United States Patent Application Publication US 2026/0103690 A1 - sequence listing, part 9

SEQ ID NO: 17581 - protein, 306 aa, unidentified
  source 1..306: note = protein_7c9a84a
  REGION 1..68: note = RuvC_domain
  SITE 7: note = RuvC_P3
  SITE 9: note = RuvC_P4
  SITE 12: note = RuvC_P5
  REGION 173..260: note = Tnp_domain
  SITE 181: note = Tnp_P1
  SITE 211: note = Tnp_P2
  SITE 219: note = Tnp_P3
  SITE 220: note = Tnp_P4
  SITE 233: note = Tnp_P5
MYIRQTKNDSKDSYIIAQIMRFGEYSATSLSEENIIALRQLSRYRLALVDACGDCKRRVIALLDQVFPEYDKLFSDTFGKTSSELLLNCPTPEDMLAVSTRKLTNILNKASRGRFGKEKAEELKDAAKNTFGIAFAKDAFSFQIKQLMQQIIFTENQLSELEEQIANLLHETNQYITTITGIGDVLGAIIVSEIGDINRFERPNQLVAFAGLDVTVKQSGEFSGTKNKISKRGSPYLRRAIWLAAQRAAFCDPVLSDYYQSLKARGKHHLTAVGAVARKLCNIIFVILKENRPYFPTPPKKSQNLS

SEQ ID NO: 17582 - protein, 301 aa, unidentified
  source 1..301: note = protein_f3b1f94
  REGION 3..115: note = RuvC_domain
  SITE 14: note = RuvC_P2
  SITE 55: note = RuvC_P3
  SITE 57: note = RuvC_P4
  SITE 60: note = RuvC_P5
  REGION 178..263: note = Tnp_domain
  SITE 186: note = Tnp_P1
  SITE 216: note = Tnp_P2
  SITE 224: note = Tnp_P3
  SITE 225: note = Tnp_P4
  SITE 236: note = Tnp_P5
MGRRVREKRQWAVESANGLGYLVAQQLVAAGETVFDVPPVLASRVRLMGSGRSQKNDPNDARSVAIAALRSDRLAQVHPDDHDRVLRLLAKRHRDMARMRAKHCTRLHALLLELEAGGIASRINVTKANAALDAVEVTNEVMRYRVLIARELVADIALLDAALTTSKERVVTAVAASGTTVTEIVGIGPISAAILIGFTGDITRFPTRGHFATYNATAPIDASSGPNPRQRLNPQGNRQLNHAIHIAAVSQLRHDDEARDYYDRKRTEGKSSKEAIRSLKRRISDRVYRHLVDDARRVAAS

SEQ ID NO: 17583 - protein, 404 aa, unidentified
  source 1..404: note = protein_d6a3c31
  REGION 5..161: note = RuvC_domain
  SITE 8: note = RuvC_P1
  SITE 58: note = RuvC_P2
  SITE 98: note = RuvC_P3
  SITE 100: note = RuvC_P4
  SITE 103: note = RuvC_P5
  REGION 275..361: note = Tnp_domain
  SITE 283: note = Tnp_P1
  SITE 313: note = Tnp_P2
  SITE 321: note = Tnp_P3
  SITE 322: note = Tnp_P4
  SITE 335: note = Tnp_P5
MNNLAGIDVSKGKSMVSVLRPFGEVVALPFTVQHTPSELRELANYLKSPEGETRVVMEHTGRYYEPIAQALHDAGIYVCAVNPKLIKDYGNNSLRKIKTDKADSRKIARYGLDNWADLRPYSSMDTIRYQLKTMNRQYGLFSKNRTTLKNNLISLLDQTYPGANALFDSPVRDDGSQKWVDFVASFWHVDCVCSISLIAFTERYQKWCKRHGYNFSNKTATAIYEGAKKILVTVPKNPTSKFPIQQAVEQLNACSKSIEMLRIEMNHLASQLPEYPVVMSMYGVGERLGPQLIAEIGDVTRFAHKGSLSAFAGVDPGANQSGNMELKSARSSKCGSPALRKALFNVMDCLIKKQPMDDPVYLFMDKKRAEGKPYFVYMTAGANKFLRVYYGRVTEYLKSLDTTQ

SEQ ID NO: 17584 - protein, 391 aa, unidentified
  source 1..391: note = protein_3621146
  REGION 4..163: note = RuvC_domain
  SITE 7: note = RuvC_P1
  SITE 60: note = RuvC_P2
  SITE 101: note = RuvC_P3
  SITE 103: note = RuvC_P4
  SITE 106: note = RuvC_P5
  REGION 266..353: note = Tnp_domain
  SITE 274: note = Tnp_P1
  SITE 304: note = Tnp_P2
  SITE 312: note = Tnp_P3
  SITE 313: note = Tnp_P4
  SITE 326: note = Tnp_P5
MIYVGIDVAKDNHDYFITNSDGKVLFEVFTIPNNKEGFDNLYQRIESVTDDLTKVKVGLEATGHYSYNILGFLLDKGLLTFVINPLHTNLYRKSLSLRKTKTDKVDAHTIAMMLMSDVNLKSYSNASYHNEELKLLTRYRFDKVKERAKLKTSISRLVNILFPELEKLLPSLHMVSVYNLLIQYPGAYLIANVHLTKLTNLLEKSSKGRYSKNTAVSFREAAKNSIGSIMPAKSLELKHTIKLIHELNSEIDEIESQIKTIMDKINSPILSIPGINYRMGAMIIAEIGDFSRFNSSDKILAYAGFSPSIYQSGQLDSSHSHMEKRGSKYLRYALYNATKYVCHWDSVFAIYLEKKRSEGKHYNVAISHAVKKLVRVIYHLEKTKQLYIKTA

SEQ ID NO: 17585 - protein, 405 aa, unidentified
  source 1..405: note = protein_3eb2ae9
  REGION 4..160: note = RuvC_domain
  SITE 7: note = RuvC_P1
  SITE 57: note = RuvC_P2
  SITE 97: note = RuvC_P3
  SITE 99: note = RuvC_P4
  SITE 102: note = RuvC_P5
  REGION 275..362: note = Tnp_domain
  SITE 283: note = Tnp_P1
  SITE 313: note = Tnp_P2
  SITE 321: note = Tnp_P3
  SITE 322: note = Tnp_P4
  SITE 335: note = Tnp_P5
MNAVGIDVSKRKSTVAILQPFGVVVASPHDVPHTGSSLKELAASIKKLRGETRVVMEATGNYYEPIARFLHEQGIFVSVVNPMLISDFGGNTLRKPKTDKKDSLKIASYALTYWVDLQQYHPQEDLRKSLKMLNRQYQQSVKVQTMLKNNLISQLDLTFPGINKLFTSPVRDSDGHLKWVDFVLEFPHRDIVAKLTLSAFKKKYQHWCDKKGYYYRNGKAEKIHAFARESVSAVSADESILLIVKQAAEMLNGALKYSHSLRTEMHRIAAALPEYETVMNLYGVGDTVGPQLMAEIGDTRRFHSRKAITAYFGYDSENDDSGTKVSKSNPMTKKGASALRRTLFTIMITLIKTQPADNPVYQFLDKKRSEGKHYYCYMNAAANKFLRIYYAKVNEALNSREHSSG

SEQ ID NO: 17586 - protein, 347 aa, unidentified
  source 1..347: note = protein_97763e7
  REGION 14..156: note = RuvC_domain
  SITE 17: note = RuvC_P1
  SITE 60: note = RuvC_P2
  SITE 95: note = RuvC_P3
  SITE 97: note = RuvC_P4
  SITE 100: note = RuvC_P5
  REGION 219..306: note = Tnp_domain
  SITE 227: note = Tnp_P1
  SITE 257: note = Tnp_P2
  SITE 265: note = Tnp_P3
  SITE 266: note = Tnp_P4
  SITE 278: note = Tnp_P5
MGKSITDLSSVTTVGLDLAKHVFQVHAIGAFGRVIVAKALRRKDVLFFFAQLPKCLVGMEACGSAHHWARELIKLGHDPRMMPPAYVKPYVRRQKNDAADAAGICEAVTRPSMRFVGVRTLENQAALMHHKAREMLVAQRTQLINALRGHLAEIGVIAAQGPKNARELAGVVMAEGDETIPACVRAALAPLVRQLHVLDQEIACSDRTIAAMARGDERARRLMTIPGLGPVTASAMAASVQDVSAFSGPREFAAFLGLTPKQNSSGGKERLGRISKMGNRYLRTLLVVGAHAVLYHRKPHDDALRSFAKKLMQSKPFKLVAVALANKMARIAFAIMRGRTSYCAVSA

SEQ ID NO: 17587 - protein, 402 aa, unidentified
  source 1..402: note = protein_9d9656d
  REGION 7..162: note = RuvC_domain
  SITE 10: note = RuvC_P1
  SITE 59: note = RuvC_P2
  SITE 99: note = RuvC_P3
  SITE 101: note = RuvC_P4
  SITE 104: note = RuvC_P5
  REGION 270..356: note = Tnp_domain
  SITE 278: note = Tnp_P1
  SITE 308: note = Tnp_P2
  SITE 316: note = Tnp_P3
  SITE 317: note = Tnp_P4
  SITE 329: note = Tnp_P5
MTYDYVIGMDVGKYFHHACVLDIDGTQVLSKRINQNEQSLRTLFSTFSENDHKVLVVVDQPNNIGRLTVAVAQDIGIDVRYLPGLAMRQLSRIHAGNAKTDIRDAYIIAHAAKNLPESLRSLDRVEEAFLQLKVLNGIDEDLARSYTRLINQIRSALVGCYPQFEQALRSQIIHRTWVLHLLARYGGPTKIKRLGKAKTLAFARRHKARNPEPVIDAIFAAIAEQTVSIAGADYAEMGVAMSAKDALAKLDHRKEIDKEVLAVIDDIPHTQILLSMPGIGPKTAAQILMTVGDMSDFPTPGHLASYAGLSPRTNQSGTSIMSNSLNRAGNKKLKNALWQSSFTSIRFHERSRQFYERKRREGKRHNAAVVALARRRINVVYAMMRNHEYYRDPAPAKEAAAV

SEQ ID NO: 17588 - protein, 391 aa, unidentified
  source 1..391: note = protein_8630582
  REGION 4..163: note = RuvC_domain
  SITE 7: note = RuvC_P1
  SITE 60: note = RuvC_P2
  SITE 101: note = RuvC_P3
  SITE 103: note = RuvC_P4
  SITE 106: note = RuvC_P5
  REGION 266..353: note = Tnp_domain
  SITE 274: note = Tnp_P1
  SITE 304: note = Tnp_P2
  SITE 312: note = Tnp_P3
  SITE 313: note = Tnp_P4
  SITE 326: note = Tnp_P5
MIYVGIDVSKDKHDCCILSSDGQVLLKPFSILNNLDGFNCLYSAICSYEENPDKIKVGLEATGHYSFNILGYLLDKNLNCFLFNPLHSNLFRKSLTLRKTKTDKVDSVIIAKMLLSEVDSKPYSKALYHNEQLKSLSRYRFSKVRERVILKQQLSRLVNILFPELEKLVPSIHLSSVYVLLEEFPSASLIASAHLTRITNLLSNSSKGHYKKNKAIEIRKAAVSSVGCVMPAKSLELKHTIHLIRILSEEINEIELHIQEILGKIQSPITSIPGLGFRMASVILSEIGDFSRFDSPDKILAFAGVSPSTYQSGKLDNAYAHMEKRGSRYLRYALYNAAIYVCNWDKTFANYLHKKRSEGKHYYVAISHVIKKLVRVIYHLQLTGDVYKTVV

SEQ ID NO: 17589 - protein, 332 aa, unidentified
  source 1..332: note = protein_6e8d180
  REGION 23..165: note = RuvC_domain
  SITE 26: note = RuvC_P1
  SITE 69: note = RuvC_P2
  SITE 109: note = RuvC_P3
  SITE 111: note = RuvC_P4
  SITE 114: note = RuvC_P5
  REGION 209..293: note = Tnp_domain
  SITE 217: note = Tnp_P1
  SITE 246: note = Tnp_P2
  SITE 254: note = Tnp_P3
  SITE 255: note = Tnp_P4
  SITE 266: note = Tnp_P5
MWPIRTTKQKEESMETVAHDRIIGIDVSRDWLDIHCLPDGKWLRLPNADEGHEQLVRLARDVNGLVCFEATGGQEWRLWAALEAASVATRQLPPAQIKAFAASRGTRAKTDRIDAELIARFMMFRPGAGRSLPHEKLRVLRALTSKRGQLVESRKRLLAQIKAHGKLGSAEMFASMDDQRRTLLDRQIADLEARIEQTIAADDELAATAGILRSVPGVGPVASSMLIAEMPELGQITGEQAAALAGLAPIAHDSRAMRGKRAIGGGRRLLRHVIFQAALVASHHNQVLKTFADRLRAAGKPHKVVIVAVARKLVTIANALVKSGQKWTPHPE

SEQ ID NO: 17590 - protein, 374 aa, unidentified
  source 1..374: note = protein_3e0d0ba
  REGION 1..144: note = RuvC_domain
  SITE 42: note = RuvC_P2
  SITE 83: note = RuvC_P3
  SITE 85: note = RuvC_P4
  SITE 88: note = RuvC_P5
  REGION 249..334: note = Tnp_domain
  SITE 256: note = Tnp_P1
  SITE 286: note = Tnp_P2
  SITE 294: note = Tnp_P3
  SITE 295: note = Tnp_P4
  SITE 307: note = Tnp_P5
MDENGEAIRDSFSFNNDKEGFNTLLNVLNSLDSNQEKRIGFESTGHYGSNLKIFLERNGYSFMEFNPLLVHRHFKSETLRRTKNDKVDARKISSYLYTREYKPNPNSSYHLNCLKSLTRTREALIKDRTRHIIHMTNVLDKMFPEFKLQFGNQGLNAASAMYLLENYSSPSKMSNMTRASYDKMKSELRRTISYAKFLRIKELARNTIGNEDEILVFELNTYLELFKELDKKILKVEDKITKEFSIMKCHIASIKGIGIITAAGILAEIESIDRFDNPGQLCAFAGIEPSENQSGTHDGGGKMVKHGSPHLRNYLMQSAGYMLIHNPVLYEYYLKKRNEGKCHTVALSHVAKRLTRIIFYLEKNDTDFNIDKMR

SEQ ID NO: 17591 - protein, 330 aa, unidentified
  source 1..330: note = protein_22151eb
  REGION 6..150: note = RuvC_domain
  SITE 9: note = RuvC_P1
  SITE 55: note = RuvC_P2
  SITE 93: note = RuvC_P3
  SITE 95: note = RuvC_P4
  SITE 98: note = RuvC_P5
  REGION 198..285: note = Tnp_domain
  SITE 206: note = Tnp_P1
  SITE 236: note = Tnp_P2
  SITE 244: note = Tnp_P3
  SITE 245: note = Tnp_P4
  SITE 258: note = Tnp_P5
MKKLIIGIDISAETLDICLKTDLEERYEVIENEISVIKKFFKSFKIYEEVVVAMENTGRYNWNLYEVLEHFEFKVYVINPLHLKKSLGLSRGKNDKIDASRIAHFIERNSGDIELWKPSSESMKKLKVLLTERKSKVKLKSSLLQQKKNYKCTKAIGLEKMLLKINEKEIKLLTDHIKFLEQEMEKVIKMDAELKEKSGLMQSIPGVGKVLTWMILAKTDNFQMIDSARKLACYSGVVPFDHQSGTSLRYRPKVSPYADKSLKSTLHLGAMSVVKLDNDLSKYYQRKVLEGKNKMLVLNNIRNKIIHLIFAVLKSGKKYENNYQNSLAVS

SEQ ID NO: 17592 - protein, 349 aa, unidentified
  source 1..349: note = protein_d485c6e
  REGION 9..163: note = RuvC_domain
  SITE 12: note = RuvC_P1
  SITE 68: note = RuvC_P2
  SITE 108: note = RuvC_P3
  SITE 110: note = RuvC_P4
  SITE 113: note = RuvC_P5
  REGION 209..296: note = Tnp_domain
  SITE 217: note = Tnp_P1
  SITE 247: note = Tnp_P2
  SITE 255: note = Tnp_P3
  SITE 256: note = Tnp_P4
  SITE 269: note = Tnp_P5
MKQILKQVLGVDVAQKELVVTLGKMYNDFTLDLYAYKVFKNNKTGFAALLKWLKPIIDKDIKLQFVMEATGVYHQKFAYYLDEKGCNLTIVLPNKISNYMRTLEVRTITDKTASQAICQFGLERKLECWIKPKKVYKELQQLTRERSQIVDQRVIVKNQLHAENTEAEPNKSSLKRIKARIKFLNQQEKEIKVEIQNIVNKDAELKKELENICTIPGVGILTAVIVIAETNGFELIRNKKQITSYAGLDVKEKQSGTSIRSKPRISKKGNRNLRKAMHLPSLSAVKYNKNHKELYVRLIAKSGIKMKGLIAVQRKLLELIYIVYKNKKGFIQNYEQQKRATPLEMETAL

SEQ ID NO: 17593 - protein, 316 aa, unidentified
  source 1..316: note = protein_14bd26d
  REGION 8..178: note = RuvC_domain
  SITE 11: note = RuvC_P1
  SITE 53: note = RuvC_P2
  SITE 93: note = RuvC_P3
  SITE 95: note = RuvC_P4
  SITE 98: note = RuvC_P5
  REGION 188..272: note = Tnp_domain
  SITE 196: note = Tnp_P1
  SITE 225: note = Tnp_P2
  SITE 233: note = Tnp_P3
  SITE 234: note = Tnp_P4
  SITE 246: note = Tnp_P5
MTSQIPVIGIDVAKESLSLCDTQSGEVFELANDRRTIKAWLKTLPACCAIAIEATGIYHMEIATLAYTTGHRIYIINGFRLSNYRKGIGRRNKDDRSDAQLLARYLSHEQAHLEPWQPPSKVYSRLQTLLHRRAVLVRSATSLRQSFSQDRALTSALQPVLKRMAALEQRLEKMIQATLDEAGLKEQSKRCQAIEGIGPLTAAALNLAFLRGYFRNSDAFIAFLGLDVRLKESGRYSGRRKLTKQGDPEIHRLLHNAAMAAARTERWKAIYQGYLARGLKKTEALTILARKLARIAFALMQTKAAYQPPGGHDVLT

SEQ ID NO: 17594 - protein, 369 aa, unidentified
  source 1..369: note = protein_58cd4f7
  REGION 9..163: note = RuvC_domain
  SITE 12: note = RuvC_P1
  SITE 60: note = RuvC_P2
  SITE 100: note = RuvC_P3
  SITE 102: note = RuvC_P4
  SITE 105: note = RuvC_P5
  REGION 271..337: note = Tnp_domain
  SITE 279: note = Tnp_P1
  SITE 309: note = Tnp_P2
  SITE 317: note = Tnp_P3
  SITE 318: note = Tnp_P4
  SITE 330: note = Tnp_P5
MNSQYPVVIGLDVGKTGHHACALDPDGSKLFDKPLPQHEAKLRELFMGLQKLGDVLMIVDQPNTIGALPIAVARDCGCAVAYVPGLTIRKAADLYPGRSKTDARDAFIIADTARTMPHTLRQVDRDSEVLSAVKVLAGFDEDLAHETTRALNRIRSLLTQIHPALERVFTGGSLSTALVLDLLEKFGGPTRLKTAGRGKVLRFARSHSRRDPEPLVDRIFTALGEQTVIVPATAAVELVIPRVAGQIKELKAQQATVARKVEGMLEDFPLAAVMRSVPGIGLKTAAQILLAIGDGSAFQTPGHLAAYAGITPVTRRSGTSIRSEFPARSGNKRLKTPCSTLPGSPRTTTRSRRPTTTTNAPRASATTPP

SEQ ID NO: 17595 - protein, 339 aa, unidentified
  source 1..339: note = protein_857a28c
  REGION 6..147: note = RuvC_domain
  SITE 9: note = RuvC_P1
  SITE 52: note = RuvC_P2
  SITE 87: note = RuvC_P3
  SITE 89: note = RuvC_P4
  SITE 92: note = RuvC_P5
  REGION 210..297: note = Tnp_domain
  SITE 218: note = Tnp_P1
  SITE 248: note = Tnp_P2
  SITE 256: note = Tnp_P3
  SITE 257: note = Tnp_P4
  SITE 269: note = Tnp_P5
MKLTPVGIDIAKSLFQVHHVNMETGEVVNKAIKRAGFLEYFANRTPCLIGMEACGGSQHWARELEKMGHQVKLMPARFVKAFNIGNKNDAADARAIWLAVQQPCKAVAVKTEDQQAVLAMHRMRQQLVKVRTMQINALRGLLTEYGEVMGTSRAALDKGISGVLERLAERLPAMLIDTLREQWNGLAKLDEQIATIERRLRTWMKQDRACATIAAIPGIGLLTATAAVATMGDAKVFRSGREFAAYIGLVPKQSGSGGKVNLQGISKRGDTYLRTLLIHGARSVLANAKDPGPWIEQIRKRRPPNVVIVALANKMARTIWAVLAHEKPYEKTYVSAKPA

SEQ ID NO: 17596 - protein, 408 aa, unidentified
  source 1..408: note = protein_e78529a
  REGION 4..165: note = RuvC_domain
  SITE 7: note = RuvC_P1
  SITE 62: note = RuvC_P2
  SITE 102: note = RuvC_P3
  SITE 104: note = RuvC_P4
  SITE 107: note = RuvC_P5
  REGION 273..359: note = Tnp_domain
  SITE 281: note = Tnp_P1
  SITE 312: note = Tnp_P2
  SITE 320: note = Tnp_P3
  SITE 321: note = Tnp_P4
MLFVGDDWAEDHHDVELMDASGRTLAKARLPEGVAGIARLHAMIGERLGEGAEDTAGLVKIGIETDRGPWVQALIAAGYTVFAVNPLQAARYRERLGVSGAKSDAADAHMLADMVRTDAHQLRPVAGDTAGAEAVKVVTRAHKTLIWERTRAGQRLRHALREYFPAALEAFEDLDAADALELLAKAPDPASAARLSTAQISAALKRARRRDIAVKTAKIQAVLRGEHLGQPAVVASAYAVSVRALVAVLGTLNEQVKILQEQVEAHFGRHPDAEIILSQPGLGAILGARVLAEFGDEHDRYASAKARKNYAGTSPITRASGKKKVVAARFVHNDRLIDALMTQAFASLRVSPGARAYYDRQRARGADDNAALRQLANRLVGILHGCLKTDTPYSEATAWSHHLTESAA

SEQ ID NO: 17597 - protein, 346 aa, unidentified
  source 1..346: note = protein_8172a43
  REGION 6..148: note = RuvC_domain
  SITE 9: note = RuvC_P1
  SITE 54: note = RuvC_P2
  SITE 89: note = RuvC_P3
  SITE 91: note = RuvC_P4
  SITE 94: note = RuvC_P5
  REGION 213..299: note = Tnp_domain
  SITE 221: note = Tnp_P1
  SITE 251: note = Tnp_P2
  SITE 259: note = Tnp_P3
  SITE 260: note = Tnp_P4
  SITE 272: note = Tnp_P5
MKINRVGVDLAKNVFQLHGVDRRGKAVWKRKLSRGKWLSVLFETIKPGTEIGMEACAGAHHWARLLTHRGYAVKIIPPQFVKPFVKSNKNDANDAQAICEAMGRPNMHPVRVKTVAQQDIQAIHRVREEIKGHRIAKANQIRGLVAENGLVAPQQLSSLRRAIPEWLEDADNGLTLLFRQLLQGLWGDLYALDQRMVELDKQIRIIAQENPTAKRLQQLRGVGPLIATALVATVGDGKQYRKGRDMAAAIGLTPRQHSSGGKDRLLGISKRGDAYLRCLLVHGARSAVRTAKDKEDRLSRWIISLQSRRHSNVVAVALANKMARMAWVMMTSDVDYDPDLAAASVN

SEQ ID NO: 17598 - protein, 391 aa, unidentified
  source 1..391: note = protein_c0fe11c
  REGION 5..162: note = RuvC_domain
  SITE 8: note = RuvC_P1
  SITE 60: note = RuvC_P2
  SITE 101: note = RuvC_P3
  SITE 103: note = RuvC_P4
  SITE 106: note = RuvC_P5
  REGION 265..351: note = Tnp_domain
  SITE 273: note = Tnp_P1
  SITE 303: note = Tnp_P2
  SITE 311: note = Tnp_P3
  SITE 312: note = Tnp_P4
  SITE 324: note = Tnp_P5
MTYFVGIDIAKFKHDCFIQDHNGVVIRHSFSFRNNQDGFNILLDALNGLDHSQEIKIGLEATGHYGSNIKQFLNSNDYSFMEFNPLLIKRFSQATTLRKTKTDKIDAALISSFLMTVDYKPITHTSYHTSALKSLTRLRESLVKERSLTLVRITNVLDIIFPEFKPLFDNSLKSSTCMYILENYSSPDRISRMNVESYNKMKSKLRKTISYDKFLKIRDAAKSTVGTTDEIYVYELQILLGIYKELDSRISDLENKIIQYYRQFNSHIHTIKGVSELSAAAIYAELNGVTGFRNPDQILAFAGLDCSRIQSGESDKNGRMVKHGSSALRCVLMRCADSFALHNPVVYEYKLKKMNEGKFFRVALSHVAKKLVRTIYTLEKNDLDFDQSKLR

SEQ ID NO: 17599 - protein, 404 aa, unidentified
  source 1..404: note = protein_9861db8
  REGION 10..164: note = RuvC_domain
  SITE 13: note = RuvC_P1
  SITE 61: note = RuvC_P2
  SITE 101: note = RuvC_P3
  SITE 103: note = RuvC_P4
  SITE 106: note = RuvC_P5
  REGION 272..359: note = Tnp_domain
  SITE 280: note = Tnp_P1
  SITE 311: note = Tnp_P2
  SITE 319: note = Tnp_P3
  SITE 320: note = Tnp_P4
  SITE 332: note = Tnp_P5
MQANDIGVWLGLDVGKESHHACALDRNGDKVHDKHLGQDETEIRDLLSRLSERGRVLLVVDQPNTIGSLPLAVARDMGVAVAYLPGGAMRKAAQLLPGDAKTDERDAYVIAFTALHMPSTLRDCGSDDETLAGLKAPSGYDEDLAWETTRHVNRLRSLLLQIHPAFERALKSDRITSGTVLALLERYGGPAGMRRTGIARVSEWARSRKLRNSAAIVASLFDAIGRQTATVAGTEAAETVIPAIARQLMELKRQRREVAGRVERLLENHPLLTVLTSMPGIAAKTGSQILLAIDGDITRFENPARLAAYAGIAPVTRRSGTSIRGEHPSRGGNKRLKNALWQSASIAAFHDPESNAYYRRKRAEGKRHNAAIICLARRRCDVLYSMLKNGTLYQPKQTDLAKAA

SEQ ID NO: 17600 - protein, 384 aa, unidentified
  source 1..384: note = protein_ac9b0f7
  REGION 41..184: note = RuvC_domain
  SITE 81: note = RuvC_P2
  SITE 118: note = RuvC_P3
  SITE 120: note = RuvC_P4
  SITE 123: note = RuvC_P5
  REGION 255..346: note = Tnp_domain
  SITE 263: note = Tnp_P1
  SITE 292: note = Tnp_P2
  SITE 300: note = Tnp_P3
  SITE 301: note = Tnp_P4
  SITE 313: note = Tnp_P5
MQKPNDLNQSRIVLKQDSTLIAVIEMSLSSWLVAGIVPGVERQPLKKLAVDESALLKLLNRWREEAEKAGRRIERITVAFEAGRDGFWLARWLRARGIEAHVIHASSVAVSREHRRAKTDRLDTELLKRAFLGWLRGERDHCKMVAIPTTKDEDAKRPNRERQSLVGEQTRIVNRMKAALIRLGIRGFNPKLKKAAGRLEDLRTPEGEPIPPNTLAELHRDMERRRLVSDQIRQIEEARLERMEQAPGDGPHAMVRLIARVIGVGIETADMLVHEVLSRKLRDRRAVARYAGLTGAPDESGSKRREKGLAKAGNARVRGGMIQLAWRFLLFQKDSALAQWYRTRTEGGRNRKTIIVALARKLLIALWRLVTTGEVPAGVVLRAA

SEQ ID NO: 17601 - protein, 346 aa, unidentified
  source 1..346: note = protein_5237e25
  REGION 6..148: note = RuvC_domain
  SITE 9: note = RuvC_P1
  SITE 52: note = RuvC_P2
  SITE 87: note = RuvC_P3
  SITE 89: note = RuvC_P4
  SITE 92: note = RuvC_P5
  REGION 211..296: note = Tnp_domain
  SITE 219: note = Tnp_P1
  SITE 249: note = Tnp_P2
  SITE 257: note = Tnp_P3
  SITE 258: note = Tnp_P4
  SITE 270: note = Tnp_P5
MKITTIGIDLAKEVFQIHGVNVHGKVLLRKQLRRSEMAKFFANLEPCLIGMEACGSSHHWARKLCEFGHSVKLMSPQFVKPYVKTNKHDMADAEAICEAVNRPNMRFVPIKNVEQQAILSVHRARQGFVKARTAQANQMRGLLSEFGIVMPQGIRSISNRMPDILEDAENSLPGTMRWLLERLNNHLKELDRQVKELEFQIKLWHKENEASQRLEGIPGIGPITASAIVATVGNAAEFKNGRQLAAWLGLVPKQHSSGGKQTLLGISKRGDTYLRTLLIHGARAVIRFAENKAEPESWLCKLITRRNKNISAVALANKNARIIWALLAKNTTFHLDHTTAASKPAA

SEQ ID NO: 17602 - protein, 319 aa, unidentified
  source 1..319: note = protein_b8e5a4a
  REGION 6..153: note = RuvC_domain
  SITE 9: note = RuvC_P1
  SITE 57: note = RuvC_P2
  SITE 97: note = RuvC_P3
  SITE 99: note = RuvC_P4
  SITE 102: note = RuvC_P5
  REGION 192..278: note = Tnp_domain
  SITE 200: note = Tnp_P1
  SITE 230: note = Tnp_P2
  SITE 238: note = Tnp_P3
  SITE 239: note = Tnp_P4
  SITE 251: note = Tnp_P5
MFQIIIGVDIAKHKFDVARLESNKYKHKKFDNTPDGFAAFSAWLATFGDSNVLICMEATGAYSIPLAEFLMQSDYPVAVVNPAKIKSFAKSELSRVKTDKSDAKLIARYALERQPPLWTPPPANIHELQVLLRRVEDLLEMQQMEKNRLDTADACIAESIKTVLTQLEKELKATRKRIQHLINQDPDLKRRRDLLETIPGIAEASSAHLLVALSEHYRFTNAKQAVAFAGLNPALNESGTWKGRTRISKMGDPLLRAKLYMPAVVAGQHNPIIRAFRLRLEANGKNGMAIVCASMRKLVHLAFAILKSGKPFDPHFLLA

SEQ ID NO: 17603 - protein, 343 aa, unidentified
  source 1..343: note = protein_5eb764f
  REGION 7..147: note = RuvC_domain
  SITE 10: note = RuvC_P1
  SITE 53: note = RuvC_P2
  SITE 88: note = RuvC_P3
  SITE 90: note = RuvC_P4
  SITE 93: note = RuvC_P5
  REGION 210..295: note = Tnp_domain
  SITE 218: note = Tnp_P1
  SITE 248: note = Tnp_P2
  SITE 256: note = Tnp_P3
  SITE 257: note = Tnp_P4
  SITE 269: note = Tnp_P5
MNQIIRIGMDRSKHFFQLHGVDAAERPVLRRKLRRNEVLAFFAKLPPTVIGMEACGAAHYWARELRKLGHEVKLMAPQHVKAYVKRNKNDGRDAEALCEAMSRPTMQFVPVKTEEQQAALMLAGVRQQLIARRTQLSNAIRGYAAEFGLTAAKGLDKIEPLLARIALDESLPTLARELLAMQGHDYARLQAELKAIEARLMAWHRANADSRRLAQIPGIGLIGATTLVMKTPDPRAFASGRHFAAWLGLTPKDHSTAGKTRLGKITRAGDEMLRSLLVAGATAVIQQMRRGRGRPSPWLVALLARKPPKLAAVALANKIARIAWKLMTTGESYDGARMHGAAA

SEQ ID NO: 17604 - protein, 323 aa, unidentified
  source 1..323: note = protein_0aaa310
  REGION 9..151: note = RuvC_domain
  SITE 12: note = RuvC_P1
  SITE 56: note = RuvC_P2
  SITE 96: note = RuvC_P3
  SITE 98: note = RuvC_P4
  SITE 101: note = RuvC_P5
  REGION 191..276: note = Tnp_domain
  SITE 199: note = Tnp_P1
  SITE 228: note = Tnp_P2
  SITE 236: note = Tnp_P3
  SITE 237: note = Tnp_P4
  SITE 248: note = Tnp_P5
MRQHNMVCAGIDTSKRKLDAALDERPEKLQVDNAADGHKGLSAWLRRQGVKRIGIEASGGYEKAVVAQLRRDGFVVVVFQPAQVRAYAQFVLQRAKNDKIDAALIAACTAAIKKIHAPPDPRLAPFAEHLTLIEQIEEDLARHKTRLETCRDPRVAAFWREEIKRLNTLLKREFAALVSTIRQHRDLAERLGLIESVDGVGLRTAVAILVRMSEIGRLTREQAAALSGLAPYDDDSGEYIGARHITGGRKRLRRSLYAAALPAALRWNRHLIALYERLRAKGKGHKVALVACARKLLIYVNTVVERGTPWAAKPPSASALRAK

SEQ ID NO: 17605 - protein, 388 aa, unidentified
  source 1..388: note = protein_e6ea255
  REGION 6..159: note = RuvC_domain
  SITE 9: note = RuvC_P1
  SITE 57: note = RuvC_P2
  SITE 98: note = RuvC_P3
  SITE 100: note = RuvC_P4
  SITE 103: note = RuvC_P5
  REGION 222..307: note = Tnp_domain
  SITE 229: note = Tnp_P1
  SITE 259: note = Tnp_P2
  SITE 267: note = Tnp_P3
  SITE 268: note = Tnp_P4
  SITE 279: note = Tnp_P5
MSKVVIGVDPHKRLNAVAVLDGKGKVLARQQFANTADGFRELKTFWRQWRSRTWAIEGCNGVGKYLAQRLVVEGETVLDVSTRRAALVRVFGGGNGRKTDDIDAESIAMVGLRSTDLPEVRADEMTVTLRLLSNRRNELVGLRTQAVCRIHRDLVVLIPGGASRSLTAKKAKEIIGRVRPRDEVGRLRRRLIVEQIGELEAIDKRIAAVNKDIKVAVAAAPTRLTKLFGVGPVTTARVMGEVGDVARFTSRHHFASYNGTAPTERSSSGPCPPRVNTKGNRKLNHAIHIVAITQLRSKTSEGHAFFTRKRAEGKTEKEALRALKRRISDAIYKQLVEDDAALRDPGGQFGTTLKTSVTGPSPTTGSSVKPQPGPQRNATPRHLTRASA

SEQ ID NO: 17606 - protein, 408 aa, unidentified
  source 1..408: note = protein_add416c
  REGION 6..159: note = RuvC_domain
  SITE 9: note = RuvC_P1
  SITE 57: note = RuvC_P2
  SITE 98: note = RuvC_P3
  SITE 100: note = RuvC_P4
  SITE 103: note = RuvC_P5
  REGION 221..306: note = Tnp_domain
  SITE 229: note = Tnp_P1
  SITE 259: note = Tnp_P2
  SITE 267: note = Tnp_P3
  SITE 268: note = Tnp_P4
  SITE 279: note = Tnp_P5
MSRVVIGMDPHKRSATIEIMAGDESVLGGGRFATDTAGFAAMLARVRPWPERVWAVEGCEGIGRHLASRLLADGERVIDVPAKLSARMRVFATGQGRKTDATDAHSVALAATRMTGLRPVADDQQLAVLRILADRRRSLGEDHTRMVCQLHHLLLELIPGGAKKDLSAAQAKALLARIRPRDLAGKARRRVAAELISDLERAYQRKKAANKELNALLAATGSTLTSLHGIGPSGAARLLAEVGDVTRFPDKAHFASWNGTAPIDASSGDQVRHRLSRAGNRQINRVLHIMAVVQLRNPTEGRAYYDRKVAAGKTPMEAMRALKRRLSDIVYRQMITDARAAVTGPGGHLGAATGSSAAGSHPSAGTSEKSLPGPAAHDPTPAKPAHSPGRSRRPPSPPDRSRRQALSA

SEQ ID NO: 17607 - protein, 326 aa, unidentified
  source 1..326: note = protein_8d6e965
  REGION 8..155: note = RuvC_domain
  SITE 11: note = RuvC_P1
  SITE 60: note = RuvC_P2
  SITE 100: note = RuvC_P3
  SITE 102: note = RuvC_P4
  SITE 105: note = RuvC_P5
  REGION 195..282: note = Tnp_domain
  SITE 203: note = Tnp_P1
  SITE 233: note = Tnp_P2
  SITE 241: note = Tnp_P3
  SITE 242: note = Tnp_P4
  SITE 255: note = Tnp_P5
MEQELHYIGIDVSKAKLDVDVLRPDGRHRSKKFANTPKGHDELVRWLNSHQAAPAHICMEATSTYMEDAAARLSDAGFTVSVINPALGKAFAQSEGLRSKTDAVDARMLAEFCRQKRPAAWEAPHPVERALRALVLRHQSLTDMHTQELNRQDTARDVQRPSIDAHLLWLEAELKRLEKQIKDLTDDDPDMKYRRRLLNSIPGIGERTSAVLLAYIGLKERFGQARQFAAFAGLTPRRHESGSSVRGTSRMSKAGHVSLRRALYMPAIVALYKTAWGRAFRQRLENNGKGARLIIGAMMRKLAQVAWGVLKSGEPFDASRHCGVTA

SEQ ID NO: 17608 - protein, 283 aa, unidentified
  source 1..283: note = protein_25799bd
  REGION 6..147: note = RuvC_domain
  SITE 9: note = RuvC_P1
  SITE 52: note = RuvC_P2
  SITE 87: note = RuvC_P3
  SITE 89: note = RuvC_P4
  SITE 92: note = RuvC_P5
  REGION 210..283: note = Tnp_domain
  SITE 218: note = Tnp_P1
  SITE 248: note = Tnp_P2
  SITE 256: note = Tnp_P3
  SITE 257: note = Tnp_P4
  SITE 269: note = Tnp_P5
MTITTVGLDLAKSVFQAHGIDETGTAVLVKKLHRKQMLPFFSKLPPCLIGVEACGTAHYWARTLAAMGHEVRLIPPSYVKAYVKRGKSDALDAEAICEAVQRPTMRFVPTKTVEQQAILMAHRARSLLVRQRTMAANALRAHLAEFGLVANPGLAHLATLAEQALSDRDGLPPYARTALETLVRQITALTGEIALLDQQIAKWHAESEASRRLAAIPGLGIITATAIAATVSDPDQFTSGRQFAAWLGLTPQQHSTGGKARLGGISKQGDRYLRRLLVVGATA

SEQ ID NO: 17609 - protein, 307 aa, unidentified
  source 1..307: note = protein_8497aca
  REGION 8..150: note = RuvC_domain
  SITE 11: note = RuvC_P1
  SITE 52: note = RuvC_P2
  SITE 92: note = RuvC_P3
  SITE 94: note = RuvC_P4
  SITE 97: note = RuvC_P5
  REGION 188..272: note = Tnp_domain
  SITE 196: note = Tnp_P1
  SITE 225: note = Tnp_P2
  SITE 233: note = Tnp_P3
  SITE 234: note = Tnp_P4
  SITE 245: note = Tnp_P5
MNKAVVYVGVDVSKAYLDMAWAGRSRRFANNKSGLSALMKWIKQSPVHLICEASGGYERGLLDAAEQNAIKLSLVQANRVRQYARAAGILAKTDEVDARVLCAFGSAMQPKPLAPLSAQQKQLRELETQRRHLSRILVAEQNRLAQLNDKELQRLTGRLLAALKKQMAAIDARIAALIAQDQTLNEKVQKLTTIVGVGTRTAVLLLAQMPELGTLNRAQAAALAGLAPFNRDSGTLRGKRTIFGGRRALRRGLYMAALVATRHNRLLRDFYQRLRTKGKPHKVALTAVMRKLLLALNHTVKPSACCA

SEQ ID NO: 17610 - protein, 345 aa, unidentified
  source 1..345: note = protein_8246a65
  REGION 7..148: note = RuvC_domain
  SITE 10: note = RuvC_P1
  SITE 53: note = RuvC_P2
  SITE 88: note = RuvC_P3
  SITE 90: note = RuvC_P4
  SITE 93: note = RuvC_P5
  REGION 210..296: note = Tnp_domain
  SITE 218: note = Tnp_P1
  SITE 248: note = Tnp_P2
  SITE 256: note = Tnp_P3
  SITE 257: note = Tnp_P4
  SITE 269: note = Tnp_P5
MSQIIRIGMDTSKYIFVLHGVDATEQVVLRKKLSRRQVLEFFAKLPPTVIGMEACGASQYWARELSRLGHEVRLMAPQLVKPYVMRNKNDGRDAEGLCEAMSRPSMRFVPVKTAEQQAALMLMGVRDGLIARRAQLTNTIRGHAAEYGLIAPKGLDATKPLLARIAQDETLPALARELFVVLGRERVRLEGELEAVEAKLMAWHRGDATGRRLAQIPSVGPIVATALVMKTPDPGAFRSGRHFAAWLGLTPKDHSTAGKTRLGKITRAGDEDLRRLLVVGATAVIQQARRGRGHHSRWLLALIKRKPPLAAVALANKVARIAWKLMVTGESYDAARLNAATTGTA

SEQ ID NO: 17611 - protein, 387 aa, unidentified
  source 1..387: note = protein_7bf5f92
  REGION 4..159: note = RuvC_domain
  SITE 7: note = RuvC_P1
  SITE 57: note = RuvC_P2
  SITE 98: note = RuvC_P3
  SITE 100: note = RuvC_P4
  SITE 103: note = RuvC_P5
  REGION 262..347: note = Tnp_domain
  SITE 269: note = Tnp_P1
  SITE 299: note = Tnp_P2
  SITE 307: note = Tnp_P3
  SITE 308: note = Tnp_P4
  SITE 320: note = Tnp_P5
MYFIGIDISKFKHDCAIIDEAGDTVTASWSFANSCEGFSLLKQLLDALDGQKKIGFESTGHYGHNLKLFLEANNFSFMEFNPLLVSKFVRSKSLRNTKTDSLDAVSIAQYLMTVEYKPYPPSFYHMDQLKSLTRFRDSLVRQHSRQLVELTNILDKVFPEFKPFFDGRFSATALYILTHYQSPEKIANMNAKSYEALRKKSRGKFSMVKFAQLKTLAKNTVGRSDAFLLKQMEITIDIENQLDAKIDEIESQILECIRALNPPILTIPGIGELTAAIILSEYGNINKFENPAQLLSFAGLEPGYYQSGLAEHQGHMVKHGSSHLRYALMNACLPLITYEPVFAEYYAKKRAEGKPHRVALTHVAKKLLRVIFTLQTKNISYDPTLIR

SEQ ID NO: 17612 - protein, 338 aa, unidentified
  source 1..338: note = protein_3750d57
  REGION 7..149: note = RuvC_domain
  SITE 10: note = RuvC_P1
  SITE 53: note = RuvC_P2
  SITE 88: note = RuvC_P3
  SITE 90: note = RuvC_P4
  SITE 93: note = RuvC_P5
  REGION 211..297: note = Tnp_domain
  SITE 219: note = Tnp_P1
  SITE 249: note = Tnp_P2
  SITE 257: note = Tnp_P3
  SITE 258: note = Tnp_P4
  SITE 270: note = Tnp_P5
MNTPHIIGIDLGKNSFHLVGHDQSGQRLFKKKLTRQKLLEFLAFHEPVIIAMESCGGSHWLARKCSEFGHTAKLIPPQYVKPYVKTNKNDFIDADAIAEAASRPTMRFSSPKTESAQVISTIQKIRNGYIRERTACMNRIGSILLEFGISLPKGHSIMKGLFQWLADKNQHLPPLIVFELTELHEHYLNLNERIASQANKVERILADNEQVKQLQSIPGIGPVVASACVSSVSEPSDFKNGRNFAAWIGLVPLQHSTGGKTILLGISKRGNKELRTLFIHGARSILWRDKSAEKYFGSWLINLKKRKPFNVAVVALANKIARIAWAVLVNKKSFEIRI

SEQ ID NO: 17613 - protein, 302 aa, unidentified
  source 1..302: note = protein_aedb6d6
  REGION 7..148: note = RuvC_domain
  SITE 10: note = RuvC_P1
  SITE 53: note = RuvC_P2
  SITE 88: note = RuvC_P3
  SITE 90: note = RuvC_P4
  SITE 93: note = RuvC_P5
  REGION 213..260: note = Tnp_domain
  SITE 221: note = Tnp_P1
MSEVTTIGLDIAKQVFHAHGADAAGRAVFSRRLTRGKLLDFFAAHPRCLVALQACGGAHHWARELQAIGHEVRLIPPAYVKPYVKRHKNDAVDAEAICEAAQRPSMRFVAVKTEQQQAAALVFRTRDLAVKQRTQLGNAIRGHLAEYGWVAPKGSAHLAMLADLLDGGEIGETLPEAARPMFAMMVDMLAGLDERIAALDKEIARRAREDEVARRLMTIPGIGPITATAIAAIAPPAETFAKGRDFAAWLEFGTEAGVDRRQAEARRDLQNGGANAAAAAHHRQQRGRAPGEQAGRAGGLMA

SEQ ID NO: 17614 - protein, 370 aa, unidentified
  source 1..370: note = protein_639b6b7
  REGION 33..175: note = RuvC_domain
  SITE 36: note = RuvC_P1
  SITE 79: note = RuvC_P2
  SITE 114: note = RuvC_P3
  SITE 116: note = RuvC_P4
  SITE 119: note = RuvC_P5
  REGION 237..322: note = Tnp_domain
  SITE 245: note = Tnp_P1
  SITE 275: note = Tnp_P2
  SITE 283: note = Tnp_P3
  SITE 284: note = Tnp_P4
  SITE 296: note = Tnp_P5
MVAALPKRHRDVPKDVVYQPQNGEDGKVKDTMIGVDLAKNVFQLHGASMTGHLKFRKKLSRPQFRKFMAAQPSAVVVMEACGSAHHWAREMRKLGHEVKLIAPQYVKPFVKRQKNDAADAEAIVIAAQRPEMRFVEPKSEKQQARAVLFRARQRLVNQRTELVNALRAVLYEYGRIVPQGIRQLNGIRRLLDEPNSDLPGLVRQECHDLINQIAQKTARIEAKTDQLKKLAAESGTARRLQTMPGVGSLTALAIEAFAPDMSSFKRGRDFAAWLGLVPRQHSSAGKERLGRVSKTGQSDIRRLLIIGAMSRLNWLGRKSIIKGSWLAQMLARKPRMLVAIALANKMARALWAMLTKNENYRNPTLAAVAA

SEQ ID NO: 17615 - protein, 392 aa, unidentified
  source 1..392: note = protein_973940f
  REGION 5..164: note = RuvC_domain
  SITE 8: note = RuvC_P1
  SITE 61: note = RuvC_P2
  SITE 102: note = RuvC_P3
  SITE 104: note = RuvC_P4
  SITE 107: note = RuvC_P5
  REGION 267..354: note = Tnp_domain
  SITE 275: note = Tnp_P1
  SITE 305: note = Tnp_P2
  SITE 313: note = Tnp_P3
  SITE 314: note = Tnp_P4
  SITE 327: note = Tnp_P5
MVVSVGIDVAKDKHDCFILNSEGEVLADVFTIPNNMDGFNCLLQTIRDCTTPQDIIKVGLEATGHYSYNILGFLLDNGLATYVLNPLRTNLYRKSLSLRKTKTDRVDARTIAAMLLSDIGLKPYTDTTYHNEELKSLTRYRFNKVKERAKLKSSVSRLVCILFPELEKLVPTLHGASIYALLEEFPGAVQASGAHLTRLKYLLSDASRGRYGRDLAVEIRDAARNSIGSRMPAKSLELQHTIRLIRELDAEIEEIETAIQTIMDEIHSPITTIPGIGYRMGAMILAEVGDFSRFESPDKLLAYAGLSPSTYQSGQLINCYPHMEKRGSRYLRYAIYNAAKYVCLWDPTFAAYLAKKRAEGKHYNVAISHAAKKLVRLIFALEKSRQPYNLAA

SEQ ID NO: 17616 - protein, 342 aa, unidentified
  source 1..342: note = protein_761a68c
  REGION 6..148: note = RuvC_domain
  SITE 9: note = RuvC_P1
  SITE 52: note = RuvC_P2
  SITE 87: note = RuvC_P3
  SITE 89: note = RuvC_P4
  SITE 92: note = RuvC_P5
  REGION 211..297: note = Tnp_domain
  SITE 219: note = Tnp_P1
  SITE 249: note = Tnp_P2
  SITE 257: note = Tnp_P3
  SITE 258: note = Tnp_P4
  SITE 270: note = Tnp_P5
MQITTIGLDIAKNVFQVHGVDAAEKVVVRKQVRRGQILAFFEALPPCLIGMEACATAHYWARELTRLGHRVRLMPAKDVKAYVKRNKNDAADAEAICEAVRRPTMRFVQIKSTEQQGRLMLHRARDLLMRQRTQVINALRAHLAELGIVAAQGREGIKELLKIIASEGDAGLPVDAHASLVVLAAELQAMQTMIGSIDKRIMAQHRSSEASQRLESIPGIGVTGATAIVATVSDPKVFRSGRDFAAWIGLVPREDSTGGKQKLGPISKRGDRYLRRILVVGACAVLRYARQQPQKYPWLTQLLARKPFKVVAVALANKMARIAWALLANGGTYRAPVLVAAA

SEQ ID NO: 17617 - protein, 393 aa, unidentified
  source 1..393: note = protein_8811c09
  REGION 4..163: note = RuvC_domain
  SITE 7: note = RuvC_P1
  SITE 60: note = RuvC_P2
  SITE 101: note = RuvC_P3
  SITE 103: note = RuvC_P4
  SITE 106: note = RuvC_P5
  REGION 266..355: note = Tnp_domain
  SITE 274: note = Tnp_P1
  SITE 304: note = Tnp_P2
  SITE 312: note = Tnp_P3
  SITE 313: note = Tnp_P4
  SITE 328: note = Tnp_P5
MVCVGIDVAKDKHDCVIISSEGEVLADVFTIQNNAEGFDTLLQTIRRCTRPEDKIKVGLEATGHYSYNILGFLLDKGLPTYVINPLHTNLYRKSLSLRKTKTDRVDARTIAAMLMSDVDLKSYTDTAYHNEELKSLTRYRFDKVRERAKLKQSVSRLVTILFPELEKLVPTLHMASVYALLGELPGAKQIAGAHMTHLKAVLNNASKGRYGRDMAETIRDAARHSIGSVMPAKSLELQHTIRLIRELDSEIEDIEAAIETMMEEIASPITTIPGMGVRMDAMILAEIGDFSRFDSPDKILAYAGMSPSTYQSGQMSLTGTYSHMEKRGSRYLRYALYNATKYVCLWDPSFSAYLAKKRAEGKHYNVAVSHATKKLVRLIFAMEKSGQPYSSAA

SEQ ID NO: 17618 - protein, 368 aa, unidentified
  source 1..368: note = protein_98044b9
  REGION 18..170: note = RuvC_domain
  SITE 21: note = RuvC_P1
  SITE 69: note = RuvC_P2
  SITE 107: note = RuvC_P3
  SITE 109: note = RuvC_P4
  SITE 112: note = RuvC_P5
  REGION 281..365: note = Tnp_domain
  SITE 289: note = Tnp_P1
  SITE 320: note = Tnp_P2
  SITE 328: note = Tnp_P3
  SITE 329: note = Tnp_P4
  SITE 339: note = Tnp_P5
MQSASTSLPAVAPDGVTAGVDWASTDHVACVVDAAGKVVTRFTAAHTADGLKALVKGLARARAAEVAIERGDGLMVEALLAAGLTVVVISPNQVKNLRSRYGSAGSKDDRFDAFVLADTLRTDRARLRSLTPDTPATITLRSAVRARRDLAAHRVAMCNQLRAHLDLVFPAAVGLFADLDSPVSLAFLARFDCQDRADWLSPRRMAAWLKSTGYSGRTSPGVLHDRITAAPRGATGDNGTARTHVTRALVTVLVTVLVTLAEQIKALAAQIAEQPGLHTDGHVFTSLPRSGTVRAARLLAEIGDCRQRSPGPSSLMCLAGVAPSTRQSGKIKAVFRWAVNKQLRDAACDPAQHRALQRLLAQDQLAAA

SEQ ID NO: 17619 - protein, 312 aa, unidentified
  source 1..312: note = protein_91a1001
  REGION 3..120: note = RuvC_domain
  SITE 26: note = RuvC_P2
  SITE 61: note = RuvC_P3
  SITE 63: note = RuvC_P4
  SITE 66: note = RuvC_P5
  REGION 185..272: note = Tnp_domain
  SITE 193: note = Tnp_P1
  SITE 223: note = Tnp_P2
  SITE 231: note = Tnp_P3
  SITE 232: note = Tnp_P4
  SITE 244: note = Tnp_P5
MLSRRVKRSQLVEAVASLPPCGIGREACGSAHHWGRAFEQLGHTVTLMSPKYVKPSVKTNKNDARDAEAICEAVSRPTMRFVSIKTVEQADLQAVHRTRSLFVKHRTAVMNQIRGLLAERGLVIAPSPEKVRPALVRFLDDAESGLTAFARETFSELYEQRRDLESRIERVTHRLDGVYRAHPVCRKLAAVPGIGPLTATALLATVGRPQAFHNGRHLAAWLGLVPRQYSSGGKEKLGGLSKRGSRYVRTLLIHGARAVVQRAERRVDPQGRWLWALKRRTGTNVAAVALANKNARVIWALLAPDDVYRQPA

SEQ ID NO: 17620 - protein, 342 aa, unidentified
  source 1..342: note = protein_1d28783
  REGION 6..148: note = RuvC_domain
  SITE 9: note = RuvC_P1
  SITE 52: note = RuvC_P2
  SITE 87: note = RuvC_P3
  SITE 89: note = RuvC_P4
  SITE 92: note = RuvC_P5
  REGION 211..297: note = Tnp_domain
  SITE 219: note = Tnp_P1
  SITE 249: note = Tnp_P2
  SITE 257: note = Tnp_P3
  SITE 258: note = Tnp_P4
  SITE 270: note = Tnp_P5
MQVTTIGLDIAKNVFQVHGIDVAEKVVVRKQLRRSQVLEFFKALPPCLVGMEACATAHYWARELTKLGHRVRLMPAKDVKAYVKRNKNDAADAEAICEAVRRPTMRFVQVKSAEQQGGLMLHRTRDLLMRQRTQLINALRAHMAELGIVAAQGDAGLKELLKIIAVERDARLPVDAHASLVVLAAGLQAVQTMIRSIERRIIIQHRSNEASKRLKTIPGIGIVGATAIAATVPDPKVFRSGRDFAAWIGLVPRQDSTGGKQKLGPISKQGDQYLRRILVVGAHAVLKRARQQPEKYPWVTQLLARKPFRVVAVAVANKMARIAWALLAKGGTYRAPALPVAA

SEQ ID NO: 17621 - protein, 324 aa, unidentified
  source 1..324: note = protein_b004105
  REGION 1..78: note = RuvC_domain
  SITE 15: note = RuvC_P3
  SITE 17: note = RuvC_P4
  SITE 20: note = RuvC_P5
  REGION 193..280: note = Tnp_domain
  SITE 201: note = Tnp_P1
  SITE 231: note = Tnp_P2
  SITE 239: note = Tnp_P3
  SITE 240: note = Tnp_P4
  SITE 253: note = Tnp_P5
MLIHDFSDNTIRKLKTDRADALKIANYALTFWDTLPPFNNEEETRLLLKMQSRANERITATATALRNGLIALADQTFPGVNIAFDPNTKNANGHEKWVDFFLRYWHKDCVCQYSMEAFTESYRGWCKRKNYKFRTDTAHKIYLLAQEGVATLPKCESTKMLITQACKSLNAVCEAKQSTQLEMQRLATMLPEYEVVMQMEGAGPITGPALMAEIGDVRRFKNKKALVAFAGIDAPPFQSGAFESKSRHVSKRGSPHLRRTIFIVSNIILTRSNPENAVYCFMDKKRSEGKHYYVYTVAGSAKFLRVYYARVTEFLRSQPSPDAC

SEQ ID NO: 17622 - protein, 320 aa, unidentified
  source 1..320: note = protein_3fd1624
  REGION 7..148: note = RuvC_domain
  SITE 52: note = RuvC_P2
  SITE 92: note = RuvC_P3
  SITE 94: note = RuvC_P4
  SITE 97: note = RuvC_P5
  REGION 187..271: note = Tnp_domain
  SITE 195: note = Tnp_P1
  SITE 224: note = Tnp_P2
  SITE 232: note = Tnp_P3
  SITE 233: note = Tnp_P4
  SITE 245: note = Tnp_P5
MSDRLAFGIDADSKTLVVAHHGTKGSARITNSASAITKWVSALPARSRIGVEATNRYHELVVQAAQKAGHAVFVLNPRDIKHYAKGVACRGKTDSGDAQVIARYIAKEADNLHEHVARSPAQEQLHVLLQQRDSLVRSKAKLNLSLGAGASESAIFGRIFGGLKEAIAMLDQQIQQLCRSGEQRDLYRRIMTIPGIGPTVAAFITHHITRWPLTSSDAWIACSGLDPRPNESGARIGRRRLSKRGNASLRQILYMAAMGLTRSKGGKALYTAIRERGHSSTASFNILARKLARIAWGVFKSGRDFDPATLKVGQACFQQA

SEQ ID NO: 17623 - protein, 391 aa, unidentified
  source 1..391: note = protein_9a12096
  REGION 4..163: note = RuvC_domain
  SITE 7: note = RuvC_P1
  SITE 60: note = RuvC_P2
  SITE 101: note = RuvC_P3
  SITE 103: note = RuvC_P4
  SITE 106: note = RuvC_P5
  REGION 267..353: note = Tnp_domain
  SITE 274: note = Tnp_P1
  SITE 304: note = Tnp_P2
  SITE 312: note = Tnp_P3
  SITE 313: note = Tnp_P4
  SITE 326: note = Tnp_P5
MVCVGIDVAKDKHDCCILDSDGMVRADCFTIPNNMDGFKQLLQTIRNCTKKSDKIKVGLEATGHYSYNILGFLLDNDLAVYVMNPLHTNLYRKSLSLRKTKTDRVDARTIATMLLSDVDLKSYTDIAYHNEELKSLTRYRFDKVQECAKLKQSVSRLATILFPELEGLVSSIHGTSIYALLSEYPGAKQISEVHLTKLTNLLTTASKGRYGKEKAIQIREAARASIGSVMPAKSLELKHTIKLIQELASEIDEIEDSIQKIIDELNPPILSIPGMGVNSAAVILAEIGDFSNFSSPDKILAYAGCSPSTYQSGKLTNCYAHMEKRGSRYLRHALYNATKYVCYWNPVFAEYLAKKRAEGKHYNVALSHAMKKLVRLIYALQKSGKTYLTAA

SEQ ID NO: 17624 - protein, 361 aa, unidentified
  source 1..361: note = protein_4e0b18c
  REGION 22..178: note = RuvC_domain
  SITE 25: note = RuvC_P1
  SITE 75: note = RuvC_P2
  SITE 115: note = RuvC_P3
  SITE 117: note = RuvC_P4
  SITE 120: note = RuvC_P5
  REGION 292..355: note = Tnp_domain
  SITE 300: note = Tnp_P1
  SITE 330: note = Tnp_P2
  SITE 338: note = Tnp_P3
  SITE 339: note = Tnp_P4
  SITE 352: note = Tnp_P5
MGKDGSVHCNFIKQEMHNMNAAGIDVSGRKSMIAVLWPFWEVVMCPFEVGHNTEGLVHLAQQLKELDWETRVVMEHTGRYYEPVAKILHKAGLFVSAVNPLLIKEYGGNSLRKVKPDKADASKLARYGLDNWADLCDYTPMDTIRYDLKTLNRQFHLAVKQKTATANNLIALQEQSFPGIRKCFTSPVRKDGAQKRVDFTHDFWHADCVRGVSKNAFTERYRKWCKRHDYKFKQDKAEEVYTLAKSVVVLIAKSEVTKLLIQESADQLTSISRSAETYRAEMNRLASMLLEYPFVMQMYGCGGSTGPQLMAEIGDVCRFASKKVLAAFAGVDPAPNAFGDKVSKSNRTTKRGFSLSLKDAV

SEQ ID NO: 17625 - protein, 356 aa, unidentified
  source 1..356: note = protein_e6cc105
  REGION 4..160: note = RuvC_domain
  SITE 7: note = RuvC_P1
  SITE 58: note = RuvC_P2
  SITE 98: note = RuvC_P3
  SITE 100: note = RuvC_P4
  SITE 103: note = RuvC_P5
  REGION 264..349: note = Tnp_domain
  SITE 272: note = Tnp_P1
  SITE 302: note = Tnp_P2
  SITE 310: note = Tnp_P3
  SITE 311: note = Tnp_P4
  SITE 324: note = Tnp_P5
MIYVGIDIAKLNHFAAAISSDGEILIEPFKFTNDYDGFYLLLSKLAPLDQNSIIIGLESTAHYGDNLVRFLISKDFKVCVLNPIQTSSMRKNNVRKTKTDKVDTFVIAKTLMMQDSLRFMTIDDLDYIELKELGRFRQKLVKQRTRLKIQLTSYVDQVFPELQYFFKSGLHQNSVYALLKEAPTPTAIASMHMTHLAHLLEVASHGHFGKEKARELRVLAQKSVGVNDSSLSIQITHTIEQIELLDSQLFHTELEMANLVTCLHSVIMTIPGIGFINGGMILGEIGDIHHFSEPKKLLAFAGLDPSVHQSGNFQAQRTRMSKRGSRVLRYALGHCAGKLVRVIWKMLTDEVEFNLE

SEQ ID NO: 17626 - protein, 341 aa, unidentified
  source 1..341: note = protein_1849e95
  REGION 7..149: note = RuvC_domain
  SITE 10: note = RuvC_P1
  SITE 53: note = RuvC_P2
  SITE 88: note = RuvC_P3
  SITE 90: note = RuvC_P4
  SITE 93: note = RuvC_P5
  REGION 209..295: note = Tnp_domain
  SITE 217: note = Tnp_P1
  SITE 247: note = Tnp_P2
  SITE 255: note = Tnp_P3
  SITE 256: note = Tnp_P4
  SITE 268: note = Tnp_P5
MSTASLVGIDLGKHSFHLHGQDKSGRAVFRKKATRQQMMRLLGNLPSCIVVMEACAGAHFTARQLVEFGHEVKLIAPQFVRPFVKGNKNDFIDAEAICEAASRPTMRFVTPKTEAQQTLSVLHRIRESLVRDRTKTANQVHGFLLEFGISLPKGLSSVRRLPSTLSERELPSRLSMLLMRLHSHFCYLEQQLVELDKELANELAEDDLGSRLMSVPGVGPITASLLSAELSDGKQYGCSRDFAASLGLVPRQYSTGGRNTLLGISKPGDKNLRRLLVQCARSYLQRVDRHQGALADWVRSLRERRHSNVVACALANKLARIVWAIAANHSEFEARPSVCSA

SEQ ID NO: 17627 - protein, 341 aa, unidentified
  source 1..341: note = protein_c9834b9
  REGION 7..149: note = RuvC_domain
  SITE 10: note = RuvC_P1
  SITE 53: note = RuvC_P2
  SITE 88: note = RuvC_P3
  SITE 90: note = RuvC_P4
  SITE 93: note = RuvC_P5
  REGION 210..296: note = Tnp_domain
  SITE 218: note = Tnp_P1
  SITE 248: note = Tnp_P2
  SITE 256: note = Tnp_P3
  SITE 257: note = Tnp_P4
  SITE 269: note = Tnp_P5
MEKFIRTAIDLGKNYFQVHGLESEGGRSISRKIKRSKMHEVYSQIEPCRVGMEACGSAHYWARQLAAMGHEVVLIPPAYIKPYVKRGKNDVVDAAAICEAMSRPDMRYVPIKSADQQAVLMLHKTRELLVKQRTMAVNALRGHLAEFGIVAAKGIGRVDELLALAKADAELPHIAGAAVACMAQHLEGLDLSIETVDEEIARAHRQNPTSRLLDEIPGIGTLIASATAASVPDPGVFKSGRDFAAWLGLTPRQNSSGGKEKLGAITKQGNRYIRKMLVTGATSVLRVAGKRKGALADWINALRARKPERLVAVALANKLARICWAIMNTGEGFRTDTYVKA

SEQ ID NO: 17628 - protein, 289 aa, unidentified
  source 1..289: note = protein_28d3f05
  REGION 1..100: note = RuvC_domain
  SITE 40: note = RuvC_P3
  SITE 42: note = RuvC_P4
  SITE 45: note = RuvC_P5
  REGION 160..246: note = Tnp_domain
  SITE 168: note = Tnp_P1
  SITE 198: note = Tnp_P2
  SITE 206: note = Tnp_P3
  SITE 207: note = Tnp_P4
  SITE 219: note = Tnp_P5
MFETGPLSVWFYHALSAEGLPAICIDARHAKAALDMAPNKTDANDADGLAHLAEVGFYREVRVKGYDSMLIRTRVAARARLIQITTELSNQIRGLMRTFGLVVPRGKGGTFEAEVQRLLAGQEELAGIILPVLEAWRSVRSRAAILGRQLLANARQHEACQRLMSIPGVGAITATSFTAAIEDPANFSKSRSVGAWLGLTTRRYQSGEVDYDGHISRRGEAHLRGLLYEAATVILTRIHAKSDLRQWGLMLRERVGFKRAAVAVARKLAVIMHAMLKSGEPFTRVVGAA

SEQ ID NO: 17629 - protein, 374 aa, unidentified
  source 1..374: note = protein_094e3da
  REGION 41..182: note = RuvC_domain
  SITE 44: note = RuvC_P1
  SITE 87: note = RuvC_P2
  SITE 122: note = RuvC_P3
  SITE 124: note = RuvC_P4
  SITE 127: note = RuvC_P5
  REGION 245..333: note = Tnp_domain
  SITE 253: note = Tnp_P1
  SITE 283: note = Tnp_P2
  SITE 291: note = Tnp_P3
  SITE 292: note = Tnp_P4
  SITE 304: note = Tnp_P5
MNEEVYLKVWSLTDFRHHSAQYGMHKAPSDWRLHSMKYTPVGVDIAKHLIQVHFINEHTGEVVDKQLQRQDFLTFFSNRESCLIGMEACGGSQHWARELQKLGHKVRLMQGRFVKAFVMGNKNDVMDARAIWMAVQQPGKAIAVKTEEQQSVLVLHRSRRQLVKFRTAQINALHGTLLEFGETIHKGRSAMDRELPAALERLKTKLPPYLITVLEDQYHRLNELDILIDGLEKQLISVARQNETCKRLMDIPGVGPLIATAAIATMGEASAFKSGREFAAYVGLVPKQTGSGGKVRLLGISKRGDTYLRTLFIHGARAASLRAKEPGPWITELKKRRPAGVAIVAMANKLARTIWAIAAHERQYDKNHVSIRPY

SEQ ID NO: 17630 - protein, 343 aa, unidentified
  source 1..343: note = protein_6328fdc
  REGION 5..153: note = RuvC_domain
  SITE 8: note = RuvC_P1
  SITE 55: note = RuvC_P2
  SITE 92: note = RuvC_P3
  SITE 94: note = RuvC_P4
  SITE 97: note = RuvC_P5
  REGION 212..300: note = Tnp_domain
  SITE 220: note = Tnp_P1
  SITE 250: note = Tnp_P2
  SITE 258: note = Tnp_P3
  SITE 259: note = Tnp_P4
  SITE 271: note = Tnp_P5
MEYYAGIDVSLKESGVCIVDAKGKIVREVKVASEPEALVRYFNDLELPVCRIGLEAGPLSHWLHAGLVAAGRDVVLLETRHVKAALSAMTVKTDRKDARGIAQLLRMGWYRPVHAKSVASQDTRAVLVGRKLLQSKLLDVELSIRGILRGYGLKVGEVSRGRFEARIEELIVGHATLKTVIGAMLAARGTLWGEFTRLHREMLKIARADKICHRLMSTPGVGALVALTYRSAIDDPTRFGKSSTVGAYFGLTPKKYQSGETDRDGGVSKVGDAMVRTALFEAAHIMLTRATRFSSLKRWALEVAKRRGMKRAKVALARKLGVVLHRMWMDATDFRWGATAMAA

SEQ ID NO: 17631 - protein, 274 aa, unidentified
  source 1..274: note = protein_e5203d5
  REGION 4..91: note = RuvC_domain
  SITE 7: note = RuvC_P1
  SITE 57: note = RuvC_P2
  REGION 166..236: note = Tnp_domain
  SITE 187: note = Tnp_P2
  SITE 195: note = Tnp_P3
  SITE 196: note = Tnp_P4
  SITE 209: note = Tnp_P5
MFYLGIDIGKNTHVASLVDDKKKVIFKAFSFSNSIDGAESLILKLEAFKNELEVGMEATGHYWLSLYSYLVEKNFTVRVINPIQTDGWRQGADLLRYGDFVETSLSNEDYLSLRNLSRFRSYLISSIGDLKRKTIALLDQVFPVQYASFSNIFGKTSKEILSNFSTPSDFEDIKRFSNPSKLVAYAGLDASVSQSGEYESTYNHMSKRGSPYLRRALFQSALRAEFCDPVFSAYYQKKITEGKHHLVATNAVARKLWHTIFAVLTKNEPYQAQS

SEQ ID NO: 17632 - protein, 401 aa, unidentified
  source 1..401: note = protein_201a03a
  REGION 4..156: note = RuvC_domain
  SITE 7: note = RuvC_P1
  SITE 56: note = RuvC_P2
  SITE 93: note = RuvC_P3
  SITE 95: note = RuvC_P4
  SITE 98: note = RuvC_P5
  REGION 264..350: note = Tnp_domain
  SITE 272: note = Tnp_P1
  SITE 303: note = Tnp_P2
  SITE 311: note = Tnp_P3
  SITE 312: note = Tnp_P4
MWYAGLDWADSHHDVVVIDDGGRQVASRRVAHSAQGLAELTAFLRQIAPLDQIACIVETNQGLLISTLLEAGCTLYPVNPKTIDRRRNASGAKTDLIDAYLLAKTGRSDLRDLRKLTPDSAIIQELKALTRDQDSLVQSQTRLVNQLTACLKAYYPVALQLFSKLQQRSTLIFLQTYPTLEAARQASVEEITSVLKEVGHPKPSKVAPKIRETLHQPQLHANAITTRTKSRLMLALAAQLLPLIEQIASYDKQITALFLTHADHEIFSSLPGAGKRLAPRLLAEWGDDRTRYTASTSVQALAGTAPVAFQSGNYAKAHKRYACLKPLRNVLHQLAWQSTKQEAWALTYYKRKRAEGKSHSMAVRSLANVWVRIIYAMWFEHKSYKTATFEAAQHHHAKRAA

SEQ ID NO: 17633 - protein, 408 aa, unidentified
  source 1..408: note = protein_31c585d
  REGION 21..181: note = RuvC_domain
  SITE 24: note = RuvC_P1
  SITE 77: note = RuvC_P2
  SITE 118: note = RuvC_P3
  SITE 120: note = RuvC_P4
  SITE 123: note = RuvC_P5
  REGION 280..369: note = Tnp_domain
  SITE 287: note = Tnp_P1
  SITE 317: note = Tnp_P2
  SITE 325: note = Tnp_P3
  SITE 326: note = Tnp_P4
  SITE 339: note = Tnp_P5
MFVVSQCLNQSNKEVFNLIFIGIDIAKDHHDIAIINDCGEILNSHLYIENSASGFKKLHMEIRAHMKSIQDIHIGMEETGIYHENLRDFLISHGYNVYSINPKLTYHSRLSSSPRRTKTDKLDAIAITRYIMNSYRSLHPYTPSLYHLDELKQLSRSYHDKKILLSKAKTELKRLLQITFPEFLKHFNPYSKWVLDILKNYPTPNHFKGLHITALAQRIKTKRDRLEDASLLKQIAIDSIGRSNELQVILMTVAIDDLIHYQAQLEVLKALISKKMRLFPKILSMPGVGPINGATILGETGDIHRFSNKHEYYAFYGCDPVIHESGNFKLKRSRLSKTGNKFLRTAIYSASRVACVGPAKDNKFRRKYLSMTHKENKHHNTIIFAVAKNMVHSLFTMIKQDKFYYDQA

SEQ ID NO: 17634 - protein, 391 aa, unidentified
  source 1..391: note = protein_1a40847
  REGION 4..163: note = RuvC_domain
  SITE 7: note = RuvC_P1
  SITE 60: note = RuvC_P2
  SITE 101: note = RuvC_P3
  SITE 103: note = RuvC_P4
  SITE 106: note = RuvC_P5
  REGION 268..353: note = Tnp_domain
  SITE 274: note = Tnp_P1
  SITE 304: note = Tnp_P2
  SITE 312: note = Tnp_P3
  SITE 313: note = Tnp_P4
  SITE 326: note = Tnp_P5
MICVGIDVAKDKHDCFIMGSEGEVLADVFTIPNNMEGFNRLLQKLQACSASQDKIKVGLEATGHYSYNILGFLLDNGLPTYVLNPLHTNLYRKSLTLRKTKTDRVDARTIAAMLMSDVGLKPYTDTAYHNEELKSLTRYRFDKVRERAKLKQSIARLACILFPELEKLVPTLHMASVYALLVEFPGAKQVADAHLTRLKALLLDASKGRYKRDMAVEIREAAKASIGSSMPAKSLELRHTIHLIRELDAEIEEIETAIQTIMDELHPPITIIPGLGTRMGAMILAEVGDFSRFDSPDKVLAYAGLSPSTYQSGQLANCYAHMEKRGSRYLRFAIFNAAKYVCHWDPTFASYLAKKRAEGKHYNVAISHAAKKLVRLIFALEKSREPYRLTA

SEQ ID NO: 17635 - protein, 270 aa, unidentified
  source 1..270: note = protein_6b3d4ef
  REGION 1..75: note = RuvC_domain
  SITE 14: note = RuvC_P3
  SITE 16: note = RuvC_P4
  SITE 19: note = RuvC_P5
  REGION 137..228: note = Tnp_domain
  SITE 145: note = Tnp_P1
  SITE 175: note = Tnp_P2
  SITE 183: note = Tnp_P3
  SITE 184: note = Tnp_P4
  SITE 196: note = Tnp_P5
MPPAYMKAYIKRNKNDAADAEAICEAIARPSMRFVPVKDAEQQSVLMLHRARNFLVRQRTMLVNALRAHMAEFGIIAPQGLRHVEILTQTIAHQQQRLPALARSILQTIVDQLNDTRERVRELEIRLIRLHQQNPLSQLLATVPGVGIMGASAIAATVSDPTLFRSGREFAAWLGMTPRQNSSGGKDRLGHTSKRDDKHIRSLLIVGAVAVLRHARNRPTRDGEWVRALVARKPTKVPAVALANKTARIVWAVMMRGDGYQTKAVLGQPA

SEQ ID NO: 17636 - protein, 341 aa, unidentified
  source 1..341: note = protein_32510a7
  REGION 7..149: note = RuvC_domain
  SITE 10: note = RuvC_P1
  SITE 53: note = RuvC_P2
  SITE 88: note = RuvC_P3
  SITE 90: note = RuvC_P4
  SITE 93: note = RuvC_P5
  REGION 212..299: note = Tnp_domain
  SITE 220: note = Tnp_P1
  SITE 250: note = Tnp_P2
  SITE 258: note = Tnp_P3
  SITE 259: note = Tnp_P4
  SITE 271: note = Tnp_P5
MADVRVIGLDIAKSVFQLHGVDEAGAIVLQKRLTRSRLLPFLEKMPPCVIGMEACSTSHYWARELARLGHQVKLMPAQYVKPYVKRQKNDMADAEAIAEALTRPTMRFVAPKSPAEQSAMMLHKVRLMLNRQVVMITNAIRAHMSEFGIIAPVGRGGVDRLIEHVEDENDDRIPETARHCLQMLVTQLKLVKLQILDNDRQVLSLARSTELGRGLMEIPGVGPLVASALIACVPDPSMFKCGRNMAAWLGIVPKQNSSGGKSRLGSITKAGNRYLRQMLFTGAMAVVRRAMQGTRRTWLVRMLERRRPKVAAMALANKNARIAWAMMMSGEAYREPMMLAA

SEQ ID NO: 17637 - protein, 342 aa, unidentified
  source 1..342: note = protein_930d5b1
  REGION 6..150: note = RuvC_domain
  SITE 9: note = RuvC_P1
  SITE 54: note = RuvC_P2
  SITE 89: note = RuvC_P3
  SITE 91: note = RuvC_P4
  SITE 94: note = RuvC_P5
  REGION 212..298: note = Tnp_domain
  SITE 220: note = Tnp_P1
  SITE 250: note = Tnp_P2
  SITE 258: note = Tnp_P3
  SITE 259: note = Tnp_P4
  SITE 271: note = Tnp_P5
MKLIRVGVDLAKNVFQVHGVDRNEKPVWRRRLTRSNWLRVVLETVEPGCQIGMEACSGAHHWARKLQERGYTVKLIAPQFVKPYLQSNKNDANDAEAICEAMSRPKMRFVAVKTVEQQDIQAVHRIRSGLIEQRTAKGNQIRGLVSEYGLVAPRELTQLRRAIPLWLEDAHNGLSARFRRLLNALWGDLQILDERVAELDREIALIAQSDPAARLQQLCGVGPIVASALVAAVGDGAQFANGRQMAAALGLTPKQHSSGGKDRQLGISKRGDAYLRMVLIHGARSAIRTAKAKSDRLSLWVRALLERRHPNVVAAALANKTARIAWAMLRRGSEYRPESIAH

SEQ ID NO: 17638 - protein, 407 aa, unidentified
  source 1..407: note = protein_460b044
  REGION 10..166: note = RuvC_domain
  SITE 13: note = RuvC_P1
  SITE 62: note = RuvC_P2
  SITE 103: note = RuvC_P3
  SITE 105: note = RuvC_P4
  SITE 108: note = RuvC_P5
  REGION 273..357: note = Tnp_domain
  SITE 281: note = Tnp_P1
  SITE 310: note = Tnp_P2
  SITE 318: note = Tnp_P3
  SITE 319: note = Tnp_P4
  SITE 331: note = Tnp_P5
MTTPAPAVYIGLDVGKSDHHAVALTSNGETVYDKALPNDETRLRAILDELLKTHGPVLLVVDQPATIGALPVAVAQSCAGVEVAYLPGLAMRRIADLHPGSAKTDARDAAIIAEAARTMPHTLRAIRVDDEQIAELAMLAGADDDLAAQITAASNRLRGLLTQIHPALERVLGPRITHPAVADLLGRYPTPAKLKTAGPGHVRARLRKHAPRLAAPLTEEIFQALGQQTVVVAGTEAAATVVPILAEQLAGLIHQRNKLATQVEAVVEAHPLYPVLISMPGVGVRTAARILTEVVGKDFADAGHLASYAGIAPITRRSGTSIRGEHAPRGGNKRLKRALFLSAFASLHHPASRAYYDRKRAQGKRHNQALIALARRRTDVLYAMLRDGTLYEDPTMPQTPSTVALAA

SEQ ID NO: 17639 - protein, 404 aa, unidentified
  source 1..404: note = protein_0ef4e33
  REGION 15..169: note = RuvC_domain
  SITE 18: note = RuvC_P1
  SITE 67: note = RuvC_P2
  SITE 107: note = RuvC_P3
  SITE 109: note = RuvC_P4
  SITE 112: note = RuvC_P5
  REGION 274..332: note = Tnp_domain
  SITE 282: note = Tnp_P1
  SITE 313: note = Tnp_P2
  SITE 321: note = Tnp_P3
  SITE 322: note = Tnp_P4
MDDELAEVTVPEIWAGVDIGKEHHHCVVIDAQGERLLSRRVLNDESALLELIGDVLAFSEDALWAVDINHGGAALLIGLLLGHGQPMVYLTGLAVHQASAAYRGQGKTDAKDAFVIADQARMRKDLGTLRPGDEIAVDLKILVRRRTDLVNDRTRHINRLREQLLEICPALERALILTNKGPVLLLTGYQTPAAIRRSGVKRIETWLKNRKVKGAATLAQAAVEAAQAQHTSLPGETLAASMVARLAKGVMALEEEIAELDALIEARFHEHPHADVIRSLPGMGAMLGATFIAATGGDMNAFGTADRLAAFAGLSPVPRDSGHVSGNMPASPLPPRPPAGLLPVFHGQPAVVSRLTGVLRTKARRGKGHKQAVLSLARRRANVLWAMIRDGACYQAAPPVTRAA

SEQ ID NO: 17640 - protein, 341 aa, unidentified
  source 1..341: note = protein_6d50e74
  REGION 7..147: note = RuvC_domain
  SITE 10: note = RuvC_P1
  SITE 55: note = RuvC_P2
  SITE 88: note = RuvC_P3
  SITE 90: note = RuvC_P4
  SITE 93: note = RuvC_P5
  REGION 212..297: note = Tnp_domain
  SITE 220: note = Tnp_P1
  SITE 250: note = Tnp_P2
  SITE 258: note = Tnp_P3
  SITE 259: note = Tnp_P4
  SITE 271: note = Tnp_P5
MNKFNTISIDLAKSVFQVAVFNRHGKRKLNQAMSKKKMLTVISQHPGATICIEACAASHYWGRTFQSRGHTVKMIPPQKVKPYRSGNKNDANDAIAIYEASLRSDIHAVPVKTPEQQDIAMLLSLRQSYIKQRTAVSLRIRGYAAECGITFPQGANKLRELLPFVIEDMENELTPTTRFVLRELHAQLLNLDEPIERVESQLIDFAKQIPACQLLITLRGVRWVIASAIFSRLGDASAYRNGRGASASLGLVPAHTGSGGKNKNHGISKSGDKTLRSLVVHGARAVVANIRDKEDRLSCWIRNLLERKSFNQVVVALANKTIRMACAMLKSNQSYNETLIA

SEQ ID NO: 17641 - protein, 396 aa, unidentified
  source 1..396: note = protein_ee3213b
  REGION 6..160: note = RuvC_domain
  SITE 9: note = RuvC_P1
  SITE 58: note = RuvC_P2
  SITE 98: note = RuvC_P3
  SITE 100: note = RuvC_P4
  SITE 103: note = RuvC_P5
  REGION 265..352: note = Tnp_domain
  SITE 273: note = Tnp_P1
  SITE 304: note = Tnp_P2
  SITE 312: note = Tnp_P3
  SITE 313: note = Tnp_P4
  SITE 325: note = Tnp_P5
MPEIWAGVDIGKEHHHCVVINAEGERLLSRRVLNDEAELLELLGDVLEISDDALWAVDLNHGGAALLIGLLVTHGQSVAYLTGLAVHRASATYRGEGKTDAKDAFVIADQARIRRDLGLLRPGDEIAVDLRTLTTRRLDLVFDRTRQINRLRAQLLEIFPALERSLDLTNKGPALLLTGYQTPAAIRRTGMKRIETWLKNRKVKGAAALARTVVEAAQAQHTVLPGEKLAAAMVVRLAKTVIALDEEIAELDALIEARLHEHPHAQVIRSLPGMGTRLTAEFIAATGGDMEIFASADRLAGFAGLAPQPRDSGRVNGNMRRPHRYHRGLLRTMYLSAMASLKSCPASKTYYQRKRSEGKGHKQALLALARRRINVLWAMIRDSQCYHVAPPVTSAA

SEQ ID NO: 17642 - protein, 343 aa, unidentified
  source 1..343: note = protein_30666f0
  REGION 6..149: note = RuvC_domain
  SITE 9: note = RuvC_P1
  SITE 54: note = RuvC_P2
  SITE 89: note = RuvC_P3
  SITE 91: note = RuvC_P4
  SITE 94: note = RuvC_P5
  REGION 213..300: note = Tnp_domain
  SITE 221: note = Tnp_P1
  SITE 251: note = Tnp_P2
  SITE 259: note = Tnp_P3
  SITE 260: note = Tnp_P4
  SITE 272: note = Tnp_P5
MNINRIGIDLAKNVFQLHGVDRHGKLVWKRRLKRDQWLQAVMDHAEPGCEIGMEACGGAHHWARVLEARGFAVRLIAPQFVKPYVKSSKNDANDAEAICEAMSRPNMRFVAVKSVAQQDIQATHRIRADLMTQRTAKSNQIRGLVAEYGLVAPLTLRALRAAIPCWLEDADNGLTDYFRSLLHGLQADLIALDDRVLDLDRQIQKLANSNEVTRRLQQLRGVGPMVATALVATVGDAGQYPKGRQMAAAIGLTPRQHSSGGKDRLLGISKRGDVYLRTLLVHGARSVVARAKHKDDRLSRWVTGIAQRRHPNVAAVALANKTARMAWAMLRNDTDYDPDFTIS

SEQ ID NO: 17643 - protein, 354 aa, unidentified
  source 1..354: note = protein_d9990c5
  REGION 7..149: note = RuvC_domain
  SITE 10: note = RuvC_P1
  SITE 53: note = RuvC_P2
  SITE 88: note = RuvC_P3
  SITE 90: note = RuvC_P4
  SITE 93: note = RuvC_P5
  REGION 212..303: note = Tnp_domain
  SITE 220: note = Tnp_P1
  SITE 250: note = Tnp_P2
  SITE 258: note = Tnp_P3
  SITE 259: note = Tnp_P4
  SITE 271: note = Tnp_P5
MQAISTIGLDIAKSVFQVHGVDDAGEVVIRRQLKRRYVLAFFQKLPPCLVGIEACASSHHWSRELKALGHTVRLMPPAYVKPYVKRQKNDAADAEAICEAVRRPTMRFVETKTPEQQSCLMLHRTRHLVIRQLNAITNALRAHLAEFGIVAPVGRRGVEELLNVIADAKDTRVPEVARACLAALGEQLCVLKAHVLKFDRLITAWHRSNETSMRLDALPGVGPALATALVASVPDPKAFRSGRNFSAWVGLVPKQNSSGGKQRLGNISKQGDRYLRSLFTAGALAVIRYAKIHGTGHRPWLTALLARRSTKVAAVALANKIARMAWAMMVRGERYREPCRTCGVNEIAPTLGVM

SEQ ID NO: 17644 - protein, 315 aa, unidentified
  source 1..315: note = protein_deed161
  REGION 9..156: note = RuvC_domain
  SITE 12: note = RuvC_P1
  SITE 56: note = RuvC_P2
  SITE 94: note = RuvC_P3
  SITE 96: note = RuvC_P4
  SITE 99: note = RuvC_P5
  REGION 190..274: note = Tnp_domain
  SITE 198: note = Tnp_P1
  SITE 227: note = Tnp_P2
  SITE 235: note = Tnp_P3
  SITE 236: note = Tnp_P4
  SITE 247: note = Tnp_P5
MENSLPQTVGIDISKATLDVFAHPTGCERQFANSAKGHKELISWLAQWQIERIAYEATGAYHRQLEQALTDLPCVKLNPARARRFAQAAGTLAKTDKIDAAILARMATTLQPPIRPATTPQQARLAELISARDGLIRDKIAIQNQAKNLTVPLLKRQYKHRLAQIDRHIEQVDAEIAAGIAADPALARRHQIISSIAGVGIRTADQLVATMPELGALDPKQAASLAGLAPVTRQSGQWKGRSFIQGGRANVRRALYMPALVAARYNPDLKAKYQSLINAGKPPKVAVVTLMRKLVVMANALIKADRLWIADRACA

SEQ ID NO: 17645 - protein, 344 aa, unidentified
  source 1..344: note = protein_2120405
  REGION 6..147: note = RuvC_domain
  SITE 9: note = RuvC_P1
  SITE 52: note = RuvC_P2
  SITE 87: note = RuvC_P3
  SITE 89: note = RuvC_P4
  SITE 92: note = RuvC_P5
  REGION 212..295: note = Tnp_domain
  SITE 220: note = Tnp_P1
  SITE 250: note = Tnp_P2
  SITE 258: note = Tnp_P3
  SITE 259: note = Tnp_P4
  SITE 271: note = Tnp_P5
MDIAVLGVDLGKNVCSVVGLDAAGVVVMRRKMRRETLIRLAEKLPACVVGMEACCGAHHLGRAFADHGHEVRLMSPEYVRPYVKAQKNDDRDAEGIAEAAMRPTMRFVELKTQDQLDMQTLHRSRDRLVSERTALINQLRAILLERGMVAPKGKRKLAEFLVVLMDEQGGEGLSPRMSLLVADARTQWAELDRRIAAFDAEFVRCVKDNEDARRLTAIPGFGAILASALVAAVGRAESFDRGRDLSAWLGIVPRQFTTGGKPKLLGISKRGNSYLRRQLIHGARAALPYVAERDTPLGRWAKALLQRAHHNVAVVAFANKLARIAWAVLRREERFAASGTPMAA

SEQ ID NO: 17646 - protein, 344 aa, unidentified
  source 1..344: note = protein_465393c
  REGION 1..105: note = RuvC_domain
  SITE 2: note = RuvC_P2
  SITE 42: note = RuvC_P3
  SITE 44: note = RuvC_P4
  SITE 47: note = RuvC_P5
  REGION 219..306: note = Tnp_domain
  SITE 227: note = Tnp_P1
  SITE 257: note = Tnp_P2
  SITE 265: note = Tnp_P3
  SITE 266: note = Tnp_P4
  SITE 279: note = Tnp_P5
MENTGHYHYPVLKAFQEAGLPVCMVNAYQIKKFGDMDLRKAKTDKKDAVRIARYALEKSYSLVPYTSMEQKYEDLRFLARQYNQRMLTLKTNKVFLLNLLDETMPGITNILPLTTRTPETSLSVLFINRFKSYDRIKKMGKSRFLDAFEKIARKSRNRQTKTYGLAIYEAALRNITTRGENEYTLAAQDQCLELVCESQKAADSIILKMQTLAETLPEYAVLRSMAGVGDRLGPLILAEIGDIRRFHSGKALNAYAGNDAPPYQSGTFESHNRHISKRGSAALRKYCFEVMQALKLTRPQDDPVYLFLLKKEQEGKPYNVAKMAGVNKFLRIYYARAMETLKQQ

SEQ ID NO: 17647 - protein, 404 aa, unidentified
  source 1..404: note = protein_f5afab7
  REGION 4..160: note = RuvC_domain
  SITE 7: note = RuvC_P1
  SITE 57: note = RuvC_P2
  SITE 97: note = RuvC_P3
  SITE 99: note = RuvC_P4
  SITE 102: note = RuvC_P5
  REGION 275..361: note = Tnp_domain
  SITE 282: note = Tnp_P1
  SITE 312: note = Tnp_P2
  SITE 320: note = Tnp_P3
  SITE 321: note = Tnp_P4
  SITE 334: note = Tnp_P5
MNAVGIDVSKGKSMVAALRPMGEVAIAPQEIPHTEVDLERLAYDIISLGEDTRVVMEATGRYHEPVAQMLHEMGIFVAVLNPLLIKQSGGGNIRKVKSDKADALKIAKYGLDNWSDLREHTPMDALRQQLKLFSRQYNLYMQTSVSLQNNLISLLDKTWPGINEEFKSPMRTDGSVKWVDFVTTFWHCDCIRYAGQDNFTERYRKWCKRKGYNFSQDKAEELYIVSAGHFPTLPKSSGTKLLITTAAKELTAALSGIAIIRAEMIRLAQQLPEHGTVLAMYGVGEITAAQLMAEIGDVRRFANRGSIVAFAGVDPSVNQSGSYQQRSTTSTKRGSPHLRKTLFQVVSTYIKRSPMDEPVYQFLDKKRSEGKPYYVYMTAGANKFLRIYYVRVKECLDVLDEPEA

SEQ ID NO: 17648 - protein, 340 aa, unidentified
  source 1..340: note = protein_f943865
  REGION 6..148: note = RuvC_domain
  SITE 9: note = RuvC_P1
  SITE 52: note = RuvC_P2
  SITE 87: note = RuvC_P3
  SITE 89: note = RuvC_P4
  SITE 92: note = RuvC_P5
  REGION 210..295: note = Tnp_domain
  SITE 218: note = Tnp_P1
  SITE 248: note = Tnp_P2
  SITE 256: note = Tnp_P3
  SITE 257: note = Tnp_P4
  SITE 269: note = Tnp_P5
MEVTTIGLDLAKNVFQAHGADAFGGVIFRKQLRRKTVLEFFAKQPECMVAMEACAGAHYWAREIGKFGHTIKLIPPAYVKPFVKRQKNDAADAEAIAEAASRPTMRFVAVKSEDAQASAVVFRARDLLVRQRTQLINSLRGHLAEYGFIAAQGASHVATLIECVVDDKNTLPEAARLVLAMLVETYRDLEDRIRRLDHEITRRAREDKDARRLATIPGVGPITATAVIALAPAASTFVKGRDFAAWLGLTPRQRSTGGKQKLGATSKMGERTLRRLLILGASSVVRQAAHRGVAEGSWLGRMLARKPRMLVIVALANKLARIVWALLAKGGVYGAPVAAN

SEQ ID NO: 17649 - protein, 353 aa, unidentified
  source 1..353: note = protein_9ab5f1b
  REGION 6..147: note = RuvC_domain
  SITE 9: note = RuvC_P1
  SITE 52: note = RuvC_P2
  SITE 87: note = RuvC_P3
  SITE 89: note = RuvC_P4
  SITE 92: note = RuvC_P5
  REGION 222..307: note = Tnp_domain
  SITE 230: note = Tnp_P1
  SITE 260: note = Tnp_P2
  SITE 268: note = Tnp_P3
  SITE 269: note = Tnp_P4
  SITE 281: note = Tnp_P5
MKDTMIGVDLAKSVFQVHGTSMTGHVKFRRKLTRPQFRKFMAEQPPALVVFEACGSASYWAREVETMGHEAKLIAPQYVRPFVKRQKNDAADAEAIVIAARQPEMRFVSPKTEEQQARAVMFRSRERLVRQRTELVNALRAVLYEQGHVFPLGLVHLKRIEALVEEPENGLPELIVSECRDLLEQIAESEGRAATGPKPPRTERITERTAKLRTLAAQTEMARRLQTMPGVGPLTSLAVEAFAPDMAQFRCGRDFAAWLGLVPRQHSSGGKDRLGRVSKAGQTDIRRLLIIGAMTRIMGRAGAKVPAESWLGRMLARKPKMLAGIALANRMARQIWAMLTKGEDYRDPALATA

SEQ ID NO: 17650 - protein, 343 aa, unidentified
  source 1..343: note = protein_d14f88d
  REGION 6..150: note = RuvC_domain
  SITE 9: note = RuvC_P1
  SITE 54: note = RuvC_P2
  SITE 89: note = RuvC_P3
  SITE 91: note = RuvC_P4
  SITE 94: note = RuvC_P5
  REGION 213..299: note = Tnp_domain
  SITE 221: note = Tnp_P1
  SITE 251: note = Tnp_P2
  SITE 259: note = Tnp_P3
  SITE 260: note = Tnp_P4
  SITE 272: note = Tnp_P5
MKLSRVGIDLAKNVYQLHGVDRTGKTVWKRRLKRHQWFKALLDKSESSCVIGMEACASAHHWGRELQSRGYTVKLIPPQFVKPYVKSNKSDARDAEAICEAMSRPNMRFVTVKTVEQQDIQATHRIRAELITQRTAKANQIRGLVAEYGLVAPKHMSSLRAAIPCWLEDAENGLTGDFRNLLHGVWNDLLGLDDRVCEMDKLIKRLADNNDDCVRLQQIRGVGPMISTAMIATVGDARQYRTSRQMAAAIGITPKQHSSGDRDRLLGISKRGDVYLRTLMIHGARSVVASAKHKDDRLSRWVTGIATKRHPNVAAVALANKTARMAWAMLRHKTDYDPDYAIR

SEQ ID NO: 17651 - protein, 339 aa, unidentified
  source 1..339: note = protein_c76ffd0
  REGION 8..150: note = RuvC_domain
  SITE 11: note = RuvC_P1
  SITE 54: note = RuvC_P2
  SITE 89: note = RuvC_P3
  SITE 91: note = RuvC_P4
  SITE 94: note = RuvC_P5
  REGION 212..303: note = Tnp_domain
  SITE 220: note = Tnp_P1
  SITE 250: note = Tnp_P2
  SITE 258: note = Tnp_P3
  SITE 259: note = Tnp_P4
  SITE 271: note = Tnp_P5
MKQEVVNVGLDLAKSVFQVHAIGSDGAVLVRRKLRRAEVVGFFTDLPSCLVGMEACASAHHWARELIALGHEVRLMPPAYVKPYVKRGKTDAADAEAICEAVTRPTMRFVAVKTVEQQAVLMLHKSRDLMVRQLTMLINALRGHLAEYGIVTGVGAGGVTAMLKALYEQQEELPVHALSALHGLAAQLRALAGEIDRLETQILAWHRADETSRRLATIPGIGPITASAISAAVPDASLFRSGRQFAAWLGLTPRANSSGGRERLGGITKQGDGYLRRLLVVGATAVMRMTRKNADRQPWMAQLLERKPAKIATVALANKTARIAWAVMSRKEVYAAATA

SEQ ID NO: 17652 - protein, 411 aa, unidentified
  source 1..411: note = protein_601129a
  REGION 5..164: note = RuvC_domain
  SITE 8: note = RuvC_P1
  SITE 61: note = RuvC_P2
  SITE 101: note = RuvC_P3
  SITE 103: note = RuvC_P4
  SITE 106: note = RuvC_P5
  REGION 272..358: note = Tnp_domain
  SITE 280: note = Tnp_P1
  SITE 311: note = Tnp_P2
  SITE 319: note = Tnp_P3
  SITE 320: note = Tnp_P4
MRLFAGDDWAEDHHDVEVMDEAGKVLAKRRLPEGVAGMTQLHELIGRFVPEDAGDVEVVIGIETDRGPWVAALVAAGYTVYPVNPLQASRYRERHGVSGGKSDQGDAHMLADMVRTDSHQLRPAAGDSPQAAGIKVVARTHKTLIWDRTRTVQRLRHQLREYFPAALAAFEDLDAPDVLELLGKAPDPARAARLTRAQVSAALKRARRRGIAGKTDAILAALRGEQLAQPAALTAAYAATARSLIAVITTLNEQVKALEEQVREHFGRHPDAEIYQSQPGLGAILGARVLGEFGDDPHRYADGKARKNYGGTSPITRASGKKKVVAARFIRNDRLIDALMSWAFASLNASPGARAFYDQQRAKGLEHNDALRRLANRLIGILHGCLKTRTRYDEATAWGHREKLPQSSVAA

SEQ ID NO: 17653 - protein, 320 aa, unidentified
  source 1..320: note = protein_3ecf8cc
  REGION 10..158: note = RuvC_domain
  SITE 13: note = RuvC_P1
  SITE 55: note = RuvC_P2
  SITE 95: note = RuvC_P3
  SITE 97: note = RuvC_P4
  SITE 100: note = RuvC_P5
  REGION 190..274: note = Tnp_domain
  SITE 198: note = Tnp_P1
  SITE 227: note = Tnp_P2
  SITE 235: note = Tnp_P3
  SITE 236: note = Tnp_P4
  SITE 248: note = Tnp_P5
MTILDSQVVVGVDVAKDEIVVYRCDEESTLIVANERSALKKWLKLLPDNCALALEATNTYHLDTTEIAHELGHDVYVIDGSRLNKYRDGIGVRAKTDALDAVLLARYLGKESDKLRVWSPPPKAYTQLKSLLRRRAELVRHRVAIKQSWRDEPLLEEALGEYLRCVEQIEKGIQKALKNIVSEAGMDAQVKRCQAVEGIGVLTATAAVTAFMRGEFSDSDGFIAFLGMDPRVRQSGKKDQRRYLSKRGDSEFRRLFHNSAMAASRSPTWRPFYQRYLDRGLKGTQALVILARKLARVVFALMKNQSEYQPNSMFGGSPQT

SEQ ID NO: 17654 - protein, 355 aa, unidentified
  source 1..355: note = protein_4a10dd2
  REGION 18..164: note = RuvC_domain
  SITE 20: note = RuvC_P1
  SITE 67: note = RuvC_P2
  SITE 104: note = RuvC_P3
  SITE 106: note = RuvC_P4
  SITE 109: note = RuvC_P5
  REGION 224..312: note = Tnp_domain
  SITE 232: note = Tnp_P1
  SITE 262: note = Tnp_P2
  SITE 270: note = Tnp_P3
  SITE 271: note = Tnp_P4
  SITE 283: note = Tnp_P5
MDGLKHQKEKRSMDHFARLDVSVKETSVCIVDDTGKIVGEVKVASEPEALLAVLKNPAYRFKRIGLEAGPLSQWLFSALAEAELPVVCVETRHIQAVLKAQINKTDRNDARGIAQMMRVGLYRPVRVKTLRSQKLRMLLTHRKLLQSKAIAIENDLRGTLRNFGLKVGMVGTVKFEARIRELVENLLDLAALVEPLLVVRRVLHEQINVLHRRLLAIVRDDAVCRRLMTIPGVGPVVALTYRATVDVPARFKNSKAVGAVFGLTPSKYQSGEINRTGAISKCGDEMMRVMLYEAARVMLTRTNKWSWLKVWAMKIARQRGMKKAIVALARRLAVIMHRIWVDSTEFRWTRKVVAA

SEQ ID NO: 17655 - protein, 376 aa, unidentified
  source 1..376: note = protein_6a13c54
  REGION 41..182: note = RuvC_domain
  SITE 85: note = RuvC_P2
  SITE 122: note = RuvC_P3
  SITE 124: note = RuvC_P4
  SITE 127: note = RuvC_P5
  REGION 242..329: note = Tnp_domain
  SITE 250: note = Tnp_P1
  SITE 280: note = Tnp_P2
  SITE 288: note = Tnp_P3
  SITE 289: note = Tnp_P4
  SITE 301: note = Tnp_P5
MVDMLKVLRFELMINVVCLEQPQASEGEAQHEILCRIGRLGEETAVCIIHETGQICREIKVASHPEDLARVLKDPNWRLERVGLEAGPLSQWLFEGLARAGLPVICIETRHTKAFLKAQVNKTDRNDARGIAQMMRVNLFRPVHVKTLTSQKRRALLTARKLLQEKAIAVENDLRGLLRNFGLKVGPVGAVKFEVRIRELTEGMPDLAEIVEPLLEARSKLRQNFATLHRKLLTLVRDDAVCRRLMTIPSVGPVVALAYTATIDIPQRFKSAKAVGPALGLTPVLDESGESRRIGRISCCGDRMLRTLLYEAAQVLLTHVTKWSWLKAWGMNVAKRRGRQKAIVALARRLAVIMHRIWSDGTRFRWTRQDIMPAAA

SEQ ID NO: 17656 - protein, 346 aa, unidentified
  source 1..346: note = protein_3e62eca
  REGION 7..148: note = RuvC_domain
  SITE 10: note = RuvC_P1
  SITE 53: note = RuvC_P2
  SITE 88: note = RuvC_P3
  SITE 90: note = RuvC_P4
  SITE 93: note = RuvC_P5
  REGION 210..296: note = Tnp_domain
  SITE 218: note = Tnp_P1
  SITE 248: note = Tnp_P2
  SITE 256: note = Tnp_P3
  SITE 257: note = Tnp_P4
  SITE 269: note = Tnp_P5
MNQIIRIGMDTSKHFFQLHGVDADERPVLRRKLQRKEVLAFFARLAPTVIGMEACGAGHYWARELRKLGHEVRLMAPQHVKAYVKRNKNDGRDAEGLCEAMSRPTMQFVPVKSEEQQAALMLAGVRQQLITRRTQLGNAIRGYATEFGLITAKGLDKLEPLLVRITQDESLPELAREMFALQGRAYARLQVELKTIEARLMAWHRANADSRRLAQIPGIGPIGATALVMKAPDPRLFRSGRHFAAWIGLTPKDHSTAGKTRLGKITRAGDEMLRSVLVAGATAVIQQARRGRGRASPWLLDLLKRKPPKLAAVALANKIARIAWKLMTTGESYDGARMPGASALAA

SEQ ID NO: 17657 - protein, 427 aa, unidentified
  source 1..427: note = protein_a0461b1
  REGION 36..190: note = RuvC_domain
  SITE 39: note = RuvC_P1
  SITE 87: note = RuvC_P2
  SITE 127: note = RuvC_P3
  SITE 129: note = RuvC_P4
  SITE 132: note = RuvC_P5
  REGION 297..381: note = Tnp_domain
  SITE 305: note = Tnp_P1
  SITE 334: note = Tnp_P2
  SITE 342: note = Tnp_P3
  SITE 343: note = Tnp_P4
  SITE 355: note = Tnp_P5
MDADICRRPASTHNWLAHKEAGVAVILDQQDVDVFIGLDVGKSGHHAVALDKSGKKLFDKAMPNDEARLRQILADLSGHGKILLVVDQPATVGALPVAIAQATGAAVGYLPGLAMRRIADLHPGESKTDARDAAIIAEAARSMPHTLRSIALADETLAELGVLCGFDDDLAAQITATSNRIRGLLTQIHPALERALGPHLDHPAVADLLTRYPTPAALKAAGRGQVKARLKKHAPRAAERLTDAVFTALAEQTVVVTGTGAAGIVLPKLAEQLLSLRRQRDEIAAQVEALVEAHPLHQVLTSMPGIGVRTCARILTEVACKEFASAAHLASYAGIAPVTRRSGTSIRGEHTSRRGNKKLKRALFLSAFAALHHPPSRAYYDRKRAEGKRHNQALIALARRRSDVLFAMLRDGTLYQDPEPGKLPSTA

SEQ ID NO: 17658 - protein, 388 aa, unidentified
  source 1..388: note = protein_ed81963
  REGION 4..160: note = RuvC_domain
  SITE 7: note = RuvC_P1
  SITE 58: note = RuvC_P2
  SITE 98: note = RuvC_P3
  SITE 100: note = RuvC_P4
  SITE 103: note = RuvC_P5
  REGION 264..351: note = Tnp_domain
  SITE 272: note = Tnp_P1
  SITE 302: note = Tnp_P2
  SITE 310: note = Tnp_P3
  SITE 311: note = Tnp_P4
  SITE 324: note = Tnp_P5
MIYVGVDIAKLNHFASAVSSEGDILIEPFKFTNDNDGFQLLISKLESLDKDSIIIGLESTAHYGDNLVRYLVASNYKVCVLNPIKTSTMRKNNIRKTKTDKVDTYIICKTLMMQDSLRFVSFYDLDLMDLKALGRFRQKTIKQRTRLKIQLTSYVDEVFPELQYFFKSGLHQKSVYALLAEAPTPEAVASMHMTHLAHLLKANSHGHFDKETAQQLRVLAKKSVGASDSALSIQITHTIAQIELLDSQLDRVESEMTEIMKYNDSVIMTIPGIGYINGGMILGEIGDVHRFSNPSKLLAYAGLDPSVYQSGNFQASKTRMSKRGSKTLRYALINAAHNVVKNNATFKTYYDKKMAEGRSHYNALGHCAGKLVRIVWKMLTDELTFSLE

SEQ ID NO: 17659 - protein, 346 aa, unidentified
  source 1..346: note = protein_ba5f4f4
  REGION 6..147: note = RuvC_domain
  SITE 9: note = RuvC_P1
  SITE 52: note = RuvC_P2
  SITE 87: note = RuvC_P3
  SITE 89: note = RuvC_P4
  SITE 92: note = RuvC_P5
  REGION 211..297: note = Tnp_domain
  SITE 219: note = Tnp_P1
  SITE 249: note = Tnp_P2
  SITE 257: note = Tnp_P3
  SITE 258: note = Tnp_P4
  SITE 270: note = Tnp_P5
MKVTTLGIDLAKNVFQLHGVNAYGKTILKKQLKREQMAAFFVNLPPCLIGMEACGSAHYWARKLQDLGHTVKLMAPQFVKPYVKSNKNDAADAEAICEAVARPNMRFVPIKSVEQQSVLALHTVRQSFVKARTAQANQIRGLLAEVGLIIPQGIGHIARRVPELLEDASNELPGTFRLLIQRLLDHLKVLDTQVDELETQIVKWHRSSALSSKLAGVPGIGPITASALVATIGDAKNFDNGRQVSAWLGLVPRQHSSGGKQNLLGISKRGDTYLRTLLIHGARSVIHWQSKRAETDACSWVAGVLARRNKNVAAVALANKNARIVWALMAYDREFRSDYVAARATP

SEQ ID NO: 17660 - protein, 334 aa, unidentified
  source 1..334: note = protein_96a9d6d
  REGION 7..149: note = RuvC_domain
  SITE 10: note = RuvC_P1
  SITE 53: note = RuvC_P2
  SITE 88: note = RuvC_P3
  SITE 90: note = RuvC_P4
  SITE 93: note = RuvC_P5
  REGION 209..296: note = Tnp_domain
  SITE 217: note = Tnp_P1
  SITE 247: note = Tnp_P2
  SITE 255: note = Tnp_P3
  SITE 256: note = Tnp_P4
  SITE 268: note = Tnp_P5
MKNVTLIGIDLGKHSFHVHCQDEMGNALLRKKFTRTRLMEFLASCQSATVVMEACAGAHFMARRIADLGHEAKLISPQFVRPFVKSNKNDFVDAEAICEAASRPSMRFVSPRTEDQQAMSALHRVRDSLIRQRVKTTNQMHAFLLEFGISMPRGIAVIRRLAAVLEENDFPPYLVRVLNRLHSQYIYLCGEIDEIDMELKTHLAEDETAQRLLTIPGVGPVTASLLAARLGDGKNYASSRDFAASTGLVPRQYSTGGKTTLMGISKRGDKNLRRLLVQCARVFMLRLENNPGRLAEWVKKQLASHHSNVVACALANKLARIAWAVTAHQAAFSK

SEQ ID NO: 17661 - protein, 341 aa, unidentified
  source 1..341: note = protein_b20b15d
  REGION 7..149: note = RuvC_domain
  SITE 10: note = RuvC_P1
  SITE 53: note = RuvC_P2
  SITE 88: note = RuvC_P3
  SITE 90: note = RuvC_P4
  SITE 93: note = RuvC_P5
  REGION 212..298: note = Tnp_domain
  SITE 220: note = Tnp_P1
  SITE 250: note = Tnp_P2
  SITE 258: note = Tnp_P3
  SITE 259: note = Tnp_P4
  SITE 271: note = Tnp_P5
MSLIKAIGIDLAKSVFSIHGVDSHDKCQLRKTVKRNKLLAEVAKLPACIIGMEACSGAHYWAREFTKLGHEVRIMASKFVIPYRQNEKNDANDAEAICEAVSRPKTRFVTIKSDEQQAVLCLHRIRQGAIKDRTALINRLRGLLAEFGIVMPKGRYPAQHAISGILEDGENNLPMLARELLSDLWQDIKALNQQILKHDRKLYQLANQMNAARRLMTIPGVGEITATAVVATVSDAKDFDTSRAFSAWIGLVPRQYTTGGQVKLGRISKRGEKHIRTSLIHGARAVMANCKNKTDRTSLWVKDLIERRGFKRATVALAAKNARLIWALLRSKNEYQIDYVK

SEQ ID NO: 17662 - protein, 390 aa, unidentified
  source 1..390: note = protein_bd88477
  REGION 4..163: note = RuvC_domain
  SITE 7: note = RuvC_P1
  SITE 60: note = RuvC_P2
  SITE 101: note = RuvC_P3
  SITE 103: note = RuvC_P4
  SITE 106: note = RuvC_P5
  REGION 268..353: note = Tnp_domain
  SITE 274: note = Tnp_P1
  SITE 304: note = Tnp_P2
  SITE 312: note = Tnp_P3
  SITE 313: note = Tnp_P4
  SITE 326: note = Tnp_P5
MIYVGIDVAKDKHDCCILGSNGEILFSPFTIQNTLQGFDELYEKILSLTSDSTEIKVGLEATGHFHLNLLRSLLDNGLPSFVINPLHTNLFRKGQSLRKTKTDKVDAASIAMMLLTDRTLKPYSNTSYHTEELKSLTRYRFDKVHERARLKTSVSRLVSILFPELEKLVPTLHMASVYALLSEFPGASFIASAHLTRLKHLLQDASKGHYGRDMAVSIRDAASASIGSVLPAKSLELKHTIRLIEILTEEIDEIEVAINAIMDAIEPPIITIPGIRNRMGAMILAEIGDFSRFDSPDQILAYAGLSPTTYQSGQLTSSYAHMEKRGSRYLRYALFNATQYVCIWDPTFKAYLAKKRAEGKHYFVAVSHACKKLVRVIYKIQLTGEPYRAV

SEQ ID NO: 17663 - protein, 371 aa, unidentified
  source 1..371: note = protein_8bbe91d
  REGION 58..170: note = RuvC_domain
  SITE 74: note = RuvC_P2
  SITE 109: note = RuvC_P3
  SITE 111: note = RuvC_P4
  SITE 114: note = RuvC_P5
  REGION 237..324: note = Tnp_domain
  SITE 245: note = Tnp_P1
  SITE 275: note = Tnp_P2
  SITE 283: note = Tnp_P3
  SITE 284: note = Tnp_P4
  SITE 296: note = Tnp_P5
MPRWSLWKRHRKGAVREQVYHRFFIRHPRRARSGKACVSGSRDAAGAVVIAKAVRRGKLLEFFTALPRCVVAMEACSTAHHWGRALSALGFNVRLIPPAHVKPYVRRNKNDAADAAAICEAAGRPGQRFVGVRSIDNQAQLMRHRTREMLVGQRTQLFNALRGHLAEIGVIAPQGPQHAYGLKELLTDGADENGEIVVPEGVRAALVPLGHLIDELDARIAAIDKELKKQAKADATARRLMSIPGVGPIIASAVLASVQEIGAFGSAREFAAFLGLTPRQNSSGGKERLGRITKMGDRYLRKLLVSGACSVLFRRKGHNDALRHWADQLLTRKSGATKFKLVAVALANKLARIIFAVLTRGGKYEPWAVAA

SEQ ID NO: 17664 - protein, 331 aa, unidentified
  source 1..331: note = protein_b9cf331
  REGION 5..150: note = RuvC_domain
  SITE 8: note = RuvC_P1
  SITE 55: note = RuvC_P2
  SITE 95: note = RuvC_P3
  SITE 97: note = RuvC_P4
  SITE 100: note = RuvC_P5
  REGION 197..283: note = Tnp_domain
  SITE 204: note = Tnp_P1
  SITE 234: note = Tnp_P2
  SITE 242: note = Tnp_P3
  SITE 243: note = Tnp_P4
  SITE 256: note = Tnp_P5
MQCVVGIDVAARSFDLTVRKDGKCRKAQTYEQTPQGHRQAIKRLRSLQPARIVMEATGVYYLDLAMALHEAALPVCVINPRSFRHFADIKLSASKTDGIDSALLAEYAERMEPARWSPPPHLHLELRDLGRQINRLVHARTQAKNRLHALGAKNGTPRMVIEDEQEGIAHLDRRIERLRQAAREVIAQSETLSEPFDCLMAANGVGEASAVAILAELCVLPEGLKAPQVVSHAGLDVRLNQSGSSVNRPGRLSKAGNTYLRAALFMPAMVAIRHEPRARAFFEALIERGKKKIQAVCAVMRKYLTGIWACVKNRTRFDPTLLFSDKHAAAG

SEQ ID NO: 17665 - protein, 331 aa, unidentified
  source 1..331: note = protein_01874bf
  REGION 18..172: note = RuvC_domain
  SITE 21: note = RuvC_P1
  SITE 65: note = RuvC_P2
  SITE 105: note = RuvC_P3
  SITE 107: note = RuvC_P4
  SITE 110: note = RuvC_P5
  REGION 204..288: note = Tnp_domain
  SITE 212: note = Tnp_P1
  SITE 241: note = Tnp_P2
  SITE 249: note = Tnp_P3
  SITE 250: note = Tnp_P4
  SITE 261: note = Tnp_P5
MTNAAREATADARPLDYIGVDMAKARFEWGVHGTRPSHSATNDAAGFESLLADLRGRHVGLIVIEATGGLEHALASLLLQLGLPVAVVNPRAAREFARSMGHLAKTDAIDALALAHYAHTLAHKANQAGVRLAPVPAQLEALQLMVLRRKQLTDMRTAEINRRGGAMRVLRQSIDAVIKTLNEQLDALDKDIGAHLDEHFKELDQRFESIKGVGPNTCAAVIAFMPELGQISNARAAKLAGLAPLNNDSGNWHGKRSIWGGRKLVRCALYMATLSAVRFNPVIKVFYQRLLAAGKPKKAALIACSHKLLRILNAMARSGQAWNQELHGLSA

SEQ ID NO: 17666 - protein, 277 aa, unidentified
  source 1..277: note = protein_36f1a89
  REGION 1..81: note = RuvC_domain
  SITE 21: note = RuvC_P3
  SITE 23: note = RuvC_P4
  SITE 26: note = RuvC_P5
  REGION 146..231: note = Tnp_domain
  SITE 154: note = Tnp_P1
  SITE 184: note = Tnp_P2
  SITE 192: note = Tnp_P3
  SITE 193: note = Tnp_P4
  SITE 205: note = Tnp_P5
MGHEVRLIPPAYVKPYVKRHKNDAVDAEAICEAAQRPSMRFVAVKTEQQQAAALVFRTRDLAVKQRTQLGNAIRGHLAEYGWVAPKGTAHLAMLADLLEGGEIGETLPEAARPMFAMMVDMLAGLDERIAALDKEIARRAREDEVARRLMTIPGIGPITATAIAAIAPPAETFAKGRDFAAWLGLVPKQASTGGKQKLGAISKMGERTLRRLLIIGSSAVVLQASKRGAPAGSWLEGMLARKPRMLVTVALANKMARTAWALRVRQEDYRAPVAVAA

SEQ ID NO: 17667 - protein, 423 aa, unidentified
  source 1..423: note = protein_5c0cf66
  REGION 4..172: note = RuvC_domain
  SITE 7: note = RuvC_P1
  SITE 69: note = RuvC_P2
  SITE 109: note = RuvC_P3
  SITE 111: note = RuvC_P4
  SITE 114: note = RuvC_P5
  REGION 285..371: note = Tnp_domain
  SITE 293: note = Tnp_P1
  SITE 324: note = Tnp_P2
  SITE 332: note = Tnp_P3
  SITE 333: note = Tnp_P4
MLFIGDDWAEDHHDIEVVDPDGHRLARRRLPEGVNGIATLHAIVAQHLAQPDGDGAGAGALDASQVVIGIETDRGPWVQALIAAGYQVYAINPLQAARYRERHTTSGAKSDPGDAHALAELVRLDRAHHRPVAGDSALAQAVKVLTRAHQSMIWSRQQHVNTLRSTLREFYPGALAAFSEEGEGLVGIEAAAVLAAAPTPTAGRALTQTKIEELLRSAGRQRYVAVCALRIHTGLRSPQLPAREGLEVAYGASVSALVAVITELTRQISALAEQVNAHFGQHPDAEIYLSQPGLGPVLAPRVLAEFGDDPHRYATVKSRRNYAGTSPITRASGKSRAVLARHVRNKHLADALYGQALSALTASPGARAYYDERRAKGATHHQGLRALGNRLVGIQQGCLRHHQLYDENTAWVSNRPDQQPAAA

SEQ ID NO: 17668 - protein, 354 aa, unidentified
  source 1..354: note = protein_0481207
  REGION 12..152: note = RuvC_domain
  SITE 15: note = RuvC_P1
  SITE 58: note = RuvC_P2
  SITE 93: note = RuvC_P3
  SITE 95: note = RuvC_P4
  SITE 98: note = RuvC_P5
  REGION 217..302: note = Tnp_domain
  SITE 225: note = Tnp_P1
  SITE 255: note = Tnp_P2
  SITE 263: note = Tnp_P3
  SITE 264: note = Tnp_P4
  SITE 276: note = Tnp_P5
MSQTLNTAIAVVGIDIGKNAFHVVGHDHRGAIVLRQKWSRGQVEARFANRSPCLIGMEACVGAHHLGRKLKALGHDARLMPAKYVRPYSKGQKNDFRDAEAIAEAVQRPTIKFVTTKTADQLDPQALHRVRARLVSRRAGIVNQIRAFLLERGVAVRQGLRFLRAELPRILAAPCDVLSPRLVRVIEDLAGDWRRLDERIEGLSSGIEAFARQDAGCERLMSVPGIGPIISSAMVAAIGTGDGFSKGRDFAAWLGLVPRQMSTGDRTILGKISKRGNRYLRVLFVQAAWAVLIKPQSWERHGLKPWIEAARKRLHHNVLAIALANKLARIAWSVLAHGRDFEARTLTGATVQTA

SEQ ID NO: 17669 - protein, 268 aa, unidentified
  source 1..268: note = protein_f7efa83
  REGION 1..76: note = RuvC_domain
  SITE 15: note = RuvC_P3
  SITE 17: note = RuvC_P4
  SITE 20: note = RuvC_P5
  REGION 139..230: note = Tnp_domain
  SITE 147: note = Tnp_P1
  SITE 177: note = Tnp_P2
  SITE 185: note = Tnp_P3
  SITE 186: note = Tnp_P4
  SITE 198: note = Tnp_P5
MIPPAYVKPYVKRQKNDVADAEAICEAVTRPTMRFVPVKSAQRQGVMMLHRTRDLLMRQRTMVLNAIRGHLAEFGIITAQGPHKLAALLEAMRDEEMPGLPDIARSALSSLMAQLDNLAAEIRALERRLMAWHREDETSQRLETIPGVGLITATALSASIPDPSVFKSGRQFAAFLGLVPRQNSSGGKDRLGCISKMGDGYLRRLLVVGATSVIRRVGTNTSATGNWVRRLLERKPARVATVAMANKTARIAWAVLARGETYRAPAMV

SEQ ID NO: 17670 - protein, 413 aa, unidentified
  source 1..413: note = protein_bba2685
  REGION 14..166: note = RuvC_domain
  SITE 17: note = RuvC_P1
  SITE 65: note = RuvC_P2
  SITE 103: note = RuvC_P3
  SITE 105: note = RuvC_P4
  SITE 108: note = RuvC_P5
  REGION 273..359: note = Tnp_domain
  SITE 281: note = Tnp_P1
  SITE 312: note = Tnp_P2
  SITE 320: note = Tnp_P3
  SITE 321: note = Tnp_P4
  SITE 332: note = Tnp_P5
MSVTSIQPTTRVCAGVDWAKDDHVVCIVDTDGDVIDRFTITHTAAGLKRLVARLLKSEVDEVGIERPDGPVVEALLAAELTVLVISPNQVKNLRSRYGSAGNKDDRFDAYVLADVVRTDRRRLTPLTRSTPATQALRSTVRARRDLVEHRVAAANQLRAHLQVVFPGSVDLFAALDSAISLSFLERFPTQAKADWLTVDRLAVWLKKIGYSGRTDPAVLHARLLAAPRGTTGDEATVHASTTLAFATLLRTLNTQIAALADTIAEQLHVHPDAHIVTSLPRSGTLRAARLLAEIGDARGRFPTADSLACLAGVAPSTRQSGKVKAVTFRWGCDKELRGALTDFADGSRHANPWAADLYNRARARNHDHPHAVRILARAWTDILWRCWQDGVTYDPDQYNALQRVLNEHAPQAA

SEQ ID NO: 17671 - protein, 409 aa, unidentified
  source 1..409: note = protein_d7b13cb
  REGION 4..167: note = RuvC_domain
  SITE 7: note = RuvC_P1
  SITE 64: note = RuvC_P2
  SITE 104: note = RuvC_P3
  SITE 106: note = RuvC_P4
  SITE 109: note = RuvC_P5
  REGION 275..361: note = Tnp_domain
  SITE 283: note = Tnp_P1
  SITE 314: note = Tnp_P2
  SITE 322: note = Tnp_P3
  SITE 323: note = Tnp_P4
MLFIGDDWAEDHHDVELVDDEGLVLARRRLVEGIAGLHALVADHLPEDWTELEPEQVQALVKVGIETDRGPWVAALVAAGYGVFAINPLSVARYRERHSTSGAKSDAGDAHVLAEIVRLDRAHHRPLAGDSEEAEAIKLVARTHQSLIWERSRHVLRLRSALRDFFPAALEAFADLDAPEALELLAAAPDPERARRLTRRRIVAALRHAHRRNVEVRATEIVQILGAEQLHRSAPVQSAYAAIVASQVAIIETLNTQVDQMAAVVDAHFGQHPDAEIYTSQPGLGVVLAARVLGEFGDDPHRYTDAKARKNDAGTSPITKASGKKKIVLARYARNRRLGDALQQWAFCSLRGSPGARAYYQQLRARGTGHQAALRQLANRLVGILHGCLKTHTTYDEHTAWRHHITSAA

SEQ ID NO: 17672 - protein, 408 aa, unidentified
  source 1..408: note = protein_c766ada
  REGION 4..165: note = RuvC_domain
  SITE 7: note = RuvC_P1
  SITE 62: note = RuvC_P2
  SITE 102: note = RuvC_P3
  SITE 104: note = RuvC_P4
  SITE 107: note = RuvC_P5
  REGION 273..359: note = Tnp_domain
  SITE 281: note = Tnp_P1
  SITE 312: note = Tnp_P2
  SITE 320: note = Tnp_P3
  SITE 321: note = Tnp_P4
MLFIGDDWAEDHHDVELMDAAGKRLARARLPEGVAGMARLHAMIGEQLGDDADELADQVLIGIETDRGPWVQALIAAGYRVFAVNPLQASEYRKRHSVSGAKSDAADAHVLADMVRTDAHQLRTVAGDSARAAAIKVVARAHKTLIWERTRHTQRLRHALRDYFPAALEAFDDLAAADTLVLLTRAPDPFSAARLTTAQVSAALKQVRRRGIAGKAAAIVAALRAEHLGQPEAVTAAYAATVRALAAVLTALNEQIKTLEGQVEAHFGEHPAAEIILSQPGLGPILGARVLAEFGDAPKRYASAKARKNYAGTSPITRASGKKKVVLARFIHNDRLVDALGAQAFAALNASPGARAYYDRQRAREMSHNAALRQLANRLVSILHGCLRTGTLYSETTAWSHRPEPLTA

SEQ ID NO: 17673 - protein, 339 aa, unidentified
  source 1..339: note = protein_032d267
  REGION 6..147: note = RuvC_domain
  SITE 9: note = RuvC_P1
  SITE 52: note = RuvC_P2
  SITE 87: note = RuvC_P3
  SITE 89: note = RuvC_P4
  SITE 92: note = RuvC_P5
  REGION 211..296: note = Tnp_domain
  SITE 219: note = Tnp_P1
  SITE 249: note = Tnp_P2
  SITE 257: note = Tnp_P3
  SITE 258: note = Tnp_P4
  SITE 270: note = Tnp_P5
MKITTIGLDVAKQVFQVHGVDDGGVVVVRKRLRRSQVLSFFARLAPCLVGMEACSTSHHWARELRTLGHEVRLMPPQYVRAYVKRNKNDSADAEAICEAVTRPSMRFVPVKTVDQQAVLVMHRARDLLVRQRTMLINALRAHMAEFGVITAQGTNKIINLEAVLLDETEERIPEMARGVLIVLVGQLTDLNRRIADIERRIRCWHAQDETSRRLATIPGIGPITASALAATVPDPSVFRNGREFAAWLGLVPRQNSSGGKDRLGGISKRGDGYLRRLLIVGAQAVLRWSKVKHSDPWVIGLLARKPRLVAAVAVANKMARIAWVIMSRMTSYQPSAARR

SEQ ID NO: 17674 - protein, 341 aa, unidentified
  source 1..341: note = protein_61de506
  REGION 7..149: note = RuvC_domain
  SITE 10: note = RuvC_P1
  SITE 53: note = RuvC_P2
  SITE 88: note = RuvC_P3
  SITE 90: note = RuvC_P4
  SITE 93: note = RuvC_P5
  REGION 212..298: note = Tnp_domain
  SITE 220: note = Tnp_P1
  SITE 250: note = Tnp_P2
  SITE 258: note = Tnp_P3
  SITE 259: note = Tnp_P4
  SITE 271: note = Tnp_P5
MNNISVLGLDLAKNSFQAAILNGHGKQVRQRTLRRQQVLEYLMNADVDVIAMEACSGAHHLARTLQAAGRTVQLLPSQHVKGYLRGQKNDRNDALAIAEACQHGRIRPVQVKTQDHQDDQAFHRIRNRLKQDQTSLINQMRGLLSEYGLVIAQGVASFRKEIPWILENAENGLSPRFRELLDRRYQHLLALQEELDWFDQCLNEQVKQNPVCQKLMALPGVGPVVSSQLACWMGNGRQFTRGRDASAALGVVPRQYSTGGRESLYGITKRGDPNLRAAMVHGCRAVVAAAVKKGKDDHLSQWIQSIVARRGFNKAVVALVNKLVRVAWVIVARGESYRPAG

SEQ ID NO: 17675 - protein, 325 aa, unidentified
  source 1..325: note = protein_8053fef
  REGION 6..147: note = RuvC_domain
  SITE 9: note = RuvC_P1
  SITE 54: note = RuvC_P2
  SITE 92: note = RuvC_P3
  SITE 94: note = RuvC_P4
  SITE 97: note = RuvC_P5
  REGION 197..284: note = Tnp_domain
  SITE 205: note = Tnp_P1
  SITE 235: note = Tnp_P2
  SITE 243: note = Tnp_P3
  SITE 244: note = Tnp_P4
  SITE 257: note = Tnp_P5
MNQVFIGIDVSAATLDICIKVNDSLSFVVIKNQIKDIKKFLQPYQDQNVKIAMENTGRYNWAFYEALSGFEFTTYVISPLHLKKSLGLVRGKNDKIDAERIVSFLIKNHLDLRPWVCPSTTIQKLKIWITERNHRIKSKRQLSTMNKDYPKMKGLGIDKSLKMMNKKLIASLDAQIMAIEKEITLLLKVDSEIQKQVELIGSVPGVGKVLSWEIIAKTNGFTTIKTPREMACYCGVAPFEYQSGTSIYRKPAVSHLADKTIKSLLHLGAMSAIRLKNDLGEYYRRKVAEGKNKMSVINAVRNKIIHRIYAVLKNQTIYQNNLVLS

SEQ ID NO: 17676 - protein, 345 aa, unidentified
  source 1..345: note = protein_1b06edb
  REGION 6..148: note = RuvC_domain
  SITE 9: note = RuvC_P1
  SITE 52: note = RuvC_P2
  SITE 87: note = RuvC_P3
  SITE 89: note = RuvC_P4
  SITE 92: note = RuvC_P5
  REGION 211..297: note = Tnp_domain
  SITE 219: note = Tnp_P1
  SITE 249: note = Tnp_P2
  SITE 257: note = Tnp_P3
  SITE 258: note = Tnp_P4
  SITE 270: note = Tnp_P5
MNITTVGIDLAKNVFQVHGVDERGKASLKKQLKRAQLLPFFANLPSCLIGMEACGSAHYWARKLKEHGHTVKLMAPQFIKPYVKTNKNDVADAEAICEAVSRPNMRFVPIKEGEQQAVLGLHRARQGFVKARTAQANQIRGLLAEYGIVIPKGIGYIARRLPEILEDGDNELPDAFRQLIERLGTHLKELDRQVDELDAQIQVWHRGNDASKKLEKIPGIGPITASALVASIGDAKNFENGRQLAAWLGLVPRQNSSGGKQTLLGISKRGDTYLRTLLIHGARAVIRVSEHRLEQANGWPTRIVDRRNKNIATVALANKNARIVWALLAHESEFQPDYSVAAVAV

SEQ ID NO: 17677 - protein, 344 aa, unidentified
  source 1..344: note = protein_2a2096a
  REGION 6..147: note = RuvC_domain
  SITE 9: note = RuvC_P1
  SITE 52: note = RuvC_P2
  SITE 87: note = RuvC_P3
  SITE 89: note = RuvC_P4
  SITE 92: note = RuvC_P5
  REGION 211..297: note = Tnp_domain
  SITE 219: note = Tnp_P1
  SITE 249: note = Tnp_P2
  SITE 257: note = Tnp_P3
  SITE 258: note = Tnp_P4
  SITE 270: note = Tnp_P5
MQITTIGIDLAKNVFQVHGANEHGKPVLRKQLKRDQFIAFFANLSPCLIGMEACGGAHHWARKLQALGHTVKLMAPQFVKPYVKSNKNDVADAEAICEAVTRPTMRFVPIKNIEQQSVLALHRARQGFVKARTAQANQIRGMLAEFGLVMPQGIGYIASRVPELIEDASLQLTGGFRLLIDRLLDHLKVLHTQVDELEAQIKAWHKNSDVSKRLEKVPGIGPLTATAIAATVGDAKNFDNGRQLAAWLGLVPRQSSSGGKATLLGMSKRGDAYLRTLLIHGARSVIYRANQRADAQSWLFKLITRRNVNVAAVALANKTARIVWAMLVNGREYDDAYKAAGAAA

SEQ ID NO: 17678 - protein, 340 aa, unidentified
  source 1..340: note = protein_e4e55d6
  REGION 6..148: note = RuvC_domain
  SITE 9: note = RuvC_P1
  SITE 52: note = RuvC_P2
  SITE 87: note = RuvC_P3
  SITE 89: note = RuvC_P4
  SITE 92: note = RuvC_P5
  REGION 210..296: note = Tnp_domain
  SITE 218: note = Tnp_P1
  SITE 248: note = Tnp_P2
  SITE 256: note = Tnp_P3
  SITE 257: note = Tnp_P4
  SITE 269: note = Tnp_P5
MKIATIGLDIAKSVFQVHGVDADGGVALRRKLRRDQVLKLFGSLEPCLVGLEACATAHHWARQILALGHDVRLMPPGYVKPYVKRNKNDAADAEAICEAVTRPTMRFVPIKSAEGQSVVMLHRARHLLVRQRTAQVTALRAHLAEYGIVAAKGRERARDLWTVLERGSDALPELARRTLVLIARMIEALSEQVRAIEIELQAWHRAHPASQRLEGVPGIGLITATALAATVSDARAFRSGRQFAAWLGLTPRQHSSGGKQRLGGISKKGDRYLRQLLVVGATAVVRFAGRRTNDLSLWANRLLERKPARLVTVAVANKMARIAWAVMARGEAYRPMPSAG

SEQ ID NO: 17679 - protein, 330 aa, unidentified
  source 1..330: note = protein_8506cc8
  REGION 8..159: note = RuvC_domain
  SITE 11: note = RuvC_P1
  SITE 59: note = RuvC_P2
  SITE 97: note = RuvC_P3
  SITE 99: note = RuvC_P4
  SITE 102: note = RuvC_P5
  REGION 202..289: note = Tnp_domain
  SITE 210: note = Tnp_P1
  SITE 240: note = Tnp_P2
  SITE 248: note = Tnp_P3
  SITE 249: note = Tnp_P4
  SITE 262: note = Tnp_P5
MQKTSFTLGVDVSINTLDVYCLEVQKHERIFNNSSGFKAFSSFCRQNEIDLKDAIVVLEYTGGYEYKLLQYCQSKNISFVRIPGLAIKRSLGIVRGKNDKVDAARIAQYGDEKYKALSPEKPLNASISKLKELLGFRKKLIRENASYKATIKERKHMYEVGNDNFIIKSLSKKLKVNEKEIESTEQQIEAVVQADYEVYKNYLLIKSIRGIGKVNAWMTIAYTENFSSFKNARSYAVYVGVIPFDYQSGTSIRGKKRVSRIANKELKQELNQAARSAIQWDKEMREYATRKLRDKAYGIVLNNVKFKLILRMFAIVKRGENYVDNYTIAA

SEQ ID NO: 17680 - protein, 342 aa, unidentified
  source 1..342: note = protein_5193fa5
  REGION 5..152: note = RuvC_domain
  SITE 8: note = RuvC_P1
  SITE 55: note = RuvC_P2
  SITE 92: note = RuvC_P3
  SITE 94: note = RuvC_P4
  SITE 97: note = RuvC_P5
  REGION 212..302: note = Tnp_domain
  SITE 220: note = Tnp_P1
  SITE 250: note = Tnp_P2
  SITE 258: note = Tnp_P3
  SITE 259: note = Tnp_P4
  SITE 271: note = Tnp_P5
MDHYAGIDVSLECSSVCVVDASGKIVREGKVASEPAALIAWFGSLGWSIERIGLEAGPLSQWLHAAMREAGLAVELLETRHVRDAFKAMPVKSDRNDARGIAQLMRLGWFRPVHCKSIGAQETRAVLTARKLVQSKLFDVENSLRGILRGFGLKVGETTAQRFAGRIRQLVAGYPSLAMIAEALLSIHAALLREFKAFEKQVRSMARADAKAKLLMSAPAVGPIVALTYASAIDDPRRFKSSKRVGAHFGLTPKKYQSGETDYTGRISKIGDAAVRTALFEAAHIMLVKPIKGCSQLKSWAMRIARRSGMKKAKVALARKLAVILHRLLANGTPFNAAAAAA

SEQ ID NO: 17681 - protein, 353 aa, unidentified
  source 1..353: note = protein_13e1e2d
  REGION 19..161: note = RuvC_domain
  SITE 22: note = RuvC_P1
  SITE 65: note = RuvC_P2
  SITE 100: note = RuvC_P3
  SITE 102: note = RuvC_P4
  SITE 105: note = RuvC_P5
  REGION 224..310: note = Tnp_domain
  SITE 232: note = Tnp_P1
  SITE 262: note = Tnp_P2
  SITE 270: note = Tnp_P3
  SITE 271: note = Tnp_P4
  SITE 283: note = Tnp_P5
MWLSKSHKGEPSTEKITTIGLDIAKHVFQVHGINGAGATVSRRRLRRDDVVGFFKALPPCLIGIDACATGHHWARVLMALGHEVRLMPASYVKPYVKRQKNDATDAEAICEAVTRPTMRFVPVKSEEQQGVLMLHRVRELLIRQRTMLVNALRGHLAEFGIVTRQGIAGVGMLIALVDDDDHDLIPPLARSALLPLIGQLRELHEKISELDRQIHAWHRSNELSRRLETIPGIGPITASAIAATVTDASLFKSGRQLAAWIGLVPRQNSSGGKDRLGRISKQGDPYLRRLLVVGAHAVLRFSGKAKVAPTRWAAELLVKKPCNVVAVALANKMARIVWALMTTGRRFEATAAL

SEQ ID NO: 17682 - protein, 412 aa, unidentified
  source 1..412: note = protein_d8bf733
  REGION 4..170: note = RuvC_domain
  SITE 7: note = RuvC_P1
  SITE 67: note = RuvC_P2
  SITE 107: note = RuvC_P3
  SITE 109: note = RuvC_P4
  SITE 112: note = RuvC_P5
  REGION 278..364: note = Tnp_domain
  SITE 286: note = Tnp_P1
  SITE 317: note = Tnp_P2
  SITE 325: note = Tnp_P3
  SITE 326: note = Tnp_P4
MLFIGDDWAEDHHDVELVDDQGRILVRRRLPEGLGGVTRLHALVAEHAPQEWADLDPAEAAAQVVVGIETDRGPWVGALVAAGYTVYGLNPMSVARYRERHSTSGAKSDTADAHLLAEIVRLDRAHHRQVAGDSPTGEAVKVSARAHQSMIWDRTRHVLRLRAALRDFFPAALTALGDLDEPDTLALLAQAPDPDTAARLSKAKIVRALTAANRRDVPARADKIRQVLTAPELRQPGPVQDAYAAIVTSEVALITVLNAQIERLGQVVAEHFGRHRDADIYTSLPGLGVILGARILGEFGDDRHRYADAKGRKAYAGTAPITRASGTRKVVLARYARNRRLGDALQQWAFCSMRGSAGARSYYQALRSRGVGHQAALRQLANRWVGILHGCLRHGTLYDENTAWEHHLDNAA

SEQ ID NO: 17683 - protein, 400 aa, unidentified
  source 1..400: note = protein_9e7f9dd
  REGION 7..163: note = RuvC_domain
  SITE 10: note = RuvC_P1
  SITE 61: note = RuvC_P2
  SITE 101: note = RuvC_P3
  SITE 103: note = RuvC_P4
  SITE 106: note = RuvC_P5
  REGION 269..356: note = Tnp_domain
  SITE 277: note = Tnp_P1
  SITE 308: note = Tnp_P2
  SITE 316: note = Tnp_P3
  SITE 317: note = Tnp_P4
  SITE 329: note = Tnp_P5
MRQQLWAGVDAGKSDHYCVVIDTDGQRLLSQRVANDEAVLVELIDEVMALADGGEVTWAIDLNAGGAALLITLLVTSEQRLLYIPGRTVYHASSGYRGDGKTDAKDAAIIADQARMRRDLQPLRPGDDIAVELRILTARRTDLVADRTRAINRLRAQLLEYFPALERAFDYSTSKAALILLTGYQTPNGLRRAGAARLTAWLAKHKARNASAVATKAIEAANAQHTTVPGQNLAATMVARLAKEVMTLDTEIDATETMIEDRFRRHHHAEIILSMPGFGVILGAEFIAATGGDMSAFDCADRLAGVSGLAPVPRDSGRISGNLKRPRRYNRRLLRACYLSAQIAIRTDIASRTYYDRKRTEGKTHTQAVLALARRRLNVLWAMLRDHRIYQPTAPNAAAA

SEQ ID NO: 17684 - protein, 385 aa, unidentified
  source 1..385: note = protein_bd845e7
  REGION 47..186: note = RuvC_domain
  SITE 80: note = RuvC_P2
  SITE 119: note = RuvC_P3
  SITE 121: note = RuvC_P4
  SITE 124: note = RuvC_P5
  REGION 257..339: note = Tnp_domain
  SITE 264: note = Tnp_P1
  SITE 293: note = Tnp_P2
  SITE 301: note = Tnp_P3
  SITE 302: note = Tnp_P4
  SITE 314: note = Tnp_P5
MQKRHDDSKACLTAFVQDNTVIATIEMSLASWLVAGMIPGVNREPLKKIAPDPEVLLRLLYRWRDEAIKAGKEITRIAVAYETGRDSFWLARWLRDRGIDAQVIHATSVAISREHRRAKTDRIDTAMLRRGFLGWLRGERGHCSMAVVPTIAEEDAKRPHRERESLIKERTSTINRMKSILVQFGVRNFKPTLRKAVEKIDAVRTPEGIPLPPNASAALRRHIERFRLLNEQIKTIEKTRLQRLREHPAGKFNAMVFLLVRIIGLGVETAEQLVHEILSRKLRDRKAVARYAGVTGSPDESGLSRREKGLSRSGNGRVRKILVQLSWRMLQFQPDSGLVRWFKNRTANSQRSRKPMIVALARKLIIALWNYVNTGVAPDGFKLAK

SEQ ID NO: 17685 - protein, 403 aa, unidentified
  source 1..403: note = protein_fe57b48
  REGION 11..166: note = RuvC_domain
  SITE 14: note = RuvC_P1
  SITE 62: note = RuvC_P2
  SITE 102: note = RuvC_P3
  SITE 104: note = RuvC_P4
  SITE 107: note = RuvC_P5
  REGION 273..358: note = Tnp_domain
  SITE 281: note = Tnp_P1
  SITE 311: note = Tnp_P2
  SITE 319: note = Tnp_P3
  SITE 320: note = Tnp_P4
  SITE 332: note = Tnp_P5
MAAPGQVSVWVGLDVGKESHFADVLDNDGERLFSRAVGNDQADIEALLDRASRHGVPGLVIDQPGSIAQLVLAVAAKREVPVAYVPGLVMRRAADLYPGEAKTDRRDAFILADTARTRRKQVHWLDASSDELLAQLRVLNGFDTDLAADQTRITNRLRDSLTSISPVLERALGNRVHQAGVRDLLAAFPTLTALREAGPDKVRAEVARRSPRLASKVAGAVAKALAAQDVTVPAEKAAGRVIAELSGELDRIFTRRDALAKEIEEVFLAHPFGEILASLPGIGPRTGARILAEIGDGSDFASGAKLASYAGLAPVTRQSGTSLNGESRSRRGNHRLKNAMFLAAFASLRDPASKAFYDRKRAEGKRHNAALICLARRRCDVILAMLRNREHYQPDRNRAAKAA

SEQ ID NO: 17686 - protein, 268 aa, unidentified
  source 1..268: note = protein_339bb6f
  REGION 1..97: note = RuvC_domain
  SITE 2: note = RuvC_P2
  SITE 42: note = RuvC_P3
  SITE 44: note = RuvC_P4
  SITE 47: note = RuvC_P5
  REGION 137..224: note = Tnp_domain
  SITE 145: note = Tnp_P1
  SITE 175: note = Tnp_P2
  SITE 183: note = Tnp_P3
  SITE 184: note = Tnp_P4
  SITE 197: note = Tnp_P5
MESTSTYMEDAAAHLSDAGYTVSIINPALSKAFAQSEGLRSKTDKVDARMLAHFCREKRPSAWEAPHPTERALKALVLRHQALTEMQTQEKNRRETAPEVQLASIDILLGCLSAELARIEKQIKDLTDNDPDMKRRRKLLNSIPGIGEKTAAVLLAYTGLRLKFGTARQFAAYAGLTPVQHESGSSVMRASRMSKAGPVQLRKALYMPALSALYHTAWGKAFRKRLEESGKRAKVIIGAMMRKLAQVAYGVLKSGKAFDASQHELLIA

SEQ ID NO: 17687 - protein, 400 aa, unidentified
  source 1..400: note = protein_ad13dca
  REGION 4..160: note = RuvC_domain
  SITE 7: note = RuvC_P1
  SITE 57: note = RuvC_P2
  SITE 97: note = RuvC_P3
  SITE 99: note = RuvC_P4
  SITE 102: note = RuvC_P5
  REGION 275..363: note = Tnp_domain
  SITE 283: note = Tnp_P1
  SITE 313: note = Tnp_P2
  SITE 321: note = Tnp_P3
  SITE 322: note = Tnp_P4
  SITE 335: note = Tnp_P5
MISVGIDVSKEKSTICILKPYGEIVSRPFEVCHTEKELSELTSMLLRLNDDVRVVMEATGIYHLPVLCYLKEKGLFVAVVNPFEMKEYRCQGLRRVKTDKQDAVTISNYGIDHWYRLREYEAEESIYAELKLLGRQYRHYMRMRVESVLELTHLLDYTMPGIKTLLKGWNETNGKDKLGDFAEEYWHYDNITKKSEEQFIESYLKWAKEKGYHQSQDKAVKIYALAKEGIPTVSSDTPSTKMLVQEAVRVLREVDNTLMTILTQMQALAKSLPEYPVVRAMGGVGNVLAPKLIAEIGDVRRFHSGKALIAHAGIDAPPYQSGQFIGTERKISKRGSSSLRKIGYEVMRCLKTHKEPEDAAVYKFILKKEKEGKSKRAAKIAGLNKFLRIYYARVMEVYQK

SEQ ID NO: 17688 - protein, 339 aa, unidentified
  source 1..339: note = protein_1c68ffd
  REGION 6..148: note = RuvC_domain
  SITE 9: note = RuvC_P1
  SITE 52: note = RuvC_P2
  SITE 87: note = RuvC_P3
  SITE 89: note = RuvC_P4
  SITE 92: note = RuvC_P5
  REGION 211..297: note = Tnp_domain
  SITE 219: note = Tnp_P1
  SITE 249: note = Tnp_P2
  SITE 257: note = Tnp_P3
  SITE 258: note = Tnp_P4
  SITE 270: note = Tnp_P5
MKLNVVGVDIAKRVFQVHWVERESGEIVSLQLKRGKFLEHFANREACMIGMEACGGAQHWARELCKLGHQVKLLAAKKVKPFVGGNKSDAADARGIWLAMQEPKLREVAIKTEAQQAVLALHRMREQLVKFRTAQINGLRGLLTEYGEVMPVGRAGFKREIAAVLGRLAERLPGLLMDTLREQLERIGELDKQIVEIERRLKQWHEQDENSQRIARIPGVGVLSATAAVATMGDPKVYRSGRGFSAFLGLVPRQSGTGGKMRLLGISKRGDRYVRTLLIHGARAVLTHSKNPGEWLTNLQRRRAKNVAVVAQANKMARTIWALVAHERNYEFGYVGQSV

SEQ ID NO: 17689 - protein, 340 aa, unidentified
  source 1..340: note = protein_515d1ff
  REGION 4..160: note = RuvC_domain
  SITE 7: note = RuvC_P1
  SITE 57: note = RuvC_P2
  SITE 97: note = RuvC_P3
  SITE 99: note = RuvC_P4
  SITE 102: note = RuvC_P5
  REGION 271..340: note = Tnp_domain
  SITE 279: note = Tnp_P1
  SITE 309: note = Tnp_P2
  SITE 317: note = Tnp_P3
  SITE 318: note = Tnp_P4
  SITE 331: note = Tnp_P5
MISVGIDVSKGKSTVCIMKPCGEILESPFDIGHTADELDSLISLIKSFDEETRVVMEDTGHYHLPVATYLSSHNIFVCCVNALRMKKFCSQSIRRAKTDKIDSIKIASFGITYWNELVKAYPSNVIYDELKFLARQYYQVTGMLVKSKVNFSNLLDQVMPKINDVLSNQGENHKLTEFVSRYIHFQNILDMGEMKFTSDYCKWAKKKGYRLNERKAAEILALAQNGIPTLPNSQSVKIAVSEAVKLIHSIEESRNTILAQMQDLCNTLPEYSVVKEMDCIGDTLAPRIIAEIGDVRRFKNKHSLIAYAGIDAPPYQSGAFHASERHISKRGNSYLRKTGY

SEQ ID NO: 17690 - protein, 343 aa, unidentified
  source 1..343: note = protein_a5a5932
  REGION 7..149: note = RuvC_domain
  SITE 10: note = RuvC_P1
  SITE 53: note = RuvC_P2
  SITE 88: note = RuvC_P3
  SITE 90: note = RuvC_P4
  SITE 93: note = RuvC_P5
  REGION 212..303: note = Tnp_domain
  SITE 220: note = Tnp_P1
  SITE 250: note = Tnp_P2
  SITE 258: note = Tnp_P3
  SITE 259: note = Tnp_P4
  SITE 271: note = Tnp_P5
MQSITTIGLDIAKSVFQVHCVDAKGQVVLRRQLKRRYMLAFFQKLQPCLVGIEACASSHYWSRELQAIGHSVRLMPPAYVKPYVKRQKNDATDAEAICEAVTRPNMRFVATKTPEQQSCLTLHRTRHLLIRQQTSVINAIRAHLAEFGIVAPVGRNGVDQLLGIVADLADKRLPEVARICVAALGTQLRMLKAQILEFDRLIRAWHRSSEASRRLDAIPGVGPALATALVASVADPKAFRSGRDFSAWIGLVPKQASSGGKDKLGSISKQGDRYLRSLFTTGALAVIRYAKIHGTKHRPWLTALLARRPTKVAAIALANKIARMAWAMMARGERYKEPAALAA

SEQ ID NO: 17691 - protein, 347 aa, unidentified
  source 1..347: note = protein_7a5dd7e
  REGION 6..147: note = RuvC_domain
  SITE 9: note = RuvC_P1
  SITE 52: note = RuvC_P2
  SITE 87: note = RuvC_P3
  SITE 89: note = RuvC_P4
  SITE 92: note = RuvC_P5
  REGION 211..298: note = Tnp_domain
  SITE 219: note = Tnp_P1
  SITE 249: note = Tnp_P2
  SITE 257: note = Tnp_P3
  SITE 258: note = Tnp_P4
  SITE 270: note = Tnp_P5
MKVTTVGIDLAKNVFQLHGVNEAGRPVIKKQLRRDQVAAFFINLPLCLIGMEACGSAHYWARKLEGFGHTVKLISPQFVKPYVKTNKNDAADAEAICEAVARPNMRFVPIKNIEQQSVLSLHRVRQGFVKARTAQANQIRGLLSEFGLIIPQGIGHIANRVPELIEDASNELPGSFRLLVQRLLNHLKELDTQVDELESQIVRWHRQSAASNKLAQVPGIGPITASALVASLGDAKNFDSGRQVAAWLGLVPKQHSSGGKQNLLGMSKRGDSYLRTLLIHGARSAIYHAGQKTDQNQTCKWINAIVIRRNKNVAAVALANKNARIVWALLTHDREFRPDYTRHTVGV

SEQ ID NO: 17692 - protein, 343 aa, unidentified
  source 1..343: note = protein_6b60848
  REGION 6..150: note = RuvC_domain
  SITE 9: note = RuvC_P1
  SITE 54: note = RuvC_P2
  SITE 89: note = RuvC_P3
  SITE 91: note = RuvC_P4
  SITE 94: note = RuvC_P5
  REGION 213..300: note = Tnp_domain
  SITE 221: note = Tnp_P1
  SITE 251: note = Tnp_P2
  SITE 259: note = Tnp_P3
  SITE 260: note = Tnp_P4
  SITE 272: note = Tnp_P5
MKITRVGVDLAKNVFQVHGVNRAGRCVWKRQLKRSNWLQVLTETLEPGCEIGMEACGGSHHWARELRSRGFAVKLVSPQFVKPFVKSQKNDANDAEAVCEAISRPSMRYVPIKTAEQQDLQAMHRIRDTLMRHRKAKANQIRGLVAEYGIVAPKTIVPLRRAIPDWLEDAENGLSDNFRALLYGLWEDFQQFEQRVKDVDRQINAVSNANPDAKRLKQLRGVGPLVSTALVAQFGDGRQFTRGRQAAASIGVTPRHAGTGGKNLIYGITKRGDPYLRSILIHGARAVVSQAKRRDDALSRWVTDLADRTHTNVAAVALANKTARMAWAMLRHGTDYDPDLARA

SEQ ID NO: 17693 - protein, 341 aa, unidentified
  source 1..341: note = protein_e825b2e
  REGION 6..148: note = RuvC_domain
  SITE 9: note = RuvC_P1
  SITE 52: note = RuvC_P2
  SITE 87: note = RuvC_P3
  SITE 89: note = RuvC_P4
  SITE 92: note = RuvC_P5
  REGION 211..297: note = Tnp_domain
  SITE 219: note = Tnp_P1
  SITE 249: note = Tnp_P2
  SITE 257: note = Tnp_P3
  SITE 258: note = Tnp_P4
  SITE 270: note = Tnp_P5
MNVKTIGIDLAKNVFQIHGVDEHGKRLFNKQLRRAQMASFFANIPPCLIGMEACASAHFWANKLISMGHNVKLMAPQFVKPYVKTNKHDAADAEAICEAVTRPNMRFVPVKTAEQQAVLALHRSRQSFIKQRTAQANQIRGLLAEFGIVVPRGIQQLQRRLPELVEDAHNPLPVLFRTQLSLLQHHMAYLFDVIATLDKQIEQCYRQNALCQRIGKIPGIGPVTASALIATIGKANNFENGRQLAAWLGLVPRQHSSGGKQVLLGISKRGDTYLRTLLIHGARAVLQSAKHKQDAVSSWANQLMARRNNNIASVALANKNARTVWALLVKEREYCAPIISA

SEQ ID NO: 17694 - protein, 410 aa, unidentified
  source 1..410: note = protein_34a83c5
  REGION 4..163: note = RuvC_domain
  SITE 7: note = RuvC_P1
  SITE 60: note = RuvC_P2
  SITE 100: note = RuvC_P3
  SITE 102: note = RuvC_P4
  SITE 105: note = RuvC_P5
  REGION 271..357: note = Tnp_domain
  SITE 279: note = Tnp_P1
  SITE 310: note = Tnp_P2
  SITE 318: note = Tnp_P3
  SITE 319: note = Tnp_P4
MLLVGDDWAEDHHDVEVQDETGRRLGKARLPEGVSGIAQLHGLIGALVPQGAAPDQVVIGIETDRGPWVAALVAAGYRVFAINPLQVARYRERQTTSGAKSDAGDAHVLADMVRTDRHQLRPIAGDSSLVEAVKVVARTHQTLIWDRSRQVLRLRAALREFFPAALQAFDDLTAADALELLAVAPEPVSAACLSTAQIIAALKGARRHHVADKAATLQAALRGEQLAQPSVMVTAYAVTVRATVAVITTLNTQIKQLEAQVEAHFGKHPDAEVYRSQPGLGEVLAAGVLGEFGDDADRYPGVRSRKNYAGTSPITRASGKKKLVLARYARNDRLADALHQQAFCALRASAGARAYYDALRARGVGHHAALRQLANRLVGILHGCLKTHTRYDEATAWPRHSEQDAEAAAA

SEQ ID NO: 17695 - protein, 320 aa, unidentified
  source 1..320: note = protein_3086267
  REGION 8..157: note = RuvC_domain
  SITE 11: note = RuvC_P1
  SITE 56: note = RuvC_P2
  SITE 96: note = RuvC_P3
  SITE 98: note = RuvC_P4
  SITE 101: note = RuvC_P5
  REGION 195..279: note = Tnp_domain
  SITE 203: note = Tnp_P1
  SITE 232: note = Tnp_P2
  SITE 240: note = Tnp_P3
  SITE 241: note = Tnp_P4
  SITE 252: note = Tnp_P5
MPEASVVVGIDVAKAHVDVAASGAVFEDRRFDNDADGHSALVAALAPMGVALVVMEVTGGYEAALACALQAAALPVAVVNPRQARDFAKAMGKLAKTDRVDARLLAEFAAVLVRRDDVSTFLRPLTDAEQQALAAMVTRRRQLLSILLAERQRLTLAAPVIRPSIEAVIEVLRQQLDHVEGQMTDHITVHYAGLNALLRTTSGIGPVASATLIAELPELGHLNRRAIAALVGVAPMANDSGTSRGRRRVQGGRFDMRRVLYMASLSAAQYNPAIKAFHDRLVRAGKLPKVVQVACTRKLLTILNAMVRDNQPWDESIHQT

SEQ ID NO: 17696 - protein, 348 aa, unidentified
  source 1..348: note = protein_84eae3d
  REGION 7..147: note = RuvC_domain
  SITE 10: note = RuvC_P1
  SITE 53: note = RuvC_P2
  SITE 88: note = RuvC_P3
  SITE 90: note = RuvC_P4
  SITE 93: note = RuvC_P5
  REGION 210..295: note = Tnp_domain
  SITE 218: note = Tnp_P1
  SITE 248: note = Tnp_P2
  SITE 256: note = Tnp_P3
  SITE 257: note = Tnp_P4
  SITE 269: note = Tnp_P5
MDKITRIGIDTSKSVFVLHGVNAADEPVLRKKLRRRQMLDFFRIMEPTRIGLEACGAAHYWARELMALGHAVMLLPPQYVKPYVQRGKNDAADASAICEAMSRPRMRFVPGKTAEQQAALMLMGVREQLIARRTQLANMIRGYAAEFGITAARGLDKIELLLARIAMAADVPELAKELFATLGEQYGELRPKLRSIDAQLLAWHRHNELSRRLAQVPAIGPIGATLLAMKVPDPRAFRTGRDFAAWLGLTPKDHSTAGKQRLGVITRAGDEALRSTLVSGATAVIQQVSKARGNPSPWLIALIKRKPPKLAAVALANKTARIAWKLMVSGEPYDCNHGAASHTVGNAA

SEQ ID NO: 17697 - protein, 342 aa, unidentified
  source 1..342: note = protein_02a0ca8
  REGION 7..148: note = RuvC_domain
  SITE 10: note = RuvC_P1
  SITE 53: note = RuvC_P2
  SITE 88: note = RuvC_P3
  SITE 90: note = RuvC_P4
  SITE 93: note = RuvC_P5
  REGION 211..295: note = Tnp_domain
  SITE 219: note = Tnp_P1
  SITE 249: note = Tnp_P2
  SITE 257: note = Tnp_P3
  SITE 258: note = Tnp_P4
  SITE 270: note = Tnp_P5
MSEVAIIGLDLAKRVFQLHGAMADGSVAFRRKLPRARVLDFLASQQRCVVAMEACASAHSWGREIARLGHKVRLIPPIYVKPFVKRQKNDAADAEAIAEAASRPTMRFVAVKSEEQQARAMLFRTRDLLVRQRTQLINALRGHLAEHGVVAPTGAAYLNRLATAISDEKTDLPEPVRQMGTLYLEQIEALSARVNDLDRQMRKVATEADNTRRLQTMPGVGPITAMAIETFAPPMTIFRRSRDFAAWLGLVPRQHSTGGKQRLGATSKMGQRDIRRLLITGAMAVVQHASRKGAPDGSWLGRMLAKKPRMLVAIALANKMARGLWAMMTTNKDFKNPAAAPA

SEQ ID NO: 17698 - protein, 403 aa, unidentified
  source 1..403: note = protein_cb7d733
  REGION 2..155: note = RuvC_domain
  SITE 5: note = RuvC_P1
  SITE 53: note = RuvC_P2
  SITE 94: note = RuvC_P3
  SITE 96: note = RuvC_P4
  SITE 99: note = RuvC_P5
  REGION 217..303: note = Tnp_domain
  SITE 225: note = Tnp_P1
  SITE 255: note = Tnp_P2
  SITE 263: note = Tnp_P3
  SITE 264: note = Tnp_P4
  SITE 275: note = Tnp_P5
MIGVDPHKGSHTAVVIGLAEEPLGELRVRASAGQAEKLVAWAADWPERTWAVEGAAGLGRLLAQQLVAAGERVLDVQPKLASRVRLLQAGDTNKNDPNDARSVAVAALRSKTARPVMAEDYPAVLKVWSKRHRDLARLRNQVACRLHAVLCDLVPGGHPKEISAAQAARILEQAAPSGAVDRARAELAAQFLEDMRRLDAQLRGTRKKLAAAVSASGTTLTEVFGVGPVIAGTITGDIADVSRFPGRDHFASYNGTAPVEVSSGNRKVHRLSLRGNRRINHAIHMAAITQIRHRHSDGRAYYEKKLAEGKTHKEALRSLKRRISDAIFACLLADARRAGQRPARRAREGNQGATLTPARPAHTPNAGSSDKPLPDPGTTIRPGTRAATPSPSKPASKKTRPAT

SEQ ID NO: 17699 - protein, 343 aa, unidentified
  source 1..343: note = protein_7390de4
  REGION 6..148: note = RuvC_domain
  SITE 9: note = RuvC_P1
  SITE 52: note = RuvC_P2
  SITE 87: note = RuvC_P3
  SITE 89: note = RuvC_P4
  SITE 92: note = RuvC_P5
  REGION 211..298: note = Tnp_domain
  SITE 219: note = Tnp_P1
  SITE 249: note = Tnp_P2
  SITE 257: note = Tnp_P3
  SITE 258: note = Tnp_P4
  SITE 270: note = Tnp_P5
MQVVRIGLDLAKYVFEVHGVDSHGKVVVRKTLRRNAGAHFFANLPPCLVGMEASNGAHYWTRVLTEFGHQVRLISPQFVTPYVKSNKNDRNDAEAICEAVGRPSMRFVPPKSVDQLAVQAVHRIRRRLVADRVRLVNQIRGLLSEHGIVIARDITQLRRGLANIVGSSDDGLSDLVRSLMRELQVEMAELDQRITSYDRRIREIFRNSEQCQRLGKIEGIGPVTATALIAAVGDRTCFRNGRQFAAWLGLVPKQRSSGGRVRLFGISKRGDRYLRTLMIHGARAALGRAGGKQDPRSLWLGKLRQRRHPNVAAVALANKNARIVWAMLSGNASYEPAMSVTVA

SEQ ID NO: 17700 - protein, 390 aa, unidentified
  source 1..390: note = protein_96a96ac
  REGION 4..161: note = RuvC_domain
  SITE 7: note = RuvC_P1
  SITE 60: note = RuvC_P2
  SITE 99: note = RuvC_P3
  SITE 101: note = RuvC_P4
  SITE 104: note = RuvC_P5
  REGION 264..353: note = Tnp_domain
  SITE 272: note = Tnp_P1
  SITE 302: note = Tnp_P2
  SITE 310: note = Tnp_P3
  SITE 311: note = Tnp_P4
  SITE 326: note = Tnp_P5
MVCVGIDVAKDKHDCFILCSEGEVLADVFTVANNREGFETLLHRIHSCTRPTDNIKVGLEATGHYSYNILGFLLEKGMPIINPLHTNLYRKSLSLRQTKTDRIDARTIASMLMSDVDLKSYTDTAYHNEELKSLTRYRFEKVSERAKLKQSVSRLVNILFPELETLVPTLHMASVYAMLSEFPGAKQIAAAHLTHFKAVLSDASKGRYDRDKAVQIREAARLSIGSNMPAKALELQHTIRLIRELDKEIAEIEAAIKTIIDEMAPPILTIPGISYRMGAMILAEIGDFSRFDSPDKLLAYAGLSPSTYESGKLKATGAYAHMEKRGSRYLRYALFNAAKFVCHWEPSFAAYLAKKRAEGKHYNVAISHTAKKLVRLIFALQTSGKAFQPA

SEQ ID NO: 17701 - protein, 427 aa, unidentified
  source 1..427: note = protein_453a15a
  REGION 19..171: note = RuvC_domain
  SITE 22: note = RuvC_P1
  SITE 70: note = RuvC_P2
  SITE 108: note = RuvC_P3
  SITE 110: note = RuvC_P4
  SITE 113: note = RuvC_P5
  REGION 279..365: note = Tnp_domain
  SITE 287: note = Tnp_P1
  SITE 318: note = Tnp_P2
  SITE 326: note = Tnp_P3
  SITE 327: note = Tnp_P4
  SITE 338: note = Tnp_P5
MKYALIQVLPDDPPGGVVAGIDWATADHVACVVDMAGRITDRFSVCHDRAGIDALISRLRKSGAAEIAIERGDGVLVEALLAAGLTVVVITSRQVKNLRSRYRSAGAKDDRFDSFVLADTLRTDRARLRPLIPDTPATTALRAAVRARKDLVAHRVAACNQLRAHLAVAFPAAIGLFFDLDSPVSLAFLARFGSQDAAGQLDEQAIDGWLKTIPARGNTAPASVLCARLRAAPGGVTGEDGAAHARITAALTATVSMLAAQVKTLETGIGIQLAAHPDAHIFASLPRAGMLRAARLLAETGDSRSRFPDPQSLAALAGVAAVTRQSGTHISHAFRWAVSRQLRDAVCDFADGSRHASAWAASVYDAARARGKDHPHAVRILARAWIYVIWRCWQAGTAYDPAKHNALQRILQQQAANAVATDSGDTR

SEQ ID NO: 17702 - protein, 389 aa, unidentified
  source 1..389: note = protein_7fc6108
  REGION 4..163: note = RuvC_domain
  SITE 7: note = RuvC_P1
  SITE 60: note = RuvC_P2
  SITE 101: note = RuvC_P3
  SITE 103: note = RuvC_P4
  SITE 106: note = RuvC_P5
  REGION 266..353: note = Tnp_domain
  SITE 274: note = Tnp_P1
  SITE 304: note = Tnp_P2
  SITE 312: note = Tnp_P3
  SITE 313: note = Tnp_P4
  SITE 326: note = Tnp_P5
MIYVGIDVAKDKHDCCILDANAEKLFPTFTIQNNQTGFGELYERLNSMTGDNSEIKVGLEATGHYSLNILGSLIDKGLTTFVINPLHTNLYRKGLSLRKTKTDKVDASSIAMMLVTDKTLKPYSDTSYHSEDLKSLTRYRFDKVQERARLKSSVSRLVNILFPELEHLVPTLHMASVYALLKELPGASHVAACHLTRLKNLLETASRGRYGREKAIELRNEAQASIGSVMPSKSLELRHTISLIEVLTEEIDEIEQSIREIMDKCNSPIMTIPGISYRMGAMILAEIGDFSRFEDADKILAYAGMSPSTYQSGQLQSSHSHMEKRGSRYLRYALFNATKFVCKWDERFAVYLAKKMREGKHYNVAVSHAAKKLVRTIYCMELTGEPYRK

SEQ ID NO: 17703 - protein, 354 aa, unidentified
  source 1..354: note = protein_3b79837
  REGION 12..153: note = RuvC_domain
  SITE 15: note = RuvC_P1
  SITE 58: note = RuvC_P2
  SITE 93: note = RuvC_P3
  SITE 95: note = RuvC_P4
  SITE 98: note = RuvC_P5
  REGION 217..302: note = Tnp_domain
  SITE 225: note = Tnp_P1
  SITE 255: note = Tnp_P2
  SITE 263: note = Tnp_P3
  SITE 264: note = Tnp_P4
  SITE 276: note = Tnp_P5
MSQQLNTTIAVIGIDIGKNSFHIVGLDKPGAIALRQKWSRGQVEAHLANMPPCLIGMEACVGAHHLSRKLKALGHDARLMPAKYVRPYSKGQKNDFRDAEAIAEAVQRPTMKFVATKTTDQLDLQALHRVRERLVSQRTGIINQIRAFLLERGIAVRQGQRFLRAGLPTILTTPPDVLSPRMVRIIEGLASDWRRLDERIEGLSSEIKAIACQDSSCERLMSVPGIGPIISSAMVAAIGTGDTFSKGRDYAAWLGLVPKQMSTGDRTILGKISKRGNRYLRVLFVQAAWVVLIKPKSWQRHGLKPWIEAAKKRLHRNVLAIALANKLARIAWSVLARGRGFEASTINDTATQPA

SEQ ID NO: 17704 - protein, 388 aa, unidentified
  source 1..388: note = protein_ef45347
  REGION 6..159: note = RuvC_domain
  SITE 9: note = RuvC_P1
  SITE 57: note = RuvC_P2
  SITE 98: note = RuvC_P3
  SITE 100: note = RuvC_P4
  SITE 103: note = RuvC_P5
  REGION 221..307: note = Tnp_domain
  SITE 229: note = Tnp_P1
  SITE 259: note = Tnp_P2
  SITE 267: note = Tnp_P3
  SITE 268: note = Tnp_P4
  SITE 279: note = Tnp_P5
MGRVVIGMDPHKHSATIEVMDDQEIFLGGGRFGTDAAGYRAMLGCARQWPERIWAVEGCQGIGGHIASTLIADGEQVLDVPPKLSARTRMFATGQGRKTDATDAHSVALVATRMSGLRPVAEDQQLAVLRVLADRRRSLGEDHTRMISQLHRLLLELIPGGAKKALSAAQAKALLARVGPRDAPGKARRRVAAELISDLERIHQRKKAADKELRELLKATGSTLTQLNGIGPSGAARLLGEVGDITRFPNRAHFASWNGTAPIDASSGQQVRHRLSRAGNRQINRVLHIMAVVQLRHRDSKGRAYYDRKVAAGKTPMEAMRCLKRKLSDVVYRQMIADAKAAATGPGGHSGTTLQSSVTGLTPVAGSSDKPLPGPASQQPRTLSLTAP

SEQ ID NO: 17705 - protein, 404 aa, unidentified
  source 1..404: note = protein_1f77684
  REGION 6..162: note = RuvC_domain
  SITE 9: note = RuvC_P1
  SITE 60: note = RuvC_P2
  SITE 100: note = RuvC_P3
  SITE 102: note = RuvC_P4
  SITE 105: note = RuvC_P5
  REGION 271..358: note = Tnp_domain
  SITE 279: note = Tnp_P1
  SITE 310: note = Tnp_P2
  SITE 318: note = Tnp_P3
  SITE 319: note = Tnp_P4
  SITE 331: note = Tnp_P5
MPELWAGTDAGKAEHHCTVIDADGEKALSRRVPNSEDELLQLLGDVLDLADGDPVTWAVDLNAGGAALWIALLVNHGQRLFYIPGRTVHHASGSYRGDGKSDAKDAFVIADQARMRRDLQPLQETSGIAVDLKILTGRRMDLSADRTRAVNRLRAQILEYFPALERAFDYSTSKTALVLLTGYQAPAALRRIGRARLTTWLKNHGVRTLNVAKSAADAAVTAAEAQFTVVPGEKTAAKMVHTLAREVMALDEEIAQTNALIQGRFREHPDAEVITSMPGIGDMLGAEFIAATGGDMAAFGSPDRLAGVAGLAPVPRDSGKVSGNLRRPRRYSRRLLRMFYLSAQTATVHCPQSRTFYQRKRAEGKSHKQAVLALARRRLNVLWALIRDHRTFAAVAPQPAAAAA

SEQ ID NO: 17706 - protein, 433 aa, unidentified
  source 1..433: note = protein_29efd08
  REGION 23..184: note = RuvC_domain
  SITE 26: note = RuvC_P1
  SITE 81: note = RuvC_P2
  SITE 123: note = RuvC_P3
  SITE 125: note = RuvC_P4
  SITE 128: note = RuvC_P5
  REGION 291..377: note = Tnp_domain
  SITE 299: note = Tnp_P1
  SITE 329: note = Tnp_P2
  SITE 337: note = Tnp_P3
  SITE 338: note = Tnp_P4
  SITE 350: note = Tnp_P5
MKYKLKQKQNQRITRITESTLVVGADIAKKVHVARAVDFRGIELGKDCVFHNDQEGLSKLATWMKELGQAHGKTNIVFGIEPTGHYWFPLAAYLQEQQQIQVVVVNPHHVNKTKELEDNSQTKSDYKDAKVIADLIRNGKYSEPKLPTKEYAELRILMNLREKVSASLTQVKGRISNWFDRFFPEYACVFKKWEGKASLMTMRAFPMPADIVGKGARDVLVHWKTEVKRGVGIKRAEKLVAAATVSIGLTEGCMAARMELSTLLGQYDLFSKQLEEIMDKVLEILEHIPGTKEMLTVPGVGAITVAGFLAEIGDLNNYDHGQQIIRLAGLNLKENSSGKRKGKTGISKRGRSRLRALLFRAVMPMVAKNEEFKTLHKHYTTRSQNPLKKKQSIIALCGKLIRVLHTLGTKQREYSAIDVMGPVRQFQIQQEAA

SEQ ID NO: 17707 - protein, 347 aa, unidentified
  source 1..347: note = protein_97a1675
  REGION 23..174: note = RuvC_domain
  SITE 26: note = RuvC_P1
  SITE 79: note = RuvC_P2
  SITE 119: note = RuvC_P3
  SITE 121: note = RuvC_P4
  SITE 124: note = RuvC_P5
  REGION 219..305: note = Tnp_domain
  SITE 227: note = Tnp_P1
  SITE 256: note = Tnp_P2
  SITE 264: note = Tnp_P3
  SITE 265: note = Tnp_P4
  SITE 278: note = Tnp_P5
MHKASGRDWRIDFFYKGAVMFYLGIDVAKLKLDCCLLLNEAGSKRRTKAVPNSKAGVAALLEWTAKHEVPVSDLHVIMEATGVYHEQPALLLIESGLLVSVINPAQARNLGRGMAVRTKTDKTDSFVLARCGALLKPEAWQPPSPEARMLQSLLSRRDAVAEDLRREKNRLEKAEAADAPPLVLQSVLDAGLFHNAELNRLEQAVKEHIDNHPSMKQDMNLLTSIPAVGPQTGSKLLAVMKARHFQSARQLAAYLGVTPVERQSGSSVLGRPRLSKTGPAKLRAVLYMAAVTAIRHNPHVKAVYDRLLARGKSKMSALGAAMRKLVHLCFGVLKTRMPYQPDYAKNN

SEQ ID NO: 17708 - protein, 347 aa, unidentified
  source 1..347: note = protein_810c61f
  REGION 7..147: note = RuvC_domain
  SITE 10: note = RuvC_P1
  SITE 53: note = RuvC_P2
  SITE 88: note = RuvC_P3
  SITE 90: note = RuvC_P4
  SITE 93: note = RuvC_P5
  REGION 210..297: note = Tnp_domain
  SITE 218: note = Tnp_P1
  SITE 248: note = Tnp_P2
  SITE 256: note = Tnp_P3
  SITE 257: note = Tnp_P4
  SITE 269: note = Tnp_P5
MDPIIRIGIDTSKHVFQLHGVNAAEEPVLRKKLRRHDMVAFFTKLPPTVIGIEACGGSHHWARLLQALGHEVKMLPPQFVKPYVKRGKNDAADAEALCEAMSRPTMRFVPVKSPDQQAALMLVGLRDRLIRQRTQLANTIRGYAAEFGLIAATGICRIEPLLERIKADDRLPPLARELFIIHAKEYAQLQARLEEVEDKLMAWHRADECSRRLARIPGVGPIVASMLVLKTPAPEAFRSARHFAAWLGLTPKDHSTAGKVRLGVITRAGDEALRSVLVVGATAVIRQLRRSQGAAASPWLVALLKRKPPKLAAVALANKIARIAWKLMVSGERYAVQGIVVGTGRAA

SEQ ID NO: 17709 - protein, 325 aa, unidentified
  source 1..325: note = protein_8606be2
  REGION 6..95: note = RuvC_domain
  SITE 9: note = RuvC_P1
  SITE 53: note = RuvC_P2
  SITE 91: note = RuvC_P3
  SITE 93: note = RuvC_P4
  REGION 196..283: note = Tnp_domain
  SITE 204: note = Tnp_P1
  SITE 234: note = Tnp_P2
  SITE 242: note = Tnp_P3
  SITE 243: note = Tnp_P4
  SITE 255: note = Tnp_P5
MTITTIGIDLAKNVFAVHGVDQNGKTVLVKSRVTRAALPGLIASLPPCVIGMEACSGAHYWARLFLQYGHEPRLMAAKFVSPYRMAGKSGKNDAAVVPVKDESQQAMQCLHRTRQGFIEEKTATYNRLRGLISEFGVIAPQSTDALRHMVSALKSSLPLQVQQCVDDLLEHVDRIEANITEYDRILSRIAKTDHRSQRLMKLKGVGPTTACALVACIGNAHDFKNGRQLAAWLGLTPSQYSSGGKSKLGRITKAGDSYLRTLLVQGARSVLIGAEKRTDSFSRWVCSLVERRGYWRAVVAIAAKNARLCWASLHYGDDFRLYSAS

SEQ ID NO: 17710 - protein, 391 aa, unidentified
  source 1..391: note = protein_7b2ab35
  REGION 4..163: note = RuvC_domain
  SITE 7: note = RuvC_P1
  SITE 60: note = RuvC_P2
  SITE 101: note = RuvC_P3
  SITE 103: note = RuvC_P4
  SITE 106: note = RuvC_P5
  REGION 266..353: note = Tnp_domain
  SITE 274: note = Tnp_P1
  SITE 304: note = Tnp_P2
  SITE 312: note = Tnp_P3
  SITE 313: note = Tnp_P4
  SITE 326: note = Tnp_P5
MIFVGIDVAKDKHDCFITDSDGEILFDSFTITNNIEGFENLFQKIESVSNDLTKVKVGLEATGHYSYNILGFLLNKNLTVYVINPLHTSLYRKSLSLRKTKTDKVDSKTIATMLMSDVDLKPYSSELYHNEELKSLSRYRFDKVQERAKLKSSIARLVNILFPELEKLFCTIHLTTVYQLLSEYPGASHIANAKLDELSNIIFSSSKGRFDYSKAELVQVTAQKSIGSVMPAKSLELKHTIKLIQELDSEIEEIEKEIKIIMDKINSPILTIPGISYRMGAMILSEIGSFSNFDSPDKILAFAGLSPSTYQSGKLDSSHSHMEKRGSRYLRYALFNATKFVCNWDPIFNAYLSKKRAEGKHYNVAISHATKKLVRVMFQLEKTGQTFQRIA

SEQ ID NO: 17711 - protein, 343 aa, unidentified
  source 1..343: note = protein_a211d83
  REGION 6..150: note = RuvC_domain
  SITE 9: note = RuvC_P1
  SITE 54: note = RuvC_P2
  SITE 89: note = RuvC_P3
  SITE 91: note = RuvC_P4
  SITE 94: note = RuvC_P5
  REGION 213..299: note = Tnp_domain
  SITE 221: note = Tnp_P1
  SITE 251: note = Tnp_P2
  SITE 259: note = Tnp_P3
  SITE 260: note = Tnp_P4
  SITE 272: note = Tnp_P5
MKINRVGVDLAKNVFQLHGADRKGKPIWKRRLSRAKWLEVLYDTVKPGTEIGMEACAGAHHWARQLMQRGYPVKIIPPQFVKPFIKSNKNDANDAQAICEAMGRPNMHPVKVKTVEQQDLQAIHRIRDEIKSHRIAKANQIRGLVTEYGLVAPQQLHALRSAIPDWLEDAENGLSFLFRQLLQGLWGDLHMLDQRMAELDKQIAVIAQEDPTARRLQQLRGVGPLIATALVATVGDGKQYRKGRDMAAALGLTPRQHSSGGKDRLLGISKRGDAYLRCLLVHGARSAVRTAKDKDDRLSRWIIDLQSRRHANVVAVALANKMTRMAWAMMTKGTDYNPDFTAC

SEQ ID NO: 17712 - protein, 342 aa, unidentified
  source 1..342: note = protein_9f6a778
  REGION 7..149: note = RuvC_domain
  SITE 10: note = RuvC_P1
  SITE 53: note = RuvC_P2
  SITE 88: note = RuvC_P3
  SITE 90: note = RuvC_P4
  SITE 93: note = RuvC_P5
  REGION 211..295: note = Tnp_domain
  SITE 219: note = Tnp_P1
  SITE 249: note = Tnp_P2
  SITE 257: note = Tnp_P3
  SITE 258: note = Tnp_P4
  SITE 270: note = Tnp_P5
MEEITIVGVDLAKSVFQIHAANADGRAIVRKRLPRARFLSFMSLIKPCVVAMEACATSHHWARELTALGHDVRLIPPIYVKPFVKRQKNDANDAEAIVEAAIRPSMRTVPVKSPEQQALAMLFRTRELLLTQKTQLMNALRAHLAEHGIIVAGGRRSIDPFIRVLDDLTNTLPDVVRKAGALYLDRIARTSGEIEALERQIDEHANEHEMAKRLRTIPGVGPVTAMAVEAFAPGMESFARGRDFSAWLGLVPRQHSSGGKHRLGRTSKMGQRDIRRLLISGAMSIIHWRGRDGGKPGSWLARMLTSKSRMLTAIALANKLARIIWAIMTRKDVYRDPAGAVC

SEQ ID NO: 17713 - protein, 425 aa, unidentified
  source 1..425: note = protein_e095c79
  REGION 9..157: note = RuvC_domain
  SITE 12: note = RuvC_P1
  SITE 63: note = RuvC_P2
  SITE 97: note = RuvC_P3
  SITE 99: note = RuvC_P4
  SITE 102: note = RuvC_P5
  REGION 259..347: note = Tnp_domain
  SITE 267: note = Tnp_P1
  SITE 298: note = Tnp_P2
  SITE 306: note = Tnp_P3
  SITE 307: note = Tnp_P4
  SITE 318: note = Tnp_P5
MKVTYQTCCGVDVHKSFLVATIIKTSGGIEPDYQKKRFSTFNNSILEFKRWLLNNDCRYVCMESTGKYWVPVFNLLEDEIHVTIANPKWVKAVKGNKDDTKDSKWIGDLFRLGLVKGSYIPCKKIRVLREFTRYRYKLVSCRSSEKNRYQNALTVCNIALDSVVSDIFGKSSTSIVDYLLEQSGNSIDHEEIASKLLRSLKSKEDAVIESIEGYQMTDSQKYRMRLVRAHMDYITAEINDVDSEIESIISSDPDYENAIQLLMTIPGVKRDSAITIISEIGIDMSQFCTSKRLCCWAGLVPGSNESGGKKKSVRITRAGVYLKPALVQCAHAAVKSDQSPYYKKKYESLMKRRGKKRAIVAIARMILTAIFQMLSTGEAWNPSDLYKIDMPEALVEKQKAKAIKQAMKLLEREGLYPPPQEPVAS

SEQ ID NO: 17714 - protein, 314 aa, unidentified
  source 1..314: note = protein_41ffbee
  REGION 8..152: note = RuvC_domain
  SITE 11: note = RuvC_P1
  SITE 54: note = RuvC_P2
  SITE 94: note = RuvC_P3
  SITE 96: note = RuvC_P4
  SITE 99: note = RuvC_P5
  REGION 190..274: note = Tnp_domain
  SITE 198: note = Tnp_P1
  SITE 227: note = Tnp_P2
  SITE 235: note = Tnp_P3
  SITE 236: note = Tnp_P4
  SITE 247: note = Tnp_P5
MILAPRCVGIDVSKYRLDIFDDAVGTAESIANAPQPITEQLARWRCGKVFVVFEATGVYDCELAAQLHQAGIRFCRINPARARDFARASGRLAKTDAIDACMLAAYARAMRPPADPAGEPVREALALLAKRRDQLVLMRAQEKNRRSETRDCAMIADITRVIDFLDGEIATIETRIKALIETEPPIAEIARLIRSVPGVGPVACMQLIAQMPELGQIGPKQIAALAGLAPLNVDSGIHRGKRTIGGGRKRVRDALYMAALNAVRRSGPFKTFYQRLRTAGKPAKLALIAVARKLLTTLNAMLRDQKPYLAARPT

SEQ ID NO: 17715 - protein, 342 aa, unidentified
  source 1..342: note = protein_a05c035
  REGION 6..148: note = RuvC_domain
  SITE 9: note = RuvC_P1
  SITE 53: note = RuvC_P2
  SITE 88: note = RuvC_P3
  SITE 90: note = RuvC_P4
  SITE 93: note = RuvC_P5
  REGION 212..299: note = Tnp_domain
  SITE 220: note = Tnp_P1
  SITE 250: note = Tnp_P2
  SITE 258: note = Tnp_P3
  SITE 259: note = Tnp_P4
  SITE 271: note = Tnp_P5
MKCKIVGIDIAKNVFQVCQLGEDNKVISNKKIPRAKLLDALRQLPESTLVAMEACGTAHHWARQLQEMGLEVRLLPAQHVKAFTGRQKNDAIDALGICEAAFSPRIHFVPVKTLEQQDIKALRCARQQWVDHRTALGNQIRGLSAEYGVIFPRSLAQLRRQLPLAVEDQRNGLSSIMRERLREAYQELCDYDTKIARVDRQLHTLCRENASYQRLMEIPGIGPIISAALISELGDGSQFSNGREMSAWCGLVPRQHSSGDRTVSLGITKNGNKHLRTLLIHGARSVVFCRKTEGDALSRWVSRLVERRGKHKAIVALANKLARICWAVIRSEQSYKHNRAFA

SEQ ID NO: 17716 - protein, 346 aa, unidentified
  source 1..346: note = protein_3ff94d2
  REGION 13..155: note = RuvC_domain
  SITE 16: note = RuvC_P1
  SITE 59: note = RuvC_P2
  SITE 94: note = RuvC_P3
  SITE 96: note = RuvC_P4
  SITE 99: note = RuvC_P5
  REGION 218..306: note = Tnp_domain
  SITE 226: note = Tnp_P1
  SITE 256: note = Tnp_P2
  SITE 264: note = Tnp_P3
  SITE 265: note = Tnp_P4
  SITE 277: note = Tnp_P5
MRNSIVTNEIKVVGIDLAKESFQLHGVNEQGHVIVRKKLSRRKLMLFMTHLPPCLVGMEACGGAHDWARKFRTMGHDVRLMSPQFVKPYVKSNKNDEVDAEAVCEAVQRPNMRFVPIKSIEQQDIQSLHRARSLAVSHRTAQLNQIRGFLMEYGLVAAKGVATLRKALPGILEDADNALSPMFRELLSGLQDEFHRLDERIAAYDLQIKQLSAQSDACRRLMTIPGVGPMISTILVAAVADAKAFKNGREMSAWLGLVPRQHSTGGKPKLLGISKHGDAYLRTMLIHGARSDLLAAKKKQDRRSQWAVALEARRGQNIAAVALANKIVRTAWALLSRGGEYKVTAA

SEQ ID NO: 17717 - protein, 318 aa, unidentified
  source 1..318: note = protein_f717e12
  REGION 5..150: note = RuvC_domain
  SITE 8: note = RuvC_P1
  SITE 55: note = RuvC_P2
  SITE 95: note = RuvC_P3
  SITE 97: note = RuvC_P4
  SITE 100: note = RuvC_P5
  REGION 190..276: note = Tnp_domain
  SITE 198: note = Tnp_P1
  SITE 228: note = Tnp_P2
  SITE 236: note = Tnp_P3
  SITE 237: note = Tnp_P4
  SITE 249: note = Tnp_P5
MTAFVGIDIASQKFDVAVLYGKNSYKCSSFPNSTQGFIAFTNWLQVYGEVHICMEATGAYSTPLATFLDEISVPVSVENPARIHAFAQSELTRNKTDKSDAKMIARYCRLYHPPLWKPAPLYIRQLLSLMSRLDNLKEMLRMEQNRLLTADVIITVSLQENINSLSRQIVVIQQAVKEHINANKELKKNKALLTSIPGVGDILSCMFLAYVGDISKFSNNKKLVAWVGLNPMQQESGLWKGRSKISKKGNVELRKALYMPAVAALTHNPILIDLKNRLKVKNKSGKSIVCAGMKKLLQLMYGVLKSGVPFDAKKSFAN

SEQ ID NO: 17718 - protein, 333 aa, unidentified
  source 1..333: note = protein_5b20e9f
  REGION 4..152: note = RuvC_domain
  SITE 7: note = RuvC_P1
  SITE 55: note = RuvC_P2
  SITE 96: note = RuvC_P3
  SITE 98: note = RuvC_P4
  SITE 101: note = RuvC_P5
  REGION 197..284: note = Tnp_domain
  SITE 205: note = Tnp_P1
  SITE 235: note = Tnp_P2
  SITE 243: note = Tnp_P3
  SITE 244: note = Tnp_P4
  SITE 257: note = Tnp_P5
MNHIGIDVSHKELIVVVSVNGKARKAKSFENTAIGHQAIIEWSSKLKGGSRVCLEATDVYHFDLAVALSRAEGIGVMVINPKAAHHFAKVLMKRSKTDAVDAETLAIYCERMPFETWQRPADETIALRAMARRIAALNKLKTQTKNQLHALKATEDTPDFVIGHTEALVDVLQKQIRAHRDSALELIRQHKALTRAFALITGIKGIAEASAVQILAELMVLPHGMTAKQWVAYAGLDPRCFESGSSIAKKPRISKAGNKFIRQALYMPALVATCHEPNIKSYYHHLIEHNGLKKIQAICAVMRKLLHAIHGMLKADKEFDGTRFYTIPVQANS

SEQ ID NO: 17719 - protein, 345 aa, unidentified
  source 1..345: note = protein_e4a9a3a
  REGION 5..152: note = RuvC_domain
  SITE 8: note = RuvC_P1
  SITE 55: note = RuvC_P2
  SITE 92: note = RuvC_P3
  SITE 94: note = RuvC_P4
  SITE 97: note = RuvC_P5
  REGION 212..300: note = Tnp_domain
  SITE 220: note = Tnp_P1
  SITE 250: note = Tnp_P2
  SITE 258: note = Tnp_P3
  SITE 259: note = Tnp_P4
  SITE 271: note = Tnp_P5
MKHYTGLDVSVKETAICIVDETGEICREVTVPSHPDGLIAVLRDPAWNLERFGLEAGPLSQWLFEALARAGLPVICIETHHVKAFLKAQPNKIDRNDARGIAQMMRVNLYRPVHVKTLTSQKRRALLTARKLLQGKAIAIENNIRGLLRNFGLKVGKVGVVKFEERIRELVDDMADLQEVMDPLLTARRKLREEFSRLHKKVLDISRNDEMCRLLMTIPGVGPVVSLAFTSTIDIPQRFKNSKAVGPILGVTPKLNESGESKRVGCISLCGDAMMRTLLYEAAQTLMINVRKWSWLKAWAMNIAERRGMRKAIVALARRLAGIMHRMMSDGTEFCWTRDDLLAAI

SEQ ID NO: 17720 - protein, 325 aa, unidentified
  source 1..325: note = protein_3625240
  REGION 6..153: note = RuvC_domain
  SITE 9: note = RuvC_P1
  SITE 54: note = RuvC_P2
  SITE 92: note = RuvC_P3
  SITE 94: note = RuvC_P4
  SITE 97: note = RuvC_P5
  REGION 197..284: note = Tnp_domain
  SITE 205: note = Tnp_P1
  SITE 235: note = Tnp_P2
  SITE 243: note = Tnp_P3
  SITE 244: note = Tnp_P4
  SITE 257: note = Tnp_P5
MKNIIIGIDISSKTLDICIKEEMKLKYLTIENKTTFIKRFFKSYNTYNVIVAMENTGRYNWNLFEVLEKLSFKVYVISPLHLKKSIGLTRGKNDKIDALRICSFIEKNHQEMPMWKPCSESIKKIKILLTERASRIKIKKQLKAQQHDYKLMKSVGLDKQLLSLNMKMINSIENQIKIIEGNIEDIISSDQKLKQQHKLMKSVPGVGKVLSWTLLSKTEGFTTITDPRKMACYSGVAPFDFQSGTSVKRRPAVSMLADKGIKAILHLAAMSAIRLDNDLRKYYMRKVEEGKNKMSVLNAVRNKIIHRVFAVIKNQTLYQKDLVLS

SEQ ID NO: 17721 - protein, 274 aa, unidentified
  source 1..274: note = protein_4bbde19
  REGION 9..154: note = RuvC_domain
  SITE 12: note = RuvC_P1
  SITE 58: note = RuvC_P2
  SITE 98: note = RuvC_P3
  SITE 100: note = RuvC_P4
  SITE 103: note = RuvC_P5
  REGION 197..269: note = Tnp_domain
  SITE 205: note = Tnp_P1
  SITE 235: note = Tnp_P2
  SITE 243: note = Tnp_P3
  SITE 244: note = Tnp_P4
  SITE 257: note = Tnp_P5
MSNVLKKVIGVDVGAKFLTVSFNDHCDKDQVQNIGNNQRSIVAFLKKFSTEDYCFVIEATGNYSSRLLHLSLSKGFESSLINCMSVKHFSRMKNIITKTDAEDAKLIKLYGEMFRPEVYVPKSIEIEHLDQEIKLLNDLEEEKRRYAVKLQALRYNPFLNANTEKHYEKRLKQLEKEITEVELRLPQLQDEEFKEVKDLIQSVCGIGEKTSLQLMIATSGFKNFDSAKSLVKYFGLAPRIYQSGKKSYSPRQMQNLQNSYQRNAVCLFLDCYET

SEQ ID NO: 17722 - protein, 275 aa, unidentified
  source 1..275: note = protein_bd2c002
  REGION 4..94: note = RuvC_domain
  SITE 35: note = RuvC_P3
  SITE 37: note = RuvC_P4
  SITE 40: note = RuvC_P5
  REGION 136..223: note = Tnp_domain
  SITE 144: note = Tnp_P1
  SITE 174: note = Tnp_P2
  SITE 182: note = Tnp_P3
  SITE 183: note = Tnp_P4
  SITE 196: note = Tnp_P5
MVLWRSGSFRTAPVELAVLNPKLVNRFAQTLRRSKTDAADALVLAEYSQRMPFSRWQRPEASHLRLRTIGRYIESLVVEQAGLKNRLRTAEQTTTTPRVVLVDLRQALASFERRVAKMRREALKMVRAEAGLWERFQLLTSVPGIAEISAIRILSELVLLAPTMGVRQWVASSGLDPAHQQSGTSLHKPSRISRAGNRHLRAALYMPALSAARNDPHIRAFYQALRCRHKTGLQALMAVARKLLHAIYGIFKTGRPYEGKLLFPNIQTGVESIAG

SEQ ID NO: 17723 - protein, 349 aa, unidentified
  source 1..349: note = protein_3785833
  REGION 14..155: note = RuvC_domain
  SITE 17: note = RuvC_P1
  SITE 60: note = RuvC_P2
  SITE 95: note = RuvC_P3
  SITE 97: note = RuvC_P4
  SITE 100: note = RuvC_P5
  REGION 218..312: note = Tnp_domain
  SITE 226: note = Tnp_P1
  SITE 256: note = Tnp_P2
  SITE 264: note = Tnp_P3
  SITE 265: note = Tnp_P4
  SITE 277: note = Tnp_P5
MTKTSISKTPIAVLGIDLGKNSCSLAGLDTTGAVVLRRRMTREVLIAFVAKLPTCVVAMEACCGAHFLGRTFEDQGHEVRLMAPEYVQPYVKAQKTDDRDAEAIAEAATRPTMRLVTLKSEAQLDLQILHRARQRLVTARTRLTNQLRAVLLERGIILPKRRTTLRQRLDDLMSGEMPISARAIRLLEDLRDEWANLDRRIRAYDDELAALTRDNDRARALATIPGIGVINATALLAAVGDASSFARGRDLAAWLGLTPRQHSTGGKTRLLGISKRGNRYLRVQLIHGARAAMTHFVKQDTATGEWLRRLLARAHPNVAIVALAAKLARIAWAVLKHGRTFERQVAVAA

SEQ ID NO: 17724 - protein, 388 aa, unidentified
  source 1..388: note = protein_9a82df6
  REGION 4..160: note = RuvC_domain
  SITE 7: note = RuvC_P1
  SITE 58: note = RuvC_P2
  SITE 99: note = RuvC_P3
  SITE 101: note = RuvC_P4
  SITE 104: note = RuvC_P5
  REGION 262..348: note = Tnp_domain
  SITE 270: note = Tnp_P1
  SITE 300: note = Tnp_P2
  SITE 308: note = Tnp_P3
  SITE 309: note = Tnp_P4
  SITE 321: note = Tnp_P5
MYLVGIDIAKYKHQCFIATTHGEVIKEFSFDNNSNGFKVLLEHLQALDHSYEIKIGLEATGHYGNTLKHFLSANSYTFVEFNPYLTKQFFKSTTIRKTKTDKIDARMLARMLASVDYKTLHTKYYHINELKSLCRTRNSLIESRSNTLVQITNALDIIFPEFKRHFNNRLGLTALFILEKYTSPKKIAKLNKNHFEKLYKLSRGKFTYPNFRKLKELAKDTVGIESKSNELKLKLYTKLYHSYNTKIKILEAEIEEIMSYTTSYIKTIPGVSLMSAANILGEVGDFTLFSNPAKLIAFVGYDIAVYQSGESKSYGKLVKRGSSLLRKTVWNIVLGCIREVPVINDYYYKKKNEGKHRNVIFSSIARKLLRIIYYLETNQVSFDQNIIR

SEQ ID NO: 17725 - protein, 343 aa, unidentified
  source 1..343: note = protein_8194f1e
  REGION 6..147: note = RuvC_domain
  SITE 9: note = RuvC_P1
  SITE 52: note = RuvC_P2
  SITE 87: note = RuvC_P3
  SITE 89: note = RuvC_P4
  SITE 92: note = RuvC_P5
  REGION 211..296: note = Tnp_domain
  SITE 219: note = Tnp_P1
  SITE 249: note = Tnp_P2
  SITE 257: note = Tnp_P3
  SITE 258: note = Tnp_P4
  SITE 270: note = Tnp_P5
MQIHSVGIDLGKTTFHLVALGVAGKVLVKKKFTRKQLLAHTANMQTSLIGLEACSGAHFLGRALRKQGHDVRLIAAQFVKPFVKSNKNDFIDAEAIAEAVERKNMRFVPIKTDDQLDLQAIHRVRDRLISRRTAVINQLRAFLLERGMVFAQRPANLKAAMADILENAEADLTPQMRNLIHMLWDEWKIVEQQIEALNDDLERVSASDAGCTRIRQIPGIGPVVATAIVAAIGNGAAFRKGREFAAWLGIVPRQHSTGGKAMLFGISKRGNVYLRKILIHGARAAVLRIKRDRAPIGAWLDALDARAPKNVVIVAMANKLARIAWAVLSSGNDYRPAVNPLPA

SEQ ID NO: 17726 - protein, 392 aa, unidentified
  source 1..392: note = protein_4bd12bd
  REGION 4..164: note = RuvC_domain
  SITE 7: note = RuvC_P1
  SITE 62: note = RuvC_P2
  SITE 103: note = RuvC_P3
  SITE 105: note = RuvC_P4
  SITE 108: note = RuvC_P5
  REGION 267..354: note = Tnp_domain
  SITE 275: note = Tnp_P1
  SITE 305: note = Tnp_P2
  SITE 313: note = Tnp_P3
  SITE 314: note = Tnp_P4
  SITE 327: note = Tnp_P5
MIYIGIDVAKNKHDCCIIDSDGAVYNDSLRISNSREGFELLYSSILSILPDRNISNVKIGLESTGHYSINLQNFLYAKGFSLSILNPLAANLFRKAQTLRKTKTDKTDALVIAKMLFSDDTKSYSPVSYQIQELKSLTRHRYRLIGYRSKLKVSINRLIDIIFPELPNLFWSIHQSSSYALLSVLTSPKEIAACHLTRLTNILSTASRGKYGKDKAIFLKECAANSIGTSSRALSFELQQTIRLIQSVQVEIDALELQIKEVVIEINSPLISIPGISYTLAAIILSEIGDIERFSSPCKLLAFAGLDPSTYQSGKYNASHTPMVKRGSSYLRFAILMASRTVSMRDAAFSAYLSKKRSEGKHYYVAMSHVAKKLIRVIFHLLKTNTAFVPQM

SEQ ID NO: 17727 - protein, 342 aa, unidentified
  source 1..342: note = protein_41428a9
  REGION 6..148: note = RuvC_domain
  SITE 9: note = RuvC_P1
  SITE 52: note = RuvC_P2
  SITE 87: note = RuvC_P3
  SITE 89: note = RuvC_P4
  SITE 92: note = RuvC_P5
  REGION 210..293: note = Tnp_domain
  SITE 218: note = Tnp_P1
  SITE 248: note = Tnp_P2
  SITE 256: note = Tnp_P3
  SITE 257: note = Tnp_P4
  SITE 269: note = Tnp_P5
MKDTMIGVDLAKRVFQLHGAAMTGEVKFRKKLSREQFRAFMATQPAALVVFEACGSASYWAREMEALGHEVKLIAPQYVRPFVKRQKNDAADAEAIVIAARQPEMRFVAPKTVDQQAKAVLFRGRERLVHQRTELANALRAVLYEYGHVFPTGLCHLKRMEAVLEDPHCDLPALVIVECQDLLAQIAEKTDRIEAKTKALKALAAETDTARRLQTMPGVGPLTALTVEAFAPDMAQFKSGRDFAAWLGLVPRQHSTGGKARLGWISKAGQSDIRRLLIVGAMSRLNWLGRRTIVPGSWLARMLARKPRMLVAIALANKMARQIWAMLTKNEDYRDPALAAAA

SEQ ID NO: 17728 - protein, 342 aa, unidentified
  source 1..342: note = protein_b2aa09e
  REGION 7..148: note = RuvC_domain
  SITE 10: note = RuvC_P1
  SITE 53: note = RuvC_P2
  SITE 88: note = RuvC_P3
  SITE 90: note = RuvC_P4
  SITE 93: note = RuvC_P5
  REGION 211..297: note = Tnp_domain
  SITE 219: note = Tnp_P1
  SITE 249: note = Tnp_P2
  SITE 257: note = Tnp_P3
  SITE 258: note = Tnp_P4
  SITE 270: note = Tnp_P5
MENVSIIGLDLAKRSFQAHGALADGAVAFRKKLSREKVLAFFAEQPRCVVAMEACGSAHHWGRAIHDLGHEVRLIPPAYVKPFVKRQKNDAADAQAIVEAASRPTMRFVAVKTEEQQARAMLFRTRDILVRQRTQLINALRGHLSEHGVVAAQGPANVKVLEEAVGDPGTSLPLLVVELARVFLDQIEGLSERISGLEKVSAHEAASGETTRRLQTMPGVGPITALAIETFAPPMDVFKRGRDFSAWLGVVPRQHSTGGKQILGKVSKMGQRDIRRLLIIGAMAVVRSALRKGAPEESWLQRMLAHKPRMLVAIALANKMARSIWAMLVKREDFRVPVVAAS

SEQ ID NO: 17729 - protein, 352 aa, unidentified
  source 1..352: note = protein_079c3f5
  REGION 9..153: note = RuvC_domain
  SITE 12: note = RuvC_P1
  SITE 57: note = RuvC_P2
  SITE 92: note = RuvC_P3
  SITE 94: note = RuvC_P4
  SITE 97: note = RuvC_P5
  REGION 218..304: note = Tnp_domain
  SITE 226: note = Tnp_P1
  SITE 256: note = Tnp_P2
  SITE 264: note = Tnp_P3
  SITE 265: note = Tnp_P4
  SITE 277: note = Tnp_P5
MNEAITYRIGFDVAKGVFQAHAVKDEPGEPVAFKKRLKRAQVEGFFATLPRSLIGMEACGSAHYWARVARRYGHEVRLMPPAYVKAYVKRNKSDPLDAEAICEAVGRPTMRFVPIKDEAAQAMLMLHRMRASFVERRTAAANQLRAAFAEFGMVAAAGNRGLSELLALVETEAERFTGLPAALRLVLAELARQWRSCHEVVCRMDREIAVGVKKNARAMRLTLVPTIGPVGASAIDAMLPNPHVFESGRHFAAFLGITPREDSSGKTVRRGPITKKGDTYLRRILVLGATAYLARVRRGQVQGASPWVLRMAAHPKRKLAAVALANKTARIAWAMLAKGEDYRAPTAALEAA

SEQ ID NO: 17730 - protein, 308 aa, unidentified
  source 1..308: note = protein_00e1564
  REGION 21..146: note = RuvC_domain
  SITE 51: note = RuvC_P2
  SITE 91: note = RuvC_P3
  SITE 93: note = RuvC_P4
  SITE 96: note = RuvC_P5
  REGION 187..274: note = Tnp_domain
  SITE 195: note = Tnp_P1
  SITE 224: note = Tnp_P2
  SITE 232: note = Tnp_P3
  SITE 233: note = Tnp_P4
  SITE 244: note = Tnp_P5
MPQAVIGCDLSRAFIDLYRLPSGTPGRIANTPDAIASWLDALDRDVRVVFEATSGCDGDLVAILATREQPFSRVNPRQAREFARATGVLAKTDRVDARVLAQMGAALDLPATVPLSPERSRLADFLRRRRQLVDMRKAEKLHRHSAGQPEIAAAIEAMIELLDRQITHLDRHIASLIADDARLADQARLLTAVPGIGPTVLATLLGELPELGTLCRRRIASLAGLAPHARESGTWRGARRIWGGRRKVREALYIAALNASRRVPVLTAMRDRMRAKGKAPKTILIAVARQLLVILNAMIRSGQPIRLA

SEQ ID NO: 17731 - protein, 427 aa, unidentified
  source 1..427: note = protein_1bb8097
  REGION 19..179: note = RuvC_domain
  SITE 22: note = RuvC_P1
  SITE 77: note = RuvC_P2
  SITE 118: note = RuvC_P3
  SITE 120: note = RuvC_P4
  SITE 123: note = RuvC_P5
  REGION 286..372: note = Tnp_domain
  SITE 294: note = Tnp_P1
  SITE 324: note = Tnp_P2
  SITE 332: note = Tnp_P3
  SITE 333: note = Tnp_P4
  SITE 345: note = Tnp_P5
MKYTQNEKILQVTEDTLIAGVDIAKESHYARAFDYRGVEYGKYLRFENNREGMTKFFKWAKDLMERHKKNKLIVGIEPTGQYWLCFAQYLKDNNIKVVLVNPFHVKRSKELDDNSPTKSDRKDPKTIAMLVKDGRYVEPIIPEGVYAELRVAMDIKDRLNKQIGMTKNQITRWIDIYFPEFNTVFSDWEGKAALITLKEIPTPEKIAEKSTGEILSIWKKEVQRGVGEKRAIKLIETAKESIGKKQGIKMAEYEIKTLIEQYEFLKKQIEEVEKKIEELIVEIPGVKELLEIKGIGINTVAGFIAEVGDIEKYEHPKQIQKLGGLNLVENSSGKHKGETTISKRGRKRLRRVLFNAVMALVAKNEEFRELHKYYTTRAQNPLKKKQSLIVLCNKLIRVFYVILKKGVKYDPIKMMKDIKRPALQEAA

SEQ ID NO: 17732 - protein, 424 aa, unidentified
  source 1..424: note = protein_a4fcf31
  REGION 23..183: note = RuvC_domain
  SITE 26: note = RuvC_P1
  SITE 81: note = RuvC_P2
  SITE 122: note = RuvC_P3
  SITE 124: note = RuvC_P4
  SITE 127: note = RuvC_P5
  REGION 290..376: note = Tnp_domain
  SITE 298: note = Tnp_P1
  SITE 328: note = Tnp_P2
  SITE 336: note = Tnp_P3
  SITE 337: note = Tnp_P4
  SITE 349: note = Tnp_P5
MNFKMQDKQNQLIERISDTHLIVGVDIAQQLHVARAVNFRGIVVGDPLTFENNEEGFVKLLSWIQSLQILKNLDSIIVGMEPTGHYWINLSNWLYKQNIEVVTVNPHLVKRNKENRDNTQSKSDKKDALVIADMVKNGYYSFVRPTSEAFEKLRVLISNRDVIVKRLVMSINQVNRWVDVVFPELRQVFKDVTCKGAIATLRLFPTPDEISSLETLDVMRGWKSLMKRQPGPKKAQLLINLAKSSIGTGQALDAYKFHLEQLLEEYDLAIKQLERVEQQVKEVLYKIPFAKKLLTIKGISEISLAGILGEAGDLSGFSHGNSLLRHAGLHLAEASSGKWKGQIVISKRGRSRLRRFLYLATMSLVMNNPEFKAVHSHNVKVKKIKKMKSIMKLIGKLARIFVGIARRNESYCPNKIQAVIPLAA

SEQ ID NO: 17733 - protein, 349 aa, unidentified
  source 1..349: note = protein_3b8195e
  REGION 19..161: note = RuvC_domain
  SITE 22: note = RuvC_P1
  SITE 65: note = RuvC_P2
  SITE 100: note = RuvC_P3
  SITE 102: note = RuvC_P4
  SITE 105: note = RuvC_P5
  REGION 223..310: note = Tnp_domain
  SITE 231: note = Tnp_P1
  SITE 261: note = Tnp_P2
  SITE 269: note = Tnp_P3
  SITE 270: note = Tnp_P4
  SITE 282: note = Tnp_P5
MIELHTIKTGEDQMQITTIGIDIAKNVFHVVCCNAKNKIVRKKAVKRRELLHYVTNLPKSIVAMEACSTSNYWGREIASLGHKVKLLPAQHVKAFLTGNKNDYNDAYAIVVASQQAHIKAVPIKTIEEQDNQLIHKVRELAIGQRTALSNQIRGLLLEYGVSIKQGIKNLRKDVVDLLDETSSLSSTFRQVLAQLYSQLVHLDKTIKQYDEHIKKQVASNDACQRLQTIPGVGPIVASGYYNEVGNGRHYKRGRDVSASLGLVPRQHSTGGKDILLGISKRGNRYLRYLLVQGAKAVVSRAKNKTDKLSQWINRIVATRGHNKACVAYANKMARIAWAITVSGESYQAL

SEQ ID NO: 17734 - protein, 387 aa, unidentified
  source 1..387: note = protein_75489da
  REGION 4..159: note = RuvC_domain
  SITE 7: note = RuvC_P1
  SITE 57: note = RuvC_P2
  SITE 98: note = RuvC_P3
  SITE 100: note = RuvC_P4
  SITE 103: note = RuvC_P5
  REGION 261..347: note = Tnp_domain
  SITE 269: note = Tnp_P1
  SITE 299: note = Tnp_P2
  SITE 307: note = Tnp_P3
  SITE 308: note = Tnp_P4
  SITE 320: note = Tnp_P5
MYFVGIDISKFKHDCAIVDEFGDVITPSWSFQNDREGFSLLKELLDALNGEKKIGLKATGHYGQNLKLFLENNDFSFMEFNPLLINRFVHSKSLRKTKTDSIDALMIAQYLMTVEYKPYPPSFYTFEKLKSLTRFRDSLIRQRSRQLVELTNILDKVFPEFKPFFKGRFSATALYILSHYASPEKISNMNSKSYEPLRRLSRGRFSMVDFVELKTLARNTVGSTSDYLLQEMEITIDIYNQLQSKVEEIELQIHDCVLALAPPILTIPGIGAASAAVILSEFGDLSKFNNPSKLLSFAGMEPGYFQSGTSESTGKMVKHGSSHLRYAMMNCAQTVINNEPTFAAYYAKKRAEGKEHRVALTHVAKKLLRVIYTLQTKELSYNPDLVR

SEQ ID NO: 17735 - protein, 411 aa, unidentified
  source 1..411: note = protein_b52d2ef
  REGION 6..165: note = RuvC_domain
  SITE 9: note = RuvC_P1
  SITE 62: note = RuvC_P2
  SITE 102: note = RuvC_P3
  SITE 104: note = RuvC_P4
  SITE 107: note = RuvC_P5
  REGION 275..361: note = Tnp_domain
  SITE 283: note = Tnp_P1
  SITE 314: note = Tnp_P2
  SITE 322: note = Tnp_P3
  SITE 323: note = Tnp_P4
MLVLFIGDDWAEDHHDVEVQDGTGQRLAISRLPEGVEGIAKLHALIGRHGGGDLEAGQVVVGIETDRGPWVQALIAAGYRVYAVNPKQAARFKERYGTSGAKSDRGDAHALADMVRIDRDQLRPIAGDSDQAQAVRVVARAHQTLIWERTRTFQRLRSTLREYFPGALTAYAGLELTSTDAMELLIKAPTPEEAVKLTKPQITAVLARHRRRNRDQRAVAIQAALREPQLGLPTPVTVAYGAAVVAHARLLIALNEQIQALEEQVSAHFLAHPDAEIYLSMPGIGEITGARVLAEFGDDPSRYTSAKARKNYAGTSPVTRASGKQHTVQARYVRNDRLADALHKQAFSALNTSPGARRYYDKQRARDAGYNPALRQLGNRLVGILHGCLKTRTLYDEATAWSHHATLAAAA

SEQ ID NO: 17736 - protein, 344 aa, unidentified
  source 1..344: note = protein_ffa5a2f
  REGION 5..152: note = RuvC_domain
  SITE 8: note = RuvC_P1
  SITE 55: note = RuvC_P2
  SITE 92: note = RuvC_P3
  SITE 94: note = RuvC_P4
  SITE 97: note = RuvC_P5
  REGION 212..302: note = Tnp_domain
  SITE 220: note = Tnp_P1
  SITE 250: note = Tnp_P2
  SITE 258: note = Tnp_P3
  SITE 259: note = Tnp_P4
  SITE 271: note = Tnp_P5
MNHYAGIDVSLECSSVCVVNASGKIMREAKVASEPEALVAWFSSLGLALERIGLEAGPLSQWLYAEMKKAGLAVELLETRHVRDAFKAMPVKTDRKDARGIAQLVRLGWFRPVHCKSMEAQETRAMLTSRKLVQSKLQDVENHLRGILRGFGLKVGKVSDRSFAPRVRELVDGHPSLQIIAEALLAVQAVLQREFKAFEKRVLAMARADERARLLMSVPGVGATVSLTYVSGIDDPARFKASKAVGAHFGITPRRYQSGETDVTGRISKIGDASVRTALYQAAHVILTTAVKGGALKSWAARIAKRAGMQKAKVALARKLAVILHRMLVDGKPFDFAAAAAARQ

SEQ ID NO: 17737 - protein, 345 aa, unidentified
  source 1..345: note = protein_11df1f9
  REGION 6..148: note = RuvC_domain
  SITE 9: note = RuvC_P1
  SITE 52: note = RuvC_P2
  SITE 87: note = RuvC_P3
  SITE 89: note = RuvC_P4
  SITE 92: note = RuvC_P5
  REGION 211..299: note = Tnp_domain
  SITE 219: note = Tnp_P1
  SITE 249: note = Tnp_P2
  SITE 257: note = Tnp_P3
  SITE 258: note = Tnp_P4
  SITE 270: note = Tnp_P5
MKITTIGIDLAKNVFQVHGVDEGGKAVLRKQLKRKDVVSFFANLAPCLIGMEACGSAHYWARKLAVLGHTVRLMAPQFVKPYVKTNKSDRNDAEAICEAVARPNMRFVPVKTGEQQAVLSVHRARQGFVKARTAQANQIRGLLAEFGIVIPKGMGHIAKRLPEILEDGENGVPGMMRELLERLGENLKDMDKQVGELERQIKLWHRENERSRKLEAIAGIGPITASALVATVGDAKSFKNARQLPAWLGMVPRHEGTGGKAKLGRISKRGDVYLRTLLIHGARAVIRQFERKPDQADGWLKKLLARRNKNIAAVALAAKNARIAWALLAHERPYQSDYVARRATA

SEQ ID NO: 17738 - protein, 345 aa, unidentified
  source 1..345: note = protein_d6e26b4
  REGION 5..153: note = RuvC_domain
  SITE 8: note = RuvC_P1
  SITE 54: note = RuvC_P2
  SITE 92: note = RuvC_P3
  SITE 94: note = RuvC_P4
  SITE 97: note = RuvC_P5
  REGION 213..299: note = Tnp_domain
  SITE 221: note = Tnp_P1
  SITE 251: note = Tnp_P2
  SITE 259: note = Tnp_P3
  SITE 260: note = Tnp_P4
  SITE 272: note = Tnp_P5
MTYYTGIDVSLRSVSICVVDDKGEVCLEAKVAAEIDAIVDRLHRFSGDVKSVGFEAGTLTQYLTYGLQAAGFEVICLEARQVSVTLAAMRNKTDRNDARGLAQILRTGWYSRVHVKSLHSHQVRALLASRKAILKKCVDLENELRGLLKVFGIRLPSRVGHGSFDAELRETVCSDDMLACALVPLLDARTVLYKTYLKLDNAVKGLVRVDPICRRLMSIPGVGPVTALTFKAAVDDPNRFKSSRTVAAHFGLTPRRFQSGEVDNPGHISRAGDADVRSALYVAAHSLLTRNAQWSSLKAWGVRLAKIRGHRRAVIAVARKLAVILHRMWIDGSEFRWGSPTATVV

SEQ ID NO: 17739 - protein, 387 aa, unidentified
  source 1..387: note = protein_70385d0
  REGION 10..164: note = RuvC_domain
  SITE 13: note = RuvC_P1
  SITE 62: note = RuvC_P2
  SITE 102: note = RuvC_P3
  SITE 104: note = RuvC_P4
  SITE 107: note = RuvC_P5
  REGION 270..354: note = Tnp_domain
  SITE 278: note = Tnp_P1
  SITE 308: note = Tnp_P2
  SITE 316: note = Tnp_P3
  SITE 317: note = Tnp_P4
  SITE 329: note = Tnp_P5
MSDRKTVAWVGIDAGKGHHWAAAVDETGATLWSKKVENDEAAILAALGELLDLADKVHWAVDISGTASALLLALLAAHGQSAVYVPGRTVNCMSGAYRGEAKTDARDAYVIAETSRHRRDFATIDVPAQLAADLALLTAHRSDLMADRVRMINRLRDILTGVFPALERAFDYSSHKGALVLLTGYQLPAAIRRRGQARMTAWLANRGVRGADAVAAGALEAAQAQQTALPGEEAAAQIVADLAAQILNLDDRLKRIDKQISETFRSHPQAGIIESMPGIGSILGAEFVVAAGDLAAYADAGHLASAAGLVPVPRDSGRRTGNMHRPKRYSRRLRRVFYMSAQTSIVREGPNRQPGLLPQEARRRLQARPSRHRPGSSTRECALGAAA

SEQ ID NO: 17740 - protein, 283 aa, unidentified
  source 1..283: note = protein_d526b78
  REGION 1..107: note = RuvC_domain
  SITE 4: note = RuvC_P2
  SITE 44: note = RuvC_P3
  SITE 46: note = RuvC_P4
  SITE 49: note = RuvC_P5
  REGION 214..258: note = Tnp_domain
  SITE 222: note = Tnp_P1
  SITE 252: note = Tnp_P2
MIVDQPNTIGALPIAVARSMGIDVAYLPGLAMRRAADLYPGSAKTDARDAFVIADTARTMPHTLRRVDGGEETAAELKVLVGFDEDLAAEATRLTNRIRGLFTQIHPALERVIGPRLATKQGLAVIEHFGGPQHLTKAGRARLQRVIAKANPRGAAEFTEHIWAALGEQTVTVAGTVAAEQVLPKLAAPLRDTVDQRAELAAQIEKVLDVHPLAPVLTSMPGVGVRTAARILLDVGDASGFPTPGHLAAYAGLARRRCDVLHAMLRNHEPYRTPAPHPQPLAA

SEQ ID NO: 17741 - protein, 343 aa, unidentified
  source 1..343: note = protein_9e5625a
  REGION 7..148: note = RuvC_domain
  SITE 10: note = RuvC_P1
  SITE 53: note = RuvC_P2
  SITE 88: note = RuvC_P3
  SITE 90: note = RuvC_P4
  SITE 93: note = RuvC_P5
  REGION 212..296: note = Tnp_domain
  SITE 220: note = Tnp_P1
  SITE 250: note = Tnp_P2
  SITE 258: note = Tnp_P3
  SITE 259: note = Tnp_P4
  SITE 271: note = Tnp_P5
MSEVTVIGLDIAKSVFQAHGADARGQQLFSRRITRGKVLEFFVDQPRCLVALEACGGAHHWARELTRMGHDVRLIPPAYVKPFVKRQKNDAADAEAICEAAQRPNMRFVAVKSEEQQASALVFRTRDLLVRQRTQTINAIRGHMAEYGWVAPKGPSWVTKLGDLMEDGVGASLPRAAQDMFRVMLAMLEELNRQVAALDKEIARRAREDEVARRLMTIPGIGPITATAIVALAPAAETFRRGRDFAAWLGLTPRQKSTGGKTRLGRTSKMGERTLRRLLIIGSSTVVKYASSRGAPEGSWLASMMARKPRMLVTVAQANKTARIVWALLMKNENYKAPVAAAA

SEQ ID NO: 17742 - protein, 285 aa, unidentified
  source 1..285: note = protein_ec13376
  REGION 4..58: note = RuvC_domain
  REGION 162..248: note = Tnp_domain
  SITE 169: note = Tnp_P1
  SITE 199: note = Tnp_P2
  SITE 207: note = Tnp_P3
  SITE 208: note = Tnp_P4
  SITE 221: note = Tnp_P5
MPAPLLKMLVTDKTLKPYTGTSYHSEELKSLTRYRFELVKERAKLKTSVSRLVNILFPELESLVSTLHMNSVYRLLQELPGAYFIASSNLTHLKALLADSSKGHYGREKAIEIRETAKSSIGSLMPAKSMELRQTIRRIDTLSSDIKEVEQSIQKIMDECGSPITTIPGIKYRMGAMILAEIGDFTRFSNADQVLAYAGLSPSTYQSGQLISSYARMEKRGSKYLRYALFNAAIYASVWDERFRLYLSKKRAEGKHYYVAISHVVKKLVRTIFRMEITHTSYQPL

SEQ ID NO: 17743 - protein, 356 aa, unidentified
  source 1..356: note = protein_7d07b9e
  REGION 16..169: note = RuvC_domain
  SITE 19: note = RuvC_P1
  SITE 67: note = RuvC_P2
  SITE 108: note = RuvC_P3
  SITE 110: note = RuvC_P4
  SITE 113: note = RuvC_P5
  REGION 231..316: note = Tnp_domain
  SITE 239: note = Tnp_P1
  SITE 269: note = Tnp_P2
  SITE 277: note = Tnp_P3
  SITE 278: note = Tnp_P4
  SITE 289: note = Tnp_P5
MPVAPTYPNGSYGVVIAIDPHKASWTAVVVGSGLTPVAALRVEVNRAGYRQLLRFAAKWPQARWAIEGAAGLGAPLTERLRAEGIAVIDVPAKLARRVRLLSTGHGRKNDQADALSVGIAAWSAPALRTVEVDEAIAALRALTEHRDDLVRTRTQLVNRLHAMLVKLVPSGLPRGLTAESAAETLRRIRPRDPLGRTLRRLAVELVGELRRIDRRIAEATQALSDAVAASGTTLTRLLGVGDVVAAKLLARTGPISRFPSAAAFASFCGVAPIEVSSGDVVRHRLSRAGDRQLNYALHVMAMTQIRYDSPGQAYYQRKRAAGKSHKEALRCLKRRLADVVYRIMIRDTVSSLTLAA

SEQ ID NO: 17744 - protein, 325 aa, unidentified
  source 1..325: note = protein_39c9985
  REGION 8..152: note = RuvC_domain
  SITE 11: note = RuvC_P1
  SITE 55: note = RuvC_P2
  SITE 95: note = RuvC_P3
  SITE 97: note = RuvC_P4
  SITE 100: note = RuvC_P5
  REGION 193..277: note = Tnp_domain
  SITE 201: note = Tnp_P1
  SITE 230: note = Tnp_P2
  SITE 238: note = Tnp_P3
  SITE 239: note = Tnp_P4
  SITE 251: note = Tnp_P5
MQIACSFFGADVGKAEIVVADYRHTKPVTKTLKNTLSGLTPWLESLPEGSVLAMESTGGYERLLADLAYERGLRVYVVNPKVLFHYAKSLGQRGKTDQLDAVMIARFIASEHHRLHPYQPTPHHILRLRQMLHLRKMTVNTRTQLRLSSERHQQACAQAQVQKVLDALTELADSLETQMIAQIEAEPDLAQDFKLLTSITGVGKLTGTALATTFARIPFASSDAVVAYAGLDPRPKESGTYKGLRVLSKQGDAILRSLAYNAASAASRSEVFKPLYQALRAKGWATTQALNIIARKLLRIAFGVWKSRKPFDPTRFNVNQACAKP

SEQ ID NO: 17745 - protein, 340 aa, unidentified
  source 1..340: note = protein_4fe3b7b
  REGION 6..148: note = RuvC_domain
  SITE 9: note = RuvC_P1
  SITE 52: note = RuvC_P2
  SITE 87: note = RuvC_P3
  SITE 89: note = RuvC_P4
  SITE 92: note = RuvC_P5
  REGION 210..296: note = Tnp_domain
  SITE 218: note = Tnp_P1
  SITE 248: note = Tnp_P2
  SITE 256: note = Tnp_P3
  SITE 257: note = Tnp_P4
  SITE 269: note = Tnp_P5
MQITTIGLDIAKNVFQVHGIDGEGQVVLRRKVRRDQLLALLGGLEPCLIGMEACATAHHWARELEALGHQVKLMPPAYVKAYVKRNKNDAADAEAICEAVTRPTMRFVAVKSANAQSILMLHRARHLLVRQRTAQVSAMRAHLAEYGIVAPKGRAHVRELVEVLDKGKNLLPELARQTLLLLAAMIEGLSTQIRKIEIELMAWHRTDPTCRRLETIPGIGFITATALAATVNDAKVFRSGRQFAAWLGLVPKQHSSGGKERMGGISKMGDRYLRHLLVIGATAVVRYTRRKATTVSIWANQLLERKPARLVTVAVANKMARIAWAVMAREENYRAGSVGA

SEQ ID NO: 17746 - protein, 341 aa, unidentified
  source 1..341: note = protein_9337666
  REGION 7..148: note = RuvC_domain
  SITE 10: note = RuvC_P1
  SITE 53: note = RuvC_P2
  SITE 88: note = RuvC_P3
  SITE 90: note = RuvC_P4
  SITE 93: note = RuvC_P5
  REGION 211..297: note = Tnp_domain
  SITE 219: note = Tnp_P1
  SITE 249: note = Tnp_P2
  SITE 257: note = Tnp_P3
  SITE 258: note = Tnp_P4
  SITE 270: note = Tnp_P5
MSTVTTIGLDIAKSVFQVHGISATGAVLIRRQVRRGQVLKFFASLPPCLIGIEACASAHHWSRELQSLGHQVKLMPPAYVKPYVKRQKNDMADAEAICEAVTRPTMRFVETKTPEQQSMLMLHRVRLMQVRQRIMLTNAIRAHLAEFGLVAKIGREGVDELLLLVRDGDERVPELARTCILALAEQLVLVKRQILEMDRRITACHRASEVSRRLAEIPGIGPLLASALVAHVPNPKAFSSGRNLAAWIGLVPKQNSSGGKERLGGVTKQGNRYLRSMLTVGALAVIRFAQRHGTKRPWIVQLLARRATKVAAVALANKMARMVWAIMAKGEHYREPVVQAA

SEQ ID NO: 17747 - protein, 414 aa, unidentified
  source 1..414: note = protein_3b2435f
  REGION 10..165: note = RuvC_domain
  SITE 13: note = RuvC_P1
  SITE 62: note = RuvC_P2
  SITE 102: note = RuvC_P3
  SITE 104: note = RuvC_P4
  SITE 107: note = RuvC_P5
  REGION 273..359: note = Tnp_domain
  SITE 281: note = Tnp_P1
  SITE 312: note = Tnp_P2
  SITE 320: note = Tnp_P3
  SITE 321: note = Tnp_P4
MALPDCVYYVGIDWGSSEHAVCVIDEAGKIRTRFTVAHSAAGFTELARRLGRLGEAEQVPIGIERPDGRLVDVLLEAGHPVVPVKSNAIKAWRDAEVLSGAKSDAGDAHVIAEYLRLRQHRLTPARPYSDQTKALRTVVRTRDDIVKLRVMATNMLSSLLDAFWPGAKEIFKDVESPIGLAFLTDYPTPASAAHLGEKRIAAFCARHGYSGKRPAAVLLARLRSAPPGVMGQAETAAGRDAVLALVAVLKTLGTVRKDLDRSVRARLAEHPDAAVFTSLPRAGQIRAAQVLAEWGDARSAYDGPDAVAAFAGVAPVTKASGRHHAVTYRWACNKRFRQAITGFADNSRHANPWAAGIYQRARARGMDHPHAVRVLARAWIRVIYRCWLDGIPYDPAKHGTAAAQTKQATTPSAA

SEQ ID NO: 17748 - protein, 344 aa, unidentified
  source 1..344: note = protein_42dd145
  REGION 7..149: note = RuvC_domain
  SITE 10: note = RuvC_P1
  SITE 53: note = RuvC_P2
  SITE 88: note = RuvC_P3
  SITE 90: note = RuvC_P4
  SITE 93: note = RuvC_P5
  REGION 212..303: note = Tnp_domain
  SITE 220: note = Tnp_P1
  SITE 250: note = Tnp_P2
  SITE 258: note = Tnp_P3
  SITE 259: note = Tnp_P4
  SITE 271: note = Tnp_P5
MGRIVTVGLDIAKSVFQVHGVDEDGKVVERRQLKRSQMVRYFGELPPALIGIEACGTAHHWARQLAELGHEVRLIPPAYVKPYVKRQKNDAADAEAICEAVMRPSMRFVAVKSVDQQAAGVLHKTRALLIKQRTMMLNAVRAHLAEFGVVTGAGITQAIRAVAELASREDLGLPDVAREALGNLAGLIQELQAKLTAVDKQLTRWHYQSDVSNLLETIPGVGIITASALVSSVTEPNAFKSARHFAAWLGLVPKQNSSGGKTRLGRITKGGNRYLRQLLVVGATAVLRHARAGNGNVLPWIKALLDRRPPKVVAVALANKMARIAWVVMTRGVEYERRELAIAA

SEQ ID NO: 17749 - protein, 264 aa, unidentified
  source 1..264: note = protein_46fbe06
  REGION 1..70: note = RuvC_domain
  SITE 9: note = RuvC_P3
  SITE 11: note = RuvC_P4
  SITE 14: note = RuvC_P5
  REGION 133..218: note = Tnp_domain
  SITE 141: note = Tnp_P1
  SITE 171: note = Tnp_P2
  SITE 179: note = Tnp_P3
  SITE 180: note = Tnp_P4
  SITE 192: note = Tnp_P5
MKPFVRRNKNDAVDAEAICEAAQRPNMRFVAIKSEEQQASALVFRTRDLLVRQRTQLINAIRGHLTEYGWVAPKGPSHIAVLGDLLDGEMGTSLPDVATPMFRTMLDLLEVLNSKIVELDKEIARRAREDVIARRLMTIPGVGPITATAIAALAPPAETFTKGRDFAAWLGLAPRQLSSGGKQKLGSITKMGERTLRRLLIIGCSAVVLQASKRGAPAGSWLEQMMARKPRMLVTVALANKTARIIWALLIKKEEYKAPVAAAA

SEQ ID NO: 17750 - protein, 320 aa, unidentified
  source 1..320: note = protein_42dacc2
  REGION 4..149: note = RuvC_domain
  SITE 7: note = RuvC_P1
  SITE 51: note = RuvC_P2
  SITE 91: note = RuvC_P3
  SITE 93: note = RuvC_P4
  SITE 96: note = RuvC_P5
  REGION 190..277: note = Tnp_domain
  SITE 198: note = Tnp_P1
  SITE 228: note = Tnp_P2
  SITE 236: note = Tnp_P3
  SITE 237: note = Tnp_P4
  SITE 250: note = Tnp_P5
MTYIGIDVSKDSFVAAYPEKSGFTTKTFKNTSSGVHLFIQSLPAECHCVMEATGNYSMLLLYLLQQANVAVSMENPQKIKHFARAMLSTTKTDEIDAKLIAMYGEKMEPAPYKIPSESIMLLKQKRTVLRQLKKQLTMMKNLQHSLSILPKQDSTAKVATEQTIKFLNKQISKLEDEITHLSNKEFKRQMDLLTSIKGIGENIASALIMATGGFTYFSSAKQISRFWGLCPTYQQSGTSVNFKGHINRNGDTHLRSQLYVIAFSSIRFNAACRETYERLRARGKSGKVAIIAVANKLIRQAFAVVTNNRPYVDGYVSALP

SEQ ID NO: 17751 - protein, 333 aa, unidentified
  source 1..333: note = protein_400627e
  REGION 4..154: note = RuvC_domain
  SITE 7: note = RuvC_P1
  SITE 55: note = RuvC_P2
  SITE 96: note = RuvC_P3
  SITE 98: note = RuvC_P4
  SITE 101: note = RuvC_P5
  REGION 197..284: note = Tnp_domain
  SITE 205: note = Tnp_P1
  SITE 235: note = Tnp_P2
  SITE 243: note = Tnp_P3
  SITE 244: note = Tnp_P4
  SITE 257: note = Tnp_P5
MKTVGIDVGCKELVIIIRVNGKSGKPKAFENTPSGHQSIIKYLTKNKGETRVCIEATGVYHFDLAVALSRVESIEVMVINPKAAHNFAKALMTRSKTDAIDAENLAIYAERMPFEAWERPADECISLRATARRIAALSKQKTQAKNQLHALKATLETPALVIEQVELLIDFLEEQITILRDSALGFVQQHEKLKQAYTLIIGIKGIAQASAIQILSELMILPANMTARQWVAHAGLDPRVFDSGSSVSKKPRISKVGNKYIRQALYMPALVASRFEPNIKGYYHHLIDDNGLKKVQAICAVMRKLLHAIHGMLRTNKEFDGSRFYTQSISTNS

SEQ ID NO: 17752 - protein, 421 aa, unidentified
  source 1..421: note = protein_b3e826f
  REGION 23..175: note = RuvC_domain
  SITE 26: note = RuvC_P1
  SITE 74: note = RuvC_P2
  SITE 112: note = RuvC_P3
  SITE 114: note = RuvC_P4
  SITE 117: note = RuvC_P5
  REGION 282..368: note = Tnp_domain
  SITE 290: note = Tnp_P1
  SITE 321: note = Tnp_P2
  SITE 329: note = Tnp_P3
  SITE 330: note = Tnp_P4
MKSASNTPIITTLPEEPRNDVTAGLDWARDDHAVSVVNGRGREVARCTVAHTATGLRELVGFLDRHGVGEVAIERPDGPVVDTLLGAGVTVVVISPNQVKNLRGRYGSAGNKDDRFDAFVLADTLRTDRARLRPLVPDTDATVALRRACRARKDLVNHRVAVANQLRAHLRNVLPAAVGLFKDLESAISLAFLTRFDTQDKINWLTPKRLGDWLAKQGYSGKVDPAVLHQRILDAAPGATGTHGVTQAHITASYVALLHTLVAQIKVLSTQIDRQLDAHADAHIFTSLPRSGRVRAARLLAEIGDCRARFPSPESLTCLAGAAPSTRQSGKSRIVGFRWSCDKQLRDAVTDFAGDSRHANPWAADLYNRAIARGHDHPHAVRILARAWLHIIWHCWHDNLAYDPNKHRALQLLLTQQKAAA

SEQ ID NO: 17753 - protein, 328 aa, unidentified
  source 1..328: note = protein_8a831f7
  REGION 5..159: note = RuvC_domain
  SITE 8: note = RuvC_P1
  SITE 62: note = RuvC_P2
  SITE 102: note = RuvC_P3
  SITE 104: note = RuvC_P4
  SITE 107: note = RuvC_P5
  REGION 204..289: note = Tnp_domain
  SITE 212: note = Tnp_P1
  SITE 241: note = Tnp_P2
  SITE 249: note = Tnp_P3
  SITE 250: note = Tnp_P4
  SITE 262: note = Tnp_P5
MKAFIGIDIGKDKLDVSWLRDIAKNKKKTKVLKNNPNGFKELVKWLLKNTNLNAQDIVITTEPTGVYSEPLMYWLYEQGFTLLHVNPGKAKQYAKSLGLVHKTDKSDATMLARYGHDQQYSLKAWQPESLEARELKAMTRRLEALEQDLQREENRYEATSFSGASERVMQSIQDMISVLKVEIEKLKSEIDDYIDRHPHLKKNRQLLESIKGVGEVTSRIMVCLLACKRFKSAKQLACYLGLIPKQKESGKQIGKTTLSKEGPGYIRAKLYMAAVVAGQHNPDIKEQKTRLIRHGKTKMQAIGAAMRKLAHICFGVVKNQTEYQPQVV

SEQ ID NO: 17754 - protein, 356 aa, unidentified
  source 1..356: note = protein_39321f4
  REGION 12..165: note = RuvC_domain
  SITE 15: note = RuvC_P1
  SITE 68: note = RuvC_P2
  SITE 104: note = RuvC_P3
  SITE 106: note = RuvC_P4
  SITE 109: note = RuvC_P5
  REGION 233..318: note = Tnp_domain
  SITE 241: note = Tnp_P1
  SITE 271: note = Tnp_P2
  SITE 279: note = Tnp_P3
  SITE 280: note = Tnp_P4
  SITE 291: note = Tnp_P5
MSIVAHSRPFVVGVDTHARNHVYAIVTASTGELMATRAFPTTAAGINRSIAWVARHTGADLGTLWVIEGAASYGALLSGAVAAAGYQVAEAARMDTRARHGVGKSDPIDAHRIAAAVLPLDEQQLRRPRLNDGVRAALRVLVTARESMTTERTRTVNALTALLRVNDLGLDARKSLTGAQIAEVSRWRSREEPLALSVARSEAVRLAKRISELDIQLKTNNSRITELVEISDAAPLLQETGFGPVTAAVCLTVWSHRGRVRSEAAFASLAGVNPIPASSGNTVRHRLNRGGDRTLNKALHVAALSRMTFDPATIDYVRKRQAEGRTKKEIRRCVKRYLARRIFRTLNATNPVLCHP

SEQ ID NO: 17755 - protein, 404 aa, unidentified
  source 1..404: note = protein_ad422a6
  REGION 4..159: note = RuvC_domain
  SITE 7: note = RuvC_P1
  SITE 59: note = RuvC_P2
  SITE 96: note = RuvC_P3
  SITE 98: note = RuvC_P4
  SITE 101: note = RuvC_P5
  REGION 267..353: note = Tnp_domain
  SITE 275: note = Tnp_P1
  SITE 306: note = Tnp_P2
  SITE 314: note = Tnp_P3
  SITE 315: note = Tnp_P4
MWYTGIDWADEHHDALALDEQGRRVGSLRVDHTAKGLAALNTFLEQIIGSHPKEEMACIIETTHGLLITSLLEAGWTIYPVNPRTVDRRRAASGAKTDTIDAYLLAKTGRADFADLHRLTPDSEKVAELKQLTRDQESLIHLQTRLVNQLTACLKAYYPVALDLFGKLQQKSTLLFLQTYPTPQAAQAASVQQIQELLRSCRHPKAKASAVSIVEQVHQPTLQADSVTIRTKSRLMLVLVSQLLPLIEQIAQYDQEIDTLFLTHEDHEIFESLPRAGQRLAPRLLAEIGDDRARYQDASSLQALGGTSPVLFQSGMYSKAHRRLGCIKPLRNTLHTFAWQTTQSEAWARDYYQRKRAEGKSHTVAVRALANVWVRIIFAIWLHRECYQTATFELAQQHHARRAA

SEQ ID NO: 17756 - protein, 343 aa, unidentified
  source 1..343: note = protein_9d43e6b
  REGION 7..149: note = RuvC_domain
  SITE 10: note = RuvC_P1
  SITE 53: note = RuvC_P2
  SITE 88: note = RuvC_P3
  SITE 90: note = RuvC_P4
  SITE 93: note = RuvC_P5
  REGION 212..301: note = Tnp_domain
  SITE 220: note = Tnp_P1
  SITE 250: note = Tnp_P2
  SITE 258: note = Tnp_P3
  SITE 259: note = Tnp_P4
  SITE 271: note = Tnp_P5
MEKITTVGLDLAKSVFQVHGIAEDGAVIVRRALRRSQVLDFFHKLQPCLVGMEACGSAHYWAREIQALGHTVRLMPPAYVKAYLKRNKTDAADAEAICEAVTRLTMRYVPAKTQDEQAAGMVLKARDLLIRQRTQAINALRAHLAELGIVRATGLVGIISLAAVVRDHSDPRLPDEARMALEEFVEQIEAVTTRVERLDRKILEAVRKDDSARRLTAIPDVGPIIAATVRAVVPDPAGFLTGRDFAAWIGLTPRAHSSGGKERIGSISKRGNQQLRTLLVAGATSILKLARRGLQPSPWIAATMLRRPFKVIAVALANKVARIIWALLVHGDTYRGAKRIEQA

SEQ ID NO: 17757 - protein, 277 aa, unidentified
  source 1..277: note = protein_a6ec347
  REGION 10..157: note = RuvC_domain
  SITE 13: note = RuvC_P1
  SITE 55: note = RuvC_P2
  SITE 95: note = RuvC_P3
  SITE 97: note = RuvC_P4
  SITE 100: note = RuvC_P5
  REGION 190..274: note = Tnp_domain
  SITE 198: note = Tnp_P1
  SITE 227: note = Tnp_P2
  SITE 235: note = Tnp_P3
  SITE 236: note = Tnp_P4
  SITE 248: note = Tnp_P5
MAMRVSKSVIGVDVAKIELVTYQADSDLLALIPNEKPAIKRWLKTLPRPAALAVEATNIYHVDLVELAYQAGFDVYIIDGFQLSNYRKGVGGRSKTDASDARLLARFLKNEGECLRPWTPPPAVYGKLQSLLRRRASLIQAKTSLTQSWANDASLKASFAAFLKSIERLDLLVKKKLKDALREAGLLEQVARCQAVEGIGFLTATALVMAYSRGDFNSSDSYIAFLGMDLRVTDSGQKNGRRSLTKRGCSEIRRLLHNAAMSASRTSAWKEFYNHHR

SEQ ID NO: 17758 - protein, 317 aa, unidentified
  source 1..317: note = protein_d544a66
  REGION 7..149: note = RuvC_domain
  SITE 10: note = RuvC_P1
  SITE 53: note = RuvC_P2
  SITE 88: note = RuvC_P3
  SITE 90: note = RuvC_P4
  SITE 93: note = RuvC_P5
  REGION 232..279: note = Tnp_domain
  SITE 238: note = Tnp_P3
  SITE 239: note = Tnp_P4
  SITE 251: note = Tnp_P5
MENIALIGIDLGKNSFHIHCQDRRGKAVYRKKFTRPKLIEFLATCPATTIAMEACGGSHFMARKLEELGHSPKLISPQFVRPFVKSNKNDFVDAEAICEAASRPSMRFVQPRTESQQAMRALHRVRESLVQDKVKTTNQMHAFLLEFGISVPRGAAVISRLSTILEDNSLPLYLSQLLLKLQQHYHYLVEQIKDLESQLKRKLDEDEVGQRLLSIPCVGTLTASTISTEIGDGRQYSTGGRTTLLGISKRGNKKIRTLLVQCARVFIQKLEHQSGKLADWVRELLCRKSNFVVTCALANKLARIAWALTARQQTYEA

SEQ ID NO: 17759 - protein, 412 aa, unidentified
  source 1..412: note = protein_f7ea257
  REGION 4..160: note = RuvC_domain
  SITE 7: note = RuvC_P1
  SITE 57: note = RuvC_P2
  SITE 97: note = RuvC_P3
  SITE 99: note = RuvC_P4
  SITE 102: note = RuvC_P5
  REGION 274..361: note = Tnp_domain
  SITE 282: note = Tnp_P1
  SITE 312: note = Tnp_P2
  SITE 320: note = Tnp_P3
  SITE 321: note = Tnp_P4
  SITE 334: note = Tnp_P5
MNAVGIDVSKGKSMVSVLRPFGELVAKPFEVRHTSSELSELAKRLKSLEGETRVVLEHTGRYYEPVAQLLHDAGVFVSAVNPLLIKEYGNNSLRKVKTDRADSLKIARYGLDNWTELRQHTPMDTIRYQLKSMNRQYGLYTKNKTAMKNNLIALLDQTYPGVNTLFGSPVREDGSQKWVDFAASFWHVDCVRGIGQAAFVERYRKWCKRHGYNLRSDKAAQIHTEAKELIAMLPKNSLSKVMVQEAIAQLNTVSKTVEVFRAEMNRLAKELPEYETVMSLYGAGKSLGPQLMAEIGDIRRFAHKGSLTAFAGVDPGANQSGTYDAKSTRTSKRGSPELRKTLFVLMTVLLQSAPPDDPVFQFLDKKRGEGKPYYVYMTAGCNKFLRIYYGRVKEFMNTLDTPVDMDSTALSQ

SEQ ID NO: 17760 - protein, 326 aa, unidentified
  source 1..326: note = protein_0ddc166
  REGION 6..156: note = RuvC_domain
  SITE 9: note = RuvC_P1
  SITE 57: note = RuvC_P2
  SITE 95: note = RuvC_P3
  SITE 97: note = RuvC_P4
  SITE 100: note = RuvC_P5
  REGION 200..287: note = Tnp_domain
  SITE 208: note = Tnp_P1
  SITE 238: note = Tnp_P2
  SITE 246: note = Tnp_P3
  SITE 247: note = Tnp_P4
  SITE 260: note = Tnp_P5
MKKNVIGVDVSKDTLDYCILDVENHSKIGKGTIANEEKAILKWLREFDVENTIISFEHTGHYGALLAWVLEDSKFVYYIINPLDLQRSLGIQRGKSDVVDAYRIAEYTIGNKHKLSPFKLPSEGLRKLKVLMTARERYVKIAVQIKNSLKAEEILATKVDIKKLITLENQQLNVIEKTIKALEKEMMDILKSIDELQLSYKKITRIIGVGPITALKCIIETDNFMKFTDARKFNCHCGLAPFPYQSGSSIKGRTKTHFLRDKTLKTILFNAAGSAIQHDPQLRNYYLDKIEKGKHKLTALNAVANKIVLRIFAVVKREEPFVKLTT

SEQ ID NO: 17761 - protein, 340 aa, unidentified
  source 1..340: note = protein_0e782cf
  REGION 6..148: note = RuvC_domain
  SITE 9: note = RuvC_P1
  SITE 52: note = RuvC_P2
  SITE 87: note = RuvC_P3
  SITE 89: note = RuvC_P4
  SITE 92: note = RuvC_P5
  REGION 210..300: note = Tnp_domain
  SITE 218: note = Tnp_P1
  SITE 248: note = Tnp_P2
  SITE 256: note = Tnp_P3
  SITE 257: note = Tnp_P4
  SITE 269: note = Tnp_P5
MRIATIGLDLAKSVFQAHGVDENGATVLVKKLHRKQMLPFFSKLSPCLIGIEACGTAHYWARTLAEMGHEVRLIPPSYVKAYVKRGKSDALDAEAICEAVQRPTMRFVPVKTVEQQAILMTHRARSLLVRQRTMLANALRAHLAELGFVTNPGIANLAKLTDQVLANKDAFPSYASAAVEILIRQIMGVSSQIAVLDQQLAAWHAESEASRRLAAIPGLGVITATAIAAIVTDPDQFRSGRQFAAWLGLTPQQHSTGGKTRLGGISKQGDRYLRRLLVVGATAVMRHIKDKPTPMADWIRKLSEKKPFRVVSVALANKLARIAWVVLTRKEAYGPYQLTT

SEQ ID NO: 17762 - protein, 376 aa, unidentified
  source 1..376: note = protein_192a5fc
  REGION 8..153: note = RuvC_domain
  SITE 11: note = RuvC_P1
  SITE 60: note = RuvC_P2
  SITE 100: note = RuvC_P3
  SITE 102: note = RuvC_P4
  SITE 105: note = RuvC_P5
  REGION 245..332: note = Tnp_domain
  SITE 253: note = Tnp_P1
  SITE 283: note = Tnp_P2
  SITE 291: note = Tnp_P3
  SITE 292: note = Tnp_P4
  SITE 305: note = Tnp_P5
MEHELHYIGIDTAKEKLDVDVLRPDGRHRTKKFANTTKGHDELVSWLKGHKIDHAHICIEATGTYMEPVAECLYDAGYIVSVINPALGKAFAQSEGLRNKTDTVDARMLAEFCRQKRPAAWEAPHPLERALRALVVRHQALTDMHTQELNRDTVDARMLAEFCRQKRPAAWEAPHPLERALRALVVRHQALTDMHTQELNRTETAREVQRPSIDAHLLWLEAELKRLEKQIKDLTDDDPDMKHRRKLLESIPGIGEKTSAVLLAYIGLKDRFAHARQFAAFAGLTPRRYESGSSVRGASRMSKAGHVSLRRALYMPAMVATSKTEWGRAFRDRLAANGKKGKVILGAMMRKLAQVAYGVLKSGVPFDASRHNPVAA

SEQ ID NO: 17763 - protein, 316 aa, unidentified
  source 1..316: note = protein_2800497
  REGION 4..123: note = RuvC_domain
  SITE 27: note = RuvC_P2
  SITE 62: note = RuvC_P3
  SITE 64: note = RuvC_P4
  SITE 67: note = RuvC_P5
  REGION 184..271: note = Tnp_domain
  SITE 192: note = Tnp_P1
  SITE 222: note = Tnp_P2
  SITE 230: note = Tnp_P3
  SITE 231: note = Tnp_P4
  SITE 243: note = Tnp_P5
MVFRKKLTRSQLFSQLANVPSCTVVMEACAGAHWVARQFAALGHTARLISPQFVKPFVQGNKNDFNDAQAICEAASRPSMRFVPPKSEAQQTLSALHRVREGWVRQRTAATNQIHAFLLEFGISLPKSSAVIKRLPVVLALHPDLPVRLIAVLERLQAHFKYLDEQIVEVERELAQQLKEDESSQRLLEIPRIGPITASALSMELGDAQQFASSRQFAASLGLVPRQYSTGGKPTLLGISKRGDKNLRRLLVQCARVLMQRIDKREDALGQWVRDLLTRRHSNVVACALANKLARIAWALLAKGTHYQSDPAVQAA

SEQ ID NO: 17764 - protein, 358 aa, unidentified
  source 1..358: note = protein_5b21dba
  REGION 22..163: note = RuvC_domain
  SITE 25: note = RuvC_P1
  SITE 68: note = RuvC_P2
  SITE 103: note = RuvC_P3
  SITE 105: note = RuvC_P4
  SITE 108: note = RuvC_P5
  REGION 227..316: note = Tnp_domain
  SITE 235: note = Tnp_P1
  SITE 265: note = Tnp_P2
  SITE 273: note = Tnp_P3
  SITE 274: note = Tnp_P4
  SITE 286: note = Tnp_P5
MHRRTTQSAGQIIGQMAGLQVIGLDIAKSVFQLHTVDMSTGEIVNVQLKRAKVLGHFANRAPCLIGIEACGGAHHWARELTAQGHAVRLIHAKAVRPFVNGNKTDATDARAIWLAIQQPGTKFVGVKTLAQQATLTLHRQREMLMRMKIMQINALRGLLYEFGATLARGKKALLGELELALEALANSIPQYVVDSLREQAQRIKQLAIDIKAIEVRLAEVLRIDVDMKRVAAIPGVGLLSATAAIATMGEAKAFKSGREFCAWLGLVPKQRGTGGRVNLLGISKRGDTYLRTLLIHGARAVLRHAKEPGPWLEQLQARRPANVVIVAQAAKMARTIWAVTARQQDYQRGHQSTRPLGA

SEQ ID NO: 17765 - protein, 266 aa, unidentified
  source 1..266: note = protein_e21c707
  REGION 2..109: note = RuvC_domain
  SITE 8: note = RuvC_P2
  SITE 47: note = RuvC_P3
  SITE 49: note = RuvC_P4
  SITE 52: note = RuvC_P5
  REGION 143..227: note = Tnp_domain
  SITE 151: note = Tnp_P1
  SITE 180: note = Tnp_P2
  SITE 188: note = Tnp_P3
  SITE 189: note = Tnp_P4
  SITE 200: note = Tnp_P5
MPSLVVFEATGPYHGRFERAFSGKLPLVKVNPLQARRFAQACGTRVKTDAVDARMLAYMGSALALEPDHPLDEKQYELKELFSSRGGLMKDRTRLINRLQTQTLALVKRQTKARIDQITRQLKVLQQDINTRVQDCPSRARANTILRSIPGIGEVAAATILIEMPEIGTLDKKRAASLTGLAPMTRQSGKWRGKATIQGGRKHLRDALYMPALVAARHNPDMRDKYKAMIKQGKPQKVALTAIMRRLIELANALVKADREWVQNGT

SEQ ID NO: 17766 - protein, 343 aa, unidentified
  source 1..343: note = protein_78dec47
  REGION 6..148: note = RuvC_domain
  SITE 9: note = RuvC_P1
  SITE 52: note = RuvC_P2
  SITE 87: note = RuvC_P3
  SITE 89: note = RuvC_P4
  SITE 92: note = RuvC_P5
  REGION 211..301: note = Tnp_domain
  SITE 219: note = Tnp_P1
  SITE 249: note = Tnp_P2
  SITE 257: note = Tnp_P3
  SITE 258: note = Tnp_P4
  SITE 270: note = Tnp_P5
MEVSTIGLDIAKSVFQVHGIDAAGKVVIRRQLRRGQLLKFFKKLGPCVVGMEACATAHHWGREIAALGHEVRLMPAHYVKAYVKRNKNDVADAEAICEAVTRPSMRFVGLKSAEQQSVLMLHRTRELLVRQRTMLVNAIRGHMAEFGIVAAAGLPRIKELLAVIADPDDHRLTPGARACLESLARQLLSLNEEIGAADKRLHAWHRSSDLSQRLATIPGIGPVTASALAASITDPEGFRSGREMAAWIGLVPRQTSTGGKVRLGRISKQGDQYLRWLLVAGAMSVIRHAQRKGAASQPWLDDLMTRRPAKVAAVALANKMARMAWALLRHGGTYRQPMVTASP

SEQ ID NO: 17767 - protein, 368 aa, unidentified
  source 1..368: note = protein_62a167f
  REGION 4..157: note = RuvC_domain
  SITE 7: note = RuvC_P1
  SITE 60: note = RuvC_P2
  SITE 100: note = RuvC_P3
  SITE 102: note = RuvC_P4
  SITE 105: note = RuvC_P5
  REGION 233..319: note = Tnp_domain
  SITE 241: note = Tnp_P1
  SITE 272: note = Tnp_P2
  SITE 280: note = Tnp_P3
  SITE 281: note = Tnp_P4
MLFVGDDWAEDHHDVEVQDEQGRAVKRARLPEGAAGVARFHELVASFLPEDAEPAEVLVCIETDRGPWVRALAAAGYRVFGVNPKQAARHREVMGNSGAKSDKADAHALADMVRTRRHQLREIAADSDEAEAVKVVARAHQTMIWERTRHMLRLRRLSAGQITAALKGHRDKPGKAAAIQAELRAEHLGQSDLVASAYAATVSATVAVLRTLNSEIKTLEGQVEANFGRHPDAEILLSQPGIGVILGARVLAEFGDARGRYASAKARKNYAGTSPITRQSGKSKTVHARFIHNDRLIDALHMQAGAAILHDPAVRAYYDQLKARDLSHNAALRQVGNRLVGILHGCLKTHTPYDPATAWSHRQDDLAA

SEQ ID NO: 17768 - protein, 407 aa, unidentified
  source 1..407: note = protein_a65740b
  REGION 6..159: note = RuvC_domain
  SITE 9: note = RuvC_P1
  SITE 57: note = RuvC_P2
  SITE 98: note = RuvC_P3
  SITE 100: note = RuvC_P4
  SITE 103: note = RuvC_P5
  REGION 222..307: note = Tnp_domain
  SITE 229: note = Tnp_P1
  SITE 259: note = Tnp_P2
  SITE 267: note = Tnp_P3
  SITE 268: note = Tnp_P4
  SITE 279: note = Tnp_P5
MAAVMIGVDPHKGSHTAVAVGAAEEPLGELRVRSSASQAGRLVAWAADWPERTWAVEGAGGLGHLLAQQLVSAGERVLDVQPKLGARVRLLAAGDTNKNDPNDARSVAVAALRPAAGREVKPDDHAAVLKVWSKRHRDLGRARTQVACRLHAVLCELVPGGISKEITAAHATHVLESAKPSGAVEMARCELAADFLEDLRRTGTQMRGTKKKLTAAVRASGTTATEIFGVGPVIAATVIGCAVDVSRFASRDHFAAYNGTAPIEVSSGNRKIYRLSRRGNRRLNHVIHMAAVTQIRHRHSDGRAYYDRKLAEGKTPKEALRSLKRRISDAIFARLQADARRVASAASTGGPGGQPGNDSVASAAGSHPEHRLFGQATPGPESTLRPRPDSQSEKNPPPLTRKVRQAS

SEQ ID NO: 17769 - protein, 366 aa, unidentified
  source 1..366: note = protein_60559cd
  REGION 22..166: note = RuvC_domain
  SITE 25: note = RuvC_P1
  SITE 70: note = RuvC_P2
  SITE 105: note = RuvC_P3
  SITE 107: note = RuvC_P4
  SITE 110: note = RuvC_P5
  REGION 229..315: note = Tnp_domain
  SITE 237: note = Tnp_P1
  SITE 267: note = Tnp_P2
  SITE 275: note = Tnp_P3
  SITE 276: note = Tnp_P4
  SITE 288: note = Tnp_P5
MKKHTIKTNSLSSADLSACTTVAVDLAKNVFQVAGEDALGQVKYEERIKSREAFLAFLYKLPNTVTVLMETGPGAQAWARILQAQGNLARILPAQRVAEHRSGAKNDRNDALAILRAGRDSLIIAVPIKTAAQLAMQALHRARQGYVRRRTAMSNQIRGLLLEHGIAMAQGELALSRNVARILEDATQPLPESLRELIDEMLGEWRHLGERVNVLTARLETAAREDETAKRLMTVRGIGPIIATALLAKQTEPERFPNARLFAAYFGTVPEQNSSGNKTRLGKMCKRGDAYLRSLAIQGAHAVLRQVRPDSEHPDDQRLQRWLSRHGQKGAAVRLANRNLRIVWVLLQNDQTYRRQPMGNQEAAVH

SEQ ID NO: 17770 - protein, 312 aa, unidentified
  source 1..312: note = protein_2c5ad8f
  REGION 6..148: note = RuvC_domain
  SITE 9: note = RuvC_P1
  SITE 53: note = RuvC_P2
  SITE 93: note = RuvC_P3
  SITE 95: note = RuvC_P4
  SITE 98: note = RuvC_P5
  REGION 189..273: note = Tnp_domain
  SITE 197: note = Tnp_P1
  SITE 226: note = Tnp_P2
  SITE 234: note = Tnp_P3
  SITE 235: note = Tnp_P4
  SITE 246: note = Tnp_P5
MELRYIGIDVSKDRLDVHILPEGTAFAVARDGKGLAELVERLSAVQPERIAVEATGGFETVAAAALAGASLPVVIVNPAQVRHFAQAVGQRAKTDPIDASMIVRFVEATKPDVRPLADEATQLLADLVARRRQIIEMIVAERNRERRVEVKRIKKSIARLIAALEKELSEIDAEIDASVRGSPAWRDKEDLIASGPGVGPITARTLIAELPELGALNGKQIASLAGLAPFTRQSGQWKGKAMIAGGRKAVRSALFLASLAACRHNPILKAFRQRLIDAGKPKMLVAIAAARKLLTILNAILPDKQPWRPEIA

SEQ ID NO: 17771 - protein, 346 aa, unidentified
  source 1..346: note = protein_0f06cff
  REGION 7..149: note = RuvC_domain
  SITE 10: note = RuvC_P1
  SITE 53: note = RuvC_P2
  SITE 88: note = RuvC_P3
  SITE 90: note = RuvC_P4
  SITE 93: note = RuvC_P5
  REGION 212..299: note = Tnp_domain
  SITE 220: note = Tnp_P1
  SITE 250: note = Tnp_P2
  SITE 258: note = Tnp_P3
  SITE 259: note = Tnp_P4
  SITE 271: note = Tnp_P5
MNKHTTVGLDLAKNTFAVVVLDGEGRECSRKTLKRRQVLAFMAKQCEAVVAMEACASAHHWARVLQARGNQVVLLPPQHVKGYLRGQKNDYNDALAIAEACQHGRVRPVAVKTLEQQDEQSFHSIRRSLIADKVRLSNQLRGLLGEYGLVVARGDGALRRAMAEHLSEADNGLTPRVRSYLARQYERFVAVVEELVWYDAELRERVQQDEVCVRLQAVPAFGPVVSSVVKHWLGDGRQFGCGRDASAALGLVPRQHSTGGKQQLGGISKRGDPYVRCLMIHGARAVVARAEGKTDPLSRWIQQLKARRGYNKAVVALANKLIRIAWVVIARGEQYRPGSGVGGSPC

SEQ ID NO: 17772 - protein, 425 aa, unidentified
  source 1..425: note = protein_f9b5899
  REGION 6..159: note = RuvC_domain
  SITE 9: note = RuvC_P1
  SITE 57: note = RuvC_P2
  SITE 98: note = RuvC_P3
  SITE 100: note = RuvC_P4
  SITE 103: note = RuvC_P5
  REGION 221..306: note = Tnp_domain
  SITE 229: note = Tnp_P1
  SITE 259: note = Tnp_P2
  SITE 267: note = Tnp_P3
  SITE 268: note = Tnp_P4
  SITE 279: note = Tnp_P5
MGHVIIGMDPHKRSATIEAIDDQEKILAQGRFGTDRDGYKAMLAAGRGFPDRTWAVEGCGGIGRHIAQRLVADGESVVDVPAKLSARARVFATGQGRKTDATDAHSVAVVALRTQGLQVVAADGATVALRLLADRRDGLGHARTDTVNRLHRLLLELLPGGAKKFLSAQQARALLATVRPRDIAGRTRRQLACELISELAAIDKKIKAANTQLSGLVAETGSSLQHLNGIGPSGAARLLGDVGDIARFADRGHFASWNGTAPIDASSGEQQRHRLSRAGNRRINRVLHIMAIVQLRNDTEGRAYYRRKLAAGKTSMEAIRCLKRRLSDQVYRQMINDARASATGPGGHTGTATGSSVAGLHPSAGTSEKSLPGPATCDPTPARRSILQVAPGASLSRRTAAVVKRPLLDDGEDRRTLARREQRPS

SEQ ID NO: 17773 - protein, 342 aa, unidentified
  source 1..342: note = protein_ff7b315
  REGION 6..148: note = RuvC_domain
  SITE 9: note = RuvC_P1
  SITE 52: note = RuvC_P2
  SITE 87: note = RuvC_P3
  SITE 89: note = RuvC_P4
  SITE 92: note = RuvC_P5
  REGION 211..298: note = Tnp_domain
  SITE 219: note = Tnp_P1
  SITE 249: note = Tnp_P2
  SITE 257: note = Tnp_P3
  SITE 258: note = Tnp_P4
  SITE 270: note = Tnp_P5
MEISTIGLDLAKSIFQVHAVDTSGEIVVRKALRRAQVLPFFTKLPPCLIGMEACGTSHYWARELVKLGHEVKLMPPAYVRPYVKRGKTDAADAEAICEAVTRPSMRFVPVKSAKQQAALALHRTRDLLVKQRTQLVNMVRALLAEFGIEMARGLHHALSLAARLSAGDAPEVPPLAQRVVKGLADQIGALQVQLGALEKELHAWHRSSELSQRLATIPGIGVISATALAASVTEPERFRSGRQFAASLGLTPLQNCSGGKERMGRISRMGDRYLRRLLVLGMTSLVRRARTKPESVDPRLATMLERKPARVVTVAAANRTARVAWAIMTRGGTYQAPLATAA

SEQ ID NO: 17774 - protein, 349 aa, unidentified
  source 1..349: note = protein_9264461
  REGION 12..152: note = RuvC_domain
  SITE 15: note = RuvC_P1
  SITE 58: note = RuvC_P2
  SITE 93: note = RuvC_P3
  SITE 95: note = RuvC_P4
  SITE 98: note = RuvC_P5
  REGION 217..302: note = Tnp_domain
  SITE 225: note = Tnp_P1
  SITE 255: note = Tnp_P2
  SITE 263: note = Tnp_P3
  SITE 264: note = Tnp_P4
  SITE 276: note = Tnp_P5
MLRNKPRDAAVYGVDIGKTTFHVVGLDETGRPIQKAKFRRDTLLQFFERAAPAIVGMEACGGSQWLARKITALGHRVRIVPTQFVKPYVKPNKNDLIDAAAIAEAVTRPTMRFVEIKTPEQVDLQALHRIRERLVTARTRLICQMRVFCLEHGVAMRQGAGAFKLDLARVIADEENDLTPTMRRLLSELWEELRALEGRIADVSREIEATATTHDVARPLATIPGIGPLGATAIIAAVGEGRQSRKARDLAAWIGSVPRQHSTGGKTTLLGISKRGNPYIRRLLIHGARSCLMHLDRSRDRLGAWLDQLRTRMHPNKVVVALAAKMARVAWVILNKPGALYERRDPAFV

SEQ ID NO: 17775 - protein, 340 aa, unidentified
  source 1..340: note = protein_e428330
  REGION 5..151: note = RuvC_domain
  SITE 8: note = RuvC_P1
  SITE 53: note = RuvC_P2
  SITE 91: note = RuvC_P3
  SITE 93: note = RuvC_P4
  SITE 96: note = RuvC_P5
  REGION 211..297: note = Tnp_domain
  SITE 219: note = Tnp_P1
  SITE 249: note = Tnp_P2
  SITE 257: note = Tnp_P3
  SITE 258: note = Tnp_P4
  SITE 270: note = Tnp_P5
MGEYIGLDVSLKETAVSIRRGGKRVWRGKCASDPQLLAALIRKHAREAERVVFETGPLSVWFFHALTAEGLPAICIDARHAKAALHMAANKTDANDADGLAHLAKVGFYKEVRVKSFDSMLARTLVAARTRLVRIGTELSNQIRGLMKTFGLVVPPASGSKFEREVEALLADNADLGRIIQPLLEAWHAVRLRAAELGRKLLADARRSDACQLLMSIPGVGVVTATSFITAIENPTNFKRSRSVGAWVGLTTRRYQSGEIDYDGHISRRGDSHLRGLLYEAATVLLVRSRSECDLRKWGLQLRERVGFKRAAVAVARKLAVIMHTMLVTGEPFQQTRASA

SEQ ID NO: 17776 - protein, 342 aa, unidentified
  source 1..342: note = protein_295053a
  REGION 6..148: note = RuvC_domain
  SITE 9: note = RuvC_P1
  SITE 52: note = RuvC_P2
  SITE 87: note = RuvC_P3
  SITE 89: note = RuvC_P4
  SITE 92: note = RuvC_P5
  REGION 210..294: note = Tnp_domain
  SITE 218: note = Tnp_P1
  SITE 248: note = Tnp_P2
  SITE 256: note = Tnp_P3
  SITE 257: note = Tnp_P4
  SITE 269: note = Tnp_P5
MEDTIIGVDLAKRVFQLHGASKSGQVKFRKKLSREQFRAFMAQHPACHVVFEACGSASYWAQEVQAMGHEVRLIAPQYVRPFVKRQKNDVADAEAIVIAARQPEMRFVAPKSIKQQSKAVLFRSRQRLVRQRTELVNALRAVLYECGHVFPAGIINLKRIEGLLQDPEVDLPALIVEECLDLLAQISEKTNRIVAKSKKVKLLAAETDTAQRLQTMPGVGPMTALAVEAFTPDMAHFKCGRNFAAWLGLAPRQYSSGGKERLGRVSKAGQSDIRRLLIIGAMSRLNWIGRRTIPEGSWLARMLSRKPKIVVAIALANKMARQIWAMLTKNEDFRDPALATAA

SEQ ID NO: 17777 - protein, 342 aa, unidentified
  source 1..342: note = protein_22676fe
  REGION 7..147: note = RuvC_domain
  SITE 10: note = RuvC_P1
  SITE 53: note = RuvC_P2
  SITE 88: note = RuvC_P3
  SITE 90: note = RuvC_P4
  SITE 93: note = RuvC_P5
  REGION 210..303: note = Tnp_domain
  SITE 218: note = Tnp_P1
  SITE 248: note = Tnp_P2
  SITE 256: note = Tnp_P3
  SITE 257: note = Tnp_P4
  SITE 269: note = Tnp_P5
MVTPVRIGMDTAKSVFQLHGVDENEIVVLRRQLRRADMIRYFEKLPPALVAIESCGSSHHWARLLESFGHEVKLIPPQYVKPYVKRGKNDAADAEALCEAVTRPTMRFVPVKSKERQAACMLMTVRERLVMVKSQLSNAFRSYAAEFGIVGPSGRQNVNGLIARVLEDDTLPELARELFHFQAKEYAAVEARLAEIDAKLMKWHRADELSRRIATIPGVGPIGSTMLSMKAPPAETFGSGRDFAAWLGLTPRDHSTGGRSRLGGITKAGDPSIRSTLIVGATALLRHVRLGHTKPSPWLAKLMERKPPKLVAVAMANKFARIAWRLMVSGGVYTRPAALNPT

SEQ ID NO: 17778 - protein, 394 aa, unidentified
  source 1..394: note = protein_4b54aa2
  REGION 4..157: note = RuvC_domain
  SITE 7: note = RuvC_P1
  SITE 58: note = RuvC_P2
  SITE 98: note = RuvC_P3
  SITE 100: note = RuvC_P4
  SITE 103: note = RuvC_P5
  REGION 263..353: note = Tnp_domain
  SITE 271: note = Tnp_P1
  SITE 301: note = Tnp_P2
  SITE 309: note = Tnp_P3
  SITE 310: note = Tnp_P4
  SITE 326: note = Tnp_P5
MATIGIDVGKREHIAAIQYQGEREARKTVLRFGADRAGVAELSAWIARQGGAERAVLESSGHYQLNLAAALQRQGLPVAVVNPLESRYFGKRRLQRTKSDAADARTLATLAMVDQPEVRDVLAGAELREAARFVMGLVDQQGRIDQKICRLVELGFPELEAAYDDPTCISALALLRTAATAAAVARKHTATLAQASRPGGGRRIGPKKAEQISTLAKDTIAAPELAEQIGFQMRLLIAQHDLLEGQIAEAEAHLATKLDGELVRRLRTIPGAGPAIVATLIAEVGDIYRFSDFDKLVAFVGVHPAEKSSGEKGKNPETSWRMSKAGNAYLRTALYRTAVVGITHNPLIRAHYARKRAQGKSNMNAVGHCMKKALAIVWGVWRSGTDFAAPPSRP

SEQ ID NO: 17779 - protein, 398 aa, unidentified
  source 1..398: note = protein_94b40a6
  REGION 12..166: note = RuvC_domain
  SITE 15: note = RuvC_P1
  SITE 63: note = RuvC_P2
  SITE 103: note = RuvC_P3
  SITE 105: note = RuvC_P4
  SITE 108: note = RuvC_P5
  REGION 273..357: note = Tnp_domain
  SITE 281: note = Tnp_P1
  SITE 310: note = Tnp_P2
  SITE 318: note = Tnp_P3
  SITE 319: note = Tnp_P4
  SITE 331: note = Tnp_P5
MIREHAQVDVFVGLDVGKSDHHAVALDRGGKVLFDRALPNDEARLRSILADLSEHGRVLVVVDQPATIGALPVAVARECGVVVGYLPGLSMHRIADLHPGQAKTDARDAAIIAEAARSMPHTLRSIALDDEQIAELSMLCGFDDDLRAQITATSNRARGLLTQIHPALERVLGPHLDHPAVLDLIETWPTPADFAAAGTRRITARLRRGAPRLADRLAAQITAALGEQTVVVTGTKAAAVVLPKLAAQLTTLRTQRSEVAAKVEELVDDHPLHLVLMSMPGVGIRTAARLLTEIVGKQFTSAAHLASYAGLAPVTRRSGTSIRGEHPSRSGNKVLKRALFLSAFAALRDPVSRAYYDRKRAEGKRHNQALIALARRRRDVLFAMLRDGTLYDPPTRTA

SEQ ID NO: 17780 - protein, 342 aa, unidentified
  source 1..342: note = protein_8d543d6
  REGION 5..151: note = RuvC_domain
  SITE 8: note = RuvC_P1
  SITE 91: note = RuvC_P3
  SITE 93: note = RuvC_P4
  SITE 96: note = RuvC_P5
  REGION 211..297: note = Tnp_domain
  SITE 219: note = Tnp_P1
  SITE 249: note = Tnp_P2
  SITE 257: note = Tnp_P3
  SITE 258: note = Tnp_P4
  SITE 270: note = Tnp_P5
MSAYVGLDVSLKETAVSVRRGGKRIWRGKCASDPKVLADLIRARAPDAERVVFETGQLSTWFYHALKADGVPAICIDARHAKAALDMAANKTDANDADGLAHIAEVGFYREVRVKGFESMLMRTLVAARDQILKVIVQMSNQIRGLMKTFGLVVPKSAGGAFEGHVRRLLADNTQLERIVLPMLDAWRGLRMQAAKLDGQLRAASRLDQRCALLMSIPGIGPVTASSFVAAVEEPGNFKSSRAVGAWLGLTTRRYQSGEVDYGGHISRRGDPRLRGLLYEAAVVILTRSTGESTLKQWGVGLRERLGFKRAAVAVARKLAVIMHRMLHTGELFDRTAGAAVS

SEQ ID NO: 17781 - protein, 404 aa, unidentified
  source 1..404: note = protein_4102f8f
  REGION 4..159: note = RuvC_domain
  SITE 7: note = RuvC_P1
  SITE 59: note = RuvC_P2
  SITE 96: note = RuvC_P3
  SITE 98: note = RuvC_P4
  SITE 101: note = RuvC_P5
  REGION 267..353: note = Tnp_domain
  SITE 275: note = Tnp_P1
  SITE 306: note = Tnp_P2
  SITE 314: note = Tnp_P3
  SITE 315: note = Tnp_P4
MWYAGIDWADTHHDALVIDEKGSQVGSLRVDHTPQGMSKLNAFLEQIIGTAPKEQMACIIETTHGLLIAHLLEAGWPVYPVNPRTVDRRRSASGAKTDTIDAYLLAKTGRADFADLHRLTPDSEKVAELKLLTRDQDALIQTQTRLVNQLTACLKAYYPVALELFTKVQQHTTLVFLQTYPTPQAAKSASTEQITQVLKKAGHPNPLAVAPKIVERLQPPHLQADAVITRTKSRLMLALVSQLLPLIEQIAQDDKEIDTLFLTHEDHEIFESLPRAGQRLAPRLLAEIGDDRKRYQDASSLQALGGTSPVLYQSGMYSKAHRRLGCIKPLRNALHQFAWQTTQSEAWARAYYQRKRAEGKSHTVAIRALANVWVRIIFAMWLHHRCYETATFEQAQQQHARRVA

SEQ ID NO: 17782 - protein, 417 aa, unidentified
  source 1..417: note = protein_4500692
  REGION 21..175: note = RuvC_domain
  SITE 24: note = RuvC_P1
  SITE 72: note = RuvC_P2
  SITE 112: note = RuvC_P3
  SITE 114: note = RuvC_P4
  SITE 117: note = RuvC_P5
  REGION 283..368: note = Tnp_domain
  SITE 291: note = Tnp_P1
  SITE 321: note = Tnp_P2
  SITE 329: note = Tnp_P3
  SITE 330: note = Tnp_P4
  SITE 342: note = Tnp_P5
MSGTHNPVWTGQDRPEYAVFCGVDVGKSDHHACALDPAGKRLYDKPLPNDEAALIGVLSRLTAHGRVLVVVDQPAAIGALTIAAARSLGIDVGYLPGLAMRRIADLYPGEGKTDERDAFIIADAARTMPHTLRRVGTDDETLAELTVLAGYDDDLASQSTRLANRLHDALLHIHPALERLLAKQLDRPGVLALLATASTPDALRALGAEGIAEALRAGGSPRLARTLPAKILVTLNTQTLVVPGTTAFGRVIAGVAVQLRDLHHERHALARDLEGLLEAHPLAEVLRSMPGVGLRTALKILTIVGDGSAFPTSGHLAAYAGLSPVTRKSGSSIKGETRSYRGNHALKSALFLSAFASLGDPASRAYYDRKRAEGKKHNAALTCLARRRVDVLFAMLRDRIPYRHPVTHEPTPTAAVA

SEQ ID NO: 17783 - protein, 342 aa, unidentified
  source 1..342: note = protein_631d60a
  REGION 6..147: note = RuvC_domain
  SITE 9: note = RuvC_P1
  SITE 52: note = RuvC_P2
  SITE 87: note = RuvC_P3
  SITE 89: note = RuvC_P4
  SITE 92: note = RuvC_P5
  REGION 211..297: note = Tnp_domain
  SITE 219: note = Tnp_P1
  SITE 249: note = Tnp_P2
  SITE 257: note = Tnp_P3
  SITE 258: note = Tnp_P4
  SITE 270: note = Tnp_P5
MQITSIGIDLGKTTFHLIALDQRGKVVSKQKFSRKQLLAYSANLPNSLIGMEACAGAHFLGAALRDQGHDVRLIPAQFVKPFLKSNKNDFLDAEAIAEAVARQNMRFVPIKTDDQLDLQALHRVRDRLVHRRTAVINQIRGFLLERGITFAKGPAKLRQQMPAILENADENLTPRLRSLLDHLWQEWKGLNSDIERVSDEIDAIADQDAACRRLRQIPGVGPLVATATVAAIGNGAAFRKGREFAAWLGLIPRQHSTGGKAKLLGISKRGNVYLRRLFIHGARAMLLRVKYDTGRLGQWAHQLELRAPRNKVIVAVANKLARIAWAVLSTGNEYRNTAVTAA

SEQ ID NO: 17784 - protein, 297 aa, unidentified
  source 1..297: note = protein_fc4e08f
  REGION 13..155: note = RuvC_domain
  SITE 58: note = RuvC_P2
  SITE 98: note = RuvC_P3
  SITE 100: note = RuvC_P4
  SITE 103: note = RuvC_P5
  REGION 170..255: note = Tnp_domain
  SITE 178: note = Tnp_P1
  SITE 207: note = Tnp_P2
  SITE 215: note = Tnp_P3
  SITE 216: note = Tnp_P4
  SITE 227: note = Tnp_P5
MMAELAEIQCVLGLDVSCNTVTLFDSCTGRCLTIANEADALRTALQPYQGTATLAVCEATGGHEDTLLCVLLELAIPAHRADPAKVNAYIKSFGKRAKNDPIDARWLSRYGRDRAAMLLRWQPANPTQQKLELLVARRLDLVAMRVQEQNRLKAPRSSLIGESRDLTLRAKSLRSVPGIGPVLVPLLLAVMPELGTLNRRQVASLAGVAPHPKDSGKASWHRSTTGGRRQIRPALFIAALAACRGNSPIATAYKALLKAAKPKRVALTAIMRKIITIANARVRDALQQQKQIMPVPA

SEQ ID NO: 17785 - protein, 341 aa, unidentified
  source 1..341: note = protein_f253f4e
  REGION 7..149: note = RuvC_domain
  SITE 10: note = RuvC_P1
  SITE 53: note = RuvC_P2
  SITE 88: note = RuvC_P3
  SITE 90: note = RuvC_P4
  SITE 93: note = RuvC_P5
  REGION 212..297: note = Tnp_domain
  SITE 220: note = Tnp_P1
  SITE 250: note = Tnp_P2
  SITE 258: note = Tnp_P3
  SITE 259: note = Tnp_P4
  SITE 271: note = Tnp_P5
MEKVAIIGLDIAKQVFQVHGINEAGAIVCRRRLRRDDVVAFFKVLPPCLIGIEACATGHYWARVLTALGHQARLMPASYVKPYVKRQKNDATDAEAICEAVTRPTMRFVPVKSEEQQSVLMLHRVRELLIRQRTMLVNALRGHLAEFGIITRQGVAGVETLIAVVEAGDQDVIPPLARSALLSVVGQLREVHEKIGEMDRQIHTWHRGNELSRRLETIPGIGPITASAIAATVADASLFRSGRQLAAWIGLVPRQNSSGGKDRLGRISKQGDPYLRRLLVIGAHAVLRFSKKGKTAPTRWAADLLVKKPYNVVAVALANKMARIVWALMATGGRFEGTGRL

SEQ ID NO: 17786 - protein, 401 aa, unidentified
  source 1..401: note = protein_59f6f8f
  REGION 9..163: note = RuvC_domain
  SITE 12: note = RuvC_P1
  SITE 60: note = RuvC_P2
  SITE 100: note = RuvC_P3
  SITE 102: note = RuvC_P4
  SITE 105: note = RuvC_P5
  REGION 270..355: note = Tnp_domain
  SITE 278: note = Tnp_P1
  SITE 308: note = Tnp_P2
  SITE 316: note = Tnp_P3
  SITE 317: note = Tnp_P4
  SITE 329: note = Tnp_P5
MTSTFGVFLGLDVGKGEHHAVGLDPAGKRLHDAPLPNSEPRLRALFDKLAEHGPLLVVVDQPATIGALPVAVARAAGHKVAYLPGLAMRRIADLYPGRAKTDARDAFVIADAARSLPHTLRPVDVGDDALAELDVLVGFDDDLAGEATRIANRIRGLLTGIHPALERAIGSRISHPAVLEILSRCGGPTGIAKAGRRKLTAIATAHAPRMGDKLVAAIMTALEEQTVTVPGTTAADTVLPRLADSLKTVLLQRKQVAAEVEGILDAHPLAGVLTSMPGIGVRTAARILLEIGDATGSKTSGHLAAYAGIAPVTRSSGSSIKGEHPARTGNRKLKRAFFLAAFAALSDPTSRAYYQRKRDQGKKHNAALICLARRRCDVLFAMLRHKTYYRHPEPAPAPTAA

SEQ ID NO: 17787 - protein, 343 aa, unidentified
  source 1..343: note = protein_8e001ad
  REGION 6..149: note = RuvC_domain
  SITE 9: note = RuvC_P1
  SITE 54: note = RuvC_P2
  SITE 89: note = RuvC_P3
  SITE 91: note = RuvC_P4
  SITE 94: note = RuvC_P5
  REGION 213..300: note = Tnp_domain
  SITE 221: note = Tnp_P1
  SITE 251: note = Tnp_P2
  SITE 259: note = Tnp_P3
  SITE 260: note = Tnp_P4
  SITE 272: note = Tnp_P5
MKLIRVGVDLAKSVFQVHGVDRKEKAVWRRRLARESWVKVLLETVEPGCKIGMESCGGAHYWARMLQEKGFAVKLIAPQFVKPYVKSNKNDANDAEAICEAMSRPGMRFVAVKNVEQQDIQAVHRVRSGLIEQRTAKANQIRGLVAEYGLIAPKELSHLRGALPLWLEDAQNGLTDRFRRLLNALWGDLLGLDARVVELDREIALIAQSHPVAKRLQQLRGVGPIIATALVAAVGDGAQFANGRQMSAAFGLTPKQHSSGGKERLLGISKRGDTYLRTLLIHGARSVIRTANGKTDRLSQWVTRLAERRHPNVAAAALANKTTRMAWAMLKNDTNYEPDRIVA

SEQ ID NO: 17788 - protein, 439 aa, unidentified
  source 1..439: note = protein_07fde3d
  REGION 40..196: note = RuvC_domain
  SITE 43: note = RuvC_P1
  SITE 93: note = RuvC_P2
  SITE 133: note = RuvC_P3
  SITE 135: note = RuvC_P4
  SITE 138: note = RuvC_P5
  REGION 310..397: note = Tnp_domain
  SITE 318: note = Tnp_P1
  SITE 348: note = Tnp_P2
  SITE 356: note = Tnp_P3
  SITE 357: note = Tnp_P4
  SITE 370: note = Tnp_P5
MQVELLLYVRLIPQQMEPAMRNAGIHANTHLEVHRMYNAVGIDISKGRSTVSVLQPGGTVIRKPFHVSHTSQSLHELTEYLGSLDGSTKIVMECTGRYHEPVVKALSEAGLFGSVVNPHLIKNFGNNSLRKVKSDPADAKKIARYTLDNWTELRQYSGMDNTRTQLKTLNAQFSFFMKQKVAAKANLIALLDNTYPGVNKLFDSPVRQDGSEKWVDYAYSFWHVDCVRKIGVKAFTERYRAFCKKHHYIFQPDKPEKLFHASRELVAVFPKEKTYKLLIQQSIQQLNLTSAHVERLRQEMDELASTLPEYSTVMDIYGVGKTYGPQLIAEIGDVSRFTHREALTAFAGVDPGVDESGQHKSKSNKASKVGSARLRKTLFQIMTTLLQNAPEHDPVYRFLDKKRSQGKPYYVYMTAGANKFLRIYYGKVKECLRNLEQAE

SEQ ID NO: 17789 - protein, 319 aa, unidentified
  source 1..319: note = protein_afcb3f3
  REGION 3..148: note = RuvC_domain
  SITE 6: note = RuvC_P1
  SITE 50: note = RuvC_P2
  SITE 90: note = RuvC_P3
  SITE 92: note = RuvC_P4
  SITE 95: note = RuvC_P5
  REGION 189..273: note = Tnp_domain
  SITE 197: note = Tnp_P1
  SITE 226: note = Tnp_P2
  SITE 234: note = Tnp_P3
  SITE 235: note = Tnp_P4
  SITE 246: note = Tnp_P5
MFVGVDVAKAELVVAVRPGGARWTVTNDERGVRTLVERLREVPPTLIVLEATGGYELLGVAALAAAELPVVVVNPRQVRDFAKATGQLAKTDCLDADILARFAEKVRPALRPIATAETQELDALLTRRRQLLEMLGAERNRLGQVFGKGKRPVKKSLKTHISFLERELRIADSGLDDAVRRSPVWREQDDLMQSVPGVGPVLSHSLLADLPELGRLSRRAIAKLVGVAPLSRDSGTFRGRRFVQGGRAPLRGVLYMGALVAARWNPVIRAFYLRLVAAGKPKKLALVACMRKLLTILNVMVRTQTRWSMQAAVPTLVGT

SEQ ID NO: 17790 - protein, 317 aa, unidentified
  source 1..317: note = protein_329d38f
  REGION 7..149: note = RuvC_domain
  SITE 10: note = RuvC_P1
  SITE 54: note = RuvC_P2
  SITE 94: note = RuvC_P3
  SITE 96: note = RuvC_P4
  SITE 99: note = RuvC_P5
  REGION 189..273: note = Tnp_domain
  SITE 197: note = Tnp_P1
  SITE 226: note = Tnp_P2
  SITE 234: note = Tnp_P3
  SITE 235: note = Tnp_P4
  SITE 246: note = Tnp_P5
MEKNNYIGIDIAKESMEVMVYEGKEHWAYTNDEKGLAKLLAKMKRLSPCLIVLEATGGYEITVAAELQSHGFPVAVVNPKYIRDFAKSTGILAKTDILDAQVIARYAATVKPAPRVLPSEETRKLGVIIMRRRQITTMLTAENNRFQTADPAVKARIKLHIKWLEQELDDINKELKQKVQDNPDWKEKDAILQSVPGVGPNLSITLLADFPELGNLNRKQIAALGGVAPFNRDSGKMRGKRTIWGGRDSVRTATYMAAFSAIRCNALFKSFYKRLITAGKKFKVAMVACMRKLLCVLNAMLKNRTPWNYSVNQSISP

SEQ ID NO: 17791 - protein, 314 aa, unidentified
  source 1..314: note = protein_fdf30a2
  REGION 8..149: note = RuvC_domain
  SITE 11: note = RuvC_P1
  SITE 54: note = RuvC_P2
  SITE 94: note = RuvC_P3
  SITE 96: note = RuvC_P4
  SITE 99: note = RuvC_P5
  REGION 190..274: note = Tnp_domain
  SITE 198: note = Tnp_P1
  SITE 227: note = Tnp_P2
  SITE 235: note = Tnp_P3
  SITE 236: note = Tnp_P4
  SITE 247: note = Tnp_P5
MIIALRCVGIDVSKSMLDIFDDAIGAPERVANAPQPIAQQVARWRNNEVFVVFEATGVYDRALAEALRQAGIRYARVNPARARDFARASGRLAKTDTIDARMLADFARAMAPAADPPPEPARNTLAFIAKRRDQLVHMRAQEKNRRSEAHDPAMADHIAVHIDFLSREIEAIDARIKALIKAEPQICEQARLLRSAPGVGPVACMQLIAQMPELGRAGPKQIAALAGLAPLNVDSGSYRGKRAIGGGRKRVRDALYMAALNAVRRDPNIKSFYQRLRTAGKPAKLALIAVARKLLTILNAMLRDQKIYAVPSPT

SEQ ID NO: 17792 - protein, 400 aa, unidentified
  source 1..400: note = protein_4ba34b7
  REGION 7..172: note = RuvC_domain
  SITE 10: note = RuvC_P1
  SITE 63: note = RuvC_P2
  SITE 103: note = RuvC_P3
  SITE 105: note = RuvC_P4
  SITE 108: note = RuvC_P5
  REGION 272..357: note = Tnp_domain
  SITE 280: note = Tnp_P1
  SITE 310: note = Tnp_P2
  SITE 318: note = Tnp_P3
  SITE 319: note = Tnp_P4
  SITE 330: note = Tnp_P5
MEACIRVGVDVGCRAHRVGVAGPDGALLEEFDISHTREGFRSFFERVHRRQQELQLPVAVAMEGFNGYARPLDQEIRTHGWRLYNVNNLKLARFREVFPGPAKTDALDARKILELFHLKDHLPLAKDVLQEVGEIPPENEKLKRLSRRRRQLVEEKIRVMDRLQADLQAVSPGLLSITKDVGNLWFLRFLTARDDLAQPARLRPSTVHEIKGIGVKWAGVIADWQKKATFSSEVDYVGPMIIADARRILALLQEIRALDRAMAELTEISSIGRRVRTIPGFGKTSAAELAGEIGTLERFASESSLALYLGMAALDNQSGQYHGSKRPRQVNRRAKAAMMTAVARHIECVPQSKAYYDRKRAEGKRHNQAVRALGRHLVRVIWSMLRQERDYELRDSPPAS

SEQ ID NO: 17793 - protein, 311 aa, unidentified
  source 1..311: note = protein_6254309
  REGION 6..154: note = RuvC_domain
  SITE 9: note = RuvC_P1
  SITE 53: note = RuvC_P2
  SITE 92: note = RuvC_P3
  SITE 94: note = RuvC_P4
  SITE 97: note = RuvC_P5
  REGION 188..272: note = Tnp_domain
  SITE 196: note = Tnp_P1
  SITE 225: note = Tnp_P2
  SITE 233: note = Tnp_P3
  SITE 234: note = Tnp_P4
  SITE 245: note = Tnp_P5
MTDDTIGIDISKATLDIHRLSDGKMMSFSNCPAGFKEFSKFCAQTSVTRVVYEATGAYHSGLERALGALLPLVKVNPLQARRFAQAQGVRAKTDAVDAKMLAVMGNAFVLDPDKPATKLQHDLKELRAFRSGLIKDRTRIMSRQKTQTLSIICRQSKARLAQVDKHIAEIDAEVKRLIQSSDTMARSMKILRSIPGIGAVCASTILIEMPEIGRMDRKQVASLTGVAPMTRQSGQWRGKSFIQGGRKVVRNALYMPALVAMRFNPDLKAKYQAMIKAGKPPKVALTALMRKLIELANALIKADRNWEEKRA

SEQ ID NO: 17794 - protein, 402 aa, unidentified
  source 1..402: note = protein_0ce3597
  REGION 4..160: note = RuvC_domain
  SITE 7: note = RuvC_P1
  SITE 57: note = RuvC_P2
  SITE 97: note = RuvC_P3
  SITE 99: note = RuvC_P4
  SITE 102: note = RuvC_P5
  REGION 274..361: note = Tnp_domain
  SITE 282: note = Tnp_P1
  SITE 312: note = Tnp_P2
  SITE 320: note = Tnp_P3
  SITE 321: note = Tnp_P4
  SITE 334: note = Tnp_P5
MNCVGIDVSKGKSMIAVMRPFGEVVVSPFEVLHTDSELSKLAGLLKSLDGETRVVIESTGNYHAPVAWLLHDAGLYVSVVNAMLVHDYGNNSLRRAKTDKKDAVKLANYGLDHWLILPRYVPEEDTRLMLKTCYRQYQQYSKVQTMLKNNLISLLDTAFPDANRLFTSPPRADGSEKWVDFVAAFWHYECVCGLSEKAFTAKYQKWCKKHGYNFSKGKALDIYASSCGHFGVMPKTDTAKLLVEQAVSQLRATSAALAALKQEMQSLAASLPEYPVVMEMFGVGPTLGPQLMAEIGDVRRFHSKKALVAFAGIDAPPYQSGQMDVRSRSISKRGSASLRRTLFLVMGVILQHAPMNEPVYQFMNKKRSEGKPYRVYMIASANKFLRIYYASVKAYLDSLEHD

SEQ ID NO: 17795 - protein, 350 aa, unidentified
  source 1..350: note = protein_08eb7e9
  REGION 1..106: note = RuvC_domain
  SITE 3: note = RuvC_P2
  SITE 43: note = RuvC_P3
  SITE 45: note = RuvC_P4
  SITE 48: note = RuvC_P5
  REGION 214..300: note = Tnp_domain
  SITE 222: note = Tnp_P1
  SITE 252: note = Tnp_P2
  SITE 260: note = Tnp_P3
  SITE 261: note = Tnp_P4
  SITE 273: note = Tnp_P5
MVDQPNTIGALPVAVARDAGCEVAYLPGLAMRKAADLYPGRAKTDTKDAFIIADTARTMPHTLRQVDHNSETLSALKVLSGFDEDLAHECTRALNRLRSLLTQIHPALERVFTGTTLSSELALNLLIKYAGPTGLATAGKTRVLRYARTHRYRNPGQLIDRIFTALEEQTVTVPATRAVESIIPRIAAQVVELKTQRATVAQEVEAMLADFPLSKVLMSMPGIGIKTAAQILLAIGDGSSFATASHLAAYAGIAPITRRSGSSIRGEYPSRAGNKRLKNALFYSAWIASTRDPASKTYYQRKRAEGKRHNAAIICLARRRCNVIYAMLRDGTPYQPPTPSPNPKPVTLAA

SEQ ID NO: 17796 - protein, 398 aa, unidentified
  source 1..398: note = protein_4311bcc
  REGION 10..173: note = RuvC_domain
  SITE 13: note = RuvC_P1
  SITE 69: note = RuvC_P2
  SITE 110: note = RuvC_P3
  SITE 112: note = RuvC_P4
  SITE 115: note = RuvC_P5
  REGION 273..360: note = Tnp_domain
  SITE 281: note = Tnp_P1
  SITE 311: note = Tnp_P2
  SITE 319: note = Tnp_P3
  SITE 320: note = Tnp_P4
  SITE 333: note = Tnp_P5
MKGQDIMIYVGIDVASQKHDCFLLKDTGEVFSKTSFTIKNDFEGYKKLHNSILQFVESTKDSNVRIGLESTGHYSKNILLYLIKQGYQTTLINPILTNMDRKASTVRKTKTDKIDAEAICKFLDKNRFDFKPYTLLSYHIDALKSLTRQRFSLVKQMTQQKLIFQRLVNVIFPELLSHFSNDYGESVLNILYSYPTPKKLAKAHKESITKLLHSRCKITSSEILELAKNSIGQSEEYLGFELKHTIDMILFYQSQIEIYNKQIEIELNETEYGKIITSIPGVGIITGAMIISEIGDINNFTTLDQLLAYAGLDPSVYESGKFESSHNKPSKRGSKYLRWAIHQASSVIWQHDNTFKDYYLKKIKESKHHYVAIGHIDKKLIRVIFSLLKNKSMFIPQK

SEQ ID NO: 17797 - protein, 343 aa, unidentified
  source 1..343: note = protein_d7fe734
  REGION 6..148: note = RuvC_domain
  SITE 9: note = RuvC_P1
  SITE 52: note = RuvC_P2
  SITE 87: note = RuvC_P3
  SITE 89: note = RuvC_P4
  SITE 92: note = RuvC_P5
  REGION 212..298: note = Tnp_domain
  SITE 220: note = Tnp_P1
  SITE 250: note = Tnp_P2
  SITE 258: note = Tnp_P3
  SITE 259: note = Tnp_P4
  SITE 271: note = Tnp_P5
MQITTVGLDLAKHIFQVHAVDATGQVVVRKRLRRGEVLPFFAGLSPCLIGMEACATAHHWARELIKLGHMVKLMPPAYVKAYVKRGKTDAADAEAICEAVARPSMRFVPVKSAEQQSVLMLHRVRALLIRQRTMLVNALRGHLAEFGIIVAQGISRIRELIAILTDESADAVLPPLARRALAPLVDQLLDLQPRIRALEAELLAWHRQSQESRRLETIPGVGFITATAIAATVTDPSQFRSGREFAAWLGLTPRPNSSGGKERLGRISKMGDGYLRTLLVVGATAVIRYAHKKTAAGSAWIAELLARKPARLVSVALANKTARIAWALLARGEVYQAPAPAAV

SEQ ID NO: 17798 - protein, 344 aa, unidentified
  source 1..344: note = protein_9c24fac
  REGION 9..169: note = RuvC_domain
  SITE 12: note = RuvC_P1
  SITE 68: note = RuvC_P2
  SITE 108: note = RuvC_P3
  SITE 110: note = RuvC_P4
  SITE 113: note = RuvC_P5
  REGION 209..296: note = Tnp_domain
  SITE 217: note = Tnp_P1
  SITE 247: note = Tnp_P2
  SITE 255: note = Tnp_P3
  SITE 256: note = Tnp_P4
  SITE 269: note = Tnp_P5
MTNIVKQVVGIDVAQNELVVSLGRMNHDTGTDIFAFKTFPNNAVGFKYLLAWVSKLSAKEISVRYVMEATGVYHEKLAYYLSDQGQEVSIVLPNKISNYFRTLEVKTITDKTASQAICQFGLERKLEAWKKPKKIFKDLKQLTRERDQLIAERTALKNQLHAEKAEAFPNDSSIKRVIKRIQLNDKQELEIKAEIAAIVKQDLELVEKINTITTIPGVGKLTAVIVLAETNGFELIKNKKQLVSYSGLDVRLKDSGTSVKSKPKISKKGNRHLRKAMYMPALAAMRFNDQHKALFVRLVSKHGIKMKAAVAVQRKILELIYTIYKTDEAFDKNYTITNIQTETA

SEQ ID NO: 17799 - protein, 377 aa, unidentified
  source 1..377: note = protein_5ae7246
  REGION 35..176: note = RuvC_domain
  SITE 38: note = RuvC_P1
  SITE 81: note = RuvC_P2
  SITE 116: note = RuvC_P3
  SITE 118: note = RuvC_P4
  SITE 121: note = RuvC_P5
  REGION 240..325: note = Tnp_domain
  SITE 248: note = Tnp_P1
  SITE 278: note = Tnp_P2
  SITE 286: note = Tnp_P3
  SITE 287: note = Tnp_P4
  SITE 299: note = Tnp_P5
MARPCSRPASNRSWDGASRQGARHSQTLNAAIAVVGIDIGKNSFHIVGHDERGAIVLRQKWSRGQVEARFANMPPCLIGMEACVGAHHLSRKLRAQGHDARLMPAKYVRPYSKGQKNDFRDAEAIAEAVQRPTMKFVATKTADQLDLQALHRVRERLISQRTGIINQIRAFLLERGIAVRQGLRFLRAELPRILATPPDVLSPRIVRIVEDLAGDWRRLDERVERLSDEIEAIARLDAGCERLMSVPGIGPIISSAMVAAIGAGDVFTRGRDFAAWLGLVPKQISTGDRTILGKISRRGNRYLRVLFVQAAWVVLIKPKTWERHGLKPWIEAAKKRLHHNVLAIALANKLARIAWSVLARGRAFEARKMDQAANQSA

SEQ ID NO: 17800 - protein, 400 aa, unidentified
  source 1..400: note = protein_cf9a08d
  REGION 5..163: note = RuvC_domain
  SITE 8: note = RuvC_P1
  SITE 62: note = RuvC_P2
  SITE 102: note = RuvC_P3
  SITE 104: note = RuvC_P4
  SITE 107: note = RuvC_P5
  REGION 273..362: note = Tnp_domain
  SITE 281: note = Tnp_P1
  SITE 311: note = Tnp_P2
  SITE 319: note = Tnp_P3
  SITE 320: note = Tnp_P4
  SITE 333: note = Tnp_P5
MNPVVGLDVSKGESQVQVFLDKGQPYGKSFSISHTREGLDTFLHFLKNVESITGQQPPVVLESTGHYQTPITQCLEEQDYLYILINPLISYQAKKSSLRKVKTDAIDAYHLCELYYKEELQPYKKRGLQLLNLHNLTRQHDSLTDLCVQAKLQFHAILDQVFPEFRTVFGNLFSKVSLHILLEFPTSEEVLKAKESELTKRIEAICISRSNTWAEEKAKKIMDAASRNPFQKAVYESHLISLEMYIRMILQYQEHLSNLEQRIDALASEIEEYKIIQSIPGIGEKIAATIISEIGEIERFNHPKKLVAFAGIDPSVHSSGKFTATINRITRRGSSRLRHALYMAVLCGIRSSRNKKLKEFYDRKRAEGKPFKVTIIACVNKLIHWIYILLKRKETFLDIA

SEQ ID NO: 17801 - protein, 343 aa, unidentified
  source 1..343: note = protein_40a233a
  REGION 6..148: note = RuvC_domain
  SITE 9: note = RuvC_P1
  SITE 52: note = RuvC_P2
  SITE 87: note = RuvC_P3
  SITE 89: note = RuvC_P4
  SITE 92: note = RuvC_P5
  REGION 211..298: note = Tnp_domain
  SITE 219: note = Tnp_P1
  SITE 249: note = Tnp_P2
  SITE 257: note = Tnp_P3
  SITE 258: note = Tnp_P4
  SITE 270: note = Tnp_P5
MQVVRIGLDLAKYVFEVHGVDKHGKVVVRKRLRRDAVSRFFANLPTCLVGMEASNGAHYWARVLTELGHQVRLISPQFVTPYVKSNKNDRNDAEAICEAVGRPSMRFVPRKSTDQLAVQAVHRIRRRLVADRVRLVNQIRGLLSEHGIVIARDIAQLRRGLAFIVGSVNDGLSEMVQALMRELQAELAELDRRIATYDRRIREIFRTSEQCQRLGKIEGIGPVTATALIAAVGDRTSFKNGRQFAAWLGLVPKQRSSGGRARLFGISKRGDRYLRTLMIHGARAALSRASGKQDPRSLWLGKMRQRRHPNVAAVALANKNARIVWAMLSDDTAYEPALSVKAA

SEQ ID NO: 17802 - protein, 318 aa, unidentified
  source 1..318: note = protein_9a5f3e3
  REGION 7..155: note = RuvC_domain
  SITE 10: note = RuvC_P1
  SITE 54: note = RuvC_P2
  SITE 94: note = RuvC_P3
  SITE 96: note = RuvC_P4
  SITE 99: note = RuvC_P5
  REGION 193..277: note = Tnp_domain
  SITE 201: note = Tnp_P1
  SITE 230: note = Tnp_P2
  SITE 238: note = Tnp_P3
  SITE 239: note = Tnp_P4
  SITE 250: note = Tnp_P5
MSDSVFIGIDVSSQTLEVASSDQAKTWQVANEASGIEQLVSQASALAPGLVVLEATGGYEFEAACALQAAGLAVAVVNPRTARDFARAMGALAKTDALDARMLAAFARVLHQHPERERFVKPLADAELQQLQALVLRRRQLVQMLTSERQRLRLAHAAARPSIERVIEFLKHELGDGEAEVAAHVQRHHAELAQALASVPGIGAASVAVMLAELPELGKLDRRRIAALVGVAPLNRDSGQMRGQRSIWGGRADVRRTLYMATLTAVRRNPALKACYERLLAVGKRKKVALVACMRKLLTMLNAIAKHGSTWDSTMHMA

SEQ ID NO: 17803 - protein, 409 aa, unidentified
  source 1..409: note = protein_dd6c200
  REGION 4..163: note = RuvC_domain
  SITE 7: note = RuvC_P1
  SITE 60: note = RuvC_P2
  SITE 100: note = RuvC_P3
  SITE 102: note = RuvC_P4
  SITE 105: note = RuvC_P5
  REGION 272..358: note = Tnp_domain
  SITE 280: note = Tnp_P1
  SITE 311: note = Tnp_P2
  SITE 319: note = Tnp_P3
  SITE 320: note = Tnp_P4
MLLVGDDWAEDHHDVELMNEAGKRLVKARLPEGIAGITRLHTMIGEYVDDGDDATQVRIGIETDRGPWVAALIAAGYTVYAVNPLQAARFRERRSVSGAKSDAADAHTLADMVRTDAHQLRPVAGDSPAAEAVKVVARAHKTLIWERTRHTQRLRYRLREYFPAALEAFEDLDAPDTLELLGKAPDPAAASRLSLNQIKAAMKRAGRRGDIDAKAARIQAILRSEQLGRDPVIVAAYAAGTRAVVAVLTTLDAQVKLLQGEVETSFGRHPAAEIILSQPGLGKILGARVLAEFGDDPHRYTTAKARKNYAATSPITRASGKMKVVAARFLHQDRLVDALTTQAFCALKPSPGARAYYDKQRARGLTHSAALRQVANRLVGILHGCLKSHTLYDEATAWAHHNQDQQAAA

SEQ ID NO: 17804 - protein, 342 aa, unidentified
  source 1..342: note = protein_d7094aa
  REGION 6..148: note = RuvC_domain
  SITE 9: note = RuvC_P1
  SITE 52: note = RuvC_P2
  SITE 87: note = RuvC_P3
  SITE 89: note = RuvC_P4
  SITE 92: note = RuvC_P5
  REGION 210..294: note = Tnp_domain
  SITE 218: note = Tnp_P1
  SITE 248: note = Tnp_P2
  SITE 256: note = Tnp_P3
  SITE 257: note = Tnp_P4
  SITE 269: note = Tnp_P5
MKDTMIGVDLAKRVFQVHGASMTGQVKFRKKLTREQFRRFMSEQPACIVVFEACGSASYWAREMEALGHDVKLIAPQYVRPFVKRQKNDAADAEAIVIAARQPEMRFVEPKTAEQQAKAVMFRSRERLVHQRTELVNALRAVLYEYGHVFPTGLVHLKRVEALVEDQACDLPALIIAECRDLLAQIAEKTERIDAKTKELKALTAETDTARRLQTMPGVGPLTALAVEAFAPDMAQFKCGRDFAAWLGLVPRQHSSGGKERLGRISKVGQRDIRRLLIIGAMTRIMGRTRQKLPVENWLGRLLARKQKMLVAIALANQMARQLWAMLTKNEDYRDPALAAAT

SEQ ID NO: 17805 - protein, 345 aa, unidentified
  source 1..345: note = protein_1b529da
  REGION 6..147: note = RuvC_domain
  SITE 9: note = RuvC_P1
  SITE 52: note = RuvC_P2
  SITE 87: note = RuvC_P3
  SITE 89: note = RuvC_P4
  SITE 92: note = RuvC_P5
  REGION 211..297: note = Tnp_domain
  SITE 219: note = Tnp_P1
  SITE 249: note = Tnp_P2
  SITE 257: note = Tnp_P3
  SITE 258: note = Tnp_P4
  SITE 270: note = Tnp_P5
MEIHTIGIDLGKTVFYLVGLNARGEVVVRKKCSRDQILRFTANLQVSLIGMEACGGAHFLARALREQGHDARLMPAKYVKPYVKTNKNDYIDAEAIAEAVGRARMRFVPIKTDDQLDLQSLHRVRERWVSGRTAVINQMRGLLLERGITIRKGRRHIEESLPGILEDADNKLSGALRILLTQLRLEMQYLQRQIDECDKLILRIADELDDCRRMLSVPGIGPMTATATIAAIGNGSAFKKGRGFAAWLGVVPGEHSTGGKQTLTGISKCGNKYLRKLFIQGAHAVLQQRMKQSNGLNTWLAQLTSRKRIQVAAVALANKMARMVWAVLSKGESYRPPLKIETAAV

SEQ ID NO: 17806 - protein, 329 aa, unidentified
  source 1..329: note = protein_1e49d52
  REGION 4..154: note = RuvC_domain
  SITE 7: note = RuvC_P1
  SITE 58: note = RuvC_P2
  SITE 98: note = RuvC_P3
  SITE 100: note = RuvC_P4
  SITE 103: note = RuvC_P5
  REGION 198..284: note = Tnp_domain
  SITE 206: note = Tnp_P1
  SITE 235: note = Tnp_P2
  SITE 243: note = Tnp_P3
  SITE 244: note = Tnp_P4
  SITE 257: note = Tnp_P5
MNYLGIDVAKAKLDCCLLMENNRKKSKVVTNSEEGFQQLIAWCKKQGFLPADLHAVMESTGCYHEPVAHALFEVGMQVSLLNPARVREFAKSQGILSKNDGLDAFAIARFGASSELELWQPPPAEVTYLKVLMARMETIDQDLQRERNRREKTDFINAPDAVLDSFMEHIAHLELAHEKLSKEIERHIDQHPDLKKDRALLQSIPGVGPKVSTVMMVCLRQGQFSCAEQSAAYLGLTPIERQSGSSVRGRSRLSKNGPAKVRAKLYMAAVSAKTHNPHIRELAQRMALRGKCNMSIIGAAMRKLVHLCFGVLKNQLPYQPNYAPKGLTG

SEQ ID NO: 17807 - protein, 419 aa, unidentified
  source 1..419: note = protein_6a89668
  REGION 24..182: note = RuvC_domain
  SITE 27: note = RuvC_P1
  SITE 81: note = RuvC_P2
  SITE 121: note = RuvC_P3
  SITE 123: note = RuvC_P4
  SITE 126: note = RuvC_P5
  REGION 292..381: note = Tnp_domain
  SITE 300: note = Tnp_P1
  SITE 330: note = Tnp_P2
  SITE 338: note = Tnp_P3
  SITE 339: note = Tnp_P4
  SITE 352: note = Tnp_P5
MKLQEGIGVTGEYNEGEMKLNPVVGLDVAKGESEAQAFLDKDRPYGKSFSVKHIKEDLDSFASFLKGIERKTGVRPAVILESTGHYHTPIIQCLEENQYLYILVNPIISHQAKKTSLRKVKTDAVDAYHLCVLYYKEDFEPYKKRGLRLLNLRTLSRQYETVTNLYVQAKLQFHTILDQVFPEYRGVFGDLFSKVSLQVLKDFPTSQDVLSAGEGKIMERIEEMRVKRSANWARERVAKLMASAKRNPFQQCIYQSHLYSLDMYISMLLQYQEHLSNLERQIDVLAEEIEEYKIIQSIPGIGGKIAATIISEIGEVDRFNHPKKLVAYAGIDPSVHSSGKFTATINHITKRGSSRLRHALYMAVLCGIRSSRNKKLKEYYDRKRNEGKPSKVAMIACVNKLLHWIYAILKRNEPFLDMA

SEQ ID NO: 17808 - protein, 385 aa, unidentified
  source 1..385: note = protein_b8569c3
  REGION 6..159: note = RuvC_domain
  SITE 9: note = RuvC_P1
  SITE 57: note = RuvC_P2
  SITE 98: note = RuvC_P3
  SITE 100: note = RuvC_P4
  SITE 103: note = RuvC_P5
  REGION 222..307: note = Tnp_domain
  SITE 229: note = Tnp_P1
  SITE 259: note = Tnp_P2
  SITE 267: note = Tnp_P3
  SITE 268: note = Tnp_P4
  SITE 280: note = Tnp_P5
MAKVVIGVDPHKRINAVVVVNAKGKVLGREQFENTSSGFRELRTFANRWRPRTWAVEGCNGVGKHLAQRLVAEGERVVDVSTRRAALVRVFAGGNGRKNDDTDAYSIALVGLQTPDLPEVVADDRTAALRLLANRRHELVGLRTQAVCRIHRDLVTLFPGGAPRALTAKSAKQLLATTRPRDEVGRLRRRLIAEQIADLVAIDKRLAQLEAEIKALVAETPTGLMRLFGVGPVTTARVLGEVGDVARFRSRHHFASYNGTAPVDASSGGGPPVYRLNIKGNRKLNHAIHMVAITQIRNDCAGRDFYRRKIREGKTPKEAVRALKRRISDSIYRQLLEDAARQRDPGGQAGTTPKTSVTDLTPMAGSSVKPQPGSQREPTPLTVTA

SEQ ID NO: 17809 - protein, 393 aa, unidentified
  source 1..393: note = protein_cf85676
  REGION 5..164: note = RuvC_domain
  SITE 8: note = RuvC_P1
  SITE 61: note = RuvC_P2
  SITE 102: note = RuvC_P3
  SITE 104: note = RuvC_P4
  SITE 107: note = RuvC_P5
  REGION 267..354: note = Tnp_domain
  SITE 275: note = Tnp_P1
  SITE 305: note = Tnp_P2
  SITE 313: note = Tnp_P3
  SITE 314: note = Tnp_P4
  SITE 327: note = Tnp_P5
MVVSVGIDVSKNKHDCFIVSSEGEVLADVFTIPNNMDGFYALLEKIRACTTPQDKIKVGLEATGHYSYNILGFLLDNGLATYVLNPLRTNLYRKSLSLRKTKTDRVDARTIAAMLLSDVGLKPYTNTAYHNEELKSLTRYRFDKVKERAKLKSSISRLVCILFPELEKLVSSLHLATVYALLEEFPGSKQIAKAHLTRLKTLLGNASKGRYGRDMAVTIRSAAQNSVGSCMPAKSLELQHTIRLIRELDAEIAEIEAEIETMMDKIQSPITTIPGMGSRMAAMILAEIGDFSRFESPDKLLAYAGMSPSTYQSGQLKNCYPHMEKRGSRYLRYALYNAAKYVCHWDPTFAAYLAKKRDEGKHYNVALSHATKKLVRLLFALERSRQPYCSLAA

SEQ ID NO: 17810 - protein, 400 aa, unidentified
  source 1..400: note = protein_19f0ffe
  REGION 10..164: note = RuvC_domain
  SITE 13: note = RuvC_P1
  SITE 62: note = RuvC_P2
  SITE 102: note = RuvC_P3
  SITE 104: note = RuvC_P4
  SITE 107: note = RuvC_P5
  REGION 270..356: note = Tnp_domain
  SITE 278: note = Tnp_P1
  SITE 308: note = Tnp_P2
  SITE 316: note = Tnp_P3
  SITE 317: note = Tnp_P4
  SITE 329: note = Tnp_P5
MTKQRARIWVGIDVGKAHHWAAAVDETGSTLWSKKIDNDEAAILTALGEILDLAAEVGWAVDITGTSSALLLALLAAHGQQAVYVPGRTVNRMSGAYRGEAKTDARDAYVIAEAARHRRDFAPIDVPAELAAGLALLTSHRSDLMADRVRMLNRLKDVLTGMFPALERAFDYSAHKGAVVLLTGYQTPAAIRRRGRARLTAWLANRNVRGADAVAAAALEAAQAQQTALPNETVAAQIIADLAAQILAMEDRLKCIDQQIRETFRSHPQADIIESLPGMGPILGAEFIVAAGAMSAYADAGHLASAAGLVPVPRDSGRRTGNLHRPKRYNRRLRRVFYLSAQVSIMREGPNRDFYLKKRSEGLKHVQAVIAVARRRIDVLWALLRDNRLFTPTPPAPQAA

SEQ ID NO: 17811 - protein, 401 aa, unidentified
  source 1..401: note = protein_f9cf488
  REGION 11..165: note = RuvC_domain
  SITE 14: note = RuvC_P1
  SITE 63: note = RuvC_P2
  SITE 103: note = RuvC_P3
  SITE 105: note = RuvC_P4
  SITE 108: note = RuvC_P5
  REGION 271..357: note = Tnp_domain
  SITE 279: note = Tnp_P1
  SITE 309: note = Tnp_P2
  SITE 317: note = Tnp_P3
  SITE 318: note = Tnp_P4
  SITE 330: note = Tnp_P5
MTKQQRPCIWAGIDVGKAHHWAAAVDETGSTLWSKKIDNDESAILTALGEILDLAAEVRWAVDITGTSSALLLALLAAHGQQAVYVPGRTVNRMSGAYRGEAKTDARDAYVIAEAARHRRDFARVDVPVQLAADLALLTSHRSDLVADRVRMLNRLKDVLTGIFPALERAFDYSSHKGALVLLTRYQAPAVIRRRGRVRLAAWLANRGVRGADAVAATALEAAQSQQTALPNETVGAQIVADLATQVLALEDHLKRIDQQIREIFRSHPQAEIIESLPGMGPILGAEFIVAAGDLSAYADAGHLASAAGLVPVPRDSGRRTGNLHRPKRYSRRLRRVFYLSAQASIMREGPNRDFYLKKRGEGLKHVQAVIAVARRRIDVLWALLRDNRLFTPVPPVPQAA

SEQ ID NO: 17812 - protein, 407 aa, unidentified
  source 1..407: note = protein_5edb232
  REGION 5..164: note = RuvC_domain
  SITE 8: note = RuvC_P1
  SITE 61: note = RuvC_P2
  SITE 101: note = RuvC_P3
  SITE 103: note = RuvC_P4
  SITE 106: note = RuvC_P5
  REGION 272..358: note = Tnp_domain
  SITE 280: note = Tnp_P1
  SITE 311: note = Tnp_P2
  SITE 319: note = Tnp_P3
  SITE 320: note = Tnp_P4
MRLLVGDDWAEDHHDMEVMDGSGRRLAKARLPEGVAGMARLHAIVGELAGDEADEVEVLVGIETDRGPWVRALVAAGYTVLAVNPLQASRFRDRLGVSGAKSDAGDAHVLADMVRTHAHELRPVAGDSAAAEAVKVVARTHKTLIWEGTRHTQRLGHALRDYFPAALVAFEDLDAADSLELLAKAPTPAQAARLTIGQISTALKHARRKNVAGKAVAIQAALRAEQLGQPQVVTDAYAASVQALIAVLEVLNTQVKTLQGQVKAHFGKHPAAKIILSRPGLGTVLGARVLAEFGDDPGRYASAKARKNYAGTSPITRASGKKKVALARLIHNDRLIDALLTQAFSALRLSPGARAYYDRQRARGSGHNAALRQLANRLVGILHGRLKTGTVYNETTAWSHHAESVAA

SEQ ID NO: 17813 - protein, 338 aa, unidentified
  source 1..338: note = protein_cfe61cc
  REGION 6..152: note = RuvC_domain
  SITE 9: note = RuvC_P1
  SITE 53: note = RuvC_P2
  SITE 91: note = RuvC_P3
  SITE 93: note = RuvC_P4
  SITE 96: note = RuvC_P5
  REGION 211..298: note = Tnp_domain
  SITE 219: note = Tnp_P1
  SITE 249: note = Tnp_P2
  SITE 257: note = Tnp_P3
  SITE 258: note = Tnp_P4
  SITE 270: note = Tnp_P5
MTILFLGIDLAKNVFALHGVDERGKPALVRPAVRRDQLLEAVAKLPPCTIDMKACSGAHHWARRFQEFGHTVRLMAPKFVVPARMSGRRGKNDAADAAAICEALQRPAMRFVPVKSTQAQSRLAVHTARQGWVCARTAVINRLRGVLSEFGIVLPLKAATVRSRAGEQLDTVPGWVQTVCRDLLAELQRLDERVAAYDEHIRLMAQADDRARALMVMPGIGPTTASALLASIGYGHDFANGRQLAAWMGLAPDQYSSGGKNRLGRITKAGDAYLRTLFIMGARAVLAAAANKHDRLSRWATALAERRGYWKAVVAIAAKNVRMAWAMLAKGEEFKPMA

SEQ ID NO: 17814 - protein, 330 aa, unidentified
  source 1..330: note = protein_5434655
  REGION 8..157: note = RuvC_domain
  SITE 11: note = RuvC_P1
  SITE 59: note = RuvC_P2
  SITE 97: note = RuvC_P3
  SITE 99: note = RuvC_P4
  SITE 102: note = RuvC_P5
  REGION 202..289: note = Tnp_domain
  SITE 210: note = Tnp_P1
  SITE 240: note = Tnp_P2
  SITE 248: note = Tnp_P3
  SITE 249: note = Tnp_P4
  SITE 262: note = Tnp_P5
MKSWNVILGVDVSKLTLDICCADRNLYLKTDNSSKGFAVFKKWCKAQRIDLKECLVVMEHTGGYEYRFMQFCESYSISYCRVPGLEIKQSSGMVRGKSDRADAFRIGQYGEEKIKKLTPSKPLDNDILIIRRLMSLRKRLVRERAGWKSTLKEHKHMYLGKKLATVIRIANAQIKEKTKYINQVEQEIMELIRSNTALMQTYRIITSIKGIGNINAWMTIAYTENFSSFPNARKYAVYVGVIPYEHTSGTSIKGRKRVSQFAHKEIKQELNQAAKTAIRHDPELRAYAERKLKNKCYPLVLNNVKFKLILRMFALVKRGEQFVENYKRAA

SEQ ID NO: 17815 - protein, 391 aa, unidentified
  source 1..391: note = protein_4573a46
  REGION 1..151: note = RuvC_domain
  SITE 44: note = RuvC_P2
  SITE 90: note = RuvC_P3
  SITE 92: note = RuvC_P4
  SITE 95: note = RuvC_P5
  REGION 262..349: note = Tnp_domain
  SITE 270: note = Tnp_P1
  SITE 300: note = Tnp_P2
  SITE 308: note = Tnp_P3
  SITE 309: note = Tnp_P4
  SITE 322: note = Tnp_P5
MYSDGSKHSSFSVPNNRNGAKLIVDRVTSVLLSQDIPQVVIGMEATSVYGDNLMRFLRESGSLGRFERSLHMLNPKQVKKFHDAYSDLPKNDYVDSYVIADHLRFGRINKEVYMDDYKYQALKMYTRARHQLVQELTREKQRLLNTVFISFSGLTQEKIFSDKFGATSMALIEEFSSLDELAYMSTDELADFIRERGKNHFENPEEIAKAVQRAAKNSYRPPQVIADAAKQMIAISMNTIRLLQKQIKEYDKAIEKMLEAFPQTLTSVKGIGNIYAAGIIAEIGDINRFPSQASLAKYAGLVWTQHQSSDFEAEDKRMIQGGNHHLKYYLCEAANALRRCDPEFKRFYALKYKEANKHNHKRALALTARKLVRLVYTLLKTNRLYIPPEEY

SEQ ID NO: 17816 - protein, 344 aa, unidentified
  source 1..344: note = protein_5a35f14
  REGION 6..146: note = RuvC_domain
  SITE 9: note = RuvC_P1
  SITE 52: note = RuvC_P2
  SITE 87: note = RuvC_P3
  SITE 89: note = RuvC_P4
  SITE 92: note = RuvC_P5
  REGION 211..296: note = Tnp_domain
  SITE 219: note = Tnp_P1
  SITE 249: note = Tnp_P2
  SITE 257: note = Tnp_P3
  SITE 258: note = Tnp_P4
  SITE 270: note = Tnp_P5
MTISILGIDIGKNSCSVVGVDHKGAVIVRRTMRRQTLIELVGKMPACIIAMEACCGAHHLGRLFAARGHEVRLMSPEYVRPYIKAQKNDDRDAAGIAEAASRPTMRFVDLKSEEQLDIQSLHRVRSRLVAQRTTLINQIRAILLERGLIFAAGRRKLEVALDALPVDQEATFSPRIHRLIVELRNEWNVLDTKIAALNAEFVSLARHNLAMRRLTTIPGIGVLNATALVAAIGDARSFKHARDLGAWLGLVPRQFTTGGKPRLLGITKRGNNYLRTLLVHGARAAMPVLSQSDTPVGQWLRALVSRGTHRNVAIVALANKLARIAWAILRKERPYEKTFGVAPE

SEQ ID NO: 17817 - protein, 323 aa, unidentified
  source 1..323: note = protein_355f97e
  REGION 9..157: note = RuvC_domain
  SITE 12: note = RuvC_P1
  SITE 63: note = RuvC_P2
  SITE 97: note = RuvC_P3
  SITE 99: note = RuvC_P4
  SITE 102: note = RuvC_P5
  REGION 253..323: note = Tnp_domain
  SITE 261: note = Tnp_P1
  SITE 292: note = Tnp_P2
  SITE 300: note = Tnp_P3
  SITE 301: note = Tnp_P4
  SITE 311: note = Tnp_P5
METLHSHCAGLDIHQKEIVVCTYIGSSDEELIKEIRTFSTMTKNLYEMLQWLEELNITHLAMESTGIYWKPVFNILEDYFEITLANAQRIKNVPGRKTDVADAEWIAKLLRYGLIEKSFVPPVDIRELRDLTRLRKKMIGNMTAEKNRIQKTLECSNIKLGSVISDIFGVSGRKLLTRLVEQGYVNPNEVEEHIHVRMMPKASQITESLFGTINPHQIFLIRQSWNHILFLESSIQQLEDKIDEILLPYQEQVELLLTIPGVKKHSVACIIAEIGVEMNQFPSAHHLASWAGLSPGNHESAGKKSTRTTKGNPHIQSTLCEVA

SEQ ID NO: 17818 - protein, 346 aa, unidentified
  source 1..346: note = protein_edc2b3a
  REGION 6..147: note = RuvC_domain
  SITE 9: note = RuvC_P1
  SITE 52: note = RuvC_P2
  SITE 87: note = RuvC_P3
  SITE 89: note = RuvC_P4
  SITE 92: note = RuvC_P5
  REGION 212..295: note = Tnp_domain
  SITE 220: note = Tnp_P1
  SITE 250: note = Tnp_P2
  SITE 258: note = Tnp_P3
  SITE 259: note = Tnp_P4
  SITE 271: note = Tnp_P5
MQIAVLGIDLGKNSCSVVGLDEAGRVVLRRRLHRDSVVKLASRLPACVIAMEACCGAHHLGRLLQTCGHEVRLMSPEYVRPYVKAQKNDERDAEAIAEAATRPTMRFVELKSEQQLDMQSLHRARSRLVGERTALINQLRAVLLERGIAVAQGRRRLEQYLAASDSDDTPRPFSQRIGMLIDDMRAQWSELDRRIAAFDTEFVAAARSDAAARGLATIPGIGVLNATALIAAVGEARSFARARDLAAWLGLVPRQATTGGRPRLLGITKRGNKYLRTLLIHGARAALPSLTTAAGPLSNWLRGLKARAHRNIVIVALANKLARIAWAVLRSTAPYGAAIGSQAASV

SEQ ID NO: 17819 - protein, 268 aa, unidentified
  source 1..268: note = protein_bcc9cf7
  REGION 9..151: note = RuvC_domain
  SITE 12: note = RuvC_P1
  SITE 55: note = RuvC_P2
  SITE 90: note = RuvC_P3
  SITE 92: note = RuvC_P4
  SITE 95: note = RuvC_P5
  REGION 214..267: note = Tnp_domain
  SITE 222: note = Tnp_P1
  SITE 252: note = Tnp_P2
  SITE 260: note = Tnp_P3
  SITE 261: note = Tnp_P4
MSSSNVHIYGIDLGKNWFHIVAMDRQGHILWRKKLNRSQLKTFVINTPPTIVAVEACPGSQYWGRLFNDAGFSVKIIPAQFVKPYLKSNKNDFNDAAAIAEAGSRGTMRCVSLKTHEQLALQATHRVRQRFIVERTATVNQMRALLLEYGITVPVGRKVFERNLPSILEDAENGLPDFIRALVFRLRERWQHLDVQIDEMSEQLQQASNASEKCQLISSVPGIGPIVATGLIAAVGSGTQFKRGRDMSAWLGLVPRQYSTGGKATLVA

SEQ ID NO: 17820 - protein, 396 aa, unidentified
  source 1..396: note = protein_051497f
  REGION 5..164: note = RuvC_domain
  SITE 8: note = RuvC_P1
  SITE 61: note = RuvC_P2
  SITE 102: note = RuvC_P3
  SITE 104: note = RuvC_P4
  SITE 107: note = RuvC_P5
  REGION 267..311: note = Tnp_domain
  SITE 275: note = Tnp_P1
  SITE 305: note = Tnp_P2
MVVSVGIDVSKDKHDCFIVSSEGEVLADAFIISNTLDGFHDLLQRIQECTAPQDKIKVGLEATGHYSYNLLGFLLDNGLATYVLNPLRTNLYRKSLSLRKTKTDRVDARTIASMLLSDAGLKPYTDTAYHNEELKSLTRYRFDKVKERAKLKSSIARLVCILFPELEKLVPSLHIASVYALLEEFPGAKQIAATHLTRLKALLETASNGHYKRDMALEIRDAARNSIGSWMPAKSLELQHTIRLIRELDVEIAEIEEQIQSIMDELHSPITTIPGVGFRMAAMILAEVGDFTRFDSPDKLLAYAGMSPLNLPIRTAQKLLPAHGKAWFPILTLRTLQRSQVCLSLGSDFCRLSCQETGGRQALQCCHFPCSQKAGSADICYGKIRSAVPLGCLTSF

SEQ ID NO: 17821 - protein, 403 aa, unidentified
  source 1..403: note = protein_94846f0
  REGION 1..157: note = RuvC_domain
  SITE 4: note = RuvC_P1
  SITE 54: note = RuvC_P2
  SITE 94: note = RuvC_P3
  SITE 96: note = RuvC_P4
  SITE 99: note = RuvC_P5
  REGION 266..352: note = Tnp_domain
  SITE 274: note = Tnp_P1
  SITE 305: note = Tnp_P2
  SITE 313: note = Tnp_P3
  SITE 314: note = Tnp_P4
MGNDWAEAHHDVCLLDEDGTKLAVRRLPEGLGGVARLHEMIAEHASDAAEVVVGIETDRGLWVGALIAAGYQVYAINPMAVSRYRDRHSQGGAKSDRGDAKVLADLVRTDRHNHRRVAGDSPEADGIKVLARTHQNLIWARVRHTNQLRHALREYYPAALETFSDLAHRDTLAVLERAPTPRLGARLTLPQIRAVLKAGGRRRNLDVVARRIQKGLRSRQLAAPQRVAEAHGATAGALVSVVGELNRQIADLEATLETCFEEHPDAAIYLSQPGLGKVLGARALGEFGDDPERYTSVKSRRNYAGTSPITIASGRKHAVVARHIRNRRLYDALDKWAFCSLTRSPGAKEFYTQRRAAGDLHHQALRALANRLVGILHGCLKHRTPYNEHTAWAHRTTINQAAA

SEQ ID NO: 17822 - protein, 341 aa, unidentified
  source 1..341: note = protein_bfde68a
  REGION 7..149: note = RuvC_domain
  SITE 10: note = RuvC_P1
  SITE 53: note = RuvC_P2
  SITE 88: note = RuvC_P3
  SITE 90: note = RuvC_P4
  SITE 93: note = RuvC_P5
  REGION 209..294: note = Tnp_domain
  SITE 217: note = Tnp_P1
  SITE 247: note = Tnp_P2
  SITE 255: note = Tnp_P3
  SITE 256: note = Tnp_P4
  SITE 268: note = Tnp_P5
MNKVAIVAIDLGKHTFHLHAQDDRGHELYRKKFNRAALIQHLANLEPCTVAMEACGGAHFMAQEVSRLGHIPKLIAPHLVRPYVKSNKNDFADAEAICEAATRPTMRFVPPKNQAQQALAMLNSTRDSFIKERTATVNRIHAALLEVGISLAPGFKSIKDLPALLEAHPLPDSIKKLLTRLREHFNYLHEQVKALDKEVECQAAEDDLAVRLMTMPCVGPITSSVLAAELGDGKQFKCGRGYSASIGLVPKQHSTGGKTVLLGISKRGDRNQRRLLIQCARVYLMQLDRQKGALADWVRRLWDNHHSNHVVCALANKLARIAWAIAAHHTEFDAGPGAMNA

SEQ ID NO: 17823 - protein, 407 aa, unidentified
  source 1..407: note = protein_08c0275
  REGION 9..163: note = RuvC_domain
  SITE 12: note = RuvC_P1
  SITE 60: note = RuvC_P2
  SITE 100: note = RuvC_P3
  SITE 102: note = RuvC_P4
  SITE 105: note = RuvC_P5
  REGION 271..357: note = Tnp_domain
  SITE 279: note = Tnp_P1
  SITE 309: note = Tnp_P2
  SITE 317: note = Tnp_P3
  SITE 318: note = Tnp_P4
  SITE 330: note = Tnp_P5
MTSGFAVVIGLDVGKTGHHACALDSAGTRLFDKALPQDEAQLRELFSALQAYGAVLMVVDQPNTIGALPIAVARDVGCEVAYLPGLAMRKAADLYPGRSKTDARDAFIIADTARTMPHTLRAVDRDSDVLAALKVLAGFDEDLAHETTRALNRIRSLLTQIHPALERVFTGGTLATGLVLDLLEKFGGPTGLKAAGRARALRFARTHSRRDPEALIDRVFTALSEQTVVVPATAAVELVIPRVAGQVKELKAQRATVAQEVEAMLEDFPLASVLMSMPGIGIKTAAQILLAIGDGTAFETAGHLAAYAGIAPVTRRSGTSIRGEFPARAGNKRLKNALFYSAWIASHSDPISKTYYDRKRAEGKRHNAAVICLARRRCNVIFAMLRNGTYYQPPTTNPSPESTALAA

SEQ ID NO: 17824 - protein, 304 aa, unidentified
  source 1..304: note = protein_18ce1b6
  REGION 8..150: note = RuvC_domain
  SITE 11: note = RuvC_P1
  SITE 54: note = RuvC_P2
  SITE 89: note = RuvC_P3
  SITE 91: note = RuvC_P4
  SITE 94: note = RuvC_P5
  REGION 191..269: note = Tnp_domain
  SITE 215: note = Tnp_P2
  SITE 223: note = Tnp_P3
  SITE 224: note = Tnp_P4
  SITE 236: note = Tnp_P5
MKQKVVTVGLDLAKSVFQVHAIGSDGAVLVRRKLRRAEVIGFFEDLPVGLVGIKASASAHHWARELIALGHEIRLMPPACVKPDVKRGKTDAADAEAICEAVTRPTMRFVAVKAVDQQAVLMLHKSLGLMVRQRTMLIDALRGHLAEYGVVTGVDTPARSTASKRRYSCGTEPTRRADGSSQYQASVRSPRPQISTAVPDASLFRSGRQFASWLGLTPRAKSSGGKERMGGITKQGDRYMRRLLVVGATAVMRMARKDAARQPWLAQLVERKPAKIAMVALANETARIAWAVMSRNEVYAASAA

SEQ ID NO: 17825 - protein, 342 aa, unidentified
  source 1..342: note = protein_502d553
  REGION 7..148: note = RuvC_domain
  SITE 10: note = RuvC_P1
  SITE 53: note = RuvC_P2
  SITE 88: note = RuvC_P3
  SITE 90: note = RuvC_P4
  SITE 93: note = RuvC_P5
  REGION 211..295: note = Tnp_domain
  SITE 219: note = Tnp_P1
  SITE 249: note = Tnp_P2
  SITE 257: note = Tnp_P3
  SITE 258: note = Tnp_P4
  SITE 270: note = Tnp_P5
MEQVTIVGLDLAKRVFQVHGATADGGIAIRKKLSRGQVLAFFADLPPCVVAMEACATAHYWAREIGALGHNVRLVPPAYVKPFVKRQKNDAADAEAIAEAASRPTMRFVEPKSPQQQARAMVFRTRDLFVRQRTQTINALRAHLAEHGLIAPQGMSNLANIRRFIDEAAAEVEPLVVETAHTYLEQIDDLSSRILKLEATLKQEAARTDASSRMMTMPGVGPITAMAIEAFAPSLCVFRRSRDFAAWLGLVPRQHSTGGKQVLGRTSKMGQRDIRRLLIIGAMSVIRWATRKGTTPGTWLHSILLRKPRKVAAIALANKMARTLWAMETRKEDYRDPRLTAA

SEQ ID NO: 17826 - protein, 397 aa, unidentified
  source 1..397: note = protein_9d31ef8
  REGION 11..164: note = RuvC_domain
  SITE 14: note = RuvC_P1
  SITE 62: note = RuvC_P2
  SITE 103: note = RuvC_P3
  SITE 105: note = RuvC_P4
  SITE 108: note = RuvC_P5
  REGION 226..311: note = Tnp_domain
  SITE 234: note = Tnp_P1
  SITE 264: note = Tnp_P2
  SITE 272: note = Tnp_P3
  SITE 273: note = Tnp_P4
  SITE 284: note = Tnp_P5
MSTPAAGRVVIGMDPHKRSATIEVMTADETIVGGGRFPTDRDGYDQMRRYAGQWPDRIWAIEGCAGIGKHIAVRLLSDGEEVVDVPPKLSARARVFASGQGRKTDATDAHSVALIGTRMAGLRPVVNDEQLAVLRLLVDRRRSLGEEHTRKTSQLHQLLLELIPGGAKRNLSAAQAKALLGKIRPRDVVGKTRRRVAAELVADLERIYARKKEANKELTDLVKQTGTTLLDLHGIGPTGAARLLVEVGDITRFPNKAHFASWNGTAPLDASSGDQVRHRLSRKGNRQINRVLHTMARVQLRNPTEGRAYYDRKKADGKAPMEAMRCVKRRLSDIVFQTMLNDAVRTNEPTARTGPGGQRGNDSDSSAAGSHPHTSSSDKSLPGPARQHPRTPLPAAS

SEQ ID NO: 17827 - protein, 343 aa, unidentified
  source 1..343: note = protein_7043e11
  REGION 7..148: note = RuvC_domain
  SITE 10: note = RuvC_P1
  SITE 52: note = RuvC_P2
  SITE 87: note = RuvC_P3
  SITE 89: note = RuvC_P4
  SITE 92: note = RuvC_P5
  REGION 211..299: note = Tnp_domain
  SITE 219: note = Tnp_P1
  SITE 249: note = Tnp_P2
  SITE 257: note = Tnp_P3
  SITE 258: note = Tnp_P4
  SITE 270: note = Tnp_P5
MTQSNLIAIDLAKNIFQVAQLKGNKLKFNKPMKREPMFELLAKAEGSKVVMEACGSAQLIARKALSLGHDVMLLPPKFVKAFRQGQKTDANDVLAIASASQAYNVKPCKIMTVEEQTLQSLSQARTLVDKQKTQLSNQIRGLLLEFGIVINQGDAALTQVVPDILEDAENALPIALKQALAVSYDLYKTQCDAKAQLHKQVEAITKQNESCQRLMALEGVGPITAIELLSFLGNTSQFSNARGAAACAGVTPTQHSSGGKAKIGHIPKRRGNTLRKNLFLGARTVVSRLKHKEATTEKERWIKNLLTKKSVKCVAIALANKTVRTAYALLKNGSTYEPKILAV

SEQ ID NO: 17828 - protein, 325 aa, unidentified
  source 1..325: note = protein_6682d1a
  REGION 6..157: note = RuvC_domain
  SITE 9: note = RuvC_P1
  SITE 55: note = RuvC_P2
  SITE 93: note = RuvC_P3
  SITE 95: note = RuvC_P4
  SITE 98: note = RuvC_P5
  REGION 197..284: note = Tnp_domain
  SITE 205: note = Tnp_P1
  SITE 235: note = Tnp_P2
  SITE 243: note = Tnp_P3
  SITE 244: note = Tnp_P4
  SITE 257: note = Tnp_P5
MEKVFIGIDISKATLDIYVASTSLAQHYQLENTPKAILKFFKTFDNTPNIIVAMEDTGRYNFALYAILSTMNFSVYVVNPLHLKRSIGLLRGKNDKIDSQRICRFIEKHYMDLELWQFSSLAIQKLSVLRTERRHRIKIKSGLKAQLKDEEFLKGIIDKEMIKLNKAMITLIDKQIRVIEEKMMRIINASTELKDQYQRLQSIPGVGKVLATLMIIKTKGFTEIKSARKMACYSGIAPFEHRSGSSIYYKPRVSTMADRELKKILNLAAMSAIRLKNDLALYYHRKVQEGKNKMAVLNAVRNKIIHRIYAIIKNNSVYQNNLFLS

SEQ ID NO: 17829 - protein, 294 aa, unidentified
  source 1..294: note = protein_dd1615e
  REGION 1..141: note = RuvC_domain
  SITE 2: note = RuvC_P1
  SITE 45: note = RuvC_P2
  SITE 80: note = RuvC_P3
  SITE 82: note = RuvC_P4
  SITE 85: note = RuvC_P5
  REGION 204..290: note = Tnp_domain
  SITE 212: note = Tnp_P1
  SITE 242: note = Tnp_P2
  SITE 250: note = Tnp_P3
  SITE 251: note = Tnp_P4
  SITE 263: note = Tnp_P5
MDIAKSTFHLVWMSSTGKVLKRKQLSRQKVADYFANLEACTVVMEACGSTHYWSRVISRCGHEVKAIAPQFVSAYRKGNKNDYNDAEAIAEAAQRQNMRFVPLKSLEQQDIQMLHRIRERLIKNRTVLSNQIRGLLPEYGLVMPKGISHLTAHLPRFLEDTPNELSTPARRYFLGLSEELDEISVQIKSVDSEVLGINKQYEVCQRLSTMTGIGPVVATAFYAGIGDGKAFNNGRHVSAWLGLVLGQHSTGGKLTFLGISKRGNTYLRTQLINGARAALRHCENKTDQVSVWAR

SEQ ID NO: 17830 - protein, 422 aa, unidentified
  source 1..422: note = protein_5342cb3
  REGION 4..157: note = RuvC_domain
  SITE 7: note = RuvC_P1
  SITE 57: note = RuvC_P2
  SITE 94: note = RuvC_P3
  SITE 96: note = RuvC_P4
  SITE 99: note = RuvC_P5
  REGION 284..371: note = Tnp_domain
  SITE 292: note = Tnp_P1
  SITE 323: note = Tnp_P2
  SITE 331: note = Tnp_P3
  SITE 332: note = Tnp_P4
  SITE 344: note = Tnp_P5
MLGVGLDWAEDYHDVALGLPGKGVIEQFRIEHGPAGVARLVARCLAVEPDPAEVRVVLETRHGLLVEALVDAGFTVLPVNPDLVARRRGPAKKKDDAEDARICCLLALDQFVELRRLIPHGELGAELRAIARDDDRAARDERRLGNRLRADLLAVFPAAVDIADGDLGSAVFLRLLQRWPSAEELAAAGRDAVEALARANKHGWPDRFAERVITALAVPRLPIRPELGRAKAGSIRLATAQLLLLREQRRAWHRRMGELLLGGPRHGRTNRPKDPQPGNAFPGGEIYLSMPGLGDRLAARVAGEIGEHIEQFTTPNALQCYAGAAPVTRRSGRSEHVVARRLAYNRYLGNAVRQWAFCSLQQSAWARTFYNAKIVAGKRHHTALRALANRWLEILWHCLHRGTLYDEAIHTANRAHTVTQAA

SEQ ID NO: 17831 - protein, 391 aa, unidentified
  source 1..391: note = protein_d75ee77
  REGION 4..163: note = RuvC_domain
  SITE 7: note = RuvC_P1
  SITE 60: note = RuvC_P2
  SITE 101: note = RuvC_P3
  SITE 103: note = RuvC_P4
  SITE 106: note = RuvC_P5
  REGION 266..352: note = Tnp_domain
  SITE 274: note = Tnp_P1
  SITE 304: note = Tnp_P2
  SITE 312: note = Tnp_P3
  SITE 313: note = Tnp_P4
  SITE 326: note = Tnp_P5
MIYVGIDVAKDKHDCFITNSDGEVLFKSFTISNNREGFEALFQRIKSVSDDLTKVKVGLEATGHYSYNLLGFLLDKGLTTFVINPLHTNLYRKSLSLRKTKTDKVDAHTIASMIMSDMNLKSYLDISYHNEELKSLTRYRFNKVKERAKLKTSVSRLVNILFPELEKLVPSLHMVSVYAMLSEFPGSSAIASAHLTRLTNLLDEASKGRYGKDTAILFREAARTSIGSHMPAKSLELKYTIKLIQELTVEIDEIEVEIKSIMDSIHSPILTIPGISYRMGAMIIAEIGDFSRFDSPDKLLAYAGMSPSTYQSGQLDNCYSHMEKRGSRYLRYAIYNATKYVCHWDETFGIYLAKKRAEGKHYNVALSHAAKKLVRVIYQLEKSGQTYIKAS

SEQ ID NO: 17832 - protein, 407 aa, unidentified
  source 1..407: note = protein_7007676
  REGION 5..161: note = RuvC_domain
  SITE 8: note = RuvC_P1
  SITE 58: note = RuvC_P2
  SITE 98: note = RuvC_P3
  SITE 100: note = RuvC_P4
  SITE 103: note = RuvC_P5
  REGION 270..356: note = Tnp_domain
  SITE 278: note = Tnp_P1
  SITE 309: note = Tnp_P2
  SITE 317: note = Tnp_P3
  SITE 318: note = Tnp_P4
MTLYLGDDWSEDHHDVHLMDDAGERLAAGRLREGVEGVTELHELVAQHASGPGEVVVGIETDRGPWVGALLASGYRVYAVNPRSAARYRERHHVGGAKSDAGDAKLLADLVRTDRHNHREVAGDSDEAGAVRILARAHQQLVWDRTRQTNRLRNGLREYFPGALRAFSSLAHGDAVGVLATAPGPREAARLTMPQLRAALRRGGRKRNVEERAAELREAFGAEQLAVPATVSRAFAATTRAAVTQIDAINGQIAALEAQLESSFEQHPDAAIYRSMPGLGVVLGARVLGEFGDDPERYESAKSRRNYADTSPLTVASGRKRTVKARFIRNRRLSDAANLWALCSLQASPGCRDFYDRRRAAGDLHYQALRALANRLVGYLHGCLRTRTPYDEATAWAHRHDREQLAA

SEQ ID NO: 17833 - protein, 415 aa, unidentified
  source 1..415: note = protein_01ed685
  REGION 19..175: note = RuvC_domain
  SITE 22: note = RuvC_P1
  SITE 72: note = RuvC_P2
  SITE 112: note = RuvC_P3
  SITE 114: note = RuvC_P4
  SITE 117: note = RuvC_P5
  REGION 290..377: note = Tnp_domain
  SITE 298: note = Tnp_P1
  SITE 328: note = Tnp_P2
  SITE 336: note = Tnp_P3
  SITE 337: note = Tnp_P4
  SITE 350: note = Tnp_P5
MAANLKLIGQRGIKEMNAVGIDVSKGKSTVAIMRPFGEVVAEPFEVSHTDVELRKLACFLEKLPGETRIVMEYTGSYWQPIAKVLHDSGLFVSVVNALLIYKYGNNSIRKGKTDKLDAVKIANYCLDRWTDLERYAPADQIRQTLKTCRRQYDQYIRLKVNLKNNLIALLDGTFPGLNTLFKSAPRDTDGHEKWIDFAAKFWHLECIYGSSEKAFTNQYQKWCARAGYRFSEEKAASIYAYAGSQVNTLPMTDAVKCLVTLAVSQINTIIETISVIQHEMLSLAAQLPEYPVVMRMFGVGPVLGPQLMAEIGDVRRFDRKQSLVAFAGVDAPPCQSGTFESKNRHISKRGSPRLRKTLFQVMSTIIQHAPADDPVFQFLDRKRQEGKHYYVYMTAAANKFLRIYYGTVMAYLEKL

SEQ ID NO: 17834 - protein, 348 aa, unidentified
  source 1..348: note = protein_c4a2d97
  REGION 8..161: note = RuvC_domain
  SITE 11: note = RuvC_P1
  SITE 59: note = RuvC_P2
  SITE 100: note = RuvC_P3
  SITE 102: note = RuvC_P4
  SITE 105: note = RuvC_P5
  REGION 223..308: note = Tnp_domain
  SITE 231: note = Tnp_P1
  SITE 261: note = Tnp_P2
  SITE 269: note = Tnp_P3
  SITE 270: note = Tnp_P4
  SITE 281: note = Tnp_P5
MDAAVITIGIDPHKASLTAVALDPTGRHLATRRVAVNAGAYQTLMNWTVRWPQRRFAVEGATGLGRGIAQLLAAHGEDVVDVPATLSARARLLDTGGTRKTDPADAASVAHAAMRHKRLRPVVAEDHTTQLRLLAERRDDLAVQRVRVLNRLHVLLRDLIPGGAPGDLTAAKATVLMRGLRPLTATDACRRDLARDLLNDVRRLDRQLSANEAQTRQALAATRSTLTDIHGVGHIIAGKILGHIGDISRFPTPDHLASYTGTSPLEASSGDRQRHRLNTTGNRRLNAAVHTIAVCQARDPGPGRVYYLRKIAEGKTPAEARRALKRRLTNILYRHILKDQQHRPARTT

SEQ ID NO: 17835 - protein, 402 aa, unidentified
  source 1..402: note = protein_65b66ff
  REGION 5..163: note = RuvC_domain
  SITE 8: note = RuvC_P1
  SITE 62: note = RuvC_P2
  SITE 102: note = RuvC_P3
  SITE 104: note = RuvC_P4
  SITE 107: note = RuvC_P5
  REGION 276..365: note = Tnp_domain
  SITE 284: note = Tnp_P1
  SITE 314: note = Tnp_P2
  SITE 322: note = Tnp_P3
  SITE 323: note = Tnp_P4
  SITE 336: note = Tnp_P5
MNSVIGLDISKEESHGQAFLERGKPYRGTFHFEHTRDGLAKLLQAVQDLEHAARQRPLLILEATGHYQSSVVQFLEEHHYLYIVINPLISNRLRKSNLRKVKTDAADAYLLGELYYKEEFEPIKKRGVQLLNLRYLTRQYDSLSKMCVQTKLQFQAVLDQVFPAYKGVFGAMYSGISLRFLSEFPTSNSVLQMDENTLNAKIKALLSPIRGRSEEWINERVKRLLHAAKQNPFEQTMYASHLINLKVLITLILQYQEHLAKLEQNIDALAEEIEEYDLIQSIPGIGHKIAATILSEIGEIDRFDHPKKLVAFAGIDPSVFASGKFTATRNRITKRGSRQLRYALVMAVQCGLIRSRNTRIKAFYDRKRAEGKPHKVALVACANKMVHWLHAILKNKKTFRID

SEQ ID NO: 17836 - protein, 343 aa, unidentified
  source 1..343: note = protein_7526066
  REGION 5..151: note = RuvC_domain
  SITE 8: note = RuvC_P1
  SITE 53: note = RuvC_P2
  SITE 91: note = RuvC_P3
  SITE 93: note = RuvC_P4
  SITE 96: note = RuvC_P5
  REGION 211..297: note = Tnp_domain
  SITE 219: note = Tnp_P1
  SITE 249: note = Tnp_P2
  SITE 257: note = Tnp_P3
  SITE 258: note = Tnp_P4
  SITE 270: note = Tnp_P5
MDQYIGLDVSLKDTAISIREDGKRIWRGKCPSDPKLLAEMIRKHAPHARRVVFETGPLSTWFYHALTAEGMPAICIEARHAQKVLDETLNKTDGNDADGLAQLAEAGFYKVVRVKSFDSMLTRTLVGARNQLLNISTQLSNQIRGLMKTFGLIVPKGTGRVFDGNVRELLAGNNDLARIILPLLEAWRDIRKRAADLDRQLLAVARQNQSTKLLMTIPGIGAVTAVSYIAAIEDPENFRTSRSVGAWLGLTTRRYQSGEVDYNGHISRRGDNHLRGLLYEAATVLLTRASVRTESSLKTWGLKLRERLGFKRAAVAVARKLAVIMHSMLRTGEVFNASVGATA

SEQ ID NO: 17837 - protein, 402 aa, unidentified
  source 1..402: note = protein_7217c38
  REGION 10..163: note = RuvC_domain
  SITE 13: note = RuvC_P1
  SITE 61: note = RuvC_P2
  SITE 102: note = RuvC_P3
  SITE 104: note = RuvC_P4
  SITE 107: note = RuvC_P5
  REGION 226..310: note = Tnp_domain
  SITE 233: note = Tnp_P1
  SITE 263: note = Tnp_P2
  SITE 271: note = Tnp_P3
  SITE 272: note = Tnp_P4
  SITE 283: note = Tnp_P5
MSSTKKGVIIGVDPHKMSVTIEVVDTHERLLGSGRFETTNTGYAAMQRYVKQWPHRVWAVEGANGAGRPLAQRLVAASEQVVDVPAKLAARVRLFDTGHNRKTDALDAHSIAVVAVRTDGLRAVVEDGELEALRMLTDRREELARQRVQTVNRLQRLLSELLPGQRKRDLSATQAKAMLATVRPRDVAGKTRRRMAAEEIADLVAVDAKLKKIKAELKAAVLERGSGLMDVYGVGPAGAARVLADVGDVARFVDRNRFASWTGTAPLDASSGEQNRHRLSRAGNRRMNHVLHVAAIVQIRHDTEGRAYYRRKLAAGKTPMEALRCLKRRLSDVVYRQLVADANRATAGLDAGPGGHCGATLQSSAADSHPLIDTSDQPLPGPAKPTLRRRPADRKTLLNAVP

SEQ ID NO: 17838 - protein, 332 aa, unidentified
  source 1..332: note = protein_7304084
  REGION 7..149: note = RuvC_domain
  SITE 10: note = RuvC_P1
  SITE 53: note = RuvC_P2
  SITE 88: note = RuvC_P3
  SITE 90: note = RuvC_P4
  SITE 93: note = RuvC_P5
  REGION 208..295: note = Tnp_domain
  SITE 216: note = Tnp_P1
  SITE 246: note = Tnp_P2
  SITE 254: note = Tnp_P3
  SITE 255: note = Tnp_P4
  SITE 267: note = Tnp_P5
MNLVSTLGIDLAKNTFSVHGVNLNGEVVLRRSLSRAKLSELVAQLPPCLIGMEACSGAHEWARRFSVFGHTVRLMAAKFVTPYRKSGKNDGNYAEAICEAVGRPNMRFVPVKSLEQQSDLTLHRVRQGFVEERTATLNRLRGLLAEFGHVLPLRAVEVHRRVPQLLGKLPIRVASCARDLLEHAARLQAKTLEYEHEIRTHVRSNALARRAQARMGIGPITASALVATVGNGRDFKNGRQFAAWLGLVPRQYSTGGKTRLGHITKRGDPYLRTLLVMGARAVLQRALSLTDPFSRWALAVRERRGYHRACIAIAAKNARVAWALLAKEPVTA

SEQ ID NO: 17839 - protein, 340 aa, unidentified
  source 1..340: note = protein_19f34f6
  REGION 7..149: note = RuvC_domain
  SITE 10: note = RuvC_P1
  SITE 53: note = RuvC_P2
  SITE 88: note = RuvC_P3
  SITE 90: note = RuvC_P4
  SITE 93: note = RuvC_P5
  REGION 212..298: note = Tnp_domain
  SITE 220: note = Tnp_P1
  SITE 250: note = Tnp_P2
  SITE 258: note = Tnp_P3
  SITE 259: note = Tnp_P4
  SITE 271: note = Tnp_P5
MGEVTTIGLDLAKHVFQVHGVDGEGATVLRKQLRRAQVLAFFSRLRPCLVGLEACATAHYWGRELRALGHEVRLMPAQYVKAYIKRNKHDAADAEAICEAVVRPTMRFVRVKTADQQAAVLLHRGRERLVRQRTGLVNALRGHLAEFGVIAPHGLRNVVKLIAIVRDQADARLPDLARQVLQVLAAQIERLEAAVAAIEKQLMAWHKSNPVSQRLASVPGIGPIIATAIAATVVEPSGFRSGREFAAWLGLVPRQNSTGGKHRLGGISKRGNQYLRRLLINGASANLLRSKATNADPWVIGLRRRRPPLVVAVALANKTARIAWAVMHRHENYQRVVAAA

SEQ ID NO: 17840 - protein, 411 aa, unidentified
  source 1..411: note = protein_7c93a25
  REGION 6..159: note = RuvC_domain
  SITE 9: note = RuvC_P1
  SITE 57: note = RuvC_P2
  SITE 98: note = RuvC_P3
  SITE 100: note = RuvC_P4
  SITE 103: note = RuvC_P5
  REGION 221..306: note = Tnp_domain
  SITE 229: note = Tnp_P1
  SITE 259: note = Tnp_P2
  SITE 267: note = Tnp_P3
  SITE 268: note = Tnp_P4
  SITE 279: note = Tnp_P5
MGQVVIGMDPHKSSATIEIINDREKILDTGRYSTDTAGYRAMLAAGRKHRDRVWAVEGCNGIGRHLAQRLVADGEPVVDVPAKLSARARVFSTGQGRKTDPVDAHSVALVGLRSQGLRTITADDATVALRLLIDRREQLGVTRVQVINRIHRLLLELLPGGAKKHLSAAQAKALLTKVRPRDIAGKTRRRLAAELIVDLVSLEAKIKAADKELHQLINTTGSTLRDLHGIGPANAARLLGDVGDITRFADKARFASWNGTAPLDASSGDQHRHRLSRAGNRRINRVLHIMAVVQLRTDTKGRRYYDRKVAAGKTSMEAMRCLKRRLSDIVYKQMRDDAQRVATGPGGHVGAATGSSAVNSNPDVDASEKSCPGPVTTHATRVKSSRPDRSSARSRRPKTAPARSRRQAHSA

SEQ ID NO: 17841 - protein, 392 aa, unidentified
  source 1..392: note = protein_b316be8
  REGION 5..163: note = RuvC_domain
  SITE 8: note = RuvC_P1
  SITE 62: note = RuvC_P2
  SITE 102: note = RuvC_P3
  SITE 104: note = RuvC_P4
  SITE 107: note = RuvC_P5
  REGION 267..356: note = Tnp_domain
  SITE 275: note = Tnp_P1
  SITE 305: note = Tnp_P2
  SITE 313: note = Tnp_P3
  SITE 314: note = Tnp_P4
  SITE 327: note = Tnp_P5
MEPVVGIDIAKGASVLQVFFKRNEPYGKAESISHDEIGFKRLGELLTELQAKTLVAPVVILEATGHYHRPLVSYLVDGGWKHFVINPLQSKRAKGTQLRKVKTDAMDAWHLADMYYRGDVKPHRTWEETYTELQHVTRQHEFVTDMFVQAKLNARALLDQVFPAYTEVFYNLFSVTALNVLQQCLDRKTEGLVELIQTFAGRSHTKRWAYEKAEQLDRLLLTWNKQTKSPSQTAMLSSMIQLLLAFINQLSHLEKQMNEISSFLPEVALVKSVPGIGDKLAAAIVAEMGNVKQFTSAKQLVAFAGLDPGIFSSGKFTATSSRITKRGSKRLRRSLYLAVQCGLRRSSNRKIKEYYDKKRNEGKPYKVVVIACANKLLHHVYAILSKSQPYKE

SEQ ID NO: 17842 - protein, 350 aa, unidentified
  source 1..350: note = protein_6bddbb4
  REGION 5..153: note = RuvC_domain
  SITE 8: note = RuvC_P1
  SITE 55: note = RuvC_P2
  SITE 93: note = RuvC_P3
  SITE 95: note = RuvC_P4
  SITE 98: note = RuvC_P5
  REGION 213..301: note = Tnp_domain
  SITE 221: note = Tnp_P1
  SITE 251: note = Tnp_P2
  SITE 259: note = Tnp_P3
  SITE 260: note = Tnp_P4
  SITE 272: note = Tnp_P5
MKYYAGLDVSVKETSVCIVDESGKLCREKRVVTHADDLVAVLSDPAFHFERIGLEAGPLSQWLFEGLAKAGFAVVCIETRHTKAFLKAQQPNKSDRNDARGIAHMMRVGLFKDVHVKTLTSQKRRALLTARKLLQEKAIAMENDMRGLLRNFGLKVGPIGAFKFDERIRELVEATPDLAEIIEPLLAAREKLRKEFAKLDRKVRDEARVDPVCQRLMSAPGVGPIVALAYTSTIDIPSRFRHSRAVGAVLGLTPVLNQSGENSRIGHVSLRGDAMLRGLLYEAAQVLLIRVKKWSWLKAWAMNVAKRHGIKKAIVALARRLAVVLHRMWVDGSEFRWTREITPTTTGATA

SEQ ID NO: 17843 - protein, 413 aa, unidentified
  source 1..413: note = protein_2898534
  REGION 5..162: note = RuvC_domain
  SITE 8: note = RuvC_P1
  SITE 58: note = RuvC_P2
  SITE 99: note = RuvC_P3
  SITE 101: note = RuvC_P4
  SITE 104: note = RuvC_P5
  REGION 269..355: note = Tnp_domain
  SITE 277: note = Tnp_P1
  SITE 308: note = Tnp_P2
  SITE 316: note = Tnp_P3
  SITE 317: note = Tnp_P4
  SITE 328: note = Tnp_P5
MQVYIGIDWSEQKHDVIMMNAAGAALAQFEIPHSPEGFLRLDETRWRMKLATEDCVVGLETAHNLLIDFLWSRGYSKVYVVPPTTVKSNRKRFSSSGARSDPSDALVIADSLRTDHGRLQSWSPDSLLTRQIRAKVSLINHLTSSTVRLSNRLRAVLLRYYPAVLNMFSSWPTKVAMEFIRAFPTPKHAENLTFDQFQRFARQHRYPNPKRLPTCFARLQAPQPEAAQETVEVYQDEAVLLATMLLTAMRAKKGALLELKTLFREHPDHAIFDSLPGAGDFLAPALLAKFGDDRKRFPTPASVQALAGTCPVTDQSGKRRIIKFRRACDREFRAIAQQWAMASLQQSAWANAYWQRARSRSRYSSLAYRRLANRWLAILWKLWQTGQVYDEAYHLQRCALRSKRHRWSLNFFV

SEQ ID NO: 17844 - protein, 407 aa, unidentified
  source 1..407: note = protein_28563c7
  REGION 5..164: note = RuvC_domain
  SITE 8: note = RuvC_P1
  SITE 61: note = RuvC_P2
  SITE 101: note = RuvC_P3
  SITE 103: note = RuvC_P4
  SITE 106: note = RuvC_P5
  REGION 272..358: note = Tnp_domain
  SITE 280: note = Tnp_P1
  SITE 311: note = Tnp_P2
  SITE 319: note = Tnp_P3
  SITE 320: note = Tnp_P4
MRLFVGDDWAEDHHDVELMDAAGRVLAKARLPGGVAGIARLHALIGLQPGEDAEDAEVVTGIETDRGPWAAALVAAGYVVFAVNPLQASRYRERHGVSGAKSDRGDAHMLTDMVRTDSRQLRAVAGDGPDAGAVKVVARAHKTLIWERTRQVQRLRHQLREYFPAAIEAFADLDAPDALELLARAPDPARAARLTRAQVSAVLKRARRHHIPARATAILAALRRAQLGQPEAVTAACAVTARSLIAVITVLNEQVKALEGEVEAVFGRHPDAEIYLSQPGLGLILGARVPGEFGDDPHRYASGKARKNYAATSPLTRASGKKKTVMARFVRNDRLTDALMAQAFAALTASPGVRALYDAERASGSGHNPALRKVASRLVGILHGCLKTRTLYDEATAWPQHQNTLAA

SEQ ID NO: 17845 - protein, 338 aa, unidentified
  source 1..338: note = protein_e474780
  REGION 7..152: note = RuvC_domain
  SITE 10: note = RuvC_P1
  SITE 53: note = RuvC_P2
  SITE 88: note = RuvC_P3
  SITE 90: note = RuvC_P4
  SITE 93: note = RuvC_P5
  REGION 211..297: note = Tnp_domain
  SITE 219: note = Tnp_P1
  SITE 249: note = Tnp_P2
  SITE 257: note = Tnp_P3
  SITE 258: note = Tnp_P4
  SITE 270: note = Tnp_P5
MSAIKTIGIDLGKSTFHLVGHDHSGQELYRHKFSRTKLIQFISAHEPVTIAMEACCGANWLARRCQEFGHEVKLIPPQYVKPYVKSHKNDFIDADAIAEAATRPKMRFVTPKSEQAQLGSVIRRIRTGYIRERTAVMNRISSILVEFGFSFPRGHANMKRLFQWLADTRQSVPPLLVFELREQLDHYNHLNEKIKEQDKKIETLNHDNELFTLLQSIPGIGPMTAACCLSAVSNPKDFSNGRNFAAWIGLVPFQYSTGGKSRLLGISKRGNKELRELFVHAARSVLWRDATAEKYFGTWLLDLKRRKPFNVALVALANKLARIAWSVMATHKTFEVRT

SEQ ID NO: 17846 - protein, 412 aa, unidentified
  source 1..412: note = protein_cb62657
  REGION 4..170: note = RuvC_domain
  SITE 7: note = RuvC_P1
  SITE 67: note = RuvC_P2
  SITE 107: note = RuvC_P3
  SITE 109: note = RuvC_P4
  SITE 112: note = RuvC_P5
  REGION 278..364: note = Tnp_domain
  SITE 286: note = Tnp_P1
  SITE 317: note = Tnp_P2
  SITE 325: note = Tnp_P3
  SITE 326: note = Tnp_P4
MLFVGDDWAEDHHDVEIVDEHGKVLARRRLPEGLAGVTRLHTLLGEHAPPEWADLDPASAAAQVVVGIETDRGPWVGALVAAGYTVYGLNPMSVARYRERHSTSGAKSDTADAHLLAEIVRLDRAHHRPVAGDSATGEAVKVSARAHLSLIWDRTRHVLRLRSALREFFPAAMRAFEELDAPEALQLLALAPDPDTAARLSRAKVVRALTAANRRDVTARAETIREVLTAPELRRPDPVQDAYAAVVASEVALITVLNTQIERLGQVVDEHFGRHRDADIYTSLPGLGVILSARILGEFGDDPHRYADAKCRKAYAGTAPITRASGTRKVVLARYARNRRLGDAVQQWAFCSMRGSPGARAYYQSLRARGIGHQAALRQLANRWVGILHGCLRHRTFYDENTAWQHHLSTAA

SEQ ID NO: 17847 - protein, 323 aa, unidentified
  source 1..323: note = protein_fa7d429
  REGION 4..152: note = RuvC_domain
  SITE 7: note = RuvC_P1
  SITE 57: note = RuvC_P2
  SITE 97: note = RuvC_P3
  SITE 99: note = RuvC_P4
  SITE 102: note = RuvC_P5
  REGION 197..283: note = Tnp_domain
  SITE 205: note = Tnp_P1
  SITE 234: note = Tnp_P2
  SITE 242: note = Tnp_P3
  SITE 243: note = Tnp_P4
  SITE 256: note = Tnp_P5
MFYLGVDVSKKKLDCMLLNSANGKLKSKSLSNTKAGFEELIGWLAENKAPEAHVVMEPTGVYHEPAALALTDAGLTLSLVNPAQLRQFAQGLGVKNKTDKADSTVLARYGEAVKPEAWQPPSKSARHLKALLARRDAVADDLQREQNRQEAVEFAVSPEEVKQSINQSISFLKAELKRLEETIEEHIDSDPGLRDKKDLLETIPGVGERVSTNLTALFAAKTFDSAEQLAGYLGLVPVHGESGTSVHKRPRLSKAGPAHLRKLLYMPALVARQWNPHIKAFSERLLAKGKTKMAVIGACMRKLAHLCFGVVHTGRPYDPNYAM

SEQ ID NO: 17848 - protein, 412 aa, unidentified
  source 1..412: note = protein_bcce8e7
  REGION 5..165: note = RuvC_domain
  SITE 8: note = RuvC_P1
  SITE 62: note = RuvC_P2
  SITE 102: note = RuvC_P3
  SITE 104: note = RuvC_P4
  SITE 107: note = RuvC_P5
  REGION 273..359: note = Tnp_domain
  SITE 281: note = Tnp_P1
  SITE 312: note = Tnp_P2
  SITE 320: note = Tnp_P3
  SITE 321: note = Tnp_P4
MRLFAGDDWAEDHHDIEVMDQAGKVLAKKRLPEGAAGMAQLHALIGQFVPEDDMDSTEVVIGIETDRGPWVAALVAAGYTVFPVNPLQASRYRERHGVSGAKSDAGDAHMLADMVRTDSHQLRAAAGDSPEAAGIKVLARTHKTLIWERTRATQRLRHQLREYFPAALEAFEDLDAADTLELLGKAPEPARAAKLTRAQVSAALKRARRRNIPDKATAILAALRSEQLGQPEALTAAYAATVRSLLAVITVLNEQVKALQGQVGEHFGRHPDAEIYLSQPGMGKILGARVLGESGDGPRRYRDGKARRNYAATSPLTRASGKKKVVSARFIHNDRLVDALNAQAFAALSASPGARTLYDELRTRGIEHNDALRRLANRLVGILHGCLKTRTLYDEATAWGHRQNLPQSSVAA

SEQ ID NO: 17849 - protein, 341 aa, unidentified
  source 1..341: note = protein_d36e7ae
  REGION 6..147: note = RuvC_domain
  SITE 9: note = RuvC_P1
  SITE 52: note = RuvC_P2
  SITE 87: note = RuvC_P3
  SITE 89: note = RuvC_P4
  SITE 92: note = RuvC_P5
  REGION 211..297: note = Tnp_domain
  SITE 219: note = Tnp_P1
  SITE 249: note = Tnp_P2
  SITE 257: note = Tnp_P3
  SITE 258: note = Tnp_P4
  SITE 270: note = Tnp_P5
MNITTIGIDLAKNVFQVHGVDEHGKVVLRKQLKRAQFALFFSNLPHCLIGMEACGSAHHWARKLQSFGHTVKLIAPQFVKPYVKSNKHDIADAEAICEAVARPNMRFVPIKNVEQQSILSLHRARQSFVKARTAQANQIRSLLAEFGLVIPKGINNVPGQIPLVLAEAEGELPGVFRQLIDGLLAHFHELHRQVTEMELQIKAWHRDNEASRKLAEIPGIGPLGATALVASIGDAKSFKNGRQLAAWLGLVPRQHSTGGKQNLLGISKRGDVYLRTLMIHGARSAILATQRRPGNTSWLAKLLDRRHPNVAAAALANKNARVVWALLAHDREYQPSYTAVA

SEQ ID NO: 17850 - protein, 344 aa, unidentified
  source 1..344: note = protein_bfe7514
  REGION 6..147: note = RuvC_domain
  SITE 9: note = RuvC_P1
  SITE 52: note = RuvC_P2
  SITE 87: note = RuvC_P3
  SITE 89: note = RuvC_P4
  SITE 92: note = RuvC_P5
  REGION 211..304: note = Tnp_domain
  SITE 219: note = Tnp_P1
  SITE 249: note = Tnp_P2
  SITE 257: note = Tnp_P3
  SITE 258: note = Tnp_P4
  SITE 270: note = Tnp_P5
MKCTRVGLDIAKQVFQVHGVNERGVAKGRKTLPRGKVLEYFAQLPPCLIGIEACGSAHYWARELSKFGHTVKLMATQYVKAYRKRGKNDANDAEAICEAVGRPNMRFVAVKSEEQQAVLMVHRARALTVANRTSQVNQIRGLLGEFGLVVPRGIGRLRRELPGILENAENGLPVLAREVLSGLLEQLREADSQVGAYDQKIRDLAEASEPARRLMRVESIGPQTATALVATVGDPHVFKNGRGFAAWLGITPRQHSSGGTERLGPITRQGDRYLRTLLVHGARSYLRVVDKKTDAKSDWARRLKQRRHMNVAAVALAAKHARIAWAMLAHGTDYRPAGPQTAAA

SEQ ID NO: 17851 - protein, 351 aa, unidentified
  source 1..351: note = protein_4b2837a
  REGION 20..162: note = RuvC_domain
  SITE 23: note = RuvC_P1
  SITE 66: note = RuvC_P2
  SITE 101: note = RuvC_P3
  SITE 103: note = RuvC_P4
  SITE 106: note = RuvC_P5
  REGION 224..307: note = Tnp_domain
  SITE 232: note = Tnp_P1
  SITE 262: note = Tnp_P2
  SITE 270: note = Tnp_P3
  SITE 271: note = Tnp_P4
  SITE 283: note = Tnp_P5
MSSIGTSCLGSGSCKRSPSSGWDLAKNVFQVHGIDAAGVVVVRKPLRRSQVLPFFEGLSPCLVGIEACASAHHWGRQLMAVVHEVRLMPPAYVKAYVKRGKTDAADAEAIAEAVTRPTMRFVAVKTEAQQAILMLHKTRDLLVRQRTMLINALRGHLGEFGMVSAQGSAGVQAALRSLILEQERLPELAQAALRGLAGQLETLRAEIERLEHQILAWHRQDATSRRLATIPGIGPITASALAASAPDPALFRSGRQFAAWLGLTPRAHSSGGKKRQAGISKMGDGYLRRLLVVGATAVLRMARQRGVGGAWIQGLLERKKPKAAAVALANKTARIAWVLMARQEVYKPAAA

SEQ ID NO: 17852 - protein, 339 aa, unidentified
  source 1..339: note = protein_4c5cf39
  REGION 6..147: note = RuvC_domain
  SITE 9: note = RuvC_P1
  SITE 52: note = RuvC_P2
  SITE 87: note = RuvC_P3
  SITE 89: note = RuvC_P4
  SITE 92: note = RuvC_P5
  REGION 211..298: note = Tnp_domain
  SITE 219: note = Tnp_P1
  SITE 249: note = Tnp_P2
  SITE 257: note = Tnp_P3
  SITE 258: note = Tnp_P4
  SITE 270: note = Tnp_P5
MKITTIGLDIAKKFFQLHWVDMTTGEVHRKQLKREQMAEFFANCERSVIAMEACGSAHYWARKLSGLGHEVRLVAAQFVRPFVKSNKTDAADARAIWEASQRPEMKFVAVKTEGQQSVLTLHRLREQLVKFRTMQTNQLRGLLYEFGVVLPVGRAKGMPAALDALGELEETLPAMTVDALRQQMVRIQKLSDDIADIEKKLTLWKKEERSAVKIMEIPGVGILTATAAVATMGDSGAFKNGREFAAFLGLVPKQSGTGGRVRLQGISKRGNVYLRTLLIHGARARINLQKQRDPWIEQLLARRPFNTVVVALANKMARTIWALMAHNREYQKNYVTSIA

SEQ ID NO: 17853 - protein, 411 aa, unidentified
  source 1..411: note = protein_ee3d81c
  REGION 5..163: note = RuvC_domain
  SITE 8: note = RuvC_P1
  SITE 62: note = RuvC_P2
  SITE 102: note = RuvC_P3
  SITE 104: note = RuvC_P4
  SITE 107: note = RuvC_P5
  REGION 273..373: note = Tnp_domain
  SITE 281: note = Tnp_P1
  SITE 311: note = Tnp_P2
  SITE 319: note = Tnp_P3
  SITE 320: note = Tnp_P4
  SITE 333: note = Tnp_P5
MNPVVGLDISKGESQVQAFVDKGKPFGKSFKVAHTLQGLDLLVEFLEVVQKESGLKPPVILEATGHYQKSVVQYLEERGYLLIIINPLISYKAKSSSLRKVKTDAIDAYHLCELFYKEELEPYKKRGVQLLNLRNLTRQHENITGVMIQTKLQFQAILVQVFPEYRRVFGDLYSVVSLLTLKAFPSSEDILEASDDTLSNRIKELCKSRSIRWANEKALQLKVVAARNPFEKTVYQSHILSLGLYIDIILQYKEHLSTLEFEIDALAKEVEEYNIIKSIPGIGEKIAATIISEIGEIDRFTDPKKLVAFAGVDPSVFESGKFTATKNRITKRGSSGLRHALYMAVRCAIRDCRKSKTSDEIIPRNKKLRQFYDKKREEGKPFKVAVIACVNKLLHWIFALLKNRTTFQDIA

SEQ ID NO: 17854 - protein, 396 aa, unidentified
  source 1..396: note = protein_79d1340
  REGION 6..160: note = RuvC_domain
  SITE 9: note = RuvC_P1
  SITE 58: note = RuvC_P2
  SITE 98: note = RuvC_P3
  SITE 100: note = RuvC_P4
  SITE 103: note = RuvC_P5
  REGION 265..352: note = Tnp_domain
  SITE 273: note = Tnp_P1
  SITE 304: note = Tnp_P2
  SITE 312: note = Tnp_P3
  SITE 313: note = Tnp_P4
  SITE 325: note = Tnp_P5
MPEIWAGVDIGKTHHHAVVIDAEGKRLLSRRVQNDETELLALIGDVLEISRDALWAVDLNHGGAALLIGLLVSHGQPVAYLTGLAIHRASATYRGEGKTDAKDAFVIADQARVRHDLGLLRPGDEIAVDLRTLTTRRLDLIFDRTRQINRLRAQLLEIFPALERSLELTNHGPVMLLTGFQTPAAIRRAGASRIETWLRNRKVRGAATLAKSAVEAARAQHTVLPGEELAAAMVVRLAKGVMALDEEIAELDTLIEAKFREHPHAEVIRSLPGMGTKLAAEFIAATGGDMDAFGSSDRLAGFAGLAPRPRDSGRVSGNMRRPRRYHRGLLRTMYLSAMVSLRCCPASKAYYDRKRSEGKGHKRALLALARRRLNVLWAMIRDGECFHSSPPVTGAA

SEQ ID NO: 17855 - protein, 349 aa, unidentified
  source 1..349: note = protein_c788fab
  REGION 6..147: note = RuvC_domain
  SITE 9: note = RuvC_P1
  SITE 52: note = RuvC_P2
  SITE 87: note = RuvC_P3
  SITE 89: note = RuvC_P4
  SITE 92: note = RuvC_P5
  REGION 211..297: note = Tnp_domain
  SITE 219: note = Tnp_P1
  SITE 249: note = Tnp_P2
  SITE 257: note = Tnp_P3
  SITE 258: note = Tnp_P4
  SITE 270: note = Tnp_P5
MNRTTYGLDLAKSVMQLHWIDSETGEIGRKKLTRAKLGEFFATRQSARVAMEACGSAHHWARTLGNLGHQVELLPAKQVRAFVRSNKDDAADARAIWLAAQQTDIRRAPIKTVEQQAVMSLHRTRSHWVSVRTATTNMVRGLLYEFGVVLPGGKQAGLKAIGANRAQIDDKLPQLMSRLVDQQLQTLRDIERSIEQIEAEIAEQQRQLDKARVLREVPGIGVLGATALAATLGDGKGWRSGREFAASLGLVPAHSGTGGKTQIGHLSKRGDPYLRTLLIHGARAVIAGAKNKPTWLQNLLLRRPPNVVAVALANKLARTAWALVAHGRAYRPEWKSTPPSGCNAQAFSA

SEQ ID NO: 17856 - protein, 343 aa, unidentified
  source 1..343: note = protein_955c4b7
  REGION 5..152: note = RuvC_domain
  SITE 8: note = RuvC_P1
  SITE 55: note = RuvC_P2
  SITE 92: note = RuvC_P3
  SITE 94: note = RuvC_P4
  SITE 97: note = RuvC_P5
  REGION 212..300: note = Tnp_domain
  SITE 220: note = Tnp_P1
  SITE 250: note = Tnp_P2
  SITE 258: note = Tnp_P3
  SITE 259: note = Tnp_P4
  SITE 271: note = Tnp_P5
MDYFAGLDVSVKETSVCIVDNAGKIVREARVASEPEALLQVLTNTIYRLKRVGLEAGPLSQWLYSVLAEAGLPVICVETRHMRAVLKAQINKTDRNDARGIAQMMRVGLYRPVHVKTLRSQKLRMLLTHRKLLQSKAIAIENDLRATLRNFGLKVGIVGTVKFEARIKELVANLPDVALLVEPLLVVRRVLREQVGILHRRLLAVVRDDDVCRRLMTIPGVGPVVALTYRVTVDVPARFRNSKAVGAVFGLTPAKYQSGENDRTGAISRCGDEMMRMMLYEAAQSMLVRSTKWSWLKAWAMKIAKHRGMKKAIVALARRLAVIMHRIWVDSTAFRWTREVAVA

SEQ ID NO: 17857 - protein, 339 aa, unidentified
  source 1..339: note = protein_be3fd40
  REGION 6..148: note = RuvC_domain
  SITE 9: note = RuvC_P1
  SITE 52: note = RuvC_P2
  SITE 87: note = RuvC_P3
  SITE 89: note = RuvC_P4
  SITE 92: note = RuvC_P5
  REGION 211..303: note = Tnp_domain
  SITE 219: note = Tnp_P1
  SITE 249: note = Tnp_P2
  SITE 257: note = Tnp_P3
  SITE 258: note = Tnp_P4
  SITE 270: note = Tnp_P5
MQVTTVVLDLAKNIFQVHGVTENGEVAFNQALRRAQLFAFFEKLPPCLVGMEACGSSHYWARQLSKLGHDVRLIPAMYVKPYVKRGKSDAVDAAAICEAVTRPIMRFVAIKSEEQQGVLFLHRARDLIVRQRTQLSNMLRGLLGEFGIVIVQGIGSAIKFAKGVLDGDKPGIPEVAIDVLDNLSNQLVALHLRVRRYEMRIRLQAKQDLRVTLLRSIPGVGPVTASAIVATAGDASQFKNGREFAAWLGLTPLNRSSGGKEKLGRITKMGDRYIRRLLVTGITSRLRQMKTHPERVDPWSRALLDRKPTRLATVAMANKTARIIWAVLSKNEYYRPHTI

SEQ ID NO: 17858 - protein, 343 aa, unidentified
  source 1..343: note = protein_051c786
  REGION 6..148: note = RuvC_domain
  SITE 9: note = RuvC_P1
  SITE 52: note = RuvC_P2
  SITE 87: note = RuvC_P3
  SITE 89: note = RuvC_P4
  SITE 92: note = RuvC_P5
  REGION 211..297: note = Tnp_domain
  SITE 219: note = Tnp_P1
  SITE 249: note = Tnp_P2
  SITE 257: note = Tnp_P3
  SITE 258: note = Tnp_P4
  SITE 270: note = Tnp_P5
MTVSVLGIDIAKNTFQLHGADSAGNSVLRKRLPRNKLAAFVANLPQCKVVMESCGSANYWARVFQSSGHTVKLISPQFVKPFVKTNKNDANDAQAIVEAASRPSMHFVPIKGIEQQDIQSIHRVRSRIVKNRTALINEIRGLCLEYGIIVSPGATKVKRSLCLIITSDTNQLTQSSRECMRDLYDELIENEARLKKLDKKIRQICLKNETCYRLLKIPGVGELTASAIVAAVPNANEFKNGRHMSAWLGLVPRQSSSGDKQVLLGISKRGDRYLRTLLIHGARAALSHYKKVDTVYGRWLSQRKATLSFNKAAVALANKNARIIWSLLHSGEEFDSNVQLAAA

SEQ ID NO: 17859 - protein, 400 aa, unidentified
  source 1..400: note = protein_ef5b71d
  REGION 10..170: note = RuvC_domain
  SITE 13: note = RuvC_P1
  SITE 65: note = RuvC_P2
  SITE 105: note = RuvC_P3
  SITE 107: note = RuvC_P4
  SITE 110: note = RuvC_P5
  REGION 273..360: note = Tnp_domain
  SITE 281: note = Tnp_P1
  SITE 311: note = Tnp_P2
  SITE 319: note = Tnp_P3
  SITE 320: note = Tnp_P4
  SITE 333: note = Tnp_P5
MKGFLHMKLIGIDIGKNKHFFCIMDQQTGEIISQPVSFSNDKEGFDFLVQKIKSYPKDSILIGMEDTGHYHFALLKYLLNLQYTVALINPKTTDFNRKMQGGITKNDKLDTINICDVLDTPERKKQYRITKVNSFDLYEQKQLTRHHHNLKEEENVYKNRLQKCIDIVFPEFNKLFNSKYGIVYMNILKMFGSAENIANTDIRTIRKCFEIEGRGNRISLTPERLKECARSSIGISSSAEVIQIKHLTAQIELIEEQLTEIDKKIEEFSIQNNSPILSIPGISHFSGTSILAELGDISNYSKPSQIIKFAGVAPLHYESSQFNAQHTSITKKGSKYLRKTLYQIILPVIRHNPVFTKYYQLKISQGKGHRCAQGHCVRKLIRIIYHLLKTNQQFDPQLLR

SEQ ID NO: 17860 - protein, 400 aa, unidentified
  source 1..400: note = protein_b73e2b6
  REGION 5..163: note = RuvC_domain
  SITE 8: note = RuvC_P1
  SITE 62: note = RuvC_P2
  SITE 102: note = RuvC_P3
  SITE 104: note = RuvC_P4
  SITE 107: note = RuvC_P5
  REGION 273..362: note = Tnp_domain
  SITE 281: note = Tnp_P1
  SITE 311: note = Tnp_P2
  SITE 319: note = Tnp_P3
  SITE 320: note = Tnp_P4
  SITE 333: note = Tnp_P5
MNPVIGLDVAKGESQVQAFLKRKKPYKKSFKFEHHLQGLHAFYQFYQEVEQVSGQPPAVIFESTGHYHEPVLQFLEDQAITYYVINPVISYEARKTSLRKVKTDKIDAFHLGELYYKEDLEVFQRKNEQYLNLRQLTRQHSALTDSYVEIKLQFQAAVDHTFPEYHSVFSDLCGKLSLNTLLHYPTSAAIQEVSQQTLAMEMHQFGAKRSYAWFLDKAAQLKAAADRNPFQHPVCHGHVVSIQMYIQMLFQYQEHLSQLQKEIDALAKTFEDYDLVQSVPGIGEKIGATIISEVGGIDQFERPKQLAAYAGLDPSVFESGKYKASINRITKRGSSRLRQALYSAVQCGLAKNRNKKLIGFYDRKRNEGKPHKVAVIACANKLVHWIHAMLKRQEAFVDQS

SEQ ID NO: 17861 - protein, 337 aa, unidentified
  source 1..337: note = protein_67159d6
  REGION 24..145: note = RuvC_domain
  SITE 50: note = RuvC_P2
  SITE 85: note = RuvC_P3
  SITE 87: note = RuvC_P4
  SITE 90: note = RuvC_P5
  REGION 209..296: note = Tnp_domain
  SITE 217: note = Tnp_P1
  SITE 247: note = Tnp_P2
  SITE 255: note = Tnp_P3
  SITE 256: note = Tnp_P4
  SITE 268: note = Tnp_P5
MLALIWQRTYFSCTVWIGRVRRYGDAGCRRDQWLKVLLEKIEPGCEIGMEACTGAHHWARELQAEGYRVKLIAPQFVKPYVKSQKNDANDAEAICEAMSRPHMRFVAVKTVEQQDIQALHRVRSELIGQRTAKANQIRGLVAEYGLVAPRELSSLRRAIPGWLEDAENSLTMQFRVLLDALWSDLRHLDGRVAELDADIRQLANTDPQAKRLQQLRGVGPLIATALLATVGTGEQFANGRQMSAALGLVPRQHDSGDKRRRLGITKRGDAYLRSLLIHGARAVIRTAGNKEDRLSQWVTALADRRHPNVAAVALANKTVRMAWAMLSRDADYQPWSA

SEQ ID NO: 17862 - protein, 358 aa, unidentified
  source 1..358: note = protein_c920c59
  REGION 27..172: note = RuvC_domain
  SITE 30: note = RuvC_P1
  SITE 73: note = RuvC_P2
  SITE 108: note = RuvC_P3
  SITE 110: note = RuvC_P4
  SITE 113: note = RuvC_P5
  REGION 231..317: note = Tnp_domain
  SITE 239: note = Tnp_P1
  SITE 269: note = Tnp_P2
  SITE 277: note = Tnp_P3
  SITE 278: note = Tnp_P4
  SITE 290: note = Tnp_P5
MVRPTPALHSAMSLNMGGAIMSAIKVIGIDLGKSTFHLVGHDYSGREQYRHKLSRSKLLQFISVHEPTLIAMEACCGAHWLARKCQEYGHQVKLIPPQYVKPYVKSHKNDFIDADAIAEAATRPRMRFVSPKTEQAQLGVVIRRIRTGYIRERTATMNRIGSILTEFGFSFPRGHANMKRLFQWLADTGQPVPSLLVFELRDQLCHYNDLNDKIKEQDKKLETLNRDNELFTILQTVPGIGPMTASCCLSSVSDPKDFSNGRNFAAWLGLVPFQYSTGGKPRMLGISKRGNKELRELFIHAARAVLWRDETAQRYFGSWLTDLKLRKPFNVALVALANKLARIAWSVMATKKPFEIRV

SEQ ID NO: 17863 - protein, 439 aa, unidentified
  source 1..439: note = protein_a100f59
  REGION 9..153: note = RuvC_domain
  SITE 12: note = RuvC_P1
  SITE 59: note = RuvC_P2
  SITE 93: note = RuvC_P3
  SITE 95: note = RuvC_P4
  SITE 98: note = RuvC_P5
  REGION 248..335: note = Tnp_domain
  SITE 256: note = Tnp_P1
  SITE 286: note = Tnp_P2
  SITE 294: note = Tnp_P3
  SITE 295: note = Tnp_P4
  SITE 307: note = Tnp_P5
MKKRRDRVCGADVHKDLIVATITGDDVPPVQENFGTTKSELKRFRNWLVANKCEQVAFEATGVYWIPIYDALSSTIDTIVANPLQIKTIPNDKSDSKDSKRIATLCLNGQIKRSRVFSNEDRDLRTLTRARSGYVKTRTQFRNRIHKYLSSSGIKLSSCMDDIFCKSGRYILNGLADEKPIEEILKGIPSGKIRKKQDLISAALSNGLDDTNRMLVRDALELLDNLESKTEKLSLVVLKKIQQRSKDLAIVMSIPGIGFISASVVLSEIGNYRDFQTPDQLAKWCGLNPGENESAGKKKKCGITKRGSKHIRVVLVQAAQTISRMKNTRLTRFFQRLSKKKEHNVAIIAVARKLICLIYHLLINQELYQEDECRKRRSSQDKSCHAPSFQEDHLTDRVAAIVDAFYHLNDRGRKNALMREIADISDIKVGQKRPSQGGE

SEQ ID NO: 17864 - protein, 391 aa, unidentified
  source 1..391: note = protein_d9a141d
  REGION 4..163: note = RuvC_domain
  SITE 7: note = RuvC_P1
  SITE 60: note = RuvC_P2
  SITE 101: note = RuvC_P3
  SITE 103: note = RuvC_P4
  SITE 106: note = RuvC_P5
  REGION 266..353: note = Tnp_domain
  SITE 274: note = Tnp_P1
  SITE 304: note = Tnp_P2
  SITE 312: note = Tnp_P3
  SITE 313: note = Tnp_P4
  SITE 326: note = Tnp_P5
MIYVGIDIAKDKHDCFIANSDGEVLFNSFTIPNNREGFDELYQKIESVSDDMTKVKVGLEATGHYSYNILGYLLDKGCPTFLINPLLTSLYRKSLSLRKTKTDKVDAHTIATMLMSDVDLKSYSDTSYHNEQLKSLTRYRFDKVKERAKLKTSVARLMVILFPELEKLVPSLHIASVYAMMSEFPSAKAISHAHLTRLTHLLELASKGHYSKDKATLIREAARQSIGSDMPAKSLELRHTIKLINELSSEIDEIEFHIKAIMTDINSPITTIPGINLRMGAMILAEIGDFNRFDSPDKILAYAGLSPSTYQSGQLESSYSHMEKRDSRYLRYALFNAAKFVCIWDPTFSAYLAKKRAEGKHYNVAVSHAAKKLVRVIYQLEKTKRPYLKAS

SEQ ID NO: 17865 - protein, 343 aa, unidentified
  source 1..343: note = protein_0074fd6
  REGION 6..148: note = RuvC_domain
  SITE 9: note = RuvC_P1
  SITE 52: note = RuvC_P2
  SITE 87: note = RuvC_P3
  SITE 89: note = RuvC_P4
  SITE 92: note = RuvC_P5
  REGION 211..298: note = Tnp_domain
  SITE 219: note = Tnp_P1
  SITE 249: note = Tnp_P2
  SITE 257: note = Tnp_P3
  SITE 258: note = Tnp_P4
  SITE 270: note = Tnp_P5
MLIASVGIDLGKTTFHLVALDDHGNVVIRKKFSRNQLLTYTANLQTSLIGMEACAGAHFLAAALRDQGHDVRLIPAQFVKPFVKSNKNDFIDAEAIAEAVTRQNMRFVPIKSDEQLDLQAMHRIRERLVQRRTALINQIRGFLQERGITFPKGPAHLRKNMAAIVEDADANLTRRMRTLLDRLWVEWRQLDYDIEVAGEDIERIASEDDACKRLRQIPGVGPLVSTATVAAIGNGAAFRKGREFAAFLGLVPRQHSTGGKTTLRGISKRGNRYLRMLFIHGARAVLLRAKCDNGSFGQWVRQLELRAPRNKVIVAVANKLARVAWAVLFNGAPYRYESVCAQP

SEQ ID NO: 17866 - protein, 396 aa, unidentified
  source 1..396: note = protein_cb52e81
  REGION 9..174: note = RuvC_domain
  SITE 12: note = RuvC_P1
  SITE 65: note = RuvC_P2
  SITE 105: note = RuvC_P3
  SITE 107: note = RuvC_P4
  SITE 110: note = RuvC_P5
  REGION 274..359: note = Tnp_domain
  SITE 282: note = Tnp_P1
  SITE 312: note = Tnp_P2
  SITE 320: note = Tnp_P3
  SITE 321: note = Tnp_P4
  SITE 332: note = Tnp_P5
MTTTSDIRVSVDVGCHRHSVAIGLPSGEVLDEFELDHRPEGFEVFFNRVDSHQRRYGGAVSVAMEGYNGWARPLDTLVRQHGYRLFNVNNLKLARFKEIFPAAAKTDRIDARKGLELFQLCDHLPLAKGVLQEVAATPKENDVLKRLTRRRRSVVDEKGRILSRMQSDLQAVCPGLLAITKDADNVWFLNLLSHSDDLTKLARLHQKTVLGIRAIGRKYAAIIGDWQKHASFSHEVDYVGPMIIEDARRILELRETVKALEARCKEAANGSPIAQLIDTVPGFGLVCSSELAGEIGTVDRFTSEASLAVYIGMATLDNSSGSVRGSKNPKHVNSRAKAAMMVGVDRHRKMIPESQRYYEKKRAQGKTHNQAVRALGRHLSRVIFRMLTQDRPYEIR

SEQ ID NO: 17867 - protein, 406 aa, unidentified
  source 1..406: note = protein_a1ce1fc
  REGION 6..164: note = RuvC_domain
  SITE 9: note = RuvC_P1
  SITE 59: note = RuvC_P2
  SITE 101: note = RuvC_P3
  SITE 103: note = RuvC_P4
  SITE 106: note = RuvC_P5
  REGION 278..364: note = Tnp_domain
  SITE 286: note = Tnp_P1
  SITE 316: note = Tnp_P2
  SITE 324: note = Tnp_P3
  SITE 325: note = Tnp_P4
  SITE 338: note = Tnp_P5
MIMNAVGIDVSKRKSTVAVLRPGGEVLMKPFDISHQSADFQILTRKLKDLDGETRIVMECTGHYYEPVARELSQAGLFVSAVNPQIINNFQGQNNPLRKVKTDKADSVKIARYTLDSWANLKQYTLMDELRSQLKTMNRQFDFYMKHKTALKNNLIALIDQTYPGANTYFDSPARDDGSQKWVDFLATYWHVDCVRKMSLNAFTDHYQKWCCRKKYNFSKAKAEEIYGIAKELIPVLPKDNFTKRIIRQAVAQVNAASQTVEELRALMNETASKLPEYPIVMEMKGVGPSLGPQLMAEIGDVTRFTHKGAVTAFAGVDPGVNDSGDYSQKSVHASKHGSPVLRKTLFQVMDILIKTKPDDAVYWFMDKKRAEGKPYYVYMTAGANKFLRVYYGRIKEYLSTLPKSN

SEQ ID NO: 17868 - protein, 339 aa, unidentified
  source 1..339: note = protein_94cb178
  REGION 6..147: note = RuvC_domain
  SITE 9: note = RuvC_P1
  SITE 52: note = RuvC_P2
  SITE 87: note = RuvC_P3
  SITE 89: note = RuvC_P4
  SITE 92: note = RuvC_P5
  REGION 210..296: note = Tnp_domain
  SITE 218: note = Tnp_P1
  SITE 248: note = Tnp_P2
  SITE 256: note = Tnp_P3
  SITE 257: note = Tnp_P4
  SITE 269: note = Tnp_P5
MKYTTVGLDIAKNVFQLHWVDAETGEIVNKQLKRTVFLEHFANREPCLIGMEACGGAQHWARRLIQMGHQVKLMPAKFVKAFVIGNKNDPADARAIWMATQMPSKAVAVKTEGQQAVLALHRLRQQKIKFRTMQMNCLRGLLTEYGEVMAKSRAALDKAIPGVLAKLAERLPAMLTDSLRELWNDLERLDKQIADIERRLQMWMKEDKACNAIAAIPGVGLVTATATVATMGDAKSFKSGREFAAWLGLVPKQTGTGGKIQLLGISRRGDTYVRTLLIHGARSVLFHANHAGAWAENLQKRRPSNVVTVALANKMARTIWAVLAHDRPYERDHVSARSA

SEQ ID NO: 17869 - protein, 406 aa, unidentified
  source 1..406: note = protein_a243355
  REGION 4..162: note = RuvC_domain
  SITE 7: note = RuvC_P1
  SITE 57: note = RuvC_P2
  SITE 99: note = RuvC_P3
  SITE 101: note = RuvC_P4
  SITE 104: note = RuvC_P5
  REGION 277..363: note = Tnp_domain
  SITE 285: note = Tnp_P1
  SITE 315: note = Tnp_P2
  SITE 323: note = Tnp_P3
  SITE 324: note = Tnp_P4
  SITE 337: note = Tnp_P5
MNAVGIDVSKGKSTVSILRPGGEFVISPFEVSHDPRELSELVTLIKSLDGDTKIVMEYTGNYYLPVALFLRKVGLFVSVVNPILVKEYSNKSLTVRKGKTDKKDSVKLAAFALDRWNELPLFSSQSDTRTLLKSFNRQYNQYNKLKVMLKNNLVSILDQTFPGANTLFNTPARKADGHEKWIDFVLKFPHCECVSKKSYSAFSKSYLSWCRKGGFNFSDSKAKEIYAFACNCAPSLDDSETAHMLVSTAILQLNTLNETLASLQNEMDLLASSLPEYDTVMRLYGVGSVLGPQLIAEIGDVSRFSNKKALVGFAGIDAPPFQSGNFNPQSRNISKRGSAALRKTLFQIMAVVLQNAPVNEPVFLFMDKKRSEGKHFYVYMMAGANKFLRIYYARVMEHLNSLQAAA

SEQ ID NO: 17870 - protein, 298 aa, unidentified
  source 1..298: note = protein_df3c9b3
  REGION 1..68: note = RuvC_domain
  SITE 7: note = RuvC_P3
  SITE 9: note = RuvC_P4
  SITE 12: note = RuvC_P5
  REGION 173..260: note = Tnp_domain
  SITE 181: note = Tnp_P1
  SITE 211: note = Tnp_P2
  SITE 219: note = Tnp_P3
  SITE 220: note = Tnp_P4
  SITE 233: note = Tnp_P5
MYVRQTKNDSVDSFIIAQIMRFGEFSISNFSDENTFALRNLTRYRFALVDECSDWKRKLIAILDQVFPEYSSLFSNIYGVASKELLSKYPLPEDMLSIPAEELGDLLCKCSKGRLGINKAEEIQSCARETFGIKFAKRSFSFQIKQIISQISFLEEQLKEIEIEISYLLEDICPIITTITGIGSVLGASIVSEIGNISRFERANQLVAYAGLDTRVKQSGDFSATNTKLSKRGSPYLRRSIWLAATVAAFKDPALSIYYQGLRARGKAHGTAIGAVARKLTNIIFAVLRDQKPYTPNI

SEQ ID NO: 17871 - protein, 308 aa, unidentified
  source 1..308: note = protein_f265a87
  REGION 1..80: note = RuvC_domain
  SITE 18: note = RuvC_P3
  SITE 20: note = RuvC_P4
  SITE 23: note = RuvC_P5
  REGION 181..268: note = Tnp_domain
  SITE 189: note = Tnp_P1
  SITE 219: note = Tnp_P2
  SITE 227: note = Tnp_P3
  SITE 228: note = Tnp_P4
  SITE 241: note = Tnp_P5
MFNPLATNHIRLAFNLAKNDRLDSLTIASALAMPRLYRIIEDEHFTYHEIRELSRYHQSLSKTMNRYKNRLQKFIDIAFPEFNKLFDTKYSKTYLKILKDFQSAQNIANTDIRTLRKALLSKGRCVSITAEELKSAARDSIGHSHIALDLEIQQTVEMIEKIDSNLDIVDKKIEEFSLQLNSPILAIPGISHISAMSILSELGDFTQYESAKKIIKLSGTNPYIYESGTYSMPRTRLEKKGSKYLRCTLYNIIQTVINNNPVFKDYYDRKISQGKSHRCAQGHCVRKLLRVIYHILTTGCEFDPSLLR

SEQ ID NO: 17872 - protein, 403 aa, unidentified
  source 1..403: note = protein_fe15973
  REGION 4..160: note = RuvC_domain
  SITE 7: note = RuvC_P1
  SITE 57: note = RuvC_P2
  SITE 97: note = RuvC_P3
  SITE 99: note = RuvC_P4
  SITE 102: note = RuvC_P5
  REGION 274..361: note = Tnp_domain
  SITE 282: note = Tnp_P1
  SITE 312: note = Tnp_P2
  SITE 320: note = Tnp_P3
  SITE 321: note = Tnp_P4
  SITE 334: note = Tnp_P5
MNAVGIDISKGKSMVAVARPLGEIVSKPFEVHHTTDGIASLVAYLHTLSGDTRIVMEHTGRYYEPMARQLAKSNFFVSAVNPKLIKDYGNNSLRKVKTDKADALKIARYAIDNWQNLCQYTSMDTLRNQLKICNQHFAFYTKQKIAAKNNLIALLDMTYPGVNTLFDSPAREDGSQKWVDFAASFWHVDCVRSIGLAAFTERYRKWCKRHGYNFQPHKPQEIFCAAKNLIAVFPKDAMSKALVMQAISGLHAISKTVEHLRKQMNQLASQLPEYPVVMTMYGVGESLGPQLIAEIGDISRFHRRENLTAFAGVDPGANQSGTYQAQSVRTSKHGSPRLRKTLFQIMNCLVQTKPRDDAVYRFIDKKRAEGKPYFVYMTAGANKFLRIYYGRVKEYLASITETD

SEQ ID NO: 17873 - protein, 311 aa, unidentified
  source 1..311: note = protein_724ea7d
  REGION 8..150: note = RuvC_domain
  SITE 11: note = RuvC_P1
  SITE 52: note = RuvC_P2
  SITE 92: note = RuvC_P3
  SITE 94: note = RuvC_P4
  SITE 97: note = RuvC_P5
  REGION 191..278: note = Tnp_domain
  SITE 199: note = Tnp_P1
  SITE 229: note = Tnp_P2
  SITE 237: note = Tnp_P3
  SITE 238: note = Tnp_P4
  SITE 251: note = Tnp_P5
MNKYKETFGVDISKAVFDVYGSESRHDQFVNAPNGFDSFLKALPSDSLVVMETTGYYHYRLSQFLCKHKVAVSVVNPLSVKRFIQMKLSRIKTDKRDAQAICDYGIYNQVPLYNGINALQAECRQLLSLKANYVKRRTSSKNKLHGEEVLGKPSKLVVRSLNNDKRHIDRELVKIESRLLELVKKSWQCELTLLKSIPGIGDKTAVFLIVATDGFSKFGNASQLCSYLGTTPVIKRSGSSERGRSRISKMGNRQLRNLMFMYSMSAYQYNKPCRDMHHRIINKGKSSKLALIAVCNKLIHQAFAIVKSGVP

SEQ ID NO: 17874 - protein, 321 aa, unidentified
  source 1..321: note = protein_6ae047e
  REGION 9..156: note = RuvC_domain
  SITE 12: note = RuvC_P1
  SITE 58: note = RuvC_P2
  SITE 98: note = RuvC_P3
  SITE 100: note = RuvC_P4
  SITE 103: note = RuvC_P5
  REGION 197..283: note = Tnp_domain
  SITE 205: note = Tnp_P1
  SITE 235: note = Tnp_P2
  SITE 243: note = Tnp_P3
  SITE 244: note = Tnp_P4
  SITE 256: note = Tnp_P5
MSNLEKKVIGVDVSSTILVMSFLDDENHSTIITINNSTTCIEKSLKRWDKHQFKIVVEATGSYSSKILYYAYSMGFEVYQVSGLSIKKFSEVKHHISKTDEQDAVLIRNFGEVMKMDPYEPKKENIEFLEQELNLWQDLEQEKARYTLKLKSLCQKPILNKSVIKHYETIIKRINKDIENLQKRLPSLEDKEFKENKDLLTSINGIGKKTALLLLASTNNFKNFKHSKALCKYFGVVPKMYHSGNKKISIGKCRTSKGFIRSILYVCSWSAIRFKKQCKALYERILEKKKCKKVALIAVCNKLLRQAFGIINSKIQYQHNY

SEQ ID NO: 17875 - protein, 345 aa, unidentified
  source 1..345: note = protein_7aa27a7
  REGION 7..151: note = RuvC_domain
  SITE 10: note = RuvC_P1
  SITE 55: note = RuvC_P2
  SITE 90: note = RuvC_P3
  SITE 92: note = RuvC_P4
  SITE 95: note = RuvC_P5
  REGION 214..300: note = Tnp_domain
  SITE 222: note = Tnp_P1
  SITE 252: note = Tnp_P2
  SITE 260: note = Tnp_P3
  SITE 261: note = Tnp_P4
  SITE 273: note = Tnp_P5
MTNIKRVGVDIAKTVFHIHAVDGRDKSVWEGKYNRKAWLQAIIKRVPNGALIGMEACASSHYWARELRGLGFVVKLIAPQFVKPYVKSNKNDRADAAAICEALGRPHMRFVAVKSILQQDIQAAHRIREELVCHRTAKANQIRGLVGEYGIVAPVGIGQLRRALPQWLEDGENGLTSDFRQLMFGMAEDLAALDERIEETTALMTRKVQSDPAAQRLMTIGGVGPIVASALLGALGDGRNFRKGRDFAASLGLTPRQHSTGGKPTLLGISKRGNSYLRKLLVHGARSVFRHAGTKEDKLSLWLMSLAKRKHANVAIVALANKIARIAWAVVHNEDTYNPSLAAGL

SEQ ID NO: 17876 - protein, 323 aa, unidentified
  source 1..323: note = protein_62d9ca4
  REGION 8..150: note = RuvC_domain
  SITE 11: note = RuvC_P1
  SITE 52: note = RuvC_P2
  SITE 92: note = RuvC_P3
  SITE 94: note = RuvC_P4
  SITE 97: note = RuvC_P5
  REGION 191..278: note = Tnp_domain
  SITE 199: note = Tnp_P1
  SITE 229: note = Tnp_P2
  SITE 237: note = Tnp_P3
  SITE 238: note = Tnp_P4
  SITE 251: note = Tnp_P5
MNKDIKFYGIDISHLVFDVTSHTGEHYQFKNSTIGFKKFVKLLDENSHCVMEATGYYHYQLAYYLLENGIKVSVENPLSVKRFIQMRLSKIKTDKSDSKLICEYAKQVELKLWRGNSKHQIECLQMTRLLTIYTKQSTMLKNKIHGESVLGNPSKVVVRSLTRSLKQVRKEMDLLEEKLLILVKQVHKDVLSRLKTIPGIGKKTSLMLVVLTDGFERFTSAAELCSYAGLTPVIRKSGTSINGRARISKIGNQKLRNLLFMCSFNACKYNKACRDIYEQIVAKGKSKKLALIAVCNKLLKQAFAIAKSGLIYDDSYRSTLPVN

SEQ ID NO: 17877 - protein, 344 aa, unidentified
  source 1..344: note = protein_dc1ec2a
  REGION 4..157: note = RuvC_domain
  SITE 7: note = RuvC_P1
  SITE 55: note = RuvC_P2
  SITE 96: note = RuvC_P3
  SITE 98: note = RuvC_P4
  SITE 101: note = RuvC_P5
  REGION 219..304: note = Tnp_domain
  SITE 227: note = Tnp_P1
  SITE 257: note = Tnp_P2
  SITE 265: note = Tnp_P3
  SITE 266: note = Tnp_P4
  SITE 277: note = Tnp_P5
MITIGIDPHKSTHTAVALDADGRSLEALRVPATRATAERLLRWAGRWPDRTWAVEGASGLRRLLAQRLVAADETVVDVPATLAARARLLDRGHGRKTDALDATCVARVAMSQAGLRRVCPEDHTAVLRLLSDRRDELTGERRRVVNRLHRLLRDLRPGGAPTELSTAAAARLLGRIRPTTVVDLERKLMARALVADLRRIDRALAENRTRCANAVAASGTTLTAIFGISDVLAAKILGHVGDVDRFRSDDSFASYSGTAPIEVSSGEVTRHRLSRNGNRALNNALHLAARVQTMHPGLGRDHYERKLAEHKSSREALRSLKRQLAKVVYRRLVADHVHRPALAS

SEQ ID NO: 17878 - protein, 386 aa, unidentified
  source 1..386: note = protein_79b8113
  REGION 4..158: note = RuvC_domain
  SITE 7: note = RuvC_P1
  SITE 56: note = RuvC_P2
  SITE 95: note = RuvC_P3
  SITE 97: note = RuvC_P4
  SITE 100: note = RuvC_P5
  REGION 261..348: note = Tnp_domain
  SITE 269: note = Tnp_P1
  SITE 299: note = Tnp_P2
  SITE 307: note = Tnp_P3
  SITE 308: note = Tnp_P4
  SITE 320: note = Tnp_P5
MLYVGVDISSESFDVCFYLPEKKKMKSMKYKQDREGFREFLKKLNAYKDEKQVGMEATGSYHSNLYGFLRSKGIDVQLLDPYTLSKFMKAMSRSKTDKKDAKSIAVAMYRIFDLLSVSQVPEEEMSAFRDLVRVRSTVVANCSDLQRKLKSKLKIHMPELLKTFRSVSSPVLLHLLSVYPSREEILDNEEDAVKLLSSHRNWSEKKAREVIDSLKDSIGKPDTFGTYSTITSTFIAEIKLLKDHVEALNEEIKRFLEKFPDNPLRTIPGIAEVTEAEIVSEVGDIDRFSSGKAFVSYIGLDPVIKQSGNMTRGLSISKKGNKHLRRTFYHLAKNLIANTEKYRNKYEKMKKRGVKNKVALIATARAAAEMVYQLLKNNVPFDLSLS

SEQ ID NO: 17879 - protein, 280 aa, unidentified
  source 1..280: note = protein_bd1f09b
  REGION 2..77: note = RuvC_domain
  SITE 17: note = RuvC_P3
  SITE 19: note = RuvC_P4
  SITE 22: note = RuvC_P5
  REGION 141..225: note = Tnp_domain
  SITE 149: note = Tnp_P1
  SITE 179: note = Tnp_P2
  SITE 187: note = Tnp_P3
  SITE 188: note = Tnp_P4
  SITE 200: note = Tnp_P5
MRLIPAQFVRPFVKSNKNDYRDAEAIAEAVERENMRFVPIKTEDQLDLQALHRVRDRLVARRTSVINQMRAFLLERGISFRKGPATLRRQMPEILENADEKLSPAMRRLLDFLWQEWKGLQVQIESLNTQLEQIASSDPSCVRLQQIPGVGPLVSTAVISAIGNGAAFKKGREFAAWLGLVPRQWSTGGKAKLLGISKRGNPYLRKMFIHGARAAVLRVKREGFSLGKWMSGLETGTARNVVIVATANKLARIRLGCFGERERLSAPARRPCFPTRRSGI

SEQ ID NO: 17880 - protein, 391 aa, unidentified
  source 1..391: note = protein_243c761
  REGION 4..161: note = RuvC_domain
  SITE 7: note = RuvC_P1
  SITE 60: note = RuvC_P2
  SITE 100: note = RuvC_P3
  SITE 102: note = RuvC_P4
  SITE 105: note = RuvC_P5
  REGION 264..351: note = Tnp_domain
  SITE 272: note = Tnp_P1
  SITE 302: note = Tnp_P2
  SITE 310: note = Tnp_P3
  SITE 311: note = Tnp_P4
  SITE 324: note = Tnp_P5
MYYIGFDIAKENHYASIANSNGEVIQEAFLVKNSINGFNFFMDKLKEKNIYISDCLVGMESTGHYGENLIQFLHNKGFNIGIINPIQTDALRNSNIRKTKTDKIDTYLIIQSLMLKHYTPFVSKDIKILELRSLCRHRDDVLKYRTKLKVRLVSFVDQLFPELNLIFSSIHLKSCYALLSKYPSPKDIASTRVDAIANLLSTASKGHFSLDKAQKLKELAKSSIGVNNSSLSIQIKHSLKQIELLDSQIKEIDLKIKEIMDELNSVILTVPGISYTLGAIILSEIGNIDKFASPTKLLAFEGLDPSVKQSGNFNATIIKMSKRGSKLLRYAMLRASGIIIWNSETYNAYYSRKLSQGKSHNNAVCHVAHKLTRVIFHMLKENVEFKEQLEN

SEQ ID NO: 17881 - protein, 357 aa, unidentified
  source 1..357: note = protein_7d39af0
  REGION 1..105: note = RuvC_domain
  SITE 2: note = RuvC_P2
  SITE 42: note = RuvC_P3
  SITE 44: note = RuvC_P4
  SITE 47: note = RuvC_P5
  REGION 219..306: note = Tnp_domain
  SITE 227: note = Tnp_P1
  SITE 257: note = Tnp_P2
  SITE 265: note = Tnp_P3
  SITE 266: note = Tnp_P4
  SITE 279: note = Tnp_P5
MEHTGRYYEPIAQQLHDAGIFVSAVNPLLIKEYGGNTLRKIKTDKADSLKIARYGLDNWCDLRKHSNMDTIRYQLKSCYRQYCLYTKNKTTFKNNLIGLLDQTYPNSNTYFESPARNDGSQKWVDFVCTFWHVDCVRKLSQTAFVEKYRKLCKKHGYNFKESKAVEIYTESKELLPMLPKDAIAKTLVQEAVTQLNSMSKTVEILRMQMNELAKQLPEYNAVMSFYGVGESLGPQIMAEVGDVLRFTHKSALTAFAGVDPGSNQSGTKESKSNSSSKRGSPELRKSLFVLMTILLQSAPYDDPVFQFLDKKRAEGKPYYVYMTAGCNKFLRIYYGRVKEFLNALDIPVDMDSTDHFR

SEQ ID NO: 17882 - protein, 334 aa, unidentified
  source 1..334: note = protein_2fcd1cd
  REGION 7..149: note = RuvC_domain
  SITE 10: note = RuvC_P1
  SITE 53: note = RuvC_P2
  SITE 88: note = RuvC_P3
  SITE 90: note = RuvC_P4
  SITE 93: note = RuvC_P5
  REGION 208..307: note = Tnp_domain
  SITE 216: note = Tnp_P1
  SITE 246: note = Tnp_P2
  SITE 254: note = Tnp_P3
  SITE 255: note = Tnp_P4
  SITE 267: note = Tnp_P5
MDKVTTAGIDLAKRVFALHGVDGAGRVGLRKTVRREQLMQTVAALPPCLIGMEACSGAHEWARRFQQLGHTVRLMAPVFVAPYRKSGKNDGNDAEAICEAVTRPNMRFVPIKSAEQQAVLALHRVRQGWIEERTATINRLRAVLTEFGVVLPNRAQYVRREAHAAAEALPELARQAVEDLRAHLGVLDERIAAYDRELQAQARQSESAQRLMQIRGIGPLTAVAMVATVGCARDFRSGRQFAAWLGLTPRQHSSGGKHRLGHISRRGDAYLRCLLVQGARSVLLTAMRHSDRLSRWALSVQARRGYHKALVAIAAKNARIAWALLSKNQTLRAA

SEQ ID NO: 17883 - protein, 272 aa, unidentified
  source 1..272: note = protein_e11c40c
  REGION 6..150: note = RuvC_domain
  SITE 9: note = RuvC_P1
  SITE 54: note = RuvC_P2
  SITE 89: note = RuvC_P3
  SITE 91: note = RuvC_P4
  SITE 94: note = RuvC_P5
  REGION 213..272: note = Tnp_domain
  SITE 221: note = Tnp_P1
  SITE 251: note = Tnp_P2
  SITE 259: note = Tnp_P3
  SITE 260: note = Tnp_P4
MKISRVGVDLAKNVFQLHGVDRHGKTVLKRRLSRDKWISALIKSAEPDCEIGMEACGGAHHWARVLTTKGFRVKLIPPQFVTPYVKSNKNDAKDAEAICEAMSRPNMRFVKAKTVEQQDIQATHRIRSELMCHRTAKANQIRGLVTEYGLVAPLQMASLRAAIPRWLEDAENGLTDRFRTLLHGLWEDLLTLDQRIETLNGEIESIAKSDPVAQRLQQLRGVGPLVATALIATVGNGDQFSKGRQMAASVGLTPRQHSSGGKDRFLGYQQTR

SEQ ID NO: 17884 - protein, 341 aa, unidentified
  source 1..341: note = protein_aec6085
  REGION 7..149: note = RuvC_domain
  SITE 10: note = RuvC_P1
  SITE 53: note = RuvC_P2
  SITE 88: note = RuvC_P3
  SITE 90: note = RuvC_P4
  SITE 93: note = RuvC_P5
  REGION 211..295: note = Tnp_domain
  SITE 219: note = Tnp_P1
  SITE 249: note = Tnp_P2
  SITE 257: note = Tnp_P3
  SITE 258: note = Tnp_P4
  SITE 270: note = Tnp_P5
MTEVSTIGLDLAKNVFQAHGANAAGAPIFRKKLRREQVLAFFAAQPPCLVAMEACPGAHHWGREIGKLGHTVKLIAPAYVKPFVKRQKNDAADAEAICEAAQRPTMRFVAVKSEAKQAPAVIFRTRDVLVGQRTQLINAIRGHLAEYGLIAPQGPAHIERLIAQIEDPASDIPPAARASLAVLVCAFRHLQEQTAALDAEIATRAKADDTARRLMSVPGIGPLIATAIEALAPPVETFRSGRDFAAWVGLTPVQRSTGGKERLGRTSRMGERTLRRLLIIAASAVVRWAKRKGVPADSWLGQILARKPPMLVIVAVANKNARIAWALLRKGGIYRAPAVTA

SEQ ID NO: 17885 - protein, 339 aa, unidentified
  source 1..339: note = protein_203168e
  REGION 7..149: note = RuvC_domain
  SITE 10: note = RuvC_P1
  SITE 53: note = RuvC_P2
  SITE 88: note = RuvC_P3
  SITE 90: note = RuvC_P4
  SITE 93: note = RuvC_P5
  REGION 209..296: note = Tnp_domain
  SITE 217: note = Tnp_P1
  SITE 247: note = Tnp_P2
  SITE 255: note = Tnp_P3
  SITE 256: note = Tnp_P4
  SITE 268: note = Tnp_P5
MNAVTLIGIDLGKHSFHLHAQDRLGRMVFRKKLSRQQLLRTLANVPACRVAMEACAGSHWLARRLASLGHEARLISPQLVRPFVAGNKNDFGDAQAICEAASRPSMRFVSPRNEAQQTVSALHRIREALVRDRTGTTNQIHGFLLEFGISLPKGAAIIRRLPAVLSQETLPARLVALVERLREHCKYLDQQIKQVEQELLAALREDDRSQRLLEIPGIGPITASALAVELGDARQFANARQFSASIGLVPRQYSTGGKPTLLGISKRGDRNLRRLLVQCARAVMQHADLRTDALGAWIRALSARRHSNVVACALANKLARIAWAVLARGTHYQGRPLAA

SEQ ID NO: 17886 - protein, 345 aa, unidentified
  source 1..345: note = protein_d706540
  REGION 5..152: note = RuvC_domain
  SITE 8: note = RuvC_P1
  SITE 55: note = RuvC_P2
  SITE 92: note = RuvC_P3
  SITE 94: note = RuvC_P4
  SITE 97: note = RuvC_P5
  REGION 212..300: note = Tnp_domain
  SITE 220: note = Tnp_P1
  SITE 250: note = Tnp_P2
  SITE 258: note = Tnp_P3
  SITE 259: note = Tnp_P4
  SITE 271: note = Tnp_P5
MKHYAGLDVSVKETSVCIVDEAGRIIRELKVPSHPQDLVDALKDPTWRLDRIGLEAGPLSQWLFSGLAEAGLPVVCIETRHTKAFLKAQVNKSDRNDARGIAQMMRVKLFRPVHVKTLTSQKRRALLTARKILQDKAVAIENDIRGLLRNFGLKVGVVGVGKFDDRVRELVDGMPELVEIMDPLLVARQKLRQTFAALHRKLLSIVRDDGVCQRMMTIPGVGPVVSLAFKSTIDIPARFKNSKAVGPSLGLTPVLNQSGESLRVGRVSLCGDDMMRALLYEAAQVMMTRVQKWSWLKAWAMNVAKRRGLKKAIVALARRLAVIMHRIWVDGSVFRWTNNAIPVTG

SEQ ID NO: 17887 - protein, 341 aa, unidentified
  source 1..341: note = protein_ca0d84e
  REGION 7..149: note = RuvC_domain
  SITE 10: note = RuvC_P1
  SITE 53: note = RuvC_P2
  SITE 88: note = RuvC_P3
  SITE 90: note = RuvC_P4
  SITE 93: note = RuvC_P5
  REGION 211..296: note = Tnp_domain
  SITE 219: note = Tnp_P1
  SITE 249: note = Tnp_P2
  SITE 257: note = Tnp_P3
  SITE 258: note = Tnp_P4
  SITE 270: note = Tnp_P5
MENVSIVGIDLAKRSFQLHGAAADGSVVFRKKLSRPQLTAFLSELPKCVVAMEACATSHYWGREIGKLGHEARLIPPVYVKPFVKRQKNDANDAEAIAEAASRPTMRYVSVKSAEQQSQGMVFRTRDLFVRQRSQLVNALRGHLAEYGVVVAQGMVQFRRIIASFDEVAVDLPAQILSLCQAYIDQIALFDERIVVLDHEIKGRAKTDEATSRLMTIPGVGPMCATTIQAFAPPMEEFSNGREFAAWCGLVPRQKSTGGRQILGRTSKMGQRDIRRLLITGAMAVIRWAIRKGPPPGSWLAKMLARKPRMLVATALANKLARTVWALTTTKENYRIPPLAT

SEQ ID NO: 17888 - protein, 344 aa, unidentified
  source 1..344: note = protein_cce6874
  REGION 6..147: note = RuvC_domain
  SITE 9: note = RuvC_P1
  SITE 52: note = RuvC_P2
  SITE 87: note = RuvC_P3
  SITE 89: note = RuvC_P4
  SITE 92: note = RuvC_P5
  REGION 212..297: note = Tnp_domain
  SITE 220: note = Tnp_P1
  SITE 250: note = Tnp_P2
  SITE 258: note = Tnp_P3
  SITE 259: note = Tnp_P4
  SITE 271: note = Tnp_P5
MKVSVLGVDLGKNVCSVVGLDALGAVVLRRRAKRESLIALAAKLPPCVVAMEACCGAHHLGRVFAGHGHDVRLMSPEYVRPYIKAQKNDDRDAEGIAEAATRPTMRFVELKSQEQLDMQTLHRSRDRLVGERTALINQLRAILLERGIIAPQGKRKLEQFLVGLMDEQGGAGLSPRMIMLVVDTRAQWAELDRRIAAFDAEFIRWTKENEDARRLATIPGGGPTIPSALIAAIGKGETFEHGRDMAAWLGLVPRQFTTGGKPKLLGISKRGNRYLRKLLIHGARAALPHVAERDTPLGRWAKALLERAHPNVAIVAFANKLARIAWAVLRRGERFVVKGLPLAA

SEQ ID NO: 17889 - protein, 343 aa, unidentified
  source 1..343: note = protein_3fbb19e
  REGION 6..147: note = RuvC_domain
  SITE 9: note = RuvC_P1
  SITE 52: note = RuvC_P2
  SITE 87: note = RuvC_P3
  SITE 89: note = RuvC_P4
  SITE 92: note = RuvC_P5
  REGION 211..292: note = Tnp_domain
  SITE 219: note = Tnp_P1
  SITE 249: note = Tnp_P2
  SITE 257: note = Tnp_P3
  SITE 258: note = Tnp_P4
  SITE 270: note = Tnp_P5
MDIVVLGIDLGKNSCSVAGLNAAGQVVLRRRLKREGIVGLSRQWPGCVVAMEACCGAHHLGRQLAAQGHEVRLMSPEYVRPYVKAQKNDDRDAEAIAEAATRPTMRFVEVKTQAQSDMQSLHRARERLVNDRTALINHLRALLLERGITVAQGRRKLEKELPGILADEALGLSPRIRQLVSDLREEWQGLDHRIAAFDTEFVAQARNDETVRRLISVPGIGSINATALVAAVGDGRAFARGRDMAAWLGLVPRQMTTGGKPKLLGISKRGNRYLRKNLIHGARAVLPLLVERDTPLGRWVKGLLERAHKNTVVVAALANKLARIAWAVLTGGQGFDAAHAVAA

SEQ ID NO: 17890 - protein, 286 aa, unidentified
  source 1..286: note = protein_83fb31e
  REGION 6..151: note = RuvC_domain
  SITE 9: note = RuvC_P1
  SITE 53: note = RuvC_P2
  SITE 91: note = RuvC_P3
  SITE 93: note = RuvC_P4
  SITE 96: note = RuvC_P5
  REGION 212..284: note = Tnp_domain
  SITE 215: note = Tnp_P1
  SITE 245: note = Tnp_P2
  SITE 253: note = Tnp_P3
  SITE 254: note = Tnp_P4
  SITE 266: note = Tnp_P5
MTITTVGIDLAKNVFAIHSVDQNGKTVLVKPKVLRAALPELIASLPPCVIGMEACSGAHYRARLFRQYGYEPRLMAAKFVSPYRMAGKSGKNDAADTQAICEAVRRPPVRFMPVKDESQQAMQCLHRTRQGFIEVKTATYNSLRGLISEFGGLAPQNTGALRHMVSAKKSPLPLQVQQCVDDLLEHVGCIEVNIAKYDRILSSMAKTDRQPAADGTGPTTACALVASISNAQDFKNGRQLAAWLGLTPSQQSSGGKSKPGRITKAGDSYLRTLLGQGVRSVLTGVD

SEQ ID NO: 17891 - protein, 342 aa, unidentified
  source 1..342: note = protein_1a3e16d
  REGION 6..121: note = RuvC_domain
  SITE 9: note = RuvC_P1
  SITE 53: note = RuvC_P2
  SITE 91: note = RuvC_P3
  SITE 93: note = RuvC_P4
  SITE 96: note = RuvC_P5
  REGION 211..298: note = Tnp_domain
  SITE 219: note = Tnp_P1
  SITE 249: note = Tnp_P2
  SITE 257: note = Tnp_P3
  SITE 258: note = Tnp_P4
  SITE 270: note = Tnp_P5
MTIVTVGIDLAKNVFAVHGVDAAGKPALVRPSVARSNLLELIATLPPCLIGMEACSGAHHWAREFEKLGHTVRLMAPKFVAPYRLSGKRGKNDAADAAAICEAVTRPQMVSCPTRASSSKASSWCTAPARDSWNNAPPRSTAFGVCSRSWGIVLPLKAATVRREALARLEELPGWANTVIGDLLSEVTRLDERIAEYDRHIALMARHSTQAQQLMQLGGIGQTTAMALISTVGNGHDFACGRSFSAWLGLVPGQYSSGGKQRLGRITKAGDAYLRSLLVMGARAVLAAAMNTRTPKQDPISRWARSLAERRGYWRAVVAIAAKNARMCWAVLQRGEAFKMPA

SEQ ID NO: 17892 - protein, 347 aa, unidentified
  source 1..347: note = protein_8a5a67d
  REGION 5..152: note = RuvC_domain
  SITE 8: note = RuvC_P1
  SITE 55: note = RuvC_P2
  SITE 92: note = RuvC_P3
  SITE 94: note = RuvC_P4
  SITE 97: note = RuvC_P5
  REGION 212..296: note = Tnp_domain
  SITE 220: note = Tnp_P1
  SITE 250: note = Tnp_P2
  SITE 258: note = Tnp_P3
  SITE 259: note = Tnp_P4
  SITE 271: note = Tnp_P5
MDYYAGIDVSLEASSVCVVDASGKIIREAKVLSEAENLIGWFKELGLELTRIGLEAGPLSQWLYAAMKKDGLAVELLETRHVHDAFKAMPVKSDRNDARGIAQLMRLGWFRPVHCKSMPAQEVRALLTARKLVQSKLFDIEMSLRGILRGFGLKIGRTTPNRFRLRVEELVAGHPTLEIIGKALLAAHEVLLRELNGFEKRVRQQARQDKRVLLMMSAPGVGSIVGLTYVAAIDDPTRFKSSKQVGPHFGLTPKKYQSGETDYSGRISKIGDASVRTALYEAANVILTKPLKGATALKSWGMKLAKRAGMAKAKVALARKLGVILHRMWVDGTQFADKGMSPKPVTA

SEQ ID NO: 17893 - protein, 269 aa, unidentified
  source 1..269: note = protein_5e1e621
  REGION 2..74: note = RuvC_domain
  SITE 14: note = RuvC_P3
  SITE 16: note = RuvC_P4
  SITE 19: note = RuvC_P5
  REGION 138..224: note = Tnp_domain
  SITE 146: note = Tnp_P1
  SITE 176: note = Tnp_P2
  SITE 184: note = Tnp_P3
  SITE 185: note = Tnp_P4
  SITE 197: note = Tnp_P5
MAPQFVKPYVKSNKNDAADAEAICEAVGRPNMRFVPIKNVEQQSVLALHRARQGFVRARTAQANQIRGLLAEFGLVVPKGLAHIAKQVPELIEDASNELTGSFRRLVQRLLEHLQELDRQVGELELQIKVWHRENEASSRLEKIPGIGPITASALVATIGDAKNFSSGRQVAAWLGLVPRQHSSGGKDVLLGMSKRGDTYLRTLLIHGARAVIFRAQQKADKSSWLHRLLARRNPNVAAVALANKNARMVWALLAHGRQFRPDYEPVVS

SEQ ID NO: 17894 - protein, 279 aa, unidentified
  source 1..279: note = protein_a2dd961
  REGION 9..94: note = RuvC_domain
  SITE 33: note = RuvC_P3
  SITE 35: note = RuvC_P4
  SITE 38: note = RuvC_P5
  REGION 154..241: note = Tnp_domain
  SITE 162: note = Tnp_P1
  SITE 192: note = Tnp_P2
  SITE 200: note = Tnp_P3
  SITE 201: note = Tnp_P4
  SITE 213: note = Tnp_P5
MPVLILWYTVSATSAMKQNLSLQFVRLFVKSNKNDFVDAEAICEAASRPSMSFAQHRIEGQQVMRAWHRVRESLIRGKVKTINQIHAFLLEFVVSLPIGDAVIKRLSLVLAEHEFSEYLSRFLVKLHTHYLYLVEQITALELELNHSIKVDDATQLIMTIPGVGSITASLLLSQLGDGKQFSFSRDFSASTGLVPRQYRTGCKSILLGIRKRGDKNLRRLLVQSARSFMMRLEHQQGRLAEWVRGQLSNRHSNVVACALANKLARIAWAITTNHNEYQA

SEQ ID NO: 17895 - protein, 344 aa, unidentified
  source 1..344: note = protein_e1a4978
  REGION 6..147: note = RuvC_domain
  SITE 9: note = RuvC_P1
  SITE 52: note = RuvC_P2
  SITE 87: note = RuvC_P3
  SITE 89: note = RuvC_P4
  SITE 92: note = RuvC_P5
  REGION 211..296: note = Tnp_domain
  SITE 219: note = Tnp_P1
  SITE 249: note = Tnp_P2
  SITE 257: note = Tnp_P3
  SITE 258: note = Tnp_P4
  SITE 270: note = Tnp_P5
MKVTTVGIDLAKNVFQLHGVNEYGKTVVKKQIRRDQMVEFFVSLPACLIGMEACGSAHHWARKLQGFGHTVKLMAPQFVKPYVKTNKNDAADAEAICEAVARPNMRFVPIKNIEQQAVLALHRVRQGFVKARTAQANQIRGLLSEFGLIVPQGIGYIASRVPELIEDASNELPGSFRILIQRLLDHLKELDRQVEELETQIVKWHRQSDASNKLAQVPGIGPITASALVASLGDAKNFDGGRQVAAWLGLVPKQHSSGGKQNLLGISKRGDTYLRTLLIHGARSVIYRAQHKPESCSWINGVVSRRNKNVAAVALANKNARIVWALLANEREFRPDYTTAKAAT

SEQ ID NO: 17896 - protein, 266 aa, unidentified
  source 1..266: note = protein_36758cb
  REGION 1..69: note = RuvC_domain
  SITE 9: note = RuvC_P3
  SITE 11: note = RuvC_P4
  SITE 14: note = RuvC_P5
  REGION 133..218: note = Tnp_domain
  SITE 141: note = Tnp_P1
  SITE 171: note = Tnp_P2
  SITE 179: note = Tnp_P3
  SITE 180: note = Tnp_P4
  SITE 192: note = Tnp_P5
MKPFRKSHKNDFRDAEATAEAVLRPTMRFVPTKTVEQLDLQALHRVRSRLVSQRTAVVNQIRTFLLERGIAVRQGLRSLRQALPDILAKRTDVLTLRMVHLIEGLVQDWHHLDGRIEAVTEEIEALVAADEACQRLMSVPGVGPIIASAMVAAIGNGAAFQRGRDFGAWLGLVPRQISTGDRTVLGRLSKRGNSYLRSLLIQAARVLLLWPAKWRQHSFGAWLTAASMRLHHNVLAAALANKLARIAWSVLSQNRVYEPRAAAMAG

SEQ ID NO: 17897 - protein, 343 aa, unidentified
  source 1..343: note = protein_6573aa6
  REGION 6..147: note = RuvC_domain
  SITE 9: note = RuvC_P1
  SITE 52: note = RuvC_P2
  SITE 87: note = RuvC_P3
  SITE 89: note = RuvC_P4
  SITE 92: note = RuvC_P5
  REGION 211..296: note = Tnp_domain
  SITE 219: note = Tnp_P1
  SITE 249: note = Tnp_P2
  SITE 257: note = Tnp_P3
  SITE 258: note = Tnp_P4
  SITE 270: note = Tnp_P5
MEIRSVGIDLGKTSFHLVALGESGHVLFRKKFTQRQLIVFTANLSTSLMGLEACSGAHFLGRALREQGHDVRLIPAQFVKPFVKSNKNDFVDAEAIAEAVDRQNMRFVPIKTDDQLDLQAIHRVRDRLIARRTAVINQLRAFLLERGMIFAKSRPSCAKEIPEVLEDADANLTPRMRNLLDLLWGEWKMLEQQLGGLNEQIEQIASADAACQRLRKIPGIGPLISTAIVAAIGNGAAFHKGRDFAAWLGLVPKQHSTGGKARLLGISKRGNRYLRKILIHGARAAVLRLKRERAPMGAWMTALEARAPRNVLIVATANKLARIAWAVLSSGEEYRAETSLVAV

SEQ ID NO: 17898 - protein, 387 aa, unidentified
  source 1..387: note = protein_1cc65b0
  REGION 4..159: note = RuvC_domain
  SITE 7: note = RuvC_P1
  SITE 58: note = RuvC_P2
  SITE 98: note = RuvC_P3
  SITE 100: note = RuvC_P4
  SITE 103: note = RuvC_P5
  REGION 263..350: note = Tnp_domain
  SITE 271: note = Tnp_P1
  SITE 301: note = Tnp_P2
  SITE 309: note = Tnp_P3
  SITE 310: note = Tnp_P4
  SITE 323: note = Tnp_P5
MIYVGIDIAKLKHFASAISSEGEILIELFKFTNDNDGFQLLDSKLKSLEPNSFIIGLESTAHYSNNLVEFLVINNYIVHVINPIQTSTMRKNNIRKTKTDKVDTYVIAKTLMMYPGRPFTKQDIDLLHLKNLGRFRQKIVKQSTRLKIQLTSYLDQAFPELQYFFKSGVHQKSVYALLKEAPSADLIASMHLTHLSKLLQKASHGHFHKETAEELRILARKSVGCNDSSISIQITQSIEQIELLARQRDEVESQIKAIMIPLDSIIMTIPGIGYVNGAMILGEIGDFTRFSDASKIIAFAGIDPSVYQSGNFEANNTRMSKRGSKPLRYALINAAHNVVRNNKTFKEYYDKKLSEHKSHYNALGHCAGKLVRIIYKMLTDNVVFNLD

SEQ ID NO: 17899 - protein, 311 aa, unidentified
  source 1..311: note = protein_7c8e96c
  REGION 6..152: note = RuvC_domain
  SITE 9: note = RuvC_P1
  SITE 53: note = RuvC_P2
  SITE 92: note = RuvC_P3
  SITE 94: note = RuvC_P4
  SITE 97: note = RuvC_P5
  REGION 188..272: note = Tnp_domain
  SITE 196: note = Tnp_P1
  SITE 225: note = Tnp_P2
  SITE 233: note = Tnp_P3
  SITE 234: note = Tnp_P4
  SITE 245: note = Tnp_P5
MKHDTIGIDISKATLDVHRLSDGKRASFTNCARGFSQLADFCAQTDVVRVVYEATGAYHSRLVGALSSHIPMVRVNPLQARRFAQAQGVRAKTDAVDARMLALMGVAFKLEPDAPVTKLHQDLKDLRSFRLGLVKDRTRIVNRQRTQSLPIIRRQNNALLSQLTKKIAEIDEEISKLLNACEVNANSLKILRSIPGVGAVCAATILIEMPEIGRIARKQAASLAGLAPMTRESGVWKGKAFIQGGRKVVRNALYMPAIVAIRHNPDFKTKYQSMINAGKPPKVAIIAVMRKIIELANVLIKENRNWVKKDA

SEQ ID NO: 17900 - protein, 343 aa, unidentified
  source 1..343: note = protein_3742edd
  REGION 6..150: note = RuvC_domain
  SITE 9: note = RuvC_P1
  SITE 54: note = RuvC_P2
  SITE 89: note = RuvC_P3
  SITE 91: note = RuvC_P4
  SITE 94: note = RuvC_P5
  REGION 213..298: note = Tnp_domain
  SITE 221: note = Tnp_P1
  SITE 251: note = Tnp_P2
  SITE 259: note = Tnp_P3
  SITE 260: note = Tnp_P4
  SITE 272: note = Tnp_P5
MRIVRVGVDLAKDVFQLHGVDRDGKTVWQRKLNRNEWIKVLLDKIEPGCVIGMEACGGAHHWARLLQSKGFVVKLIAPQFVKPYVKSNKNDVNDAEAICEAMSRPHMRFVNIKSVEQQDIQATHRIRAALMDQSKAKSNQIRGLLSEYGLVAPREICHLRKAIPYWLEEMDNGLTDRLRRLLHGVWQDLLILDQRIKALDQEIELLAANDPVAKRLQQLRGVGPMIATALLATVGDASQFDNGRQMAASLGLTPRQMSSGGKSKLLGISKRGDSYLRSLLVHGARSMIQIAKGKDDHLSLWVMRIVNNRHPNIAAVAMANKTVRIAWAMITKGLDYKAELASA

SEQ ID NO: 17901 - protein, 363 aa, unidentified
  source 1..363: note = protein_5c57a84
  REGION 30..172: note = RuvC_domain
  SITE 33: note = RuvC_P1
  SITE 76: note = RuvC_P2
  SITE 111: note = RuvC_P3
  SITE 113: note = RuvC_P4
  SITE 116: note = RuvC_P5
  REGION 235..321: note = Tnp_domain
  SITE 243: note = Tnp_P1
  SITE 273: note = Tnp_P2
  SITE 281: note = Tnp_P3
  SITE 282: note = Tnp_P4
  SITE 294: note = Tnp_P5
MSHDVGSTPTSTRVRQTMKHDKPKGKLAVLGIDLAKQSFQLHGVDDKGNTVLKRKLNRNKLSEFIVKLPPCIIGLEACGGAHYWTRVFELFGHKVKIIAPQFVKPFVKSNKNDSADAEAICEAIQRPSMRFVPVKSIEQQDIQSLHRIRSQIVARRTAQANQIRGLLMEYGIIIPKGISYIRKEIPMILEDAENELSFLFRELLGGLYDEMVHMDNRINIIERKLETICHQNEDCQRLLSIPGIGLLSATAMIAAIGDISVFKNGRELAAWLGLVPRQHSTGGKPTLLGISKRGDTYLRTLLIHGGRTVVRVSEKYQDKRNNWISNLSQRRGKNISAVAVANKNARIVWALLMNKTTYQASMA

SEQ ID NO: 17902 - protein, 350 aa, unidentified
  source 1..350: note = protein_55b5f4f
  REGION 11..151: note = RuvC_domain
  SITE 14: note = RuvC_P1
  SITE 57: note = RuvC_P2
  SITE 92: note = RuvC_P3
  SITE 94: note = RuvC_P4
  SITE 97: note = RuvC_P5
  REGION 216..302: note = Tnp_domain
  SITE 224: note = Tnp_P1
  SITE 254: note = Tnp_P2
  SITE 262: note = Tnp_P3
  SITE 263: note = Tnp_P4
  SITE 275: note = Tnp_P5
MQHQPKICAVFGVDIGKILFHVVGLDASGAPIQKVKLRRDTILQFFAQADPTLVGMEACPGSQWLARKLQQLGHEVRIIPAQFVKPYVKSHKNDIIDAEAIAEATTRPTLRFVGVKEAHQVDLQMLHRVRSRLVKGRTNLICQMRSYCLEHGVALRQGAGVFKLDIVRAIDNPENDLTERARIVLRELQADLLRLEERILSVTTEIKNIADTDETARRLMTIPGVGPLGATAILASIGDPSRFRKARDVAAWLGLVPRQHSTGGKQTLLGIAKRGSGYLRTLLIHGARSVLMHLDRTKDRLGQWADELRSRMHVNKVTVALAAKLARVIWVVLSKPGATYERRAPEGSCA

SEQ ID NO: 17903 - protein, 314 aa, unidentified
  source 1..314: note = protein_74d101d
  REGION 7..149: note = RuvC_domain
  SITE 10: note = RuvC_P1
  SITE 53: note = RuvC_P2
  SITE 93: note = RuvC_P3
  SITE 95: note = RuvC_P4
  SITE 98: note = RuvC_P5
  REGION 188..272: note = Tnp_domain
  SITE 196: note = Tnp_P1
  SITE 225: note = Tnp_P2
  SITE 233: note = Tnp_P3
  SITE 234: note = Tnp_P4
  SITE 245: note = Tnp_P5
MSAPVFVGIDVSQAQLDIALRPAGHFTAPNDDAGIAKVVDQLRAVTPAVVLLEATGGLELPLVGALAAAAVPVVVVNPRQVRDFAKAAGQLAKTDALDAQILAHFAEVMRPAPRPLPDEQTHALAAILTRRRQLVEMLTAEKNRLASARKPVRKSLQAHITWLERELTRTDTDLAQAIRESPVWREKEELLRSAPGVGPVLTTTLLANLPELGTLTGKQIAALVGVAPLNRDSGTLRGKRTVWGGRAQVRAVLYMGALVAARCNPVIRAFYQRLCAAGKAKKVVLTACMRKLLIILNAMLKHRTPWRTEMVQCA

SEQ ID NO: 17904 - protein, 269 aa, unidentified
  source 1..269: note = protein_96786bc
  REGION 1..64: note = RuvC_domain
  SITE 14: note = RuvC_P3
  SITE 16: note = RuvC_P4
  SITE 19: note = RuvC_P5
  REGION 137..223: note = Tnp_domain
  SITE 145: note = Tnp_P1
  SITE 175: note = Tnp_P2
  SITE 183: note = Tnp_P3
  SITE 184: note = Tnp_P4
  SITE 196: note = Tnp_P5
MRAKYVRPYSKGQKNDFRDAEAIAEAVQRPTMKFVATKTADQLDLQALHRVRERLVSPHRHHQPNPRLLARARRCGASGTSVLACELPRILAAPPEVLSPRMVHLIEGLAEDWRRLDERIDCLSGEITAVARLDAGCERLVSVPGIGPIISSAIVAAIGTGDAFSKGRDFAAGLGLVPKQISTGDRTILGKISKRGNRYLRVLFVQAAWVVLIKPQSWERHGLKRWIEAAKKRLHRNVLAIALANKLARIAWAVLARGRAFEVRPAVSA

SEQ ID NO: 17905 - protein, 343 aa, unidentified
  source 1..343: note = protein_4805e5a
  REGION 7..148: note = RuvC_domain
  SITE 10: note = RuvC_P1
  SITE 53: note = RuvC_P2
  SITE 88: note = RuvC_P3
  SITE 90: note = RuvC_P4
  SITE 93: note = RuvC_P5
  REGION 212..301: note = Tnp_domain
  SITE 220: note = Tnp_P1
  SITE 250: note = Tnp_P2
  SITE 258: note = Tnp_P3
  SITE 259: note = Tnp_P4
  SITE 271: note = Tnp_P5
MNEVTTIGIDLAKSVFQVHGVDAAGRTVIRKQLRRRQVLAFFRKQSPCLVGMEACATSHHWAREIAALGHEVRLMPPRYVKPYVKRNKNDAADAEAICEAVTRPTMRFVAVKSVGRQSVLMAHRTRELLVRQRTMLVNALRAHMAEFGVVARVGLPQVKKLLAVIADGDDERIPALARTCLEGLVRQLLSLEREINGAEKRIHAWHRASEDSLRLETTPGIGPITASALASFITDPHIFRSGREMAAWIGLVPRQNSTGGKVRMGRISKQGDQYLRWLLVAGAMTVIRHAKRRGTTDPWLAHIIANKPTKVAAVALANKNARIAWVLLRHGGTYRKAASAKAV

SEQ ID NO: 17906 - protein, 351 aa, unidentified
  source 1..351: note = protein_ff6cfec
  REGION 6..148: note = RuvC_domain
  SITE 9: note = RuvC_P1
  SITE 52: note = RuvC_P2
  SITE 87: note = RuvC_P3
  SITE 89: note = RuvC_P4
  SITE 92: note = RuvC_P5
  REGION 211..301: note = Tnp_domain
  SITE 219: note = Tnp_P1
  SITE 249: note = Tnp_P2
  SITE 257: note = Tnp_P3
  SITE 258: note = Tnp_P4
  SITE 270: note = Tnp_P5
MKITTIGIDLAKEVFQIHGVDMYGKALLRKQLRRSEMSKFFANLEPCLIGMEACGSSHHWARKLCEFGHTVKLMSPQFVKPYVKTNKHDMADAEAICEAVSRPNMRFVSIKNIEQQAILSVHRARQGFVKARTAQANQIRGLLSEFGIVIPQGIRSIINRVPDILEDAGNDLPGSMRHLLKQLNDHLKQLSRQIEELELQIKLWHKENEASQRLEAIPGIGPITASAIVATVGNATEFKNGKQLSAWFGLVPKQCSSGGKQILLGISKRGDTYLRTLLIHGARAVIRFAENKEEPESWLRKLIARRNKNIAAVALANKNARIIWALLAQGTTFHHNRATTSVAAEHDYGVA

SEQ ID NO: 17907 - protein, 341 aa, unidentified
  source 1..341: note = protein_d00e0f2
  REGION 7..148: note = RuvC_domain
  SITE 10: note = RuvC_P1
  SITE 53: note = RuvC_P2
  SITE 88: note = RuvC_P3
  SITE 90: note = RuvC_P4
  SITE 93: note = RuvC_P5
  REGION 211..297: note = Tnp_domain
  SITE 219: note = Tnp_P1
  SITE 249: note = Tnp_P2
  SITE 257: note = Tnp_P3
  SITE 258: note = Tnp_P4
  SITE 270: note = Tnp_P5
MSEVSIIGIDLAKRVFQLHGTCANGAVIFRKKLTRVQLLAFMSKQPECTVAMEACATAHCWGREIEKLGHTVRLIAPNYVKPFVKRQKNDVADAEAIVEAVSRPTMRFVELKSEAQQARAMLFRTRQMFIGQRTQTINALRGHLAEHGVVAPKGAIHVKRLADAVEDETIGLLEDVRELAQVYLAQIEGLNVQVAALDQRMKGAAKEAEAARRAQTMPGVGPITALAIETFAPGLNCFRRGRDFAAWLGLVPKQNSTGGKPRLGKTSKMDQRDIRRLLISGAMAVLQAVERFGTPHNTWLIAMLERKPRMLVAVALANKMARSLWAMVTKQEDYRIPVAMA

SEQ ID NO: 17908 - protein, 349 aa, unidentified
  source 1..349: note = protein_f5926f5
  REGION 7..149: note = RuvC_domain
  SITE 10: note = RuvC_P1
  SITE 53: note = RuvC_P2
  SITE 88: note = RuvC_P3
  SITE 90: note = RuvC_P4
  SITE 93: note = RuvC_P5
  REGION 213..310: note = Tnp_domain
  SITE 220: note = Tnp_P1
  SITE 250: note = Tnp_P2
  SITE 258: note = Tnp_P3
  SITE 259: note = Tnp_P4
  SITE 271: note = Tnp_P5
MPEIVTIGLDIAKNVFQLNGVDRSGTIVLRKPLRRSQILGFFRTLPPCLIGMEACATAHHWARTLMAFGHDVRLIPPACVKPYLRRQKNDAADAAAICEAVTRPSMRFVPVKSPQQQSTLMLHGARDLLIGQRTALINALRGHFAELGIVVAQGARNTRQLIAYLQDDASPDLPVTARLALQPLAAILLGIEAQIAKLDKAILAAHRSDPVSLRLVTIPGVGPIVASCLSASIPDASLFQGSREFAAYLGLVPRQHSTGGKARLGSISKMGNRHLRKLLVVGAHAALYSMKSGKTRTALADWARSLLARKPFKVVAVALANKMARIAWAVMARSTAYEPGSKGAAVSAA

SEQ ID NO: 17909 - protein, 343 aa, unidentified
  source 1..343: note = protein_838b432
  REGION 8..148: note = RuvC_domain
  SITE 11: note = RuvC_P1
  SITE 54: note = RuvC_P2
  SITE 89: note = RuvC_P3
  SITE 91: note = RuvC_P4
  SITE 94: note = RuvC_P5
  REGION 211..300: note = Tnp_domain
  SITE 219: note = Tnp_P1
  SITE 249: note = Tnp_P2
  SITE 257: note = Tnp_P3
  SITE 258: note = Tnp_P4
  SITE 270: note = Tnp_P5
MKNPPVRIGMDTSKSVFQLHGVDADEIVVVRRSFRRSEMIHYFEKLPPALVAIESCGSSHHWARLLTSLGHDVKLIPPQYVKPYVKRGKNDAADAAALCEAVTRPSMRFVPIKSEEQQAACMLMTVRERLVSVKSQLSNAFRSYAAEFGIVGAAGRQNVHALIRRVLDDESLPELARELFRFQAKEYAAVEARLEEIETRLMKWHRENEASRRIATIPGIGPIGATMLSMKAPPAESFRSGRDFAAWIGLTPRDHSTGGRMRHGGITKAGDAALRSVLVVGATALLRHIRAGRHKPTAWLAALLERKPPKLVAVALANKFARIAWRLMMSGGIYSRPSDSMAA

SEQ ID NO: 17910 - protein, 341 aa, unidentified
  source 1..341: note = protein_50d0e83
  REGION 6..147: note = RuvC_domain
  SITE 9: note = RuvC_P1
  SITE 52: note = RuvC_P2
  SITE 87: note = RuvC_P3
  SITE 89: note = RuvC_P4
  SITE 92: note = RuvC_P5
  REGION 211..313: note = Tnp_domain
  SITE 219: note = Tnp_P1
  SITE 249: note = Tnp_P2
  SITE 257: note = Tnp_P3
  SITE 258: note = Tnp_P4
  SITE 270: note = Tnp_P5
MDIAVLGIDLGKNSCSIVGLDSSGKVVLRRRMQRKTLVTMAAKLSPCIIAMEACCGAHHLGRILAAQGHTVRLMSPEYVRPYVKAQKNDDRDAEAIAEAATRPTMRFVTLKSEEQLDMQSLHRARDRVVVERTSLMNQLRALLLERGIIVPQGRAKLRYRVKELLVQTCNELSPRIRVLIEDMMARWQAVDNRIAAFDTEFAAEVKQNEAARRLISIPGIGALNATALVAAVGDARTFARGRDLAAWLGLVPRQATTGGKPRLLGITKRGSKYLRKMLIQGARAALPTLSRGNTRLGQWLRSLLARAHSNTVVVALAAKMARMVWALLRHGRTFEHRAITV

SEQ ID NO: 17911 - protein, 398 aa, unidentified
  source 1..398: note = protein_8717048
  REGION 6..162: note = RuvC_domain
  SITE 9: note = RuvC_P1
  SITE 60: note = RuvC_P2
  SITE 100: note = RuvC_P3
  SITE 102: note = RuvC_P4
  SITE 105: note = RuvC_P5
  REGION 267..354: note = Tnp_domain
  SITE 275: note = Tnp_P1
  SITE 306: note = Tnp_P2
  SITE 314: note = Tnp_P3
  SITE 315: note = Tnp_P4
  SITE 327: note = Tnp_P5
MSRIWAGIDCGKTHHHCVVVDSEGDRLLSRRVANDEMELLQLLGDVLALADGKRTTWAVDMTGGEPGLLIALLVNHSQELLYIPGRVVNRATDGYRGEGKTDARDARVIADQARMRRDLLPVRLGDEAVIELKLLTSYRSDLVADRTRTVNRLRSTLTSMFPALERALDVTNAGPLVLLTGYQTPAALRRVGTKRLTTWLNHRKVKGAQKLAETAVEAAGRQHTAVAGEKAIAKMVHTLAKEVMVLNEKGNETDKLIEGRFHEHELAEVIESMPGIGSVLGAELLVGIGGDLEGFPTADRLAAFAGLAPAPRDSGKSSGNLHRPQRYHRRLQRVFYTSALISIQFDPNSRRFYDRKRAEGKRHTQAVLALARRRVNVIWALIRDRRCYQVESPVTFAA

SEQ ID NO: 17912 - protein, 391 aa, unidentified
  source 1..391: note = protein_208d0da
  REGION 4..163: note = RuvC_domain
  SITE 7: note = RuvC_P1
  SITE 60: note = RuvC_P2
  SITE 101: note = RuvC_P3
  SITE 103: note = RuvC_P4
  SITE 106: note = RuvC_P5
  REGION 266..353: note = Tnp_domain
  SITE 274: note = Tnp_P1
  SITE 304: note = Tnp_P2
  SITE 312: note = Tnp_P3
  SITE 313: note = Tnp_P4
  SITE 326: note = Tnp_P5
MVSVGIDVAKDKHDCFILNSEGEILSDVFTIPNNLGGFSVLLRKIRDCISSQDKIKVGLEATGHYSYNILGFLLDNGLPTYVLNPLRTTLYRKSLSLRKTKTDRVDARTIATMLLSDLDLKPYLDTAYHNEELKSLTRYRFDKVKERAKLKSSVSRLVCILFPELETLVPSLHMVSIYTLLEEFPGAKQVAQAHLTRLKTLLEGASKGRYGREMAVLIRDAARNSIGSRMPAKSLELQHTIRLIRELDAEIEDIEAPIQTIMDETHSPITTIPGIGYRMGAMILAEAGDLSRFDSPDKLLAYAGMSPSTYQSGQLKNCYPHMEKRGSRYLRYALYTATKYVCLWEPTFATYLAKKRAEGKHYNVALSHASKKLVRLIFALEKSRKPYCLAR

SEQ ID NO: 17913 - protein, 319 aa, unidentified
  source 1..319: note = protein_0cbbfa6
  REGION 4..141: note = RuvC_domain
  SITE 42: note = RuvC_P2
  SITE 80: note = RuvC_P3
  SITE 82: note = RuvC_P4
  SITE 85: note = RuvC_P5
  REGION 185..274: note = Tnp_domain
  SITE 193: note = Tnp_P1
  SITE 223: note = Tnp_P2
  SITE 231: note = Tnp_P3
  SITE 232: note = Tnp_P4
  SITE 245: note = Tnp_P5
MVDKEIAGFHDTANRMDDIYNKFAEVLEYGKIDIGEVLVCAEYTGKYIYPLVLACHKCRVDLWLESGYNIKCEARKERGKDDRTDARRIAEYGRKNQDDARIYRLPGESIATLRGLLAERAMYCSQRAAHKGQLRDMRGFMSPEAYTARAVRQLSLIKEHDRLIEEVDNSMAEIVASDPELLRQQQLLLSVPGIGMVCAAALIAVTAGFSLFDNGRELCCFAGLAPSAYTSGTSIRSKRRVSCRADHQLKALLHMCALVAATRMKSGRFAEYYQRKTAEGKNKMSVLNAVRAKLMLTAFAVVRDNTPYDKNFKINLAES

SEQ ID NO: 17914 - protein, 403 aa, unidentified
  source 1..403: note = protein_0d074ed
  REGION 4..162: note = RuvC_domain
  SITE 7: note = RuvC_P1
  SITE 60: note = RuvC_P2
  SITE 101: note = RuvC_P3
  SITE 103: note = RuvC_P4
  SITE 106: note = RuvC_P5
  REGION 267..354: note = Tnp_domain
  SITE 275: note = Tnp_P1
  SITE 305: note = Tnp_P2
  SITE 313: note = Tnp_P3
  SITE 314: note = Tnp_P4
  SITE 327: note = Tnp_P5
MIYAGIDIAKNSHVIGATDERGKDAAKPMQFANSTAGFDRCAAYLDGLAESKSDLLVGMEATGHYWLPLFCRLQDEGYAVVVINPVRTDAMRRFKGSSRVKTDMIDCVLIAETLRCGDFEPSKLGEESMIELRQLTRLHQELKESVADLKRQVIVALDQVFPEYDSIFSNTFGESSKAFLKRCPTPEECLAVRVDSLARTLERASHGKIGREKADEIKGIARNSCGIDVATSAFSFQIKLLIEQIDFIEGQVSEVEARIREGVEAVEPLVLTIPGIGHTLGAQIVSEIGDVRRFRNASAIVKYAGINPSISQSGKFTSEENHITKQGSPYLRRALYLAAMSQLQLKTPFYDYYAKKRADGKSHREALIAVARKLVHVIYAVLSKQEPYDPEITRNPELASRSE

SEQ ID NO: 17915 - protein, 264 aa, unidentified
  source 1..264: note = protein_bab1acd
  REGION 1..75: note = RuvC_domain
  SITE 14: note = RuvC_P3
  SITE 16: note = RuvC_P4
  SITE 19: note = RuvC_P5
  REGION 138..224: note = Tnp_domain
  SITE 146: note = Tnp_P1
  SITE 176: note = Tnp_P2
  SITE 184: note = Tnp_P3
  SITE 185: note = Tnp_P4
  SITE 197: note = Tnp_P5
MASKYVAPFRTGAKNDLNDAIAICTAVIRPSTRFVRIKSADQQAILLLHRARDHWVHERTALLNQIRAMLAEFGIIAPKGRHALQTAIPEALEDGDNLLPDLARAIISDYFGHLLSLNQRIAEQEQCFDMLVSRSRQAKKIMKVAGIGPITATAVIASIGRGEQFDKGRDFAARLGLVPTQYPTGGKPRLGRITKKGDRYLRTLLVHGVRAVIASLSDKTDRLSLWCKSLVERRGFKRAIVALAAKNARIIWSLLRNDTEYQTI

SEQ ID NO: 17916 - protein, 343 aa, unidentified
  source 1..343: note = protein_71342bb
  REGION 6..150: note = RuvC_domain
  SITE 9: note = RuvC_P1
  SITE 54: note = RuvC_P2
  SITE 89: note = RuvC_P3
  SITE 91: note = RuvC_P4
  SITE 94: note = RuvC_P5
  REGION 213..299: note = Tnp_domain
  SITE 221: note = Tnp_P1
  SITE 251: note = Tnp_P2
  SITE 259: note = Tnp_P3
  SITE 260: note = Tnp_P4
  SITE 272: note = Tnp_P5
MKLSRVGVDLAKNVYQLHGVDCFGETILTRRLKRRQWLKVLLDKADTDCVIGMEACGGAHHWARELQLRGYTVRLLPPQFVKPYVKSNKNDANDAEAICEAMSRPNMRFVAIKTVEQQDIQATHRIRAECIAHRTAKGNQLRGLVSEYSLVAPQQTAALRAAIPCWLEDAENGLTSRFRALLHGLWEDLIRLDERVATLDADIALIAKTDPVAKRLQQLRGVGPLIATALIASVGTGEQYAKGRQMAAALGLTPKQHSSGGKDRLLGISKRGDAYLRSLLIHGARSTLWHAKHKEDRLSRWMTDLSARRHPNVAAVALANKTVRMAWAMMRNESDYDPEFATA

SEQ ID NO: 17917 - protein, 308 aa, unidentified
  source 1..308: note = protein_3a8673c
  REGION 7..154: note = RuvC_domain
  SITE 53: note = RuvC_P2
  SITE 93: note = RuvC_P3
  SITE 95: note = RuvC_P4
  SITE 98: note = RuvC_P5
  REGION 189..273: note = Tnp_domain
  SITE 197: note = Tnp_P1
  SITE 226: note = Tnp_P2
  SITE 234: note = Tnp_P3
  SITE 235: note = Tnp_P4
  SITE 246: note = Tnp_P5
MIAQNYVGCDISKQWLDFFDETSGRLRRIDNQADAIAAYVAGLDPSRDFVVMEATGVHDRLLRHALAKAGVPFSRHNPAHTHHYAKSTRRRAKTDPLDARMLSDYGRRYNPEAEPAPREEVERLQSLARYRDQLVEMRATAKKHLAEAFNEIVIADLEETIAYLDTRIKAIESQIAEVIRQAEDTARDYSLMVSVPGVSKVGAFSLLALLPELGQRSPRRSRHWSAFAPFDNKSGKLNRRSQIQGGRSRVRRALYMAALTAIRTCERFKTFYSALAARSGSKKLAIIAVARKLLVVLNAIMRDKTAFA

SEQ ID NO: 17918 - protein, 392 aa, unidentified
  source 1..392: note = protein_8e174ef
  REGION 4..164: note = RuvC_domain
  SITE 7: note = RuvC_P1
  SITE 62: note = RuvC_P2
  SITE 103: note = RuvC_P3
  SITE 105: note = RuvC_P4
  SITE 108: note = RuvC_P5
  REGION 267..354: note = Tnp_domain
  SITE 275: note = Tnp_P1
  SITE 305: note = Tnp_P2
  SITE 313: note = Tnp_P3
  SITE 314: note = Tnp_P4
  SITE 327: note = Tnp_P5
MLFVGIDVAKAKHDCCIIDSDGVIFTNSLRIANSMKGFETLYSTILSALSSKDLGNVKIGLESTGHYSTNITNYLYSKGFQVHILNPLATSLFRKAGTLRKTKTDKTDAKVIATMLFTDESKSYSPVSYQISELKSLTRHRYRMIGYRSKLKISVNRLIDIVFPELPDLVWSIHQNSSYSLLLELPTPKEISSCHLTKLTNLLISTSKGKYGKAKAVTLKELALNSIGSSNRSTAFELQQTIRLIQSIQVEINTLDKQIKAVVNELNTPLVSIPGIGYTLAAIMLAEIGDIERFSTPAKLLAFAGMEPSTYQSGKYNASKTPMVKRGSTYLRWAVMQAARLVAMRDHTFALYMEKKRSEGKHYCVAQNHVGKKLLRVIYYLLKTNSKFVPQI

SEQ ID NO: 17919 - protein, 335 aa, unidentified
  source 1..335: note = protein_6938b3f
  REGION 7..149: note = RuvC_domain
  SITE 10: note = RuvC_P1
  SITE 53: note = RuvC_P2
  SITE 88: note = RuvC_P3
  SITE 90: note = RuvC_P4
  SITE 93: note = RuvC_P5
  REGION 209..295: note = Tnp_domain
  SITE 217: note = Tnp_P1
  SITE 247: note = Tnp_P2
  SITE 255: note = Tnp_P3
  SITE 256: note = Tnp_P4
  SITE 268: note = Tnp_P5
MKNVSLIGIDIGKHSFHIHCQDNAGRMVLRKKFTRAKLFEFLAGCSSATVVMEACSGSQYMARRIADLGHEAKLISPQFVRPFVKSNKNDFIDAEAICEAASRPSMRFVLPKTENQQMMSALHRLRESMVADKVKTANQMHGFLLEFGVSLPKGEAVIKRLSSVLADNLLPEQLVRLLLMLHEHYNYLLAQIHALDKKLEDSLLQDENASHLQSIPCIGLITASLLSCELGDGKQYENGRNFAASLGIVPRQYSTGGKNVLMGISKRGNKNLRRLLVQCARIFMIRLNNQQGRLADWVRELLTRRHSNVVACALANKLARIAWAVSYHKQPYAQF

SEQ ID NO: 17920 - protein, 400 aa, unidentified
  source 1..400: note = protein_72ffc9b
  REGION 12..167: note = RuvC_domain
  SITE 15: note = RuvC_P1
  SITE 65: note = RuvC_P2
  SITE 105: note = RuvC_P3
  SITE 107: note = RuvC_P4
  SITE 110: note = RuvC_P5
  REGION 273..360: note = Tnp_domain
  SITE 281: note = Tnp_P1
  SITE 312: note = Tnp_P2
  SITE 320: note = Tnp_P3
  SITE 321: note = Tnp_P4
  SITE 333: note = Tnp_P5
MSGLKGNFGCIVGIDVSKDKFDACGITGEEVKLFQLSVAMDRKGFEKLKKHLSSFSESSVLIGMESTASYHVNLFSYLVAEGYKVILINPLLISNYVKMQLRKTKTDKKDAVVIAQFLLANGDTLIQRATPALISDLRDLSRQRESLVDEMTSLKIEIKQLLNITFPELEHMVGIFTKAILKLLQQYPSANAIKNADIGQLSQALIADSYGHKREEFAKTLIKVARSSIGTNSPAKEMILKQKIGLLLHLEEALQEITDMLIEMARKLMEEDIDIMTSIKGIGDKTAANFLVEMGGDINNFECSGKIIAMAGLDPAVYQSGQHEGRGRITKRGNRHLRRIIWMMTTSVIQYTDIFHTYYQKRRKEGLPYKKAVLATAHKLIRVIYAMLTQRKTFCPQGNS

SEQ ID NO: 17921 - protein, 401 aa, unidentified
  source 1..401: note = protein_4fefdc0
  REGION 5..162: note = RuvC_domain
  SITE 8: note = RuvC_P1
  SITE 59: note = RuvC_P2
  SITE 99: note = RuvC_P3
  SITE 101: note = RuvC_P4
  SITE 104: note = RuvC_P5
  REGION 273..362: note = Tnp_domain
  SITE 281: note = Tnp_P1
  SITE 311: note = Tnp_P2
  SITE 319: note = Tnp_P3
  SITE 320: note = Tnp_P4
  SITE 333: note = Tnp_P5
MKYGVGIDVSKGKSTVAILSIEGEVIEEPFEINHDINGLNLLEEKLKDISKEDLKIVMEETGTYHLPVLGYLLDKGYFVVAENALKIKKYLDRGLRKAKTDKKDSYKLAEYTCDNWYKLNKVRENDETYDNLRFLSRQYINNINVQIKQKNNFSNLCDLLFPGYYQMLDENNFILGLEIFKKYYHPEIVTNKKQSQFVDEIDKLAKELGHKGAGITLANKIYLLAQKTISPRPNNKFAQLSAISCADALILTIKTTTTIITEMDKLARELPEYDVISEMPGCGKKLTSRVIAEIGDVRRFKNAGSIIAYAGLDAPPYQSGQFEATNRHISKRGNKYLRKAGYEVMKSIKSSCRLDNDLKSYIIKKENEGKSKKAAKIAGLNKFLRMYYGIVKKKYKQLEIW

SEQ ID NO: 17922 - protein, 266 aa, unidentified
  source 1..266: note = protein_51f1aaf
  REGION 1..76: note = RuvC_domain
  SITE 15: note = RuvC_P3
  SITE 17: note = RuvC_P4
  SITE 20: note = RuvC_P5
  REGION 139..225: note = Tnp_domain
  SITE 147: note = Tnp_P1
  SITE 177: note = Tnp_P2
  SITE 185: note = Tnp_P3
  SITE 186: note = Tnp_P4
  SITE 198: note = Tnp_P5
MIAPQYVKPFVKGNKNDYNDAQAIAEASQRSSMRIVPIKSVEQQDLQNVHDPRERVKKERTALANQIRGLLAEYGTVIKKGISAIRNELPSIIEDVENDLTVMSRGLFNELLEEFRAMDVLLEHCDTKIKVANKNNEVCTRLGDVLGIGDITSNVLYAAAGDGKSFVNGRHFSAWIGLVPGQHSTGGKPRLLGISKRGNSYLRTLLIHGARAVLRHSEKKNDRFSLWAQALLKRRGQNKACVAVVNKLARMAWVIIAKGETYRPAM

SEQ ID NO: 17923 - protein, 268 aa, unidentified
  source 1..268: note = protein_0819ffe
  REGION 6..146: note = RuvC_domain
  SITE 9: note = RuvC_P1
  SITE 52: note = RuvC_P2
  SITE 87: note = RuvC_P3
  SITE 89: note = RuvC_P4
  SITE 92: note = RuvC_P5
  REGION 140..227: note = Tnp_domain
  SITE 148: note = Tnp_P1
  SITE 178: note = Tnp_P2
  SITE 186: note = Tnp_P3
  SITE 187: note = Tnp_P4
  SITE 199: note = Tnp_P5
MNRIVVGVDIAKRVFQLHWVEPETGEIVALQLKREKFLEHFANRSNCVIGMEACGGSQHWARSLQKLGHEVKLLSGRMVKPFVGGNKNDAADARGSWTAMQQPGIKAVAVKSEEQQAVLALHRMREQLVKFRTAQINGLRERIAAIPGVGLLSATAAVATMGDAKAFKSGREFAAWLGLVPRQTGTGGRVRLLGISKRGDKYLRTLLIHGARAVLTHSKSPPEWLSELVKRRPKNVAVVAMANKMARTIWALTAHERAYQSGYVSRPA

SEQ ID NO: 17924 - protein, 402 aa, unidentified
  source 1..402: note = protein_2f842cc
  REGION 4..157: note = RuvC_domain
  SITE 7: note = RuvC_P1
  SITE 56: note = RuvC_P2
  SITE 94: note = RuvC_P3
  SITE 96: note = RuvC_P4
  SITE 99: note = RuvC_P5
  REGION 265..351: note = Tnp_domain
  SITE 273: note = Tnp_P1
  SITE 304: note = Tnp_P2
  SITE 312: note = Tnp_P3
  SITE 313: note = Tnp_P4
MYFVGIDWSDLHHDVAVLNEKGQELKYFTIPHNRKGMELLKERLLSIDPEPENFACLLETKNGLLVQFLLEAGFPVYPLNPKIVDYRRKPSGAKSDPIDARLLANIGRSDLAQLKRLKPDAELIAELKMLTRDQDSLIQESTRLTNKLIACLKEYYPVALEFFSKPTLPVALGFFKLYPTPDLVREATVPEMAAFLKKHKHPRPNQTAISIWQKAQEPQLQASAPTVRAKGRLMLALVRQLEVVQEQIAAYDEEINRLFQQHSDSRIFASLPGAAGRLAPRLLAEWGDDRERYENAAVVQALAGTSPVLFQSGKYRFARQRRSCVKPFRRALHLFAFQSIRQVSWAREYYDTKRSQGKTHHEALRALANIWVRIIFAMWKNRTCYDEATFLAARARHLSRAA

SEQ ID NO: 17925 - protein, 401 aa, unidentified
  source 1..401: note = protein_7bd969d
  REGION 4..160: note = RuvC_domain
  SITE 7: note = RuvC_P1
  SITE 57: note = RuvC_P2
  SITE 97: note = RuvC_P3
  SITE 99: note = RuvC_P4
  SITE 102: note = RuvC_P5
  REGION 274..361: note = Tnp_domain
  SITE 282: note = Tnp_P1
  SITE 312: note = Tnp_P2
  SITE 320: note = Tnp_P3
  SITE 321: note = Tnp_P4
  SITE 334: note = Tnp_P5
MNAVGIDVSKGKSTVSILRPFGEIVYSPFDVNHSSSDINALIQLINSVEGESRIVMEYTGRYYEVLAHQLSEANLFVSVVNPKLIKDFDNDSLRKVKSDNADSVKIARYALDKWHKLQQYGDMEELRNQLKTMNRQFGFYMKHKTAMKNNLIGILDQTYPGVNTYFDSPARSDGSQKWVDFASTYWHVDCVRKMSLNAFIEHYQKWCKRRKYNFSKSKAEEIYEKAKELVPVLPKDDITKMIIKQAVDQLNNTSATVEKLRSLMDETASKLPEYPVVMQMKGVGPSLGPQLIAEIGDITRFHKKSALTAFAGIDPGVNESGSYEQKSVPTTKRGSADLRKTLFQIMDVLIKTAPIDDPVYQFLDKKRSQGKPYYVYMTAGANKFLRVYYGRVTEYLSTLSD

SEQ ID NO: 17926 - protein, 418 aa, unidentified
  source 1..418: note = protein_940d71b
  REGION 19..171: note = RuvC_domain
  SITE 22: note = RuvC_P1
  SITE 70: note = RuvC_P2
  SITE 108: note = RuvC_P3
  SITE 110: note = RuvC_P4
  SITE 113: note = RuvC_P5
  REGION 278..364: note = Tnp_domain
  SITE 286: note = Tnp_P1
  SITE 317: note = Tnp_P2
  SITE 325: note = Tnp_P3
  SITE 326: note = Tnp_P4
  SITE 337: note = Tnp_P5
MEYAPQASLPATPQGGRTAGVDWASADHVACVVDATGAVVTRFTVQHTGAGLQDLVRRLRQAGACEVAIERGDGPVVEALLAAGLTVVVISPNQVKNLRSRYRSAGRKDDRFDAYVLADTLRTDRARLRPLIPDTAPTVTLRATVRARRDLVVHRVALCNQLRAHLKTAFPGVVGLFADLDSPISLAFLSRFDCQDRADWLSERRLAAWLKGVGYCGRKTPAALLAHLKAAPRGATGHDGAARAHITRALLDVLTSLTGQIKTLEAQIAEQLALHADAHIFTSLPRSGVVRAARLLAEIGDCRARFPDPSSLACLAGVAPATRQSGKHKAVGFRWAVNKQLRDAVCDFAADSRHANPWAAKLYADAIARGKDHPHATRILARAWLYVIWHCWQNTAAYDPAKHRALQALLQQDQKAAA

SEQ ID NO: 17927 - protein, 406 aa, unidentified
  source 1..406: note = protein_3214ef5
  REGION 4..160: note = RuvC_domain
  SITE 7: note = RuvC_P1
  SITE 57: note = RuvC_P2
  SITE 97: note = RuvC_P3
  SITE 99: note = RuvC_P4
  SITE 102: note = RuvC_P5
  REGION 269..355: note = Tnp_domain
  SITE 277: note = Tnp_P1
  SITE 308: note = Tnp_P2
  SITE 316: note = Tnp_P3
  SITE 317: note = Tnp_P4
MIFAGVDWAEAHHDVCFQDEQGRRLAGGRLAEGVKGIARFHELAAAHAAAPDEVVVGIETDRGLFVAALVAAGYQVVAVNPMSASRYRDRHGSSGAKSDPGDAKVLADLVRTDRHNHRPVAGDSDLAQGIRALARAHQSMIWARRRQANQLRSALREFYPAALAAFDDVTSGDALAVLKAAPQPALGAALSRAQITAALRRGGRTRRLAERTAAVQAALRAPQPQPAPALAAAMGAAVAATAAVITEMNTQITALEQQLAADFEQHPDAEVVRSLPGLGTILGARVLGEFGDAPGRYATAKSRKNYAGTSPITRASGTRRAVLARYTRNRRLADAIYLWAFAALTASPGARAYYDHHRTAGDTHHQALRALGNRLVGILHGCLASHTPYSEDTAWSHRSHETARAA

SEQ ID NO: 17928 - protein, 392 aa, unidentified
  source 1..392: note = protein_3f162d7
  REGION 5..163: note = RuvC_domain
  SITE 8: note = RuvC_P1
  SITE 62: note = RuvC_P2
  SITE 102: note = RuvC_P3
  SITE 104: note = RuvC_P4
  SITE 107: note = RuvC_P5
  REGION 267..356: note = Tnp_domain
  SITE 275: note = Tnp_P1
  SITE 305: note = Tnp_P2
  SITE 313: note = Tnp_P3
  SITE 314: note = Tnp_P4
  SITE 327: note = Tnp_P5
MEPVVGVDVAKGFSVVQAFLKRNESWRKAISVSHEKSGLEQLGRLLSELQAQTEQSPVVNLEATGHYHRGLVAYLKRSGWTYFIVNPLQAKRAKGTQLRKVKTDAADAWHLAEMYYRGDVTPHRTWEEGYTELQHVTRQHEFVTGMFVQAKLNMRALLDQVFPEYEKVFSNLFSATSLHVLTRCLEDQAEDLHGVIQKNAGKSHSKKWAEAKTEHLKEVLSRWNEELRSPTQTSVLSSMVSLVLAFTEQLSVMEKQIDELATVLPEVEFMKSIPGIGDKLAAAIVAEIGDVRQFKEAKQLVAFAGLDPGIFSSGKFTATSSRITKRGSKRLRRALYLAVQCGIRGSTNLRIREYYEKKRKEGKPYKVVVIACANKLLHHVYAILSKQQPFKL

SEQ ID NO: 17929 - protein, 342 aa, unidentified
  source 1..342: note = protein_e97aae9
  REGION 7..148: note = RuvC_domain
  SITE 10: note = RuvC_P1
  SITE 53: note = RuvC_P2
  SITE 88: note = RuvC_P3
  SITE 90: note = RuvC_P4
  SITE 93: note = RuvC_P5
  REGION 211..295: note = Tnp_domain
  SITE 219: note = Tnp_P1
  SITE 249: note = Tnp_P2
  SITE 257: note = Tnp_P3
  SITE 258: note = Tnp_P4
  SITE 270: note = Tnp_P5
MGEVSIIGLDLAKNVFQAHGAGSDGAVVFRRKLSRAQLLKFMAAQPPCVVAMEACASSHHWGRAIGDLGHEVRLIPPAYVKPFVKRQKNDMADAEAIAEAASRPTMRFVAVKSEAQQPAAMAYRTRDLLVRQRTQTINALRAHLAEQGIVAPAGPAHVGRLAAIIDGDDGMLPAAVRDLARLMLNQIAGLAEKIAGLDAELRKRVTTDDTARRLTTIPGVGAVTAAAITTFAPPMETFSKGRDFAAWVGLTPRQHSSGGKDRLGRTSKMGQRDIRRLLIVGAVAVVRWAARKGAPGGSWLGRMMARKPKMLVAVALANRMARTAWALLRKGEDYRDPAMAAS

SEQ ID NO: 17930 - protein, 426 aa, unidentified
  source 1..426: note = protein_0bb75b0
  REGION 19..180: note = RuvC_domain
  SITE 22: note = RuvC_P1
  SITE 78: note = RuvC_P2
  SITE 119: note = RuvC_P3
  SITE 121: note = RuvC_P4
  SITE 124: note = RuvC_P5
  REGION 286..372: note = Tnp_domain
  SITE 294: note = Tnp_P1
  SITE 324: note = Tnp_P2
  SITE 332: note = Tnp_P3
  SITE 333: note = Tnp_P4
  SITE 345: note = Tnp_P5
MNYTQNQKISQVTEATLIVGVDIGSETNFARAFNWRGQELSKKVFHFRNSLEGFQSFLAYLNTYTTIASARQVIVGCEPTGHYWFNLARYLEENNIKLALVNPYHVKQIKELDDNSPKKTDLKDPKTIAKLVVDGRYSYPYLPEGIYADLREAVSSRERIVKELNAITNRIKRWLKIYFPEYLVVYKNFSAESGLTVLESAPLPQDVLRLGPEGVNQLWRDKKLRAVGMKRALTLVEAAHNSIGLPGGSCARMELQLLLEDFRTKQSQLEKITEVLEEETLCVPYADKLLAIKGVGLITVAGFLAEVGDVRRFDSPKQIQKLAGLEVKENSSGKHRGRSSISKRGRKRLRKILFQVMLPMIQNNAEFGEIYQYFTTRQKNPLKGKQAIIAAGCKLIRVFYAILKHGVDYDPGKLRADMIRPELEAA

SEQ ID NO: 17931 - protein, 342 aa, unidentified
  source 1..342: note = protein_1f6fa4d
  REGION 6..148: note = RuvC_domain
  SITE 9: note = RuvC_P1
  SITE 52: note = RuvC_P2
  SITE 87: note = RuvC_P3
  SITE 89: note = RuvC_P4
  SITE 92: note = RuvC_P5
  REGION 211..299: note = Tnp_domain
  SITE 219: note = Tnp_P1
  SITE 249: note = Tnp_P2
  SITE 257: note = Tnp_P3
  SITE 258: note = Tnp_P4
  SITE 270: note = Tnp_P5
MNIKTIGLDIAKNVFQLHGVDSNGKTMLRKQLKRDKLLEYFANLTPCLIGLEACSGAHYWARELIKLGHDARLISPQFVKPYVKGNKNDANDAEAICEAVGRPAMRFVPIKSIEQQDIQMLHRVRSGLVKERTALANRIRSLLAEYGIIVPIGLVKVRQALPDILEDADNGLTMAARVIFADLQDQLVELDKQVTTYGDKIQDVHRASEVSQRLSDVPGIGPITATAIMAALGDGKAFGSARQVAAWLGLVPRQDSSGGKPKLLGISKRGDVYLRTLLIHGGRAVVNAAAKKDDAQSRWINELVKRRNINIAAVAVANKNARIVWALLTKSVEYDVSAPSSV

SEQ ID NO: 17932 - protein, 327 aa, unidentified
  source 1..327: note = protein_3288aff
  REGION 4..160: note = RuvC_domain
  SITE 7: note = RuvC_P1
  SITE 57: note = RuvC_P2
  SITE 97: note = RuvC_P3
  SITE 99: note = RuvC_P4
  SITE 102: note = RuvC_P5
  REGION 274..318: note = Tnp_domain
  SITE 282: note = Tnp_P1
  SITE 312: note = Tnp_P2
MNCVGIDVSKGKSMIAVMRPLGEVVIPPFEVGHTESELCELSKLLGNLDGETRVVMETTGNYHLPVASFLYDSGFYVSVVNAMLVHSYGNNSLRRAKTDKKDAIKLANYGLDHWLTLPRYIPEDDVRLMLKTTYRQYQQCAKVQTMLKNNLISLLDTAFPDANRLFASPARADGSEKWVDFVAAFPHCECVCGLSERVFTAKYQKWCRKHGYNFNQDKALDIYASACGHFSVMPRTDTAKLLVVQAVSQLRAASASLAALRNEMQSLAASLPEYPVVMGMFGVGPALGPQLMAEIGDVRRFHSKKALVAFAGIDARVPVRPIGSTQS

SEQ ID NO: 17933 - protein, 383 aa, unidentified
  source 1..383: note = protein_fd6d265
  REGION 7..162: note = RuvC_domain
  SITE 10: note = RuvC_P1
  SITE 67: note = RuvC_P2
  SITE 107: note = RuvC_P3
  SITE 109: note = RuvC_P4
  SITE 112: note = RuvC_P5
  REGION 208..296: note = Tnp_domain
  SITE 216: note = Tnp_P1
  SITE 246: note = Tnp_P2
  SITE 254: note = Tnp_P3
  SITE 255: note = Tnp_P4
  SITE 268: note = Tnp_P5
MTIKYSVGLDISSKKVNGSISLIDENQKVTVKSSIVFYNTLKGFSELSLWIKKWHIKPEVPLVICMEATGVYHENCALYLFEKGYNVSIILPNKAKHYLISMGLKSKNDSIDAKGLSKMGAEQCLDLWQPSGKYFYELRQYTRQHQNLQEQKTVINNQLHALEFGMYDVKPVVKQLKKVIQLFDKQIKELEKIIKKHLESDEIVNQKVANICQIKGIGILTIATILAETNGFELFKNYKQLVSYAGFDVVERESGSSVTGKTRISKKGNSHIRRALFMPAFTAVKYKEPSFFGLYERTYAKHAIKMKSYVAVQKKLLTTIYHLWKKSEAYNPNYIFIIQEKEQELSSLLGFEKAVSTQKNSPNQVEAIQGKHPAKNHSRLPLC

SEQ ID NO: 17934 - protein, 343 aa, unidentified
  source 1..343: note = protein_3d11573
  REGION 6..146: note = RuvC_domain
  SITE 9: note = RuvC_P1
  SITE 52: note = RuvC_P2
  SITE 87: note = RuvC_P3
  SITE 89: note = RuvC_P4
  SITE 92: note = RuvC_P5
  REGION 211..295: note = Tnp_domain
  SITE 219: note = Tnp_P1
  SITE 249: note = Tnp_P2
  SITE 257: note = Tnp_P3
  SITE 258: note = Tnp_P4
  SITE 270: note = Tnp_P5
MKLRVLGIDLGKTVFHLVGLDSTGRVVIRKKCSPTQLLAFTANLQVQLIGMESRSGSHFLGRALREQGHEVRLMPAQYVKPYVQTNKSDFLDAEAIAEAVQRPRMRFVPIKTEEQLDLQALHRVRERWVMRRTAVVNPIRSLLLERGLTLPKGRGYVDRQLPRILEDGELRLSGSFRVLLAQLKIELEQLTARIEEMDRVIQKTAKENEACQRLTEIPGVGPVTATALIAAVGNGSTFQKGRNLAAWMGIVPGEYSTGGKQKLLGISKRGNKYLRTLFIQGARSVLQQRDKQVPGLSSWLTQLLARAHQNVVIVALANKMVRMAWAVLCKNERYRALVLAMSA

SEQ ID NO: 17935 - protein, 343 aa, unidentified
  source 1..343: note = protein_2a59bd6
  REGION 5..151: note = RuvC_domain
  SITE 8: note = RuvC_P1
  SITE 53: note = RuvC_P2
  SITE 91: note = RuvC_P3
  SITE 93: note = RuvC_P4
  SITE 96: note = RuvC_P5
  REGION 211..295: note = Tnp_domain
  SITE 219: note = Tnp_P1
  SITE 249: note = Tnp_P2
  SITE 257: note = Tnp_P3
  SITE 258: note = Tnp_P4
  SITE 270: note = Tnp_P5
MNQYIGLDVSLKDTAISIRQGGRRVWRGKCPSDPKLLAQMIRKHAPHPKRVVFETGPLSTWFYHALTAEGLPAICIEARHAQKVLNETLNKTDANDADGLAQLAEANFYKVVRVKSFDSMLTRTLVAARNQLLGITTQLSNQIRGLMKTFGLIVPKGTGRVFDGNVRKLLDGNYSLAQILLPLLDAWRDIRKRAADLGHQLLAAARESEATKLLMTIPGVGAVTAVSYVAAIENPENFRTSRSVGAWLGLTTRRYQSGEVDYNSRISRRGDNHLRGLLYEAATVLLTRATTSIECSLRDWGLKLRERLGFKRAAVAVARKLAVIMHSMLKTGEVFNPSAGAPA

SEQ ID NO: 17936 - protein, 400 aa, unidentified
  source 1..400: note = protein_74ac94c
  REGION 4..160: note = RuvC_domain
  SITE 7: note = RuvC_P1
  SITE 57: note = RuvC_P2
  SITE 97: note = RuvC_P3
  SITE 99: note = RuvC_P4
  SITE 102: note = RuvC_P5
  REGION 275..362: note = Tnp_domain
  SITE 283: note = Tnp_P1
  SITE 313: note = Tnp_P2
  SITE 321: note = Tnp_P3
  SITE 322: note = Tnp_P4
  SITE 335: note = Tnp_P5
MNAVGIDVSKGKSTVAIMRPFGEVVADPFEVSHTDAELRKLACFLEKLPGETRIVMEYTGNYWQPIAKVLHDAGLFVSIVNALLIYKYGNNSIRKGKTDKLDAVKIANYCLDRWTGLERYTPVDQIRQALKTCRRQYDQYIRLKVNLKNNLIALLDGTFPGLNILFKSAPRDMDGHEKWVDFAEKFWHRECICGNSEKAFTNQYKKWCAKAGYRFSEEKASSIYAHAVSQVNTLPMTDSIKRLVTLAVSQLNTIIETISVIQHEMLTLATQLPEYPVVMRMFGVGPVLGPQLMAEIGDVRRFDRKQSLVAFAGVDAPPCQSGTFESKNRHISKRGSPRLRKTLFQVMSTIIQHAPADDPVFQFLDRKRREGKHYYVYMTAAANKFLRIYYGTVIAYLEKL

SEQ ID NO: 17937 - protein, 303 aa, unidentified
  source 1..303: note = protein_b6ab4a5
  REGION 4..76: note = RuvC_domain
  SITE 7: note = RuvC_P1
  SITE 49: note = RuvC_P2
  REGION 177..266: note = Tnp_domain
  SITE 185: note = Tnp_P1
  SITE 215: note = Tnp_P2
  SITE 223: note = Tnp_P3
  SITE 224: note = Tnp_P4
  SITE 236: note = Tnp_P5
MQLLAIDLGKQSFHIHGISSEGEVISKKVTRSKLEAVVQELAPAIVAMEACASAHHWGRQFEALGYSVRLIHPRFVPVKTTEQQDLQMLHRTRDRLITQRTGLINHIRGLLGEYGVVIPVGAFRFRKDIRTAISEASLSTLAKQSFNALIAEFEALDKRINEIDRKLVAICRTDERCKRLATLPGVGPVIATALIAAVDDGQHFSSGRALAAWIGLVPRQYTTGGKPRLGGIGKRGNQYLRRQLIHGARSVLIRISARSDRRAKWAQELLVRAGHNKTLVAIANKTARMAWAVLRSGESYKAA

SEQ ID NO: 17938 - protein, 288 aa, unidentified
  source 1..288: note = protein_fca203a
  REGION 8..159: note = RuvC_domain
  SITE 10: note = RuvC_P1
  SITE 52: note = RuvC_P2
  SITE 87: note = RuvC_P3
  SITE 89: note = RuvC_P4
  SITE 92: note = RuvC_P5
  REGION 156..244: note = Tnp_domain
  SITE 164: note = Tnp_P1
  SITE 194: note = Tnp_P2
  SITE 202: note = Tnp_P3
  SITE 203: note = Tnp_P4
  SITE 215: note = Tnp_P5
MTQSNLSAIDLAKNIFQVAQLKGNKLKFNKPMKREPMLELLAKAEGSKVVMEACGSAQHIARKALSLGHDVMLLPPKFVKAFRQGQKTDANDVLAIASASQAYNVKPCKIMTVEEQTLQSLSQARALIDKQNKTQCDAKAKLHKRVEAITKQNDSCQRLMALEGVGPITAIELLSFLGNTSQFSDARGAAACAGVTPTQHSSGGKAKIGHIPKRRGNTLRKNLFLGARTVVSRLKHKEATTEKERWIKNLLAKKSVKCVAIALTNKTVRTAYALLKNGSTYEPKILAA

SEQ ID NO: 17939 - protein, 273 aa, unidentified
  source 1..273: note = protein_a01e8f3
  REGION 1..82: note = RuvC_domain
  SITE 22: note = RuvC_P3
  SITE 24: note = RuvC_P4
  SITE 27: note = RuvC_P5
  REGION 142..207: note = Tnp_domain
  SITE 150: note = Tnp_P1
  SITE 180: note = Tnp_P2
  SITE 188: note = Tnp_P3
  SITE 189: note = Tnp_P4
  SITE 201: note = Tnp_P5
MVFLPSALMRGTRTALDMAANKTDANDADGLAHIAEVGFYREVRVKGFESMLMRTLVAARDQILKVIVQMSNQIRGLMKTFGLVVPKSAGGAFEGHVRRLLADNTQLERIVLPMLDAWRGLRMQAAKLDGQLRAASRLDQRCALLMSIPGIGPVTASSFVAAVEEPGNFKSSRAVGAWLGLTTRRYQSGEVDYGGHISRRGRSAPPRPALRGRCRDPDASTGESTLKQWGVGLRERLGFKRAAVAVARKLAVIMHRMLHTGELFDRTAGAAVS

SEQ ID NO: 17940 - protein, 420 aa, unidentified
  source 1..420: note = protein_91d3783
  REGION 19..179: note = RuvC_domain
  SITE 22: note = RuvC_P1
  SITE 77: note = RuvC_P2
  SITE 118: note = RuvC_P3
  SITE 120: note = RuvC_P4
  SITE 123: note = RuvC_P5
  REGION 286..372: note = Tnp_domain
  SITE 294: note = Tnp_P1
  SITE 324: note = Tnp_P2
  SITE 332: note = Tnp_P3
  SITE 333: note = Tnp_P4
  SITE 345: note = Tnp_P5
MQDKQNQLIERISDKHLVVGVDIAQQFHVARAVNYRGIVVGDPLTFENSEVGFSFFMEWIQRLQKLNQLDSIIVGMEPTGHYWINLSKWLIKQSVEVVTVNPHLVKKNKENRDNTQSKSGKKDALVIADMVKNGYYSFVRHTSESFEKLRVLMSNRDIVVKRLVMSINQLNRWVDMVFPELRQVFKDISKKGAIATLRLFPSPTELRSLKPEDVVTGWKSIMKRQPGLKKAQLIINLAKKSIGTGQALDAHKFHLEQLLEEYDLAVCQLERVELAVKEVLKQIPFAKKLLTIKGISEISLAGILGESGDLSGFSHGNSLLRHAVLHLSEASSGKWRGQIIISKRGRSRLRRFLFLATMSLVANNPEFKAIHANNVNMKKMKKMKSILKLVGKLARIFVGIARRNETYCPGKVHILLDQAA

SEQ ID NO: 17941 - protein, 321 aa, unidentified
  source 1..321: note = protein_8555d16
  REGION 8..150: note = RuvC_domain
  SITE 10: note = RuvC_P1
  SITE 53: note = RuvC_P2
  SITE 93: note = RuvC_P3
  SITE 95: note = RuvC_P4
  SITE 98: note = RuvC_P5
  REGION 189..252: note = Tnp_domain
  SITE 197: note = Tnp_P1
  SITE 226: note = Tnp_P2
  SITE 234: note = Tnp_P3
  SITE 235: note = Tnp_P4
MSEVDCFAADVSKRELVIAIYPGGVGVKRIANQEAVINAWLDTLPAGSVIAMEATGIYHRRLADLAHTRGLVVYVVNPRDVYYDVRGMGARGKTDPSDAKLLARYVAHERMHLHPYLPPSALCERLVTLLEHRAVLVRTRQALTQSLAELPALGREKRNLFKAVAALLSGIDRELAALGCADPLTATLVTRLKTISGVEPLVASLLCALFKRFAFRHADALIAYLGLDPRPDESGQHSRPTPPVQARSPRVAPVADRSRHVRRAYPGLARLRQPAARQSPARHCSACHPRPQNAAHGLLLRTAFALFKNGQDFIPPSAQPT

SEQ ID NO: 17942 - protein, 402 aa, unidentified
  source 1..402: note = protein_c7d6ffc
  REGION 5..163: note = RuvC_domain
  SITE 8: note = RuvC_P1
  SITE 62: note = RuvC_P2
  SITE 102: note = RuvC_P3
  SITE 104: note = RuvC_P4
  SITE 107: note = RuvC_P5
  REGION 276..365: note = Tnp_domain
  SITE 284: note = Tnp_P1
  SITE 314: note = Tnp_P2
  SITE 322: note = Tnp_P3
  SITE 323: note = Tnp_P4
  SITE 336: note = Tnp_P5
MNPVVGLDISKEESHGQAFLARGKLFRGTFHFEHTRDGLANLHQVLKDVESVSKQRPLLILEATGHYQSPVVQFLEEHHYIYIVINPLISNRLRKSQLRKVKTDAADAYLLGELYYREEFEPFKKRGVQLLNLRYLTRQYETLSKMCVSTKLQFQAVLDQVFPGYKGVFGAMYSGVSLRFLSEFPTSYLVLQTDEDTLRAKMKELLSSKRGRSEDWINQRVQRLVDAAKQNPFQQTMYASHLINMRVLITLILQYQEHLAELEQNIDALAEEIEEYELIQSIPGIGHKIAATILSEIGEVERFDHPKKLVAFAGIDPSVFASGKFTATRNRITKRGSRQLRYALVMAVQCGLIRSRNMRIKAFYERKRAEGKPHKVALIACANKLVHWLYAILKNKKEFRPI

SEQ ID NO: 17943 - protein, 353 aa, unidentified
  source 1..353: note = protein_c5715ba
  REGION 12..160: note = RuvC_domain
  SITE 15: note = RuvC_P1
  SITE 64: note = RuvC_P2
  SITE 100: note = RuvC_P3
  SITE 102: note = RuvC_P4
  SITE 105: note = RuvC_P5
  REGION 228..314: note = Tnp_domain
  SITE 236: note = Tnp_P1
  SITE 267: note = Tnp_P2
  SITE 275: note = Tnp_P3
  SITE 276: note = Tnp_P4
  SITE 287: note = Tnp_P5
MEEQPDQNEVILGIDTHLDTHVGVIIDYRGKWLGTLSIATNPSGYHELLSWAQSLGHLQRAGIEGTGTYGAGIAQFLHTHGVEVWEINRPDRSQRRLQGKSDPTDAESAARTVLSGKAQAIPKLQKGAAEAMRTVSVARRSAVKARTQTINQLRALLISAPDDIRARLWKSKPEQCVKACAQILSLGDTVALQTLAATLRLLAKRWLYLTTELRELDATLESLTKQAAKRLRSQFGVGPQTAATLLAVAGDNPERLRSEAALAALCGTNPLPASSGKTVRHRLNRNGDRTANNALWTIALVRMRSEPRTRAYVARRTAEGKSTKEIQRCLKRYIVRELYPLILADLKDAALVI

SEQ ID NO: 17944 - protein, 391 aa, unidentified
  source 1..391: note = protein_09379ed
  REGION 4..163: note = RuvC_domain
  SITE 7: note = RuvC_P1
  SITE 60: note = RuvC_P2
  SITE 101: note = RuvC_P3
  SITE 103: note = RuvC_P4
  SITE 106: note = RuvC_P5
  REGION 266..353: note = Tnp_domain
  SITE 274: note = Tnp_P1
  SITE 304: note = Tnp_P2
  SITE 312: note = Tnp_P3
  SITE 313: note = Tnp_P4
  SITE 326: note = Tnp_P5
MIYIGIDVAKDKHDCFITNIEGEVLFKPFTIPNNLDGFNDLFQKICSVSDDFSEIKVGLEATGHYNFNLLGFLVDKGLPTFVINPLHTNLYRKSLSLRQTKTDKVDAHTIALMMMSGVNLQSYSDTSYHNEELKSLTRYRFDKVKERAKLKTSISRLVTILFPELETLVPSLHLVSVYTLLAEFPGASAIAQAHLTRLSHLLEVASRGRYGKETAILFRNAARQSIGLNLQAKSLELKHTIKLIRELDDEIAEIEASIKSIVDAMHSPILSIPGISYRMGAMILAEIGDFSRFNSPDKILAYAGLSPSTYQSGQLDSSYSHMEKRGSRYLRYALFNATKFVCIWDDTFAAYLARKRAEGKHYNVAISHAAKKLVRIIYQLEKSGQTYHRAA

SEQ ID NO: 17945 - protein, 399 aa, unidentified
  source 1..399: note = protein_4255fb6
  REGION 4..160: note = RuvC_domain
  SITE 7: note = RuvC_P1
  SITE 57: note = RuvC_P2
  SITE 97: note = RuvC_P3
  SITE 99: note = RuvC_P4
  SITE 102: note = RuvC_P5
  REGION 276..363: note = Tnp_domain
  SITE 284: note = Tnp_P1
  SITE 314: note = Tnp_P2
  SITE 322: note = Tnp_P3
  SITE 323: note = Tnp_P4
  SITE 336: note = Tnp_P5
MISVGIDVSKEKSMVCILKPYGEIVQSPFEIMHTEGSVTKLANKILELEGEVKVVLEATGAYHLPLLSIFLDKKIFVSIINPLVMKKYASTSIRKGKTDKIDSIRIANYGIDNWFHLTKHEANEETYEELKFLGRQYSHYIKIKIDSKLALTSILDRTMPGIKKLLSGKRSDNPMKDKLSDFVEHYWHYDNITKLTELKFVESYQKWAKKNGYHASESKARKIYAMACSGIPTLPSRTPSTKMLVLESVRVLKEVNKTLYNILSQLQSIARTLKEYETVRAMNGVGDVLAPRLIAEIGDVKRFHSVSALIAYAGLDSPPYESGAFIGTRRKISKRGSSLLRKTGYEVMKCLKTVKPTEDSAVYLYMLKKEAEGKPKKVAKIAALNKFLRIYYARVMELQ

SEQ ID NO: 17946 - protein, 302 aa, unidentified
  source 1..302: note = protein_6daaa8e
  REGION 1..68: note = RuvC_domain
  SITE 7: note = RuvC_P3
  SITE 9: note = RuvC_P4
  SITE 12: note = RuvC_P5
  REGION 173..260: note = Tnp_domain
  SITE 181: note = Tnp_P1
  SITE 211: note = Tnp_P2
  SITE 219: note = Tnp_P3
  SITE 220: note = Tnp_P4
  SITE 233: note = Tnp_P5
MFIRKIKTDTKDSFIIAELIRFGRYAESNVAQDRLLALKELCRNRFYLVDMAGDLKRKLIALIDRVFPEYEAQFDTIFCKSSVALLKKYPTPQKLSNAHLDKLTELLWNSSNGHFGEWKARELKELARNSFGVEDCDGAYSTLILLMLDQIQSLSGKADALEKEISRLFQSFDTTVTTIPGVGPIIGAVILSEVGDISRFSSADKLAAYIGVDPSVNQSGEFQAAHAHMSKRGSPYLRRCIWMASQVAVQRDPMFRAYYEKKAAEGLKYMTIIGHVTRKMTAVVFAILRDHKVYEPVLPTAA

SEQ ID NO: 17947 - protein, 399 aa, unidentified
  source 1..399: note = protein_8c1b173
  REGION 10..163: note = RuvC_domain
  SITE 13: note = RuvC_P1
  SITE 61: note = RuvC_P2
  SITE 102: note = RuvC_P3
  SITE 104: note = RuvC_P4
  SITE 107: note = RuvC_P5
  REGION 225..310: note = Tnp_domain
  SITE 233: note = Tnp_P1
  SITE 263: note = Tnp_P2
  SITE 271: note = Tnp_P3
  SITE 272: note = Tnp_P4
  SITE 283: note = Tnp_P5
MNEDISRVVIGMDPHKRTVTIEVMTADETVLDGGRFDTTVEGYRAMLAFVSAWPVRVWAIEGCEGIGRHIAHRLLADGQEIVDVPAKLSARARVFATGQGRKTDATDAHSVALVGTRMAGLRPVVSDAQLEVLQLLVDRRRSIGEEHTRKVSQLHRILLEMLPGGAKKHLSAAQARALLTGIRPRDDVGKTRKRVAMELVVDLERIYARKKAADKELRQLVAATGTSLLGLYGVGPSGAARLLVEVGDLSRFPDRNHFASWTGTAPVDASSGEHVRHRLSRGGNRQINRVLHIMATVQLRTPTEGRAYFDRKKAAGKTSMEAMRCLKRRLSDLVFRTMLGDYVAGRITTATGQATGPGGHRGNDSDSSATGSQPHTGSSDKPLPGPVTTQRRTPLPTAS

SEQ ID NO: 17948 - protein, 342 aa, unidentified
  source 1..342: note = protein_315cf86
  REGION 6..148: note = RuvC_domain
  SITE 9: note = RuvC_P1
  SITE 52: note = RuvC_P2
  SITE 87: note = RuvC_P3
  SITE 89: note = RuvC_P4
  SITE 92: note = RuvC_P5
  REGION 211..298: note = Tnp_domain
  SITE 219: note = Tnp_P1
  SITE 249: note = Tnp_P2
  SITE 257: note = Tnp_P3
  SITE 258: note = Tnp_P4
  SITE 270: note = Tnp_P5
MAVTTLGIDLAKLSFALHGIDQQGSVLIKKNVRRANLAKVISKLEPCLIGMEACSGAHYWARLFIKMGHSVKLMPPQFVKPYVKSNKNDAADAEAICEALTRPNMRFVPIKTVEQQSILSVHKARERLVSMRTGQVNQLRGLLGEFGIVIPKGSSALNKQIPLILEDAENGLTVTVRSLVSQLKELVNELDIQVKELNKQIDSWHQLNEDSQRIAQIPGIGPITATALVASTGDPKSFNNGRQVSAWIGLVPKQFSTGGKQVLLGISKRGDGYLRRLLVHGARAVLGHLKQNSETYTHRWLAELLKRKHKNVAIVALANRNARIAWALLSKQQEYNPSLLSA

SEQ ID NO: 17949 - protein, 343 aa, unidentified
  source 1..343: note = protein_855b90e
  REGION 5..153: note = RuvC_domain
  SITE 8: note = RuvC_P1
  SITE 55: note = RuvC_P2
  SITE 92: note = RuvC_P3
  SITE 94: note = RuvC_P4
  SITE 97: note = RuvC_P5
  REGION 212..298: note = Tnp_domain
  SITE 220: note = Tnp_P1
  SITE 250: note = Tnp_P2
  SITE 258: note = Tnp_P3
  SITE 259: note = Tnp_P4
  SITE 271: note = Tnp_P5
MEHYAGIDVSLKESSVCVVDATGTIVCEVKIASEPEALVRYFDELELPVSRIGLEAGPLSQWLHAGLVAAGRAAVLLETRHVKAGLSAMTVKTDRKDARGIAQLLRMGWYRPVHAKSVTCKDTRALLVGRKLLQGKLLDVELSIRGILRGYGLKVGEVSRGRFEARIRELIAGHATLETVIGAMLVARTALWCAFTKLHREMLKIARADKVCRRLMSTPGVGALVALTYRSAVDEPMRFGKSSTVGAYFGLTPKKYQSGETDRDGGVSKVGDAMVRTALFEAAHIMLTRATRFSSLKCWALDVAKRRGMKRAKVALARKLGVVLHRMWVDATEFRWSKAATAA

SEQ ID NO: 17950 - protein, 400 aa, unidentified
  source 1..400: note = protein_a185b52
  REGION 5..163: note = RuvC_domain
  SITE 8: note = RuvC_P1
  SITE 62: note = RuvC_P2
  SITE 102: note = RuvC_P3
  SITE 104: note = RuvC_P4
  SITE 107: note = RuvC_P5
  REGION 273..362: note = Tnp_domain
  SITE 281: note = Tnp_P1
  SITE 311: note = Tnp_P2
  SITE 319: note = Tnp_P3
  SITE 320: note = Tnp_P4
  SITE 333: note = Tnp_P5
MNPVVGIDIAKEESEVQAFLDKGKPYGTSFSIKHNREELEEFIYFLGEMKAKTGQMPVIILESTGHYHTPVVQCLEENDILYILLNPIISHQAKKASLRKVKTDAYDAYQLCVLYYKEEFEPQKRRGIQLLNLRNLSRQQEIMTNMYVEAKLHFHTILDQVFPEYRKVFGDLFSKVSLSVLKEYPTSEKVLKAGKEELEDKIREHCPSRSVQWAKEKARKLIHSASQNPFQKVQYESHLINLSMYIDILFHYQGHLTDLESQMVSLANEIEEYKIIQSIPGIGEKIAATIISEIGEIDRFNHPKKLVAFAGVDPSVHSSGKFTANINRITKRGSSRLRRSLYLAVLCGIRRSRNKKLKEFYDRKRSEGEPSKVAIVACINKLLHWIYALLKKNQNFLDIA

SEQ ID NO: 17951 - protein, 339 aa, unidentified
  source 1..339: note = protein_41ddd46
  REGION 6..147: note = RuvC_domain
  SITE 9: note = RuvC_P1
  SITE 52: note = RuvC_P2
  SITE 87: note = RuvC_P3
  SITE 89: note = RuvC_P4
  SITE 92: note = RuvC_P5
  REGION 210..293: note = Tnp_domain
  SITE 218: note = Tnp_P1
  SITE 248: note = Tnp_P2
  SITE 256: note = Tnp_P3
  SITE 257: note = Tnp_P4
  SITE 269: note = Tnp_P5
MKFIPVGVDIAKHLIQVHFINEHSGEVVDKQVRSQDFLTFFSNREPCLIGMEACGGSQHWARELTKQGHKVRLLQARFVKAFVMGNKNDVMDARAIWMAVQQPGKEISVKTEEQQSVLVLHRSRRQLVKFRTAQINALHGTLLEFGETIHKGRSAMDRELPAALERMKTTLPPYLIAVLEDQYNRLNDLDSLIDGLEKQLISVARQNEMCKRLMDIPGVGPLIATAAAATMGEASAFKSGRAFAAYIGLVPKQTGSGGKVRLLGISKRGDAYLRTLFIHGARSVSSVAKEPGLWITELKKRRPASVAIVAMANKLARTVWAIAAHDRNYDKDHISIRPY

SEQ ID NO: 17952 - protein, 346 aa, unidentified
  source 1..346: note = protein_c080805
  REGION 7..147: note = RuvC_domain
  SITE 10: note = RuvC_P1
  SITE 53: note = RuvC_P2
  SITE 88: note = RuvC_P3
  SITE 90: note = RuvC_P4
  SITE 93: note = RuvC_P5
  REGION 210..295: note = Tnp_domain
  SITE 218: note = Tnp_P1
  SITE 248: note = Tnp_P2
  SITE 256: note = Tnp_P3
  SITE 257: note = Tnp_P4
  SITE 269: note = Tnp_P5
MEQIIRIGMDTSKYIFQLHGVDAAEQPVLRKRLGRKAMLAFLAKLPSTVVAIEACGAAHHLARELGKLGHTVKLIAPQLVKPYVPRNKNDGRDAEGLCEAASRPRMRFVPVKTVEQQAALMLLGVRDQLVARRTQLSNTIRGYAAEFGLIEAKGLDKIAALLATIAHDESVPVLARELFATLARDYAQVQVELKAIEAKLVAWHRTNALSRRLAQIPGVGPVTAAALVMKAPDPHAFRSGRLFAAWLGLTPKDHSTAGKTRLGKITRAGDESLRRLLVVGATSVVKQAKGKHKRGSGWLLELLERKTPKLAAVALANKMARIAWKLMTTGESYDSARTDTRVASAA

SEQ ID NO: 17953 - protein, 300 aa, unidentified
  source 1..300: note = protein_264529c
  REGION 1..63: note = RuvC_domain
  SITE 2: note = RuvC_P3
  SITE 4: note = RuvC_P4
  SITE 7: note = RuvC_P5
  REGION 173..262: note = Tnp_domain
  SITE 181: note = Tnp_P1
  SITE 211: note = Tnp_P2
  SITE 219: note = Tnp_P3
  SITE 220: note = Tnp_P4
  SITE 233: note = Tnp_P5
MKTDAIDTYQLCVLYYKEDLEPHKIRGIQLLDLRNLSRQQEIVTNMYVEAKLQFHTILDQVFPEYRKVFGDLYTRVSLLILKEYPTSEAVLTAGESKLAESVIEFCPSRSGQWAWEKAKKIMDSASRNPFKKNVYQSHVINLRMYIELLFHYQGHPSDLEDQIVALANELEEYKIIQSIPGIGEKIAATIISEIGEIDEFNHPKKLVAFAGVDPSVHSSGKFTATINRITKRGSSRLRHSLYLAVLCGIRSSRNKKLKAFYDKKKSEGKPAKVSIVACMNKLLQWIYALLSRKETFLDLA

SEQ ID NO: 17954 - protein, 337 aa, unidentified
  source 1..337: note = protein_d259649
  REGION 5..168: note = RuvC_domain
  SITE 8: note = RuvC_P1
  SITE 66: note = RuvC_P2
  SITE 106: note = RuvC_P3
  SITE 108: note = RuvC_P4
  SITE 111: note = RuvC_P5
  REGION 210..295: note = Tnp_domain
  SITE 218: note = Tnp_P1
  SITE 247: note = Tnp_P2
  SITE 255: note = Tnp_P3
  SITE 256: note = Tnp_P4
  SITE 268: note = Tnp_P5
MTAYVGIDVSKKKLDVGFYSDKLGKNGQRKKKTKVFKNDRQAFSQLESWLTQQTQHKAQDIAIGIEATGIYHEALIYTLNEQGFKLFIANPGRAKKYFESLGVTHKTDKSDSLLLARFTEDKAHNGDITWWKPESPEARHLKLLLRRLKALQKDALREKNRLEACANTDTSPRVVKSIEDMIAVLNEEIKALLKEIDDHIDGHPQLKKNRELLESIDGVGPTVSRELTSLFSVKRFSSAKEAAAYLGLIPRLQESGSHKGMTRLSKIGPSAIRALLYLPAVVASRCNPDIAYQKQRLLAQGKTKMQALGAAMRKLVQICFGVIKHQEEYRPQTSLSV

SEQ ID NO: 17955 - protein, 266 aa, unidentified
  source 1..266: note = protein_0c37a55
  REGION 8..152: note = RuvC_domain
  SITE 11: note = RuvC_P1
  SITE 55: note = RuvC_P2
  SITE 95: note = RuvC_P3
  SITE 97: note = RuvC_P4
  SITE 100: note = RuvC_P5
  REGION 194..266: note = Tnp_domain
  SITE 202: note = Tnp_P1
  SITE 232: note = Tnp_P2
  SITE 240: note = Tnp_P3
  SITE 241: note = Tnp_P4
  SITE 254: note = Tnp_P5
MEKSFIYVGVDISKLTFDVAIFKNGIYYHHKFSNDLKGFKSFIKLLNTDNCCVMEASGPYYLNLAFFLVDQGIAVSVINPLVIRRFSQMRMLRAKTDKKDAAMIAEYGKTERPVLWEKEENYVLELKQMQAYCEQLNKSRTGLIRQKQAFEANPVQSQIVMNSLNKQVEELEQQLKFIEKEMVSLIKQYHPEQYQQLKSIPGIGPKSAMGLIVLSGGFTKFSNAKQLSSYVGISPRIFESGTSVKGKARICKMGMSRIRAILYVCS

SEQ ID NO: 17956 - protein, 323 aa, unidentified
  source 1..323: note = protein_87464c2
  REGION 8..150: note = RuvC_domain
  SITE 11: note = RuvC_P1
  SITE 52: note = RuvC_P2
  SITE 92: note = RuvC_P3
  SITE 94: note = RuvC_P4
  SITE 97: note = RuvC_P5
  REGION 191..278: note = Tnp_domain
  SITE 199: note = Tnp_P1
  SITE 229: note = Tnp_P2
  SITE 237: note = Tnp_P3
  SITE 238: note = Tnp_P4
  SITE 251: note = Tnp_P5
MNKSTNYYGIDISKDVFDVTDQKETHYQFINDSKGFKEFKKLLDKNSHCVMEATGYYHYKLAYFLLENRVLVSVENPLSVKRFIQMKLSKIKTDKSDSKMLCKYAEKADLRLWEGESKQQQECLQMTRILSIYTKQSTAIKNKIHGEVVLGVPSKIVMSSLKRTLKSIAKEVKMIEDKLLELVKKENQELLTLLETIPGIGRKTSLMLLVLTDGFERFSSASELCSYAGLTPVIRKSGSSVHGRPRISKIGNQKLRNLLFLCSFNASKYNKACKALYDRIVAKGKSKKLALIAVCNKLLKQAFAIAKSRLPYDQNYRSKLSVN

SEQ ID NO: 17957 - protein, 412 aa, unidentified
  source 1..412: note = protein_65c0e02
  REGION 5..164: note = RuvC_domain
  SITE 8: note = RuvC_P1
  SITE 63: note = RuvC_P2
  SITE 103: note = RuvC_P3
  SITE 105: note = RuvC_P4
  SITE 108: note = RuvC_P5
  REGION 274..374: note = Tnp_domain
  SITE 282: note = Tnp_P1
  SITE 312: note = Tnp_P2
  SITE 320: note = Tnp_P3
  SITE 321: note = Tnp_P4
  SITE 334: note = Tnp_P5
MNPVVGLDVSKGESQVQAFLDKGKPYRKSFSIEHNVKGLEIFLEFLHEVEIAANGVQPSVVMESTGHYHIPVVQFLDEQKYVYIIINPLISHRAKSSSLRKVKTDAIDAYHLCELFYKEELEPYKKRGIQLLNLRNLTRQQESIAEIAAKTKVQLHSLLDQVFPEYRGVFGSLYSKVSLHTLLAFPTSEAVLSVTEEELTEKIASLCTSRSEQWANERAIKLKEAALRNPFQHNLYESHIFNLEMLIKIVLQYQEHLSKLADEIDSLAQEIEEYELLQSIPGIGEKIAATIISEIGEIDRFNSAKKLVAFAGVDPSVYSSGKFTASINRITKRGSNRLRHALYMAVQSGIRDARKSKTTEEIIPRNKRLREFYDKKREEGKPFRVAVIACVNKLLHWIYALLKSRTTFQDIA

SEQ ID NO: 17958 - protein, 391 aa, unidentified
  source 1..391: note = protein_88d717b
  REGION 5..162: note = RuvC_domain
  SITE 8: note = RuvC_P1
  SITE 60: note = RuvC_P2
  SITE 101: note = RuvC_P3
  SITE 103: note = RuvC_P4
  SITE 106: note = RuvC_P5
  REGION 265..351: note = Tnp_domain
  SITE 273: note = Tnp_P1
  SITE 303: note = Tnp_P2
  SITE 311: note = Tnp_P3
  SITE 312: note = Tnp_P4
  SITE 324: note = Tnp_P5
MTYFIGIDIAKFKHDCFIMDQDGTVIRNSFSFKNDKAGFDQLLSVLNSLDPSHEKRIGLEATGHYGMNLKLFLEDHELSFLEINPILIKGFSSTRTLRKTKTDKIDASLISLYLTSVEYKIYPTKSYHIKNLKSLTRSREELVKERSLHLVNLTNVLDLVFPEFKPFFNGSLKSATCLYLLENYTSPSKMANMTSASYKSMSSKLRRTFSYARFNELRQLARNTIGHEDEILIFRLNLYLDLYKTIDSKIQDIEHKIEEEFQKIHTHIHTIKGIGLHSAASIYAEYGSLDAFDTPNKMLAYAGLEPSRDDSGQHSYSGKMVKRGSSYLRQTIMNVAETVMIHNPVFYDYYYKKKSEGKCHRVALSHVAKKLIRIIFYLEKNDVDFDPEKLR

SEQ ID NO: 17959 - protein, 420 aa, unidentified
  source 1..420: note = protein_6238fff
  REGION 33..192: note = RuvC_domain
  SITE 36: note = RuvC_P1
  SITE 89: note = RuvC_P2
  SITE 130: note = RuvC_P3
  SITE 132: note = RuvC_P4
  SITE 135: note = RuvC_P5
  REGION 295..382: note = Tnp_domain
  SITE 303: note = Tnp_P1
  SITE 333: note = Tnp_P2
  SITE 341: note = Tnp_P3
  SITE 342: note = Tnp_P4
  SITE 355: note = Tnp_P5
MTVYLERGYNHKEFLWSKNSIIFYERGIRMILVGIDVAKDKHDCFIMSSEGEVLYKSFTIANNMEGFNELYQKISSTSDDLSKIKVGLEATGHYSYNILGYLLDKGLTTFVINPLHTSLYRKSLSLRKTKTDKVDSHTIASMLMSDVNLKSYSETLYHNEELKSLTRYRFDKVKERAKLKQSISRLVTILFPELEKLVSTLHMVSIYALLSEFPSAKAIANAHLTKLTNLLYEVSKGRYTRETAIMFRESARNSIGSYMPAKSLELKHTIKLIGELDNEIEEIEAEIKRIMDEINSPIRSIPGIGLAMGAMIVAEIGDFSNFDSPDKILAYAGLSPSTYQSGQLYSTHAKMEKRGSRYLRYALFNATKFVCNWDPTFSAYLAKKRAEGKHYNVAISHAAKKLVRVIYQLQKSGQSYIKAA

SEQ ID NO: 17960 - protein, 340 aa, unidentified
  source 1..340: note = protein_aef4c7f
  REGION 6..148: note = RuvC_domain
  SITE 9: note = RuvC_P1
  SITE 52: note = RuvC_P2
  SITE 87: note = RuvC_P3
  SITE 89: note = RuvC_P4
  SITE 92: note = RuvC_P5
  REGION 211..298: note = Tnp_domain
  SITE 219: note = Tnp_P1
  SITE 249: note = Tnp_P2
  SITE 257: note = Tnp_P3
  SITE 258: note = Tnp_P4
  SITE 270: note = Tnp_P5
MDMTTLGIDIAKSVFQLHGIDADGAVVVQKKLRRGAVLNFLGKVGPCLIGMEACATSHYWAREIAALGHEVRLIPPAYVKPYVKRQKNDAADAEAICEAVTRPNMRFVPIKTEEQQSVLVLHRARDLLMRQRTMILNAIRGHLAEFGIIAAQGPRQVMGMIARLRDDGDASLPEIARSALLALGAHLEALAGEIRALERQLIVWHRADPTSQRLETIPGVGLITATALAASVSDPSVFKSGREFAAFLGLVPRQNSSGGKDRLGRISKMGDRYLRKLLVVGATSVIRRAGSNPTKTGAWVRSLMERKPARVVTVAMANKTARIEWAVMTRGEAYRASPIA

SEQ ID NO: 17961 - protein, 345 aa, unidentified
  source 1..345: note = protein_34eb85b
  REGION 6..147: note = RuvC_domain
  SITE 9: note = RuvC_P1
  SITE 52: note = RuvC_P2
  SITE 87: note = RuvC_P3
  SITE 89: note = RuvC_P4
  SITE 92: note = RuvC_P5
  REGION 211..297: note = Tnp_domain
  SITE 219: note = Tnp_P1
  SITE 249: note = Tnp_P2
  SITE 257: note = Tnp_P3
  SITE 258: note = Tnp_P4
  SITE 270: note = Tnp_P5
MKITTIGIDLAKSVFAVHGVNEHGRAVLRKVVKRDKLLALFANLPACLIGMEACGSSHFWARKLQAMGHTVRLIAPQFVKPYVKTNKNDAADAEAICEAVARPHMRFVPIKNVEQQSVLSLHRVRQGFVKARTAQANQIRGLLSEFGLVIPQGISHIARRVPELIEDAENGLTGSFRSLIGRLMDHLKELDRQVRELEAQIQSWHRESDDSRKLAQVPGIGPITATALVASVGDAKSFTNGRQLAAWLGLVPRQNSSGGKNVLLGISKRGDTYLRTLLIHGARAVIRTAQNTDNNKDGWLPRLLQRRNHNVAAVALANKNARVVWALLTHGQTYRRDYTSAMPTK

SEQ ID NO: 17962 - protein, 422 aa, unidentified
  source 1..422: note = protein_cff8d6c
  REGION 9..155: note = RuvC_domain
  SITE 12: note = RuvC_P1
  SITE 62: note = RuvC_P2
  SITE 96: note = RuvC_P3
  SITE 98: note = RuvC_P4
  SITE 101: note = RuvC_P5
  REGION 253..341: note = Tnp_domain
  SITE 261: note = Tnp_P1
  SITE 292: note = Tnp_P2
  SITE 300: note = Tnp_P3
  SITE 301: note = Tnp_P4
  SITE 312: note = Tnp_P5
MKLTYPVCCGVDVHKTFLVATIIKTDGLVPKYYKKCFSTFSRDLLAFRQWLLDNDCKDVCMESTGKYWVPVWNILEDAIRVVIANPKWVSAVKGNKDDTKDSRWIGDLFRMGLVPGSFVPSRKIRVLREFTRYRYKLISMRSSERNRFQNAFTVCNSTLDAVLSDMFGKSAAAIQNYLLDTDVVNPAYCASLLQRAAKKKSADVMAAVEGFKMSAEQKERVRIIQEHFSDINARVARLDAEINKLVSEYESQIALLCTIPGVDRNLAITIISEIGTDMSEFGSSKRLCRWAGLTPGNNESAGKKKSVKITRAGVYLKPALVQAAHAAVKSTKSVYFKSKYEHISKRRGKKRAIIAIARMILTAVFAMLKTGEVFHPCDLQKYDMPEQLRRRQVVSSAKNAVKLLVSLGVLQEDSVSLAALAG

SEQ ID NO: 17963 - protein, 346 aa, unidentified
  source 1..346: note = protein_b7ec3dc
  REGION 5..161: note = RuvC_domain
  SITE 8: note = RuvC_P1
  SITE 59: note = RuvC_P2
  SITE 100: note = RuvC_P3
  SITE 102: note = RuvC_P4
  SITE 105: note = RuvC_P5
  REGION 223..308: note = Tnp_domain
  SITE 231: note = Tnp_P1
  SITE 261: note = Tnp_P2
  SITE 269: note = Tnp_P3
  SITE 270: note = Tnp_P4
  SITE 281: note = Tnp_P5
MVTTIGIDPHKATHTAVAIDEAEMVVGEITVPADRRQLGRLIDWAGKVNGDRSRVWAVEAAGGLGYLLSQQLVAHGEHVIDVPAVLASRVRVLSSGKSDKNDPNDARSVAIAALRQPGLAVVRREDHVQVLRMLAKRHLELTSLRTQAVCRLHAILVLLKPGGMKRRLSAKQASRMLQGLRTFDPVGEQRRLMARTHLADIRRLDRDIHANKATIRRAVATSGTTVTDIYGVGPIVAAFLIGYTGDPTRFATADHYAAYNGTAPIEVSSGGKKRYRLSLRGNRKLNHAIHMVAVTQIRFPTPGRVYYDRKLTEGKTKKEALRSLKRHVSDAVYRQLLVDYQRHNTR

SEQ ID NO: 17964 - protein, 321 aa, unidentified
  source 1..321: note = protein_9a35b01
  REGION 7..154: note = RuvC_domain
  SITE 10: note = RuvC_P1
  SITE 59: note = RuvC_P2
  SITE 99: note = RuvC_P3
  SITE 101: note = RuvC_P4
  SITE 104: note = RuvC_P5
  REGION 194..280: note = Tnp_domain
  SITE 202: note = Tnp_P1
  SITE 232: note = Tnp_P2
  SITE 240: note = Tnp_P3
  SITE 241: note = Tnp_P4
  SITE 253: note = Tnp_P5
MNPVSCVGIDVAKAKFDVALLKPDGKYRSKVFSNNSEGFRQFRDWLEKQEALKAHLCMETTGAYGRSLARFLAQQQLLISVMNPALIHAFGKTELSRAKTDKADARLIARYCQMHRPAPWVPPAEAIVTLQALVQRLDDLLGMQNMENNRLEMAEPAARASIEALLLTIHQQIDAVRRQIQDHMDDHPDLKSQKALLLSIPGIGEVTAAMLLAFLSPLTRFHSAKQVVAYAGLNPRIRESGQWAGKSHIAKAGNVLLRKALYLPAVVAKHYNPVIAAFCDRLLSRGKCPMQVIIAAMRKLLHIVYGVLKSGQPFDPEKALA

SEQ ID NO: 17965 - protein, 394 aa, unidentified
  source 1..394: note = protein_3fdeb2c
  REGION 4..164: note = RuvC_domain
  SITE 7: note = RuvC_P1
  SITE 59: note = RuvC_P2
  SITE 99: note = RuvC_P3
  SITE 101: note = RuvC_P4
  SITE 104: note = RuvC_P5
  REGION 267..354: note = Tnp_domain
  SITE 275: note = Tnp_P1
  SITE 305: note = Tnp_P2
  SITE 313: note = Tnp_P3
  SITE 314: note = Tnp_P4
  SITE 327: note = Tnp_P5
MILVGIDIGKNQHTFSIIDKGTGEILLNPSVFDNNQNGFLLLIKQLKDYDKAEVLIGIEDTGHYHFALLKYLLDNRYTVALINPTTTDLTRKIQGGITKNDPLDSITICDVISSNQRKKPYRVTKVNRFDLYEQKQLTRHHHNLKEELNIYKNRLQKCIDIVFPEFNSLFNSKYGIVYMSILKTFSSAEAVANADIRSVRKCFEYKGRGGRISLSAEQLKMTAKASIGIPSAAEEIQIRHLVCQIELLEEQLSEIDKRIEEFSIQNSSTILSIPGISHFSGTSILAELGDVCNYQKSSQIIKFAGVAPYHYESSQFTAQHTAITKKGSKYLRKTLYQIILPVINNNEVFHIYYNKKLSEGKGHRCAQGHCIRKLLRVIYHLLSTEQQFNPELLV

SEQ ID NO: 17966 - protein, 339 aa, unidentified
  source 1..339: note = protein_c007889
  REGION 6..147: note = RuvC_domain
  SITE 9: note = RuvC_P1
  SITE 52: note = RuvC_P2
  SITE 87: note = RuvC_P3
  SITE 89: note = RuvC_P4
  SITE 92: note = RuvC_P5
  REGION 210..297: note = Tnp_domain
  SITE 218: note = Tnp_P1
  SITE 248: note = Tnp_P2
  SITE 256: note = Tnp_P3
  SITE 257: note = Tnp_P4
  SITE 269: note = Tnp_P5
MKYTTVGVDIAKNVFQLHWVDGESGEIVSKQLKRAVFLEHFANREACVIGMEACGGAHHWARRLIEMGHEVRLMPAKFVKAFVTGNKNDAADARAIWMATQMPSKVVAVKTEAQQAVLALHRMRQQKIKYRTAQMNCLRGLLAEYGEVMAKSRAALDKAIPGVLAKLAERLPAMLIDSLRELWSELDRLDKQIADIERRLQTWMKEDKACKAIAAIPGVGLLTATATVATMGDAKAFRSGREFAAWLGLVPKQIGTGGKIQLLGISRRGDTYVRTLLIHGARSVLFHGKHVGSWAEQLQKRRPSNVVTVALANKMARTIWAVLANGTPYNQAHFVAQPA

SEQ ID NO: 17967 - protein, 326 aa, unidentified
  source 1..326: note = protein_16761d3
  REGION 1..97: note = RuvC_domain
  SITE 2: note = RuvC_P2
  SITE 37: note = RuvC_P3
  SITE 39: note = RuvC_P4
  SITE 42: note = RuvC_P5
  REGION 161..248: note = Tnp_domain
  SITE 169: note = Tnp_P1
  SITE 199: note = Tnp_P2
  SITE 207: note = Tnp_P3
  SITE 208: note = Tnp_P4
  SITE 220: note = Tnp_P5
MEACGGSHFLGRALREQGHEVRLMPAQYVKPYVKTNKSDYIDAEAIAEAVGRPKMRFVPIKSDDQLDLQSLHRVRERWVMRRTAVINQIRGLLLERGITLRKGRRHIDAALPGILEDASNQLSGAVRVLLVQLKLELDHLQTRIDEVDAMINKASGESEICRRLVLIPGIGPVTATAIIAAIGNGAAFKKGRGFSAWLGIVPGEYTTGGKQKLLGISKRGNSYLRRLFVQGARAVLQQSAKQSSGLSAWLAQLTTRAHNNVVAVALANKLARMAWAVLSLRMNPIGRRSRSVQPQHNWPADDAWLKPGLEIAFAIPTSTDQRLLRS

SEQ ID NO: 17968 - protein, 387 aa, unidentified
  source 1..387: note = protein_713c393
  REGION 5..161: note = RuvC_domain
  SITE 8: note = RuvC_P1
  SITE 59: note = RuvC_P2
  SITE 100: note = RuvC_P3
  SITE 102: note = RuvC_P4
  SITE 105: note = RuvC_P5
  REGION 261..347: note = Tnp_domain
  SITE 269: note = Tnp_P1
  SITE 299: note = Tnp_P2
  SITE 307: note = Tnp_P3
  SITE 308: note = Tnp_P4
  SITE 320: note = Tnp_P5
MIYFVGIDISKYKHDFCIISNTGEIIVENSSFENNQKGFQSLVDLLEPYDKQCVRIAFEATGHYSLNLELFLTNQGYSFMKMNPLVVHNYLKARSLRRTKTDKADSKTIASYLMSVQYIPNSTLLYHTYTLKQLCRSRETLVKERSKIAVLLTNQLDFAFPELKPFFQNKISATLLYILEKYKNASHIALMKDYESLRKVSHGKFSYAKFAKLKELAKSTVGYHDENSDLLISTYVSLYNELSNKIDPIDKQISTIIKELNPRILSIPGIGVISAASIISEYGDINNFSSPAKMLAYAGLEPSINESGTLQSNGKMVKHGSGHLRYALMNIAMIILRHSPCFYDYYLKKRSEGKCHRVALSHVCKKLIRVIYSLEKYNHIFDPSLLK

SEQ ID NO: 17969 - protein, 387 aa, unidentified
  source 1..387: note = protein_71c8591
  REGION 4..159: note = RuvC_domain
  SITE 7: note = RuvC_P1
  SITE 57: note = RuvC_P2
  SITE 98: note = RuvC_P3
  SITE 100: note = RuvC_P4
  SITE 103: note = RuvC_P5
  REGION 262..349: note = Tnp_domain
  SITE 270: note = Tnp_P1
  SITE 300: note = Tnp_P2
  SITE 308: note = Tnp_P3
  SITE 309: note = Tnp_P4
  SITE 322: note = Tnp_P5
MLLIGIDVAKDKHDCFICDSDGNVIRDVFTFSNDREGFNLLLSFMPTSSENVKVGLEATGHYSLNLINFLIDNGYSPVVFNPLQINLFRKAHTLRKTKTDKIDAKLIALMLSSSDAKPHLDLSYHVTELKSLTRYRSRLKDQLARLKISLARIIEIVFPELEDCVYSINQKSTMALLYEFPSKELIANAHLTRLTNLLKDNSKGRYSKDKALEIRNVASNSIGTSSDASSFELVQTIDMINFYSSKMDELDAKIEDIMIELNSPILSIPGISYNLGSIILAEIVDINRFDTPAQLQAFAGLDPTTHQSGKFIATGVSMVKRGSPYLRWAILNASRLIAMRDPCFKDYYQGKRKEGKHHYVALTHVAKKLIRVIFKLLKTNTQFVPQT

SEQ ID NO: 17970 - protein, 405 aa, unidentified
  source 1..405: note = protein_bd260fc
  REGION 4..149: note = RuvC_domain
  SITE 7: note = RuvC_P1
  SITE 46: note = RuvC_P2
  SITE 86: note = RuvC_P3
  SITE 88: note = RuvC_P4
  SITE 91: note = RuvC_P5
  REGION 263..350: note = Tnp_domain
  SITE 271: note = Tnp_P1
  SITE 301: note = Tnp_P2
  SITE 309: note = Tnp_P3
  SITE 310: note = Tnp_P4
  SITE 323: note = Tnp_P5
MNAAGIDVSSRKSTVAVLRPFGEVVRLPFDVSQLKALDGETRVVMEHTGRYYEPVANVLHEAGLHVSAVNPLLIREYGGNSLRRVKTDKADAVKIARYALDNWADLRDYTPMDTIRYDLKTLNRQFQLASKQKTATANNLIALQEQSFPGIRKCFDSPVRQDGTQKWVDFTYTFWHADCVRKHSLNAFAERYRKWCKRHGYIFKQSNAEEVYALAKSAVTLVSSSEVTKLLVQEAANQLTGISHSVETYRAEMNRLASMLPEYPVVMEMYGVGESFGPQLMAEIGDIRRFEHKKSLVAFAGVDPMPNQSGEKNVRSNRSSKRGSPYLRKTLFNIMGIYLRCSPADEPVYQFLDRKRVEGKPFYIYMTAGANKFLRRYYAKVRDYLATLDGLPPVDMDSTGLSQPD

SEQ ID NO: 17971 - protein, 343 aa, unidentified
  source 1..343: note = protein_9d04899
  REGION 2..153: note = RuvC_domain
  SITE 57: note = RuvC_P2
  SITE 92: note = RuvC_P3
  SITE 94: note = RuvC_P4
  SITE 97: note = RuvC_P5
  REGION 215..302: note = Tnp_domain
  SITE 223: note = Tnp_P1
  SITE 253: note = Tnp_P2
  SITE 261: note = Tnp_P3
  SITE 262: note = Tnp_P4
  SITE 274: note = Tnp_P5
MGKTTTDLDTVAATGLDLAKHVFQVDAAGRVVVTRVLRRKHVLAFFERLPSCLVGMEACGSAHHWARELMKLGHDVRLMPPAYVKAYVRRQKNDAADAAAICEAVTRPSMRFVPVRSVENQAALMHHKVRELLVAQRTQLLNALRSHLAEIGTIAAQGPNNARALAVLIVEGNDMIPAIVRSALLPLVRRMNELDQEIAQSDRTILVLAKADETARRLISVPGIGPVTASALAASIQDVSAFSGPREFAAFLGLTPRQSSSGGEERLGRVSNMGNRYLRKLLVVGAHAVLFHRTRCSDTLRQWADRLMETKRFKLVAVATANKLARIVFALMRDETHYAGTPA

SEQ ID NO: 17972 - protein, 315 aa, unidentified
  source 1..315: note = protein_06d0c65
  REGION 8..149: note = RuvC_domain
  SITE 11: note = RuvC_P1
  SITE 54: note = RuvC_P2
  SITE 94: note = RuvC_P3
  SITE 96: note = RuvC_P4
  SITE 99: note = RuvC_P5
  REGION 189..273: note = Tnp_domain
  SITE 197: note = Tnp_P1
  SITE 226: note = Tnp_P2
  SITE 234: note = Tnp_P3
  SITE 235: note = Tnp_P4
  SITE 246: note = Tnp_P5
MTHTPWFVGIDVSKAQLDIALRPEGRFAVPNDETGWAHVIERLQALPVVLIVLEATGGLELPLIGALVAARLPVVVANPRQVRDFAKATGKLAKTDSLDAQILAHFADVIRPVPRPLPDAQTHALAALLARRRQLVEMLTAEKNRLGSAPHSLHKRLKVHITWLKREVTQTERALATAIRESPLWRENDDRLRTVPGVGPGLARTLIVGLPELGTLNRKQIAALVGVAPLNHDSGTLRGKRTVWGGRAHVRAALYMAALVASRCNPVIRSFYQRLCEAGKAKKVALTACMRKLLTILNAMVKHRTRWGTQEIVCP

SEQ ID NO: 17973 - protein, 386 aa, unidentified
  source 1..386: note = protein_8485d45
  REGION 4..161: note = RuvC_domain
  SITE 7: note = RuvC_P1
  SITE 59: note = RuvC_P2
  SITE 100: note = RuvC_P3
  SITE 102: note = RuvC_P4
  SITE 105: note = RuvC_P5
  REGION 262..347: note = Tnp_domain
  SITE 269: note = Tnp_P1
  SITE 299: note = Tnp_P2
  SITE 307: note = Tnp_P3
  SITE 308: note = Tnp_P4
  SITE 320: note = Tnp_P5
MYFVGIDISKYKHDCFICTETGEVIEENLSFTNTNEGFNQLLNLLKSLDNNQEIRIGFEATGHYGMNLKLFLEKNNYSFMEFNPALVKRFISTQTLRRTKTDKKDAMHITKYLISADYKPHPKQFYHKYSLKSLSRMREKLVKQRSYYEVQITNTLDIIFPEFKPFFNNTFSKTSLYILKKYKTPDKIKNMKDFDSIRKVSRGKFTSANFIKLKELAKNSIGVSNDIFETELESLLILLSQIEVEINKLENKIESIIKELNPPILSIKGIGTISCAGIISEFGDFSRFKSADACVAFAGIEPSISQSGTESYTGHMVKHGSGHLRYFLMNAADYVFMHEPIFTEFYYKKRSEGKSHRVALTHVAKKLVRIIYKLESENITFNSNIN

SEQ ID NO: 17974 - protein, 400 aa, unidentified
  source 1..400: note = protein_02cbbf8
  REGION 4..160: note = RuvC_domain
  SITE 7: note = RuvC_P1
  SITE 57: note = RuvC_P2
  SITE 97: note = RuvC_P3
  SITE 99: note = RuvC_P4
  SITE 102: note = RuvC_P5
  REGION 274..361: note = Tnp_domain
  SITE 282: note = Tnp_P1
  SITE 312: note = Tnp_P2
  SITE 320: note = Tnp_P3
  SITE 321: note = Tnp_P4
  SITE 334: note = Tnp_P5
MNAVGIDVSKGKSMVAILRPFGEIILKPVEVKHTNSEIRSLIKAIQSIDGESKVVMEHTGRYYEPIMHELVKAGIFACAVNPKLIKDFDNNSLRKVKSDKADSIKIARYTLDKWSDLKQYSVMDEIRDQLKTMNRQFGFYMKHKTAMKNNLIGLLDQTYPGVNTYFDSLAREDGSQKWVDFSNTYWHVDCVRKMSLKAFTEHYHKWCKRNKYLFSQSKAEEIYGKAKEIVPVLPKDELTKKIIHQAIEQLNTASKTVEDLRTLMNETASKLPEYDIVMAMKGVGPSLGPQLMAEIGDVTRFTHKSAITAFAGVDPGVNESGTYNQKSVPVTKRGSAHLRKALFQVMDILIKTHPEDDEVYKFLDKKRSEGKPYFVYMTAGANKFLRIYYGRVKEYMSNLP

SEQ ID NO: 17975 - protein, 391 aa, unidentified
  source 1..391: note = protein_2554cda
  REGION 4..161: note = RuvC_domain
  SITE 7: note = RuvC_P1
  SITE 60: note = RuvC_P2
  SITE 100: note = RuvC_P3
  SITE 102: note = RuvC_P4
  SITE 105: note = RuvC_P5
  REGION 266..353: note = Tnp_domain
  SITE 274: note = Tnp_P1
  SITE 304: note = Tnp_P2
  SITE 312: note = Tnp_P3
  SITE 313: note = Tnp_P4
  SITE 326: note = Tnp_P5
MYYIGIDIAKRNHEVSIIDADGKILSKSISIANSQKGLDTFNNYLSSFNVTSENSIIGMESTGHYWLNLYSSLVNLNFNVFVINPIQTDAFRKMYIRKTKNDSKDSYIIAQIMRFGEFSSSSISDENIFAIRQLSRYRSSLVDECSNWKRKVITILDQVFPEYSDLFSDTFGVTSKEVLSKYPLPENMLEVSTKELTSLLNKASKGRFGIGKAQEIKEYATKSFGISFAKETFSFQIKQIINQISFIESQLKELEKEITNILKTLNSEITTITGIGDILGASILGEIGDISRFEKASQLVAFAGLDVAINQSGEFTGTEMKITKRGSPYLRRSIWIAATIACFKDPALSVYYKKLIDRGKKHLTAVGAVARKMCNIIFSVLKNKKPYTPNI

SEQ ID NO: 17976 - protein, 395 aa, unidentified
  source 1..395: note = protein_1896d27
  REGION 5..156: note = RuvC_domain
  SITE 8: note = RuvC_P1
  SITE 57: note = RuvC_P2
  SITE 96: note = RuvC_P3
  SITE 98: note = RuvC_P4
  SITE 101: note = RuvC_P5
  REGION 266..351: note = Tnp_domain
  SITE 274: note = Tnp_P1
  SITE 304: note = Tnp_P2
  SITE 312: note = Tnp_P3
  SITE 313: note = Tnp_P4
  SITE 325: note = Tnp_P5
MKHILSFDVAKGKSVYCFIDEFKNIIIEPTLIEHNKNKFDNLLNLVKDYSNLIVVMESTSIYHLPVENYFRSKGIETIVMNPKLVKQFKDTLNKSKTDKLDCFKIARCYLGTIDNFYQKQDEYFMYNPLARQYWSLVEGQTRLKNRYKQLIEIIFPEFSLIFNDLYDDLALDFIHDFPHPTFFINRRIDYLMNYLKEKNGTTQAYRFKNKVLKMKELASNSLCYVAFDSFQVQNLVQVIEMIQFHKTEINKIKNQLINEMKNKNLFKIINSIPGFGEFSTALFLAEVGDITRFDDKYQFISFIGIDSVTSQSGVSAYHGPISKTGCKFGRTILFNIVTTIIQISAHADKTNPIYLFFRKKQSEGKHHYKCIIACETKLCKIIYKLCSSNCLYENK

SEQ ID NO: 17977 - protein, 387 aa, unidentified
  source 1..387: note = protein_acef0d3
  REGION 6..159: note = RuvC_domain
  SITE 9: note = RuvC_P1
  SITE 57: note = RuvC_P2
  SITE 98: note = RuvC_P3
  SITE 100: note = RuvC_P4
  SITE 103: note = RuvC_P5
  REGION 221..306: note = Tnp_domain
  SITE 229: note = Tnp_P1
  SITE 259: note = Tnp_P2
  SITE 267: note = Tnp_P3
  SITE 268: note = Tnp_P4
  SITE 279: note = Tnp_P5
MGQVIIGMDPHKRSATIEVINDREKVLAQGRFSTDRDGYHSMLKLSRQYKDRIWAVEGCNGIGKHIAQRLVADGETVVDVPAKLSARARVFDTGQGRKTDPVDAHSVAVAALRSKGLRQVDVDDVTVALRLLVDCRDGLGRAHTDLLNRIHKLLLELLPGGAKKYLSAAQARALLNTIRPRDLVGRTRRRLASELITELVQVDKKTKAADKELRELVEATGSSLQDLHGIGPSGAARLIGDVADISRFASRGHFASWNGTAPLDASSGDQNRHRLSRAGNRRINRTLHIMAVVQLRNDTQGRAYYRRKLAAGKTPVEALRALKRRLSDVVYRQMVNDAIRVETGPGGHVGAALKSSAADLIPMIDTSDKSLPGPAEPQPRTQLLAVS

SEQ ID NO: 17978 - protein, 345 aa, unidentified
  source 1..345: note = protein_f07e8f3
  REGION 6..149: note = RuvC_domain
  SITE 9: note = RuvC_P1
  SITE 54: note = RuvC_P2
  SITE 89: note = RuvC_P3
  SITE 91: note = RuvC_P4
  SITE 94: note = RuvC_P5
  REGION 213..301: note = Tnp_domain
  SITE 221: note = Tnp_P1
  SITE 251: note = Tnp_P2
  SITE 259: note = Tnp_P3
  SITE 260: note = Tnp_P4
  SITE 272: note = Tnp_P5
MNITRVGVDIAKSVFHVHGVDRHDQVQWRGKYSRDKWLDAIVNRVPAGAVIGMEACASAHHWGRELQARGYHVTLIAAQFVKPYVKSNKNDRVDAEAICEAMGRPSMRFVTVKSVAQQDVQAAHRIRSELVHQRTAKANQIRGLVGEYGLVAPVGIGQLRAALPRWLEDAENGLTDDFRVLLADLAEDLRYLSDRIATVTERIEHHAQTDPVAKRLLSLRGVGTLTASALAGALGDAQAFKRGRDFAASLGLTPRQHSTGGRDRLLGISKRGDSYLRTLLVHGARAVLRCSDGKEDNLSHWVRKLAERKHANVAIVALANKTARIAWAITRHDSDYDPELAAHVA

SEQ ID NO: 17979 - protein, 339 aa, unidentified
  source 1..339: note = protein_0ea48f2
  REGION 6..147: note = RuvC_domain
  SITE 9: note = RuvC_P1
  SITE 52: note = RuvC_P2
  SITE 87: note = RuvC_P3
  SITE 89: note = RuvC_P4
  SITE 92: note = RuvC_P5
  REGION 210..298: note = Tnp_domain
  SITE 218: note = Tnp_P1
  SITE 248: note = Tnp_P2
  SITE 256: note = Tnp_P3
  SITE 257: note = Tnp_P4
  SITE 269: note = Tnp_P5
MKYTPVGVDIAKHLIQVHLINEHTGEVVDKQVSRQGFMTFFSNREPCLIGMEACGGSQYWARELTKLGHKVRLMQGRFVKAFVMGNKNDMMDARAIWMAVQQPGRKIAVKTEEQQSVLVLHRSRRQLVKFRTAQINALHGTLLEFGETIHKGRAAMDRELPAALERLKTKLPPYLTNVLEDQYSRLIELGTLIDGLEKQLISVARQNETCKRLMEIPGVGPLIATAAVATMGEASAFKSGREFAAYVGLVPKQTGSGGKVRLLGISKRGDTYLRTLFIHGARAASLCAKEPGPWITELKKRRPTGVAIVAIANKLARTLWAIAAHGREYDKNHVSIRPY

SEQ ID NO: 17980 - protein, 323 aa, unidentified
  source 1..323: note = protein_8daba93
  REGION 9..151: note = RuvC_domain
  SITE 12: note = RuvC_P1
  SITE 56: note = RuvC_P2
  SITE 96: note = RuvC_P3
  SITE 98: note = RuvC_P4
  SITE 101: note = RuvC_P5
  REGION 191..276: note = Tnp_domain
  SITE 199: note = Tnp_P1
  SITE 228: note = Tnp_P2
  SITE 236: note = Tnp_P3
  SITE 237: note = Tnp_P4
  SITE 248: note = Tnp_P5
MAKHTTICAGIDTGKRKLDVALEGNREQLQVENTSEGHAVLLAWLRRHRVKRVGIEASGGYEQPVVVELRRQRFVVVVFQPAQVRAYAKFHLQRAKNDKIDAALIAACTAAVRKIHAAPDPRLLPFAEQLTMIDQINEDTARLKNRIESCRNARIKKLWNEDIARLEKREKAELKALVASIRKHPDLAKRLGLINSVHGIGLPTAVAILVRLPEIGQITREQAVALAGLAPYDDDSGEQVGVRHIEGGRKRLRRALYTASLAASFRWNQQLIQLYQRLTAAGKEHKRALVACARKMLIFANTVVARGKPWQDCPPEKAALTTG

SEQ ID NO: 17981 - protein, 333 aa, unidentified
  source 1..333: note = protein_387488a
  REGION 5..151: note = RuvC_domain
  SITE 8: note = RuvC_P1
  SITE 55: note = RuvC_P2
  SITE 95: note = RuvC_P3
  SITE 97: note = RuvC_P4
  SITE 100: note = RuvC_P5
  REGION 196..283: note = Tnp_domain
  SITE 204: note = Tnp_P1
  SITE 234: note = Tnp_P2
  SITE 242: note = Tnp_P3
  SITE 243: note = Tnp_P4
  SITE 256: note = Tnp_P5
MSVFVGIDVGASCVDVVSCGEGKFSKPKQYKQSPDGHNSLVSAMMKLQPKCIVMEATGVYYFDLAVALAEAGLPVAVINPKSTKHFANIKLQNSKTDSIDAALLAEYGMRMEPRLWTSPDQHRQAIRSLGRQINRLTGSRVQAKNRLHAMKATQSTPTLLVEDEQEAIEMLDRRIDRLKQAAMELLEQSAELKRLYTHFCAAKGIAEATALALLAELCVLPEHLKSAQVSRHAGLDIRLHQSGSSVHQASRISKAGNVYIRSALYMPAMSAVRFDPNAKAFYEALVARGKTKLQALVAVMRKYLTGLWACIKTDTPFDSSLLFSDCHAKNACV

SEQ ID NO: 17982 - protein, 424 aa, unidentified
  source 1..424: note = protein_412ed2b
  REGION 34..194: note = RuvC_domain
  SITE 37: note = RuvC_P1
  SITE 89: note = RuvC_P2
  SITE 129: note = RuvC_P3
  SITE 131: note = RuvC_P4
  SITE 134: note = RuvC_P5
  REGION 297..384: note = Tnp_domain
  SITE 305: note = Tnp_P1
  SITE 335: note = Tnp_P2
  SITE 343: note = Tnp_P3
  SITE 344: note = Tnp_P4
  SITE 357: note = Tnp_P5
MSLEFVFCTRFYEISAVDITLHILRKECMIMILVGIDIGKNQHTFSIIDKNTGEILSNPSFFPNNREGFLFLIKKLNTYSKSDLLIGMEDTGHYHFALLKHLLDSRYTVALINPTTTDLTRKLQGGITKNDPLDSLTICDVIGSNQHNKPYRITKVNRFDLYEQKQLTRHHHNLKEELNTYKNRLQKCIDIVFPEFNSLFRSKYGIVYMNVLKTFSSAEKIANSDIRTIRKCFEYNKRGKRISLSAEQLKAAAKTSIGMPSVAEEIQIRHLVCQIEMIEEQLSEIDKKIEEFSLQNNSPILSIPGISHFSGTSILAELGDICNYTKAAQIIKFAGVAPYHYESSQFNAQHTAITKKGSRYLRKTLYQIIFPVIYHNKVFNVYYNKKLAEGKGHRCAQGHCVRKLLRIIYHLLSTGQIFDPALLR

SEQ ID NO: 17983 - protein, 343 aa, unidentified
  source 1..343: note = protein_8b2de06
  REGION 9..150: note = RuvC_domain
  SITE 12: note = RuvC_P1
  SITE 55: note = RuvC_P2
  SITE 90: note = RuvC_P3
  SITE 92: note = RuvC_P4
  SITE 95: note = RuvC_P5
  REGION 213..310: note = Tnp_domain
  SITE 221: note = Tnp_P1
  SITE 251: note = Tnp_P2
  SITE 259: note = Tnp_P3
  SITE 260: note = Tnp_P4
  SITE 272: note = Tnp_P5
MANPAIEVLGVDLGKNSCSVAGLDSAGAVVMRCRKTRTGLIKFVSQLPPCIVAMEACCGAHFLARTFQSHGHSIRLMPPEYVQPYVKAQKTDDRDAEAIAEAATRPTMRLVTPKNEAQLDLQILHRARARLVAERTRLTNQLRAMLLERGIILPKRRGPLIKRLGELLASDPPISARMMCLLHDLRDEWAELDRRIGAYDDELVAMTREDDLARRLLTVPGIGVINATALVAAVGDASAFAKARDLAAWLGLTPRQHSTGGKTKMLGISKRGNRYLRTQLIHGARAAMRHFAEQQTAMGAWLRNLLVRAHPNVVVVALAAKLARVAWAVLRRGNAYRSQANLA

SEQ ID NO: 17984 - protein, 372 aa, unidentified
  source 1..372: note = protein_17fbc0e
  REGION 5..164: note = RuvC_domain
  SITE 8: note = RuvC_P1
  SITE 61: note = RuvC_P2
  SITE 102: note = RuvC_P3
  SITE 104: note = RuvC_P4
  SITE 107: note = RuvC_P5
  REGION 267..354: note = Tnp_domain
  SITE 275: note = Tnp_P1
  SITE 305: note = Tnp_P2
  SITE 313: note = Tnp_P3
  SITE 314: note = Tnp_P4
  SITE 327: note = Tnp_P5
MVVSVGIDVAKDKHDCFIQSSEGEVLADVFTISNNMDGFNILLEKIRTCTSPQDKIKVGLEATGHYSYNLLGFLLDNGLATYVLNPLRTNLYRKSLSLRKTKTDRVDARTIAAMLLSDAGLKPYTDTAYHNEELKSLTRYRFDKVKERAKLKSSVSRLVCILFPELEKLVPMLHMASVYALLEEFPGAKQIAGAHLTRLRSLLANASKGRYKRDMAVSIRDAARNSIGSKMPAKSLELQHTIRLIRELDAEIDEIEAEIETMMEEIHSPITTIPGIGCRMGAMILAEAGDFSRFDSPDKLLAYAGMSPSTYQSGQLKNCYPHMEKRGSRYLRYALFNATKYVCLWDPTFAAYLAKKRAEGKHYNVAISHAAK

SEQ ID NO: 17985 - protein, 331 aa, unidentified
  source 1..331: note = protein_35479a1
  REGION 7..161: note = RuvC_domain
  SITE 10: note = RuvC_P1
  SITE 62: note = RuvC_P2
  SITE 100: note = RuvC_P3
  SITE 102: note = RuvC_P4
  SITE 105: note = RuvC_P5
  REGION 205..292: note = Tnp_domain
  SITE 213: note = Tnp_P1
  SITE 243: note = Tnp_P2
  SITE 251: note = Tnp_P3
  SITE 252: note = Tnp_P4
  SITE 265: note = Tnp_P5
MNYSHFVGLDVGKNTFDASLMSAEEKELSHKSFDNTPEGIQSMLAWIDNYQLSLSEVLFCAENMGSYVTELSVSSVTMGFSLTLVCPLTIKKSIGLQRGKNDRIDAKRIANYAVLHYRKLKLYKLPDKDLVRLRGWIIIRDNLVKQKVSGTKLLETFSQMAKLADVTESISFLEEQLDSVKEKILKVEEAMEQLIAANNSLYTNYLLLRSIKGIGIINAIVLLCVTDNFQRFDNPRKLACYCGVAPFEHTSGISIRGKTQTSPLASKEIKVYLTRAAITAISWDPQMKAFYQRKIAEGKHKAPVINAVRAKIIARAFAVIRRQTPFVTLVA

SEQ ID NO: 17986 - protein, 391 aa, unidentified
  source 1..391: note = protein_80121d8
  REGION 4..163: note = RuvC_domain
  SITE 7: note = RuvC_P1
  SITE 60: note = RuvC_P2
  SITE 101: note = RuvC_P3
  SITE 103: note = RuvC_P4
  SITE 106: note = RuvC_P5
  REGION 266..353: note = Tnp_domain
  SITE 274: note = Tnp_P1
  SITE 304: note = Tnp_P2
  SITE 312: note = Tnp_P3
  SITE 313: note = Tnp_P4
  SITE 326: note = Tnp_P5
MILVGIDVAKDKHDCFIMNSDGEILAKAFTFSNNLEGFNFLYEKIKSVSKPKDKIKVGLEATGHYGYNLLGFLLNKGLPTFVINPLHTNLFRKSLTLRKTKTDKVDSKTIAMMLMSDVALKPYTDTSYHNEELKSLSRYRFTKVQERAKLKTSVSRLVQILFPELEKLVSTLHMISIYSLLEEYPGASYIASAHLTKLTNLLNEASHGHYDRNTAIKFREAAKNSIGSVMPAKSLELKHTIKLIRELTIEINEIDDEIKKIMDSMASPITTIPGIGYSMGAMIISEIGDFNRFSSPDKVLAYAGLSPSTYQSGKLDNCYSHMEKRGSRYLRYALFTVTQKVCIWDNTFAEYLSKKRAEGKHYYVAISHAVKKLVRVIFHLERTRQAYLKAA

SEQ ID NO: 17987 - protein, 341 aa, unidentified
  source 1..341: note = protein_4dbcec0
  REGION 6..147: note = RuvC_domain
  SITE 9: note = RuvC_P1
  SITE 52: note = RuvC_P2
  SITE 87: note = RuvC_P3
  SITE 89: note = RuvC_P4
  SITE 92: note = RuvC_P5
  REGION 211..302: note = Tnp_domain
  SITE 219: note = Tnp_P1
  SITE 249: note = Tnp_P2
  SITE 257: note = Tnp_P3
  SITE 258: note = Tnp_P4
  SITE 270: note = Tnp_P5
MQIALLGIDLGKNSCSVAGIDASGEVLLRRRLNRNSIPKLAARFPGCIIAMEACCGAHHLGRVLRKQGHVVRLMSPEYVRPYVKAQKNDDRDAEAIAEAATRPTMRFVALKNEEQLDLQSLHRARDRLVGERTSLINQLRAILLERGITIPQGRQKLESMLPQLIENSGDLLSDRIRRLLEEMWQELRDLTRRIRSFDDEFTAFARNDASCQRLESIPGIGSLNATAFVAAIDKAQAFARGRDLAAWLGLVPRQMTTGGKPRLLGISKRGNAYLRRMLIHGARAAMPHLARTQTATGSWLRRLIARAHPNVVVVALAAKMARIIWTVLQKRVAFEHAAAAL

SEQ ID NO: 17988 - protein, 345 aa, unidentified
  source 1..345: note = protein_9bdcc32
  REGION 6..147: note = RuvC_domain
  SITE 9: note = RuvC_P1
  SITE 52: note = RuvC_P2
  SITE 87: note = RuvC_P3
  SITE 89: note = RuvC_P4
  SITE 92: note = RuvC_P5
  REGION 211..297: note = Tnp_domain
  SITE 219: note = Tnp_P1
  SITE 249: note = Tnp_P2
  SITE 257: note = Tnp_P3
  SITE 258: note = Tnp_P4
  SITE 270: note = Tnp_P5
MKIKTIGIDLAKDVFQLHGVDEFGNMVLRKQVKRAQLAIFFSNLPVCLVGMEACSGAHYWARKLQSMGHTVRLMAPQFVKPYVKTNKSDAADPEAICEAVTRPNMRYVPVKNIEQQAVLALHTVRQGFIKARTAQANQIRGLLSEFGLIIPKGIGYIVSRVPDILEDATNELLGVFRNLMQRLFDHFKEVSMKVKALNMEIQQWHRNNEASTRLAQIPGIGPISATALVASLSNAKNFDNGRQVAAWLGLVPRQHSTGGKTNLLGMSKRGDSYLRTLLIHGARSVIYRASLKKDNINSWVNILVSRRNKNIAAVALANKNIRIVWALLAHDREFRPDYVSINSCA

SEQ ID NO: 17989 - protein, 394 aa, unidentified
  source 1..394: note = protein_0d71c32
  REGION 4..164: note = RuvC_domain
  SITE 7: note = RuvC_P1
  SITE 59: note = RuvC_P2
  SITE 99: note = RuvC_P3
  SITE 101: note = RuvC_P4
  SITE 104: note = RuvC_P5
  REGION 267..354: note = Tnp_domain
  SITE 275: note = Tnp_P1
  SITE 305: note = Tnp_P2
  SITE 313: note = Tnp_P3
  SITE 314: note = Tnp_P4
  SITE 327: note = Tnp_P5
MILVGIDIGKKSHMFCVMDQSTGDILVDPLSFKNNKEGFDQLIQAIKPYSKENILIGMEDTGHYHFNLLKYLLDAKYTVALINPITTDLTRKMQLSSTKDDDLDTLTICDVLASGPRRKGYRISKFDSFDLYEQKRLTREHHDLKEQKNVYTNKLQKCIDIVFPEFNDLFKSKYGTVYMNILKTFGSADAIAHANIRSIRKCFETYTKGRKISLTAEQLKEAAKNSIGFPSTAETIEIKHLIEIIEMLDQQIEEIDKKIEEFAHENDSPILSIPGISYFSGTSILAELGDLHNYSKASQVIKFAGVSPSKYKSSQFEAQHTAITKKGSRYLRKTLYQVILPVIKFNPVFETFYKLKRSQGKSHRCAQGHCVRKLLRIIYHLETTNQKFDPSMIR

SEQ ID NO: 17990 - protein, 326 aa, unidentified
  source 1..326: note = protein_e2db69c
  REGION 5..157: note = RuvC_domain
  SITE 8: note = RuvC_P1
  SITE 62: note = RuvC_P2
  SITE 102: note = RuvC_P3
  SITE 104: note = RuvC_P4
  SITE 107: note = RuvC_P5
  REGION 202..287: note = Tnp_domain
  SITE 210: note = Tnp_P1
  SITE 239: note = Tnp_P2
  SITE 247: note = Tnp_P3
  SITE 248: note = Tnp_P4
  SITE 260: note = Tnp_P5
MSFDIGIDVAKDKIDCLWLRDPVNLKVKTKVLPNTPKGFKSLKLWIEKNISTEFGSVFVSLEATGVYHEALSYALYDMGLQVSVVNPAFIRDFAKGLGVRGKTDKKDSMVLARYSNMVRPSLWVPEPKEIRALKALLTRLAGLEKDLQRESNRLEKAEISDASTGVLGSIKMMICHLESEVKRVEKMIDDHIDKNPTLKKDRAILRSIPGVGDVLSREMLSVLHSRKFVRASQAAAFVGVVPKLWESGKMKGRTALCKNGPGRLRAKLYMAAVAAIQHNSDIKIQHKRLLQAGKTKMQALGAAMRKLVQICFGVLKHQCEYRPQTN

SEQ ID NO: 17991 - protein, 293 aa, unidentified
  source 1..293: note = protein_c0aa432
  REGION 10..98: note = RuvC_domain
  SITE 37: note = RuvC_P3
  SITE 39: note = RuvC_P4
  SITE 42: note = RuvC_P5
  REGION 161..255: note = Tnp_domain
  SITE 169: note = Tnp_P1
  SITE 199: note = Tnp_P2
  SITE 207: note = Tnp_P3
  SITE 208: note = Tnp_P4
  SITE 221: note = Tnp_P5
MIAQSNQIRGLLLEFGIVIPQGINSLRRNLRFQTKQKTDKNDAIAIATAAPLEHIQSIRIHSVEEQAMQSTERARNLALTHVIAQSNQIRGLLLEFGIVIPQGINSLRRNLPMILEDAENDLPDSFRQIVMSLWEHLEVQIEHADAITSSLKGTIESNQVCQKLMKLEGVGPIGALGLSLKLGKGEHYSNGRNAAASIGLTPKQHSSGGKEHIGHISKQCADKRLRATLYQGALSVVSLVINRPPKTNKEQWLKALIARRGKKVAAIALANKTVRTAYAILKSDSEYEPQVIV

SEQ ID NO: 17992 - protein, 376 aa, unidentified
  source 1..376: note = protein_a95a110
  REGION 7..147: note = RuvC_domain
  SITE 10: note = RuvC_P1
  SITE 53: note = RuvC_P2
  SITE 88: note = RuvC_P3
  SITE 90: note = RuvC_P4
  SITE 93: note = RuvC_P5
  REGION 210..299: note = Tnp_domain
  SITE 218: note = Tnp_P1
  SITE 248: note = Tnp_P2
  SITE 256: note = Tnp_P3
  SITE 257: note = Tnp_P4
  SITE 269: note = Tnp_P5
MTKIIRIGVDTSKSVFVLHGVDAAERVVLRKRLRRRQVLELFAQLEPTKVGLEACGAAHYWARELQGLGHEVVLLPPQYVKPYVKRNKNDAADAEAICEAMSRPTMRFVPVKTAEQQAALMLVGTRDALVRRRTQLTNAIRGYAAEFGLIAAKGLDKIEPLLARIAAHAPLPGLAQELFAAHAKEYARLQAQIREIEAKLRAWHKHNELSRRLAEVPGIGPIGATLAVMKVPNPKAFRCGRDFSAWIGLTPKDHSTAGKTRLGVITRAGDEALRSALVAGATAVIQHVKQGKGHPSPWLIELVRRKPAKLAAVALANKNARIAWKLMVSTERYNPAHGRAVAASGGRGPALRGGSAPRPPLAPHDKSREITATTRA

SEQ ID NO: 17993 - protein, 405 aa, unidentified
  source 1..405: note = protein_0c0b84d
  REGION 6..164: note = RuvC_domain
  SITE 9: note = RuvC_P1
  SITE 59: note = RuvC_P2
  SITE 101: note = RuvC_P3
  SITE 103: note = RuvC_P4
  SITE 106: note = RuvC_P5
  REGION 278..365: note = Tnp_domain
  SITE 286: note = Tnp_P1
  SITE 316: note = Tnp_P2
  SITE 324: note = Tnp_P3
  SITE 325: note = Tnp_P4
  SITE 338: note = Tnp_P5
MNMNAVGIDISKRKSMVSILRPGGEVVAKPFEISHLSGDVQSLIDRIHALDGESRIVMECTGRYHEPIARELVAAGLFVSAINPQLIHDYQDGDSSLRKVKSDKADSLKIARYTLDRWEKLKQYGLMDEIRNQLKTMNRQFDFYMKHKTAMKNNLIALLDQSYPGANTYFDSPAREDGSQKWVDFTATYWHVDCVRKMSLNAFVEHYQKWCRRKKYNFSRAKAEEIHGTAKELVPVLPKDDFTKQILKRATEQLYAVSKTVEQLRTLMNETAATLPEYSVVMAMKGVGPSLGPQLMAEIGDVARFTHRNAITAFAGVDPGVNESGDYSQKSVHASKHGSPVLRKTLFQIMDVLIKTKPQDDPVYLFMDKKRAQGKPYYVYMTAGANKFLRIYYGRVKEYLASLPQ

SEQ ID NO: 17994 - protein, 379 aa, unidentified
  source 1..379: note = protein_2325626
  REGION 9..157: note = RuvC_domain
  SITE 12: note = RuvC_P1
  SITE 63: note = RuvC_P2
  SITE 97: note = RuvC_P3
  SITE 99: note = RuvC_P4
  SITE 102: note = RuvC_P5
  REGION 253..340: note = Tnp_domain
  SITE 261: note = Tnp_P1
  SITE 292: note = Tnp_P2
  SITE 300: note = Tnp_P3
  SITE 301: note = Tnp_P4
  SITE 312: note = Tnp_P5
MEVFIEKCAGLDVHSETIVACVIKGSREDDVYTETETFPTLTKDLFRLLKWLENHEVTHIAMESTGVYWKPVFNILEDFFDITLANAQRIKNVPGRKTDVSDAEWIAKLLRHGLIEKSFVPPVDIRELRDLTRLRKKWIGHLTSEKNRIQKVLESSNVKLSTVISDVFGVSGRKLLNRLIEQGYVDEADVEKDIHGKLVPKKQRITDSLFGTINEHQIFLIRQSWQHIEYLESLILEIEERVDQLLINYHDELQLLITIPGISKDTAAVIIAEIGVDMGQFPTSQHLASWAGVSPGNHESAGKRKSTRTVKGNPHIKSAMCEAAWAVSRSRNRWLANKYWSLAARRGKKKALVAISHRMLRVIYSMLLNKEPYKEPQLV

SEQ ID NO: 17995 - protein, 310 aa, unidentified
  source 1..310: note = protein_77c9e5d
  REGION 5..149: note = RuvC_domain
  SITE 8: note = RuvC_P1
  SITE 52: note = RuvC_P2
  SITE 91: note = RuvC_P3
  SITE 93: note = RuvC_P4
  SITE 96: note = RuvC_P5
  REGION 187..271: note = Tnp_domain
  SITE 195: note = Tnp_P1
  SITE 224: note = Tnp_P2
  SITE 232: note = Tnp_P3
  SITE 233: note = Tnp_P4
  SITE 244: note = Tnp_P5
MKDSIGIDISKATLDVHRLKTGETAQFANSPTGLRALHRWIGTQMPDIVVYEATGAYHRALECSLSGKLPLVKVNPLQARYFAKACGTRAKTDTLDAQMLATMGKSLNLSPDMPIDKDQHVLKELQVARKALIKERTRLGNREKTQTFPLLKRQSKARLDQIARQLMQLEEALLALLKQSPKKARAFDILCSIPGLGPVTAMTILVECPEIGTMTRKQIASLVGLAPMVRQSGQWRGKAFIQGGRKFLRDALYMPALVAARYNPDLRQKYQTMTKAQKPAKVALTCLMRKLIELANALIKQDRKWLPKTA

SEQ ID NO: 17996 - protein, 341 aa, unidentified
  source 1..341: note = protein_d25e521
  REGION 6..148: note = RuvC_domain
  SITE 9: note = RuvC_P1
  SITE 52: note = RuvC_P2
  SITE 87: note = RuvC_P3
  SITE 89: note = RuvC_P4
  SITE 92: note = RuvC_P5
  REGION 211..295: note = Tnp_domain
  SITE 219: note = Tnp_P1
  SITE 249: note = Tnp_P2
  SITE 257: note = Tnp_P3
  SITE 258: note = Tnp_P4
  SITE 270: note = Tnp_P5
MNIKRVGIDLAKQVFQVHGVDNHDKAVLRKQLKRGQFLSFFAELPPCLIGLEACGGAHHWARELQKLGHTVKLMAPQFVKPYVKSNKNDANDAEAICEAVGRPTMRFVSIKTVAQQDLQAIHRIRSELIKRRTAKVNQIRGLLAEYGLVVGQQVNTLRRALPGLLEDAENGLSFDFRALLEELRQDLIQLDKRTLEIDKKIHTLANADPVSKRLQGIPGIGPIIATAIICAVGEGKQFKRGRDMAAWLGLTPGQHSSGGKDRLLGMSKRGDPYLRTLLIQGAKSSLNAAGKKTDPCSLWLNNLCVRRHKNVAVVALANKNARIAWALLRNETHYLPEGITI

SEQ ID NO: 17997 - protein, 345 aa, unidentified
  source 1..345: note = protein_ebaf85d
  REGION 6..147: note = RuvC_domain
  SITE 9: note = RuvC_P1
  SITE 52: note = RuvC_P2
  SITE 87: note = RuvC_P3
  SITE 89: note = RuvC_P4
  SITE 92: note = RuvC_P5
  REGION 211..297: note = Tnp_domain
  SITE 219: note = Tnp_P1
  SITE 249: note = Tnp_P2
  SITE 257: note = Tnp_P3
  SITE 258: note = Tnp_P4
  SITE 270: note = Tnp_P5
MQITTVGIDLAKNVFQIHGADNRGKAVLRKRLRRDQFAAFFGNLPPCLVGMEACGGAHHWARRLETFGHTVKLIAPQFVKPYVKGNKTDMADAEAICEAVVRPSMRFVSIKNIEQQSVLALHRVRQGFVKARTAQANQIRGLLAEFGLVVPQGILCIPSRVPGLLEDAENGLPDRMRHLISQLLEHFKVLHGRVIEIEAQIKLWHRSSERSRRLEKVPGIGPLTASALAAALGNARNFDNGRQLAAWLGLVPRQHSSGGKPTLLGMSKRGDAYLRTLLIHGARSVIYRARQRADEKSWLFNLVERRNANVAAVALANKTARIVWALLAHEREFQADHAAAAAAAQ

SEQ ID NO: 17998 - protein, 364 aa, unidentified
  source 1..364: note = protein_3981ade
  REGION 7..156: note = RuvC_domain
  SITE 10: note = RuvC_P1
  SITE 60: note = RuvC_P2
  SITE 96: note = RuvC_P3
  SITE 98: note = RuvC_P4
  SITE 101: note = RuvC_P5
  REGION 221..298: note = Tnp_domain
  SITE 229: note = Tnp_P1
  SITE 259: note = Tnp_P2
  SITE 267: note = Tnp_P3
  SITE 268: note = Tnp_P4
  SITE 280: note = Tnp_P5
MKRKVYVGMDVHKETIQIAILPSNTKALVKEQQIKHEEGQIKKFIQKLKSEGTEIHCCYEAGVTGYPLYRYLKTLGVNCIIAAPGKIPRQSSDKIKTDKRDAIKLARLLRSGELESIHVPSEEDEAVRDYLRSRDSLRLDLGRNRQRLMKFLLRKGIKYSTTKYWTASHYKWLNNLHFENEILQATFNDYYSRVRVQEENLKAMDQKIREIAESEPYREKVGILRCFRGVDYLTAMFLLSEVNDFKRFKTAGSFMSFLGLVPGEYSSGSKRKQTSITKTGSPRLRRILVEAAWQHRFPGTGSKVVVARRVGQSALVVSLAEKASLRLHKKFKSMQLRGKTPQVMITAVSRELSGFLWAAMNLVA

SEQ ID NO: 17999 - protein, 404 aa, unidentified
  source 1..404: note = protein_b8c8034
  REGION 18..172: note = RuvC_domain
  SITE 21: note = RuvC_P1
  SITE 70: note = RuvC_P2
  SITE 110: note = RuvC_P3
  SITE 112: note = RuvC_P4
  SITE 115: note = RuvC_P5
  REGION 277..360: note = Tnp_domain
  SITE 285: note = Tnp_P1
  SITE 316: note = Tnp_P2
  SITE 324: note = Tnp_P3
  SITE 325: note = Tnp_P4
  SITE 333: note = Tnp_P5
MVHDSKQPVERRVTAIWAGIDAGKTHHHAVVIDDTGKRLLSRRVANDETELLQLMADVLALGEVTAWGIDLADGGAALVIAILLNHGQHLLYIPGRSVNRASEGYRGDGKTDAKDAAVIADQARVRRDLMPLRPDDERVTELKVLTGRRRDLSDDKTRTVNRLRGHLTGIFPGLERELDLANVAPLVLLTGYQSPAAIRRTGARRLTTWLRNRKVIRPDQLAAKAVQAAEGQHTAVPGEKITAQVVHSLAKEVMALNEKIAEIDKLIEGRFREHRHAEVISSLPGIGPLLGAEFIAATGGDMDIFENADRLAGFAGVAPAARDSGRISRPKRYSRRLQRVFYTSALISIRCCDESRRFYDRKRAEGKRHVQAVLALARRRVNVPWALLRDGRCYSLTPPVTLAA

SEQ ID NO: 18000 - protein, 391 aa, unidentified
  source 1..391: note = protein_d33b2e8
  REGION 4..163: note = RuvC_domain
  SITE 7: note = RuvC_P1
  SITE 60: note = RuvC_P2
  SITE 101: note = RuvC_P3
  SITE 103: note = RuvC_P4
  SITE 106: note = RuvC_P5
  REGION 266..353: note = Tnp_domain
  SITE 274: note = Tnp_P1
  SITE 304: note = Tnp_P2
  SITE 312: note = Tnp_P3
  SITE 313: note = Tnp_P4
  SITE 326: note = Tnp_P5
MVYVGIDVAKDKHDCFIVSSEGEVLQDVFTIPNNMTGFDDLFQRICSVSGNLDNVKVGLEATGHYSYNILGFLLDKGLTTFVINPLHTNLYRKSLSLRKTKTDKVDARMIASMLMSDVNLKSYTDTAYHNEELKSLTRYRFDKVKERAQLKQSVARLVTILFPELEKLVPTLHMVSVYALLSEYPSAGQVAAANLTHLKALLSDASKGRYGRDKAIEIRDAARCSIGSRMSAKSLELRHTIKLIHELDAEIAEIEAEIKSIMDELQSPILTIPGISYHMGAMIIAEIGDFSRFDSPDKILAYAGLSPSTYQSGQLTSSYSHMEKRGSRYLRYALFNAAKFVCNWDPAFAEYLAKKRSEGKHYNVAISHAAKKLVRLIYALEKSRQSYSLAF

SEQ ID NO: 18001 - protein, 423 aa, unidentified
  source 1..423: note = protein_7aea4c2
  REGION 10..158: note = RuvC_domain
  SITE 13: note = RuvC_P1
  SITE 64: note = RuvC_P2
  SITE 98: note = RuvC_P3
  SITE 100: note = RuvC_P4
  SITE 103: note = RuvC_P5
  REGION 257..345: note = Tnp_domain
  SITE 265: note = Tnp_P1
  SITE 296: note = Tnp_P2
  SITE 304: note = Tnp_P3
  SITE 305: note = Tnp_P4
  SITE 317: note = Tnp_P5
MMKLKYSICCGLDVHKNVIVATIVTTNKDGISEYKQKSFSTINSDIQKFHNWLIENNCYHVCMESTGKYWIPIFNYLENDIDVCLTHPKYVKAIKGKKTDKKDSKWIADLYKFDLVRCSFIPPKDFRQLRELSRYRFKLVCMKSSEKNRIQNCMTVSNVGIASVLSDPFGKTATEIISYLLEHTADSMDEKAVRKLIKKGAKSKADEIIEAIKGYTIETDQAKKLELARGHLEYLDDMITQTEVELYVRIKPYYEFVEFVSTMPGMTELSSTIVLAETGVDMDIFDDAKHLCSWCGLSPANNESAGKKKSVRIAKAGDYLKPMMVQCALAAIKSKKKPYFAIKYGRIKKRRGHKKAIIAIARMMMVCIYHMVSEKKPFTPTDYEELMNPQNHVERVVLNENNVFAYLESLGYDSSKLVKRNDN

SEQ ID NO: 18002 - protein, 270 aa, unidentified
  source 1..270: note = protein_5c24ac3
  REGION 2..81: note = RuvC_domain
  SITE 21: note = RuvC_P3
  SITE 23: note = RuvC_P4
  SITE 26: note = RuvC_P5
  REGION 141..228: note = Tnp_domain
  SITE 149: note = Tnp_P1
  SITE 179: note = Tnp_P2
  SITE 187: note = Tnp_P3
  SITE 188: note = Tnp_P4
  SITE 200: note = Tnp_P5
MPAICIDARHAKAALDMAANKTDANDADGLAHLAEVGFFREVRVKGFDSMLSRTLVAARTKLVRTTLDVANQIRGLMKTFGLIVPRSMGGKFEAHVHFLLADRAALSQIILPLLEAWRALRLQAARLTQQLLAEARRSEQCQLLMSIPGVGAITATAYLTAVEDASNFKRSRSVGAWLGLTTRRYQSGEVDYDGHISRRGDAHVRSLLYEAAVVILTRSQTDSDLRNWAMKLREKVGFKRSAIAVARKLAVIMHAMLRSGELFNKEAANA

SEQ ID NO: 18003 - protein, 400 aa, unidentified
  source 1..400: note = protein_e7b8861
  REGION 9..163: note = RuvC_domain
  SITE 12: note = RuvC_P1
  SITE 61: note = RuvC_P2
  SITE 101: note = RuvC_P3
  SITE 103: note = RuvC_P4
  SITE 106: note = RuvC_P5
  REGION 269..355: note = Tnp_domain
  SITE 277: note = Tnp_P1
  SITE 307: note = Tnp_P2
  SITE 315: note = Tnp_P3
  SITE 316: note = Tnp_P4
  SITE 328: note = Tnp_P5
MGTAATVWAGIDVGKTHHWIEAVDPDGKTLLSRRVLNDQGEIEAVIAAVTALGGQVQWAVDIVGAPSALLLALLTQAHQHVLYASGRVVSVMSSAFTGEGKTDAKDAHVIAETVRLRRDLTVVDKSTDLARNLAVLTAHRADLIADRVRGINRLRDLLTSVFPALEREFDYASCKGALVLLSGYATPARLRRVGRTRLAAWLRARHVRGYAQLAERAVNAAATQQVVLSGQDIAAGVVSDLASSVLALDERIKDVDARIGATFELHPQAATITSMPGFGPFLGAALLAAAGDLRAFPTAGHLAAAAGLVPVPNDSGRRSGNLHRPHRYSRPLRHVFYLSAQTAMMRPGPNRDYYLKKREHGRTHTQAVIALARRRVDVLWALLRDDRLFSEQPPALARAA

SEQ ID NO: 18004 - protein, 345 aa, unidentified
  source 1..345: note = protein_762635b
  REGION 6..148: note = RuvC_domain
  SITE 9: note = RuvC_P1
  SITE 52: note = RuvC_P2
  SITE 87: note = RuvC_P3
  SITE 89: note = RuvC_P4
  SITE 92: note = RuvC_P5
  REGION 211..297: note = Tnp_domain
  SITE 219: note = Tnp_P1
  SITE 249: note = Tnp_P2
  SITE 257: note = Tnp_P3
  SITE 258: note = Tnp_P4
  SITE 270: note = Tnp_P5
MQVTTIGLDLAKNVFQVHGIDDAGIVIVRRSLRRRQVMPFFGKLEPCLIGMEACGTSPFWARELRAMGHEVKLMPPIYVKPYVKRGKTDAADAAAICEAVGRPTMRFVPIKSAEQQSVLALHRTRDLLIGQRTQLVNMIRAQLAEFGIVMAKGIEHALRLVDQLVEGIVPDIPSLACKVMIALAEQIQALQTRIARLEDEIRMGFRGNELAKRLATIPGVGIITASALAASVTDPRRFTSARQFAASLGLTPRADCSGGRERMGRISKMCDRYLRRLLINGMTSQLQVARRKPEVYPWVAGLLANGKSNKLVAVAMANKAARIAWVVMTRGETYRPRRPGVEGTA

SEQ ID NO: 18005 - protein, 341 aa, unidentified
  source 1..341: note = protein_e6ab8bf
  REGION 8..165: note = RuvC_domain
  SITE 11: note = RuvC_P1
  SITE 64: note = RuvC_P2
  SITE 102: note = RuvC_P3
  SITE 104: note = RuvC_P4
  SITE 107: note = RuvC_P5
  REGION 206..292: note = Tnp_domain
  SITE 213: note = Tnp_P1
  SITE 243: note = Tnp_P2
  SITE 251: note = Tnp_P3
  SITE 252: note = Tnp_P4
  SITE 265: note = Tnp_P5
MKDFSFFIGIDISADSFTAHCMNKDFNVIFPAESFENTPEGFEQLSDRIQANSIPIKRLLLCLEATGVYSETLCYVMSSNSYSIALVDPRKVKGATQDSPRKNDSLDATRITEYAARFTDKLTIWKPNNHILEQIKVLLSTREHLTQQKVSNENALKTLQRKYYQTPFANKVYEETISLFKKDIAAIDREIRRLIDKDDSFRHYISLAVSVPGVGLLLGANLLVLTQGFTEPISYKKLSAHFGICPFEKESGSSVRKKPRSRGHGPARIRKLLHLASRSVKTHRPEFRKYFYRKSLEGKPNKLILNNISNKILKIICAVINSKTAYVDNYKSVHPNILKSA

SEQ ID NO: 18006 - protein, 391 aa, unidentified
  source 1..391: note = protein_5882110
  REGION 4..163: note = RuvC_domain
  SITE 7: note = RuvC_P1
  SITE 60: note = RuvC_P2
  SITE 101: note = RuvC_P3
  SITE 103: note = RuvC_P4
  SITE 106: note = RuvC_P5
  REGION 266..353: note = Tnp_domain
  SITE 274: note = Tnp_P1
  SITE 304: note = Tnp_P2
  SITE 312: note = Tnp_P3
  SITE 313: note = Tnp_P4
  SITE 326: note = Tnp_P5
MIYVGIDVSKDKHDCTIVSSEGEVLADVFTVQNNLDGFKLLFQRIKSVAPDLSKVKVGLEATGHYSYNILGFLLDKGLPTYVINPLHTNLFRKSTSLRRTKTDRVDARTIAAMMMSGVVLKSYTAISYHNEELKSLSRYRFDKVRERAKLKQSVSRLVNILFPELETLVPTLHMVSVYSLLAELPGAKQVASCHLTHLTNLLSTASKGHYDRSKAAEFRNAAQRSIGSVMPAKSLELQHTIRLIRELDTEIDDIEAALKQMMDEIASPILSIPGISYRMGAMILAEIGDFSRFSSPDKLLAYAGLSPSTYQSGKLDNAYAHMEKRGSRYLRYALFNATRYVCHWDNSFADYLAKKRSEGKHYNVAISHAAKKLVRLIFALQRSGEPYVPAS

SEQ ID NO: 18007 - protein, 344 aa, unidentified
  source 1..344: note = protein_aefc601
  REGION 7..149: note = RuvC_domain
  SITE 10: note = RuvC_P1
  SITE 53: note = RuvC_P2
  SITE 88: note = RuvC_P3
  SITE 90: note = RuvC_P4
  SITE 93: note = RuvC_P5
  REGION 212..299: note = Tnp_domain
  SITE 220: note = Tnp_P1
  SITE 250: note = Tnp_P2
  SITE 258: note = Tnp_P3
  SITE 259: note = Tnp_P4
  SITE 271: note = Tnp_P5
MGEVITIGLDIAKSVFQVHGVDGLGVVVIRKRVSRAKMLEFFAGLPRYLIGIEACPAAHHWARELQAIGHTVRLMPPSYVKAYLKRSKNDANDAAAICEAVTRPSMRFVAVKTKEQQAALMLHRARQLLVRQRTMLSNAIRGHLSELGIVSAKGRNGTDELLEIIGKDADSRIPLAARSVLKVLASQYVAIGVEIASISKSILAWHRACEPSRRLEEIPGIGPIVATALVAEISDWMAFSSGRGLAAWIGLVPKQHTTGGKDKLGSITKQGNRYLRWLLVNGAMAVIRYAQKHGTKKHPWLGQLMARRPTKVAAVALANKIARITWAIMVRGDRYREPALMPAA

SEQ ID NO: 18008 - protein, 316 aa, unidentified
  source 1..316: note = protein_3c3a454
  REGION 9..157: note = RuvC_domain
  SITE 12: note = RuvC_P1
  SITE 56: note = RuvC_P2
  SITE 95: note = RuvC_P3
  SITE 97: note = RuvC_P4
  SITE 100: note = RuvC_P5
  REGION 191..275: note = Tnp_domain
  SITE 199: note = Tnp_P1
  SITE 228: note = Tnp_P2
  SITE 236: note = Tnp_P3
  SITE 237: note = Tnp_P4
  SITE 248: note = Tnp_P5
MEKMTDCNVGIDVSKSCLDAYRLEDEAAARFDNSPSGFRALMRWLGKRPVARIVYEPAGPYHRALEQALGGKFPLVKVNPLQARRFAQASGTRTKTDELDARALARMGAVLSLAPDDPQSANLHELKDLHVARLGIVKERTRLRNRGQTQTNPVLKRQTAERLRMVERQIKELDKEIDKLISDDQAHARKRDILSSIPGLGPVATGMILTFLPEIGALERKQAGSLAGLVPHNRQSGQWRGKSFISGGRKVLRDALYMPALVAARFNPDLRKKYAQLRADGKPAKVAIAAVMRKLIETANALVKADRFWVPKEACA

SEQ ID NO: 18009 - protein, 390 aa, unidentified
  source 1..390: note = protein_c4706e7
  REGION 4..163: note = RuvC_domain
  SITE 7: note = RuvC_P1
  SITE 60: note = RuvC_P2
  SITE 101: note = RuvC_P3
  SITE 103: note = RuvC_P4
  SITE 106: note = RuvC_P5
  REGION 266..353: note = Tnp_domain
  SITE 274: note = Tnp_P1
  SITE 304: note = Tnp_P2
  SITE 312: note = Tnp_P3
  SITE 313: note = Tnp_P4
  SITE 326: note = Tnp_P5
MIYVGIDVAKDKHDCCILGSDGEILLSPFTIQNTLQGFDDLYEKIWSLTQDLHEIKVGLEATGHYHLNLLRSLLDNGLASYVINPLHTNLFRKGQSLRKTKTDKVDAASIAMMLLTDRTLKPYSDTSYHNEELKSLTRYRFDKVQERAKLKTSVSRLVSILFPELEKLVPSLHMATIYALLSEFPGASFVATAHLTRLKHLLYEASKGHYGRDEAILIRDAAISSVGTVMPSKSMELKHTIYLIEVLTEEITEIETAINSIMETLNSPITTVPGIKNRMGAMILAEIGDFSRFENADQILAYAGLSPSTYQSGQMTSSYAHMEKRGSRYLRYALFNATIYVCNWDPIYNAYLAKKRAEGKHYYVAISHACKKLVRMIYRMQLTGEPYRAA

SEQ ID NO: 18010 - protein, 349 aa, unidentified
  source 1..349: note = protein_7ac83d8
  REGION 12..153: note = RuvC_domain
  SITE 15: note = RuvC_P1
  SITE 58: note = RuvC_P2
  SITE 93: note = RuvC_P3
  SITE 95: note = RuvC_P4
  SITE 98: note = RuvC_P5
  REGION 217..303: note = Tnp_domain
  SITE 225: note = Tnp_P1
  SITE 255: note = Tnp_P2
  SITE 263: note = Tnp_P3
  SITE 264: note = Tnp_P4
  SITE 276: note = Tnp_P5
MSQIAQAAVSVIGIDIGKNSFHVVGQDDRGAIVLRQRWSRGQVETRLANMPRCLVGMEACVGAHYLSRKLKTLGHDARLMPAKYVRPYSKGQKNDFRDAEAIAEAVQRPTMKFVATKTADQLDLQALHRVRERLVSQRTGIINQIRAFLLERGIAVRQGQRFLRAELPRILATSPDVLSPRMARVIEDLASDWRRLDERIEGLSAEIEVLACADSGCERLMSVPGIGPIISSAMVAAIGTGDAFSKGRDFAAWLGLVPRQMSTGDRTILGRISKRGNRYLRVLFVQAAWVVLIRPKSWERHGLKPWIESARKRLHHNVLAIALANKLARIAWSVLARGRGFEASKLHAV

SEQ ID NO: 18011 - protein, 316 aa, unidentified
  source 1..316: note = protein_c10a174
  REGION 1..76: note = RuvC_domain
  SITE 13: note = RuvC_P3
  SITE 15: note = RuvC_P4
  SITE 18: note = RuvC_P5
  REGION 191..279: note = Tnp_domain
  SITE 199: note = Tnp_P1
  SITE 229: note = Tnp_P2
  SITE 237: note = Tnp_P3
  SITE 238: note = Tnp_P4
  SITE 251: note = Tnp_P5
MKEYASRGLRRVKTDKQDSITIANYGIDNWYRLENHQGSDAVYAELKLLGRQYCHYMELHVKTLLELTHMLDYTMPEVKKMFRSWNESSGKDKLSDFVERYWHFDNITAMTKDEFIEDYVSWAAEKKYHQNRSKAAELYDLASDGISTLPANTPSTKMLVLEAVRVLREIDSTLLKIITRMKELAKTLPEYETVRAMGGVGDVLAPKLIAEIGDIRRFHSGKALIAFAGIDAPPYESGQFVGTNRTISKRGSKVLRKIGYETMRVLKTHKAPEDDAVYRFILKKEAEGKSKRQAKIAGLNKFLRIYYARVSEVYKA

SEQ ID NO: 18012 - protein, 397 aa, unidentified
  source 1..397: note = protein_2ea7a81
  REGION 4..164: note = RuvC_domain
  SITE 7: note = RuvC_P1
  SITE 59: note = RuvC_P2
  SITE 99: note = RuvC_P3
  SITE 101: note = RuvC_P4
  SITE 104: note = RuvC_P5
  REGION 267..354: note = Tnp_domain
  SITE 275: note = Tnp_P1
  SITE 305: note = Tnp_P2
  SITE 313: note = Tnp_P3
  SITE 314: note = Tnp_P4
  SITE 327: note = Tnp_P5
MILIGIDIGKLSHTFCILNQLTGEEIVPPTNIENNKSGFDFLIDKVKCYKNEDMLFGIEDTGHYHFALLKALLSKNYTVALINPVATDLTRKMQGGISKNDNLDSLTICDVISSNSRKKPYRITKVDKFELFEQRELTRHHHNLKEELNVYTNRLQKCIDIVFPEFNSLFNSKYGIVYTNVLKSFGSAFNIANADIRTIRKCFNYKGKGLRISLTAEDLKDAAKNSIGIQSTSEVIQIKHLINQIELINEQLAEIDKKIEEFSIQTNSPILSIPGISHFSGTSILSEFGSFSNYSSHKKLIKFARVAPYEHQSSQFKAEHTAITKKGSRYLRKTLYQIILPVINHNKVFKDYYNLKLSQGKSHRCAQGHCVRKLLRVIYHICTSTDDNIKFDANLLK

SEQ ID NO: 18013 - protein, 346 aa, unidentified
  source 1..346: note = protein_d06740a
  REGION 6..159: note = RuvC_domain
  SITE 9: note = RuvC_P1
  SITE 67: note = RuvC_P2
  SITE 105: note = RuvC_P3
  SITE 107: note = RuvC_P4
  SITE 110: note = RuvC_P5
  REGION 212..299: note = Tnp_domain
  SITE 219: note = Tnp_P1
  SITE 250: note = Tnp_P2
  SITE 258: note = Tnp_P3
  SITE 259: note = Tnp_P4
  SITE 272: note = Tnp_P5
MKNLFIGIDFSKEKVDVAIIAAKGLHETSERVYNTFKSTTAGYRQLVKWVEENSRGEERESWLFCGENTGDYSKGLCNFLYGKGYDMWLENAKCIKDASGLRRLKSDRADAAMIAEYAMRNYDKAVMYEPLSGPLMQLRELFLFRLMMVRHKCSFKVRRGEKRLTMEKSPAKTVISQIGRHIVNEMDKEIKKIDKKIADLIASDEQLSHVFGIITSTPGIGTQNAVCLMIYTNNFKRFGFNPRKIACYYGIAPFARNSGSSVHCDPHVHYMANRMIKALLTQAALAAVNFCPEIASYYTRLTTAGKKPQVALNNVKNKLIRIITALVRTGSYYSSDYQLSKVSLIS

SEQ ID NO: 18014 - protein, 398 aa, unidentified
  source 1..398: note = protein_ea649d0
  REGION 4..160: note = RuvC_domain
  SITE 7: note = RuvC_P1
  SITE 57: note = RuvC_P2
  SITE 97: note = RuvC_P3
  SITE 99: note = RuvC_P4
  SITE 102: note = RuvC_P5
  REGION 275..362: note = Tnp_domain
  SITE 283: note = Tnp_P1
  SITE 313: note = Tnp_P2
  SITE 321: note = Tnp_P3
  SITE 322: note = Tnp_P4
  SITE 335: note = Tnp_P5
MISVGIDVSKEKSTVCILKPYGEIVRSPYEITHTESQIAELVSTIKCLDDEVRVVMEATGNYHLPVLSFLKEHGIFVAVINPLIMKKYASIILRKGKTDKLDSIKIANYGLDNWFHLINHESSEEIYVQLRLLGRQYGHYIKLRIESKLSLTTMLDYTMPGIKTMLKSRSDKPEKDKLNDFIEEYWHYDNITKKSENQFISNYKNWAKKKGYQQSEAKAIKIYDLAQQGIPTLSSNAPSTKMLVLEAVRVLREIDKTLALILSQMQELAKSLKEYTVVREMAGVGDIIAPRLMAEIGDIRRFHSGKALIAYAGIDAPPYQSGQFTGTRRRISKRGSATLRKTGFEIMKCLKSNKPESDTVYLFVLKKEAEGKASKVAKIAGLNKFLRIYYARVKEVYN

SEQ ID NO: 18015 - protein, 338 aa, unidentified
  source 1..338: note = protein_97a82c0
  REGION 7..149: note = RuvC_domain
  SITE 10: note = RuvC_P1
  SITE 53: note = RuvC_P2
  SITE 88: note = RuvC_P3
  SITE 90: note = RuvC_P4
  SITE 93: note = RuvC_P5
  REGION 212..299: note = Tnp_domain
  SITE 220: note = Tnp_P1
  SITE 250: note = Tnp_P2
  SITE 258: note = Tnp_P3
  SITE 259: note = Tnp_P4
  SITE 271: note = Tnp_P5
MDKITTIGLDLAKNVFHVVGCNEHGKIIRKRMLKRPQVLAYFANLPVSLVGMEACASAHYWARELGALGHEVKLIPPQYVKPYVRGNKNDYNDALAIAEAVVRPEMRFVGVKTPEQQDIQALHRLRERRLGDRTALCNQLRGLLAEYGLVFPKGVTTLRRRLPELLADGENGLSDLFRQLLAQGYQQLQELDVHIDFYTQELVYQSQQDDACQRLQTIPGFGPIVASVFRSVVGNGEAYRRGRDVSASVGLVPRQHSSGGKEVLLGISKRGDRYLRSLLIHGARSVVIQAKRKEDRLSRWINRLVSARGFNKAVVALANKMARIGWVILAKKTTYQAA

SEQ ID NO: 18016 - protein, 322 aa, unidentified
  source 1..322: note = protein_e658f5f
  REGION 9..157: note = RuvC_domain
  SITE 12: note = RuvC_P1
  SITE 63: note = RuvC_P2
  SITE 97: note = RuvC_P3
  SITE 99: note = RuvC_P4
  SITE 102: note = RuvC_P5
  REGION 253..316: note = Tnp_domain
  SITE 261: note = Tnp_P1
  SITE 292: note = Tnp_P2
  SITE 300: note = Tnp_P3
  SITE 301: note = Tnp_P4
METLHSHCAGLDVHQKEIVVCIYIGNSETELTKEIRTFPTFTKHLFEMLQWLEELHITHLAMESTGIYWKPVFNILEDYFDITLANAQRIKNIPGRKTDVADAEWIAKLLRYGLIEKSFVPPADIRELRDLTRLRKKMIGNMTTEKNRIQKTLECSKIKLGSIISDVFGVSGRKLLTRLVEQGYVNSHEVEENIHGSMMPKASQITESLFGTLNPHQIFLIRQSWNHILFLEESIQQIEEKIDELLSPYPEQIELLLTIPGVKRHAVASIIAEIGVEMRQFPSAQHLASWAGLSPGNHESAGKKKALEQQKVIHKFNPCFVK

SEQ ID NO: 18017 - protein, 308 aa, unidentified
  source 1..308: note = protein_89abcb9
  REGION 15..146: note = RuvC_domain
  SITE 51: note = RuvC_P2
  SITE 91: note = RuvC_P3
  SITE 93: note = RuvC_P4
  SITE 96: note = RuvC_P5
  REGION 187..275: note = Tnp_domain
  SITE 195: note = Tnp_P1
  SITE 224: note = Tnp_P2
  SITE 232: note = Tnp_P3
  SITE 233: note = Tnp_P4
  SITE 244: note = Tnp_P5
MPQAVIGCDLSRAFIDLQDLPAGRTDRITNTREAIASWLGALDCNVRIVFEATSGCDGGLIAALAERGQPFSRVNPRQAREFARATGVLAKTDRVDARVLAQMGTALDLPITIPISPKRSCLADFLRRRRQLVDMRKAEKLHRHSAGQIEIATAIETMIELLGRQIADLDRHIANLITDDRQLAGQARLLSAVPGIGPTVLATLLGELPELGTLCRRRIASLAGLAPHARESGTWRGARRIWGGRRKVREAPYIAALNSSRRIPSLTAMRDRMRQKGKAPKTILIAVARQLLVILNAMIRSGQPIRLP

SEQ ID NO: 18018 - protein, 400 aa, unidentified
  source 1..400: note = protein_5d70c81
  REGION 11..159: note = RuvC_domain
  SITE 14: note = RuvC_P1
  SITE 65: note = RuvC_P2
  SITE 99: note = RuvC_P3
  SITE 101: note = RuvC_P4
  SITE 104: note = RuvC_P5
  REGION 255..344: note = Tnp_domain
  SITE 263: note = Tnp_P1
  SITE 295: note = Tnp_P2
  SITE 303: note = Tnp_P3
  SITE 304: note = Tnp_P4
  SITE 316: note = Tnp_P5
MALKIVYKICCGIDVHKNFVVACIAKTDKQGVTTYERHHFSTYTKGLKQLLKWLLDRNCKDVCMESTGKYWIPVYNVLEHDCSIVLAHPKYVKAIRGKKTDKKDAKWIADLFKHDLVAGSFMPPADIRQLRDLMRYRFKLTCFKSSEKNRYQNCLTVSNIQLGNVVSDTFGKSSQKIIAKILENPDDTSFDIGSLIHGSMKDKLPELELAIDGYITPEQAAKLKIIKEHFDNLEARKAELEELILALANPYQQEISIILTAPGFKNTFTAIGIISEIGTNMEAFPSAKHLCSWAGLTPTNNESAGKKKSVRVSKAGCYIKPLLVQCANAAIKSKKHPEIRDRYLRIKKRRGHKKAIIAIARMLLTALYHMLKNGENYNSDLYQKSDILPTTREITVEQAI

SEQ ID NO: 18019 - protein, 338 aa, unidentified
  source 1..338: note = protein_0f29ec5
  REGION 6..151: note = RuvC_domain
  SITE 9: note = RuvC_P1
  SITE 53: note = RuvC_P2
  SITE 91: note = RuvC_P3
  SITE 93: note = RuvC_P4
  SITE 96: note = RuvC_P5
  REGION 211..298: note = Tnp_domain
  SITE 219: note = Tnp_P1
  SITE 249: note = Tnp_P2
  SITE 257: note = Tnp_P3
  SITE 258: note = Tnp_P4
  SITE 270: note = Tnp_P5
MAIVSVGIDLAKNVFAVHGVDESGKPALVRPNVARGKLLELIASLPPCLIGMEACSGAHHWAREFAKFGHTVRLMAPKFVIPYRLSGKRGKNDAADAAAICEAVTRPNMRFVPVKSIEQQGQLLVHRARQGFVEQRTATLNRIRGLLSEQGIVLPLKAAVVRRETMARLEDLPGWANTVIGDLLSEVTRLDERISQYDQHIRAMARQSTEAQRLMQLSGIGETTATALLSTIGNGRDFRCGRQLCSWLGLVPGQYSSGGKQRLGRITKAGDPYLRSLLVLGARAVLAAAKNKSDPISRWANALAQRRGYWKAVVAIAAKNARMCWAVLSKGDDFRLPV

SEQ ID NO: 18020 - protein, 404 aa, unidentified
  source 1..404: note = protein_9cc0790
  REGION 4..157: note = RuvC_domain
  SITE 7: note = RuvC_P1
  SITE 56: note = RuvC_P2
  SITE 94: note = RuvC_P3
  SITE 96: note = RuvC_P4
  SITE 99: note = RuvC_P5
  REGION 265..351: note = Tnp_domain
  SITE 273: note = Tnp_P1
  SITE 304: note = Tnp_P2
  SITE 312: note = Tnp_P3
  SITE 313: note = Tnp_P4
MWYVGLDWSDTHHDVVVLDEAGHRVGTQRFAHSHQGLHHLKDFLLGIASRPEDLACIVETNHGLLITFLLEAGIPVYPVNPKTANTLRKTAGAKTGRIDAYLLAKTGRFDLADLRRLSPDSPIIAELKTLTRDQDALIQSQTRLVNQLTACLKEYYPVSLKLFGKLHQPSTLLFLQAYPTPTAAAAASLEEIEALLKSCKYPNARRAALEMVEQLHHQELTANEVIVRAKSRLMLSLVRQLLPLLEDIKGYDKEIATLFLKHPDHDLWQSLPRAAQRLAPRLLAEWGDDRARYRDAQSVQELAGTAPVPFQSGNFSKAHKRFACLKPLRNVLYQFAWQTTRQDGWARAYYQRKRMEGKTHSMAVRCLANVWVRIIYRMWVRKDLYQAATFEAAKLAHAPRQRVA

SEQ ID NO: 18021 - protein, 416 aa, unidentified
  source 1..416: note = protein_2c593ac
  REGION 46..194: note = RuvC_domain
  SITE 49: note = RuvC_P1
  SITE 100: note = RuvC_P2
  SITE 134: note = RuvC_P3
  SITE 136: note = RuvC_P4
  SITE 139: note = RuvC_P5
  REGION 290..377: note = Tnp_domain
  SITE 298: note = Tnp_P1
  SITE 329: note = Tnp_P2
  SITE 337: note = Tnp_P3
  SITE 338: note = Tnp_P4
  SITE 349: note = Tnp_P5
MFNPLLALSKWKDDYVQKNAYFQIHSLFVILSLWSDWMEVFIERCAGLDVHSETIVACVLIGSKDDELIKETETFPTLTKDLFRLLKWLEDHDVTHIAMESTGVYWKPVFNILEDFFDITLANAQRIKNVPGRKTDVSDAEWIAKLLRHGLIEKSFVPPVDIRELRDLTRLRKKWIGHVTSEKNRIQKVLEASNVKLSTVISDVFGVSGRKLLNRLIEKGYVDVKDVEERIHGKMASKKQRIADSLFGTINEHQLFLIRQSWQHIEYLESLITEIEQRIDVLLQKYQEELQLLLTIPGIKKDTAAVIIAEMGVDMSQFPTSQHLASWAGVCPGNKESAGKRYSTRTVKGNPPIKSAMCEAAWAVSRCRNRWLAAKYWSLAARRGKKKALVATSHRMLRIIYSMLINKEAFKEKQIN

SEQ ID NO: 18022 - protein, 458 aa, unidentified
  source 1..458: note = protein_d65ee61
  REGION 60..215: note = RuvC_domain
  SITE 63: note = RuvC_P1
  SITE 112: note = RuvC_P2
  SITE 152: note = RuvC_P3
  SITE 154: note = RuvC_P4
  SITE 157: note = RuvC_P5
  REGION 323..406: note = Tnp_domain
  SITE 331: note = Tnp_P1
  SITE 362: note = Tnp_P2
  SITE 370: note = Tnp_P3
  SITE 371: note = Tnp_P4
MTLPPPASPEPLIDDRGTRRRAPVSDHSTVGSFASAWLLPRAASRKATGLSLEDGPLFFVGIDWATTEHAVCVLDRAGRKVAAFTIEHTAAGFARLTARLDKLGDTQLTPVAIERPDGRLVDALLEAGHPVMPVKPNAIKTWREAEVLSGAKSDPGDAHVIADYLRVRIHRLRPAVPYSGPTKALRTVTRTRGDLVDARVAAVNQLAALLDAHWPGAKGIFASLSSAIALAFLTKYPTAASAASLTETRLAAFCVKQGYSGKKPAAVLLARLRSAPAGTTDPDLGEGVRAAVLAQVGVINALNTAIKNLDRTITEKMDTHPDGKIFRSFPRAGTVNAAQILAEWGDARAAFDHPDAIAALAGITPVTKASGKQRGVWACNKRLRQAITTFADNSRHASPWAADIYNRARASGKDHPHATRILARAWVRVIWRCWKDHTAYNPALHGGNQHHTEQQLAA

SEQ ID NO: 18023 - protein, 343 aa, unidentified
  source 1..343: note = protein_b5dba49
  REGION 6..150: note = RuvC_domain
  SITE 9: note = RuvC_P1
  SITE 54: note = RuvC_P2
  SITE 89: note = RuvC_P3
  SITE 91: note = RuvC_P4
  SITE 94: note = RuvC_P5
  REGION 213..300: note = Tnp_domain
  SITE 221: note = Tnp_P1
  SITE 251: note = Tnp_P2
  SITE 259: note = Tnp_P3
  SITE 260: note = Tnp_P4
  SITE 272: note = Tnp_P5
MKISRIGVDLAKNVFQLHGVDGRDQVVFKRRLRRDQWLRVLLKNTDSDCLIGMEACAGAHHWARVLQARGYRVRLIPPQFVKPYVKSHKNDANDAEAICEAMSRPNMRFVSIKRVEQQDIQAVHRIRSELLTQRTAKANQIRGLVAEYGLVAPKQLTALRSAIPCWLEDAENGLTVRFRALLHDLWQDLLGLDCRVQGLDAEIEALAKADPVAQRLQQLRGVGPLIATALVASVGDGQQFGRGRQMAAALGLTPKQYSSGNREILGGISKRGDVYLRSILIHGARSVVSHAKHKEDRLSRWMTELAKRRHPNVAAVALANKTVRMAWAMMTTGTDYDPEYVTA

SEQ ID NO: 18024 - protein, 346 aa, unidentified
  source 1..346: note = protein_c9aa87d
  REGION 7..148: note = RuvC_domain
  SITE 10: note = RuvC_P1
  SITE 53: note = RuvC_P2
  SITE 88: note = RuvC_P3
  SITE 90: note = RuvC_P4
  SITE 93: note = RuvC_P5
  REGION 210..297: note = Tnp_domain
  SITE 218: note = Tnp_P1
  SITE 248: note = Tnp_P2
  SITE 256: note = Tnp_P3
  SITE 257: note = Tnp_P4
  SITE 269: note = Tnp_P5
MEKIIRVGMDTSKSVFQVHGVDAAERPVLRRKLARKEMIRFFEKLPATLVAIEACAGSHHWARLLTSLGHEVRLIAPQLVKPYVKRGKNDAADAEALCEAASRPTMRFVPVKTAEEQAALMLMGMRTRLIRKRTQLANAIRGYASEFGITAATGMCRIEPLLDSIAENDAVPSLARELFALHAGEYMQLKAEIERVEKKLMEWHRENECSQRLAHIPGIGPIGASLLMMKTPDPRLFKSGRDFAAWIGLTPRDHSTAGKVRSGGITRAGDELLRSTLVVGATAVIRQVRQKNGRHATPWLLGLIERKKPKIIAVALANKMARIAWKLMVSGENYSRRSTAPELLPV

SEQ ID NO: 18025 - protein, 345 aa, unidentified
  source 1..345: note = protein_ee8c044
  REGION 5..152: note = RuvC_domain
  SITE 8: note = RuvC_P1
  SITE 55: note = RuvC_P2
  SITE 92: note = RuvC_P3
  SITE 94: note = RuvC_P4
  SITE 97: note = RuvC_P5
  REGION 212..300: note = Tnp_domain
  SITE 220: note = Tnp_P1
  SITE 250: note = Tnp_P2
  SITE 258: note = Tnp_P3
  SITE 259: note = Tnp_P4
  SITE 271: note = Tnp_P5
MKHFIGLDVAVKETAVCIVDESGGICREVKVVSHCDDLLAVLKDPALNIERVGLEAGPLSQWLFEGLACAGLPVICIETRHVKAFLKAQPNKTDRNDARGIAQMMRVNLYRPVHVKTLMSQKRRALLTARKLLQGKAIAIENDIRGLLRNFGLKVGVVGTVKFEERICELVEGMPDLEEIMEPLLAARRKLRAEFARLHKKVLTITGNDATCRRLMTVPGVGPVVALAYAATIDIPQRFRSSKAVGPILGLTPKLNESGESKRVGCISLCGDGMMRTLLYEAAQTLMTRVTKWSWLKAWAMNVAKRRGMRKAIVALARRLAVVMHRMWLDGTEFRWTRETMASAT

SEQ ID NO: 18026 - protein, 325 aa, unidentified
  source 1..325: note = protein_2623e4a
  REGION 6..153: note = RuvC_domain
  SITE 9: note = RuvC_P1
  SITE 54: note = RuvC_P2
  SITE 92: note = RuvC_P3
  SITE 94: note = RuvC_P4
  SITE 97: note = RuvC_P5
  REGION 197..284: note = Tnp_domain
  SITE 205: note = Tnp_P1
  SITE 235: note = Tnp_P2
  SITE 243: note = Tnp_P3
  SITE 244: note = Tnp_P4
  SITE 257: note = Tnp_P5
MKKIFIGIDISSKTLDICLKTDGKVEYFNIQNQLKPIRLFFKKHTTVGTVVAMENTGRYNWNLFEVLAELELFVYVLSPLHLKKSLGLSRGKNDKIDSLRICSYIEKNQQGTKQWSQLSLSIRRLKVLLTERATRVAMKSSFVRQQHDYKMMKSIALDKELLKLNKKLIESIDVQIKKIESDIEMNIMLDSELKCKAELIRSVPGVGKVVSWMMIAKTEGFTSISDPRKMACYCGVVPFDHQSGTSIRYRPRVSVFADKGMKSLLHLAAMSSIRLNNDLGTYYKRKVQEGKNKMSVLNAVRNKIIHRIFAVIKNQTIYKNDLVLS

SEQ ID NO: 18027 - protein, 405 aa, unidentified
  source 1..405: note = protein_6d45404
  REGION 4..160: note = RuvC_domain
  SITE 7: note = RuvC_P1
  SITE 57: note = RuvC_P2
  SITE 97: note = RuvC_P3
  SITE 99: note = RuvC_P4
  SITE 102: note = RuvC_P5
  REGION 274..361: note = Tnp_domain
  SITE 282: note = Tnp_P1
  SITE 312: note = Tnp_P2
  SITE 320: note = Tnp_P3
  SITE 321: note = Tnp_P4
  SITE 334: note = Tnp_P5
MNAVGIDVSKGKSTVTIRKPGDVVLLPPRDIPHTQSQINALIELIKGLDGETKVCMEHTGRYYEPVASWLSDAGIFVSAVNPILIKDFGDDSLRSPKTDKADSKKIARYTLDRWANLKQYGCMDKTRNQLKTMNRQFGFYMDQKTAMKNNLIALIDQTYPGANDFFDSPARNDGSQKWVDFIHTYWHVDCVRSKSLEAFTEHYQNWCKRKGYNFSTQKAQEVYQLSSDLIAVFPKDANTKMFIRQAVAMLNTASTTVESLRLEMDKTASTLPEYPVVMAMDGVGPTLGPQLMAEIGDVTRFTHCGALTAFAGVDPGKDDSGQRVRKSVPTTKKGSPSLRKTLFQIMDGLIKRSPADDPVYAFMDKKRAQGKPYYVYMTAGANKFLRIYYGRVKEYMASLEPTQQQ

SEQ ID NO: 18028 - protein, 388 aa, unidentified
  source 1..388: note = protein_c5c1dc5
  REGION 4..160: note = RuvC_domain
  SITE 7: note = RuvC_P1
  SITE 58: note = RuvC_P2
  SITE 99: note = RuvC_P3
  SITE 101: note = RuvC_P4
  SITE 104: note = RuvC_P5
  REGION 262..348: note = Tnp_domain
  SITE 270: note = Tnp_P1
  SITE 300: note = Tnp_P2
  SITE 308: note = Tnp_P3
  SITE 309: note = Tnp_P4
  SITE 321: note = Tnp_P5
MYLIGVDISKYKHDCFIATEAALPIKAFRFDNNRLGFDLFLETLKSLDQSQDIRIGLESTGHYGTNLKQFICMSGYTYLEFNPYLTHMFSKALSLRKTKTDKVDAKTISSMLGSVDYKTLHTSFYHINELKKLVRTRHIKMTARSKLLIEITNILDNTFPEFKSFFRERLPGTALSILKKYKSRSRIAKFQTKDYDSIRHFSMGKFTYVRFQKLKQLAKGSIGYETQSDLFLLKEAIKSYEYLSILIQSIEEKIEIYMKDIPQTLTSIPGVSTISAAIIIAELGDFKNFTNPAQVISFAGLDTSVNQSGMMETRGHLVKRGSGLLRMTFWQITFSSLRLNPILYDYYLKKRAEGKHHKVAMVHCTRKLIRTIYYLGVNQIPFDQSLFR

SEQ ID NO: 18029 - protein, 342 aa, unidentified
  source 1..342: note = protein_03f736a
  REGION 7..149: note = RuvC_domain
  SITE 10: note = RuvC_P1
  SITE 53: note = RuvC_P2
  SITE 88: note = RuvC_P3
  SITE 90: note = RuvC_P4
  SITE 93: note = RuvC_P5
  REGION 211..296: note = Tnp_domain
  SITE 219: note = Tnp_P1
  SITE 249: note = Tnp_P2
  SITE 257: note = Tnp_P3
  SITE 258: note = Tnp_P4
  SITE 270: note = Tnp_P5
MDKITIIGVDLAKRSFQVHGASADGSVLFRKKLSRAQVVPFFSQQPVCIVAMEACATAHDWGREIGALGHEVKLIPPIYVKPFVKRHKNDAADAEAIAEAASRPTMRTVAVKTHEQQSRAVLFRTRDLLLRQRTQLINALRAHLAEFGKVAPKAATNIKRLKEVLEDPENGLPQIVMDIGSIYIDQIATLTNQIFRLEKQVRIEAAKDDAARRLQTMPGIGPITAMAVSAFAPPMEIFRRGRDFAAWVGLVPKQHSTGGKQKLGRTSKIGQRDIRRLLVIGAMSVVKVAVHKGAPEGSWLQRMLERKPRMVVAVALANKMARRLWAMLVKNEDYRDPTIAAA

SEQ ID NO: 18030 - protein, 345 aa, unidentified
  source 1..345: note = protein_2c55e68
  REGION 6..148: note = RuvC_domain
  SITE 9: note = RuvC_P1
  SITE 52: note = RuvC_P2
  SITE 87: note = RuvC_P3
  SITE 89: note = RuvC_P4
  SITE 92: note = RuvC_P5
  REGION 212..298: note = Tnp_domain
  SITE 220: note = Tnp_P1
  SITE 250: note = Tnp_P2
  SITE 258: note = Tnp_P3
  SITE 259: note = Tnp_P4
  SITE 271: note = Tnp_P5
MEITTIGLDLAKNVFQVHAVDAAGDVVVRKTLRRAQLLPFVAKTGPCLVGIEACGTSHHWARELVALGHEVRLMPPAYVKPYVKRGKNDAVDAEAICEAVTRPTMRFVAVKSREQQAALALHRSRSLLVGQRTQLINMIRSLLAEFGIVIPEGRDRALVLARQIVDSERTPEVPDDAAMIVGMLSQQALDIHARLHAIELRLAVLQRSDEVAQRLSTIPGIGPVGATALAASVSDPHQFRSGRQFAAWLGLTPLQKSSGGKERLGRISKMGDKYLRRLLVIGATSLVRRAKYKPDTADPRLVALLARKPVRVATVAMANKMARIAWALMTRGQVYQRHHAPMLAG

SEQ ID NO: 18031 - protein, 403 aa, unidentified
  source 1..403: note = protein_f7c9f8a
  REGION 4..160: note = RuvC_domain
  SITE 7: note = RuvC_P1
  SITE 57: note = RuvC_P2
  SITE 97: note = RuvC_P3
  SITE 99: note = RuvC_P4
  SITE 102: note = RuvC_P5
  REGION 274..361: note = Tnp_domain
  SITE 282: note = Tnp_P1
  SITE 312: note = Tnp_P2
  SITE 320: note = Tnp_P3
  SITE 321: note = Tnp_P4
  SITE 334: note = Tnp_P5
MNAAGIDVSKGKSMIAVARPFGEVAVKPYEVRHTASELRKLARTLKSLDGETRVILEHTGRYYEPVAQMLHDAGIFVSAVNPLLIKEYGNNSLRRVKTDKADSLKIARYGLDNWAELREHTPMDTIRYQLKNLNRQYSLYTRNKTALKNNLIALLDQTYPGVNALFDSPVREDGSQKWVDFAASFWHVDCVRNRTETAFAERYRKWCKRHGYNFRTVKASGIHSESKELIAMLPKDQTARLLVQEAIAQLNSVSRTVEVLRSEMHRLAEQLPEYPVVMKLYGVGGSIGPQLMAEIGDVRRFAHKGALTAFAGVDPMPNQSGDHEAKSTSSSKRGSPDLRKTLFILMTILLQKAPPDDPVFQFLDKKRSEGKPYYVYMTAGCNKFLRIYYGRVREYLNFLDSAE

SEQ ID NO: 18032 - protein, 399 aa, unidentified
  source 1..399: note = protein_8f1090b
  REGION 4..160: note = RuvC_domain
  SITE 7: note = RuvC_P1
  SITE 57: note = RuvC_P2
  SITE 97: note = RuvC_P3
  SITE 99: note = RuvC_P4
  SITE 102: note = RuvC_P5
  REGION 275..362: note = Tnp_domain
  SITE 283: note = Tnp_P1
  SITE 313: note = Tnp_P2
  SITE 321: note = Tnp_P3
  SITE 322: note = Tnp_P4
  SITE 335: note = Tnp_P5
MISVGIDVSKEKSTVCILKPYGEIVRSPYEITHTESQMAELASMIKCFDDEVRVIMEATGNYHLPVLSFLKEHEIFVSVINPLIMKKYSNIILRKGKTDKIDSIKIANYGLDNWFHLTNHESSKDVYVQLRLLGRQYGHYIKLKIESKLSLTTMLDYTMPGIKTALKSRSDKPEKDKLNDFVEEYWHYDNITQKSKKQFIKSYKTWAKKKGYHQSEAKAIKIYNLAQQGIPTLSSNAPSTKMLVLEAVRVLREIDKTLALILSQMQELAKSLKEYTVVREMSGVGDIIAPRLIAEIGDIRRFHSGKALIAYAGIDAPPYQSGRFTGTRRRISKRGSSVLRKTGYEVMKCLKSNKPETDAVYLFIIKKEAEGKASKVAKMAGLNKFLRIYYARVKEVYKN

SEQ ID NO: 18033 - protein, 321 aa, unidentified
  source 1..321: note = protein_14f7b59
  REGION 8..149: note = RuvC_domain
  SITE 11: note = RuvC_P1
  SITE 52: note = RuvC_P2
  SITE 92: note = RuvC_P3
  SITE 94: note = RuvC_P4
  SITE 97: note = RuvC_P5
  REGION 191..278: note = Tnp_domain
  SITE 199: note = Tnp_P1
  SITE 229: note = Tnp_P2
  SITE 237: note = Tnp_P3
  SITE 238: note = Tnp_P4
  SITE 251: note = Tnp_P5
MTKDRKIYGIDISKSVFDIYSKAKGHVQLKNDESGFKKLLTSLPKEALVIMEATGYYHYRLAQFLNKNGVLVSVVNPLSVKRFIQMKLAKVKTDKSDAKAICEYGTFNNVPLYNALSDVQAECLQLFRLLDSYVKKSTATKNKIHGEDVLGTPSKTVYRSLKRNLSHLKKEIKLLEDRLLELVKQDQQHQLTLLQSIPGIGMKTALFLIVVTDGFKKFESASQLCSYVGITPTIRESGSSVRGRSRISKVGNKKLRNLLFLAAFSAYKYNKSCKALFDRIVAKGKSKKLALIAVANKLLKQAFAIAKSGLPYDENFVSKLA

SEQ ID NO: 18034 - protein, 392 aa, unidentified
  source 1..392: note = protein_b09aad7
  REGION 4..164: note = RuvC_domain
  SITE 7: note = RuvC_P1
  SITE 62: note = RuvC_P2
  SITE 103: note = RuvC_P3
  SITE 105: note = RuvC_P4
  SITE 108: note = RuvC_P5
  REGION 267..354: note = Tnp_domain
  SITE 275: note = Tnp_P1
  SITE 305: note = Tnp_P2
  SITE 313: note = Tnp_P3
  SITE 314: note = Tnp_P4
  SITE 327: note = Tnp_P5
MIYVGIDVAKDKHDCCIVDSDGVIINDCLRICNSSEGFELLYISILSALSGQDISNVKIGLESTGHYSTNLQNYLYAKGFRLYILNPLATNLFRKAQTLRKTKTDKTDALVIAKMLFSDDAKSYSPVSYQIQELKSLTRHRYRMIGYRSKLKISITRLIDIIFPELPKHVWSIHQNSSYCLLTELSSPKDIASCHLTKLTNILNKSSQGRYGKAKAIEIKEAASFSIGMSVSSLSFELKQTIRLIQSVQTEIDALDAQIKKVVIETNTPLMTIPGISYTLAAIILSEIGDIDRFTTPAKLLAFAGLEPSTYQSGKYNASHTPMVKRGSAYLRWAMLTASRTVTMRDETFALYLSKKRDEGKHYYVAMSHVAKKLTRTIFYLLKTNTAFVPQM

SEQ ID NO: 18035 - protein, 368 aa, unidentified
  source 1..368: note = protein_3c0b885
  REGION 4..162: note = RuvC_domain
  SITE 7: note = RuvC_P1
  SITE 60: note = RuvC_P2
  SITE 101: note = RuvC_P3
  SITE 103: note = RuvC_P4
  SITE 106: note = RuvC_P5
  REGION 266..352: note = Tnp_domain
  SITE 273: note = Tnp_P1
  SITE 303: note = Tnp_P2
  SITE 311: note = Tnp_P3
  SITE 312: note = Tnp_P4
  SITE 325: note = Tnp_P5
MICIGIDISKDKHDCLISNSDGDILFDNFTFSNSLEGFELLFSRIQSCSDNFSQMKIGLEATGHYSNNITEFLVNKNLPIFIINPLHTSLYRKSLSFRKTKTDKADVHSIVSMLMTQKLTPYVPVSYHRKELKSLTRYRFNLVQDCSVLKVSFSRLMNIIFPELEKIVHQLQVNSVYQLMSAYPDAAAVSNANLTHLTNLLRKYSKGHYGREKAIEIRNAAMQSIGTSDGILKLEMQQTIARIRLLREQISIVEVRIKDIIKESDSPFITIPGISYITAAMIHAEVGDFSNFSSAEKILAFAGMEPSIYQSGQYTSTHAKMVKRGSKYLRYALFTAAKNVGKWDNTFKEFLQKKNSLRESTTMWQYLM

SEQ ID NO: 18036 - protein, 330 aa, unidentified
  source 1..330: note = protein_a21f31e
  REGION 4..157: note = RuvC_domain
  SITE 7: note = RuvC_P1
  SITE 61: note = RuvC_P2
  SITE 101: note = RuvC_P3
  SITE 103: note = RuvC_P4
  SITE 106: note = RuvC_P5
  REGION 201..287: note = Tnp_domain
  SITE 209: note = Tnp_P1
  SITE 238: note = Tnp_P2
  SITE 246: note = Tnp_P3
  SITE 247: note = Tnp_P4
  SITE 260: note = Tnp_P5
MTMIGIDVSKDKLDCAWINDSAARKVKNKVFSNNPSGHHLLIAWAIKHSQAPVEVLHFVMEATGVYHEAVAYALYQAGAQVSVVNPAQIHAHAKSLGVRSKTDKRDSVVIARFGYSHQPRLWQPEPEAMRTLKALISRLEALDKDIQRERNRLEKAQIAQPTGEVVDSIRTVLQQLQTERQRIEDLVNRHIDQHPTLKQDRQLLETIPGIGPILSRLMITLLRSRAFESAPQCAAFVGLVPRHHESGTSVRARPRLSKTGNPMIRAKLYMAAIVSIQHNPDIKQHYERLLKKGKARMSALGAAMRKLVHICFGVIKHQQPYRPQADLNPA

SEQ ID NO: 18037 - protein, 404 aa, unidentified
  source 1..404: note = protein_617438b
  REGION 4..159: note = RuvC_domain
  SITE 7: note = RuvC_P1
  SITE 58: note = RuvC_P2
  SITE 96: note = RuvC_P3
  SITE 98: note = RuvC_P4
  SITE 101: note = RuvC_P5
  REGION 267..353: note = Tnp_domain
  SITE 275: note = Tnp_P1
  SITE 306: note = Tnp_P2
  SITE 314: note = Tnp_P3
  SITE 315: note = Tnp_P4
MWYAGVDWADQHHDALVINEQGQQVGSIRVDHSLQGFAKLTTFLQQIIGSEPKEQMACIIETTHGLLIAALLEAGWPVYPVNPRTVDRRRSASGAKTDTIDAYLLAKTGRADFADLHRLTPDSAQVAELKTLTRDQDGLIQMQTRLVNQLTACLKAYYPVALELFAKLQQHTTLVFLQTYPTPQAASAASQEQIASVLKQAGHPNPSKAAPAIFATLKLPHLTADAVTTRTKSRLMLALVSQLMPLLEQIAAYDKEITTLFLTHPDHEIFSSLPRAGKRLAPRLLAEVGDDRTRYVDAASLQALAGTSPVLFQSGMYSKAHRRLGCIKPLRNALHQFAWQTTQSEPWAMQYYQRKRAEGKSHTVALRALANVWVRIIFAMWLHHRCYEAITFETAQQRHARRAA

SEQ ID NO: 18038 - protein, 425 aa, unidentified
  source 1..425: note = protein_52ddd46
  REGION 19..179: note = RuvC_domain
  SITE 22: note = RuvC_P1
  SITE 77: note = RuvC_P2
  SITE 118: note = RuvC_P3
  SITE 120: note = RuvC_P4
  SITE 123: note = RuvC_P5
  REGION 286..374: note = Tnp_domain
  SITE 294: note = Tnp_P1
  SITE 324: note = Tnp_P2
  SITE 332: note = Tnp_P3
  SITE 333: note = Tnp_P4
  SITE 345: note = Tnp_P5
MHSISNKKMNQVTDQTLVVGMDIAKKKHYACFVDERGRVLKKSFPVLQSKEGLEWLYQCIVEAMKEFGKTEVIVGIEPTGHYWLNLAYFLDEKGIPLVMTNPMHVKRSKELDDNLPTKHDAKDALVIARLVKDGRFSYPRILKGMEAELRVGATFRSKLVEEQGAVRNQMIRWLDRYFPEFTQVFPSFGKMALAVLEYTPFPSDLAGKELEEVLALYRQSEGLQSPQRPKAKKLIERAQHSIGVTEGQQMARIEIATLVRRYRQLEEEIEALTQQLTELVQTSVEYEWLKTVSGLGDATIVELLSEIGSFSHYQDPRQLLKLAGLALREHSSGHHKGQKRISKRGRRRLRALLFRVMMPMIRHNEAFRQLHEYYTTRPDNPLRKKQSIVVLCGKLLKVLHAVCTKHQAFDAKRMMQDIFGLETAA

SEQ ID NO: 18039 - protein, 339 aa, unidentified
  source 1..339: note = protein_3149376
  REGION 6..148: note = RuvC_domain
  SITE 9: note = RuvC_P1
  SITE 52: note = RuvC_P2
  SITE 87: note = RuvC_P3
  SITE 89: note = RuvC_P4
  SITE 92: note = RuvC_P5
  REGION 211..298: note = Tnp_domain
  SITE 219: note = Tnp_P1
  SITE 249: note = Tnp_P2
  SITE 257: note = Tnp_P3
  SITE 258: note = Tnp_P4
  SITE 270: note = Tnp_P5
MKITTIGLDIAKRFFHVVCCNEQGRLINKKMLTRAQVLAFFQKQPTCLVALEACATSNYWAREIQKCGHKVKLIPPQHVKAFLIGNKNDYNDALAISVAANQLHIKSVGIKSIEQQDNQAQHKVRELAVKQRTALCNQIRGLIAEYGIILSQGVNHVRKTIPFILDDGSTQLSETFKTILRQLQAQLNALDKCIEAYSQLIVETVKSNAICQRIQTIPGFGPMVSSAYFNEVGNGAHYKRGRDVSASLGIVPKQHSSGGKDSLLGISKRGNSYLRCLLIQGAKAVVSRAGTKSDKLSQWINKLVKTRGHNRACVAYANKMARMAWAITVSGEDYSTIEI

SEQ ID NO: 18040 - protein, 345 aa, unidentified
  source 1..345: note = protein_2c900b2
  REGION 6..147: note = RuvC_domain
  SITE 9: note = RuvC_P1
  SITE 53: note = RuvC_P2
  SITE 86: note = RuvC_P3
  SITE 88: note = RuvC_P4
  SITE 91: note = RuvC_P5
  REGION 210..300: note = Tnp_domain
  SITE 218: note = Tnp_P1
  SITE 250: note = Tnp_P2
  SITE 258: note = Tnp_P3
  SITE 259: note = Tnp_P4
  SITE 272: note = Tnp_P5
MHNIITGVDLAKEEIQVCVSKRNKVQSNQAMTPSQFTSWLASSKSMTIVFEACSTSNYWKQSALKYGHDAQIISAKLVATVRQNQKTDKNDALAVAQAAQLLDVSFINGKSKEQQELQTLVRLRELAVKHKVAMQNQIKSLLLEFNIRVSPSQGGLNGVVQSVLEDAENGFSMVFRQALHMAWQQLLLCIESIQQYDLCLEKAANQHPACKALQAIEGVGPLNAINLYIALGCGEMGTFNKGRDASACIGLTPIQHSSGGKVKLGSIGKHVKNSSIRSCLVSGAMAAVNQATKRPAKTKKDLWIQQMVERKGKRCAAVALANKTVRTAFAMLANGTEYKAELLAV

SEQ ID NO: 18041 - protein, 341 aa, unidentified
  source 1..341: note = protein_f509086
  REGION 7..149: note = RuvC_domain
  SITE 10: note = RuvC_P1
  SITE 53: note = RuvC_P2
  SITE 88: note = RuvC_P3
  SITE 90: note = RuvC_P4
  SITE 93: note = RuvC_P5
  REGION 211..295: note = Tnp_domain
  SITE 219: note = Tnp_P1
  SITE 249: note = Tnp_P2
  SITE 257: note = Tnp_P3
  SITE 258: note = Tnp_P4
  SITE 270: note = Tnp_P5
MNEVSTIGLDLAKYVFQDHGADATGKVVFRKQLRRNKLLAFFAEQPACLVAMEACSGAHYWAREIGKLGHEVRLIPPAYVKPFVKRQKNDMADAEAICEAAQRPTMRFVPVKSEEQQASAVVFRTRDLLIRQRTQAINALRGHLAEYGVIMAKGTAHVGELVERAMDPKTNVPEAARFVLDILIKTMVTLEMQIKKLDSEITHRARKEKDARRLMTIPGVGPMTATALLALAPAAGSFRCGRDFAAWLGLTPLQRSTGGKQKLGATSKMGERTLRRLLIIGATAVVQQARRRGTSPSSWLGRMVARKPPMLVATALANKMARVVWALMANGGVYKAPAVAA

SEQ ID NO: 18042 - protein, 403 aa, unidentified
  source 1..403: note = protein_ba8fbec
  REGION 5..160: note = RuvC_domain
  SITE 8: note = RuvC_P1
  SITE 59: note = RuvC_P2
  SITE 98: note = RuvC_P3
  SITE 100: note = RuvC_P4
  SITE 103: note = RuvC_P5
  REGION 274..365: note = Tnp_domain
  SITE 281: note = Tnp_P1
  SITE 311: note = Tnp_P2
  SITE 319: note = Tnp_P3
  SITE 320: note = Tnp_P4
  SITE 333: note = Tnp_P5
MKSVLSVDVANGKSIVLLITEHGEILIEPYEVKHCLSDFNSLKNKIDTFKIDDLTIFMESTSTYHLPIQRFFTKNNYNVQVINPILGKNNTRNLRKTKTDIEDCYNLADLFFKNTVKIHTKNMNDIYSSMLELSRQEKHLTESLVRSKNIFKQIIANSFPEYIKCFTANDIFGRTSLNFIKEFPHADIIKEKRIDALANNLYKSCKNGCSYNRCLTKAKKIKELANNSYPGIDKNSYEVNNLINIVEIISYSDFKLTEVKQDIIKLAKQTPYFDIINSIYGIGETSAAQIIAELGDINRFENIKQLNAFCGLDPTIVQSGKSINYHGPISKRGNRNARKILFITCCSIIRASVLHNVDSEILLYYRKKQAENKHFKECITACSTKLLRIIFAMCKNNSLYVQK

SEQ ID NO: 18043 - protein, 262 aa, unidentified
  source 1..262: note = protein_4802c29
  REGION 1..135: note = RuvC_domain
  SITE 37: note = RuvC_P2
  SITE 77: note = RuvC_P3
  SITE 79: note = RuvC_P4
  SITE 82: note = RuvC_P5
  REGION 176..262: note = Tnp_domain
  SITE 184: note = Tnp_P1
  SITE 214: note = Tnp_P2
  SITE 222: note = Tnp_P3
  SITE 223: note = Tnp_P4
  SITE 236: note = Tnp_P5
MFDVYGSKSGHNQFKNDASGFKSFLKSLPKESLVIMEATGYYHYRLAQFLFKQSVLVSVVNPLSVKRFIQMKLAKVKTDKSDAKAICEYGQINEVPLYTALTDVQSECLQLFRLMDSFIKKRTATKNKLHGEEVLGIPSSWVYRSLKRDRKHLDKEILGIETKLLSLVKQDQQVQLTLLTSIPGIGLKTALFMIVITDGFEKFENSKQLCSYAGITPTIRESGSSVRGRGRISKVGNRKMRNLLFLCSFTACKHNKRVSRCL

SEQ ID NO: 18044 - protein, 340 aa, unidentified
  source 1..340: note = protein_77f93cd
  REGION 6..148: note = RuvC_domain
  SITE 9: note = RuvC_P1
  SITE 52: note = RuvC_P2
  SITE 87: note = RuvC_P3
  SITE 89: note = RuvC_P4
  SITE 92: note = RuvC_P5
  REGION 211..300: note = Tnp_domain
  SITE 219: note = Tnp_P1
  SITE 249: note = Tnp_P2
  SITE 257: note = Tnp_P3
  SITE 258: note = Tnp_P4
  SITE 270: note = Tnp_P5
MNIVFLGIDLAKNVFQLCGLNQAGKPVYTKRTGRKELLQTLANIPACLIGIEASTGAFYWQREFEKLGHKVKVISPQYVKPFVRGQKNDGNDAQAIAVALMQPTMQFVPPKSPEQQDIQALHRARQRIVNHRTATVCQIRGLLLDRGIPIGSAVSRARRAIPLILEDAENGLSSRMRKTIAELYDLFNDLERRIHFFDKEIETVFRQSEACQRIAKVKGIGPKTATAVVAAIGKGTEFKNGRHFAAWLGLVPRQHSSGDRQVLMNMTKKGDKHLRTLFIHGARAVVRVATNNNDGHMNQWVNQLKERRGFNKTTVAVANKNARIIWSMLRNDTGYQVVCN

SEQ ID NO: 18045 - protein, 328 aa, unidentified
  source 1..328: note = protein_0a1490e
  REGION 1..143: note = RuvC_domain
  SITE 4: note = RuvC_P1
  SITE 47: note = RuvC_P2
  SITE 82: note = RuvC_P3
  SITE 84: note = RuvC_P4
  SITE 87: note = RuvC_P5
  REGION 202..288: note = Tnp_domain
  SITE 210: note = Tnp_P1
  SITE 240: note = Tnp_P2
  SITE 248: note = Tnp_P3
  SITE 249: note = Tnp_P4
  SITE 261: note = Tnp_P5
MGIDLAKSVFSLHGVDAAGRVVLRRTVRRDQLVATVAGLSPCLIGMEACSGAHEWGRRFQALGHTVRLMAPKFVAPYRKSGKNDGNDAEAICEAVARPSMRFVPVKSVEQQALLALHRVRQGFVVERTALINRLRGLMSEFGVVLPLRSITVRRQASAGAEGLPELARRAVGDLLEQLRVLDERIGGYDREIEAQARLSEPAQRLMKIRGIGATTALAIVATVGNAREFKNGRQFAAWIGLVPGQYSTGGKPRLGHISKRGDAYLRNLLVQGARSVLNSAASHQDHMSRWILDLQPRRGYYRTLVAIANKNARIAWALLAKNETLRAA

SEQ ID NO: 18046 - protein, 390 aa, unidentified
  source 1..390: note = protein_97d1689
  REGION 4..162: note = RuvC_domain
  SITE 7: note = RuvC_P1
  SITE 60: note = RuvC_P2
  SITE 100: note = RuvC_P3
  SITE 102: note = RuvC_P4
  SITE 105: note = RuvC_P5
  REGION 266..353: note = Tnp_domain
  SITE 274: note = Tnp_P1
  SITE 304: note = Tnp_P2
  SITE 312: note = Tnp_P3
  SITE 313: note = Tnp_P4
  SITE 326: note = Tnp_P5
MIYVGIDIAKLNHFASAISSDGVELMKPFKFTNDGDGFQMLDSRLTALSYEDDSIIIGLESTAHYGDNLVRYLVACNYNVCVLNPIKTSVMRKDNIRKTKTDKVDTFIIAKTLLMQDSYRFVSFYDLDLMDLKQLGRFRQKTIKQRTRLKIQLTSYVDQVFPELQYFFKSGLHQKTVYALLKEAPTPQDIASMHMTHLSHLLVAASHGHFKKEQAKELRVLAQKSVGANDSALSIQITHTIAQIELLDSQLNSVEAEMTQIMKFNDSVIMTIPSISYINGGMILGEIGDIHRFSCPAKLLAFAGLDPSVYQSGNYSARRTRMSKRGSRVLRYALINAAHNVVKNNATFKTYYDKKMAEGRTHYNALGHCAGKLVRVIWKMLTDEVEFNLD

SEQ ID NO: 18047 - protein, 356 aa, unidentified
  source 1..356: note = protein_fc72668
  REGION 4..164: note = RuvC_domain
  SITE 7: note = RuvC_P1
  SITE 59: note = RuvC_P2
  SITE 99: note = RuvC_P3
  SITE 101: note = RuvC_P4
  SITE 104: note = RuvC_P5
  REGION 229..316: note = Tnp_domain
  SITE 237: note = Tnp_P1
  SITE 267: note = Tnp_P2
  SITE 275: note = Tnp_P3
  SITE 276: note = Tnp_P4
  SITE 289: note = Tnp_P5
MILVGIDIGKNQHTFSIVDKNTGEILSNPSLFTNNQEGFLFLIKKLNRYSKSDLLIGMEDTGHYHFALLKYLLDIRYTVALINPTTTDLTRKLQGGITKNAPLDSLTICDVIGSNQRKKPYRITKVNRFDLYEQKQLTRHHHNLKEELNIYKNRLQKCIDIVFPEFTSLFRSKYGIVYMNVLKAFASAEKIATSDIRTIRKYFEYEGRRKRITLSEIDKKIEEFSFQNNSPILSIPGISHFSGTSILAELGDICNYTKASQIIKFAGVAPYHYKSSQFTAQHTAITKKGSRYLRKTLYQIIFPVINHNKVFTAYYNKKLIEGKGYRCAQCHCVRKLLRIIYHLLSTGQTFDPALLI

SEQ ID NO: 18048 - protein, 414 aa, unidentified
  source 1..414: note = protein_bab31f5
  REGION 19..175: note = RuvC_domain
  SITE 22: note = RuvC_P1
  SITE 72: note = RuvC_P2
  SITE 112: note = RuvC_P3
  SITE 114: note = RuvC_P4
  SITE 117: note = RuvC_P5
  REGION 290..378: note = Tnp_domain
  SITE 298: note = Tnp_P1
  SITE 328: note = Tnp_P2
  SITE 336: note = Tnp_P3
  SITE 337: note = Tnp_P4
  SITE 350: note = Tnp_P5
MVTITTNLDRGGKASVISVGIDISKEKSTVCVLKPYGEVVCSPFEINHTEKDLSELSAMLLRLNEDVKIVIEATGIYHLPVLSYLQDRGLFVSVINPFEMKQYRSQGLRSVKTDKKDSIAIANYGIDHWFRLKDYEIAEGLYQELKILGRQYSHYMCMRIESVQSLTHLLDYTMPGIKNLLKGWQDSTEKDKLSDFVEAYWHFDNITKLSLEEFTESYKTWAKTKGYHQSQNKAVKIYSLAQDGIPTLPAEMESTQIMIQQSVSVLRQINTTLKTILTRMQELAKKLPEYPVVRAMGGVGDILAPKLIAEIGDIRRFHSSKALIAYAGIDAPPYQSGQFIGTNRKISKRGSSTLRKIGYEVMRVLKTHNAPEDSAVYWYILKKESEGKSKKVSKIAGLNKFLRIYYARVKEVYQ

SEQ ID NO: 18049 - protein, 391 aa, unidentified
  source 1..391: note = protein_11121a3
  REGION 4..163: note = RuvC_domain
  SITE 7: note = RuvC_P1
  SITE 60: note = RuvC_P2
  SITE 101: note = RuvC_P3
  SITE 103: note = RuvC_P4
  SITE 106: note = RuvC_P5
  REGION 266..353: note = Tnp_domain
  SITE 274: note = Tnp_P1
  SITE 304: note = Tnp_P2
  SITE 312: note = Tnp_P3
  SITE 313: note = Tnp_P4
  SITE 326: note = Tnp_P5
MIYVGIDVAKDKHDCFITNSDGEVLFKAFTIKNNLDGFDELYQKIESVMEDASKVKVGLEATGHYSYNLLGYLLDKGLATFVINPLHTNLYRKSLSLRQTKTDKVDAHTIASMLMSDVNLKSYSDTSYHNEELKSLTRYRFDKVKERAKLKTSISRLVCILFPELEKLVPTLHQNSVYELLYEFPGAKQVANAHLTRLSNLLETASKGHYTKETSIAFREAARTSIGSNMPAKSLELKHTIKLIRELDSEIEEIENEIKVIMDEINSPILSIPGISYRMGAMIIAEIGDFSQFDSPDKILAYAGMSPSTYQSGQLDNCYARMEKRGSRYLRYALFNATAYVCLWDPTYKAYLAKKRAEGKHYYVAMSHATKKLVRLIYHLERTGQQYQKAI

SEQ ID NO: 18050 - protein, 398 aa, unidentified
  source 1..398: note = protein_d86962b
  REGION 4..160: note = RuvC_domain
  SITE 7: note = RuvC_P1
  SITE 57: note = RuvC_P2
  SITE 97: note = RuvC_P3
  SITE 99: note = RuvC_P4
  SITE 102: note = RuvC_P5
  REGION 275..362: note = Tnp_domain
  SITE 283: note = Tnp_P1
  SITE 313: note = Tnp_P2
  SITE 321: note = Tnp_P3
  SITE 322: note = Tnp_P4
  SITE 335: note = Tnp_P5
MISVGIDVSKGKSTVCIMRPYGEVISMPFDVNHTERELSELAAMIERLTGETRIIMEATGNYHLPILSFLKEYNCFIAVINPLVMKKYASTMLRKGKTDKLDAIKISNYGLDNWFRLTDYEVSEEIYVHLRLLGRQYAHYNKLRVESKLSLTTLLDMVMPGIKKSLSGKSYYSKKDKLSDFVEEYWHFDNITVKSEKRFINNYKSWAKKNGYHQSESKAIKIYALAQDGIPTLDSNAPSTKMLVLESVRVLREVEKTLSKILTQMQNLARTLKEYSTVREMNGVGDILAPRLIAEIGDVRRFHKGKALIAYAGIDAPPYQSGNFVGTKRRISKRGSANLRKTGYEVMKCLKCNKPEEDAVYNFIVKKEKEGKALKVAKIAGLNKFLRIYYARVKELYQ

SEQ ID NO: 18051 - protein, 354 aa, unidentified
  source 1..354: note = protein_6fb237c
  REGION 6..163: note = RuvC_domain
  SITE 9: note = RuvC_P1
  SITE 61: note = RuvC_P2
  SITE 102: note = RuvC_P3
  SITE 104: note = RuvC_P4
  SITE 107: note = RuvC_P5
  REGION 267..351: note = Tnp_domain
  SITE 273: note = Tnp_P1
  SITE 303: note = Tnp_P2
  SITE 311: note = Tnp_P3
  SITE 312: note = Tnp_P4
  SITE 324: note = Tnp_P5
MAMYFVGIDISKYKHDCCIISADVQKVVAKLTIKNDKAGFEQLLSVFNSLSIPENIKIGFKSTAHYALNLELFLENAHYSFMEINPLLIKEYKKSTSLRCTKTDSVDCESIARWLMSVEYKPHSKGFYHSYSLKSLTRLRDRLIRQRSFYLVKITNVLDHTFPEFKPFFHEHLSKTALYLLENYGSSEKTARMNSASYEKLRSLSRGKFSPQQFIQLKELAANTVGVNNSIFDVELNSLLILYKSLLKEIDTLKKEINRLIEEVHPHYMSVPGIGSISAAVIYSEYGDISSFSTPAQMLAFAGIEPGINDSGTESHGGRMVKHGSSQLRYVLINCCLPLIRFDMTFAAYYEKKT

SEQ ID NO: 18052 - protein, 358 aa, unidentified
  source 1..358: note = protein_760b060
  REGION 6..169: note = RuvC_domain
  SITE 9: note = RuvC_P1
  SITE 68: note = RuvC_P2
  SITE 106: note = RuvC_P3
  SITE 108: note = RuvC_P4
  SITE 111: note = RuvC_P5
  REGION 213..299: note = Tnp_domain
  SITE 220: note = Tnp_P1
  SITE 250: note = Tnp_P2
  SITE 258: note = Tnp_P3
  SITE 259: note = Tnp_P4
  SITE 272: note = Tnp_P5
MKKIVIGIDISKEKIDASAIDVRDCQLGVVRLDYQMFDNCPMGFRRMLVWARHLMKKATLQDVLFCCETTGGYDRILCDYLYGKGLDIWREGALQIKRSMGVRKGKDDKADSLMIAEYAMRHMDKAVIYESPNETIRELKALFLYRHKLVQEKAEKQVRAAHLTDTAAKSRSMRFILHDARRSVKAIQKSIKECEKHILELIESDEEIQRNYGHIVSVKGLSIVNATAFIAYSNNFRGITTANKMASYYGVASFRDRSGSSVDKKACVKYYSCSLLRATITQAAEWTVKENGIYRDYYLRLKAEGKPYGVIINNVKNKLIHLVFSLVTNDTDYEQNHEFLRVKRKTENRKSTQLENIN

SEQ ID NO: 18053 - protein, 341 aa, unidentified
  source 1..341: note = protein_4a1bfea
  REGION 6..148: note = RuvC_domain
  SITE 9: note = RuvC_P1
  SITE 52: note = RuvC_P2
  SITE 87: note = RuvC_P3
  SITE 89: note = RuvC_P4
  SITE 92: note = RuvC_P5
  REGION 211..299: note = Tnp_domain
  SITE 219: note = Tnp_P1
  SITE 249: note = Tnp_P2
  SITE 257: note = Tnp_P3
  SITE 258: note = Tnp_P4
  SITE 270: note = Tnp_P5
MNIKRIGIDLAKQVFQVHGVDGQEKVVVRKKLSRAQMLVYFQKLPPCLIGMEACSSAHYWARELQKIGHTVKLMAPQFVKPYVKSNKNDANDAEAICEAVARPTMRFVAIKSIEQQDIQAVHRIRSELVQQRTAKVNQIRGLLGEYGLVVGQRIDVLRKALPLMLEDAENGLTVDFRTLLEGLQQDLITLDERVDDMDKKIKLLASSNEDAKRLQQIPGIGPITATALISAIGDGKQFKRGRDLAAWLGLTPRQHSSGGKDRLLGISKRGDAYLRTLLIHGARAVLKVAGNKEDPRSRWIQNLCGRRNKNIAAVALANKNARIVWALLTKKTDFLPEGKPA

SEQ ID NO: 18054 - protein, 338 aa, unidentified
  source 1..338: note = protein_c226f02
  REGION 7..149: note = RuvC_domain
  SITE 10: note = RuvC_P1
  SITE 53: note = RuvC_P2
  SITE 88: note = RuvC_P3
  SITE 90: note = RuvC_P4
  SITE 93: note = RuvC_P5
  REGION 212..299: note = Tnp_domain
  SITE 220: note = Tnp_P1
  SITE 250: note = Tnp_P2
  SITE 258: note = Tnp_P3
  SITE 259: note = Tnp_P4
  SITE 271: note = Tnp_P5
MNKVTTIGLDLAKNVFHVVCCDARGKQVGRKMLRRSQILRYFANLPPCLVGMEGCASAHYWARELTAHGHQVRLIPPQYVKPFVRGNKNDYNDALAIAEAVIRPEMRFVAVKTPAQQDVQALHRLRERRIAERTALCNQVRGLMGEYGIVLPRGINTLRRQLPALLEGGENGLSEFFLQLLAESYRQLQELDAHIEFYTRELVQQSKHSDACQRLQTIPGYGPIVASVFYAQVGNGTGYRRGRDVSASVGLVPRQHSSGGKDTLLGISKRGDRYLRSLLIHGARSVVTQAAKKDDRLSRWINRIRAERGMNKATVALANKLARMGWAVLAHKTVYQAA

SEQ ID NO: 18055 - protein, 369 aa, unidentified
  source 1..369: note = protein_f94900c
  REGION 32..173: note = RuvC_domain
  SITE 35: note = RuvC_P1
  SITE 78: note = RuvC_P2
  SITE 113: note = RuvC_P3
  SITE 115: note = RuvC_P4
  SITE 118: note = RuvC_P5
  REGION 237..322: note = Tnp_domain
  SITE 245: note = Tnp_P1
  SITE 275: note = Tnp_P2
  SITE 283: note = Tnp_P3
  SITE 284: note = Tnp_P4
  SITE 296: note = Tnp_P5
MVRLVLLPHHEAVKPKEVAMPQRNVPRPAAVYGIDLGKNIFHVVALGSDGTVVQRVRFRRDTLLQFFQRAAPAIVGMESCAGSQWVARKIQTLGHKVRLIPAQFVKPYVKSNKSDIIDAEAIAEAATRPTMRFAALKTEEQTDLQALHRVRDQMIGTRTRLINQMRAFCLEYGVALRQGAGLFKLDLPEALKDPTNDLSPAMRKLLSELFADLRQLETRIADVTREIEANADREDAARRLMTIPGIGALGATALLAAVGNGRQFQKARDLAAWLGLVPREYSTGGKQKLLGISKRGNRYVRKLLVHGARSCFRHLDRTKDRLGSWLDGLQARMHPNKAVVALAAKMARIVWVVLTKPGALYERRDPAFT

SEQ ID NO: 18056 - protein, 393 aa, unidentified
  source 1..393: note = protein_c9c95f3
  REGION 4..164: note = RuvC_domain
  SITE 7: note = RuvC_P1
  SITE 59: note = RuvC_P2
  SITE 99: note = RuvC_P3
  SITE 101: note = RuvC_P4
  SITE 104: note = RuvC_P5
  REGION 266..353: note = Tnp_domain
  SITE 274: note = Tnp_P1
  SITE 304: note = Tnp_P2
  SITE 312: note = Tnp_P3
  SITE 313: note = Tnp_P4
  SITE 326: note = Tnp_P5
MFLVGIDIGKFKHSFCLVDKETGEIVIEPMFFENNKGGFDILLSSIKKISKNNLLIGMEDTGHYHLNLLKFLLDKQYQVALINPIATNLTRKMQGCITKNDKLDTLTICDVLSSNQRMKSFRITKLNRFDLYEQKQLTREHHNLKESLNQYSNRLQKCIDIVFPEFNSLFKSKYGVVYMNVLREFGSADAIAHTDIRTLRKCFDIGRGMRISLTPEKLKEAAKNSIGFPSLSEVLQIKHLVAQIELLNEQIAEIDKKIEEFSVKNNSPILSIPGISHFSGTSILAELGDIGNYSKPSQIIKYAGVAPLAYESSQFTAQHTAITKKGSKYLRKTLYQIITPVIQHNPVFKKFYQLKISQGKGHRCAQGHCVRKLMRVIYHLLSTNTQFNPELLK

SEQ ID NO: 18057 - protein, 345 aa, unidentified
  source 1..345: note = protein_f3a497d
  REGION 6..147: note = RuvC_domain
  SITE 9: note = RuvC_P1
  SITE 52: note = RuvC_P2
  SITE 87: note = RuvC_P3
  SITE 89: note = RuvC_P4
  SITE 92: note = RuvC_P5
  REGION 211..297: note = Tnp_domain
  SITE 219: note = Tnp_P1
  SITE 249: note = Tnp_P2
  SITE 257: note = Tnp_P3
  SITE 258: note = Tnp_P4
  SITE 270: note = Tnp_P5
MKITTIGIDLAKNVFQVHGVDEHGRAAFNKPLKREQMVAFFVNLPPCLVGMEACGSAHHWARKLQAMGHTVRLMAPQFVKPYVKTNKSDAADAQAICEAVTRPSMRFVPIKNVEQQGVLALHRVRQGFVKARTAQANQIRGLLAEFGLIVPQGIGHISERVPELIEDACNELPGAFRRLVQRLLEHLKELDRQVQELEAQIVAWHRQSDLSRKLELIPGIGPITACALVASLGDAKSFKDGRQVAAWLGLVPRQHSSGGKQHLLGISKRGDTYLRTLLIHGARSVIYHAQNKAADNPQCCWINSVVQRRNKNVAAAALANKNARIVWALLAHERSYEPGYVREPA

SEQ ID NO: 18058 - protein, 342 aa, unidentified
  source 1..342: note = protein_effeb0b
  REGION 7..148: note = RuvC_domain
  SITE 10: note = RuvC_P1
  SITE 53: note = RuvC_P2
  SITE 88: note = RuvC_P3
  SITE 90: note = RuvC_P4
  SITE 93: note = RuvC_P5
  REGION 211..297: note = Tnp_domain
  SITE 219: note = Tnp_P1
  SITE 249: note = Tnp_P2
  SITE 257: note = Tnp_P3
  SITE 258: note = Tnp_P4
  SITE 270: note = Tnp_P5
MSEATLIGIDLAKRVFQLHGARDDGSFVFRKKLSRPQLMAFVSRHPRCVIAMEACATAHGWGREFEKLGHEIRLIPLIYVKPFVKRQKNDAADAEAIVEAATRPTMRFVALKSEAQQARAMLFRTRQMFVGQRTQLINALRGHLAEHGLVAARGPAHFKRLADAIEDDDTALLQDVRELGRMYLEQIEGLNARIADIDGKVKSAAKEDGLARRAQTMPGVGPVTALAIETFAPDLATFRRGRDFAAWLGLVPKQHSTGGKQRLGKTSKMGQRDIRTLLVSGAMAVLQAVERFDTSSNGWLKRLLTRKPRLVAAIALANKMARGLWAMMTKQEDYRNPAAMIA

SEQ ID NO: 18059 - protein, 330 aa, unidentified
  source 1..330: note = protein_496304f
  REGION 8..154: note = RuvC_domain
  SITE 11: note = RuvC_P1
  SITE 59: note = RuvC_P2
  SITE 97: note = RuvC_P3
  SITE 99: note = RuvC_P4
  SITE 102: note = RuvC_P5
  REGION 202..289: note = Tnp_domain
  SITE 210: note = Tnp_P1
  SITE 240: note = Tnp_P2
  SITE 248: note = Tnp_P3
  SITE 249: note = Tnp_P4
  SITE 262: note = Tnp_P5
MKIWNVILGVDVSKLTLDICCAERNLHIKIDNCSKGFNDLKKWCKTNEIDLKETLMVLEFTGGYEYRFLQFCESLSIPYCRIPGLEIKKSLGMTRGKSDRIDAFRIGQYGEEKAKRLIPSKPLDKNILTLKQLLSFRKRLVREKAGLESTIKEREHMYPQKKADTITRIARAKVKSDAQHILQIEQEIIAVIKSNEAMWQNYRIITSIKGIGKINGWMTIAHTENFTSFTDPRKYGVYVGVIPFEHTSGTSVKARKRVSHLAHKELKQELNQAAKAAITHDREMAAYAERKLKSKEYRLVLNNVKFKLILRMFSLVKRGETYVENYNRAA

SEQ ID NO: 18060 - protein, 343 aa, unidentified
  source 1..343: note = protein_7cc7ede
  REGION 7..149: note = RuvC_domain
  SITE 10: note = RuvC_P1
  SITE 53: note = RuvC_P2
  SITE 88: note = RuvC_P3
  SITE 90: note = RuvC_P4
  SITE 93: note = RuvC_P5
  REGION 212..300: note = Tnp_domain
  SITE 220: note = Tnp_P1
  SITE 250: note = Tnp_P2
  SITE 258: note = Tnp_P3
  SITE 259: note = Tnp_P4
  SITE 271: note = Tnp_P5
MNEVITIGVDLAKNVFQVHGIDAEGGVIFRRQLRRAQMLPFFKKQPSCLVGMEACATSHHWARQLVELGHEVKLMPPKYVKPYVKRNKNDMADAEAICEAVTRPTIRFVEIKTPEQQSVLMLHRTRQLFVRQRTTLINALRAHLAEFGIVAGVGRNGLEKLLELIESGEDDRVPTGARDCLLALRNQLEMVKHQILDADRSILAWHRASEVSLRLDDIPGVRPLIASTLVASVPDPHIFKSGRDMAAWIGLVPRQNSTGGKERLGHISKAGNRYLRMLLVVGAMSVIRRAKQVGYTRRPWLTKLLERRSTKIAAIALANKIARTAWAMMAHGTFYHEPVSQAA

SEQ ID NO: 18061 - protein, 346 aa, unidentified
  source 1..346: note = protein_7e6218d
  REGION 6..148: note = RuvC_domain
  SITE 9: note = RuvC_P1
  SITE 52: note = RuvC_P2
  SITE 87: note = RuvC_P3
  SITE 89: note = RuvC_P4
  SITE 92: note = RuvC_P5
  REGION 211..299: note = Tnp_domain
  SITE 219: note = Tnp_P1
  SITE 249: note = Tnp_P2
  SITE 257: note = Tnp_P3
  SITE 258: note = Tnp_P4
  SITE 270: note = Tnp_P5
MNVTTVGIDLAKNVFQVHGVDSRGHAVLRKQLKRPQLLPFFANLPPCLVGMESCCGSHFFARRLEAFGHTVRLIAPRFVKPYVKTNKNDAADAEAICEAVGRPNMRFVPAKSIEQQAVLLMHRAREGFVRHRTAQVNQLRGLLMEFGIVFPKGIGAARTGIPRVLADETNELPARARHLLRRLFDHLCELDRQVKAIEEQLQAWHRDDPASQRLRRIPGVGFITATALVASIGDARAFKNGRQLSAWLGLVPKQYSSGGKQVLRRISKRGDAYVRKLLVVGARAVLRHLKAKPSEEPTWIDRLVTRRRSNVAAVALANKNARIVWALLAHDREYQADYRRCHAQAA

SEQ ID NO: 18062 - protein, 339 aa, unidentified
  source 1..339: note = protein_751658e
  REGION 6..147: note = RuvC_domain
  SITE 9: note = RuvC_P1
  SITE 52: note = RuvC_P2
  SITE 87: note = RuvC_P3
  SITE 89: note = RuvC_P4
  SITE 92: note = RuvC_P5
  REGION 210..300: note = Tnp_domain
  SITE 218: note = Tnp_P1
  SITE 248: note = Tnp_P2
  SITE 256: note = Tnp_P3
  SITE 257: note = Tnp_P4
  SITE 269: note = Tnp_P5
MNSIAVGVDIAKQVFQVHYIDPETGEIVNKPIRRAKFLEHFANRARCLIGMEACGGAHHWARQLMRLGHEVRLMPAAFVKAFNIRNKNDAADARAIWLAVQQPGKPVAVKTEMQQAMLALHRMREQLVKFRTMQINGLRRLMAEYGEVMSRGRAKLDAEIPAALGRLAERLPAALIDTLREQWNGLVRIDEQVAEIERRMREWQKDDRAVKAISRIPGVVLLTATAAVAMMGNAKAFRSGREFAAWAGLVPKQTGSGGKVNLHGISKRGDTYLRTLLIHGARSVLSHANDPGPWVEQMKKRRPLNVVVVALANKIARTIWAVLAHDRQYQKVYVNVKPI

SEQ ID NO: 18063 - protein, 386 aa, unidentified
  source 1..386: note = protein_8fefa05
  REGION 42..184: note = RuvC_domain
  SITE 79: note = RuvC_P2
  SITE 118: note = RuvC_P3
  SITE 120: note = RuvC_P4
  SITE 123: note = RuvC_P5
  REGION 255..342: note = Tnp_domain
  SITE 263: note = Tnp_P1
  SITE 292: note = Tnp_P2
  SITE 300: note = Tnp_P3
  SITE 301: note = Tnp_P4
  SITE 313: note = Tnp_P5
MQKLNDLSRSLTALEPDGTLIAVIEMSLSSWLIGGILPGVERQPLKKLAVDESALLKLLHRWREEAEKAGHRIERIVVAFEAGRDGFWLARWLKARSIEAYVIHAASVAVSREHRRAKTDRLDSELLKRAFLGWLRGERDHCKMVAIPSIMDEDAKRPNRERESLIGEQSRIVNRMKAALIRLGIRGFNPKLKRAAGRLDGLHTPEGEPIPPNTLAELRRDMERRRLVSNQIRRIEQARLQRLEQEPDDGPHAMVRLLARVIGVGIETADMLVREVLSRNMRDRRAVARYAGLTGSPDESGRKCREKGLARSGNARVRRGMIQLAWRLLMFQKNSALAQWFRARTENARGTRKTMIVALARKLLIALWRLVHEGVVPDGIVLRPAQ

SEQ ID NO: 18064 - protein, 332 aa, unidentified
  source 1..332: note = protein_83e7f72
  REGION 4..145: note = RuvC_domain
  SITE 7: note = RuvC_P1
  SITE 49: note = RuvC_P2
  SITE 84: note = RuvC_P3
  SITE 86: note = RuvC_P4
  SITE 89: note = RuvC_P5
  REGION 206..295: note = Tnp_domain
  SITE 214: note = Tnp_P1
  SITE 244: note = Tnp_P2
  SITE 252: note = Tnp_P3
  SITE 253: note = Tnp_P4
  SITE 265: note = Tnp_P5
MQLLAIDLGKQSFHIHGITNEGEVISKKVTRSKLEAAVQEHSPETVAMEACASAHHWGRQFEAQGYSVRLIHPRFVMPFVKGSKNDAVDAEAIYEAALRPTMRFVPVKTTEQQDLQMLHRTRDRLITQRTGLINHIRGLLGEYGVVIPVGAVRFRKDIRTAVADAKLSALERQNFNALIAEFEASDKRVAEIDRKLIAICRTDDRCKRLVTLPGVGPVIATALIAAVDDGRHFSSGRALAAWIGLVPRQYTTGGKPRLGGIGKRGNQYLRRQLIHGARSVLIRIAGRSDRRAKWAQDLLARAGHNKTLVAIANKTARIAWAVLQSGAGYKTV

SEQ ID NO: 18065 - protein, 342 aa, unidentified
  source 1..342: note = protein_1de6fc3
  REGION 6..147: note = RuvC_domain
  SITE 9: note = RuvC_P1
  SITE 52: note = RuvC_P2
  SITE 87: note = RuvC_P3
  SITE 89: note = RuvC_P4
  SITE 92: note = RuvC_P5
  REGION 211..294: note = Tnp_domain
  SITE 219: note = Tnp_P1
  SITE 249: note = Tnp_P2
  SITE 257: note = Tnp_P3
  SITE 258: note = Tnp_P4
  SITE 270: note = Tnp_P5
MSIAVLGIDLGKNSCSLAGLDERGAVVKRRRMRRENIAKFTSALTPCVIAMEACCGAHHVGRLLMAQGHTVRLMSPEYVRPYVKAQKNDDRDAEAIAEAATRPTMRFVELKSEEQLDMQTLHRARERLVGERTALINQLRAILLERGITVPQGRYKLAKYLDAAEEQTKSTLSSRILTLIDDMREQWHELDRRIDALDDEFADHARQDEAARRLATIPGIGVLNATALVAAIGDGRTFERGRDLAAWLGLVPRQVTTGGKPRLVGITKRGNKYLRKLLIHGARSAMTPLAKSATPLGQWLRALMERVHHNAAVVALANKLARIAWAVLRHGKEFKAAAIAAA

SEQ ID NO: 18066 - protein, 266 aa, unidentified
  source 1..266: note = protein_aa4128b
  REGION 3..78: note = RuvC_domain
  SITE 17: note = RuvC_P3
  SITE 19: note = RuvC_P4
  SITE 22: note = RuvC_P5
  REGION 137..224: note = Tnp_domain
  SITE 145: note = Tnp_P1
  SITE 175: note = Tnp_P2
  SITE 183: note = Tnp_P3
  SITE 184: note = Tnp_P4
  SITE 196: note = Tnp_P5
MAAKFVSPYRMAGKSGKNDAVDALAICEAVRRPHMRFVSVKDESQQSMQCLHRTRQGFIEEKTATYNRLRGLISEFGIIATQSTDALHHIVSEQKSFLSLQVQQCVDDLLEHVDRIEAHIAEYDQILFRMAKTDHRSQRLMELKGIGPTTACELVARIGNAHDFKNGRQRAAWLGLTPSQYSSGGKSKLGRITKAGDSYLRTLLVQGARSVLIGAGKRTDSFSRWVCSLVERRGYWRAVIAISAKNARLCWASLHYGDDFRLYSAS

SEQ ID NO: 18067 - protein, 341 aa, unidentified
  source 1..341: note = protein_60b1ca8
  REGION 8..149: note = RuvC_domain
  SITE 11: note = RuvC_P1
  SITE 54: note = RuvC_P2
  SITE 89: note = RuvC_P3
  SITE 91: note = RuvC_P4
  SITE 94: note = RuvC_P5
  REGION 213..300: note = Tnp_domain
  SITE 221: note = Tnp_P1
  SITE 251: note = Tnp_P2
  SITE 259: note = Tnp_P3
  SITE 260: note = Tnp_P4
  SITE 272: note = Tnp_P5
MSDYSYFCGIDLAKNHFSIHAVDQHGKVLLHKSVTRSKLLTTKANMPPMRIGVEACGGAHYWARTLRKFGHDARIMAVKYVAPYRTKGKNDLNDAVAICEAVQRPTTRFVPVKSPEQQAILSVHRMREHWVRERTALMNRIRALLSEFGLIIPVGRASLMRLVPDMLGNPENELPNLARATLADAFEHLKSLNQNIDNTEITFDAFAKVSTNVQRIMKVRGIGPQTATAILASIGNGAQFDKSRDFSAWLGLVPKQYSTGGKPRLGRITKHGDKYLRTLLVHGARTVIANLGDKQDRLSQWCRGVLERRGMNRAVVALAAKNARIIWSLIHNQTEYENYSA

SEQ ID NO: 18068 - protein, 342 aa, unidentified
  source 1..342: note = protein_b6155cd
  REGION 5..152: note = RuvC_domain
  SITE 8: note = RuvC_P1
  SITE 55: note = RuvC_P2
  SITE 92: note = RuvC_P3
  SITE 94: note = RuvC_P4
  SITE 97: note = RuvC_P5
  REGION 212..300: note = Tnp_domain
  SITE 220: note = Tnp_P1
  SITE 250: note = Tnp_P2
  SITE 258: note = Tnp_P3
  SITE 259: note = Tnp_P4
  SITE 271: note = Tnp_P5
MEHYAGIDVSLERSSVCVVDATGRIIREAKVPSEPEALVAFFGQLGLRPTRIGLEAGPLSQWLHAGLAQVGFEVVLLETRHVKAALSAMVVKTDRKDARGIAQLLRMGWYRPVHRKSPPAQEIRALLVGRKLLQAKLRDVELSIRGILRGFGLKVGEVSKGRFAARVRELVAGHEMLEAVIAAMLQARDGLQTEFMRLHRRMLAIVRGDAICRRLMTVPGVGALVAVTFKTAVDDPGRFRTAKAVGAHFGLTPKRYQSGETDVTGGISKVGDAMVRTALYEAANVMLTRTTRVSTLKRWALEVTRRRGMKRAKVALARKLAGVLHRMWANATDFRWGKEVIA

SEQ ID NO: 18069 - protein, 404 aa, unidentified
  source 1..404: note = protein_0046f74
  REGION 4..157: note = RuvC_domain
  SITE 7: note = RuvC_P1
  SITE 56: note = RuvC_P2
  SITE 94: note = RuvC_P3
  SITE 96: note = RuvC_P4
  SITE 99: note = RuvC_P5
  REGION 265..351: note = Tnp_domain
  SITE 273: note = Tnp_P1
  SITE 304: note = Tnp_P2
  SITE 312: note = Tnp_P3
  SITE 313: note = Tnp_P4
MWYVGLDWADTHHDVEVQDEGGKCVGTRRFAHSHKGLNELKAFLLGIAASPEQLACIVETNHGLLISFLLEAGIPVYPVNPKSANQLRKAAGAKTDRIDAHLLAKLGRFDQAELRRLEPDSPSVAELKTLTRDQDALIQTQTRLVNQLTACLKEYYPAALHLFAKVQQRSTLVFLLAYPTPQAALAASVEEITATLRRGKHTNPRHAAPKIFEELHRPQLVASEVIVRAKSRLMLSLVKQLLVVIEEIASYDKAIRPLFLSHPDQELWRSLPEAGKRLAPRLLAEWGDDRRRHADGTSVQTLAGTAPVPYESGNYAIAHKRFACLKPLRNALHQFAWQSTQHEAWAREYYQRKRAQGKTHSMAVRALANVWVRIIYAMWVNKTSYQTATFEAAQHAHAPRQRIA

SEQ ID NO: 18070 - protein, 345 aa, unidentified
  source 1..345: note = protein_d7e62a9
  REGION 12..155: note = RuvC_domain
  SITE 15: note = RuvC_P1
  SITE 58: note = RuvC_P2
  SITE 94: note = RuvC_P3
  SITE 96: note = RuvC_P4
  SITE 99: note = RuvC_P5
  REGION 217..302: note = Tnp_domain
  SITE 225: note = Tnp_P1
  SITE 255: note = Tnp_P2
  SITE 263: note = Tnp_P3
  SITE 264: note = Tnp_P4
  SITE 276: note = Tnp_P5
MTPMTPMTPMTVGLDLAKNVFHVHVADASGRMLESKKLVRRHVLDFFMALPSCLVGLEACATAHYWARQLRDLGHDVRLIPPGYVKPFVRRGAKNDATDAAAICEAVTRPGMRFVPIKSRQGQAFLMLHRARALLIRQRTMAACAFRAHLAEYGIVVAQGRHRVEVLTEQLDELREDLPEDACFALDALVEQLDALNRQIAVIDARLAERHKTDAIFRLLATIPGIGPITATAFTATIPDPSAFRLGREFAAWLGLSPRQNSSGGKHRLGGITKKGDRYLRHLLVLGARTVVRYPKARSRVDGPWIEGLLARRRPMVVAVAVANKLARTIWAMLSTGEVFRPAQL

SEQ ID NO: 18071 - protein, 406 aa, unidentified
  source 1..406: note = protein_39600ee
  REGION 4..163: note = RuvC_domain
  SITE 7: note = RuvC_P1
  SITE 60: note = RuvC_P2
  SITE 100: note = RuvC_P3
  SITE 102: note = RuvC_P4
  SITE 105: note = RuvC_P5
  REGION 271..357: note = Tnp_domain
  SITE 279: note = Tnp_P1
  SITE 310: note = Tnp_P2
  SITE 318: note = Tnp_P3
  SITE 319: note = Tnp_P4
MLFVGDDRAEDHHDVEVQDEQGRAVKRARLPEGAAGVARFHELVASVLPQDAEPAEVLVCIETDRGPWVRALVAAGYRVFGVNPKQAARHREVMGNSGAKSDKADAHALADMVRTRRHQLRQIAADSDEAEAVKVVARAHQTMIWERTRHMLRLRSALRDYFPAALAAYQPLGLTSTAVLALLAKAPTPHAAARLTVTQITAALKGYRDKSAKAAAIQAELHAEHLGQSDLVASAYAATVAATVAVLQTLNTQIATLERQVEAHFGRHSDAEILLSQPGIGAILGARVLAEFGDARGRYASAKARKNYAGTSPITRQSGRSKSVHARFIHNDRLIDALHMQASAAILHDPAVRAYYDQLKTRDLSHNAALRQVGNRLVGILHGCLKTHTLYDRATAWSHRQEDLAA

SEQ ID NO: 18072 - protein, 341 aa, unidentified
  source 1..341: note = protein_1e92874
  REGION 6..148: note = RuvC_domain
  SITE 9: note = RuvC_P1
  SITE 52: note = RuvC_P2
  SITE 87: note = RuvC_P3
  SITE 89: note = RuvC_P4
  SITE 92: note = RuvC_P5
  REGION 211..299: note = Tnp_domain
  SITE 219: note = Tnp_P1
  SITE 249: note = Tnp_P2
  SITE 257: note = Tnp_P3
  SITE 258: note = Tnp_P4
  SITE 270: note = Tnp_P5
MNIKRVGIDLAKQVFQVHGVDCHDKAVLRKQLRRNQFLGFFATLSPCLIGMEACGGAHHWARELQKQGHTVKLIAPQFVKPYVKSNKNDANDAEAICEAVGRPSMRFVTIKTVAQQDLQAIHRIRSELIRQRTAKVNQIRGLLAEYGLVVGRQVHVLRRALPDLLENADNGLSFDFRALLDNLRADLVHFDERVAEMDKKIHALAHSEPAAKRLLSIPGVGPVSATAILCAVGDGKQFKRGRDMAAWLGLTPKQHSSGGKDRLLGMSKRGDTYLRTLLIQGAQSALKVIDKKTDPRSQWLQNLCGRRPKNVAAVALANKNARIAWALLNNETNYLSEGKPA

SEQ ID NO: 18073 - protein, 463 aa, unidentified
  source 1..463: note = protein_21e136b
  REGION 6..159: note = RuvC_domain
  SITE 9: note = RuvC_P1
  SITE 57: note = RuvC_P2
  SITE 98: note = RuvC_P3
  SITE 100: note = RuvC_P4
  SITE 103: note = RuvC_P5
  REGION 221..307: note = Tnp_domain
  SITE 229: note = Tnp_P1
  SITE 259: note = Tnp_P2
  SITE 267: note = Tnp_P3
  SITE 268: note = Tnp_P4
  SITE 279: note = Tnp_P5
MAAVMIGADPHKGSHTAVAAGLAEEPLGELRVRACAARAGELVAWTAVWPERTWAVEGARGLGRLLARQLAAAGERVLDVQPELACRVRLLQAGDTNKNDPDDALPAAIAALRSRACRPVTADDYPAVLKVRAERHRDLGRARNQVACRLHAVLCDLVPGGLAKEISAAQAAEILEQAAPSGAVAQARAGLATEFLAGLRRLDAQLRGTRKKLAAAVRASGTTLTQVFGVGPVVAGTIAGDVTDVARFPGRDHFAACNGTAPAGASSGNRTVRRLPLRGSRRVSHAIHMAAINWIRHRHSDGRACYEKKLAGGKTHKEALRSLQRRISDAIFARLQADARRAAEASVTGPGGQPGNDSASSAAGSHPARRLFGQATPGPDTTIRPGTTAGPPSGPRSSRTESRGRAGHSPVAATEPSAKRQAQVERPEPSADERPGGTARRRPHPAARKAPVGTTSKKNPTPT

SEQ ID NO: 18074 - protein, 399 aa, unidentified
  source 1..399: note = protein_3bc8a96
  REGION 7..163: note = RuvC_domain
  SITE 10: note = RuvC_P1
  SITE 61: note = RuvC_P2
  SITE 101: note = RuvC_P3
  SITE 103: note = RuvC_P4
  SITE 106: note = RuvC_P5
  REGION 269..356: note = Tnp_domain
  SITE 277: note = Tnp_P1
  SITE 308: note = Tnp_P2
  SITE 316: note = Tnp_P3
  SITE 317: note = Tnp_P4
  SITE 329: note = Tnp_P5
MEQHVWAGIDAGKSEHHCVAIDTDGHRLLSHRVANDETALCELLDQVLSLTGHGKVSWAIDLNHGGAALLITLLLDRDQQLLYIPGRTVHHAAGSYRGEGKSDAKDAAIIADQARMRRDLHPVRVGDETAVDLRLLTAHRTDLVCDRTRAINRLRALLLEYFPALERAFDYSTCKAALVLLTGYQTPDRIRRVGARRLEEWLQKNRVRTASRVAHTAVEAARAQHTRVPGQQVAAEMVARLAKEVIALDTQIGETETQIEARFRGHRHAPIILSMPRFGSILGAEFLAATGGDMTLFDSADRLAGVAGLAPVPRDSGRVRGNLHRPRRYDRRLLRACYLSAMVSIRSCPESRAYYDRKRTEGKRHTQAVLALARRRLNVLWAMLRDGAVYRPTPTAAAA

SEQ ID NO: 18075 - protein, 343 aa, unidentified
  source 1..343: note = protein_42be7c7
  REGION 7..149: note = RuvC_domain
  SITE 10: note = RuvC_P1
  SITE 53: note = RuvC_P2
  SITE 88: note = RuvC_P3
  SITE 90: note = RuvC_P4
  SITE 93: note = RuvC_P5
  REGION 212..296: note = Tnp_domain
  SITE 220: note = Tnp_P1
  SITE 250: note = Tnp_P2
  SITE 258: note = Tnp_P3
  SITE 259: note = Tnp_P4
  SITE 271: note = Tnp_P5
MVKITTIGLDLAKSVFQVHAITEDGQIAVRRALRRSQVLEFFRNIAPCLVGIEACGSAHYWANAISEFGHSVRIMPPAYVKPYVKRNKTDAADAEAICEAVTRPTMRFVPIKSPEEQAANMVLKTRELFVRQRSQTANAMRAHMAELGIIAATGMTSIAKLIAVLRDDRDQRLPNSARTALLEMAEQIEKLTTRVEALDSKIVAAVKADEAARRLTTTPGVGPIIAATVRAAVPDPAAFRTGRDLAAWIGITPRANSSGGKERLGKISKQGNKQLRTLLIVGATSILKQVRRGVKLPAWVVSLIARRPYKVVAVALANKMARTIWALLVKGGIYQPPSSSVAA

SEQ ID NO: 18076 - protein, 420 aa, unidentified
  source 1..420: note = protein_ab082cb
  REGION 22..174: note = RuvC_domain
  SITE 25: note = RuvC_P1
  SITE 73: note = RuvC_P2
  SITE 111: note = RuvC_P3
  SITE 113: note = RuvC_P4
  SITE 116: note = RuvC_P5
  REGION 281..367: note = Tnp_domain
  SITE 289: note = Tnp_P1
  SITE 320: note = Tnp_P2
  SITE 328: note = Tnp_P3
  SITE 329: note = Tnp_P4
MKSASTTPITALPDEPPNSVTGGLDWARDDHAASVVDARGREQARHSVEHSAAGLAELVRVFLDAGCREVAIERPDGPVVDALLAAGITVVVISPNQVKNLRGRYGSAGNKDDRFDAYVLADTLRTDRARLRPLTPDSPATITLRRTVRARKDLVAHRVALANQLRAHLRNALPAAVGLFAAIDSAISLAFLTRFDTQDRVDWLSPKRLASWLDSVGYSGRTDPAVLHARLAGAPRGATGTQATAHAHITHALVAVLRGLLEQITALEAQIDTQLDAHADAHIFTSLPRAGRVRAARLLAEIGDCRARFPTPDALICLAGTAPSTRQSGKLRTVTFRWSCDKQLRDAVIDFAADSRHAHPWAANLYNRARARGHDHPHAARILARAWLYVIWHCWHDGVSYNPDHHHALQRLLQDQQAAA

SEQ ID NO: 18077 - protein, 327 aa, unidentified
  source 1..327: note = protein_f1d50e5
  REGION 5..157: note = RuvC_domain
  SITE 8: note = RuvC_P1
  SITE 62: note = RuvC_P2
  SITE 102: note = RuvC_P3
  SITE 104: note = RuvC_P4
  SITE 107: note = RuvC_P5
  REGION 202..288: note = Tnp_domain
  SITE 210: note = Tnp_P1
  SITE 239: note = Tnp_P2
  SITE 247: note = Tnp_P3
  SITE 248: note = Tnp_P4
  SITE 261: note = Tnp_P5
MKAVIGIDVSKHKLDCLWLRDSETRKAKVKVHPNTPAGHRQLLAWVEHQTGRSVRECRFVLEATGVYHQRLAYALHEAGAEVAVLNPAQVRDYARGLAVRTKNDRKDAMVLALYGAKETVRRWQPEPEPVRQLKGLLARLEALEADIRREHNRLEKARVGGSAAAVIESIEKVLRQLEQEKARVERLIDEHIDKHPPLKHDQQLLETIPGVGKVLSRHMLSVFRARDFDNAGQMAAFLGVVPVEHSSGTSVRKPPRLSKAGSARLRAKLYLPAVVAAQHNPTARAVYERLLKRGKAKMAAIGAVMRKLVHICYGVLKHQKAYAPQAA

SEQ ID NO: 18078 - protein, 342 aa, unidentified
  source 1..342: note = protein_f43a6cf
  REGION 7..148: note = RuvC_domain
  SITE 10: note = RuvC_P1
  SITE 53: note = RuvC_P2
  SITE 88: note = RuvC_P3
  SITE 90: note = RuvC_P4
  SITE 93: note = RuvC_P5
  REGION 211..301: note = Tnp_domain
  SITE 219: note = Tnp_P1
  SITE 249: note = Tnp_P2
  SITE 257: note = Tnp_P3
  SITE 258: note = Tnp_P4
  SITE 270: note = Tnp_P5
MKEVSIVGLDLAKRVFQVHAARSDGSVVLRRKLSRGQLVPFFTELPKCTVAMEACATAHYWAREIGKLGHDVRLIPPAYVKPFVKRQKNDAADAETIVEAATRPSMRFVAPKTESQQACSMLFRTRDLFVRQRTQLINALRAHLAEHGVIAPQGIANLALLAEIIEDHESGLELIVVETGRLYLDQIAALSSRIASLEKALRSEAKRSQSTARLMSMPGMGPITAMAVEAFAPTMTTFRGGRDFAAWLGLVPKQHSSGGKQILGRTSKMGQRDIRRLLIIGAMTVIRWACRKAPPENSWLARMLARKPRMLVAIALANKMARSIWAMMTRNEDYKDSALAAA

SEQ ID NO: 18079 - protein, 430 aa, unidentified
  source 1..430: note = protein_9c0a39b
  REGION 20..181: note = RuvC_domain
  SITE 23: note = RuvC_P1
  SITE 79: note = RuvC_P2
  SITE 120: note = RuvC_P3
  SITE 122: note = RuvC_P4
  SITE 125: note = RuvC_P5
  REGION 288..377: note = Tnp_domain
  SITE 296: note = Tnp_P1
  SITE 326: note = Tnp_P2
  SITE 334: note = Tnp_P3
  SITE 335: note = Tnp_P4
  SITE 347: note = Tnp_P5
MKYNTQNAKIASITEETLVLGIDVGSATHYVRAFDWRNYEFSDKPLAFSNDEAGFLTFMAWVEDIKEKAGKTAVIPGMEPTGHYWFNLGKFLQDSGMRPVHVNPHHVKKSKEMDDNNPDKNDRKDPKTIAALVNEGRFSYPYIPTGGYAEIRSLSNLRFQTQEEITRIRNRIARWISIYFPEYKDVYGKLDAVSGMMVLKEAPLPVQIKELGAGGINQIWRDAKLRGAGMKRAKTLLSAAEHSVGSQEAPEAASMEIWNLLEDYEKYSSRMDDLMARIEEKIKEVPYVDKLLEIKGIGLKTVYGFIAEVGDLSRFDDPKQLQKLAGYAIVKNSSGKHAGESHISYRGRKRLRYVLYEAAISVIGKNGEFREIHRYYQTREKNPLKKMQSVVAIACKVLRVFYAILTKGVDYDGEKMLGDIRRPAMSVQAA

SEQ ID NO: 18080 - protein, 342 aa, unidentified
  source 1..342: note = protein_5eb67b3
  REGION 6..148: note = RuvC_domain
  SITE 9: note = RuvC_P1
  SITE 52: note = RuvC_P2
  SITE 87: note = RuvC_P3
  SITE 89: note = RuvC_P4
  SITE 92: note = RuvC_P5
  REGION 210..293: note = Tnp_domain
  SITE 218: note = Tnp_P1
  SITE 248: note = Tnp_P2
  SITE 256: note = Tnp_P3
  SITE 257: note = Tnp_P4
  SITE 269: note = Tnp_P5
MKDLIIGVDLAKRVFQVHGTNQAGHENFRKKLTRDQFRVFMAKQPPCSVVFEACGSANYWAREMAVLGHEARLIPPQYVRPFVKRQKNDAADAEAIVVAARQPEMRFVTPKTEEQQAKAVLFRSRQRLVNQRTELVNAVRSTLYEYGYVFPVGLVHLKRIEAVIEDVASGLPTIIIEECKDLLAQIAQKTESIAVRNKQLQKIAAASDTARLLQTMPGVGPLIALAVEAFAPDMAQFKRGRDFAAWLGLVPRQYSSGGKERLGRLSKAGQSDIRRLLVIGAMSRFVGPARQKVGANSWIGRMLDRKPKMLVAIALANKMARQIWAMMTTNSDYRDPVQVAAV

SEQ ID NO: 18081 - protein, 343 aa, unidentified
  source 1..343: note = protein_16500c0
  REGION 7..149: note = RuvC_domain
  SITE 10: note = RuvC_P1
  SITE 53: note = RuvC_P2
  SITE 88: note = RuvC_P3
  SITE 90: note = RuvC_P4
  SITE 93: note = RuvC_P5
  REGION 212..298: note = Tnp_domain
  SITE 220: note = Tnp_P1
  SITE 250: note = Tnp_P2
  SITE 258: note = Tnp_P3
  SITE 259: note = Tnp_P4
  SITE 271: note = Tnp_P5
MSEQKIIGIDLAKTNFYLFSINAHGKPAGKSKLSRNQLLNWLAQQPKMTVAMEACGASHYWAREIRKLDHDVILLPAQHVKAYQRRQKNDYNDAQAIAEACQHGTIRPVPIKTLGQQDVQTFLKMRRLVSMERTQLINHVRGLLAEYGIVFSKGATELRQKLPALLEDAENELTDTMRTLLHQQYIRLITLDNELEWYDSEQKKYVRQDPVCKRLLSILGFGPLVSQAIKSWMGDGKQFRRGRDASAAMGLVPRQFSTGGKQVLLGITKYGDQYVRSMLIHGARAVLFRASEKTDSLSVWVNRIREKRGFNRAVVALANKLLRIAWVIIARNEMYLPATKQNQ

SEQ ID NO: 18082 - protein, 319 aa, unidentified
  source 1..319: note = protein_68c6fa4
  REGION 6..152: note = RuvC_domain
  SITE 9: note = RuvC_P1
  SITE 57: note = RuvC_P2
  SITE 97: note = RuvC_P3
  SITE 99: note = RuvC_P4
  SITE 102: note = RuvC_P5
  REGION 192..278: note = Tnp_domain
  SITE 200: note = Tnp_P1
  SITE 230: note = Tnp_P2
  SITE 238: note = Tnp_P3
  SITE 239: note = Tnp_P4
  SITE 251: note = Tnp_P5
MSQVTVGVDIAKHKFDVARLENGKYKHKKFDNTPEGFAALIVWLTTFGGVKPSVCMEATGAYSIPLAECLAQSGYPVAVVNPARIKGFAKSELSRIKTDKADAKLIARYAQEKKPPLWTPPPANIRELQALLRRIEDLLEMQQMEKNRLDTADPTIAESIRAVLAHLEQALKTTRERVQRLIDQDPDLRHRRALLETIPGIGEASSAHLMVALSDHYGFTTAKQAVAFAGLNPALNESGKWKGKTRISKMGDPMLRAKLYMPAVVAGRHNPVIRLFRERLAARGKNGMAIACASMRKLVHIAFAILKSNKPFDPNFALA

SEQ ID NO: 18083 - protein, 405 aa, unidentified
  source 1..405: note = protein_2519b7a
  REGION 4..157: note = RuvC_domain
  SITE 7: note = RuvC_P1
  SITE 56: note = RuvC_P2
  SITE 94: note = RuvC_P3
  SITE 96: note = RuvC_P4
  SITE 99: note = RuvC_P5
  REGION 265..351: note = Tnp_domain
  SITE 273: note = Tnp_P1
  SITE 304: note = Tnp_P2
  SITE 312: note = Tnp_P3
  SITE 313: note = Tnp_P4
MWYVGLDWADTHHDVEVPYLAGKRVGVRRFAHSHDGLNELQAFLLGIAASPEDLACIVETNHGLLITFLLEAGIPVYPVNPKTANQLRKAAGAKTDQIDAHLLAKLGRLELAELRRLEPDSALVQELKTLTRDQDALIQTQTRLVNQLTACLKEYYPAALQLFAKGKPRSTLVFLQTYPTPQAAQAASLAELTATLRAGKHPNPTKAAPKIFAELHRPQLVASEVMVRAKSRLLLSLVKQLLVVIEEIESLDKAIRPLFLRHDDQELWRSLPRAGKHLAPRRLSEWGDDRGRYADAASVQTLAGTAPVPFQSGHYAKAHKRFACVKPLRNVLYQFAWQSTRQEAWALAYYQRKRARCGKSHSMAVRALANVWVRIIYRMWQSKTNYQTVTFEAARLAHAPRQHVA

SEQ ID NO: 18084 - protein, 284 aa, unidentified
  source 1..284: note = protein_e77d8e8
  REGION 7..152: note = RuvC_domain
  SITE 10: note = RuvC_P1
  SITE 54: note = RuvC_P2
  SITE 94: note = RuvC_P3
  SITE 96: note = RuvC_P4
  SITE 99: note = RuvC_P5
  REGION 158..242: note = Tnp_domain
  SITE 166: note = Tnp_P1
  SITE 195: note = Tnp_P2
  SITE 203: note = Tnp_P3
  SITE 204: note = Tnp_P4
  SITE 215: note = Tnp_P5
MSEPVYVGIDVAKRTFEVATTGQAQTFSLGNDEAGHAQLCQLLAPLSPRLVLLEATGGYEQDLALALSAAGLRVSVINPRQARDFARCMGKLAKTDRIDTQALRGFAALLDAQGHEPRMLADEQQRELTALVVRRRQLVAMLVAERQRLALAHHADLAALLTSVKGVGPTTASTLLAQLPELGQLNRKQITSLVGLAPINRDSGTLRGQRHIFGGRADVRRVLFVAALVGTRFNRVLKAFYARLLAAGKPKKVALLACMHKLLVILNAIARTKSPWRNELAEAV

SEQ ID NO: 18085 - protein, 407 aa, unidentified
  source 1..407: note = protein_0811741
  REGION 4..160: note = RuvC_domain
  SITE 7: note = RuvC_P1
  SITE 57: note = RuvC_P2
  SITE 97: note = RuvC_P3
  SITE 99: note = RuvC_P4
  SITE 102: note = RuvC_P5
  REGION 274..361: note = Tnp_domain
  SITE 282: note = Tnp_P1
  SITE 312: note = Tnp_P2
  SITE 320: note = Tnp_P3
  SITE 321: note = Tnp_P4
  SITE 334: note = Tnp_P5
MNAVGIDVSKGKSMMMALQPMNQVVLKPREYPHTEVGLEQMAHDILRLGEDTRVIMEATGRYHEPVVAVLHEHGIRVTVMNPLFIKQSGGGSIRKVKTDKADARKIAKYGLDNWTDLREYTPMEAIREQLKLISRQYDLYMKNVVALQNNLISLTDKVFPGVNEMFSSPDRADGSQKWVDFIMTFWHCECIALISEAAFTERYRKWCKRKGYHFSGSKAADLYIDSIGHITTLPKNSNTKLIIITAAKELTSAKAALAVLRAEMDRLARQLPEYKTVRAMYGVGERTAPQLMAEIGDVRRFPRRSSIVSFAGVDPAVDESGKHISKSNPTTKRGSPHLRKTLYQIVCTYLLKAPADEPVYQFLDKKRAEGKPYFVYMTAAQNKFLRIYYARVKECLLAADAREYSES

SEQ ID NO: 18086 - protein, 343 aa, unidentified
  source 1..343: note = protein_0ef6270
  REGION 6..146: note = RuvC_domain
  SITE 9: note = RuvC_P1
  SITE 52: note = RuvC_P2
  SITE 87: note = RuvC_P3
  SITE 89: note = RuvC_P4
  SITE 92: note = RuvC_P5
  REGION 211..296: note = Tnp_domain
  SITE 219: note = Tnp_P1
  SITE 249: note = Tnp_P2
  SITE 257: note = Tnp_P3
  SITE 258: note = Tnp_P4
  SITE 270: note = Tnp_P5
MEIRSVGIDLGKTTFHLVALGDNCKVLLKKKFTQKQLIAFTANLQTSLIGMEACSGAHFLGRTLREQGHDVKLIPAQFVKPFVKSNKNDFLDAEAIAEAVDRENMRFVPIKTDDQLDLQALHRVRDRLIARRTSVINQLRAFLLERGLVFAKSPARLRERMPEILENAEEDLTPRMRNLLAQLWNEWKDLEQRVVDLNQEVELIASSDAACTRLRQIPGVGPLVATAIVAAIGNGAAFHKGREFSSWLGLVPRQHSTGGKARLFGISKRGNNYLRKIFIHGARAVVLRSKRDRVAMGAWMTALEARAPRNVLIVATANKLARIAWAVLSSGQDYRAVQEPVAA

SEQ ID NO: 18087 - protein, 343 aa, unidentified
  source 1..343: note = protein_6318faa
  REGION 7..149: note = RuvC_domain
  SITE 10: note = RuvC_P1
  SITE 53: note = RuvC_P2
  SITE 88: note = RuvC_P3
  SITE 90: note = RuvC_P4
  SITE 93: note = RuvC_P5
  REGION 212..303: note = Tnp_domain
  SITE 220: note = Tnp_P1
  SITE 250: note = Tnp_P2
  SITE 258: note = Tnp_P3
  SITE 259: note = Tnp_P4
  SITE 271: note = Tnp_P5
MQTITTIGLDIAKSVFQVHGVDAGGQVVIRHRLKRRYVQAFFQKVPPCLVGIEACASSHHWSRELRALGHTVRLIPPAYVKPYVKRQKNDAADAEAICEAVTRANMRFVPTKTPEQQSGMVLHRTRHLCMRQQISVINAIRAHFAEFGIVAAVGRKGVEELLDIVADPDDKRLPEIARACLAILGTQLRRLKEQILEFDRMIRAWHRSTEMSMRLDEAPGVGPVLATALVATVADPNAFRSGRNFSAWIGLVPKQHSSGGKNRLGSISKQGDRYLRGLFVIGALAVIRYAKIHGTKHRPWLTALLARKPAKVAAIALANKIARMVWAMMARGERYKEPVALAA

SEQ ID NO: 18088 - protein, 325 aa, unidentified
  source 1..325: note = protein_4ba444e
  REGION 6..148: note = RuvC_domain
  SITE 9: note = RuvC_P1
  SITE 54: note = RuvC_P2
  SITE 92: note = RuvC_P3
  SITE 94: note = RuvC_P4
  SITE 97: note = RuvC_P5
  REGION 197..284: note = Tnp_domain
  SITE 205: note = Tnp_P1
  SITE 235: note = Tnp_P2
  SITE 243: note = Tnp_P3
  SITE 244: note = Tnp_P4
  SITE 257: note = Tnp_P5
MKNIIIGIDISKKTLDICIKENQLVKHLNIENKVPAIKRFLKAYTKENVLIAMENTGRYNWTLFEVLEPFKFRVYVISPLHLKKSIGITRGKNDKIDALRICNFIEKNHEETPQWSPSPQAIKQIKVLLTERALTIKMKKQLTGYQHDYKLMKSIKLDKHLLKLNEQLIKSIDAQIKGIEDNIEQIISDDQKLKQQYQLIKSVPGVGKVLAWVFLSKTDGFTSITNPRKMACYSGVVPFDFQSGTSIKKRPGVSMLADKTIKSTLHLGAMSAIRHSNDLQTYYQRKVEEGKNKMSVLNAVRNKIIHRVFAVIKNQRPYQKDLVLS

SEQ ID NO: 18089 - protein, 391 aa, unidentified
  source 1..391: note = protein_b82dc47
  REGION 4..163: note = RuvC_domain
  SITE 7: note = RuvC_P1
  SITE 60: note = RuvC_P2
  SITE 101: note = RuvC_P3
  SITE 103: note = RuvC_P4
  SITE 106: note = RuvC_P5
  REGION 266..353: note = Tnp_domain
  SITE 274: note = Tnp_P1
  SITE 304: note = Tnp_P2
  SITE 312: note = Tnp_P3
  SITE 313: note = Tnp_P4
  SITE 326: note = Tnp_P5
MICVGIDVAKDKHDCFIMNSEGEVLYDVFTVQNSKEGFEALLQSIVTCTGNGEKIKVGLEATGHYSYNLLGFLLDKGLPTYVINPLHTNLFRKSQSLRKTKTDRVDARMIAYMLMSDSSLKPYTNIAYHNSELKSLTRYRFDKVKERAKLKSSVSRLVNILFPELEKLLPTVHTTSSYALLSELPSAKHISEVHLSHLINLLYVASKGRYNRDKAIQIRETARNSIGTYMPAKSLELKHTIKLIRELDNEIAEIESAIKKIMDEIDSPITSIPGIGLSMAAMIIAEIGDFSNFDSPDKVLAFSGLSPSTYQSGKLNNCYAHMEKRGSRYLRYALYNATKYVCFWCPIFAEYLNKKRSEGKHYNVAISHAAKKLVRLIFALQKSGQPYLAKF

SEQ ID NO: 18090 - protein, 395 aa, unidentified
  source 1..395: note = protein_4c6b100
  REGION 4..162: note = RuvC_domain
  SITE 7: note = RuvC_P1
  SITE 60: note = RuvC_P2
  SITE 101: note = RuvC_P3
  SITE 103: note = RuvC_P4
  SITE 106: note = RuvC_P5
  REGION 267..354: note = Tnp_domain
  SITE 275: note = Tnp_P1
  SITE 305: note = Tnp_P2
  SITE 313: note = Tnp_P3
  SITE 314: note = Tnp_P4
  SITE 327: note = Tnp_P5
MFYVGIDIGKYTHYASIIDHTGAPLTKPFSFKNHTNGGQTLLAWISQYIDSPSNVQIGMEATGHYWLATYSFLLDQGFSVIVLNPLQTNAWRKGTEIRKRKTDAIDATLIADVIRFGRFKETPLIDEKMFTLKQLSRFRHSLITNMGDLKRKAIVVLDQTFPEYQGVFSDVFGKTSSQILMDYASPSDYEGVSVDDLTKIIETTSRKRLGEKKAKELITLASQSFGVTFCKDAFAFQLKMLMEQIRFLEEQVEQCEQQMNQFLIELDTPITTIPGIGPILGATILSEIGDIHRFDKPAKLVAYAGIDASVSQSGQYEASRTTMSKRGSSHLRRALFQAAISGYRSDPVLKAFYEKKRAQGKHYYVCIGAVAKKLCYIIYTILKNNKPYQVPHHSE

SEQ ID NO: 18091 - protein, 343 aa, unidentified
  source 1..343: note = protein_e7af965
  REGION 6..147: note = RuvC_domain
  SITE 9: note = RuvC_P1
  SITE 52: note = RuvC_P2
  SITE 87: note = RuvC_P3
  SITE 89: note = RuvC_P4
  SITE 92: note = RuvC_P5
  REGION 211..294: note = Tnp_domain
  SITE 219: note = Tnp_P1
  SITE 249: note = Tnp_P2
  SITE 257: note = Tnp_P3
  SITE 258: note = Tnp_P4
  SITE 270: note = Tnp_P5
MQIAILGIDLGKNSCSMAGLDEAGRVLLRRRVRRESVIKFVSGLPACVVAMEACGGAHHLGRLFQKQGHEVRLMPPEYVRPYVKAQKNDDRDAEAIAEAASRPAMRFVELKSEEQLDMQILHRARDRLVAERTALINQLRAILLERGIIMSRGRRKLETSLAMLMDADIASVSPRIRTLIEDMQGQWHDLDRRIAAFDEEFKAYARSDKACRLLVTIPGVGPLNATAFVAAIDNAQAFGHGRDLAAWLGLVPRQMTTGGRPKLLGISKRGNGYLRKMLIHGARAALPTLSKGQTILGSWLRSLLARAHINKVVVALAAKMARIIWCVLRNGTAFEAVAVREPA

SEQ ID NO: 18092 - protein, 333 aa, unidentified
  source 1..333: note = protein_3f38005
  REGION 6..147: note = RuvC_domain
  SITE 9: note = RuvC_P1
  SITE 51: note = RuvC_P2
  SITE 86: note = RuvC_P3
  SITE 88: note = RuvC_P4
  SITE 91: note = RuvC_P5
  REGION 208..299: note = Tnp_domain
  SITE 216: note = Tnp_P1
  SITE 246: note = Tnp_P2
  SITE 254: note = Tnp_P3
  SITE 255: note = Tnp_P4
  SITE 266: note = Tnp_P5
MTMNLLAIDLGKQSFHLHGIDTNGVVVSRKVSRTKLTEIVNELAPETIAMEACASAHHWGRLFMTAGREVRLINPRFVKPFVRGSKNDAVDAEAIYEAATRPTMRYVPVKSTDQQDLQSLHRIRERLIVQRTSLINHTRGLLAEYGIVLPQGAWRFAAQAPTAIEQAGLSDLGRELFEELLDQLRDANARLAKLDARIMEICRQHDDCRRLATLPGVGPIIATALVASIDDARHFRSGRELAAWIGLVPRQYTTGGKPRLGGIGRANHYLRKQMIHGARAVISRLANRDDPRSAWLRAIVERRGFNKALVALANKTARIAWALLTKKEIYAAA

SEQ ID NO: 18093 - protein, 352 aa, unidentified
  source 1..352: note = protein_3d1ce4a
  REGION 10..158: note = RuvC_domain
  SITE 13: note = RuvC_P1
  SITE 62: note = RuvC_P2
  SITE 98: note = RuvC_P3
  SITE 100: note = RuvC_P4
  SITE 103: note = RuvC_P5
  REGION 233..314: note = Tnp_domain
  SITE 267: note = Tnp_P2
  SITE 275: note = Tnp_P3
  SITE 276: note = Tnp_P4
  SITE 287: note = Tnp_P5
MAKHSRVVIGGVDTHGRIHHGAVVDQHGRLLADAEFGAHTDGYRQLLGWLGRHGQLRSVGVEGTGTYGAGLTRFLLGQGVQVLEADRPDRTTRRRRGKSDPIDAEAAARAVLAGTATALPKRRDGIVEAIRALPSVRAGAVKARTAAINQLKGVVVTAPAIVREALDGRSTTQQVAACARLRPDPTQLDDPVQATKAALRAVAVRILALEQEIKVADQRLGKLVAKAAPRTLGLLAIGVEHAGQLLTTAGDNPERLRGEAAFAHLCGAAPIPASSGRTQRHRLHRGGDRNANCALHLAVVVRMRYCPRTRAYVERRTKEGLSKPEIMRCLKRYLAREVYHAILADYQALHAT

SEQ ID NO: 18094 - protein, 392 aa, unidentified
  source 1..392: note = protein_92fde71
  REGION 4..163: note = RuvC_domain
  SITE 7: note = RuvC_P1
  SITE 60: note = RuvC_P2
  SITE 101: note = RuvC_P3
  SITE 103: note = RuvC_P4
  SITE 106: note = RuvC_P5
  REGION 266..355: note = Tnp_domain
  SITE 274: note = Tnp_P1
  SITE 304: note = Tnp_P2
  SITE 312: note = Tnp_P3
  SITE 313: note = Tnp_P4
  SITE 328: note = Tnp_P5
MICVGIDVAKDKHDCFILNSEGEVLADVFTIPNSRDGFETLLERIRSCSSETDKIKVGLEATGHYSYNILGFLLDCGLPTYVINPLHTNLYRKSLSLRKTKTDRVDARTIAAMLMSDVDLKSYTDTAYHNEELKSLTRYRFDKVRERAKLKQSVSRLVTILFPELEKLVPSLHMVSVYSLLSEFPGAHQIARSHLTHLKNVLCDASKGHYGRDKAVEIRDAARRSVGSRMPAKSLELKHTIHLIRILDTEIEEIESEITAIMDELQSPITTIPGIGYRMGAMILAEIGDFSRFASPDKILAYAGLSPSTYQSGQLSMNGAYSHMEKRGSKYLRYALFNATKYVCHWNPSFAAYLSKKRAEGKHYNVAISHAAKKLIRLIWAMEKSGQSYRAA

SEQ ID NO: 18095 - protein, 391 aa, unidentified
  source 1..391: note = protein_a6a4cf7
  REGION 4..163: note = RuvC_domain
  SITE 7: note = RuvC_P1
  SITE 60: note = RuvC_P2
  SITE 101: note = RuvC_P3
  SITE 103: note = RuvC_P4
  SITE 106: note = RuvC_P5
  REGION 266..353: note = Tnp_domain
  SITE 274: note = Tnp_P1
  SITE 304: note = Tnp_P2
  SITE 312: note = Tnp_P3
  SITE 313: note = Tnp_P4
  SITE 326: note = Tnp_P5
MIYVGIDVAKDKHDCFITNSDGEVLFKPFTISNNREGFENLFQRIESVSDDFTKVKVGLEATGHYSYNLLGFLLDKGLTTYVINPLHTNLYRKSLSLRKTKTDKVDSRTIATMMMSDMNLKSYSDTSYHNEELKSLTRYRFDKVKERAKLKSSVSRLVCILFPELEKLVPTLHMASVYALLFEFPSADAVANSHLTRLSNLLAESSKGRYGKDTAVMFREAARSSIGSHMPAKSLELKHTIKLIHELDAEIEEIENEIKSIMDEIHSPILTIPGISYRMGAMIIAEIGDFSRFDSPDKILAYAGMSPSTYQSGQLDNCYSHMEKRGSRYLRYALYNAAKYVCHWDESFAVYLAKKRAEGKHYNVALSHATKKLVRTIYAMEKSGQPYQSAS

SEQ ID NO: 18096 - protein, 394 aa, unidentified
  source 1..394: note = protein_b0ccd01
  REGION 4..164: note = RuvC_domain
  SITE 7: note = RuvC_P1
  SITE 59: note = RuvC_P2
  SITE 99: note = RuvC_P3
  SITE 101: note = RuvC_P4
  SITE 104: note = RuvC_P5
  REGION 267..354: note = Tnp_domain
  SITE 275: note = Tnp_P1
  SITE 305: note = Tnp_P2
  SITE 313: note = Tnp_P3
  SITE 314: note = Tnp_P4
  SITE 327: note = Tnp_P5
MKLVGIDIGKNKHFFCIMDKVTGEIIVSPTSFLNNKDGFDFFIQKLKPYSKDSLLIGMEDTGHYHFSLLKYLLDNHFTVALINPKTTDFTRKLQGGITKNDELDTFTICDVLDNHERKKLYRITKVNRFDLYEQKQLTRHHHNLKEELNVYTNRLQKSIDIVFPEFNSLFKSKYGTIYMNILKTFGSADNIANTDIRILRKCFDIKGRGNRISLTPEKLKECAKASIGIPSSSEEIKIKHLIDQIELINEQISEVDKKIEEFSVQNNSPILSIPGISHFSGTSILAELGDICNYSKPSQIIKFAGVAPYHYESSQYNAKHTTITKKGSKYLRKTLYQIILPVIRYNPVFQQYYQLKLSQGKGHRCAQGHCVRKLLRIIYHLLTTNQQFDPKLLR

SEQ ID NO: 18097 - protein, 330 aa, unidentified
  source 1..330: note = protein_361bf55
  REGION 8..158: note = RuvC_domain
  SITE 11: note = RuvC_P1
  SITE 59: note = RuvC_P2
  SITE 97: note = RuvC_P3
  SITE 99: note = RuvC_P4
  SITE 102: note = RuvC_P5
  REGION 202..289: note = Tnp_domain
  SITE 210: note = Tnp_P1
  SITE 240: note = Tnp_P2
  SITE 248: note = Tnp_P3
  SITE 249: note = Tnp_P4
  SITE 262: note = Tnp_P5
MKKWKYTIGIDVSKDTLDLHCSEINEHIQIVNGSQGFKNFMKWCKIHQIELAESFLVMEFTGGYEYKFIQFCETKKLPYARISGLAIKRSMGITRGKSDQVDAARIAQYGEEKHKVIQPAKPLNMGIIHLKELLAFRKRIVREQSGYKTTLNERMHMYPELKKDIICKTLETKIKENEKVISKLDATLLELASKDETIKANYTLLTSIRGIGMVNALMTIAYTENFISFSNPRSYAVYVGVVPFEHSSGTSIKGRKKVSSISNKELKQELNQAARSAIQWDPEMRSYAERKMPAKCYNIVLNNVKFKLILRMFAVVKRQEKYVDNYKKAA

SEQ ID NO: 18098 - protein, 344 aa, unidentified
  source 1..344: note = protein_e0139a3
  REGION 6..147: note = RuvC_domain
  SITE 9: note = RuvC_P1
  SITE 52: note = RuvC_P2
  SITE 87: note = RuvC_P3
  SITE 89: note = RuvC_P4
  SITE 92: note = RuvC_P5
  REGION 212..296: note = Tnp_domain
  SITE 220: note = Tnp_P1
  SITE 250: note = Tnp_P2
  SITE 258: note = Tnp_P3
  SITE 259: note = Tnp_P4
  SITE 271: note = Tnp_P5
MKVSVLGIDLGKNVCSVVGLDAAGAVVLRRRVMRETLIGLAAKLPRCILAMEACCGAHHLGRLFADQGHDVRLMSPEYVRPYVKAQKNDDRDAEGIAEAATRPTMRFVELKAQEQLDMQTLHRSRDRLVGERTALINQLRAILLERGIVVPQGKRHLERHLAALLDGQDARGLSPRMRLLIADGRAQWQELDRRIAVFDAEFEAFMKENEDAKRLATIPGIGVMIASALIAAIGKAESFEHGRDLSAWLGLVPRQSTTGGKPKLFGISKRGNKYLRKLLIHGARAALPHLAEHDTAPGRWAKGLLARVHHNVVVVALANKLARIAWAVLRRGETFAAKGAFVAA

SEQ ID NO: 18099 - protein, 344 aa, unidentified
  source 1..344: note = protein_94c41f8
  REGION 7..149: note = RuvC_domain
  SITE 10: note = RuvC_P1
  SITE 53: note = RuvC_P2
  SITE 88: note = RuvC_P3
  SITE 90: note = RuvC_P4
  SITE 93: note = RuvC_P5
  REGION 212..304: note = Tnp_domain
  SITE 220: note = Tnp_P1
  SITE 250: note = Tnp_P2
  SITE 258: note = Tnp_P3
  SITE 259: note = Tnp_P4
  SITE 271: note = Tnp_P5
MGDVSTIGLDIAKSVFQVHGVDVVGAVVIRKRVSRAKVLEYFGELLPCLVGIEACPSAHHWGRELQALGHTVRLIPPSYVKAYLKRSKNDANDAAAICEAVTRPSMRFVPIKTKEQQTALMLHRTRQLLVRQRTMLSNALRGHLAELGIVSAKGRNGTAELLRIIADGADSRISAAVRSILDVLARQHSAIGTEIASIDKSIMALHRACEASRRLAEIPGIGPVGATALVAEIGDWNTFSSGRSLAAWIGLVPKQHTTGGKDRLGSITKQGNRYLRWLLVVGAMAVIRYARKHGTQKRPWLARLMERRPTKVAAVALANKIARMAWAIMVRGERYKEPKLLLAA

SEQ ID NO: 18100 - protein, 340 aa, unidentified
  source 1..340: note = protein_d2046f4
  REGION 5..152: note = RuvC_domain
  SITE 8: note = RuvC_P1
  SITE 55: note = RuvC_P2
  SITE 92: note = RuvC_P3
  SITE 94: note = RuvC_P4
  SITE 97: note = RuvC_P5
  REGION 212..300: note = Tnp_domain
  SITE 220: note = Tnp_P1
  SITE 250: note = Tnp_P2
  SITE 258: note = Tnp_P3
  SITE 259: note = Tnp_P4
  SITE 271: note = Tnp_P5
MEYYAGIDVSLKASSLCVVDARGKVIREAKAASEPEALIGWFAGLGLELERIGLEAGPLSQWLSAEMARAGLKVELLETRHVRAAFKTMPVKTDRSDARGIAQLIRLGWFRPVHCKSLSAQETRALLAARRLMKDKLHDIELSLRGLLRNFGLKVGKTTPRTYEGRIRELVAGHPILQTLAEAMLTARASLAGQFAQLDRQVRASARTSPNARLLMTTPGVGPIVALDFASAIDDAARFKSSQQVGAYFGLTQRKYQSGETNITGRISKLGDKGVRASLYEAAHVILTRPTRPSTLKTWAQGVVKNAGMRKAKVALARRLAVVMHRMLVDQTPFDPAKAA

SEQ ID NO: 18101 - protein, 392 aa, unidentified
  source 1..392: note = protein_8d5a662
  REGION 46..191: note = RuvC_domain
  SITE 49: note = RuvC_P1
  SITE 95: note = RuvC_P2
  SITE 131: note = RuvC_P3
  SITE 133: note = RuvC_P4
  SITE 136: note = RuvC_P5
  REGION 256..342: note = Tnp_domain
  SITE 264: note = Tnp_P1
  SITE 294: note = Tnp_P2
  SITE 302: note = Tnp_P3
  SITE 303: note = Tnp_P4
  SITE 315: note = Tnp_P5
MRERITEMQVMMEGQPHFQPFGLPYWGLVDLNKGVGSMTASYEYHIGVDYHKSYSHLVVQNSAGKTLRSGRVKNDRQSLGGFLERYRESSHAVVEATRNWMVMYDWLDDICDDVVLAHPLKVKAIADAKIKTDKIDATVLAHLLRADLVPEAWAPSERSRDLRVALRERMFYVRLRTMTKNRIVTVFDRYPEQTAQLKKLGDLFGKAGRAQLKQVNVSEIDRIQIDRGLAFIGDIDGRIKQSEATIRAMTKANANVKLLKTIPGIGEFFARLIDAEIDDISRFRNPKKLAAYAGLVPSTYSSGGKTFHGKIIKQGNKWLRWAFVEAVTPAIASDAQLRAQYEHLKIRGINKARVAIARKLLTIAFQILHDQRAYEPRGAGPMEGTSTISRLS

SEQ ID NO: 18102 - protein, 396 aa, unidentified
  source 1..396: note = protein_b170a8b
  REGION 8..162: note = RuvC_domain
  SITE 11: note = RuvC_P1
  SITE 59: note = RuvC_P2
  SITE 99: note = RuvC_P3
  SITE 101: note = RuvC_P4
  SITE 104: note = RuvC_P5
  REGION 269..354: note = Tnp_domain
  SITE 277: note = Tnp_P1
  SITE 307: note = Tnp_P2
  SITE 315: note = Tnp_P3
  SITE 316: note = Tnp_P4
  SITE 328: note = Tnp_P5
MSDPEVFVGLDVGKSEHHCVALDTSGNRLVDRPLLNDEQALRAVFSELVKHGQTVVVVDQPASIGALPVAVAQAMELDTAYLPGLAMRRIADLYPGEAKTDARDAYVIADAARVLPHTLRSVDIAGPAMADLTVLMGYDDDLRDQVTSGTNRIRNLLLGVHPALERALGANLAHPAVLGLLARYGGPSGLRKAGRARIDKTLAKKAPRMHARLTERIWTALAEQTVVVAGTTAVEAILPKQAAALADLLDQRASIARQVEKVLDDHPLAEVLTSMPGVGVRTSARILVEIGDASSFPTAGHLAAYAGLAPATRRSGSSIKGEHPARGGNKRLKNTLFLSAFAALHDPESRAYYDRKRAEGKKHNAALICLARRRTDVIYAMLRDGSYYHTKTPSAA

SEQ ID NO: 18103 - protein, 343 aa, unidentified
  source 1..343: note = protein_fabaf4b
  REGION 6..148: note = RuvC_domain
  SITE 9: note = RuvC_P1
  SITE 52: note = RuvC_P2
  SITE 87: note = RuvC_P3
  SITE 89: note = RuvC_P4
  SITE 92: note = RuvC_P5
  REGION 211..300: note = Tnp_domain
  SITE 219: note = Tnp_P1
  SITE 249: note = Tnp_P2
  SITE 257: note = Tnp_P3
  SITE 258: note = Tnp_P4
  SITE 270: note = Tnp_P5
MQITTIGLDLAKSVFQVHGVDAAGQVVVRKSLRRSQMLPFFAKLPSCLVGMEACGTSHHWARELIKLGHEVRLMPPAYVKPYVKRGKTDAADAEAICEAVTRPTMRFVPVKSLEQQAALSIHRARDLLVKQRTQLINMIRGLLAEFGVDIPKGLERALLMARQIVDGKAPEVPIEAAKIVATLSRQALDTHVRLREIDRDLLVSLRGNDVARRLMTIPGIGPVGATALAASVTDPHQFRSGRQFAAWLGLTPLQKSSGGKERLGRITKMGDKYLRKLLVVGMTALVRRARQNPESDPRLADLLARKPTRVATVAMANKTARVIWAIMTRGEEYHAGHRPALAA

SEQ ID NO: 18104 - protein, 316 aa, unidentified
  source 1..316: note = protein_91f00e5
  REGION 5..150: note = RuvC_domain
  SITE 8: note = RuvC_P1
  SITE 52: note = RuvC_P2
  SITE 92: note = RuvC_P3
  SITE 94: note = RuvC_P4
  SITE 97: note = RuvC_P5
  REGION 188..274: note = Tnp_domain
  SITE 196: note = Tnp_P1
  SITE 226: note = Tnp_P2
  SITE 234: note = Tnp_P3
  SITE 235: note = Tnp_P4
  SITE 247: note = Tnp_P5
MKIYIGIDISKDTFDVAVSTQKQSVTFNNTPAGFKKFIKWMSLFDSPHIAMEATGKYYLGLALHLYEQEYPVYVINPFKIKHYAQSKLKRVKTDSEDAKLIADFCEVHKLKPWQPDSPIIAKLQEFSALQSLLIQTKTRIKNQMQSSTEIEVQKIQIAQIKQLEKQIEKIQSQMKGCVQQDVELAKQMALLKSIKGLGEKTAIELITHIKDIYRFDNAKALACYSGLVPQIQQSGSSLNRSSLSKMGNANLRKCLYMPAVNSIAYNPVLKAFADNLRKRGVAGKKIVAAVMRKLIHLVYAILKSGKPFDPEYKIGA

SEQ ID NO: 18105 - protein, 427 aa, unidentified
  source 1..427: note = protein_cbed0e8
  REGION 11..176: note = RuvC_domain
  SITE 14: note = RuvC_P1
  SITE 67: note = RuvC_P2
  SITE 107: note = RuvC_P3
  SITE 109: note = RuvC_P4
  SITE 112: note = RuvC_P5
  REGION 276..361: note = Tnp_domain
  SITE 284: note = Tnp_P1
  SITE 314: note = Tnp_P2
  SITE 322: note = Tnp_P3
  SITE 323: note = Tnp_P4
  SITE 334: note = Tnp_P5
MSEKKSLELRVSVDVGYWRHSVAIGLSSGEVLEEFEIEHRPEGFKDFFTRIEKHRKTTNSAVAVAMEGYNGHARPLDSLVRARGYRLYNLNNLKFARFKEIFPGSAKSDRIDAHKGLELFQLSDHLPLAKEVLQEVSGTPHENEVLKRLTRRRRRLVNERVRVVNNLQADLQAVCPGLLEITSEAGSQWFLNFLLSADTVPQLARLRHNTLLKITSVGVKYAGLIENWQKRAHFSDEVEWVSEMIQEDAKRCLELDEKIKRLEVKIAGIAKDSKIAKILRSIPGYGATSSSELAGEIGTIERFASEGSFSLYLGMSTLDNSSGKYQGSKAPKHVNTRAKAAMMIALDRHRKYVPESQKYYEKKRGEGKKHNQAIRALGRHLSRIIYKMLKEEREYEIRTQKGNTKAKVSSRSSLKRQIRRSKFSANS

SEQ ID NO: 18106 - protein, 397 aa, unidentified
  source 1..397: note = protein_f4ac307
  REGION 9..163: note = RuvC_domain
  SITE 12: note = RuvC_P1
  SITE 60: note = RuvC_P2
  SITE 100: note = RuvC_P3
  SITE 102: note = RuvC_P4
  SITE 105: note = RuvC_P5
  REGION 270..355: note = Tnp_domain
  SITE 278: note = Tnp_P1
  SITE 308: note = Tnp_P2
  SITE 316: note = Tnp_P3
  SITE 317: note = Tnp_P4
  SITE 329: note = Tnp_P5
MNNEYSVFLGLDVGKTDHHAVGLDSVGKRLHDAPLPNSEPKLRAMFDKLAAHGPVLVVVDQPATIGALPVTVARACGHEVAYLPGLAMRRIADLYPGNAKTDARDAFIIADAARTLPHALRRLDVGDGALAELDVLVGYDDDLAAEATRLSNRIRGLLTGIHPALERVLGPKAAHPAVLEILSRCGGPIGIGAAGRRKLTSIATKYAPRMGAKLVDNILTALDEQTVVVPGTAAADTVLPRLAESLKTVLQQRKTVAAEVEEILDAHPLAQVLISMPGIGVRTAARILLEIGDASAFKSAGHLAAYAGIAPVTHHSGSSIRGEHPARSGNRKLKRAFFLAAFAALSDPTSRAYYDRKRAEGKKHNAALICLARRRCDVLFAMLRTKTPYQPPELRTA

SEQ ID NO: 18107 - protein, 343 aa, unidentified
  source 1..343: note = protein_e8c0cb5
  REGION 6..147: note = RuvC_domain
  SITE 9: note = RuvC_P1
  SITE 52: note = RuvC_P2
  SITE 87: note = RuvC_P3
  SITE 89: note = RuvC_P4
  SITE 92: note = RuvC_P5
  REGION 210..294: note = Tnp_domain
  SITE 218: note = Tnp_P1
  SITE 248: note = Tnp_P2
  SITE 256: note = Tnp_P3
  SITE 257: note = Tnp_P4
  SITE 269: note = Tnp_P5
MNDMIVGVDLAKSVFQLHGATADGRPAFRKKVPRQQFLRFLAAYPGAIIAMEACGSAHFWARELISRNHQVLMVPPQYVRPFVKRQKNDATDAEAIVTAARQPGMRFVPPKTDQQQARAVLFRARERLVHQRTELVNALRAVLYEFGYVLPAGLRQIGRVQAILDSDEGAIPRLVREECRDLLEQIAEQTARIDERTRKAHQLADGAETARRLQTLPGVGPITALAFDAFAPDMKTFRRGRDFAAWLGLVPRQHSSGGKERLGRITKAGQADIRRLLIIGAMSRLNWLGRSRIPEGSWLERMLARKPRMLVAIALANKMARAIWAMMTKQQDYRIPVPAAATV

SEQ ID NO: 18108 - protein, 334 aa, unidentified
  source 1..334: note = protein_a0040df
  REGION 7..149: note = RuvC_domain
  SITE 10: note = RuvC_P1
  SITE 53: note = RuvC_P2
  SITE 88: note = RuvC_P3
  SITE 90: note = RuvC_P4
  SITE 93: note = RuvC_P5
  REGION 209..295: note = Tnp_domain
  SITE 217: note = Tnp_P1
  SITE 247: note = Tnp_P2
  SITE 255: note = Tnp_P3
  SITE 256: note = Tnp_P4
  SITE 268: note = Tnp_P5
MQNVTLIGIDLGKHSFHVHCQDKSGKELLRKKFTRTKLMLFLATCPTATVVMEACAGAHFMARRINDIGHEVKLISPQFVRPFVKSNKNDFVDAEAICEAASRPSMRFVQPRTEVQQAMRALHRVRESLIRDKVKTTNQIHGFLLEFGISLPIGNAVIKRLPTILTEHEIPEYLDRLLMKLQAHYFYLVEQITELESELNQSIEADDTARRIMTIPGVGPITASLLSSQLGDGKQFSCSRDFAASTGLVPRQYSTGGKNTLLGISKRGNKNLRRLLVQCARSFMMRLENQQGGLAEWVREQLNNKHSNVVACALANKLARIAWAITTNHSEYQV

SEQ ID NO: 18109 - protein, 274 aa, unidentified
  source 1..274: note = protein_191bfd2
  REGION 3..114: note = RuvC_domain
  SITE 15: note = RuvC_P2
  SITE 55: note = RuvC_P3
  SITE 57: note = RuvC_P4
  SITE 60: note = RuvC_P5
  REGION 151..235: note = Tnp_domain
  SITE 159: note = Tnp_P1
  SITE 188: note = Tnp_P2
  SITE 196: note = Tnp_P3
  SITE 197: note = Tnp_P4
  SITE 208: note = Tnp_P5
MRWIADRPVARLVFEATGPYHRAFERAMGEAGLPLCKVNPRQAKRFGEALGQLAKTDRMDAGMLARFGALLEPDVRPAPSKIISDLKDLHVARTALIKDRTAARNRKKSLQSPLLKRQSRERLAQIERHLEAIEDGMLAIIESDQDLARRFAILTSIPGVATRSAFALIADMPELGTLDSQATAALSGTAPMTRQSGKRTGKAFVTGGRVNVRQALYMPALVAARFNPDFAAMYQAMTARGKPPKVALTAIMRKLIILANALIKADRKWEPRVA

SEQ ID NO: 18110 - protein, 334 aa, unidentified
  source 1..334: note = protein_2ae7d4b
  REGION 7..149: note = RuvC_domain
  SITE 10: note = RuvC_P1
  SITE 53: note = RuvC_P2
  SITE 88: note = RuvC_P3
  SITE 90: note = RuvC_P4
  SITE 93: note = RuvC_P5
  REGION 208..295: note = Tnp_domain
  SITE 216: note = Tnp_P1
  SITE 246: note = Tnp_P2
  SITE 254: note = Tnp_P3
  SITE 255: note = Tnp_P4
  SITE 267: note = Tnp_P5
MEKVTTLGIDLAKSVFSLHGVGGAGQTVLRRTVRRDQLVKVVAGIAPCLIGMEACSGAHEWGRRFQGLGHTVRLMAPKFVAPYRKSGKNDGNDAEAICEAVTRPSMRFVLVKSLEQQALLAIHRVRQGFVVERTAIINRLRGLLCEFGVVLPLRSVTVRRQAAQAAENLPDLARRAIGDLLEQLRVLDERIGGYDREIEAQAKLCEPAQRLMKIRGIGPTTALAIVATVGNAREFKNGRQFAAWIGLTPSQYSTGGKPRLGHISKRGDAYLRNLLVQGARSVLNSAGMHQDRMSRWILELQPRRGYYRTLVAIANKNARIAWALLAKNETMRSV

SEQ ID NO: 18111 - protein, 338 aa, unidentified
  source 1..338: note = protein_435e84d
  REGION 5..151: note = RuvC_domain
  SITE 8: note = RuvC_P1
  SITE 54: note = RuvC_P2
  SITE 90: note = RuvC_P3
  SITE 92: note = RuvC_P4
  SITE 95: note = RuvC_P5
  REGION 211..297: note = Tnp_domain
  SITE 219: note = Tnp_P1
  SITE 249: note = Tnp_P2
  SITE 257: note = Tnp_P3
  SITE 258: note = Tnp_P4
  SITE 270: note = Tnp_P5
MKSHIGVDLHQRFCYLTAVDASGKRYGQARVANDAGALQAWLGQMPRPRQVVMEASGFWPAFERAVRPEAERVVMVHPQRVKAIASARLKNDRVDSEILARLSQADLLPEAWMADPQTQRLRKLARLRIALGQQRTTAKNQLQAVLHQEGFAKPVTDVFGKRGRAWLGKLELSAAGRMVVDTWLQMVDHLDGLIAQQKRELERMAGEDMRARWLQTVPGIGAYSAMVILAEIGDIARFHSKRALASYAGLTPSVRESAGKRKRGGIGHHGSGTLRWIMLQVAQVAARHSPAAKAWIARLRKKKPAQVAKIALARKLLTAVWALLRQGVCFEESVFGQP

SEQ ID NO: 18112 - protein, 349 aa, unidentified
  source 1..349: note = protein_0a41a91
  REGION 12..153: note = RuvC_domain
  SITE 15: note = RuvC_P1
  SITE 58: note = RuvC_P2
  SITE 93: note = RuvC_P3
  SITE 95: note = RuvC_P4
  SITE 98: note = RuvC_P5
  REGION 217..303: note = Tnp_domain
  SITE 225: note = Tnp_P1
  SITE 255: note = Tnp_P2
  SITE 263: note = Tnp_P3
  SITE 264: note = Tnp_P4
  SITE 276: note = Tnp_P5
MIRNKPRDAAVYGVDLGKNIFHVVGLDAAGMPIQKVKFRRETLLQFFAQAKQAIVGMEACPGSQWLARKIRAMGHTVRILPAQFVKPYVKSNKNDAIDAAAIAEAVTRPTMRFVEIKTPDQMDMQALHRIRDQLVAARTGLVCQMRAFCLEYGVAIRQGVGVFKLDLPRVLADEQNDLTPTMRRLLGDLFDDLRRLEERIAAVTKENEAAVGQDEVARRLMSVPGIGPLGASALRAAAGDARQFQKARDLAAWLGLVPRQHSTGGKPTLLGISKRGNSYVRRLLIHGARSCAMHLDRSRDRLGQWIDQLERRMHINKVVVALAAKIARVAWVIMNRPGSIYQPRSLSAA

SEQ ID NO: 18113 - protein, 346 aa, unidentified
  source 1..346: note = protein_b88f56d
  REGION 13..155: note = RuvC_domain
  SITE 16: note = RuvC_P1
  SITE 59: note = RuvC_P2
  SITE 94: note = RuvC_P3
  SITE 96: note = RuvC_P4
  SITE 99: note = RuvC_P5
  REGION 218..305: note = Tnp_domain
  SITE 226: note = Tnp_P1
  SITE 256: note = Tnp_P2
  SITE 264: note = Tnp_P3
  SITE 265: note = Tnp_P4
  SITE 277: note = Tnp_P5
MNNHNSKGNITTLGIDLAKNSFQLHGVNEKGDRMLRKKLTRRQLTAFVANLEPCLIGLEACGGAHHWVRVFSQFGHTVKMIAPQFVKPYVKSNKNDAVDAEAICEAVQRPSMRFVPSKSLEQQDIQSVHRIRSLLVGRRTAQANQIRGLLMEYGVVIPQGIHQLRRAIPEILEDAENTLTAYFRELLQELYEEIIHFDQRIETIELKLKRVSEQNKDCQRLLTIPGIGLLTATALIAAIGDISAFKNGRELAAWIGLVPHQHSTGGKPTLLGISKRGDSYLRTLLIHGGRSVVRVASRHQDKRNQWITEIKQRRGENISNVAVANKNARVVWALLTNKQDYNVVAA

SEQ ID NO: 18114 - protein, 320 aa, unidentified
  source 1..320: note = protein_4b8b1db
  REGION 8..163: note = RuvC_domain
  SITE 11: note = RuvC_P1
  SITE 56: note = RuvC_P2
  SITE 96: note = RuvC_P3
  SITE 98: note = RuvC_P4
  SITE 101: note = RuvC_P5
  REGION 195..279: note = Tnp_domain
  SITE 203: note = Tnp_P1
  SITE 232: note = Tnp_P2
  SITE 240: note = Tnp_P3
  SITE 241: note = Tnp_P4
  SITE 252: note = Tnp_P5
MSATSVVVGIDVAKASVDVAVLGGKLEARRFDNEAEGHSALAAALQPQGVALVVMEATGGYEAALACALQAAGLPVAVVNPKQARDFAKAMGRLAKTDRIDAAMLAELAAVLVRRDDLARFIRPLTDAQQQALAAWVTRRRQLLTMLLSERQRLQLAIPMVRPSIEAMIRAIRAQLDDVEAQMTGHVRTHFAELDTLLRSTRGIGPIASATLIAELPELGRLNRREIAALVGVAPIANDSGATRGRRRVQGGRFETRRVLYMAALVATRHNPVIQTFYQRLIDAGKLPKVALVACMRKLLTTLNAMVRTNKPWDASFHHA

SEQ ID NO: 18115 - protein, 344 aa, unidentified
  source 1..344: note = protein_7cfecdd
  REGION 7..147: note = RuvC_domain
  SITE 10: note = RuvC_P1
  SITE 53: note = RuvC_P2
  SITE 88: note = RuvC_P3
  SITE 90: note = RuvC_P4
  SITE 93: note = RuvC_P5
  REGION 210..296: note = Tnp_domain
  SITE 218: note = Tnp_P1
  SITE 248: note = Tnp_P2
  SITE 256: note = Tnp_P3
  SITE 257: note = Tnp_P4
  SITE 269: note = Tnp_P5
MEQIIRIGIDTSKSVFQLHGVNAAEQPILRKKLSRKEMVKFFEKAPPTIIALEACGGSHHWARMLSSFGHEVKLIAPQLAKPYVKRGKNDAADAEALCEAMSRPTMRFVPVKAAEQQAALMLVGMRERLIRNRTQLANAIRGFAMEFGIVAATGMCRIEPLLERIAADQSLPELARALFSMHGVEYRDLLTETKAVEEKLTALHRSDECSMRLAEIPGVGPVGASLLMMKTPDPKMFKSGRDFAAWIGLTPRDHSTAGKVRLGVITRAGDEMLRSILVVGATALLQYVRAGRSRHTSRWLIELLQRKKPKLVAVALANKIARIAWKLMVSGERYRRAEGQTQAV

SEQ ID NO: 18116 - protein, 392 aa, unidentified
  source 1..392: note = protein_1080728
  REGION 4..162: note = RuvC_domain
  SITE 7: note = RuvC_P1
  SITE 60: note = RuvC_P2
  SITE 101: note = RuvC_P3
  SITE 103: note = RuvC_P4
  SITE 106: note = RuvC_P5
  REGION 265..352: note = Tnp_domain
  SITE 273: note = Tnp_P1
  SITE 303: note = Tnp_P2
  SITE 311: note = Tnp_P3
  SITE 312: note = Tnp_P4
  SITE 325: note = Tnp_P5
MIYVGIDVAKDKHDCFAMNSDGEILIEKLTITNNLYGFETLYNSLMNFSDSLDNIKVGLEATGHYSNNILNFLTEKGFNIYLINPLQTNLYVKGQSLRKTKTDKLDAHVIATMLVSDNLKPYIPVSYHISELKSLTRHRFRLVKENSKFKTSLVRLVDIVFPELPKIVSSVAQKSCLALLYELPSAKDIAECNLTHLTHLLSDNSNKKFDREKALQIRDLARKSIGLNSNSVSFELKQTISIIQFIQEQLDDVEKRIKEILKEINSPILTIPGISFKTAGSILAEIGDISRFDSPAKLLAFAGLDPSMYQSGKFFSTHSVMVKRGSKYLRFALMTAARMVCLNDATFCAFKDRKMAEGKHYMVTMGHVAKKLVRVIYYLLKTNNVYQASKVA

SEQ ID NO: 18117 - protein, 339 aa, unidentified
  source 1..339: note = protein_0cbb92a
  REGION 6..148: note = RuvC_domain
  SITE 9: note = RuvC_P1
  SITE 52: note = RuvC_P2
  SITE 87: note = RuvC_P3
  SITE 89: note = RuvC_P4
  SITE 92: note = RuvC_P5
  REGION 211..296: note = Tnp_domain
  SITE 219: note = Tnp_P1
  SITE 249: note = Tnp_P2
  SITE 257: note = Tnp_P3
  SITE 258: note = Tnp_P4
  SITE 270: note = Tnp_P5
MANTVVGVDIAKSVFQIHEVSSVTGEVVSVQVKRARFLQYFVNREPCLIGMEACGGAQHWARQLTAMGHTVKLLPAQMVKPFAGGNKSDMADAKAIWVAVQQPGIREVAIKTEAQQAVLALHRMRQQLVKFRTAQINALRGLLTEYGEVMPLGRDALAKMLPGAFERVAELLPGVLIDTLREQYARIKELDRQVLDIERRLREWHKEDEACKRIAAIPGVGLLTATATVATMGDPKAFRSGREFAAWLGLVPRQIGTGGRVKLLGISKRGDTYLRTLLIHGARAVLTSSKAPPEWAVNLSKRRPMNIAVVALANKMARTLWALLAYQRTYQVGYAVRPV

SEQ ID NO: 18118 - protein, 266 aa, unidentified
  source 1..266: note = protein_fd14887
  REGION 2..69: note = RuvC_domain
  SITE 9: note = RuvC_P3
  SITE 11: note = RuvC_P4
  SITE 14: note = RuvC_P5
  REGION 135..220: note = Tnp_domain
  SITE 143: note = Tnp_P1
  SITE 173: note = Tnp_P2
  SITE 181: note = Tnp_P3
  SITE 182: note = Tnp_P4
  SITE 194: note = Tnp_P5
MKPFVKRNKNDAVDAEAICEAAQRPSMRYAAIKTEAQQAAGMVFPTRDLLVRQRTQLINAIRGHLTEFGWVALKGPSHVSVLASLLEEGEEIGASLPEAARSMFLVMTGQLEHLNEQIKLLDKEIARRAREDEAARRLMTIPGIGPIAATALLALAPPVEGFARGRDFAAWLGLTPRQHSTGGKERLGAISRMGERTLRRLLIIGSSAVVLHASKRGAPRGSWLEQMLARKPRMLVTVALANKTARIVWAVLMKGENYKAPVAAAA

SEQ ID NO: 18119 - protein, 372 aa, unidentified
  source 1..372: note = protein_43a0277
  REGION 26..169: note = RuvC_domain
  SITE 29: note = RuvC_P1
  SITE 74: note = RuvC_P2
  SITE 109: note = RuvC_P3
  SITE 111: note = RuvC_P4
  SITE 114: note = RuvC_P5
  REGION 233..318: note = Tnp_domain
  SITE 241: note = Tnp_P1
  SITE 271: note = Tnp_P2
  SITE 279: note = Tnp_P3
  SITE 280: note = Tnp_P4
  SITE 292: note = Tnp_P5
MKQHTTRRKTVPATRTATELSACRTVAVDLAKRVFQVAAEDARGQVVHEARIGSREAFQTFLQRLPAGITVLMEVGPGAQAWARQVQASGNAVRLLPAQRVAEHRSGAKNDRNDAHAILRAGRDTSLHAVPVKSLTALAMQALHRVRQGCVRRRTALANQMRGLLLEHGVALAQGDAALTRGVDRVLQDATQPIPALLRELVADVHAEWRRLGERIDGLTARLEGAAREDAEARRLMTVRGIGPISATALIAKQTEPQRFANARRFAAYFGTVPDQHSSGQKVRLGKMSKRGDAYLRSLMIQGAHAVLKQLKPESTQPDDRRLLRWRQRLGQKGAAVRLANRNLRIVWALLQTEQTYRRQPAAKAGTEEATE

SEQ ID NO: 18120 - protein, 339 aa, unidentified
  source 1..339: note = protein_023eb55
  REGION 6..147: note = RuvC_domain
  SITE 9: note = RuvC_P1
  SITE 52: note = RuvC_P2
  SITE 87: note = RuvC_P3
  SITE 89: note = RuvC_P4
  SITE 92: note = RuvC_P5
  REGION 210..297: note = Tnp_domain
  SITE 218: note = Tnp_P1
  SITE 248: note = Tnp_P2
  SITE 256: note = Tnp_P3
  SITE 257: note = Tnp_P4
  SITE 269: note = Tnp_P5
MNYTTVGVDVAKNVFQLHWVDADTGEIVSKQIKRSGFLEHFANRAPCLIGMEACGGAQHWARRLISMGHLVKLMPAKFVKAFVIGNKNDAADARAIWAATQMQGKEVAVKTEAQQAVLALHRIRQQKVKFRTAQMNSLRGLLTEYGEVMNKSRSALDRAIPGVLGKLSERLPAMLIDSLRELWNELETLDQQIAAIEQRLQRWMKEDRACKAIAEIPGVGLLTATAAVATMGDPKSFKSGREFAAWLGLVPAQTGTGGKVRLLGISKRGDTYLRTLLIHGARSVLFRMKEPGAWLAQMKQRRPANVITVALANKIARTIWAVLAHNTPYQKNHVSVVPG

SEQ ID NO: 18121 - protein, 269 aa, unidentified
  source 1..269: note = protein_5f7b60c
  REGION 6..141: note = RuvC_domain
  SITE 9: note = RuvC_P1
  SITE 49: note = RuvC_P2
  SITE 86: note = RuvC_P3
  SITE 88: note = RuvC_P4
  SITE 91: note = RuvC_P5
  REGION 194..261: note = Tnp_domain
  SITE 202: note = Tnp_P1
  SITE 232: note = Tnp_P2
  SITE 240: note = Tnp_P3
  SITE 241: note = Tnp_P4
  SITE 253: note = Tnp_P5
MEAPVAGIDVSKDKLIVYFQGKLYEFTNDRQGFEEIRKILPSGCKVGIESTGVYHVNLAKYLNNEYDVRIINPFILKKFKGFRGKKSDKNDAKKLAEIVVSMGSGFVTSDARELTSQWDFVIRSIARVKNRLRRDLVLLGYRDSLSKKNLEEVLRGGGDSVVLSEVRFLLEELERLEGRKREIEKELEDFVPKDSLIFTIPGIGKTLGCIILARVGDVRRFSDKKRFVAYCGLDPVVESSGKSVVSRGISKRGDAVFEEGFLLGSFDCY

SEQ ID NO: 18122 - protein, 364 aa, unidentified
  source 1..364: note = protein_6cf4f81
  REGION 39..188: note = RuvC_domain
  SITE 42: note = RuvC_P1
  SITE 89: note = RuvC_P2
  SITE 129: note = RuvC_P3
  SITE 131: note = RuvC_P4
  SITE 134: note = RuvC_P5
  REGION 230..317: note = Tnp_domain
  SITE 238: note = Tnp_P1
  SITE 268: note = Tnp_P2
  SITE 276: note = Tnp_P3
  SITE 277: note = Tnp_P4
  SITE 290: note = Tnp_P5
MQGREPVNSLLSLIPCLQTIMTNTQFKDIDLEAKPVLFAGIDVGAEELILVVRKNGKPFDPQKFANTPADRNRLVKKLVKLPGIIVCLEATGVYHFDLSLALHDAGVLLRVVNPKAAHNFAKVLMKNSKTDAVDANTLSEYAARMDFVAWTRPSNEMFALRSFARRIDVLTGQKAAAKNHLHALIATSETPKAILKDVKLAIAQLEKRIDSLTAEALILIGKYPNLERVLALLIGIKGIGNTRALALMGELLLLPPDLSHREWVKFAGLDPRAFDSGKSVHKKTRISKAGNRHLRSALYMPALSAKQHDPHVKAYFQHLVANGKKPLQAVCAIMRKLLHAIHGMLKHNEPFDNTRFYAIPECNG

SEQ ID NO: 18123 - protein, 346 aa, unidentified
  source 1..346: note = protein_a92267b
  REGION 7..148: note = RuvC_domain
  SITE 10: note = RuvC_P1
  SITE 53: note = RuvC_P2
  SITE 88: note = RuvC_P3
  SITE 90: note = RuvC_P4
  SITE 93: note = RuvC_P5
  REGION 212..301: note = Tnp_domain
  SITE 220: note = Tnp_P1
  SITE 250: note = Tnp_P2
  SITE 258: note = Tnp_P3
  SITE 259: note = Tnp_P4
  SITE 272: note = Tnp_P5
MSYSTTVGVDLAKNVIQISVVSGRGKMLSNRSLTRKKFAEFLGKQNPSLVAFESCATAHYWARAAERHGHEARIISAKAVAPFRQGHKTDSNDALAVAEAARRPNIKAAPLKTLEQQGLQAVQRFRDLLVQECTALSNHLRGLLMEFGVVIPQGFAALWRQLPEILEDGDNEVPDLYRPTLHRLYVRFLELRDDIQAMNQQVKELVKQHPGCNRLTALEGVGPISAVLLYASLGTGEAFSGSREFAAYLGLTPRQLSSGGKTNIVGLSKKVGNCRLRSVLIQGARAYVYRLKEPKTSKDRWLMALIERAGHGKAAVALANKNVRTAWAMLTQGTDYQRRPQQEAAA

SEQ ID NO: 18124 - protein, 334 aa, unidentified
  source 1..334: note = protein_b181731
  REGION 21..163: note = RuvC_domain
  SITE 24: note = RuvC_P1
  SITE 65: note = RuvC_P2
  SITE 105: note = RuvC_P3
  SITE 107: note = RuvC_P4
  SITE 110: note = RuvC_P5
  REGION 204..291: note = Tnp_domain
  SITE 212: note = Tnp_P1
  SITE 242: note = Tnp_P2
  SITE 250: note = Tnp_P3
  SITE 251: note = Tnp_P4
  SITE 264: note = Tnp_P5
MKTKVAVLSNQSVMDKIKHFYGVDISKSFFDVVDQDGKHDQFSNDVKGFKSFLKAIKKDSLVVMEATGYYHYRLAQHLYEKDITVSVVNPLSVKRFIQMKLSKIKTDKSDAKAICEYAQANEVPLYTARNAVQAECLQLLSLQDLYLKQRTAVKNKIHGEKTLGTPSKTISRSLNRMLKQLEKELAKIETKLETLVKETQQDQLEQLTSIPGMGKKTAMLLIVLTDGFTGFENARQLCCYAGITPTIRQSGTSVRGRSRISKVGNRKLRNLLFMCSFTACKTNKACRELYERIVEKGKSKKLALIAVCNKLLKQAFAIAKSRTYYQENYMSKLA

SEQ ID NO: 18125 - protein, 316 aa, unidentified
  source 1..316: note = protein_8327e8c
  REGION 10..152: note = RuvC_domain
  SITE 13: note = RuvC_P1
  SITE 57: note = RuvC_P2
  SITE 97: note = RuvC_P3
  SITE 99: note = RuvC_P4
  SITE 102: note = RuvC_P5
  REGION 193..277: note = Tnp_domain
  SITE 201: note = Tnp_P1
  SITE 230: note = Tnp_P2
  SITE 238: note = Tnp_P3
  SITE 239: note = Tnp_P4
  SITE 250: note = Tnp_P5
MNDKLAEAFVGIDVSKDTLDVHIAPSGVSLHETYDEKGIEKIIEALKAASSTLIVLEATGGLEVRLACELSATGLTVAIINPRQARDFAKATGRLAKTDRVDAAMLAAFAQAIRPAARPLKDADARALEDMLNRRRQLIAMRVQELLRLNTAESKALQKSLKTHIAWLEKQITTVDNDLNTQLRASDVWRAKDDVLKGIPGIGAVTSLTMLSKCPELGALNRREIAALVEVAPLANGSGKHRGKRSIWGGRAEVRAVLYMAALSAMRFNPDIKAFAERLKNKGKATKVVIVACMRKLLTIMNAMLKNMQPWVAQIA

SEQ ID NO: 18126 - protein, 298 aa, unidentified
  source 1..298: note = protein_a2abd3c
  REGION 1..125: note = RuvC_domain
  SITE 30: note = RuvC_P2
  SITE 70: note = RuvC_P3
  SITE 72: note = RuvC_P4
  SITE 75: note = RuvC_P5
  REGION 170..256: note = Tnp_domain
  SITE 178: note = Tnp_P1
  SITE 207: note = Tnp_P2
  SITE 215: note = Tnp_P3
  SITE 216: note = Tnp_P4
  SITE 229: note = Tnp_P5
MPNSRDGVHELVRWCAKHGVGADQAHAVLEATGPYHEQAATTLHDGDIAVSIANPASVHDFSRAMAMRSKTDALDSLVLARYGVAMRPGAWQPPPAHVRELRALITQLDALSKDRLRTMNRQEKIEASSASELVERSISDTLSFYDKEIARLEKAIDDHIDRHPDLKDDTKLLSSIPGVGPKVARTMLRVMRTHQFKCAEDLAAYLGLVPVRRQSGTSLRGRSRMSKAGPADVRAKVYMAGVVASKHNPHVRALYQRLLAAGKTKMSALAACMRKVVHLCFGVLKTRQPYRPDYAFST

SEQ ID NO: 18127 - protein, 391 aa, unidentified
  source 1..391: note = protein_6e59b9e
  REGION 4..163: note = RuvC_domain
  SITE 7: note = RuvC_P1
  SITE 60: note = RuvC_P2
  SITE 101: note = RuvC_P3
  SITE 103: note = RuvC_P4
  SITE 106: note = RuvC_P5
  REGION 266..353: note = Tnp_domain
  SITE 274: note = Tnp_P1
  SITE 304: note = Tnp_P2
  SITE 312: note = Tnp_P3
  SITE 313: note = Tnp_P4
  SITE 326: note = Tnp_P5
MIYVGIDIAKDKHDCFITNSDGEALFNVFTIPNSREGYNDLYQKISSLTSDFSVIKVGLEATGHYNYNLLGFLIDKGLPTYVINPLHTNLYRKSLSLRQTKTDKVDARTIAFMLMSGVNLQSYSDTSYHNEELKSLTRYRFDKVKERAKLKTSVSRLVNILFPELEKLVPSIHMASVYAMLSEFPCASKIAAAHLTRLANLLETSSRGHYGKETAITFRNAARASVGSNMPAKSLELKHTIKLIQELDAEIEEIENEIKTIMDEINSPILSIPGINYRMGAMIIAEIGDFSRFDSPDKILAYAGMSPSTYQSGQLDSSYSHMEKRGSRYLRYALFNATKFVCHWDSTFAAYLAKKRAEGKHYNVAISHAAKKLVRVIYQLEKSGQEYITAT

SEQ ID NO: 18128 - protein, 343 aa, unidentified
  source 1..343: note = protein_b52b3a0
  REGION 7..149: note = RuvC_domain
  SITE 10: note = RuvC_P1
  SITE 53: note = RuvC_P2
  SITE 88: note = RuvC_P3
  SITE 90: note = RuvC_P4
  SITE 93: note = RuvC_P5
  REGION 212..297: note = Tnp_domain
  SITE 220: note = Tnp_P1
  SITE 250: note = Tnp_P2
  SITE 258: note = Tnp_P3
  SITE 259: note = Tnp_P4
  SITE 271: note = Tnp_P5
MSQVTTIGLDIAKNVFHAHGADARGQGVFSKRLSRAKLLGFFAAQPPCLVALEACGGAHHWARELMALGHEVRLIPPAYVKPFVKRHKNDAVDAEAICEAAQRPTMRFVAVKSEEQQASALLFRTRDLLVRQRTQLINALRGHLTEYGWVAPKGPSHMAMLGDLLEDEMGSLLPPAAVAMFRVMLNLLADLDDRIAELDREIARRAREDETARRLMTIPGIGPITATALIALAPVAETFAKGRDFAAWLGLAPLQRSTGGKQKLGAISKMGERTLRRLLIIGSSAVVHQASRRGAPKGSWLEQMLARKPRMLVTVALANKMARIVWALLAKGGSYRAPAVATA

SEQ ID NO: 18129 - protein, 411 aa, unidentified
  source 1..411: note = protein_4b21380
  REGION 9..168: note = RuvC_domain
  SITE 12: note = RuvC_P1
  SITE 65: note = RuvC_P2
  SITE 105: note = RuvC_P3
  SITE 107: note = RuvC_P4
  SITE 110: note = RuvC_P5
  REGION 283..369: note = Tnp_domain
  SITE 291: note = Tnp_P1
  SITE 321: note = Tnp_P2
  SITE 329: note = Tnp_P3
  SITE 330: note = Tnp_P4
  SITE 343: note = Tnp_P5
MSAGVITAVGIDVSKYKSTVAARRPGGEVALLPFDVGHDVTGIKNLLEKLHGLDDEGSEIRVVMEHTGMYWRPVALALQQAGFFVSVVNAILIHNFSDNSLRKVKTDKADALKIANYGLTFWMDLREYSAEDETRQMLKIQNRLYERTTTTGTMLRNGLISLLDQIFPGANKLFLNEGRNSKGHVKWVDFVIRFWHKECVAALSLHTFADTFQKWCKRTGYRFSTSDAERIHTAARNAVATLPKNDSTKLLITQAAISLNTVYDSLHAFRTEMNRLASLLPEYELVMGMEGVGKITGPQLMAEVGDVRRFSHKGALVAYAGVDAPPYQSGTFDAKNRHVSKRGSPHLRKVLFEIASMILVHGNPDNSVFCFMDKKRAEGKHFYVYTVAGAAKFLRIYYARVKEYLNTQETA

SEQ ID NO: 18130 - protein, 342 aa, unidentified
  source 1..342: note = protein_23a029f
  REGION 5..158: note = RuvC_domain
  SITE 8: note = RuvC_P1
  SITE 56: note = RuvC_P2
  SITE 97: note = RuvC_P3
  SITE 99: note = RuvC_P4
  SITE 102: note = RuvC_P5
  REGION 220..305: note = Tnp_domain
  SITE 228: note = Tnp_P1
  SITE 258: note = Tnp_P2
  SITE 266: note = Tnp_P3
  SITE 267: note = Tnp_P4
  SITE 278: note = Tnp_P5
MTITIGIDPHKASHTAVAIDSTECVLDEIRVRACTAQTDQLRCWAAPFPDRVWAIESARGLGYLLAQQLVAAGETVVDVPAVLSTRTRLLGSGRAQKNDPNDARSVAITALRNDALSRVRVDNHAQVLKLLVKRHRDLGRLRNKAACRLHVLLMELHPGGMAKEMTVTRANDLLDRAAIADAMTEHRVAVGREFVADIDRYDEQMKASRKRLRTAVAASGTTLTEIRGVGVVVAAMIIGHVGNIERFKSAAHFASYNGTAPIEASSGEHRRHRLNKRGNRQLNWAIHVVAITQLRQPCPGRDYYARKRAEGKNTKEAIRALKRQLSNVIYRALVADARRASS

SEQ ID NO: 18131 - protein, 343 aa, unidentified
  source 1..343: note = protein_468c2b8
  REGION 6..148: note = RuvC_domain
  SITE 9: note = RuvC_P1
  SITE 52: note = RuvC_P2
  SITE 87: note = RuvC_P3
  SITE 89: note = RuvC_P4
  SITE 92: note = RuvC_P5
  REGION 211..296: note = Tnp_domain
  SITE 219: note = Tnp_P1
  SITE 249: note = Tnp_P2
  SITE 257: note = Tnp_P3
  SITE 258: note = Tnp_P4
  SITE 270: note = Tnp_P5
MEHTTIAVDLAKSVFQIAVSHRPGHVDEERRLSRDRFLPFFAQQPAATVVFEACGSAHYWARQLQPFGHTLRLLPAHDVRRYVRRNKTDRTDTKGMLEANRNEEIHPVPVKSIEQQAIASLHRLRSTWLATRTARLNTLRGLLREFGVFIPVGAQHVVPRLRALLGEPTDTVPIAVRGTLAHACAELDVLETNMRDVERQLTAMARQLPDVTLLQTVPGVGVLTATALAALVGDIRRFRSGRHFASFLGLTPKEDSSAGRRHLGAISKQGDVYVRMLLTHGARSFVWHAKTASLPTSLQRWAVHTEQRRGHNVATVAVANKLARIVWAVWVRQRPFAAEHRPG

SEQ ID NO: 18132 - protein, 344 aa, unidentified
  source 1..344: note = protein_a14a052
  REGION 7..149: note = RuvC_domain
  SITE 10: note = RuvC_P1
  SITE 53: note = RuvC_P2
  SITE 88: note = RuvC_P3
  SITE 90: note = RuvC_P4
  SITE 93: note = RuvC_P5
  REGION 211..298: note = Tnp_domain
  SITE 219: note = Tnp_P1
  SITE 249: note = Tnp_P2
  SITE 257: note = Tnp_P3
  SITE 258: note = Tnp_P4
  SITE 270: note = Tnp_P5
MQKISTIGLDLAKHWFQVHGVGDEGQVVIRRRLRRGEVIGFFASVEPCLVGMEACATAHHWARQLASLGHCVKLMPPGYVKAYVKRNKNDAADAEAICEAVTRPSMRFVPVKNADQQSVLMLHRARNLLVRQRTMLINALRAHMAEFGIIAPLGPRHAEHLLTAINDDETELPDLARSILRLIVAQLNDTTAKIRDIERRLVKWHRQSKVSRLLATVPGVGLMGASAIAATVSDPSLFRSGREFAAWLGMTPRQNSSGGKERLGRTSKRGDKYIRSLLVAGAVAVLRHRRNRTTKDAAWVRELLARKPTKLAAVALANKTARIIWAVMARGDGYRSKEIMVQPA

SEQ ID NO: 18133 - protein, 393 aa, unidentified
  source 1..393: note = protein_67b82c7
  REGION 4..163: note = RuvC_domain
  SITE 7: note = RuvC_P1
  SITE 60: note = RuvC_P2
  SITE 101: note = RuvC_P3
  SITE 103: note = RuvC_P4
  SITE 106: note = RuvC_P5
  REGION 266..355: note = Tnp_domain
  SITE 274: note = Tnp_P1
  SITE 304: note = Tnp_P2
  SITE 312: note = Tnp_P3
  SITE 313: note = Tnp_P4
  SITE 328: note = Tnp_P5
MVCVGIDVAKDKHDCFILSLEDEVLADVFTIQNNAEGFDRLLQTIRRCTRPEDKIKVGLEATGHYSYNILGFLLDKGLPTYVINPLHTNLYRKSLSLRKTKTDRVDARTIAAMLMSDVDLKSYTDTAYHNEELKSLTRYRFDKVRERAKLKQSVSRLVTILFPELEKLVPTLHMTSVYALLSEFPGTKQVAEAHLTHLKAVLSNSSRGHYGRDMAETIRDAARCSVGSVMPAKSLELKHTIRLIRELDAEIKDIENAIQAIMDEIQSPITTIPGKGVRMGAVFLAEIGDFSRFDSPDEILAYAGMSPSTYQSGQLSLSGAYSHMEKRGSRYLRYAIYNATKYVCHWDPTFAAYLAKKWAEGKHYNVALSHAAKKLVRLIYAMEKSRQPYSSAA

SEQ ID NO: 18134 - protein, 342 aa, unidentified
  source 1..342: note = protein_c5af62a
  REGION 7..149: note = RuvC_domain
  SITE 10: note = RuvC_P1
  SITE 53: note = RuvC_P2
  SITE 88: note = RuvC_P3
  SITE 90: note = RuvC_P4
  SITE 93: note = RuvC_P5
  REGION 211..297: note = Tnp_domain
  SITE 219: note = Tnp_P1
  SITE 249: note = Tnp_P2
  SITE 257: note = Tnp_P3
  SITE 258: note = Tnp_P4
  SITE 270: note = Tnp_P5
MGKVTIIGIDLAKNVFQLHGAAADGTVLFRKKLSRLQFCRFMEGQPACVVAMEACAGSHYWAREMVQLGHQPKLIAPRYVKAFIKRQKNDAADAEAIVEAAQRPTMRFVEMKTEEQQSRSIMFRTREQLVNHRTELANALRAHLYEFGHIAPQGIRYLSRLERFVEDENANLPDLVREICRDLLDQIYQLTGRIDALKKKIDALSREAEASRRLQTMPGVGPIAALAIETFAPPMETFKCGRDFAAWLGLVPLQKSTGGKQRLGKTSKMGQRDIRRLLIIGAMAVVRWASRKGAPESSWLARMMAKKPRMLVAIALANKMARGIWAMLTKEEDYRNPATVPA

SEQ ID NO: 18135 - protein, 336 aa, unidentified
  source 1..336: note = protein_1320b3f
  REGION 7..148: note = RuvC_domain
  SITE 10: note = RuvC_P1
  SITE 53: note = RuvC_P2
  SITE 88: note = RuvC_P3
  SITE 90: note = RuvC_P4
  SITE 93: note = RuvC_P5
  REGION 210..295: note = Tnp_domain
  SITE 218: note = Tnp_P1
  SITE 247: note = Tnp_P2
  SITE 255: note = Tnp_P3
  SITE 256: note = Tnp_P4
  SITE 268: note = Tnp_P5
MTELTRIAIDTSKSVFTLHGTDADGRAVLRRNLRRQDMVPFFARRPPMEVVLEACGGSHHWGRVLAGLGHTVRLIPPQYVKPFVKRGKNDRNDAEAISEAAARPEMREVAVKSARQQANAMLLSVRELLVRQRTQLVNALRGHAAEFGHVGRLGRQGVAKLLADVAEDAELPTPAKDALALLGAEIGRLDARLAEVDARLVAQHKQTPTSQMLAEVPGIGPIGALSLVLRVDFSQFKSGRHFASWLGLTPREHSTGGKTRLGGISRAGDERLRQLLVLGATAVIRQAKPGRASAWLIALLARRPRKLAAVALANKMARIVWAMMTRGEAYRQPATA

SEQ ID NO: 18136 - protein, 387 aa, unidentified
  source 1..387: note = protein_5b3d676
  REGION 6..159: note = RuvC_domain
  SITE 9: note = RuvC_P1
  SITE 57: note = RuvC_P2
  SITE 98: note = RuvC_P3
  SITE 100: note = RuvC_P4
  SITE 103: note = RuvC_P5
  REGION 222..306: note = Tnp_domain
  SITE 229: note = Tnp_P1
  SITE 259: note = Tnp_P2
  SITE 267: note = Tnp_P3
  SITE 268: note = Tnp_P4
  SITE 279: note = Tnp_P5
MGRVIIGMDPHKRSATIEIINDREQILAQGRFATDRDGYQAMLKVGRQHKDRVWAVEGCSGIGRHIAQRLVADGETVIDVPAKLSARARVFDTGQGRKTDPVDAHSVAVAALRAKGLREVAVDDATIALRLLVDRRDGLGHARTDLLNRIHKLLLELVPGGAKTFLSAPQARTLLNTVRPRDLVGSTRRRLTSELITELAQVDKKIKAANKELSELVAATGSGLQDLNGIGPSGAARLIGDVGDVSRFATRGHFAAWNGTAPLDASSGDQKRHRLSRAGNRRINRVLHIMAIVQMRHDTEGRAYYRRKLAAGKTPMEAIRCLKRRLSDVVYKQMIKDAASARTGPGGHVGTTLQSSAADPIPMVDTSEQSLPGPAEPQPRTPLLAAS

SEQ ID NO: 18137 - protein, 348 aa, unidentified
  source 1..348: note = protein_d4843b4
  REGION 8..149: note = RuvC_domain
  SITE 11: note = RuvC_P1
  SITE 54: note = RuvC_P2
  SITE 89: note = RuvC_P3
  SITE 91: note = RuvC_P4
  SITE 94: note = RuvC_P5
  REGION 213..300: note = Tnp_domain
  SITE 221: note = Tnp_P1
  SITE 251: note = Tnp_P2
  SITE 259: note = Tnp_P3
  SITE 260: note = Tnp_P4
  SITE 272: note = Tnp_P5
MNATAKVIGLDIAKNVFVAAGRDAHGKVVLKRTLSRGDVLSTFANMPATTIGIESCAGSHYWARKLIELGHDVKLIAAQHTRAYVTGNKNDGNDAAAIAEARSRASTKYVPINSEAQQDLQMMHRARRALMVERNAMIYRIRAFAGEYGQVFPVGVARFRAAFAAWIADARNGLSGSAISTFGDLTAQLDDKEARIATYDQRLLQAAKSDERAKRLQEVPGIGPLTATAVIASVADAHHFGSGRDFAANLGLVPREHSSGGKQRLYGITKRGDVYLRTLLIHGARSALRCAGEKPDRLLRWAVKLAEKRGMNVAAVALANKLARVIWALLAHGREYVPAWSKSMTKPA

SEQ ID NO: 18138 - protein, 283 aa, unidentified
  source 1..283: note = protein_8c24196
  REGION 1..123: note = RuvC_domain
  SITE 26: note = RuvC_P2
  SITE 66: note = RuvC_P3
  SITE 68: note = RuvC_P4
  SITE 71: note = RuvC_P5
  REGION 161..245: note = Tnp_domain
  SITE 169: note = Tnp_P1
  SITE 198: note = Tnp_P2
  SITE 206: note = Tnp_P3
  SITE 207: note = Tnp_P4
  SITE 218: note = Tnp_P5
MANDAAGWEGLIAWLAERGVRRVGLEATAGYERGVRARLEAAGLEVVVHQPLEVKLFARLKRRRAKTDRLDAALIAAATAQVDTVRAAQDPRLAHLAERLTAYEQISDQAAQLKTFMEHVTLPDLAASLGEQIQSLARLKARLAREILAALKAWPDLLARWTLLRSLPGVGPLVAASLVIRMPELGALKRGQPASLLGVAPFDRQSGQWKGQSFIGGGRSRPRRMLYLAAIAAKRFDAAFKIFADRLLAAGKPPKVAIVAVMRKLVEAANLVLKRQQPWVRHA

SEQ ID NO: 18139 - protein, 341 aa, unidentified
  source 1..341: note = protein_638a180
  REGION 7..149: note = RuvC_domain
  SITE 10: note = RuvC_P1
  SITE 53: note = RuvC_P2
  SITE 88: note = RuvC_P3
  SITE 90: note = RuvC_P4
  SITE 93: note = RuvC_P5
  REGION 211..297: note = Tnp_domain
  SITE 219: note = Tnp_P1
  SITE 249: note = Tnp_P2
  SITE 257: note = Tnp_P3
  SITE 258: note = Tnp_P4
  SITE 270: note = Tnp_P5
MTQVVTIGLDLAKNIFQAHGADAAGAVVFRRKLRRDQVLTFFAAQAPCLVAMEACPGAHHWGREIGKLGHTVRLIAPAYVKPFVKRQRNDAADAEAICEAAQRPTMRFVAVKSEAKQASAAIFRSRDVLVAQRTQLINAIRGHLSEYGLIAPQGPSHVERLIAEIEDPASSVPQATRTCLVMLVSTLRHLQHQIAALDAEISARAKADDTARRLMSVPGIGPLIATAVEALAPPAETFSSGRDFAAWIGLTPVQRSTGGKERLGRTSRMGERTLRRLLIIGASGVVRWAKRKDIAADTWLGRMLARKPTMLVIVALANKIARVAWALLTKGGIYRAPVVSA

SEQ ID NO: 18140 - protein, 348 aa, unidentified
  source 1..348: note = protein_50edb87
  REGION 6..147: note = RuvC_domain
  SITE 9: note = RuvC_P1
  SITE 52: note = RuvC_P2
  SITE 87: note = RuvC_P3
  SITE 89: note = RuvC_P4
  SITE 92: note = RuvC_P5
  REGION 211..294: note = Tnp_domain
  SITE 219: note = Tnp_P1
  SITE 249: note = Tnp_P2
  SITE 257: note = Tnp_P3
  SITE 258: note = Tnp_P4
  SITE 270: note = Tnp_P5
MHAMTYAVDLAKSVFQVHWVDPETGEVHNRRLTRAKFITFFAQRQPGCVAMEACGSAHHWGRTFLAQGHQVELIPAFEVKKRVFGNKDDAADATAIWLSAQDRRIRRVPLKTVEQQSDLTAHRMRTQLVSERTARVNALRGLLYEFGVAMPKGRGIGLRWLAAHRAEVDAQLPVRMQRLLNLQLQTLGQLDEHIEVLDAEIREMVAANALAKRLIKIPGIGPLGASALASTLGDGSGWRNARQFACCLGLVPSHTGTGGKVRMGGISKRGDAYLRTLLVHGARNLARLATPSVWVAGMLERRPFNVVVTAVAHKLARIAWAIASHQRTYDPAWKPESPRGAPATTATA

SEQ ID NO: 18141 - protein, 347 aa, unidentified
  source 1..347: note = protein_542156b
  REGION 7..149: note = RuvC_domain
  SITE 10: note = RuvC_P1
  SITE 53: note = RuvC_P2
  SITE 88: note = RuvC_P3
  SITE 90: note = RuvC_P4
  SITE 93: note = RuvC_P5
  REGION 212..303: note = Tnp_domain
  SITE 220: note = Tnp_P1
  SITE 250: note = Tnp_P2
  SITE 258: note = Tnp_P3
  SITE 259: note = Tnp_P4
  SITE 271: note = Tnp_P5
MKDLTTIGLDLAKHVFQAFGADAEGAPLFNRKLRRAEVLRFFERLPPCLVGMEACASAHYWAREISAFGHEVRLLPPQYVKPFVKRGKCDAADAEAIAEAVTRKTMRFVPVKTTKQQAAVMVLKTRALLVRQRTQAINALRAHMGELSIIAPTGIANIKALAPIIRDEKDSRLPPAARFALTEIIDQIEMLATQIDKLEHEIVVQARQDDEMRRLATIPGVGAIIAMAVKAFVPDPAGFKSARHFAAWIGLTPKAHSSGGKERLGRISKMGNPVLRSLLTTGAASVLRHVQYRDRVWPWLKNMLTRRPFKVVAVALANKIARMIWALLTRGGIYRDPTAIEAGPVAA

SEQ ID NO: 18142 - protein, 391 aa, unidentified
  source 1..391: note = protein_371465c
  REGION 6..163: note = RuvC_domain
  SITE 9: note = RuvC_P1
  SITE 61: note = RuvC_P2
  SITE 102: note = RuvC_P3
  SITE 104: note = RuvC_P4
  SITE 107: note = RuvC_P5
  REGION 267..351: note = Tnp_domain
  SITE 273: note = Tnp_P1
  SITE 303: note = Tnp_P2
  SITE 311: note = Tnp_P3
  SITE 312: note = Tnp_P4
  SITE 324: note = Tnp_P5
MSLYFIGIDISKYKHDCCIISAADQKVVSKFTIKNNKDGFEKLLTSINSLSSPEDIKIGFESTAHYALNLELFLEKSLLTFMEVNPVLISEYKKSTTLRRTKTDPIDCESIARWLMTVEYKPHSKGFYHAYSLKSLTRLRDKLIRQRSFYLVRITNVLDHTFPEFKPFFREHLSKTAFFLLENYGSAEKMSRMNSNSYEKLRSISKGKFSPQQFIELKQLASNTVGVNNSIFDVELNSLLTLYKSLSKEIESIEKEIITLIEEVHPHYMSIPGIGPLSAAVIYSEYGDISNFSKPSQMLAFAGIEPSVNDSGTESHGGRMVKRGSSQLRYTLINCCLPLIRFDMTFAEYYAKKRAQGKPHRVAITHVAKKLIRVIYALERQDVDYNAHLVR

SEQ ID NO: 18143 - protein, 331 aa, unidentified
  source 1..331: note = protein_00a0078
  REGION 7..158: note = RuvC_domain
  SITE 10: note = RuvC_P1
  SITE 59: note = RuvC_P2
  SITE 97: note = RuvC_P3
  SITE 99: note = RuvC_P4
  SITE 102: note = RuvC_P5
  REGION 202..289: note = Tnp_domain
  SITE 210: note = Tnp_P1
  SITE 240: note = Tnp_P2
  SITE 248: note = Tnp_P3
  SITE 249: note = Tnp_P4
  SITE 262: note = Tnp_P5
MKFLETAGIDVSKDTIDSTLHVKKCSKQFKNNTTGFRSFIRWAQNQSGLSINQIQICFEHTGLYSLNLAMFLSNNEIKFSMVPALEIKKSLGIARGKNDQLDARRIAEYAYLRREKLAFYNVPSINIIKLQALTTLRAHMVKNKSGYQSSLQGLKTFFKQKDNDNIYKTIQSEISGLNKKIKKIEREILQVIRSEESLYHLYSLITSVKGVGLILAANFLVMTNCFTRFETSRQFACYSGIAPFEKQSGTSLKSKSKVSHFANKRMKTLLNLAASSAIQCDPELKAYYNHRIETGKSRMSTLNIVRNKIVYRVFAVVKRGTPYVPLHLHAA

SEQ ID NO: 18144 - protein, 420 aa, unidentified
  source 1..420: note = protein_1f0637c
  REGION 33..187: note = RuvC_domain
  SITE 36: note = RuvC_P1
  SITE 84: note = RuvC_P2
  SITE 124: note = RuvC_P3
  SITE 126: note = RuvC_P4
  SITE 129: note = RuvC_P5
  REGION 294..378: note = Tnp_domain
  SITE 302: note = Tnp_P1
  SITE 331: note = Tnp_P2
  SITE 339: note = Tnp_P3
  SITE 340: note = Tnp_P4
  SITE 352: note = Tnp_P5
MDAGTHHRVEPSKFDRKVSQLDEGVDGPIEVFVGVDVGKSAHHAVALDVGGRVLLDRSLPQDESRLVQLIEELQTRGRVLFVVDQPATIGALPLAVARSMGVEVGYLPGLAMRRIADLHAGEAKTDARDAAIIAQAARTMPHALRALRRDDEVTAELAMLSGFDEDLAGQINQVSNRIRGLLTQTHPALERVLGPRLDHPAVLDLLERYPSPQLLASAGRARLESRLRKLAPRIGDRIAAEVWAALAEQTVVVSGTTAAAKVMPRLAEQLIVLRRQRSEIAEQVEQVVDSHPLSEVLTSMPGTGVRTAARILVEVSGRDFATAAHLAAYAGLAPVTRRSGTSIRGERRPTRGNRRLKRALYLSAFASLKDPTSRSYYDRKRAENKSHQHALMALARRRCDVLYAMMRDGTLYDQDHVAAA

SEQ ID NO: 18145 - protein, 331 aa, unidentified
  source 1..331: note = protein_b493529
  REGION 14..145: note = RuvC_domain
  SITE 17: note = RuvC_P1
  SITE 54: note = RuvC_P2
  SITE 92: note = RuvC_P3
  SITE 94: note = RuvC_P4
  SITE 97: note = RuvC_P5
  REGION 209..295: note = Tnp_domain
  SITE 217: note = Tnp_P1
  SITE 247: note = Tnp_P2
  SITE 255: note = Tnp_P3
  SITE 256: note = Tnp_P4
  SITE 268: note = Tnp_P5
MEKSTHIGKEVGVLGIDVSKDYLITSRGRERKYKNNLKGYEEILEMKPCLIVLEPTGVYAIRPSQYFKEKGVKVLQVSPNVLSREKEFRGKKTDFYDAEKLENMVDKAKEYEYNPLRELVTLYLFLKDIEVKYKNRLKRTLFLVSDNDKISKERLEKLANGDFAQEELYQLEYTPIVLEEIRVLAKTLLETEERLKEVKKMIEEQVPENHVLLTIPGIGRLAAGIIIGVVGDVKRFPKPESFVAYCGLDPVVERSGKAVISRGISKRGNKYLRSLFYFLAEMNYSRNPTLLKFYESHKDRLQGKKLYTALARKLARIVWSVWYNNKPYEPK

SEQ ID NO: 18146 - protein, 339 aa, unidentified
  source 1..339: note = protein_2024963
  REGION 18..169: note = RuvC_domain
  SITE 21: note = RuvC_P1
  SITE 68: note = RuvC_P2
  SITE 106: note = RuvC_P3
  SITE 108: note = RuvC_P4
  SITE 111: note = RuvC_P5
  REGION 211..298: note = Tnp_domain
  SITE 219: note = Tnp_P1
  SITE 249: note = Tnp_P2
  SITE 257: note = Tnp_P3
  SITE 258: note = Tnp_P4
  SITE 271: note = Tnp_P5
MKSLLSTKYHKFMKSIYVGIDISKNTLDFCIKSSNGISFQKIDNKIRNIRKLLKTLVKMNVKVFIAMENTGYYNYNLYQVLESFDFNVYVLDPKHIKRSIGLVRGKNDKVDAKRIAFFIERNHQDFECWEPCSEAVKSLKILMGQRKSKIKQRKGIKQQMTDLRDIAFNSSTRKLIKINQKAINELDRHIKEIETLIRAEIKSEPALGAQVKRIKTVPGIGDVTAWMITIKTEGFQRLTDPRKLACFAGVVPFEQQSGTSLKTKPRVSKMADMALKSVLQMAAMRAVRMKNDLQAYYLRKVEEGKNKMSVLNAVRNKLIHIAMALIKNQTNYKNRLELS

SEQ ID NO: 18147 - protein, 345 aa, unidentified
  source 1..345: note = protein_abae59b
  REGION 7..147: note = RuvC_domain
  SITE 10: note = RuvC_P1
  SITE 53: note = RuvC_P2
  SITE 88: note = RuvC_P3
  SITE 90: note = RuvC_P4
  SITE 93: note = RuvC_P5
  REGION 210..297: note = Tnp_domain
  SITE 218: note = Tnp_P1
  SITE 248: note = Tnp_P2
  SITE 256: note = Tnp_P3
  SITE 257: note = Tnp_P4
  SITE 269: note = Tnp_P5
MEQISRIGMDTSKHFFQFHGVNAAEKVVLRKKLRRKEMVAFFKALAPTVIGIEACGASHHWARILRSFGHEVKLIAPQLVKPYVKRGKNDTADAEALCEAMSRPTMRFVPVKTAEQQAALMMVGLRDRLIRNRTQLSNAIRGYAAEFGFTAARGMAHIDPLLDRIQADESVPVLARELFAAQAEEYAQLQAQIAEADAKLMAWHKADECSRRLANIPGIGPIGATLLLMKTPAPEMFRSGRQFAAWIGLTPKDHSTAGKVRLGVITRAGDEALRSVLVVGATAVIQHVRRGGRGSPWIVDLLKRKPPKLAAVALANKMARIAWKLMVTGNSYAAKSAPAALMGAA

SEQ ID NO: 18148 - protein, 378 aa, unidentified
  source 1..378: note = protein_55d4c8f
  REGION 34..198: note = RuvC_domain
  SITE 37: note = RuvC_P1
  SITE 91: note = RuvC_P2
  SITE 137: note = RuvC_P3
  SITE 139: note = RuvC_P4
  SITE 142: note = RuvC_P5
  REGION 310..378: note = Tnp_domain
  SITE 317: note = Tnp_P1
  SITE 347: note = Tnp_P2
  SITE 355: note = Tnp_P3
  SITE 356: note = Tnp_P4
  SITE 369: note = Tnp_P5
MRGCRCSMIMGFTKPIEHFNSQRKKGITMNTLYVGIDVSSKSNVVYLMLPNGDKHSNFSVANSHEGSTQLVKRIHSALTSHSLDTVLIGLKATSVYGDNLVYFLREDATLAPFNRKIHVLNPKQVKKFHDTYNDLPKNDYVDSFVISDCLRFGRINKEVYLGDYHYKALQNLTRARFFDVQNLVKEKQRFMNVLFKKYSTMTQEKVFSDTFSTTALAVYDEFESAEALANMDLHELTDFIMKKGKNRFPDPDAVAKAIQKAARSSYRLPKTVNDSVNQVISISITSMKALESQIKEFDKAIKAQMELLPNVLISIPGIGPVYSAGIMAEIGDINRFNRQAALAKYAGLAWKQHQSGGFEAEVTRLIPSGNRFLRYYLC

SEQ ID NO: 18149 - protein, 346 aa, unidentified
  source 1..346: note = protein_ba99c5e
  REGION 5..152: note = RuvC_domain
  SITE 8: note = RuvC_P1
  SITE 55: note = RuvC_P2
  SITE 92: note = RuvC_P3
  SITE 94: note = RuvC_P4
  SITE 97: note = RuvC_P5
  REGION 212..299: note = Tnp_domain
  SITE 220: note = Tnp_P1
  SITE 250: note = Tnp_P2
  SITE 258: note = Tnp_P3
  SITE 259: note = Tnp_P4
  SITE 271: note = Tnp_P5
MNHYAGIDVSLECSSVCVVDASGKILREAKVASEPEALIAWFRSLGFALERIGLEAGPLSQWLFAAMKAAGLAVELLETRHVRKAFEAMPVKSDRNDARGIAQLMRLGWFRPVHCKSLGAQETRTVLTARKLVQSKLRDVENSLRGILRGFGLKVGPTTERSFCGRIRELVAGHPSLETVTEALLAVHAVLLREFNGFEKQVRRMARSDANAKLLMSTPCVGPVVSLTYASAIDDPARFRSSKQVGAHFGMTPKKYQSGETDYTGRISKIGDASVRTALYEAAHIMLTKPVKGCSELKSWAMRIARRAGMSKAKVALARRLAVIMHRMLVDGTPFDPAHKQVTAAA

SEQ ID NO: 18150 - protein, 269 aa, unidentified
  source 1..269: note = protein_5c7e8c8
  REGION 2..75: note = RuvC_domain
  SITE 14: note = RuvC_P3
  SITE 16: note = RuvC_P4
  SITE 19: note = RuvC_P5
  REGION 138..231: note = Tnp_domain
  SITE 146: note = Tnp_P1
  SITE 176: note = Tnp_P2
  SITE 184: note = Tnp_P3
  SITE 185: note = Tnp_P4
  SITE 197: note = Tnp_P5
MPPAYVKPYVERHKNDAADAEAICEAVTRPNMRFVPTKTAEQQSCLTLHRTRHLFIRQQTAIINSIRAHLAEFGIVAPVGRGGVEQLLKAVADANDTRLPEIARACVAALGSQLVALKAQILAFDRRIMAWHRSNETSKRLDAIPGVGPALATALVASIGDPKAFRSGRDFSAWIGLVPKQNSGGGKDKLASISKQGDRYLRSLFTAGALAVIRYAKLHGTKHRPWLAALLARRPTKVAAIALANKVARMAWAMMTRGGRYKEPVALAA

SEQ ID NO: 18151 - protein, 341 aa, unidentified
  source 1..341: note = protein_7ab94f5
  REGION 7..149: note = RuvC_domain
  SITE 10: note = RuvC_P1
  SITE 53: note = RuvC_P2
  SITE 88: note = RuvC_P3
  SITE 90: note = RuvC_P4
  SITE 93: note = RuvC_P5
  REGION 209..295: note = Tnp_domain
  SITE 217: note = Tnp_P1
  SITE 247: note = Tnp_P2
  SITE 255: note = Tnp_P3
  SITE 256: note = Tnp_P4
  SITE 268: note = Tnp_P5
MSAVALVGIDLGKHNFHLHGQDKSGREVFRKKATRLQMMRFLSNLPSCTVAMEACAGSHFVARQLIAIGHEAKLISPQFVRPFVKANKNDFVDAEAICEAASRPAMRFVTPKTEAQQTLSVLHRIRDSLVRDRTKTANQVHAFLLEFGISLPKGLPLLRRLPNTLAEHELPPRLIMLLTRLHQHFCYLDEQIRELDKEMASQLAEDDLGTRLLTIPCVGPITASLLSAEMGDGKQYGGSRDFAASVGLVPRQYSTGGRANLLGISKRGDKNLRRLLVQCARVYLQRLEFQQGALADWVRSLRERRHSNVVVCALANKFARIAWAIATNRSRFDPEPSTSGA

SEQ ID NO: 18152 - protein, 344 aa, unidentified
  source 1..344: note = protein_e360b3c
  REGION 7..148: note = RuvC_domain
  SITE 10: note = RuvC_P1
  SITE 53: note = RuvC_P2
  SITE 88: note = RuvC_P3
  SITE 90: note = RuvC_P4
  SITE 93: note = RuvC_P5
  REGION 210..296: note = Tnp_domain
  SITE 218: note = Tnp_P1
  SITE 248: note = Tnp_P2
  SITE 256: note = Tnp_P3
  SITE 257: note = Tnp_P4
  SITE 269: note = Tnp_P5
MNQIIRIGMDTSKHIFQLHGVDAAEQVVLRRKLRRHQVLEFFARLPRTVIGMEACGAAHYWARELRKLDHEVKLIAPQHVKAYVKRNKNDGRDAEGLCEAMSRPTMQFVPVKTEEQQAVLMLAGVRQQMIARRTQLGNAIRGYATEFGLTAAKGVDKIEPLLAQIAQDNTVPAMARELFAFQGKDYTRLQSELKAIEARLLAWHRANPDSRRLAQIPGVGPISATALVMKTPDPHRFSSGRQFAAWIGLTPKDHSTAGKTRLGKITRAGDEMLRSLLVAGATAVVKQAKRGRGSPWLLELLKRKSPKQAAVALANKTARIAWKLMVTGESYDGARMPGASALAA

SEQ ID NO: 18153 - protein, 344 aa, unidentified
  source 1..344: note = protein_abe0f0b
  REGION 6..147: note = RuvC_domain
  SITE 9: note = RuvC_P1
  SITE 52: note = RuvC_P2
  SITE 87: note = RuvC_P3
  SITE 89: note = RuvC_P4
  SITE 92: note = RuvC_P5
  REGION 211..298: note = Tnp_domain
  SITE 219: note = Tnp_P1
  SITE 249: note = Tnp_P2
  SITE 257: note = Tnp_P3
  SITE 258: note = Tnp_P4
  SITE 270: note = Tnp_P5
MHIASIGIDLGKTTFHLIALGERSKVLVRKKFSRTQLLAYTANLPSSLIGLEACAGAHFLGAALRAQGHEVRLIPGQFIKPYRKSNKNDFLDGEAIAEAVSKENMRFVPIKTQEQLDVQALHRVRDRLVQRRTALINQIRGFLLERGITFAAKPIHLRQNLPAVMEDAEQNLTPRLRWLLQRLWQEWKQLEIDIQAITDEIERISNEDGLCRRLRQIPGFGPLVSTATVAAIGNGAGFRRGRDFAAWVGLVPRQYSTGGKPKLFGISKRGNVYLRRMLIHGARAVLLRVKYDSGGFGQWVHRLAARAPRNKVIVAIANKLARIAWAVLSKGKDYRHQPLQPAAA

SEQ ID NO: 18154 - protein, 341 aa, unidentified
  source 1..341: note = protein_85822ad
  REGION 6..147: note = RuvC_domain
  SITE 9: note = RuvC_P1
  SITE 52: note = RuvC_P2
  SITE 87: note = RuvC_P3
  SITE 89: note = RuvC_P4
  SITE 92: note = RuvC_P5
  REGION 211..296: note = Tnp_domain
  SITE 219: note = Tnp_P1
  SITE 249: note = Tnp_P2
  SITE 257: note = Tnp_P3
  SITE 258: note = Tnp_P4
  SITE 270: note = Tnp_P5
MSIFVLGIDLGKNVCSLVGLDETGAVVLRRRLRRDGVADFVGTLPACIVAMEACCGAHYLGRVLGAAGHTIRLMSPEYVRPYVKANKNDDHDAEAIAEAATRPTMRFVPVKSEPQSDIQALHRARSRLVTERTALINHLRALLLERGIIAPKGRKQLESQLAVFADEADPRLSPRMRRLIEDLRAEWRNLDGRIAAFDAEFVAMARKDEMARRLATIPGIGVINATALVAAVGDARSFGRGRDLSAWLGLTPRQATTGGKPRLLGISKRGNRYLRANLIHGARAVLPRITAQDTPLGRWVRNLSERTHKNVVVVALAAKLARIVWAVLRKGQGFDPAIAAV

SEQ ID NO: 18155 - protein, 312 aa, unidentified
  source 1..312: note = protein_2da4e27
  REGION 7..154: note = RuvC_domain
  SITE 10: note = RuvC_P1
  SITE 54: note = RuvC_P2
  SITE 94: note = RuvC_P3
  SITE 96: note = RuvC_P4
  SITE 99: note = RuvC_P5
  REGION 189..273: note = Tnp_domain
  SITE 197: note = Tnp_P1
  SITE 226: note = Tnp_P2
  SITE 234: note = Tnp_P3
  SITE 235: note = Tnp_P4
  SITE 246: note = Tnp_P5
MAMLSFCGIDVSKDRLDVVVLPEGWFFSVSNDTAGWAELVARLRPLTVSAIGLEPSGGYERGIIRALLAAGLSVRRINPNKLRQFARARGVLAKNDRLDARLIAEYVAIMPTRVVQRDAAVEKLAEIVTMRRQLCDEHVAAENQAAHLEDAMLRRLSKRRQIRLEADIRLLDKRLAEMVAANGALAQRYDLLTSMPGVGPVLAFTLIALLPELGKMSRKQIAALVGLAPYDFDSGKLKGHRSIYGGRMSVRNVLYMAALSASRYSPALKTFHNRLADADKKSKVIIVAVMRKMITTLNAMLRDSAAWQPRSA

SEQ ID NO: 18156 - protein, 385 aa, unidentified
  source 1..385: note = protein_417025d
  REGION 2..156: note = RuvC_domain
  SITE 53: note = RuvC_P2
  SITE 93: note = RuvC_P3
  SITE 95: note = RuvC_P4
  SITE 98: note = RuvC_P5
  REGION 264..350: note = Tnp_domain
  SITE 272: note = Tnp_P1
  SITE 303: note = Tnp_P2
  SITE 311: note = Tnp_P3
  SITE 312: note = Tnp_P4
MELEDEAGRRLARARLPEGLEGITRLHALVAEHAPGSWAELPPDQVAGQVIVGIETDRGPWVTALRAAGYQVFAINPLSAARYRQRHSTSGAKSGAGDAHVLAEIVRLDRDHHRPIAGDSDLADAVKLLARAHQTAVWERTRQVLRLRSTLREYFPAAVEAFEDLAAPDALALLARAPDPARAAKLTRGQLVAALRAARRHHVETRADTLLAVLRAPALRQSATLQGAYAAAVTGQVGIITALNAQITQLGQVVDEHFARHPAADIYLSQPGFGVVLAARTLGEFGDDKDRFATARARKNYSGQSPITRASGKKSVVLARYATNRRLGAALHLQAFAALGASPGARAYYDAIRARNIGHHAALRQLANRLVGIRHGCLKTGTLYD

SEQ ID NO: 18157 - protein, 308 aa, unidentified
  source 1..308: note = protein_f2435ba
  REGION 19..146: note = RuvC_domain
  SITE 51: note = RuvC_P2
  SITE 91: note = RuvC_P3
  SITE 93: note = RuvC_P4
  SITE 96: note = RuvC_P5
  REGION 187..275: note = Tnp_domain
  SITE 195: note = Tnp_P1
  SITE 224: note = Tnp_P2
  SITE 232: note = Tnp_P3
  SITE 233: note = Tnp_P4
  SITE 244: note = Tnp_P5
MPQPVIGCDLSRAFLDLCDLPSGRMQRIPNTRDAIAEWAETLTPDVLVVFEATSGCDDILIATLTERAHPFSRVNPRQAREFARAIGMLAKTDRVDARVLAQMGAALDLPVTRPVSPARATLAVFLRRRRQLVDMRKAEKLRRHSAGHDDIAEQIDAMIALLSTQISVLDQRIKAIIAADRALAEQAALMSTVPGIGPTVMAVLLGELPELGTLCRRKIASLAGLAPHARESGSWKGARRIWGGRRKVREALYIAALSASRRVPALIAMRDRMRAKSKPPKTILIAIARQLLVILNAMIQKGLPLQIT

SEQ ID NO: 18158 - protein, 341 aa, unidentified
  source 1..341: note = protein_d16a76a
  REGION 8..164: note = RuvC_domain
  SITE 11: note = RuvC_P1
  SITE 64: note = RuvC_P2
  SITE 102: note = RuvC_P3
  SITE 104: note = RuvC_P4
  SITE 107: note = RuvC_P5
  REGION 205..292: note = Tnp_domain
  SITE 213: note = Tnp_P1
  SITE 243: note = Tnp_P2
  SITE 251: note = Tnp_P3
  SITE 252: note = Tnp_P4
  SITE 265: note = Tnp_P5
MLKNTFFIGLDIAADDFAASIYQSPEKPVITKEAIKNNPEGFGMLISWLKEHNIDCTNSVICMEATGVYSEAIAYYLSTYGFKVSVEPPLKVKRAFDPVGHKTDPVDSKQIAEYAYRYSDELKFWQPRKDILEKIKQLLTAREQFTKQNTAIKNAMKSYERHVVQVPLIIKAHHETLKELKKHIAEIDKELNRLIRQNPTISQMSNQLKGIPGVGLLLASNLITITGAFNDISSYKTLSAFLGICPYQYRSGKSIYKTPHTRNFGPAYARKLLMLAARSVATHNTAFRKYYLRKLAEGKAKQLVLNNIANKIIKIACALIKNNSQYLEGYYSVSPLCLNLA

SEQ ID NO: 18159 - protein, 274 aa, unidentified
  source 1..274: note = protein_15d0c10
  REGION 2..85: note = RuvC_domain
  SITE 24: note = RuvC_P3
  SITE 26: note = RuvC_P4
  SITE 29: note = RuvC_P5
  REGION 144..231: note = Tnp_domain
  SITE 152: note = Tnp_P1
  SITE 182: note = Tnp_P2
  SITE 190: note = Tnp_P3
  SITE 191: note = Tnp_P4
  SITE 203: note = Tnp_P5
MGHVVKLMAARLVAPYRMSGKHGKNDAADAAAICEAVTRPSMRFVPVKDEHQQATLCLHRTRQGFVEERTATYNRLRGLLAEFGVVLPQKPERLRKEITAHLDSLPGWASRSIRDLLEHVDNIEDRLAEYDRAIREVAREDERSRRLMQLRGIGPTTASALLASIGAGHDFRNGRQVAARLGLTPGQYSSGGKARLGSITKAGDAYIRCLLVNGARAVMANLGDKQDRFSRWVRALTERRGYWRTAVAISAKNVRMAWALLRYGDDFKHELSAG

SEQ ID NO: 18160 - protein, 263 aa, unidentified
  source 1..263: note = protein_e67f2db
  REGION 8..111: note = RuvC_domain
  SITE 50: note = RuvC_P3
  SITE 52: note = RuvC_P4
  SITE 55: note = RuvC_P5
  REGION 174..248: note = Tnp_domain
  SITE 182: note = Tnp_P1
  SITE 212: note = Tnp_P2
  SITE 220: note = Tnp_P3
  SITE 221: note = Tnp_P4
  SITE 232: note = Tnp_P5
MKFFERAAPAIVGLESCAGSQWIARRLQALRHKGRLIPAQFVKPYVKSNKSDIIDAAAIAEAATRPTMRFAAIKSEEQSDLQALHRVRDQMIGTRTRLINQMRAFCLEYGIALRQGAGLFKLDLPLVLDDLSNDLSPAMRKLLVDLFADLRQLEQRINDVTREIAAIADREDVARRLMTIPGIGALGATALLAAVGTGCQFQKARELAAWLGLVPREYSTGGKQKLLGISNAREPLRSQAARSWRAIMLPSPGSNPGSPGKLA

SEQ ID NO: 18161 - protein, 323 aa, unidentified
  source 1..323: note = protein_82cb75a
  REGION 12..155: note = RuvC_domain
  SITE 58: note = RuvC_P2
  SITE 98: note = RuvC_P3
  SITE 100: note = RuvC_P4
  SITE 103: note = RuvC_P5
  REGION 196..280: note = Tnp_domain
  SITE 204: note = Tnp_P1
  SITE 233: note = Tnp_P2
  SITE 241: note = Tnp_P3
  SITE 242: note = Tnp_P4
  SITE 253: note = Tnp_P5
MMAEPHEIQSVLGLDVSCDTVTLFDSCTSRCLTIANEADALRAALQPYQGTATLAVCEATGGHEDKLLGVLIELAIAAHRADPAKVKAYIASFGKRAKNDPIDAHWLSRYGCDRAAVLPRWQPAAPTQQKLELLVARRLDLVAMRVQEQNRLKAPRSRLIADNISAHLCELQRHIEALNTEIDTLISESRDLTLRATSLRSVPGIGPVLVPLLLAVMPELGTLNRRQVASLAGVAPHPKDSGKASWHRSTTGGRRQIRPALFIAALAACRGNSPLATAYQALLKAAKPKRVALTAIMRKIITIANARVRDALRQQNEIMIALE

SEQ ID NO: 18162 - protein, 343 aa, unidentified
  source 1..343: note = protein_e548371
  REGION 6..149: note = RuvC_domain
  SITE 9: note = RuvC_P1
  SITE 54: note = RuvC_P2
  SITE 89: note = RuvC_P3
  SITE 91: note = RuvC_P4
  SITE 94: note = RuvC_P5
  REGION 213..299: note = Tnp_domain
  SITE 221: note = Tnp_P1
  SITE 251: note = Tnp_P2
  SITE 259: note = Tnp_P3
  SITE 260: note = Tnp_P4
  SITE 272: note = Tnp_P5
MKLSRVGVDLAKNVYQLHGVDRHGKTVWKRRLRRGQWLQALLDKVEPGCEIGMEACTGAHHWARELQSRGYTARLIAPQFVKPFVKSNKNDANDAEAICEAMSRPHMRFVSVKTVEQQDIQATHRVREELKAHRNAKANQIRGLVAEYGLVAPKTLLALRRAIPEWLEDAENGLTDSFRSLLHGVWNDLLALEERLKELDKEIEKLARSFEVTKRLQQLRGVGPLVATALVATVGDGSQYNKGRQMASALGLTPRQSSSGDKYRLFGISKRGDVYLRTMLIHGARAVVSQAKHRDDPLSRWVTDIAKRRHPNIAAVALANKTARMAWAMLQNETNYDASLAVG

SEQ ID NO: 18163 - protein, 340 aa, unidentified
  source 1..340: note = protein_a73dcf3
  REGION 6..148: note = RuvC_domain
  SITE 9: note = RuvC_P1
  SITE 52: note = RuvC_P2
  SITE 87: note = RuvC_P3
  SITE 89: note = RuvC_P4
  SITE 92: note = RuvC_P5
  REGION 210..294: note = Tnp_domain
  SITE 218: note = Tnp_P1
  SITE 248: note = Tnp_P2
  SITE 256: note = Tnp_P3
  SITE 257: note = Tnp_P4
  SITE 269: note = Tnp_P5
MNVSMIGLDLAKNVFQVHGADTAGAVVFRKQLRRDKMLAFFAGHPACVVAMEACSSAHYWAREIGKLGHTVRLIAPAYVKPFVKRQKNDAADAEAICEAAQRPTMRFVTVKSEEQQASAAVFRARDLLVRQRTQTINALRGHLAEYGQIVAQGPTHVTRLVWHVEDPRSKLPEAARMALAILVDTLKSLDQRIQKLDVEIARRAREDEDARRLVTIPGVGPITATALIALAPEAAGFKRGRDFAAWLGLTPLQRSTGGKQKLGETSKMGERTLRRLLIIGASAVVLQARRRGTPEGSWLGRMLARKPPMLVTVALANKMARIVWALMANGGVYKAPAVAA

SEQ ID NO: 18164 - protein, 338 aa, unidentified
  source 1..338: note = protein_7d2ab91
  REGION 7..149: note = RuvC_domain
  SITE 10: note = RuvC_P1
  SITE 53: note = RuvC_P2
  SITE 88: note = RuvC_P3
  SITE 90: note = RuvC_P4
  SITE 93: note = RuvC_P5
  REGION 209..295: note = Tnp_domain
  SITE 217: note = Tnp_P1
  SITE 247: note = Tnp_P2
  SITE 255: note = Tnp_P3
  SITE 256: note = Tnp_P4
  SITE 268: note = Tnp_P5
MSTVTLLGIDIGKNTFHLHGQDARGNQLLRKKLNRSQLLPYLAQLPSCKIAMESCGGSQWLARQIEGLGHRVQLIAAQHVKAYVTGNKNDFIDAEAICEAASRPRTRSVPVKTLEQQILSTEHKLRKSWVDSRTRIINQVHAFLLEFGIIFPVGHAALEQVPALMEHHELPIRLRNAVERMLLDIQRLTKDIKAIDVEFKQQLSEDAAGMRLLSIPGIGPLTASALVADVGDASIYKSSRDFAASLGLVPRQYSTGGKTSLLGISKRGDKYLRCLLVQGAHALMIRIDKRNDALGAWVRNLLARKPPNKVACALANKMARIVWAVLARGGSYNVQHIA

SEQ ID NO: 18165 - protein, 345 aa, unidentified
  source 1..345: note = protein_7a78f79
  REGION 5..152: note = RuvC_domain
  SITE 8: note = RuvC_P1
  SITE 55: note = RuvC_P2
  SITE 92: note = RuvC_P3
  SITE 94: note = RuvC_P4
  SITE 97: note = RuvC_P5
  REGION 212..300: note = Tnp_domain
  SITE 220: note = Tnp_P1
  SITE 250: note = Tnp_P2
  SITE 258: note = Tnp_P3
  SITE 259: note = Tnp_P4
  SITE 271: note = Tnp_P5
MKHYAGLDLSIKETSICIVDETGKVCREAKVVSHPEDLIQELKDPAWRLERVGLEAGPLSQWVFSGLAEAGLPVICIETRHAKAFLKAQVNKSDRNDARGIAQMMRVNLFRPVHVKTLTSQKRRALLTARKLLQEKAIAIENDIRGLLRNFGLKVGVVGSTKFEERILELVEGMPELAEIMASLLDARRTLREQVGKLHQKLLSIVREDNVCRRLMTIPGVGPIVSLAFTATIDIPARFKNSRAVGPALGLTPILNQSGESNRIGRISQCGDGMMRTLLYEAAQVMLTRTIKWSWLKAWAMNVAKRRGKQKAIVALARRLAVVMHRMWSDGTEFRWTKENAPAAG

SEQ ID NO: 18166 - protein, 315 aa, unidentified
  source 1..315: note = protein_7138fb5
  REGION 9..156: note = RuvC_domain
  SITE 12: note = RuvC_P1
  SITE 56: note = RuvC_P2
  SITE 94: note = RuvC_P3
  SITE 96: note = RuvC_P4
  SITE 99: note = RuvC_P5
  REGION 190..274: note = Tnp_domain
  SITE 198: note = Tnp_P1
  SITE 227: note = Tnp_P2
  SITE 235: note = Tnp_P3
  SITE 236: note = Tnp_P4
  SITE 247: note = Tnp_P5
MDNSLAQTVGIDISKSSLDAYAHPAGSAQQFANTVKGHKELIAWLGQWPIDRIAYEATGAYHRQLEQALADLPCVKLNPARARRFAQAVGTLAKTDKIDAAVLARMAMTLQPPVRPATTPRQAKLAELISARDSLVRDKIAIQNQAKNLTIPLLKRQHKLRLDQIDRHIAQVDAEIAATISADPILARRHQIISSIAGIGVRTADQLVATMPELGALDPKQTASLAGLAPVARQSGQWKGRSFIQGGRANVRRALYMPALVAARYNPDFKAKYQSLIEAGKPAKVAVVTLMRKIIVMANALVKADRLWVVDRPCT

SEQ ID NO: 18167 - protein, 342 aa, unidentified
  source 1..342: note = protein_30fe296
  REGION 6..147: note = RuvC_domain
  SITE 9: note = RuvC_P1
  SITE 52: note = RuvC_P2
  SITE 87: note = RuvC_P3
  SITE 89: note = RuvC_P4
  SITE 92: note = RuvC_P5
  REGION 212..297: note = Tnp_domain
  SITE 220: note = Tnp_P1
  SITE 250: note = Tnp_P2
  SITE 258: note = Tnp_P3
  SITE 259: note = Tnp_P4
  SITE 271: note = Tnp_P5
MQIAVLGIDLGKRTCSVVGLDGAGRVVLRRRVARTNVIGFTAGLAACVVAMEACCGAHYLGREIATQGHTVRLMSPEYVRPYVKAQKNDDRDAEAIAEAATRPTMRFVPLKTEAQLDAQILHRVRSRLVGERTALINQLRAVLLERGLVFPQGRRQFEQALAELLTGDETADLSPRIRQLVVDMQAEWQDLDRRIAALDDEFAKRARSDDSARRLATIPGIGVLNATALAAAVGDASAFARGRDFAAWLGLVPRQRTTGGKAKLLGISKRGNVYLRTLLIHGARAALPALSRKATPFGAWLRGLLARAHVNTVVVALANKLARIAWAVLARQTTYEAHHAHA

SEQ ID NO: 18168 - protein, 342 aa, unidentified
  source 1..342: note = protein_b4a1af9
  REGION 6..148: note = RuvC_domain
  SITE 9: note = RuvC_P1
  SITE 52: note = RuvC_P2
  SITE 87: note = RuvC_P3
  SITE 89: note = RuvC_P4
  SITE 92: note = RuvC_P5
  REGION 210..294: note = Tnp_domain
  SITE 218: note = Tnp_P1
  SITE 248: note = Tnp_P2
  SITE 256: note = Tnp_P3
  SITE 257: note = Tnp_P4
  SITE 269: note = Tnp_P5
MKDTMIGVDLAKNVFQLHGASMTGQLKFRKKLSRSQFREVLSAQPPAVIVMEACGSASYWARELARLGHEVKLIAPQYVKPFVKRQKNDAADAEAIVVAAQRPEMRFVPAKSESQQARAILFRNRERLVNQRTELVNGLRSILYEFGHTIPQGIGNLSRGNEILEDPNCDLPDLVRQECRDLFELIEETTVRIDAKLKRIKALSTETDTAKRLQTMPGVGPLSALAIEAFAPPLETFTRGRDFAAWLGLVPRQHSSGGKPRLGRMSKAGQSDIRRLLIIGAMSRLSQLGRKSIPKGSWLERMLARKPKMLVAIALANKMARALWAMQTKKENYRDPTQAVAT

SEQ ID NO: 18169 - protein, 341 aa, unidentified
  source 1..341: note = protein_4c47d85
  REGION 7..149: note = RuvC_domain
  SITE 10: note = RuvC_P1
  SITE 53: note = RuvC_P2
  SITE 88: note = RuvC_P3
  SITE 90: note = RuvC_P4
  SITE 93: note = RuvC_P5
  REGION 209..294: note = Tnp_domain
  SITE 217: note = Tnp_P1
  SITE 247: note = Tnp_P2
  SITE 255: note = Tnp_P3
  SITE 256: note = Tnp_P4
  SITE 268: note = Tnp_P5
MEDVTLIGIDFGKHTSHLHAQDRAGHAVWRKKCNRSQLMILLANTPPCTVVTEACAGAHQMARDLIRFNHTVKLISPQFVRPFVKTNKNDFIDAEAICEAASRPSMRFVTPKTEAQQCLGAWHRVRESLVCDRVQVTNQIHAFLMEFGISLPKGAAVIKRLPSVLAEQRLPARLVILLERLRDQYRALDAQIAEIERDLAAQLREDESGRRLLSVPGIGPVTASLLAAEMGDGKQYGCARDFAASLGLVPRQYSTGERAHLMGISKRGDKNLRRLLVQCARVYMQNVARQTGRLADWVRDLLQRRHSNVVACAVANKFARIVWAMTARRVDFERIGEALPA

SEQ ID NO: 18170 - protein, 343 aa, unidentified
  source 1..343: note = protein_fc984e1
  REGION 7..148: note = RuvC_domain
  SITE 10: note = RuvC_P1
  SITE 53: note = RuvC_P2
  SITE 88: note = RuvC_P3
  SITE 90: note = RuvC_P4
  SITE 93: note = RuvC_P5
  REGION 212..304: note = Tnp_domain
  SITE 220: note = Tnp_P1
  SITE 250: note = Tnp_P2
  SITE 258: note = Tnp_P3
  SITE 259: note = Tnp_P4
  SITE 271: note = Tnp_P5
MEAVTAIGLDIAKSVFQVHCIDAEGNVIIRRQLKRRHVQAFFQKLSPCLVGIEACATSHHWSRELTALGHMVRLMPPAYVKPYVKRQKNDAADAEAICEAVTRANMRFVETKTPEQQSCLMLHRTRHLFIRQQTAVINAIRAHFGEFGVVAPVGRKGVEELLDVVADASDERVPEVARACLGALGVQLQTLKAQILEFDRRIMAWHRSNETSRRLDAIPGVGPALATALVASVADPKAFRSGRDFSVWVGLVPKQHSSGGKEKLGSISKQGDRYLRSLFTAGALAVIRYAKIHGTKHRPWLAALLARRPTKVAAIALANKIARMAWAMMAKGEPYKEPAALAA

SEQ ID NO: 18171 - protein, 399 aa, unidentified
  source 1..399: note = protein_23a6b14
  REGION 4..162: note = RuvC_domain
  SITE 7: note = RuvC_P1
  SITE 57: note = RuvC_P2
  SITE 99: note = RuvC_P3
  SITE 101: note = RuvC_P4
  SITE 104: note = RuvC_P5
  REGION 277..362: note = Tnp_domain
  SITE 285: note = Tnp_P1
  SITE 315: note = Tnp_P2
  SITE 323: note = Tnp_P3
  SITE 324: note = Tnp_P4
  SITE 337: note = Tnp_P5
MNAVGIDVSKGKSTVAILRPGGEVIVSPFEVSHNPRELNELVTLIKNLDGDTKIVMEYTGNYYLPVALFLQKSGLFVSVVNPILVKDYSNKSLTVRKGKTDKKDSIKLAAFALDRWNELPLFSSQSDTRTLLKSFNRQYNQYNKLKVMLKNNLISILDQTFPGANTLFNTPARKADGHEKWIDFVLKFPHCECISRKTYSVFSKCYLSWCRKYGYRFSDAKAKEIYSFACNCVPSLADSEAAHALVSVAILQLNTLNETLASLQREMDRLASSLPEYDTVMSFFGVGSVLGSQLIAEIGDVSRFPNKKALVGFAGIDAPPFQSGNFDPKSRSISKRGSAALRKTLFQIMSVILQNAPADDPVFLFMNKKRSEGKHFFVYMIAGANKFLRIYFARVSASV

SEQ ID NO: 18172 - protein, 257 aa, unidentified
  source 1..257: note = protein_a2d679e
  REGION 10..153: note = RuvC_domain
  SITE 13: note = RuvC_P1
  SITE 55: note = RuvC_P2
  SITE 95: note = RuvC_P3
  SITE 97: note = RuvC_P4
  SITE 100: note = RuvC_P5
  REGION 190..254: note = Tnp_domain
  SITE 198: note = Tnp_P1
  SITE 227: note = Tnp_P2
  SITE 235: note = Tnp_P3
  SITE 236: note = Tnp_P4
MAKPIEPIRVGIDVSKAELVIARSDSKSLEKIANTPRAISRWLKTLPCGTQLAFEATGAYHRTLASLAHQLGFALYLLDGYRLNRYRDGIGNRAKTDPADARLILRYLSKELSELKPWVPPHEAFYRIQSLLRRRASLVHTRVALTQSLGDVPELKNASRRLSNNIKDIERLIERRLKEAMAEVGWRPDTQRCKAIEGIGDLTSVALANTFHRGEFKSSDAFIAYLGMDVRVRDSGKQVGRRKPDQERGPRTATPLV

SEQ ID NO: 18173 - protein, 291 aa, unidentified
  source 1..291: note = protein_ee0f916
  REGION 2..134: note = RuvC_domain
  SITE 32: note = RuvC_P2
  SITE 73: note = RuvC_P3
  SITE 75: note = RuvC_P4
  SITE 78: note = RuvC_P5
  REGION 196..281: note = Tnp_domain
  SITE 204: note = Tnp_P1
  SITE 234: note = Tnp_P2
  SITE 242: note = Tnp_P3
  SITE 243: note = Tnp_P4
  SITE 254: note = Tnp_P5
MQARGRYGTDKAGYAAMLGAGRKFADRVWAVEGCNGIGKHIAHRLVHDGETVLDVPAKLSAQVRVFATGNGRKTDPVDAHSVAMVALRTPGLVTVRVDDDLLVMGMLADRRDELGQARTRTVNRLHRLLLELFPGGAKQFLSARQARTMIATIRPRDLVGKTRRRLAVELIGEVEQIDAKMKTLKKELTALVTARGSTLLEVTGIGPSGAARLLADVGDIHRFADRDRFASWNDTAPLDASSGNQQRHRLSRAGNRRINRTLHIMAIVQLRHRTPRAAPTTTPAKLAACRP

SEQ ID NO: 18174 - protein, 422 aa, unidentified
  source 1..422: note = protein_7238b3f
  REGION 15..155: note = RuvC_domain
  SITE 57: note = RuvC_P2
  SITE 92: note = RuvC_P3
  SITE 94: note = RuvC_P4
  SITE 97: note = RuvC_P5
  REGION 282..369: note = Tnp_domain
  SITE 290: note = Tnp_P1
  SITE 321: note = Tnp_P2
  SITE 329: note = Tnp_P3
  SITE 330: note = Tnp_P4
  SITE 342: note = Tnp_P5
MWGWTGRSRFTTWRSAGRERGWLSSFRIEHGAAGVARLVARSLELEADPAEVRVVLETRHGLLVEALVDAGFTVLPVNPDLVARRRGPAKKKDDAEDARICCLLALDTYTELRRLIPHGEVGTELRAIARDDERAARDERRIGNRLRADLLAVFPAAIDIADGDLSAAVFLKLLERWPSAADLATTTGEELESFARSCRHGWPARFTERVIAAMAAPRLAVRPELARAKAGSIRLAAAQLLLLRTQRKAWERRMGELLLGAPRHGRAKTPKDPDPGKAFPGGEIYLSMPGLGDRLAARVAGEIGEHYQQFTTPNALQCYAGRAPVTRRSGRSEFTVARRLACNRHLGEAVQQWAFCSLQQSAWAREFYDEKIAAGKSHHAALRALGNRWLEVLWHCLDKRVCYDETIHTANRLRSRMLKPAA

SEQ ID NO: 18175 - protein, 343 aa, unidentified
  source 1..343: note = protein_cc6dc91
  REGION 6..146: note = RuvC_domain
  SITE 9: note = RuvC_P1
  SITE 52: note = RuvC_P2
  SITE 87: note = RuvC_P3
  SITE 89: note = RuvC_P4
  SITE 92: note = RuvC_P5
  REGION 211..297: note = Tnp_domain
  SITE 219: note = Tnp_P1
  SITE 249: note = Tnp_P2
  SITE 257: note = Tnp_P3
  SITE 258: note = Tnp_P4
  SITE 270: note = Tnp_P5
MKLSVVGIDIAKNVFQLHGVDNTGKAVLRKRMTRDKLGAYIANLSQCTIVMESCGGANYWARVFERSGHLVKLISPQFVKPFVKTNKNDANDAEAIVEAASRPAMNFVPIKQAEQQDIQSIHRVRSRVVRNRTALINEIRGLNLEYGITIAPGASKVKKAMCSIIADNENGLTQSLRECMQDLYDELVAVEGRQKKLEKTIRHICKQNETCRRILKVPGVGELTATAIVAAVPDANEFKNGRHMSAWLGLVPRQSSSGNKQVLLGISKRGDRYLRTLLIHGARAALSHYKNTDNDYGRWLTGKKATLSFNKAAVALANKNARIIWSLLKTGDEFNCGVQRVAA

SEQ ID NO: 18176 - protein, 345 aa, unidentified
  source 1..345: note = protein_c06ae45
  REGION 5..152: note = RuvC_domain
  SITE 8: note = RuvC_P1
  SITE 55: note = RuvC_P2
  SITE 92: note = RuvC_P3
  SITE 94: note = RuvC_P4
  SITE 97: note = RuvC_P5
  REGION 212..295: note = Tnp_domain
  SITE 220: note = Tnp_P1
  SITE 250: note = Tnp_P2
  SITE 258: note = Tnp_P3
  SITE 259: note = Tnp_P4
  SITE 271: note = Tnp_P5
MEHYAGLDVSLELTSVCLVDASGQVVREAKVDSTPDALIHFLRSQDVPIVRVALEAGPLSQWLHAGLMAARFEAVLLETRHVKAALSAMTVKTDRRHARGIAQLLRLGWFRPVHAKSASAQEVRALLTARKLVQGKCLDIESGIRGVLRGFGLKVGPVSKGRFEARVVELIGGHAMLEAVIGAMLKARSALQAEFARLHRTMLGLVRADPVCRQLMSVPGVGAVVAIAFKSGVDDPARLKRSRDVGAHFGLTPRKYQSGEIDVTGSISKVGDKMVRTALYEAAGTMLTRTVRLSGLKSWALGVAKRRGGKKARVALARKLGVILHRMWVDRTTFRWRNAPAAMTA

SEQ ID NO: 18177 - protein, 350 aa, unidentified
  source 1..350: note = protein_5c16860
  REGION 7..149: note = RuvC_domain
  SITE 10: note = RuvC_P1
  SITE 53: note = RuvC_P2
  SITE 88: note = RuvC_P3
  SITE 90: note = RuvC_P4
  SITE 93: note = RuvC_P5
  REGION 211..298: note = Tnp_domain
  SITE 219: note = Tnp_P1
  SITE 249: note = Tnp_P2
  SITE 257: note = Tnp_P3
  SITE 258: note = Tnp_P4
  SITE 270: note = Tnp_P5
MDKITTIGLDIAKNVFQLHGVDADGQIVLRKTLRRGQMQPFFEKLAPCLIGMEACATAHHWARTLIAAGHDVRLIPPSYIKPYLRRQKNDAADAATICEAVTRPSMRFVPVKSEEQQATLMLHSARELLISQRTALINALRGHFAELGIVAPQGAHNARQLIAILDDDERYTPDAVRIALGPLATTLIEIEGQIATLDKAIIAAHRNDDVSLRLATVPGIGPVIATCLSASVPDAKLFVGGREFAAWLGLVPRQHSTGGKPRLGSISKMGNRRLRKLLVVGAHAALYRMKNGKTQSPLANWARTLLEKKSFKLVAVALANKIARIAWAIMARNIQFQPDFVPDHRVPASV

SEQ ID NO: 18178 - protein, 341 aa, unidentified
  source 1..341: note = protein_1d11003
  REGION 5..151: note = RuvC_domain
  SITE 8: note = RuvC_P1
  SITE 53: note = RuvC_P2
  SITE 91: note = RuvC_P3
  SITE 93: note = RuvC_P4
  SITE 96: note = RuvC_P5
  REGION 211..297: note = Tnp_domain
  SITE 219: note = Tnp_P1
  SITE 249: note = Tnp_P2
  SITE 257: note = Tnp_P3
  SITE 258: note = Tnp_P4
  SITE 270: note = Tnp_P5
MGEYIGLDVSMKDTAISVRRDGKRVWRGKCASDPEAIARMVRKHAQEPERVIFETGPLSVWFYHALQAEGLPAICVDARHAKAALDMAANKTEANDADGLAHLAEVGFYREVRVKGFDSMLTRTLVAARTKLVRIKIEISNQIRGLMKTFGLVVPAGKGSTFDANVCTKLSESSDLAGIILPLLEAWRSVRMRAAELTRRLIGDARQSEACQLLMSIPGVGVVTATAFATAVEEPANFRTSRSVGAWLGLTTRRYQSGQVDYNGHISRRGDHQVRNLLYEAACVILTRSSAESTLREWGLKLRERVGFKRAAVAVARKLSVVMHAMLKSGELFDKTAGAPA

SEQ ID NO: 18179 - protein, 345 aa, unidentified
  source 1..345: note = protein_afba894
  REGION 6..147: note = RuvC_domain
  SITE 9: note = RuvC_P1
  SITE 52: note = RuvC_P2
  SITE 87: note = RuvC_P3
  SITE 89: note = RuvC_P4
  SITE 92: note = RuvC_P5
  REGION 211..297: note = Tnp_domain
  SITE 219: note = Tnp_P1
  SITE 249: note = Tnp_P2
  SITE 257: note = Tnp_P3
  SITE 258: note = Tnp_P4
  SITE 270: note = Tnp_P5
MEIHTIGIDLGKTVFHLVGLNSHGEVVVRKKCSRNQILRFTANLHVSLIGMEACGGAHFLGRALREQGHDVRLMPAQYVKPYVKTNKNDFIDAEACAEAVGRPNMRFVPIKTDDQLDLQSLHRVRERWVARRTAVVNQMRGLLLERGITIRKGRRYIEESLPGILEDPENKLSGALRVLLTQLHLEMQYLDRQVEESDKLILGIAGELEPCRRLVAIPGIGPIIATATIAAIGNGAAFKKGRGFAAWLGVVPGEHSTGGKQTLTGTSRRGNKYLRKLFVQGAHSVLLQKTKQSTGLSKWLDQLTSRKRIQVATVAMANKMARMAWAVLSKGEAYRPPLLPQTAGD

SEQ ID NO: 18180 - protein, 346 aa, unidentified
  source 1..346: note = protein_ee39ab2
  REGION 10..161: note = RuvC_domain
  SITE 13: note = RuvC_P1
  SITE 64: note = RuvC_P2
  SITE 100: note = RuvC_P3
  SITE 102: note = RuvC_P4
  SITE 105: note = RuvC_P5
  REGION 226..311: note = Tnp_domain
  SITE 234: note = Tnp_P1
  SITE 264: note = Tnp_P2
  SITE 272: note = Tnp_P3
  SITE 273: note = Tnp_P4
  SITE 284: note = Tnp_P5
MLADELDHVIGVDTHRDRHALALVAARSGGVVGGLELPASAGGYRQALAFARRHAPGRRLWAIEGTGCYGAGLARYLASRGERVVEVERPARTGGRSRGKSDALDAVRAARSALADEKPISPRRGDTRESLRALVTTRAGAVATKQTALRQLRSLLVCVHEPLRAELRPLSRSLLLRRCAGLRPRAGSDHRGVLVALRCCAQRVLVAEREANELEREIQALVARLAPTLLEEPGVGPISAAQLLISWSHPGRLHSEAAFARLAGAAPIPASSGQTIRHRLDRGGDRQLNRALHTIITSRRKHHPATIAYINRRTSEGKNTREAIRCLKRYLARHLYRLLETMPTPT

SEQ ID NO: 18181 - protein, 325 aa, unidentified
  source 1..325: note = protein_a2ab710
  REGION 6..156: note = RuvC_domain
  SITE 9: note = RuvC_P1
  SITE 55: note = RuvC_P2
  SITE 93: note = RuvC_P3
  SITE 95: note = RuvC_P4
  SITE 98: note = RuvC_P5
  REGION 197..284: note = Tnp_domain
  SITE 205: note = Tnp_P1
  SITE 235: note = Tnp_P2
  SITE 243: note = Tnp_P3
  SITE 244: note = Tnp_P4
  SITE 257: note = Tnp_P5
MEKVFIGIDISKSTLDICIRKNAVTEHCQINNSSKDIKRFLKRYADNADTIVAMENTGRYNFELYEVLSRMKLLVYVINPLHLKKSIGLLRGKNDKIDSQRICLFIEKNYMDLAPWVCKSPDIQKLSLLNAERRHRVKIRSGLSRQMKDLEFLKHHTDQDILKLNQEMILLIDKQIKSIEKKIVEIIECNEILKDQYERIQTIPGVGKVLASLLLVKTNGFTEIQSARKMACYSGVVPFEHRSGSSIYYKPRVSTMADKDLKKILHLAALSSIRLKNDLAVYYQRKVLEGKNKMSVLNAIRNKIIHRVYAIIKNNSVYENRLHMS

SEQ ID NO: 18182 - protein, 397 aa, unidentified
  source 1..397: note = protein_d13b747
  REGION 9..163: note = RuvC_domain
  SITE 12: note = RuvC_P1
  SITE 60: note = RuvC_P2
  SITE 100: note = RuvC_P3
  SITE 102: note = RuvC_P4
  SITE 105: note = RuvC_P5
  REGION 270..355: note = Tnp_domain
  SITE 278: note = Tnp_P1
  SITE 308: note = Tnp_P2
  SITE 316: note = Tnp_P3
  SITE 317: note = Tnp_P4
  SITE 329: note = Tnp_P5
MDNGYGVFLGLDVGKSEHHAVGLDPAGKRLHDAPLPNSEPKLRAMFAKLAVHGPVLVVVDQPATIGALPVAVARACGHEVAYLPGLAMRRIADLYPGNAKTDARDAYIIADAARTLPHALRRVDVGDEALAELDVLIGYDDDLTAEATRLSNRIRGLLTGLHPALERVLGPKVTHLAVLEILSRCGGPIGIRKAGRRKLTSIATKHAPRMGAKLVENLLAALDEQTVVVPGTAAADTVLPRLAESLKTVLAQRKTVATEVEEILDAHPLARVLTSMPGIGVRTAARILLEIGDGSAFASSGHLAAYAGIAPVTHRSGSSIRGEHPARTGNRKLKRAFFLAAFAALSDPTSRAYYDRKRAEGKKHNAALICLARRRCDVLFAMLRNKTFYQHPAPHTA

SEQ ID NO: 18183 - protein, 351 aa, unidentified
  source 1..351: note = protein_1619f4c
  REGION 7..149: note = RuvC_domain
  SITE 10: note = RuvC_P1
  SITE 53: note = RuvC_P2
  SITE 88: note = RuvC_P3
  SITE 90: note = RuvC_P4
  SITE 93: note = RuvC_P5
  REGION 212..299: note = Tnp_domain
  SITE 220: note = Tnp_P1
  SITE 250: note = Tnp_P2
  SITE 258: note = Tnp_P3
  SITE 259: note = Tnp_P4
  SITE 271: note = Tnp_P5
MDEITTIGFDIAKNVFQLHGVDAHGQIVLRKSLRRGQLHQFFEKLPPCLIGMEACATAHHWARTLMTSGHDVRLIPPAYIKPYLRRQKNDAADAAAICEAVTRPSMRFVPVKNEEQQTTLMLHSTRDLLISQRTALINALRGHFAELGIVVAQGARNARQLTAIVNDEDNIVLPASARHALQPVTAMLIDIETQIGKLDKDILATHRKDNVSKRLATIPGIGTVTASCLSASVPDARVFKCGREFAAWMGLVPRQFSTGGKPRLGSISKMGNRRLRALLVVGAHAALYRMKSGKTQTPLADWARSLLSKKPFKLVAVALANKMARIAWAVMAKVSDYEPGFNGHKVVQTTA

SEQ ID NO: 18184 - protein, 359 aa, unidentified
  source 1..359: note = protein_aa603f6
  REGION 5..158: note = RuvC_domain
  SITE 8: note = RuvC_P1
  SITE 56: note = RuvC_P2
  SITE 97: note = RuvC_P3
  SITE 99: note = RuvC_P4
  SITE 102: note = RuvC_P5
  REGION 220..305: note = Tnp_domain
  SITE 228: note = Tnp_P1
  SITE 258: note = Tnp_P2
  SITE 266: note = Tnp_P3
  SITE 267: note = Tnp_P4
  SITE 278: note = Tnp_P5
MTVIIGMDPHKRSATIEVIDERAQVLATGRYDTDNAGYGRLLRAGREFSDRVWAVEGCNGIGKHLAHRLVHDGETVVDVPAKLSAQVRVFAVGNGRKTDPVDAHSVALAALRTPNLVTVQVDPELVVLGLLVDRRDELGRARTQTVNRVHRLLLELVPGGAERFLSAAQARALVATIKPRDIVGKTRRRLVVELIGELESIDRKTKTIDKELTQLVTARGSTLLGLHGIGPSGAARLLADAGDISRFGTRDRFASWNGTAPLDASSGQQQRHRLSRAGNRRINRTLHIMAVVQLRNPTEGRVYFDAKKAAGKTSMEAMRALKRRLSNVVYQRMVHDQQDRQAASPGGHPGTTLTPARPT

SEQ ID NO: 18185 - protein, 282 aa, unidentified
  source 1..282: note = protein_b90dd4c
  REGION 7..149: note = RuvC_domain
  SITE 10: note = RuvC_P1
  SITE 53: note = RuvC_P2
  SITE 88: note = RuvC_P3
  SITE 90: note = RuvC_P4
  SITE 93: note = RuvC_P5
  REGION 211..271: note = Tnp_domain
  SITE 218: note = Tnp_P1
  SITE 248: note = Tnp_P2
  SITE 256: note = Tnp_P3
  SITE 257: note = Tnp_P4
MGEIKTIGLDIAKNVFQVHGIDADGHVVLRKSLRRSQMPPFFEKLAPCLIGIEACATAHHWARTLMEAGHEVRLIPPGYIKPYLRRQKNDAADAAAICEAVTRPSMRFVPVKSRDQQATLMLHSARELLISQRTALINALRGHFAELGIVVPQGARNVRQLIALLEDEQHSPQAVRVALMPLAMALTEMETQVAKLDKAILATHRNDDVSIRLATVPGIGPVIATCLSASVSDVKLFEGGREFAAWLGLVSRQHSTGGKPRQWVIGTYASSSWLGLMRYFTA

SEQ ID NO: 18186 - protein, 319 aa, unidentified
  source 1..319: note = protein_6a08057
  REGION 5..155: note = RuvC_domain
  SITE 8: note = RuvC_P1
  SITE 52: note = RuvC_P2
  SITE 92: note = RuvC_P3
  SITE 94: note = RuvC_P4
  SITE 97: note = RuvC_P5
  REGION 193..280: note = Tnp_domain
  SITE 201: note = Tnp_P1
  SITE 231: note = Tnp_P2
  SITE 239: note = Tnp_P3
  SITE 240: note = Tnp_P4
  SITE 253: note = Tnp_P5
MSKIIGIDISKQVFDVSFLEENLWKHQVLKNNLSGFEKLISFVEKEDFVVMEASGTYYLPLAEYLYSQEINVVVANPLSIKRYAQSRLKRAKTDKADSKVIAEYGKKNLDDLSLWSPESKVCIRIRQMHTRIEMIQKQISQTYNQLEAFLSSGFLDEKLEKEIQESLEQLQIGKKMLESEIEKLALEEFGVTIKCLTSIPGIGMKTAIMLVVITDNFKKFEHYKQLIAFVGFSPRIYESGSSVRGRSSICKMGKSQIRKLLYLCSWSAKRWNKKCKEMYERLITNGKAERVAKIALANKLLKQAFAIGKKKEIYREDFC

SEQ ID NO: 18187 - protein, 344 aa, unidentified
  source 1..344: note = protein_667307b
  REGION 6..148: note = RuvC_domain
  SITE 9: note = RuvC_P1
  SITE 52: note = RuvC_P2
  SITE 87: note = RuvC_P3
  SITE 89: note = RuvC_P4
  SITE 92: note = RuvC_P5
  REGION 211..298: note = Tnp_domain
  SITE 219: note = Tnp_P1
  SITE 249: note = Tnp_P2
  SITE 257: note = Tnp_P3
  SITE 258: note = Tnp_P4
  SITE 270: note = Tnp_P5
MHITTLGIDLAKNVFQLHGVDARGRAVLSRRVKRGQLLQAVANLPPCVIGMEACGSAHHWGRAFEQLGHTVKLMHPKYVKPYVKTNKNDGRDAEAICEAVSRPTMRFVSIKTVEQADLQAVHRTRSLFVKHRTAVINQIRGLLAEYGLVIAPSPGKVRPALVRFLDDTASGLTAFARDTFSELYAQLTELDSRIERVTHWVERVYRAHPVCQKLAAVPGIGPLTATALVATVGRPQAFHNGRHLAAWLGLVPRQYSSGGKERLDGISKRGSRYVRTLLIHGARAVVQRAERRTDTQGQWLCALKHRKGTNVAAVALANKNARVIWALLAHDEAYRPPASEPAGS

SEQ ID NO: 18188 - protein, 324 aa, unidentified
  source 1..324: note = protein_12f6856
  REGION 5..156: note = RuvC_domain
  SITE 8: note = RuvC_P1
  SITE 58: note = RuvC_P2
  SITE 98: note = RuvC_P3
  SITE 100: note = RuvC_P4
  SITE 103: note = RuvC_P5
  REGION 195..280: note = Tnp_domain
  SITE 203: note = Tnp_P1
  SITE 233: note = Tnp_P2
  SITE 241: note = Tnp_P3
  SITE 242: note = Tnp_P4
  SITE 254: note = Tnp_P5
MPIVVGVDIAKRTFDIALLQANGKYRTKGNLSNDPAGFRAFTQWLEKYAEPGAWVVMEATNVYHEALADHLVGLGYRLCVVNPARIASYAQSQLQRVKTDKVDAKLMALFGTRHIDELQPWQPEPPARRRLRALVRRYEELKELYRMESNRLDTAESSVKESILSVMTHLERQIDQTLKAIQEQIDDDPDLRGKRDLLVSIDGISDKTAALLLAELGDLSRFDNARAVVAFAGLNPRLQQSGSHQGQVRISRMGSARLRAGLYMPAMCAMLHNAAVKALRLRLQENGKTGKQIICAAMRKLLHIAYGVLKSGQPFKAELALPAR

SEQ ID NO: 18189 - protein, 360 aa, unidentified
  source 1..360: note = protein_4d5b1e3
  REGION 7..147: note = RuvC_domain
  SITE 10: note = RuvC_P1
  SITE 53: note = RuvC_P2
  SITE 88: note = RuvC_P3
  SITE 90: note = RuvC_P4
  SITE 93: note = RuvC_P5
  REGION 210..295: note = Tnp_domain
  SITE 218: note = Tnp_P1
  SITE 248: note = Tnp_P2
  SITE 256: note = Tnp_P3
  SITE 257: note = Tnp_P4
  SITE 268: note = Tnp_P5
MEQMIGIGMDTSKSVFQLHGVNAAEEPILRKKLSRKEMMKFFEKTPPTTIAVEACGGSHHWARLLGSLGHNVKLIARQLAKPYVKRGKNDAADAEALCEAMSRPTMRFAPVKTADQQAALMLIGVRQRLLHNRTQLANAIRGFAMEFGIISAKGMCKIEPLLEQIAADHKLPELTQELFAMHGEEYRELLSQIKAIDEKLMRLHRADDCSKRLAEIPGVGPIGASLLLMKTPDPRMFKSGRDFAAWIGLTPKDHSTAGVKLGVITRAGDELLRSVLVVGATALLQQIRTGRSRHASLWLLGLLQRKRPKLVAVALANKIARIAWKLMVNGETYRQGERQTQATKEIGHHGERRQNAIVLS

SEQ ID NO: 18190 - protein, 339 aa, unidentified
  source 1..339: note = protein_ebd3c20
  REGION 6..147: note = RuvC_domain
  SITE 9: note = RuvC_P1
  SITE 52: note = RuvC_P2
  SITE 87: note = RuvC_P3
  SITE 89: note = RuvC_P4
  SITE 92: note = RuvC_P5
  REGION 211..298: note = Tnp_domain
  SITE 219: note = Tnp_P1
  SITE 249: note = Tnp_P2
  SITE 257: note = Tnp_P3
  SITE 258: note = Tnp_P4
  SITE 270: note = Tnp_P5
MKITTFGLDLAKRVFQLHWMDMETGEIFRRQVKRKELLEFFGNRGPALIAMEACGSAHDWGRKLVALGHEVKLIAPQFVRPFVKTNKTDAADAEAIWEAAQRPGMRYVAVKSADQQGVLTMHRVREQLVKIRTMQVNQLRGLLYEFGAELPQGRQRGVKEIPNALAQLESVLPAMVIEALRRQLKWLGELDRDIAEIEKGLAAWKKGDAASRRLMDIPGVGLLTATAAVATIGDARSFKSGREFAAFLGLVPRQSGTGGRVKLLGISKRGDVYLRTLLIHGARSVITHQKKRGPWLDQLLARRPLNAAVVALANKMARTIWALLAHERKYQKGYAAAVA

SEQ ID NO: 18191 - protein, 340 aa, unidentified
  source 1..340: note = protein_d727d51
  REGION 7..149: note = RuvC_domain
  SITE 10: note = RuvC_P1
  SITE 53: note = RuvC_P2
  SITE 88: note = RuvC_P3
  SITE 90: note = RuvC_P4
  SITE 93: note = RuvC_P5
  REGION 209..293: note = Tnp_domain
  SITE 217: note = Tnp_P1
  SITE 247: note = Tnp_P2
  SITE 255: note = Tnp_P3
  SITE 256: note = Tnp_P4
  SITE 268: note = Tnp_P5
MDEISIVGVDLAKQVFQLHGAAADGRALFRKKLSRPQFAKFMAALPPCIVAMEACGTAHYWGRELALLGHDIRLIPPVYVKPFVKRQKNDAADAEAIAEAVQRPNMRTVAVKSSAQQARAMLFRTRDLLVGQRTQLVNALRGHLAEHGIVLAKGIANVERLALRLEDDDLPDLVRHLGRIYLDQIAQLGAEIEKLDKRIVAAAKQNGEARRLQTMPGIGPVCAMAITAFAPDMREFRRGRDFAAWLGLVPRQHSSGGKQKLGRTSKMGQRDIRRLLIVGAMSIVHWRGRDGGRPGSWLARMLARKPRMLVAIALANKMARMVWAMLVREEDYRDPTGAVC

SEQ ID NO: 18192 - protein, 402 aa, unidentified
  source 1..402: note = protein_51874e0
  REGION 6..162: note = RuvC_domain
  SITE 9: note = RuvC_P1
  SITE 60: note = RuvC_P2
  SITE 100: note = RuvC_P3
  SITE 102: note = RuvC_P4
  SITE 105: note = RuvC_P5
  REGION 271..358: note = Tnp_domain
  SITE 279: note = Tnp_P1
  SITE 310: note = Tnp_P2
  SITE 318: note = Tnp_P3
  SITE 319: note = Tnp_P4
  SITE 331: note = Tnp_P5
MPELWAGTDAGKAEHHCTAIDADGTKVLSRRVPNSEDELLQLLGDVLDLADGDPVTWAVDLNAGGAALWIALLVNHGQQLFYIPGRTVHHASGSYRGDGKSDAKDAFVIADQARMRRDLQPLQETSEIAVDLKILTARRMDLAADRTRAINRLRAQMLEYFPALERAFDYSASKAALILLTGYQTPAALRRIGRTRLATWLKNHDVRTLNTAKSAADAAVTAAEAQFTVVPGEKTAAKMVHTLAREVMALDEEISELNALIEGRFREHPDAEVITSMPGVGDMLGAEFIAATGGDMAAFGSPDRLAGVAGLAPVPRDSGKVSGNLRRPRRYSRRLLRMFYLSAQVASVHCPQSKTFYQRKRAEGKSHKQAVLALARRRLNVLWALIRDHRTFEAVTPQPAAT

SEQ ID NO: 18193 - protein, 391 aa, unidentified
  source 1..391: note = protein_f8c68f9
  REGION 4..161: note = RuvC_domain
  SITE 7: note = RuvC_P1
  SITE 60: note = RuvC_P2
  SITE 100: note = RuvC_P3
  SITE 102: note = RuvC_P4
  SITE 105: note = RuvC_P5
  REGION 266..353: note = Tnp_domain
  SITE 274: note = Tnp_P1
  SITE 304: note = Tnp_P2
  SITE 312: note = Tnp_P3
  SITE 313: note = Tnp_P4
  SITE 326: note = Tnp_P5
MFYIGIDIAKKNHEASIIDSNGKLLDKSISFSNSQAGCTKLISYFEKFEADTSNTIIGMEATGHYWVSLYSYLIDLGFTVYVINPIQSDAFRKMYIRQTKNDSKDSFIIAQIMRFGEFSTTSLADEDILALRQLSRYRLALVDECSDWKRKCIALLDQVFPEYSKLFSDTFGVTSKELLSKYPTPEDMLSVDAGTLAELLAKASKGRFSISKANEIQESASNTFGVSFAKDAFAFQIKQIIAQINFIEDQLKELETEISNLLHKTNTVITTITGIGDVLGAIIIGEIGDICRFEKASQLVAYAGLDVAVRQSGDFEGTKTKISKRGSPYLRRAIWLAATIAAFKDPALSVYYQSLRARGKHHLTAIGAVARKMCNIIFAVLRDNKPYVPHI

SEQ ID NO: 18194 - protein, 409 aa, unidentified
  source 1..409: note = protein_f376c9d
  REGION 35..185: note = RuvC_domain
  SITE 83: note = RuvC_P2
  SITE 124: note = RuvC_P3
  SITE 126: note = RuvC_P4
  SITE 129: note = RuvC_P5
  REGION 298..369: note = Tnp_domain
  SITE 321: note = Tnp_P2
  SITE 329: note = Tnp_P3
  SITE 330: note = Tnp_P4
  SITE 342: note = Tnp_P5
MITQPDSLWKTAVPKYISGGNLKCPCTLPKLIFPSTNTIAASFRQPVKKLLLSLLSKTIKQAFNNYLLLLTLSNPEDIKIGFESTAHYALNLELFLENACHSFMEVNPVLIKEYKKSTTLKRTKTDSVDCESIARWLMTVEYKPHSKGFYHAYSLKSLARLRDKLIRQRSFYLVKITNVLDHTFPEFKPFFNERLSKTALYLLENYGSAEKMARMNSASYEKLRSLSRGKFSPQRFLKLKELASNTVGVNNSIFDVELNSLLALYKSLVKEIDTLENEIHKLVEEMCLFQALVHYPPLLSILSTGDISNFSNPGQMLAFAGIEPGVNDSGTESHGGRMVKRGSSQLRYTLINCCLPLIRFDMTFAAYYAKKRGEGKPHRVAITHVVKKLIRVIYASERQEVDFNVQKLR

SEQ ID NO: 18195 - protein, 388 aa, unidentified
  source 1..388: note = protein_de87e14
  REGION 4..160: note = RuvC_domain
  SITE 7: note = RuvC_P1
  SITE 58: note = RuvC_P2
  SITE 99: note = RuvC_P3
  SITE 101: note = RuvC_P4
  SITE 104: note = RuvC_P5
  REGION 263..350: note = Tnp_domain
  SITE 271: note = Tnp_P1
  SITE 301: note = Tnp_P2
  SITE 309: note = Tnp_P3
  SITE 310: note = Tnp_P4
  SITE 323: note = Tnp_P5
MIFVGIDVAKDKHDCFIVSSDGEVLKNVFTFKNDLEGFNSFLAAIPDVPKDTIRVGLEATGHYSLNLMNFITNNQLPLVVLNPLQTNLFRKAHTLRKSKTDKIDAKIIALMLQSGNFSPHSNLSYHLSELKSLTRHKSRIKKNLSRYKVSLNRILDIMFPELSSVVYSLNQKSIYALLKAFPSKKAIATAHLTKLTNVLKKSSYGKYGKSKALLIRETASSSIGTDSRALSFELSQTISFIEIYTSQINKINHEIKSIMDELQSPILSVPGISYGLGSVIISEIGSIKNFDSPYKLLAFAGLDPSTYQSGKFAASNMKMVKRGSPYLRWALLEAARLIAMRDKTFKEYYLKKKAEGKHHYVALSHVAKKLVRVIYYLLSNNTVFVPQT

SEQ ID NO: 18196 - protein, 338 aa, unidentified
  source 1..338: note = protein_993cc32
  REGION 6..147: note = RuvC_domain
  SITE 9: note = RuvC_P1
  SITE 51: note = RuvC_P2
  SITE 86: note = RuvC_P3
  SITE 88: note = RuvC_P4
  SITE 91: note = RuvC_P5
  REGION 208..295: note = Tnp_domain
  SITE 216: note = Tnp_P1
  SITE 246: note = Tnp_P2
  SITE 254: note = Tnp_P3
  SITE 255: note = Tnp_P4
  SITE 267: note = Tnp_P5
MALELLAIDLGKRSFHLYGIDTDGVILSRKVSRAKLAEVVGNLAPTTIAMEACASAHYWGQRWLVAGSEVRLINPRFVKPFVKGSKNDAVDAEAIFEAAMRPTMRFVPVKSRDQQDLQSLHRARDRLICQRTALINHTRGLLAEYGIVLPQGPWRFTAQAPAAIADADLSDLARAIFGELLDQLDELDRRVKKLDATMVALCRTNETCRRLAKLPGVGPVVATAIVAAVNDGRQFRSGREMAAWIGLVPRQYTTGGKPRLGGIGRRANHYLRRQLIHGARAVVSRLPKHDDKHDDRRSTWLRALVARRGFNRTIVALANKTARIAWVLLNRTEEYAIA

SEQ ID NO: 18197 - protein, 420 aa, unidentified
  source 1..420: note = protein_c932435
  REGION 21..177: note = RuvC_domain
  SITE 24: note = RuvC_P1
  SITE 74: note = RuvC_P2
  SITE 114: note = RuvC_P3
  SITE 116: note = RuvC_P4
  SITE 119: note = RuvC_P5
  REGION 291..378: note = Tnp_domain
  SITE 299: note = Tnp_P1
  SITE 329: note = Tnp_P2
  SITE 337: note = Tnp_P3
  SITE 338: note = Tnp_P4
  SITE 351: note = Tnp_P5
MGNTGTITNSPDGGTSMINAVGIDVSKGKSTVAVLQPAGVIIKKPFNVLHTASGLRGLSDYIASLEGDTRVVMECTGRYHEPVARALSSAGLFVSAVNPHLIKDYGNNSLRKVKSDPADAKKIARYTLDNWADLRQYAIMDETRTQLKTLNAQFDFFMKMKVAAKNNLIALMDQTYPGIDKLFSSPVRSDGSEKWVDFAYSFWHVDCVRKIGLKAFTERYKQFCKRHGYDFQSNKPEEIFKASKELVAVFPKEQAYRNMIRMAVDQLNMTSTHVELLRMEMDSLASTLPEYETVMGIKGIGSTYGPQLMAEIGDISRFPHRSSITAFAGVDPGVNQSGQMDSKSNRASKCGPPRLRKTLFQIMSTLLQLQPKDDPVYEFLDKKRREGKPYYVYMTAGANKFLRIYYGKVKECMAAQAKSE

SEQ ID NO: 18198 - protein, 424 aa, unidentified
  source 1..424: note = protein_027a933
  REGION 23..183: note = RuvC_domain
  SITE 26: note = RuvC_P1
  SITE 81: note = RuvC_P2
  SITE 122: note = RuvC_P3
  SITE 124: note = RuvC_P4
  SITE 127: note = RuvC_P5
  REGION 290..376: note = Tnp_domain
  SITE 298: note = Tnp_P1
  SITE 328: note = Tnp_P2
  SITE 336: note = Tnp_P3
  SITE 337: note = Tnp_P4
  SITE 349: note = Tnp_P5
MKFKMQDKQNQLIERISDKHLVVGVDIAQQTHVARAVNYRGIVVGDPLPFENDEDGFARLLDWIIQLKNTKGLDTEIVGMEPTGHYWLNLSEWLYEQDIDVVTVNPHLVKKNKENRDNTQSKSDKKDALVIADMVKNGYYSFIRPTTEAFEKLRVLMSNRDTVVKRFVSAANQINRWVDIIFPELRQVFKDVKGKGALATLRLFPTPKELRSMEAIDIVNEWRTVMKRQPGIKKAQALIQLAKNSVGNDKAHDAYKLHLKQLLEEFDLATTQLEIVEKEVSEALESITFTDKLLGIKGLTEITLGGILGETGDLSQFSHGNSLLRHAGLHLVEASSGKWKGQIVLSKRGRSRLRRFLYLATLSLVMNNPEFKELHAQNVKVKKMKKMKSIMKLIGKFARMIVGIARRNEPYSPEKVQPLTPLAA

SEQ ID NO: 18199 - protein, 413 aa, unidentified
  source 1..413: note = protein_2650651
  REGION 10..173: note = RuvC_domain
  SITE 13: note = RuvC_P1
  SITE 67: note = RuvC_P2
  SITE 113: note = RuvC_P3
  SITE 115: note = RuvC_P4
  SITE 118: note = RuvC_P5
  REGION 285..371: note = Tnp_domain
  SITE 292: note = Tnp_P1
  SITE 322: note = Tnp_P2
  SITE 330: note = Tnp_P3
  SITE 331: note = Tnp_P4
  SITE 344: note = Tnp_P5
MISLSNSLLVGIDVSLNDNKVRILHPDGTSLSKFVVANSVPGAKTLSQRVAGIAEKNSFDSIVIGLESTSVYGDPLVYFLKQDASVNRFNTKIHVLNPTQVNKFKMMYPDLPKTDDIDAWVIAEHLRFGRINKEVYMDDRYKALQKLTKARFHTVQNLAREKNWFLNNLFLKFSSLAQEKIFSDRFGATSSSIIEEFFSVDEISYMPIEELAEFINKKGKGRFENPDEIAAAVQKAARSSYRLPKTVADSVNQVLAVSMVAMKAYKEQLKIFDKAIEEQIKLIPNPLTSIKGIGPVYSAGIIAEIGDIHRFKDQAALAKFAGIAWTKHQSGNFTAAHTQLIKFGNRYLRYYIMEATNKVRMHDHEFKRFYDLKYSQTPKTPHKRALALTARKFVRLVYALLHSNRLYTPPKGE

SEQ ID NO: 18200 - protein, 342 aa, unidentified
  source 1..342: note = protein_3d27722
  REGION 6..147: note = RuvC_domain
  SITE 9: note = RuvC_P1
  SITE 52: note = RuvC_P2
  SITE 87: note = RuvC_P3
  SITE 89: note = RuvC_P4
  SITE 92: note = RuvC_P5
  REGION 212..297: note = Tnp_domain
  SITE 219: note = Tnp_P1
  SITE 249: note = Tnp_P2
  SITE 257: note = Tnp_P3
  SITE 258: note = Tnp_P4
  SITE 270: note = Tnp_P5
MKVTTVGIDLAKTVFQIHGVDEHGKAIVKKQIKRDQMAVFFVNLPPCLIGMEACGSAHHWARKLTGMGHVVKLMAPQYVKPYVKTNKNDAADAEAICEAVSRPNMRFVPVKDTGQQAVLAMHRVRQGFVKARTAQANQIRGLLSEFGLVIPQGIGHIALRVPELIENASNDLPGSFRLLVQRLLDHLKELDRQVGELEAQIQAWHRNSAISCKLAQIPGIGPITASALVASIADAKSFDSGRQVAAWLGLVPRQHSSGGRQNLLGISKRGDTYLRTLLIHGARSVIFHTQHKADSCTWVKALAERRNKNVAAVALANKNARIVWALLAHDRQYQDNYTPAAA

SEQ ID NO: 18201 - protein, 340 aa, unidentified
  source 1..340: note = protein_24d9a31
  REGION 6..162: note = RuvC_domain
  SITE 9: note = RuvC_P1
  SITE 59: note = RuvC_P2
  SITE 99: note = RuvC_P3
  SITE 101: note = RuvC_P4
  SITE 104: note = RuvC_P5
  REGION 271..338: note = Tnp_domain
  SITE 279: note = Tnp_P1
  SITE 310: note = Tnp_P2
  SITE 318: note = Tnp_P3
  SITE 319: note = Tnp_P4
MVTIFVGDDWAEAHHDVHVMDSDGVRLASRRFPEGLDGVGAFHGLLADHASDPFGVVVGIETDRGLWVEALVAAGYRVYAINPMSVARYRDRHTVSGAKSDAGDAKVLADVVRTDCHNHRPVAGDSDLAEGVKVLARAHQSLIWARGRHTNMLRNGLREYYPAALEAFDNLADRDTLAVLGRAPTPEVGARLTVPQIRAVLKRGGRQRNLEHRAAEIYQALHTEQLTAPAQVAAAFGATTTAAVGIITELNTQIATLETEMGAAFEQHPDADIYLSVPGLGDVLGARVLGEFGDDPNRYADGKSRRNYAGTSPVTRASGKKRAVLARHVRNRRLYDAIDQ

SEQ ID NO: 18202 - protein, 338 aa, unidentified
  source 1..338: note = protein_9a5879c
  REGION 6..152: note = RuvC_domain
  SITE 9: note = RuvC_P1
  SITE 53: note = RuvC_P2
  SITE 91: note = RuvC_P3
  SITE 93: note = RuvC_P4
  SITE 96: note = RuvC_P5
  REGION 211..298: note = Tnp_domain
  SITE 219: note = Tnp_P1
  SITE 249: note = Tnp_P2
  SITE 257: note = Tnp_P3
  SITE 258: note = Tnp_P4
  SITE 270: note = Tnp_P5
MTIIAVGIDLAKNVFAVHGVNAGGKAVLVRPTVKRDALLEMVAKLPPCLIGMEACSGAHYWAREFAKFGHDVRIIAAKFVAPYRLSGRRGKNDAADAQAICEAVQRPHMRFVPVKSEDAQARLAIHRVRQGFVEQRTATINRIRGLLSEYGHVLPQKVEVVRREAGRCLEDLPGWANTAIGDLLSEVHRLDERIAEYDHHIAVMAQADERCRRLMGMPGIGEKTATALMASIGNGHDFKCGRQLAAWLGLVPGQYSSGGKQRLGRITKAGDSYLRMLLILGARSVVVAAKKKTDRLSRWVTELVNRRGYWKAVVAVAAKNARMAWAMLSKGEAFQPIG

SEQ ID NO: 18203 - protein, 408 aa, unidentified
  source 1..408: note = protein_41a3cf4
  REGION 25..180: note = RuvC_domain
  SITE 28: note = RuvC_P1
  SITE 79: note = RuvC_P2
  SITE 119: note = RuvC_P3
  SITE 121: note = RuvC_P4
  SITE 124: note = RuvC_P5
  REGION 284..371: note = Tnp_domain
  SITE 292: note = Tnp_P1
  SITE 322: note = Tnp_P2
  SITE 330: note = Tnp_P3
  SITE 331: note = Tnp_P4
  SITE 344: note = Tnp_P5
MRIRLSGSKQLSDFFIKGCGSMIFIGIDIAKQKHFAAAMTADGEVLIPSFGFTNNSEGFTFLLSKLKTFDKENLLIGLESTAHYGENLIGYLFDLGYHVAVINPIQTATLRKTNIRKTKTDKVDAMLIIKSMMVNSYRLFTKTDIDLLHLKSLCRFREKIKKSKARLKIQLVSYVDVLFPELQYFFKSGIHINTCYELLKRHSIPNDIAALHLTYLGNLLQKASHGRFGKEEAIALKSLAKSSVGTGNTSVSIQITQSISQIELLEKQITELDKTIKSIMLEMDSVILTIPGIGYLNGAMILSEIGDISRFSNPSKLLAYAGLDPAVNQSGNFNAKSTRMSKRGSKLLRYALINAAWNVSLNNRTFKNYFLSKQSQGNNHYTALGHVAHKLIRIIFKILKDNVAFNLD

SEQ ID NO: 18204 - protein, 403 aa, unidentified
  source 1..403: note = protein_5186c8e
  REGION 4..161: note = RuvC_domain
  SITE 7: note = RuvC_P1
  SITE 60: note = RuvC_P2
  SITE 100: note = RuvC_P3
  SITE 102: note = RuvC_P4
  SITE 105: note = RuvC_P5
  REGION 266..353: note = Tnp_domain
  SITE 274: note = Tnp_P1
  SITE 304: note = Tnp_P2
  SITE 312: note = Tnp_P3
  SITE 313: note = Tnp_P4
  SITE 326: note = Tnp_P5
MFYCGIDIAKYKHEAAVIDEAGMALLDSISFANSKEGCEKLLALFQRLDIAKDALIVGMEATGHYWLSVYGYLLERGFEVKVINPIQSEAFRKMYIRQTKTDRKDSFIIAQIMRFGQFSATNLSEEVIVAMRQLSRYQLALVDACGDCKRRVIALLDQVFPEYDTLFSDTFGVTSKEVLSQYPTPEDLLSVSTRKLANLLEKASRGRFGKEKAEQLKAAAASSFGVSFAKDAFAFQIRQLIEQLEFLEGQIAELEEQISSLLKQTGSYITTIPGIGDILGAIILSEIGDIHRFDAPNKLVAFAGLDVRVTQSGEFTGTRQKISKRGSPYLRRAIWLAASRAAFCDPILSEYYQSLRARGKHHLTAIGAVSRKLCNTIYTILKEDRPWQPIPPRDRKVSNHTGQ

SEQ ID NO: 18205 - protein, 420 aa, unidentified
  source 1..420: note = protein_b4bb2e0
  REGION 9..157: note = RuvC_domain
  SITE 12: note = RuvC_P1
  SITE 63: note = RuvC_P2
  SITE 97: note = RuvC_P3
  SITE 99: note = RuvC_P4
  SITE 102: note = RuvC_P5
  REGION 256..344: note = Tnp_domain
  SITE 264: note = Tnp_P1
  SITE 295: note = Tnp_P2
  SITE 303: note = Tnp_P3
  SITE 304: note = Tnp_P4
  SITE 315: note = Tnp_P5
MKVVYQTCCGVDVHKSFLVATIIKTTSGVQPSYHKKRFSTFNNSILEFKQWLLDNQCFDLCMESTGKYWVPVFNLLEDDINVTIANPKWVKAVKGNKDDTKDSKWIGDLFRLGLVPGSYIPFRDIRILREFTRYRYKLVSCRSSEKNRYQNALTVCNIALDSVVSDVFGKSATSVLDYLIEQSDNSINHEEISSRLLRSLKKKSDSVFESIEGYQMTDSQKDRMRLVRAHIDYITSTVIDIDTKLDELVAPYENAIQLLSTIPGIKRNSAITIISEIGTDMTQFSSSKRICAWAGLTPGSNDSAGKKKSVRITRAGVYLKPALVQCAHAAVKSDKSPYYKQKYERIMKRRGKKRAIIAIARMILTAIYQMLKTGEVWNPTDLYKIDMPEPLKEKQKAKAIKQALKLLISEGIIPESLEAS

SEQ ID NO: 18206 - protein, 343 aa, unidentified
  source 1..343: note = protein_0f2a312
  REGION 7..149: note = RuvC_domain
  SITE 10: note = RuvC_P1
  SITE 53: note = RuvC_P2
  SITE 88: note = RuvC_P3
  SITE 90: note = RuvC_P4
  SITE 93: note = RuvC_P5
  REGION 212..297: note = Tnp_domain
  SITE 220: note = Tnp_P1
  SITE 250: note = Tnp_P2
  SITE 258: note = Tnp_P3
  SITE 259: note = Tnp_P4
  SITE 271: note = Tnp_P5
MSEVTTIGLDIAKNVFHAHGADASGSPVFSRKISRAKLVEFFAKQPRCLVALEACGGAHYWAGELTVLGHEVKLIPPAYVKPFVKRNKNDAVDAEAICEAAQRRNMRFVAIKSEEQQASALVFRTRDLMVRQRTQLINAIRGHLTEYGWVAPKGPSHIAVLSNLLDGEMGSSLPDAATPMFRTMLDLLEILNGRTSELDKEITRRAREDVIAKRLMTIPGVGPITATAIAALAPPVGTFTKGRDFAAWLGLAPRQSSSGGKQKLGSITKMGERTLRRLIIIGCSAVVLHASKRGAPAGSWLEQMMARKPRMLVTVALANKTARIIWAILMEQEEYKAPVAAAA

SEQ ID NO: 18207 - protein, 387 aa, unidentified
  source 1..387: note = protein_0d28d7d
  REGION 4..159: note = RuvC_domain
  SITE 7: note = RuvC_P1
  SITE 58: note = RuvC_P2
  SITE 98: note = RuvC_P3
  SITE 100: note = RuvC_P4
  SITE 103: note = RuvC_P5
  REGION 263..350: note = Tnp_domain
  SITE 271: note = Tnp_P1
  SITE 301: note = Tnp_P2
  SITE 309: note = Tnp_P3
  SITE 310: note = Tnp_P4
  SITE 323: note = Tnp_P5
MYYVGIDIAKRGHFASVISSDGEVLIKPFKFTNDNDGFCKLLSALAPYECGSLIIGLESTAHYGDNLVEFLVSRRYQVCVINPIQTSTMRKNNIRKTKTDKVDTFIIAKTLMTQPHRFYTLEDIDMMHLKNLGRFRQKLVKDRTRIKIQLTAYVDRVFPELQYFFKAGLHQKGVYALLAEAPTPELISSMHLTHLTHLLEVASHGHFTKEQAKELRVLAQKSVGSSDKALSIQITQSVEQIVLLDSHVKQVESEMTEIMLGLDSVIMTIPGIGYINGGMILGEIGDIHRFAAPKQLLAFAGLDPTVYQSGNFNASHTRMSKRGSTALRYALINAAHNVVKNNATFKSYYDTKTAEGRTHYNALGHCAGKLVMVIHKMLSDDVAFNLG

SEQ ID NO: 18208 - protein, 400 aa, unidentified
  source 1..400: note = protein_99ba0bb
  REGION 4..160: note = RuvC_domain
  SITE 7: note = RuvC_P1
  SITE 57: note = RuvC_P2
  SITE 97: note = RuvC_P3
  SITE 99: note = RuvC_P4
  SITE 102: note = RuvC_P5
  REGION 275..362: note = Tnp_domain
  SITE 283: note = Tnp_P1
  SITE 313: note = Tnp_P2
  SITE 321: note = Tnp_P3
  SITE 322: note = Tnp_P4
  SITE 335: note = Tnp_P5
MNAVGIDVSKGKSTVAVLRPFGEVVASPFDVIHNDSDLKQLVDLIKTLPGESKVVMECTGTYFEPIAQFLHNNGIFVSVVNALLVHDYGGNSLRKVKTDKKDALKLASYTLDRWTELEEYVPADEQRKTLKILNRQYNQSNKIQTMMKNNLISLTDSVFPGINKLFTSPERQSDGHEKWVDFLNAFPHKDCIAGLYLSVFKTKYKSWCKKNKYNYSDSKAEEIHTFAKSIIAVLPLNYSVKLLVTQAVMQLNTILETVSSIRKEMDRIASSLPEYKTVMAMYGVGKVYGPQLMAEIGDTRRFRNRRAITAFAGLDAPPYQSGQLDITSRHISKRGSAALRKVLFQITQVFILNKPENEPVYQFIDKKRSEGKHYYSYRIAAANKFLRIYYAKVNQTLKLL

SEQ ID NO: 18209 - protein, 350 aa, unidentified
  source 1..350: note = protein_adebe3f
  REGION 6..147: note = RuvC_domain
  SITE 9: note = RuvC_P1
  SITE 52: note = RuvC_P2
  SITE 87: note = RuvC_P3
  SITE 89: note = RuvC_P4
  SITE 92: note = RuvC_P5
  REGION 211..295: note = Tnp_domain
  SITE 219: note = Tnp_P1
  SITE 249: note = Tnp_P2
  SITE 257: note = Tnp_P3
  SITE 258: note = Tnp_P4
  SITE 270: note = Tnp_P5
MKICTIGIDLGKTVFHLISLDEHGKLIAKKKCSRSQLLAYTANIPAALIGMEACCGSHHLGAALAVQGHQVRLIPPQFVKPFVKSNKNDYNDAEAIAEAVLRPRMRFVPIKTNDQLDLQALHRVRDRLVRSRTGIINQIRAFLLERGIAFRAGRVYLRSHMAAILEDAELNLSPLLRGLLEQLWEDWKITESRIEEVTDQLEVIADQDTSCKRLQSVPGVGPLVSTALVAAIGNGSAFTKGREFSAWLGLVPRQVSTGGKPKLLGISKRGNSYLRRLFIHGARSILIRERKKYAFGGWMTQLESRAHANVVAVAMANKLARIAWAVLVKGVNYRQTPILSVSNCEGNMAA

SEQ ID NO: 18210 - protein, 367 aa, unidentified
  source 1..367: note = protein_1056886
  REGION 22..166: note = RuvC_domain
  SITE 25: note = RuvC_P1
  SITE 70: note = RuvC_P2
  SITE 105: note = RuvC_P3
  SITE 107: note = RuvC_P4
  SITE 110: note = RuvC_P5
  REGION 229..319: note = Tnp_domain
  SITE 237: note = Tnp_P1
  SITE 267: note = Tnp_P2
  SITE 275: note = Tnp_P3
  SITE 276: note = Tnp_P4
  SITE 288: note = Tnp_P5
MKKHTTAKQSLSSTDLSTCTTVAVDLAKQVFQVAGEDTLGQVLYEERLQSREAFHAFLHQLPPNVVVLVETGPGAQAWARQLQAQGNRARILPAQLVAKHRSGAKNDRNDARAILRAGRDSKIAAVPIKSATALAMQALHRARQGYVRRRTAMSNQMRGLLLEHGITLAQGDVAISQTLPRVLEDTTQPLPDLLRELIDELLGEWRQLGERINVLTSRLECAANADKTARRLMTVRGIGPIIATALLAKETEPERFANARQFAAYFGLVPEQNSSGQKVRLGGMSKRGDSYVRSLMVQGAHAVLRHLHPDSEQPDDRRLQRWLNRLGRKEAAVRLANRNLRIVWVLLQNDQTYRRQPANGRLAAPSS

SEQ ID NO: 18211 - protein, 361 aa, unidentified
  source 1..361: note = protein_41ebdc5
  REGION 18..165: note = RuvC_domain
  SITE 21: note = RuvC_P1
  SITE 67: note = RuvC_P2
  SITE 105: note = RuvC_P3
  SITE 107: note = RuvC_P4
  SITE 110: note = RuvC_P5
  REGION 236..322: note = Tnp_domain
  SITE 244: note = Tnp_P1
  SITE 274: note = Tnp_P2
  SITE 282: note = Tnp_P3
  SITE 283: note = Tnp_P4
  SITE 295: note = Tnp_P5
MKRVQSNTLDFSGQNIYVGIDVHLKSWSVAILSEHSVLNRFSQIPEPEALHKYLVSNYPGANYFSVYEAGFCGFWIHEKLMDLGITNIVVNPADVPTMSKEKLRKTDAVDCKKLARELRSGSLVGIYVPKADVLEMRSLIRMRNLIVKDSTRAKNRIKSLLRFHGVDIPEEFTRCSIGCWSKRFLTWLHSLELSTEYGKKTLELHLEQFVRLRKMLLQETRAIREISRNAPFERPIRLLTSVPGIGVTTAATLMVELDGIVRFRNEDHLASFIGLVPMCHSSGESNGTGDITVRRHFMLRCLLVEAAWIAIRKDPAMTVAYTEYRKRMNPQKSIIKIARRLVNRIYYVLKHEKEYIPCVVK

SEQ ID NO: 18212 - protein, 401 aa, unidentified
  source 1..401: note = protein_b285be5
  REGION 10..164: note = RuvC_domain
  SITE 13: note = RuvC_P1
  SITE 62: note = RuvC_P2
  SITE 102: note = RuvC_P3
  SITE 104: note = RuvC_P4
  SITE 107: note = RuvC_P5
  REGION 270..356: note = Tnp_domain
  SITE 278: note = Tnp_P1
  SITE 308: note = Tnp_P2
  SITE 316: note = Tnp_P3
  SITE 317: note = Tnp_P4
  SITE 329: note = Tnp_P5
MAAQRDMAWVGIDVGKTHHWVCVVDADGKVLLSVKIGNDEAEIVALLARVALLATRLIWAVDIIGAPSALLLALLARAGQPVRYASGRVVAAMSAAYAGEGKTDAKDAYVIAETARLRRDLATIDADTDLVRNLAVLTGHRADLVADRVRMINRLRDLMTSVFPSLERAFDYSSHKGALVLLTGYASPDRIRRIGQTRLAGWLRNRSVRGSAGVAARAVSAAKAQSVVLAGQELTTSIIAELAGAILALDERLKALDAQIQELFAEHPQAEIIESMPGFGPFLGASLLVGAGDLRAFPSAGHLAAAAGLVPVPNDSGRRTGNLHRPLRYSRPLRHVFYLSAQTSMMRTGPNRDYYLKKRARGATHSQAVIALARRRIDVLWALLRENRTWTATPPPLAQAA

SEQ ID NO: 18213 - protein, 340 aa, unidentified
  source 1..340: note = protein_1e64e5c
  REGION 6..148: note = RuvC_domain
  SITE 9: note = RuvC_P1
  SITE 52: note = RuvC_P2
  SITE 87: note = RuvC_P3
  SITE 89: note = RuvC_P4
  SITE 92: note = RuvC_P5
  REGION 211..298: note = Tnp_domain
  SITE 219: note = Tnp_P1
  SITE 249: note = Tnp_P2
  SITE 257: note = Tnp_P3
  SITE 258: note = Tnp_P4
  SITE 270: note = Tnp_P5
MNNSIAGLDLAKNVFHVVFFDRHFKEVRKRMLRRNQVLAFFANTPPVLIGMEACSGSSYWGRELIKLGHEVKIIAPQHVKPYVRGNKNDYNDARGIAAAAKIPGMPTVPVKTIEDQDIQAAHRMRTQCIRDRTALCNSMRGLLAEYGIVLARGVSKVRKGIPELLEDPDNALTPFFKEMLARRYEQLVEIDGHIDFYTQKIKQRAKEDDACKRLQTIPGFGPINASAFKSAVGDGSAFSKGRDVSASLGVVPRQHSSGGKDNLLGISKRGDRYLRSLLVHGARSTVRAAANKDDQLSQWINRLRERRGIHKASVALANKMARIGWAGMPPAGALNKDYSF

SEQ ID NO: 18214 - protein, 326 aa, unidentified
  source 1..326: note = protein_44f1b75
  REGION 6..159: note = RuvC_domain
  SITE 9: note = RuvC_P1
  SITE 57: note = RuvC_P2
  SITE 95: note = RuvC_P3
  SITE 97: note = RuvC_P4
  SITE 100: note = RuvC_P5
  REGION 200..287: note = Tnp_domain
  SITE 208: note = Tnp_P1
  SITE 238: note = Tnp_P2
  SITE 246: note = Tnp_P3
  SITE 247: note = Tnp_P4
  SITE 260: note = Tnp_P5
MKKYTVGIDVSKDKLDYCILSNKDRSVLSKGVIENERKELLCWLRKFDPEQYDFALEHTGNYGAMLAWLLSEANYCFYMINPMTLKKSMGIQRGKTDAVDAYRIASYAISNGHQLEAYQLPTEELRRIKALITARERYVKIVVQLKNSLKSNQILNKTIDVKELIKEEKRQIKAISGSIKKVEKQILELINATEDLKKSYQKITKVIGVGPITAVKCITETNNFLNFKDARKFSCYCGLAPFPYQSGSSVKGKTKTYHLRNKPLKSTLFKAAGSAIQHDPQLKAYYQRKTKEGKHKLTALNAVANKLVLRIFAVVKRDEPFVKLAA

SEQ ID NO: 18215 - protein, 323 aa, unidentified
  source 1..323: note = protein_c6db7a6
  REGION 8..150: note = RuvC_domain
  SITE 11: note = RuvC_P1
  SITE 52: note = RuvC_P2
  SITE 92: note = RuvC_P3
  SITE 94: note = RuvC_P4
  SITE 97: note = RuvC_P5
  REGION 191..278: note = Tnp_domain
  SITE 199: note = Tnp_P1
  SITE 229: note = Tnp_P2
  SITE 237: note = Tnp_P3
  SITE 238: note = Tnp_P4
  SITE 251: note = Tnp_P5
MNKDIKYFGIDMSHLVFDVTDSDGNYYQFKNNEFGFKQLTKLLNCDSHCVMEATGYYHYQLAYHLLEFGIKVSVENPLSVKRFIQMKLSKIKTDKSDSKLICDYASQVALKLWQGNSKHKIECLQIARALSVYTKQSTMLKNKLHGEGVLGNPSKVVVRSLKRSLKLLQKEIKYLEDELLILVKEVHQDLLTRLKTIPGIGPKTAIMLVVFTGGFDRFTSASELCSYAGLTPVIRQSGSSVKGRPRISKIGNQKLRNLLFMCSFNACKYNKACRDLYERIVAKGKSKKLALIAVCNKLLKQAFAIAKSGLIYDDTYRSTLVKN

SEQ ID NO: 18216 - protein, 316 aa, unidentified
  source 1..316: note = protein_7e8184c
  REGION 8..150: note = RuvC_domain
  SITE 11: note = RuvC_P1
  SITE 55: note = RuvC_P2
  SITE 95: note = RuvC_P3
  SITE 97: note = RuvC_P4
  SITE 100: note = RuvC_P5
  REGION 190..274: note = Tnp_domain
  SITE 198: note = Tnp_P1
  SITE 227: note = Tnp_P2
  SITE 235: note = Tnp_P3
  SITE 236: note = Tnp_P4
  SITE 247: note = Tnp_P5
MTEAGGFVGIDVAKAELEVVVRPSGARWTVTNDASGLAQLQERLQALAPALIVLEATGGYEVAVVAALATAALPVVVLNARQVRDFARATGRLAKTDAIDAGVLAHFAEVVRPPVRPLPDAMTQSLQAWLMRRRQLVEMLLAEEQRRSRAPRPIQRQIDQHVRWLRAQLGAVEKDLAQTLRASPVWREKDDLLRSVPGVGPVLTTTLLGDVPELGQLNRKQIAALIGVAPLNRDSGTYRGRRAVWGGRARVRATLYMASLTAARYNPVIRAFYERLVAAGKPKKVALTACMRKLLTILNAMIARRTAWKPPATVSA

SEQ ID NO: 18217 - protein, 331 aa, unidentified
  source 1..331: note = protein_25d5bda
  REGION 7..161: note = RuvC_domain
  SITE 10: note = RuvC_P1
  SITE 62: note = RuvC_P2
  SITE 102: note = RuvC_P3
  SITE 104: note = RuvC_P4
  SITE 107: note = RuvC_P5
  REGION 203..289: note = Tnp_domain
  SITE 211: note = Tnp_P1
  SITE 240: note = Tnp_P2
  SITE 248: note = Tnp_P3
  SITE 249: note = Tnp_P4
  SITE 262: note = Tnp_P5
MSCRFYLGIDVAKAKLDCLLLDMSNAKRKSKSIVNSPDGVAALLSWLNKQEVAIQDVQVIMEPTGVYHERALFALAQAGLAVSLVNPAQLRKFAQGIGVKTKTDAADSAVLARYGAANHPPAWQPPSASARELRALLARRDAVAEDLQRERNRTEKAATAIDTPERVKQSLNEAITFLQKELAELQRAIDQHINNDPELRRIWTLLHSIPGVGERVADHMTALLAARQFQTAEQLAAYLGLVPVEWQSGSSIHGRARMSKAGPAHLRALLYMPAVVAKTYNPHIRALYERLLAKGKPKMSAIGAAMRKLAHLCFGVVHSGQPYDANWAIKA

SEQ ID NO: 18218 - protein, 322 aa, unidentified
  source 1..322: note = protein_edf0310
  REGION 7..155: note = RuvC_domain
  SITE 10: note = RuvC_P1
  SITE 54: note = RuvC_P2
  SITE 94: note = RuvC_P3
  SITE 96: note = RuvC_P4
  SITE 99: note = RuvC_P5
  REGION 190..274: note = Tnp_domain
  SITE 198: note = Tnp_P1
  SITE 227: note = Tnp_P2
  SITE 235: note = Tnp_P3
  SITE 236: note = Tnp_P4
  SITE 247: note = Tnp_P5
MAMLSFGGIDVSKNRLDVMVLPEEQCSSVPNDAAGWANLVEQLRGCSIAAIGIEASGGYERGVMRALLAAGIPARQVNPFKLRQFARASGVLAKNDPLDARMIASFVAIMPTRPAQLQAPAAERLAEMLAVRRQLSAEKVAAENASRLLEDAMLQRLSRRRIGRLTADIDVLDERMVEIVAADAALAHRYRLLTSMPGVGAVLACTLLALLPELGRMSRKQVAALVGVAPYAFESGTLKGRRCIWGGRAHVRHVLYMAAMSASNWNPVLKAFHDRLKAAGKLPKVTIVAVMRKMITILNAMVRDDVTWADRYIGRHSVPTAR

SEQ ID NO: 18219 - protein, 392 aa, unidentified
  source 1..392: note = protein_f8302e6
  REGION 5..164: note = RuvC_domain
  SITE 8: note = RuvC_P1
  SITE 61: note = RuvC_P2
  SITE 102: note = RuvC_P3
  SITE 104: note = RuvC_P4
  SITE 107: note = RuvC_P5
  REGION 268..354: note = Tnp_domain
  SITE 275: note = Tnp_P1
  SITE 305: note = Tnp_P2
  SITE 313: note = Tnp_P3
  SITE 314: note = Tnp_P4
  SITE 327: note = Tnp_P5
MVISVGIDVSKDKHDCFIVSSEGEVLADVFTISNNMDGFHCLLQRIRGCVTPQGKIKVGLEATGHYSYNLLGFLLDNGLATYVLNPLRTNLYRKSLSLRKTKTDRVDARTIAHMLLSDAGLKPYTSTAYHNEELKSLTRYRFDKVKERAKLKTSISRLVCILFPELEKVVPTLHMTSVYALLEEFPSAKQIAAAHLTRLKALLETASKGRYKRDTALAIRDAARNSIGSWMPAKSLELQHTIRLIRELDAEIAEIEEQIQSIMDGLHSPIITIPGLGFRMAAMILAEVGDFSRFDSPDKLLAYAGMSPSTYQSGQLKNCYPHMEKRGSRYLRYALYNATKYVCYWNPVFADYLAKKRAEGKHYNIAISHAAKKLVRLIFALEKSRQPYCSAA

SEQ ID NO: 18220 - protein, 389 aa, unidentified
  source 1..389: note = protein_33c6bfe
  REGION 5..161: note = RuvC_domain
  SITE 8: note = RuvC_P1
  SITE 59: note = RuvC_P2
  SITE 99: note = RuvC_P3
  SITE 101: note = RuvC_P4
  SITE 104: note = RuvC_P5
  REGION 265..352: note = Tnp_domain
  SITE 273: note = Tnp_P1
  SITE 303: note = Tnp_P2
  SITE 311: note = Tnp_P3
  SITE 312: note = Tnp_P4
  SITE 325: note = Tnp_P5
MKIYVGIDIAKLNHFAAAISSDGEIILEPFKFTNDADGFQLLVSKLESFDKNSIIIGLESTAHYGDNLVRFLISKGFKVCVLNPIQTSSMRKNNVRKTKTDKVDTFVIAKTLMMQDSLRFMTLKDLDYIELKELSRFRQKLVKQRTRLKIQLTSYVDQVFPELQYFFKSGLHQNSVYALLKEAPTPAVIASMHMTHLAHLLEVASHGHFGKEKARDLRVLAQKSVGVNDSSLSIQITHTIEQIELLDSQLFHTELEMANLVTCLHSVIMTIPGIGFINGGMILGEIGDIHRFSEPKKLLAFAGLDPSVHQSGNFQAQRTRMSKRGSRVLRYALMNAAHNVVKNNTTFKAYYDAKRAEGRSHYNALGHCSGKLVRVIWKMLTDNVEFNLK

SEQ ID NO: 18221 - protein, 295 aa, unidentified
  source 1..295: note = protein_26fe55a
  REGION 2..109: note = RuvC_domain
  SITE 10: note = RuvC_P2
  SITE 48: note = RuvC_P3
  SITE 50: note = RuvC_P4
  SITE 53: note = RuvC_P5
  REGION 168..254: note = Tnp_domain
  SITE 176: note = Tnp_P1
  SITE 206: note = Tnp_P2
  SITE 214: note = Tnp_P3
  SITE 215: note = Tnp_P4
  SITE 227: note = Tnp_P5
MTQPCLIGVEACSGAHHWAREFEKFGHTVRLMAPKFVIPYRLSGRRGKNDAADAAAICEAVTRPNMRFVPIKSIEQQGQLMVHRARQGFVEQRTATFNRIRGLLSELGIVLALKAAVVRREAMARLEDLPGWANTVIGDLLSEVTHLDERIAQYDRHIALMARQSIEAQRLMQLCGVGETTATALLSTIGNGRDFKCGRQLCAWLGLVPGQDSSGGKQRLGRITKAGDPYLRSLLVLGARAVLAAAKTKSDPISRWAVSLEQRRGYWKAIVAIAAKNARMCWAVLSRGEAFRLPA

SEQ ID NO: 18222 - protein, 389 aa, unidentified
  source 1..389: note = protein_cffd0cb
  REGION 4..159: note = RuvC_domain
  SITE 7: note = RuvC_P1
  SITE 57: note = RuvC_P2
  SITE 98: note = RuvC_P3
  SITE 100: note = RuvC_P4
  SITE 103: note = RuvC_P5
  REGION 264..351: note = Tnp_domain
  SITE 272: note = Tnp_P1
  SITE 302: note = Tnp_P2
  SITE 310: note = Tnp_P3
  SITE 311: note = Tnp_P4
  SITE 324: note = Tnp_P5
MFYLGIDIGKNTHVASLIDSKKKVLFKAFSFSNSIDGAENLICKLEPFKNQLEIGMEATGHYWLSLYSYLSEKNFTVRVINPIQTDGWRQGIEIRKRKTDIIDSLLIADLLRYGDFVETSLSNEDYLSLRNLSRFRSYLVSSIGDLKRKTIALLDQVFPEYASSFSNIFAKTSKEILANFSSPSDFEDINSEDLQSFLDNVTMKKFAARKLEELSKKASKSFGVNFCMDSFGLQIKMLIGQISFIQNQVLDVEKEIKSLLEKLNSPITTIPGIGAVNAATILGEIGDIKRFSNPSKLVAYAGLDSTVSQSGNFEFTSNHMTKRGSPYLRRALFQSALRAEFCDPVFSDYYQKKITEGKHHLVATNAVARKLVHTIFAVLTKNEPYQVQS

SEQ ID NO: 18223 - protein, 352 aa, unidentified
  source 1..352: note = protein_5b6bb0b
  REGION 12..153: note = RuvC_domain
  SITE 15: note = RuvC_P1
  SITE 58: note = RuvC_P2
  SITE 93: note = RuvC_P3
  SITE 95: note = RuvC_P4
  SITE 98: note = RuvC_P5
  REGION 217..302: note = Tnp_domain
  SITE 225: note = Tnp_P1
  SITE 255: note = Tnp_P2
  SITE 263: note = Tnp_P3
  SITE 264: note = Tnp_P4
  SITE 276: note = Tnp_P5
MSQKPESTIAIVGIDIGKNSFHVVGLDKRGAIVLRQKWSRGQVEARFANMPPCLVGMEACVGAHHLSRRLKALGHDARLMPAKYVRPYSKGQKNDFRDAEAIAEAVQRPTMKFVATKTADQLDLQALHRVRERLVSQRTGIINQIRAFLLERGIAVRQGQRFLRAELPRILTTPPDVLSPRMVRIIEDLAGDWRRLDERVENMSNEIEAIARQDAGCERLMSVPGVGPIISSAMVAAIGAGDVFTKGRDFAAWLGLVPKQISTGDRTILGKISRRGNRYLRVLFVQAAWVVLIKPKSWERHGLKSWIEAAKKRLHRNVLAIALANKLARIAWSVLAHGRDFEARSIATAQPV

SEQ ID NO: 18224 - protein, 342 aa, unidentified
  source 1..342: note = protein_6583155
  REGION 6..148: note = RuvC_domain
  SITE 9: note = RuvC_P1
  SITE 52: note = RuvC_P2
  SITE 87: note = RuvC_P3
  SITE 89: note = RuvC_P4
  SITE 92: note = RuvC_P5
  REGION 211..296: note = Tnp_domain
  SITE 219: note = Tnp_P1
  SITE 249: note = Tnp_P2
  SITE 257: note = Tnp_P3
  SITE 258: note = Tnp_P4
  SITE 270: note = Tnp_P5
MKITTFGIDLAKNVFQVHGVNDQGKAVLRKALRRDQVLEFFIKLSPCLVGMEACASAHYWARKLQSQGHTVKLMAPQYVKPYVKTNKNDAADAEAICEAVGRPNMRFVPIKNVEQQSVLSLHRARQGFVKSRTAQANQIRDLLSEYCIVIRQGICNVTKRLPHILEECANELPGVFCQLIQRLGDHLKELDRQVGELEVQIKIWHKQNEASKKLEEIPGVGPITATAIVASIGDAKCFKDGRQLAAWLGLVPRQHSSGGKQMLLGISKRGDSYLRTLLIHGARSVLRAAERKVHHAGSWLANLMERRNFNVAVVALANKNARIIWALLAHERKYQINFASGH

SEQ ID NO: 18225 - protein, 399 aa, unidentified
  source 1..399: note = protein_e113b64
  REGION 4..160: note = RuvC_domain
  SITE 7: note = RuvC_P1
  SITE 57: note = RuvC_P2
  SITE 97: note = RuvC_P3
  SITE 99: note = RuvC_P4
  SITE 102: note = RuvC_P5
  REGION 275..362: note = Tnp_domain
  SITE 283: note = Tnp_P1
  SITE 313: note = Tnp_P2
  SITE 321: note = Tnp_P3
  SITE 322: note = Tnp_P4
  SITE 335: note = Tnp_P5
MNAIGIDVSKGKSTVAVLRLFGEVVASPFDVIHNDSELKKLVAFIRQLPGESKVVMEFTGNYSEPIARFLHNEGIFVSVVNALLIHDYGGNTIRKAKTDKKDAIKLASFALDKWLDLNEYTPAEDLRATLKFLNRQYIQYTKMLTMLKNNLISLLDLTFPNANQFFNTPPKASDGHEKWVDFVLKFWHRECISKLSLSAFKLKYQRWCKKNSYNYSEIKAEEIHCYAKSQISVLPMNDSVKLLVTQSVTQLITMQETLCAIRKEMDNISSQLPEYDTVMSIFGAGKVLGAQLMAEIGDTRRFRNRKCITAYAGLDAPPYQSGTVNIQSRSISKKGSSALRKTLFQIMTIYIQNQPITEPVYNFLDKKRSEGKPYKVYMMAAANKFLRIYYAKVNKVLCS

SEQ ID NO: 18226 - protein, 343 aa, unidentified
  source 1..343: note = protein_a409432
  REGION 6..148: note = RuvC_domain
  SITE 9: note = RuvC_P1
  SITE 52: note = RuvC_P2
  SITE 87: note = RuvC_P3
  SITE 89: note = RuvC_P4
  SITE 92: note = RuvC_P5
  REGION 211..296: note = Tnp_domain
  SITE 219: note = Tnp_P1
  SITE 249: note = Tnp_P2
  SITE 257: note = Tnp_P3
  SITE 258: note = Tnp_P4
  SITE 270: note = Tnp_P5
MKDMMIGVDLAKNVFQVHGALWTGEVQFRKKLTRKQFPAFMARQEPRLVVFEACGSAHYWAREMEALGHEVKLIAPQYARPFVKRQKNDAADAEAIVIAARQPEMRFVAPKTVEQQSRAAVFRGRERLVHQRTADVNALRALLYEYGHVFPAGIRSLDRMTVLVKDDEASDLPALIREECQDLLAQIAEKTARIAERTTKLKTLASQSDRARRLQTMPGVGPLTAVAVEAFGPDMAQFKTGRAFAAWLGLVPRQHSSGGKERLGRMTKAGQADIRRLLIIGAMSRLNWLGQRTIAEGSWLSRMLARKPRMLVAIALANKMARQIWAMLTKNEDYKDPAPAVAA

SEQ ID NO: 18227 - protein, 341 aa, unidentified
  source 1..341: note = protein_a1ab989
  REGION 8..150: note = RuvC_domain
  SITE 11: note = RuvC_P1
  SITE 54: note = RuvC_P2
  SITE 89: note = RuvC_P3
  SITE 91: note = RuvC_P4
  SITE 94: note = RuvC_P5
  REGION 213..299: note = Tnp_domain
  SITE 221: note = Tnp_P1
  SITE 251: note = Tnp_P2
  SITE 259: note = Tnp_P3
  SITE 260: note = Tnp_P4
  SITE 272: note = Tnp_P5
MNVTKNVVGVDIAKRVFQVHEVDMTTGEIVSVQLKREKFLNHFVNRAACLIGMEACGGAQHWARRLIALGHIVKLLPAKRVRPFVGGNKNDVADARAIWTAVQQPGIKAVAVKTEAQQAVLAMHRMRQQLVKFRTAQINALRGLLTEYGEVMPQGRHAIAKALPEVLACLADRLPTMLIETLREQFARIGQLDEQVAEIERRLQIWQRQDEACRRIAEIPGVGLLTATAAVATMGDAKAFTSGREFAAWLGLVPRQVGTGGRVKLLGISKRGDTYLRTLLIHGARVVLARSKEPSEWAMNLAKRRPVNVAVVAMANKTARTLWALLAHQRAYQPGYVSQPA

SEQ ID NO: 18228 - protein, 392 aa, unidentified
  source 1..392: note = protein_3ae1cda
  REGION 4..163: note = RuvC_domain
  SITE 7: note = RuvC_P1
  SITE 60: note = RuvC_P2
  SITE 101: note = RuvC_P3
  SITE 103: note = RuvC_P4
  SITE 106: note = RuvC_P5
  REGION 266..355: note = Tnp_domain
  SITE 274: note = Tnp_P1
  SITE 304: note = Tnp_P2
  SITE 312: note = Tnp_P3
  SITE 313: note = Tnp_P4
  SITE 328: note = Tnp_P5
MICVGIDVAKDKHDCFILSSEGEVLADVFTIPNNRDGFETLLQRIRSCALPADKIKVGLEATGHYSYNILGFLLDCGLPTYVINPLHTNLYRKSLSLRKTKTDRIDARTIAAMLMSDVDLKSYTDTAYHNEELKSLTRYRFDKVRERAKLKQSVSRLVNILFPELETLVPSLHMASVYAVLSEFPGAKQIADAHLTHFKTVLTDASKGRYGREKAVEIREAARCSIGSIMPSKSLELQHTIRLIRELDREIVDIEAAIKAILDEMAPPILTIPGISYRMGAMILAEIGDFSRFESPDKLLAYAGLSPSTYESGKLKASGAFAHMEKRGSRYLRYALFNAAKFVCNWEPSFAAYLAKKRAEGKHYNVAVSHATKKLVRLIFALQTSGRAFQPA

SEQ ID NO: 18229 - protein, 343 aa, unidentified
  source 1..343: note = protein_34f85a2
  REGION 7..149: note = RuvC_domain
  SITE 10: note = RuvC_P1
  SITE 53: note = RuvC_P2
  SITE 88: note = RuvC_P3
  SITE 90: note = RuvC_P4
  SITE 93: note = RuvC_P5
  REGION 212..301: note = Tnp_domain
  SITE 220: note = Tnp_P1
  SITE 250: note = Tnp_P2
  SITE 258: note = Tnp_P3
  SITE 259: note = Tnp_P4
  SITE 271: note = Tnp_P5
MEAVKVIGFDIAKSVFQVHGLNAEGKVIIRRQLKRRHVLPFFQKLPPCLVGIEACASSHYWSRELQALGHTVRLMPAAYVKPYVKRHKNDATDAEAISEAVTRPNMRFVATKTPEQQSCLTLHRARHLFIRQQTAVINAIRGHLAEFGIVAPVGRKGVEDLLRVVADPKDERVPKVARACVVALGAQLRMLKAQILEFDRMINAWHRSNKTSKELDEIPGVGPALATALVGGVADPKAFRSGRDFSAWIGLVPKQHSSGGKEKLGSISKRGDRYLRGLFTSGALAVIRYAKIHGTKHRPWLTRLLARRPTKVAAVALANKIARMAWAMMAKGERYKEPVALAA

SEQ ID NO: 18230 - protein, 356 aa, unidentified
  source 1..356: note = protein_e85c89a
  REGION 14..156: note = RuvC_domain
  SITE 17: note = RuvC_P1
  SITE 60: note = RuvC_P2
  SITE 95: note = RuvC_P3
  SITE 97: note = RuvC_P4
  SITE 100: note = RuvC_P5
  REGION 222..309: note = Tnp_domain
  SITE 230: note = Tnp_P1
  SITE 260: note = Tnp_P2
  SITE 268: note = Tnp_P3
  SITE 269: note = Tnp_P4
  SITE 281: note = Tnp_P5
MGKSIKTLSSVTLVGLDIAKNVFQVHAIDAEGAVVVARAVRRGQLLSFFASLPRCLVGIEACGSAHHWARSLSALGHQVKLIPPAYVKPYVLRGKNDAVDAAAICEAMLRPRIRFVPVRSVENQGQLMRHRVRELLIGDRTRMLNALRGHLAEVGVIAPQGTAHAYALKRLIVDGFDENGEVVADCVRAALAPLARQIETIDAEIGAIDEEIKALAKADEKARRLMTIPGVGPITASALVATVQDIGAFASGREFAAYLGLTPRQNSSGGKERLGRITKMGDRYLRKLLVVGSCATLIHSNGHNDALRAWASQMLARKTVAYKFKLTAVALANKVARIVFALLTSGGDYIERPMAA

SEQ ID NO: 18231 - protein, 341 aa, unidentified
  source 1..341: note = protein_61cde0f
  REGION 6..149: note = RuvC_domain
  SITE 9: note = RuvC_P1
  SITE 54: note = RuvC_P2
  SITE 89: note = RuvC_P3
  SITE 91: note = RuvC_P4
  SITE 94: note = RuvC_P5
  REGION 213..299: note = Tnp_domain
  SITE 221: note = Tnp_P1
  SITE 251: note = Tnp_P2
  SITE 259: note = Tnp_P3
  SITE 260: note = Tnp_P4
  SITE 272: note = Tnp_P5
MKLIRVGVDLAKNVFQLHGVDRSEKTVWRRKLVRGDWIKELLERIEPGCEIGMEACSGAHHWARMLQAQGHTVKLIAPQFVKPYVKSNKNDANDAEAICEAMSRPSMRLVAIKTVEQQDIQAVHRVRSGLMDQRKAKANQLRGLASEYGLVAPKELLHLRSAIPRWLEDQENGLTEHFRRLLHGLWRDLKALDERVEELDREIGQIARQDPVAIRLQQVRGIGPLTATALLATVGDASQFASGREMAASFGLTPKQNSSGGKQRLLGISKRGDAYLRSLLVHGARAVIRTAQAKTDRLSTWVIRIATTRHPNIAAVALASKTARIAWAMLTKGTDYRSQAA

SEQ ID NO: 18232 - protein, 400 aa, unidentified
  source 1..400: note = protein_4c2a5bc
  REGION 7..162: note = RuvC_domain
  SITE 10: note = RuvC_P1
  SITE 59: note = RuvC_P2
  SITE 99: note = RuvC_P3
  SITE 101: note = RuvC_P4
  SITE 104: note = RuvC_P5
  REGION 270..356: note = Tnp_domain
  SITE 278: note = Tnp_P1
  SITE 308: note = Tnp_P2
  SITE 316: note = Tnp_P3
  SITE 317: note = Tnp_P4
  SITE 329: note = Tnp_P5
MTYDYVIGMDVGKYFHHACVLDSSGHQALSKRINQHEQSLRKLFGAYATKATKTLVVVDQPNNIGRLTVAVAQDIGIDVRYLPGLAMRQLSRIHAGNAKTDVRDAYIIAYAGKNLPESLRNVDRVEEAFIQLKVLNGIDEDLARSYTRLINQIRSALVGTYPAFEHVLRGQMIHRKWILHLLAKYGGPTKIKRLGKARVNTFARKHRARNPEPITDAMFTAIAGQSVQIAGAEYAELGVAMSAKDALLKLEHRKEIEAQVIELIEEIPQTQLLLSMPGIGPRSAAQILMTVGDMSDFPTAGHLASYAGLSPKTNQSGTSIMSNSLNRAGNKKLKNALWQSSFASIRFHERSRQFYERKRSEGKRHNAAVVALARRRLNVLFAMMRNNEFYREPQTEVTAA

SEQ ID NO: 18233 - protein, 338 aa, unidentified
  source 1..338: note = protein_4951cf5
  REGION 7..149: note = RuvC_domain
  SITE 10: note = RuvC_P1
  SITE 53: note = RuvC_P2
  SITE 88: note = RuvC_P3
  SITE 90: note = RuvC_P4
  SITE 93: note = RuvC_P5
  REGION 211..297: note = Tnp_domain
  SITE 219: note = Tnp_P1
  SITE 249: note = Tnp_P2
  SITE 257: note = Tnp_P3
  SITE 258: note = Tnp_P4
  SITE 270: note = Tnp_P5
MTTIRVIGIDLGKNTFLLIGHDYSGREVFRKKLNRQKLLQLLSVHEPVIVAMEACGGAHWLARRCESYGHQVKLIPAQYVKPYVKTNKNDFIDADAIAEASMRPNMRFVSPKSELAQICTVIRKIRAGYLKERTACMNRIGSILLEFGINFPRGHHNMKNLFQYLADNKEPVPPMLILELREQLDHYNQLNTWIKEQEKKLENLLKDDELLTLLQSVPGIGPMTASCCLSTVGNPTDFSNGRNFAAWIGLTPHQYSTGGKSRMLGISKRGNKELRELFVHAARAVIWRDGTAERYFGSWLIDLKRRKPFNVALVALANKLARIAWSVMVTHKTFEIRI

SEQ ID NO: 18234 - protein, 323 aa, unidentified
  source 1..323: note = protein_01f733a
  REGION 8..150: note = RuvC_domain
  SITE 11: note = RuvC_P1
  SITE 52: note = RuvC_P2
  SITE 92: note = RuvC_P3
  SITE 94: note = RuvC_P4
  SITE 97: note = RuvC_P5
  REGION 191..278: note = Tnp_domain
  SITE 199: note = Tnp_P1
  SITE 229: note = Tnp_P2
  SITE 237: note = Tnp_P3
  SITE 238: note = Tnp_P4
  SITE 251: note = Tnp_P5
MNKYTETFGVDISKDVFDCYGSLQGHLQFENTEKGFVKFLKTSKDNTLVVMEATGYYHYRLAQFLYKEGQIVSVVNPLSVKRFIQMKLAKVKTDKSDAKAICDYGIINEVPLYNALTDVQSECLQLFRWLDNLIKKRTATKNKIHGEEVLGVPSKFVFRSLVKTKKNLDKEILGIEQKLLSLVKQDQQVQLTLLQSIPGIGVKTALFLIVVTDGFKKFENAKQLCSYVGITPTIRVSGSSVRGRSRISKVGNRKLRNLLFLCSFSACKQNKGCREIYERITNKGKSKKLALIAVSNKLLKQAFAIAKLGNPYDASFVSVVKIK

SEQ ID NO: 18235 - protein, 325 aa, unidentified
  source 1..325: note = protein_f5fe448
  REGION 12..96: note = RuvC_domain
  SITE 34: note = RuvC_P3
  SITE 36: note = RuvC_P4
  SITE 39: note = RuvC_P5
  REGION 199..286: note = Tnp_domain
  SITE 207: note = Tnp_P1
  SITE 237: note = Tnp_P2
  SITE 245: note = Tnp_P3
  SITE 246: note = Tnp_P4
  SITE 259: note = Tnp_P5
MVVSVGLVLMSRRISTIALRTNLYRKSLSLSKTKTDRVDARTIAHMLLSDAGLKPYTDTAYHNEELKSLTRYRFDKVKERAKLKSSVSRLVCILFPELEKVVPTLHMVSVYALPEEFPGAKQIAAAHLTRLKALLESASKGHYKRDMALEIRDAARNSIGSRMPAKSLELQHTIRLIRELDAEIAEIEEQIQSLMEELDSPITTIPGLGFRMAAMILAEVDDFTRFDSSDKLLAYAGMSPSTYQSGQLKNCYPHMEKRGSRYLRYDLYNATKYVCHWDPNFTVYRAKKSAEGKHYNVALSHAAKKLVRLVFAMEKSQQPYWSLAV

SEQ ID NO: 18236 - protein, 386 aa, unidentified
  source 1..386: note = protein_2cbc968
  REGION 45..186: note = RuvC_domain
  SITE 83: note = RuvC_P2
  SITE 121: note = RuvC_P3
  SITE 123: note = RuvC_P4
  SITE 126: note = RuvC_P5
  REGION 255..339: note = Tnp_domain
  SITE 263: note = Tnp_P1
  SITE 292: note = Tnp_P2
  SITE 300: note = Tnp_P3
  SITE 301: note = Tnp_P4
  SITE 313: note = Tnp_P5
MQTVADRPEASTAIRTDLGAIFVSLELSRSTWLITSLSPGGGEKMSKQVVRGGDVAGLLERFARLREKTRARTGKVFPFVVIQEAGLDGFWIDRALQNEGIESHVVDPASIATSRRRRRAKTDGIDGEALVRALLAYKRGEPRVCAMVKAPTPEEEDRRRLCRERKVLIVERVRHVNRVKGLLFSQGISGYEPLRRDRRERLDTLQTGDGRRLPDHLKAQVRRELDRLELLLEQIKAVEAERDVLLAAQRVAAPAAMLLDIKGIGPEFAAILWSEGLFRHFDNRRQVASYAGLAPTPWQSGSIDREQGVSKAGNPRLRTTLIQLAWLWLRHQPQSALALWFEERVRRNGGRLKKTTIVALARKLLVALWKYVTAGVVIEGAVMKRT

SEQ ID NO: 18237 - protein, 311 aa, unidentified
  source 1..311: note = protein_f9e15b6
  REGION 6..147: note = RuvC_domain
  SITE 9: note = RuvC_P1
  SITE 52: note = RuvC_P2
  SITE 92: note = RuvC_P3
  SITE 94: note = RuvC_P4
  SITE 97: note = RuvC_P5
  REGION 188..272: note = Tnp_domain
  SITE 196: note = Tnp_P1
  SITE 225: note = Tnp_P2
  SITE 233: note = Tnp_P3
  SITE 234: note = Tnp_P4
  SITE 245: note = Tnp_P5
MTEISIGIDISKDHLDAYRSHDGAEKRFTNDRSGCRRPVAWIGAEAERIVYEPTGRYHRLVEDILSKAGLPLAKVNPRQAKRFTEAIGVLAKSDRVDARVLAQMGRVLDLPCHQSASAEMDALKELCVMRRALLKDRTAAKNREKGARLPLIKRQLAARLRHIDRQVTAIDAAIRERIKADAALTERFDILVSIPGISEITAAVLLVEMPELGTLDGKQVASLAGLAPVSRQSGKWQGKAFIRGGRRGPREALYMPALVAMRFNPDLKRMYEALRARGKPPKVAITAVMRKRVIIANALLRDHRPWAPHLA

SEQ ID NO: 18238 - protein, 410 aa, unidentified
  source 1..410: note = protein_3d94e14
  REGION 5..166: note = RuvC_domain
  SITE 8: note = RuvC_P1
  SITE 63: note = RuvC_P2
  SITE 108: note = RuvC_P3
  SITE 110: note = RuvC_P4
  SITE 113: note = RuvC_P5
  REGION 283..370: note = Tnp_domain
  SITE 291: note = Tnp_P1
  SITE 321: note = Tnp_P2
  SITE 329: note = Tnp_P3
  SITE 330: note = Tnp_P4
  SITE 343: note = Tnp_P5
MKLFVGIDVSSKDLVTSMISEETCDVVFQGNFVNDLKGATELKAIIINTANSNHLDQVVIGMEATSIYSFHPAMFFQEDADLKKLNTQSVVIDPKKTKRYHDVFAEDKNDQIDAFYIADFLRVGRYSTGIVRQENYIALQRLTRSRYELVQSLVRAKQHFIENLYYKLNKLVISDELNTSVFGSTMMSLLTEDMTTDDLLNISINDLADYLNEHGRGRFANPEALAKTIQKAVRTSYRLDKVIANSVDTVLSVYAEEIKAFQKMIKDLDKAIEEVTKVIGKEEEVLRSIPGIGPVYAAGILAEIGQIDRFDNEAKLAKYAGLSWREKQSGGYASDNTPLKRTGNAYLRYYLVEAANRVRIQDPVLGEYYQRKYKEVKHTPSKRALVLTARKLIRVIFFLLKNHQIYQEKR

SEQ ID NO: 18239 - protein, 407 aa, unidentified
  source 1..407: note = protein_b538910
  REGION 4..160: note = RuvC_domain
  SITE 7: note = RuvC_P1
  SITE 57: note = RuvC_P2
  SITE 97: note = RuvC_P3
  SITE 99: note = RuvC_P4
  SITE 102: note = RuvC_P5
  REGION 274..361: note = Tnp_domain
  SITE 282: note = Tnp_P1
  SITE 312: note = Tnp_P2
  SITE 320: note = Tnp_P3
  SITE 321: note = Tnp_P4
  SITE 334: note = Tnp_P5
MNAVGIDVSKGKSMVAALRPMGEVALLPREYPHTEAGLEQLACSIIALGEDTRVIMEATGRYHEPIAAALHEYGIYVSVLNPLFIKQSGGGSIREVKTDKADAMKIAKYGLDNWTQLREYTLMEAVRQQLKLYSRQYDLYMKTIVALQNNLISLTDKTFPGVNELFSSPERADGHQKWVDFVASFWHCECICHVSEKAFGERYRKWCKRKDYHFSAEKVTKLYTASCGHITTLPKNDMTRLLITTAAQQLTAAKTTLVAMRKEMLNLAKQLPEYETVRAMYGVGEITATQLMAEIGDVRRYPRRSASVAFAGVDPSVNQSGKHKAQSNPTTKRGSPHLRKTLYQIVCTYLKKSPPSEPVYQFLDKKRSEGKPYFVYMTAAQNKFLRIYYARVKECLATLDPADTPQA

SEQ ID NO: 18240 - protein, 346 aa, unidentified
  source 1..346: note = protein_6f375b1
  REGION 6..149: note = RuvC_domain
  SITE 9: note = RuvC_P1
  SITE 54: note = RuvC_P2
  SITE 89: note = RuvC_P3
  SITE 91: note = RuvC_P4
  SITE 94: note = RuvC_P5
  REGION 213..300: note = Tnp_domain
  SITE 221: note = Tnp_P1
  SITE 251: note = Tnp_P2
  SITE 259: note = Tnp_P3
  SITE 260: note = Tnp_P4
  SITE 272: note = Tnp_P5
MKINRVGVDLAKNVFQLHGADRQGKTLWKRQLSRDKWLTVLFATVEPRTVIGMEACTGAHHWSRLLLDKGYEVKIIPPQFVKPFVKSNKNDANDAQAICEAMARPNMYPVKVKTIEQQDMQAIHRIRNEIKNHRIAKANQIRGLVAEYGLVAPKELTSLRSAIPEWLEDASNGLTMFFRQLLQGLYEDLYSMDKRMAELDKQIAVIAQQDPIAKRLQQLRGVGPLIATALVATMGDGKQYRKGRDMAAAIGLTPRQHSSGGKDRLLGISKRGDAYLRCLLVHGARSAMRTAKDKDDRLSRWITNLQDRRHANVAACAMANKMARMAWAMMTKGVDYDPDFSSVSAS

SEQ ID NO: 18241 - protein, 327 aa, unidentified
  source 1..327: note = protein_aee5134
  REGION 6..152: note = RuvC_domain
  SITE 9: note = RuvC_P1
  SITE 56: note = RuvC_P2
  SITE 94: note = RuvC_P3
  SITE 96: note = RuvC_P4
  SITE 99: note = RuvC_P5
  REGION 199..286: note = Tnp_domain
  SITE 207: note = Tnp_P1
  SITE 237: note = Tnp_P2
  SITE 245: note = Tnp_P3
  SITE 246: note = Tnp_P4
  SITE 259: note = Tnp_P5
MTDLIIGIDISAQTLDICIREQRCDQFFVIKNKVGAIKKFLVPLVSKDRNILLGMENTGRYNYNLYEVLRTLELKTFVIYPFHLKKSLGLVRGKNDKVDAERIANFVEKNHKELDPWKPCSETIMEMKYVMTERRSKIKTRARLLQQQRDLKLIKDPRLKRRLVNMFNKSLKLVSQQIKDLEAILEELIDMDQTIREQIELVRSVPGVGTVLSTAIVIKTEGFNTYTDPRKLACSAGVVPFNYQSGISLKSRNRVSHMADKSMKTLLHMAAMRAVRLECDLKYYYQRKIAEGKNKMSVLNAVRNKIIHIIYALIKNQTIYKNSLSLS

SEQ ID NO: 18242 - protein, 391 aa, unidentified
  source 1..391: note = protein_3cdf184
  REGION 5..163: note = RuvC_domain
  SITE 8: note = RuvC_P1
  SITE 60: note = RuvC_P2
  SITE 101: note = RuvC_P3
  SITE 103: note = RuvC_P4
  SITE 106: note = RuvC_P5
  REGION 266..353: note = Tnp_domain
  SITE 274: note = Tnp_P1
  SITE 304: note = Tnp_P2
  SITE 312: note = Tnp_P3
  SITE 313: note = Tnp_P4
  SITE 326: note = Tnp_P5
MTILVGIDVAKDKHDCFIMNSEGEVLAKPFTILNNKEGFNFLYEKIQSVSSSDNIKVGLEATGHYSYNIIGFLLNKGLATFILNPLHTNLYRKSLSLRKTKTDKIDSKTIAMMLLSDVSLKSYSDISYHNEDLKSLTRYRFSKVEERAKLKTSFSRLAQILFPELEKLVPTLHMTSIYQLLEEFPSASAIASVHLTRLTNLLSKASKGHYDRETAIKIRDAAKNSVGSNMPAKSLELKHTIKLICALTIDIDEIEAEISKMMDKIASPITTIPGIGRNMGAMIISEIGDFSRFSSPDKILAYAGFSPSIYQSGKLDNCYAHMEKRGSRYLRYALFHAAKLVCHWDKTFADYLAKKRAEGKHYYVAISHAVKKLVRVIFHIEKTKQAFLKAS

SEQ ID NO: 18243 - protein, 347 aa, unidentified
  source 1..347: note = protein_a13575d
  REGION 7..147: note = RuvC_domain
  SITE 10: note = RuvC_P1
  SITE 53: note = RuvC_P2
  SITE 88: note = RuvC_P3
  SITE 90: note = RuvC_P4
  SITE 93: note = RuvC_P5
  REGION 210..300: note = Tnp_domain
  SITE 218: note = Tnp_P1
  SITE 248: note = Tnp_P2
  SITE 256: note = Tnp_P3
  SITE 257: note = Tnp_P4
  SITE 269: note = Tnp_P5
MEQIIRIGMDTSKHVFQLHGVNAAEQPVLRKKLRRSEMIAFFEKLPATMVAIEACGSSHHWARLLGGLGHEVKLIAPQLSKPYVKRGKNDAADAEALCEAMSRPTMRFVPVKSAEQQASLMLMGMRDRLVRNRTQLANAIRGYAAEFGLTAAKGMCKVEPLLDRIASDPAVPALARELFASHAMEYRHLEEQLDEIDAKLMKWHRANECSRRLAQIPGVGPVGAALLMMKTPAPELFASGRQFAAWMGLTPKDHSTAGKSRPGIITRAGDETLRCTLVVGATSLLQHVRAGRGKNGTPWLLELLKRKPPKLVAVALANKIARIAWKMMMTGEAYRANTSPPAQACAA

SEQ ID NO: 18244 - protein, 391 aa, unidentified
  source 1..391: note = protein_b34712b
  REGION 4..163: note = RuvC_domain
  SITE 7: note = RuvC_P1
  SITE 60: note = RuvC_P2
  SITE 101: note = RuvC_P3
  SITE 103: note = RuvC_P4
  SITE 106: note = RuvC_P5
  REGION 266..353: note = Tnp_domain
  SITE 274: note = Tnp_P1
  SITE 304: note = Tnp_P2
  SITE 312: note = Tnp_P3
  SITE 313: note = Tnp_P4
  SITE 326: note = Tnp_P5
MIYVGIDIAKDKHDCFITNSDGEVLHNPFSISNNREGFNDLYNRICSTTEDLTNVKIGLEAIGHYSYNLLGFLIDKGLATFVINPLHTDLYRKSLSLRQTKTDKVDARMIASMLMSDVNLKSYSDTSYHNEELNSLTRYRFDKVKERSKLKTSVSRLVLILFPELEKLVPTLHMTSVYALLSEFPCASKVASAHLTRLSNLLKTASKGHYSKDTAILFREAARTSIGSNMPAKSLELKHTIKLIQELDTEIKEIEAEIKTIMDEINSPILSIPEINYRMGAMIIAEIGDFSRFDSPDKILAYAGLSPSTYQSGQLDNCYSHMEKQGSRYLRYALFNATKYVCIWDSSFNTYLAKKRSEGKHYNVAVSHAAKKLVRVIYQLEKTGQTYIKDA

SEQ ID NO: 18245 - protein, 315 aa, unidentified
  source 1..315: note = protein_613dd0b
  REGION 9..150: note = RuvC_domain
  SITE 12: note = RuvC_P1
  SITE 56: note = RuvC_P2
  SITE 96: note = RuvC_P3
  SITE 98: note = RuvC_P4
  SITE 101: note = RuvC_P5
  REGION 192..276: note = Tnp_domain
  SITE 199: note = Tnp_P1
  SITE 228: note = Tnp_P2
  SITE 236: note = Tnp_P3
  SITE 237: note = Tnp_P4
  SITE 248: note = Tnp_P5
MTQTSTTTAGIDTSKRKLDVALHGRAGHWQVPNSLAGWRELTVKLVEAGVGRVGIEATGGYERGVVEHLRAADLTVLVLQPMQVKAYGWAHLRRAKNDVLDAVLIAAFTASLDRIKAAPDPRLAELADHLTFLEQIEEDIRRYKTRLEHIGEPGLRRMVLGDIARLKARRLTQIRHLAKQLRAHRDLAVRFDLVLSIPGIGERTALALLIRMPELGQVSREEAAALAGLAPFDNDSGQQRGQRRIAGGRDRLRRSLFAAALPAAFRWNTALIALYTRLIARGKAHNAALIACARKLLIYANTVVQRGTPWTEKTA

SEQ ID NO: 18246 - protein, 321 aa, unidentified
  source 1..321: note = protein_e37c3bf
  REGION 10..160: note = RuvC_domain
  SITE 13: note = RuvC_P1
  SITE 55: note = RuvC_P2
  SITE 95: note = RuvC_P3
  SITE 97: note = RuvC_P4
  SITE 100: note = RuvC_P5
  REGION 191..277: note = Tnp_domain
  SITE 198: note = Tnp_P1
  SITE 227: note = Tnp_P2
  SITE 235: note = Tnp_P3
  SITE 236: note = Tnp_P4
  SITE 248: note = Tnp_P5
MAMKANHFVIGIDVAKAELVIHYQDSGAQVCVSNTKPEIKKWLKQQPANTALCVEATNVYHLDVVEMAYEKGFTVYVVDGFQLSNYRKSIGARAKTDSSDAALLARYLEREGGELRPWAPPPAVYGKLQSLLRRRAALVSMRTALSQSWGNETLLKAAFKSFTAQMNRLDLLVQKKLKELLQEAGLLEQIARCRSIEGIGFLTATALVMAFIRGEFKNSDAFVAFLGMDLRVSDSGQKTGRRRLTKRGCSETRRLLHNASMSASRSTAWKDVYEHYRSEGKATTESLVILARKLARVAFSLMQNKDAYQAGKRAKKLCPQP

SEQ ID NO: 18247 - protein, 402 aa, unidentified
  source 1..402: note = protein_db48903
  REGION 4..160: note = RuvC_domain
  SITE 7: note = RuvC_P1
  SITE 57: note = RuvC_P2
  SITE 97: note = RuvC_P3
  SITE 99: note = RuvC_P4
  SITE 102: note = RuvC_P5
  REGION 275..362: note = Tnp_domain
  SITE 283: note = Tnp_P1
  SITE 313: note = Tnp_P2
  SITE 321: note = Tnp_P3
  SITE 322: note = Tnp_P4
  SITE 335: note = Tnp_P5
MISVGIDVAKGKSTVCILKPYGEIVSKPFDIVHNEKDLSELASMLVRFDEEVKVVMEATGIYHLPVLTYLQEKGLFVTVINPYLMKVYRSGDLRKAKTDKIDSRIIANYGIDHWFTMTEFQASEDIYGELKLLGQQYRHYMKLHINSLHELTHLLDYTMPGIKGMFASWNEGNRKDKLSDFVESFWHYDKITCLDEMEFINQYINWAKEKKYHQSQTKAKAIYKLAHESIPTLSSETPSVKMLVTEAVRVLKEVDATLGTILSRMQELAKGLPEYAVVRGMGGVGEVLAPKLIAEVGDVRRFHSGKALIAFAGIDTPPYESGQFAGSNRKITKRGSAALRKVGYETMRCIKTHPRPNDPVYQYIVKKELEGKAKKSAKIAGLNKFLRIYYARVKEVYRDSSE

SEQ ID NO: 18248 - protein, 293 aa, unidentified
  source 1..293: note = protein_6fb2a32
  REGION 7..148: note = RuvC_domain
  SITE 10: note = RuvC_P1
  SITE 53: note = RuvC_P2
  SITE 88: note = RuvC_P3
  SITE 90: note = RuvC_P4
  SITE 93: note = RuvC_P5
  REGION 210..293: note = Tnp_domain
  SITE 218: note = Tnp_P1
  SITE 248: note = Tnp_P2
  SITE 256: note = Tnp_P3
  SITE 257: note = Tnp_P4
  SITE 269: note = Tnp_P5
MESIIRIGMDTSKHVFQLHGVNESEQPILRRKLRKKEMITFFEKLPPTIVAIEACGGSHHWARLLQSFGHVVKLIAPQLAKPYVKRGKNDAADAEALCEAMSRPTMRFVPVKSQDQQAALMLVGIRDRLIRTRTQIVNAIRGYATEFGLAAAKGLGKVEPLLERIAVDESLPELARELFALQAQEYARLRAEIRDIEEKLMAWHRTDECSQRLRQIPGVGPIVASLLVMKTPSATLFRSGRDFAAWIGLTPKDHSAAGKVKLGIITRAGDEALRSALVVGATAMLRVVRARAQ

SEQ ID NO: 18249 - protein, 320 aa, unidentified
  source 1..320: note = protein_639ed83
  REGION 5..148: note = RuvC_domain
  SITE 8: note = RuvC_P1
  SITE 52: note = RuvC_P2
  SITE 92: note = RuvC_P3
  SITE 94: note = RuvC_P4
  SITE 97: note = RuvC_P5
  REGION 188..272: note = Tnp_domain
  SITE 196: note = Tnp_P1
  SITE 225: note = Tnp_P2
  SITE 233: note = Tnp_P3
  SITE 234: note = Tnp_P4
  SITE 245: note = Tnp_P5
MLSFCGIDVSKDRLDVMVLPDEYSSSVPNDPAGWAILVEQLRGFSITAIGIEASGGYERGAVRSLQAAGMPVRQVNPFKLRQFAKASGVLAKNDPLDARMIASFVGIMPTRPAQRTTPVAEQLVEMLVVRRQLSAEKIAAENASRLLEDPMLQRLSRRRIGRLAGDIELLDKRLVEIVATDATLAHRYRLLTSMPGVGPVLACTLIALLPELGGMSRKQVAALVGVAPYAFESGTLKGRRCIWGGRANVRQVLYMAAMSASNWNPALKLFHDRLKGAGKLPKVVIVAVMRKMITTLNAMVRDDIAWADRLSGRHSVTTAR

SEQ ID NO: 18250 - protein, 396 aa, unidentified
  source 1..396: note = protein_53e5e88
  REGION 6..160: note = RuvC_domain
  SITE 9: note = RuvC_P1
  SITE 58: note = RuvC_P2
  SITE 98: note = RuvC_P3
  SITE 100: note = RuvC_P4
  SITE 103: note = RuvC_P5
  REGION 265..352: note = Tnp_domain
  SITE 273: note = Tnp_P1
  SITE 304: note = Tnp_P2
  SITE 312: note = Tnp_P3
  SITE 313: note = Tnp_P4
  SITE 325: note = Tnp_P5
MAMIWAGIDAGKTHHHCVAIDESGHRLLSRRVANDEPELLELLTDVLALGDEVAWGIDLADGGAALVITLLFNHAQPVHYISGRAIHRASESYRGEGKTDAKDAAVIADQARIRRDLHLLRADDDTVTDLKILTGRRTDLVADRTRTVNRLRAQLTGIFPALERALDLTNTGPLMLLTGYQTPASLRRTGKKRLETWLRNRKVLRADLLAETALEAAGRQHTSLPGEKLTAQMVHTLAQEVTALNQQIAELDKAIEARFREHRDFEVITSMPGQGVILGAEFLAATGGDMTAFGTADRLAGFGGVAPVPRDSGKISGNLRRPRRYNRRLQRVFYISALFSIRHCDESRRFYERKRAEGKRHIQAVLALARRRVNVLWALLRDERTYELVPPTAHAA

SEQ ID NO: 18251 - protein, 376 aa, unidentified
  source 1..376: note = protein_05bdaec
  REGION 5..164: note = RuvC_domain
  SITE 8: note = RuvC_P1
  SITE 61: note = RuvC_P2
  SITE 102: note = RuvC_P3
  SITE 104: note = RuvC_P4
  SITE 107: note = RuvC_P5
  REGION 268..354: note = Tnp_domain
  SITE 275: note = Tnp_P1
  SITE 305: note = Tnp_P2
  SITE 313: note = Tnp_P3
  SITE 314: note = Tnp_P4
  SITE 327: note = Tnp_P5
MVVSVGIDVSKDKHDCFIVNSEGEVLADVFTIPNTMDGFHCLLQRIRDCTTPQDKIKVGLEATGHYSYNLLGFLLDNGLLTYVLNPLRTNLYRKSLSLRKTKTDRVDARTIAHMLLSDAGLKPYTDTAYHNEELKSLTRYRFDKVKERAKLKSSVSRLVCILFPELEKLVPTLHMASVYALLEEFPGAKQIAAAHLTRLKALLETASKGRYKRDMALEIRNAARNSVGSRMPAKSLELQHTIRLIRELNAEITEIEEQIQSIMDELHSPIPTIPGLGFRMAAMILAEVGDFTRFDSPDKLLAYAGMSPSTYQSGQLKNCYSHMEKRGSRYLRYALYNATKYVCHWDPAFATYLAKKRAEGKHYNVALPHAARNWFG

SEQ ID NO: 18252 - protein, 312 aa, unidentified
  source 1..312: note = protein_8b03402
  REGION 4..150: note = RuvC_domain
  SITE 7: note = RuvC_P1
  SITE 52: note = RuvC_P2
  SITE 92: note = RuvC_P3
  SITE 94: note = RuvC_P4
  SITE 97: note = RuvC_P5
  REGION 191..241: note = Tnp_domain
  SITE 199: note = Tnp_P1
  SITE 229: note = Tnp_P2
MTYVGIDVSKATFVVAYSSAKSSETKTFKNTTKGIREFIRTISSEENHCVLEATGNYSMLLVYLLSKAGFTVSMENPLKIKNFARVMLSVVKTDEIDARLIALYGERMQPAPFKLRSDSLLLLKQKRTVLRQLKKQLTANRNLEGSLKVLPFIDSKCKKVLEKTIKFLEKQIQEMEEELTSLAEIEYKKQMDLLTSIKGIGATLAAALIIATGGFTYFDNAKQLTRYLGCHLLTNSLVRQSMSKGTLIVTEMLTCVVSFILELWHHCGATPNAKHALTVCDQMGSQGNWLLSLLPTNSSDKPSLLLHMRRNI

SEQ ID NO: 18253 - protein, 324 aa, unidentified
  source 1..324: note = protein_5c97e40
  REGION 8..146: note = RuvC_domain
  SITE 11: note = RuvC_P1
  SITE 52: note = RuvC_P2
  SITE 92: note = RuvC_P3
  SITE 94: note = RuvC_P4
  SITE 97: note = RuvC_P5
  REGION 194..281: note = Tnp_domain
  SITE 202: note = Tnp_P1
  SITE 232: note = Tnp_P2
  SITE 240: note = Tnp_P3
  SITE 241: note = Tnp_P4
  SITE 254: note = Tnp_P5
MNKDKKIYGIDISKKVFDVYSEGSGHLQFANDEKGFRKLLKHLPEHSLVAMEATGYYHYRLAQYLHGKGVAVSVVNPLSVKRFIQMKLAKVKTDKSDARAICEYARVNQVLMYSALTEVQAECLQLFRLLDSYVKMRTQTKNKLHGEEAQEALGIPTKAVYRSLKRNLKHLDTELEGLESRLLELVKRDQQHQLTLLKGIPGMGVKTALFLIVITDGFSKFESASQLCSYVGITPTIRQSGSSVRGKSRIGKVGNRKLRNLLFMCAFSACKHNRACRAIYERIVAKGKSKKLALIAVANKLLKQAFAIAKSGLPYDEKFVSRLA

SEQ ID NO: 18254 - protein, 334 aa, unidentified
  source 1..334: note = protein_259dbd9
  REGION 1..104: note = RuvC_domain
  SITE 2: note = RuvC_P2
  SITE 43: note = RuvC_P3
  SITE 45: note = RuvC_P4
  SITE 48: note = RuvC_P5
  REGION 209..296: note = Tnp_domain
  SITE 217: note = Tnp_P1
  SITE 247: note = Tnp_P2
  SITE 255: note = Tnp_P3
  SITE 256: note = Tnp_P4
  SITE 269: note = Tnp_P5
MEATGHYWLSLYSFLLEKDLSIHVINPIQTDGWRNGIEIRKRKTDIIDSILIADLLRYGNFVETSLAPEDYFSLKFLTRFRSYLVSSIGDLKRKTIAVLDQVLPEYTDSFTDIFGTTSKKILNSLSTPEEFDKITSNDLNEILKEIRLKKFAIKKIDELSEKAKKLFGIKFAINSFSIQIKHLINQIDFIESQISDIEGEIGLLMKKINSPITSIPGVGPITGATILGEIGDISKFSDPSKLVAYSGLAAIVSQFGEYKSSSTRISKRGSSALRKALLQAALRAEFYDPVFSNYYKSKIVQGKHHSVATNAVARKLCHTIFAALTKNECYKIQN

SEQ ID NO: 18255 - protein, 400 aa, unidentified
  source 1..400: note = protein_da488ac
  REGION 5..163: note = RuvC_domain
  SITE 8: note = RuvC_P1
  SITE 62: note = RuvC_P2
  SITE 102: note = RuvC_P3
  SITE 104: note = RuvC_P4
  SITE 107: note = RuvC_P5
  REGION 273..362: note = Tnp_domain
  SITE 281: note = Tnp_P1
  SITE 311: note = Tnp_P2
  SITE 319: note = Tnp_P3
  SITE 320: note = Tnp_P4
  SITE 333: note = Tnp_P5
MNPVVGLDVAKEESQVQAFLDQSKPYGKSFSMKHIKEELDYLLDFLKEVEEVTGQMPMVILESTGHYHSPVIQYLEEQGILYILLNPIISYQVKKSSLRKVKTDAIDAYQLCVLYYKEDFEPHKIRGIQLLDLRNLSRQQEIVTNMYVEAKLQFHTILDQVFPEYRKVFGDLYSKVSLLMLKEYPTSEAVLTAGESRLAESVIEFCPSRSGEWAWEKAKKIMDSASRNPFQKNVYESHVINLRMYIELLFHYQGHLSDLEDRIVALANEMEEYKIIQSIPGIGEKIAATIISEIGEIDRFNHPKKLVAFAGVDPSVHSSGKFTATINRITKRGSSRLRHSLYLAVLCGIRSSRNKKLKAFYDKKKSEGKPAKVSIVACMNKLLHWIYALLKRKEAFLDLA

SEQ ID NO: 18256 - protein, 345 aa, unidentified
  source 1..345: note = protein_8e2c949
  REGION 6..148: note = RuvC_domain
  SITE 9: note = RuvC_P1
  SITE 52: note = RuvC_P2
  SITE 87: note = RuvC_P3
  SITE 89: note = RuvC_P4
  SITE 92: note = RuvC_P5
  REGION 211..297: note = Tnp_domain
  SITE 219: note = Tnp_P1
  SITE 249: note = Tnp_P2
  SITE 257: note = Tnp_P3
  SITE 258: note = Tnp_P4
  SITE 270: note = Tnp_P5
MTIKTIGLDLAKQVFQVHAVDERGQVVMKKQLARAKLAAFFANLPPCLVGMEACSSAHFWAIKLARFGHDVRLMAPQFVKPYVKGSKTDHVDAEAICEAVQRPSMRFVPIKQPEQQALLALHRARQGFVKARTAQANQLRGLLAEFGIIIPQGISKLFQQLPILMEDAEHGLPGMMRELVCRLAAHLRLLDSQAKELEQRIEQWHRQSESSRRLAAIPGIGPITATALVASVGNAHAFENGRQLAAWLGLVPRQHSSGGKPVLLGISKRGDVYLRTLLIHGARAVIAHAEHRIQDGTNWLSRLLSRRNRNVATVALANKNARIVWTLLTSGRDFESGHLSFPAVA

SEQ ID NO: 18257 - protein, 346 aa, unidentified
  source 1..346: note = protein_24ca97d
  REGION 7..147: note = RuvC_domain
  SITE 10: note = RuvC_P1
  SITE 53: note = RuvC_P2
  SITE 88: note = RuvC_P3
  SITE 90: note = RuvC_P4
  SITE 93: note = RuvC_P5
  REGION 211..295: note = Tnp_domain
  SITE 218: note = Tnp_P1
  SITE 248: note = Tnp_P2
  SITE 256: note = Tnp_P3
  SITE 257: note = Tnp_P4
  SITE 269: note = Tnp_P5
MDQIIRIGMDTSKNFFQLHGVDTAERAVLRRKLRRNEVLTFFAEQPPTVIGMEACGAGHYWARELGKLGHEVKLIAPQHVKAYVKRNKNDGRDAEGLCEAMSRPTMQFVAVKSEEQQAALMLIGVRQQLMTRRTQLSNAIRGYAAEFGVITVKGLVKVEPLLAQIARDESLPALAREMFALQGRDYARLQVELKAVEARLMAWHRANTDSCRLAKIPSIGLIGATALVMKAPDPRLFPSGRHFAAWIGLTPKDHSTAGKTRIGKITRAGDEMLRSVLVAGATSVIQQAKKGRGRPSPWLVALLARKPPKLAAVALANKTARIAWKLLTTGESYDGARMPVASKLAA

SEQ ID NO: 18258 - protein, 344 aa, unidentified
  source 1..344: note = protein_f5317f7
  REGION 7..149: note = RuvC_domain
  SITE 10: note = RuvC_P1
  SITE 54: note = RuvC_P2
  SITE 89: note = RuvC_P3
  SITE 91: note = RuvC_P4
  SITE 94: note = RuvC_P5
  REGION 213..296: note = Tnp_domain
  SITE 221: note = Tnp_P1
  SITE 250: note = Tnp_P2
  SITE 258: note = Tnp_P3
  SITE 259: note = Tnp_P4
  SITE 271: note = Tnp_P5
MNTIKVVDIDLAKNVFQVCVWMEDGSVASNQKISRQKFPDTLRAFPPETLIAMETCATSHYWGRTLQSMGYHVRIVPTQHVKAFSHHQKNDANDALAICETACRPGLHFVPIKTVEQQDIKALRSARQLMVEQRTALANQIRAFLAEQRIIVPVGIQKLQQHLPDILEEGDNALSCVLRRLLHTLWEELQNLNVSIHEMDNEITALSRQQAGYEHLLTIPGVGPLIVAAFVSDVNVSQFTNGRQLSAWCGLVPRQHSSGGKSRLSSLSKHGNRHLRTLIIHGARAMMQDVQKRDDPLGEWLRTLITRCGPMKAVVALANKLTRIIWRILTDEVDYDMKKAFAIH

SEQ ID NO: 18259 - protein, 340 aa, unidentified
  source 1..340: note = protein_e28397c
  REGION 6..148: note = RuvC_domain
  SITE 9: note = RuvC_P1
  SITE 52: note = RuvC_P2
  SITE 88: note = RuvC_P3
  SITE 90: note = RuvC_P4
  SITE 93: note = RuvC_P5
  REGION 211..297: note = Tnp_domain
  SITE 219: note = Tnp_P1
  SITE 249: note = Tnp_P2
  SITE 257: note = Tnp_P3
  SITE 258: note = Tnp_P4
  SITE 270: note = Tnp_P5
MKYTPVGVDIAKHLIQVHFIDEHTGEVIDKQLRRQDFLMFFCNREPCLIGMEACRGSQHWGRELTKLGHKVRLLQAHFVKAFVVMGNKNDVMDARAIWMAVQQPGKDIAVKTEEQQSVLVLHRSRRQLVKFRTMQINSLHGTLLEFGKTIHKGRAAMERELPEALERMKERLPPYLITVLENQYNRLNELDSLIEDIEKKLTSVARQNETCKRLLDIPGVGPLIATAAVATMREASAFKSGREFAAYVGLVPKQTGSGGKIRLLEISKRGNTYLRALFIHSARAAALLPKEPGPWITELKKRRPTSVAIVAMANKLARTVWAIAAHGSKYDKNHVSIRSY

SEQ ID NO: 18260 - protein, 343 aa, unidentified
  source 1..343: note = protein_810e55f
  REGION 6..149: note = RuvC_domain
  SITE 9: note = RuvC_P1
  SITE 54: note = RuvC_P2
  SITE 89: note = RuvC_P3
  SITE 91: note = RuvC_P4
  SITE 94: note = RuvC_P5
  REGION 213..300: note = Tnp_domain
  SITE 221: note = Tnp_P1
  SITE 251: note = Tnp_P2
  SITE 259: note = Tnp_P3
  SITE 260: note = Tnp_P4
  SITE 272: note = Tnp_P5
MKLSRVGIDLAKNVYQLHGVDRSGKTILKRRLKRHQWLKVLLDETEPGCVIGMEACASAHHWGRELQSRGYTVKLIPPQFVKPYVKSNKNDARDAEAICEAMSRPNMRFVTVKTVEQQDIQATHRIREELKVRRTAKANQIRGLVAEYGLVAPQRLSSLRAAIPCWLEDAENGLTHYFRSLLQGLWDDLLILDDRMCEMDKTIKRLAKDNEDCVRLQQLRGFGPMISTALVATVGDARQYHKSRQMAAAIGITPRQHSSGDRHRLLGISKRGDVYLRMLMIHGARSVVTRAKHKDDPLSRWVTEIAKRRHPNVAAVALANKNARMAWAMLRHKTDYDPDFAMS

SEQ ID NO: 18261 - protein, 431 aa, unidentified
  source 1..431: note = protein_1c01ac9
  REGION 34..188: note = RuvC_domain
  SITE 37: note = RuvC_P1
  SITE 86: note = RuvC_P2
  SITE 126: note = RuvC_P3
  SITE 128: note = RuvC_P4
  SITE 131: note = RuvC_P5
  REGION 295..383: note = Tnp_domain
  SITE 303: note = Tnp_P1
  SITE 335: note = Tnp_P2
  SITE 343: note = Tnp_P3
  SITE 344: note = Tnp_P4
  SITE 356: note = Tnp_P5
MRFVLVRDLMAGLSTGFGGVNGSVRVVRRQRLWIGIDVGKANHHVCVVDENAKVCWSGKLANDQRAIEAVIDRARNTGIELRWAIDLTSPFAALLITVLLSAGESVVYVPGRMVATMTGVFRGEGKTDAKDARVIADTARMRNDLTPVTAPDELIAELTQLASYRADLMADWVRGVNQLRAKLASIFPALEAAFDYSARSPLILVAGLCTPAEIRDAGISGVATYLTENDAWRKGIATMATAGVAAAETQDIAVPGEATTATLIKRLAAKLLDLDREIKDLDKHIATRFRTHPQAAIIESLPGMGPHLGTDFLVSTGGDALAEFTTPGRLASYAGLVPVPRDSGRISGNLHRPERYNRRLRRVFFMAALSSIRNEGPSRTFYQRKRTERLIHTQALLALARRLVDVLWALLRDNRAFDTKPPSVTGVPAAA

SEQ ID NO: 18262 - protein, 339 aa, unidentified
  source 1..339: note = protein_7a7c564
  REGION 6..147: note = RuvC_domain
  SITE 9: note = RuvC_P1
  SITE 52: note = RuvC_P2
  SITE 87: note = RuvC_P3
  SITE 89: note = RuvC_P4
  SITE 92: note = RuvC_P5
  REGION 210..297: note = Tnp_domain
  SITE 218: note = Tnp_P1
  SITE 248: note = Tnp_P2
  SITE 256: note = Tnp_P3
  SITE 257: note = Tnp_P4
  SITE 269: note = Tnp_P5
MNVTPVGIDIAKSVFQVHYVDAQTGEIVNRALRRAAFLEHFANRAPCLIGMEACGGAQHWARSLMKMGHQVRLMPARFVKAFNIGNKNDAADARAIWLAVQQPCKAVAVKTEAQQTVLALHRMRQQLVKFRTMQTNGLRGLLTEYGEVMGKSRAALDRAMPEVLARLADRLPAVLIDTLREQYNGLAGLDAQIAQIERRLGQWMREEPAVQAIAQIPGVGLLTATAAVAAMGDAKTFRSGREFAAWVGLVPKQTGSGGKVTLHGISKRGDAYLRTLLIHGARSVLQHAKEPGPWVEQLGQRRPPNVVVVALANKMARTIWAVLAHDRVYQKEYVSVRPA

SEQ ID NO: 18263 - protein, 341 aa, unidentified
  source 1..341: note = protein_ede7a06
  REGION 7..149: note = RuvC_domain
  SITE 10: note = RuvC_P1
  SITE 53: note = RuvC_P2
  SITE 88: note = RuvC_P3
  SITE 90: note = RuvC_P4
  SITE 93: note = RuvC_P5
  REGION 209..297: note = Tnp_domain
  SITE 217: note = Tnp_P1
  SITE 247: note = Tnp_P2
  SITE 255: note = Tnp_P3
  SITE 256: note = Tnp_P4
  SITE 268: note = Tnp_P5
MSTVTLIGIDLGKHSFHLHGQDAAGRMMFRKKCSRQDLFKLLGNTPRSTVVMEACAGAHWMARRIEELGHQAKLISPQFVRPFVQGNKNDFADAQAICEAASRPSMRFVSVRNQAQQTVSALHRVRESLVAQRTGVINQVHAFLLEFGISLPRGQAILRRLPAVLAEHALPPQLGALLERLRSHFQYLDEQVGQIERELCLQLREDERSQRLLQIPGIGPITASVLMTELGDARQFGSARQFAASVGLVPRQYSTGGKPTLLGISKRGDKNLRRLLVQGARAIMRHVERRTDRLGAWVRELQARRHSNVVACALANKLARIAWAILANGTNYRSEQTVAPA

SEQ ID NO: 18264 - protein, 324 aa, unidentified
  source 1..324: note = protein_15e56df
  REGION 1..84: note = RuvC_domain
  SITE 21: note = RuvC_P3
  SITE 23: note = RuvC_P4
  SITE 26: note = RuvC_P5
  REGION 199..287: note = Tnp_domain
  SITE 207: note = Tnp_P1
  SITE 237: note = Tnp_P2
  SITE 245: note = Tnp_P3
  SITE 246: note = Tnp_P4
  SITE 259: note = Tnp_P5
MAVVNPFEMKEYRCQGLRRVKTDKQDAVTISNYGIDHWYRLREYEAEENIYAELKLLGRQYRHYMRMRVESVLELTHLLDYTMPGIKTLLKGWNETNGKDKLGDFAEEYWHYDNITKKSEEQFIESYLKWAKEKGYHQSQDKAVKIYALAKEGIPTVSSDTPSTKMLVQEAVRVLREVDNTLMTILTQMQALAKSLPEYPVVRAMGGVGNVLAPKLIAEIGDVRRFHSGKALIAHAGIDAPPYQSGQFIGTERKISKRGSSSLRKIGYEVMRCLKTHKEPEDAAVYKFILKKEKEGKSKRAAKIAGLNKFLRIYYARVMEVYQK

SEQ ID NO: 18265 - protein, 338 aa, unidentified
  source 1..338: note = protein_df11857
  REGION 8..154: note = RuvC_domain
  SITE 11: note = RuvC_P1
  SITE 59: note = RuvC_P2
  SITE 99: note = RuvC_P3
  SITE 101: note = RuvC_P4
  SITE 104: note = RuvC_P5
  REGION 196..283: note = Tnp_domain
  SITE 204: note = Tnp_P1
  SITE 234: note = Tnp_P2
  SITE 242: note = Tnp_P3
  SITE 243: note = Tnp_P4
  SITE 256: note = Tnp_P5
MTTRLPALGIDMAKSTFDVHLLAESKVSSQHFANTSPGCEALVQWLKQLGMKQVHACMEATGTYGDALALFLYQAGHTVSIVNPARMAAFRLSEGGRTKTDKQDAKLIAHFCAQKCPVAWLPTPAAIAQLQVLLVRLEALQQMERQEANRLENGRFDAQTRQDIQEHRQDLKTRIREVKKRLHAHIEQYETLKKPCTLLISLPGIAELSAARLLAEIIDITRFKTVKQLVAHAGLAPQERSSGNSVRGKASIGKSGRSKLRKALYMCAVVASTHDPSMRAFAQRMRQRGKPAKVVLTAVMRKLLHMVYGILKSEKAYDPTKAFPGAALGSVPEAEVAA

SEQ ID NO: 18266 - protein, 440 aa, unidentified
  source 1..440: note = protein_48c2df8
  REGION 41..197: note = RuvC_domain
  SITE 44: note = RuvC_P1
  SITE 94: note = RuvC_P2
  SITE 134: note = RuvC_P3
  SITE 136: note = RuvC_P4
  SITE 139: note = RuvC_P5
  REGION 311..398: note = Tnp_domain
  SITE 319: note = Tnp_P1
  SITE 349: note = Tnp_P2
  SITE 357: note = Tnp_P3
  SITE 358: note = Tnp_P4
  SITE 371: note = Tnp_P5
MQVGLSCTCPYDTQETESAMDNRWYHVNLSDWRSLIMFNAVGIDVSKGKSTVSVLQPGGTVVKKPFNVVHSSRSLNDLSRFILHLDGQTRVVMECTGRYHEPILHALHDAGIFVSAVNPHLIKNFCSNTIRKVRSDPADSRKIVRYALDNRASLRQYSTMDTTRTQLKTLNSQMDFFTKQKVAARTNLISLMDMTYPGVNSLFSSPARDDGSEKWLDYAESFWHVDCVRKIGLKAFTERYQAFCKRNGYNFQPGKPEELYLASKELVAVYPKDKVYKDLIMTGIEQLKSTTRHVEHIRHEMDALASTLPEYETVLSMRGVGKTLGPQLMAEIGDITNYTHREALTAFAGVDPGVNESGSFRSKSNPASKCGSSRLRKTLFLIMTSLLQTSPADDRVYQFLDRKRSEGKPYLVYMTAGANKFLRIYYGKVKACIASQSKAE

SEQ ID NO: 18267 - protein, 339 aa, unidentified
  source 1..339: note = protein_f19a0fc
  REGION 6..147: note = RuvC_domain
  SITE 9: note = RuvC_P1
  SITE 52: note = RuvC_P2
  SITE 87: note = RuvC_P3
  SITE 89: note = RuvC_P4
  SITE 92: note = RuvC_P5
  REGION 210..299: note = Tnp_domain
  SITE 218: note = Tnp_P1
  SITE 248: note = Tnp_P2
  SITE 256: note = Tnp_P3
  SITE 257: note = Tnp_P4
  SITE 269: note = Tnp_P5
MNSMAVGVDIAKHVFQVHYVDQESGEIVNKPLKRAKFLEHFANRTPCLIGMEACGGAHHWARQLTKMGHEVRLMPAEFVKAFNIRNKNDAADARAIWLAVQQPGKPVAVKSEMQQAMLALHRLREQLVKFRTMQSNGLRGLLTEYGEVMSKGRAKLDKEIPAALKRIAERLPAVLIDTLREQWNGLAKLDGQIAEIERRMREWKKADAAVKAVSEIPGVGLLTATAAVAMMGDPKAFSSGREFAAWAGLVPKQTGTGGKVNLHGISKRGDTYLRTLLIHGARSVLSHAKEPGPWVEQMKKRRPPNVVIVALANKMARTIWAVLAHGRPYRKDYVSVKPA

SEQ ID NO: 18268 - protein, 346 aa, unidentified
  source 1..346: note = protein_dad4a6c
  REGION 7..149: note = RuvC_domain
  SITE 10: note = RuvC_P1
  SITE 53: note = RuvC_P2
  SITE 88: note = RuvC_P3
  SITE 90: note = RuvC_P4
  SITE 93: note = RuvC_P5
  REGION 211..295: note = Tnp_domain
  SITE 219: note = Tnp_P1
  SITE 249: note = Tnp_P2
  SITE 257: note = Tnp_P3
  SITE 258: note = Tnp_P4
  SITE 270: note = Tnp_P5
MDEVIIVGVDLAKNVFQAHGAAADGSVIFRKKLSRPQFAKFMSELPACIVAMEACATAHYWGREMTRLGHEVRLIPPIYVKPFVKRQKNDAADAEAIVEAALRPTMRFVEIKTAEQQSRAMLFRTRELLVTQRTKMINALRAHLAEHGFVVARGVGNVQRLATILDGQEHDLPELVRQMGAIYLDEITRISERIDSLKLRIRAVGEDSDAARRLQTMPGIGPITAMAIETFAPPMEVFKRGRDFAAWLGLVPRQHSTGGKPRLGHVSKMGQRDIRRLLIIGAMSVIQAAARKGAVGGSWLMRMLARKPRMLVAIALANKMARMIWAMLVRKEDYRKDCKVPAGMPA

SEQ ID NO: 18269 - protein, 346 aa, unidentified
  source 1..346: note = protein_c7e39a8
  REGION 6..150: note = RuvC_domain
  SITE 9: note = RuvC_P1
  SITE 54: note = RuvC_P2
  SITE 89: note = RuvC_P3
  SITE 91: note = RuvC_P4
  SITE 94: note = RuvC_P5
  REGION 213..299: note = Tnp_domain
  SITE 221: note = Tnp_P1
  SITE 251: note = Tnp_P2
  SITE 259: note = Tnp_P3
  SITE 260: note = Tnp_P4
  SITE 272: note = Tnp_P5
MDISRVGVDLAKSVFQLHGVNKAGKRVWKRQLPRNKWLSVISETIEPGTEIGMEACAGSHHWSRELIARGYKVKMIPPQFVTPFVKGNKNDANDAEAITEAMARPNMHPVKVKSVEQQDMQAVHRIREEIKNHRVAKGNQIRGLVAEYGIVAPVQLTSLRQAIPVWLEDTSNGLTSLFKQLLQGLWEDLTTLDKRMKILDKQIMVIATQNPTAKRLQQLRGIGPLIATAMVATLGDGKQYRKGRDMAAALGLTPKQHSSGGKDKLLGISKRGDSYLRCLIIHGARSAVQAAKNKDDRLSRWIVSLQIRRHNNVVVVAMANKMARMAWVMMTKDVDYDPNFCSASVN

SEQ ID NO: 18270 - protein, 344 aa, unidentified
  source 1..344: note = protein_c4ba9f3
  REGION 1..105: note = RuvC_domain
  SITE 2: note = RuvC_P2
  SITE 42: note = RuvC_P3
  SITE 44: note = RuvC_P4
  SITE 47: note = RuvC_P5
  REGION 216..303: note = Tnp_domain
  SITE 224: note = Tnp_P1
  SITE 254: note = Tnp_P2
  SITE 262: note = Tnp_P3
  SITE 263: note = Tnp_P4
  SITE 276: note = Tnp_P5
MSKQEHIHLPILIYLLDKGYCVIAENALKIKKYLDRSLRKAKTDKKDSLKLAEYACDNWYKLKANFVEEEKYKELRFLSRQYFSLNSMKVQQKVDFSDLSDMLFPGYYQLLEECNFIVGLKIFEKFSDPKIIRKKKLETFLNDIEKIAQKIGQKRAGRNLAIKVYELAKKSVPSCPSNSSTQLILNKRVVALINLIETTNEIIAKMNEIAKTMDEYKEVRNMKGVGDRLAPLLIAEIGDIRRFKNAGSLIAYAGIDSPPYQSGKYEATNRHISKRGNKYLRKTGFEVMQSIKSFCRIDCEIYDYIVKKESEGKCKKSAKIAGLNKFLRQYYGILKKKYIELGTW

SEQ ID NO: 18271 - protein, 407 aa, unidentified
  source 1..407: note = protein_6951a88
  REGION 5..161: note = RuvC_domain
  SITE 8: note = RuvC_P1
  SITE 58: note = RuvC_P2
  SITE 98: note = RuvC_P3
  SITE 100: note = RuvC_P4
  SITE 103: note = RuvC_P5
  REGION 275..362: note = Tnp_domain
  SITE 283: note = Tnp_P1
  SITE 313: note = Tnp_P2
  SITE 321: note = Tnp_P3
  SITE 322: note = Tnp_P4
  SITE 335: note = Tnp_P5
MNIAVGIDVSKGKSVVAAMRPFGEVALPPREFLHTSADLSALTESLRLIDGNTRVILEATGRYHEPIVVVLRDAGIFVSIVNPKLIKDFGNNSLRKVKTDKADAVKTARYGLEYWEEMREHTETDTVRQQLKLFLRQYNLHMKTVVALQNNLILLLDSVFPEVNELFKSPVRDDGHHKWVDFVCTFYHRDCVSGVSVSAFSERYHKWCKRKGYNFSTAKAAELHAASREMVVTMPKNALTKALITSAAGQLIAATTALATLKSEFIRLAATLPEYEIVNSMYGVGDITGAQLMAEIGDVRRFANRGALIAFAGVDPGVNESGKHSAQSVRTTKRGSPHLRKTLFQIVSTHLKNSPEEEPVYQFIDRKRAEGKPYLVYMTAAANKFLRIYHAKVKEYLNGLDSVERNT

SEQ ID NO: 18272 - protein, 311 aa, unidentified
  source 1..311: note = protein_4c841c4
  REGION 8..149: note = RuvC_domain
  SITE 11: note = RuvC_P1
  SITE 55: note = RuvC_P2
  SITE 95: note = RuvC_P3
  SITE 97: note = RuvC_P4
  SITE 100: note = RuvC_P5
  REGION 190..274: note = Tnp_domain
  SITE 198: note = Tnp_P1
  SITE 227: note = Tnp_P2
  SITE 235: note = Tnp_P3
  SITE 236: note = Tnp_P4
  SITE 247: note = Tnp_P5
MKEPERFVGIDISKEELVVAVRPTAELQSFPNTEEGLAALVGFLQPLGAHSIVLEATGGFVRAAVNALALAALPVVVVNPRQIRDFARSVGLLAKTDAIDARIIARFAEAVRPELRPLKDLETQKLEDLNNRRRQIVEMISAEKNRLGMAPPWSQKDIRSHIAWLEKRLKRINDDIDDLIKNSPIWRQKEKILTSVLGVGPVVTTTLLCGLPELGSLSARKLSALVGVAPFNRDSGQSRGRRSCWGGRAHVRAALYMAALTASRCNPMIREFYLRLRLAGKPAKVALVACMRKLLVILNAMVKNNTCWQQA

SEQ ID NO: 18273 - protein, 340 aa, unidentified
  source 1..340: note = protein_7821b5d
  REGION 6..148: note = RuvC_domain
  SITE 9: note = RuvC_P1
  SITE 52: note = RuvC_P2
  SITE 87: note = RuvC_P3
  SITE 89: note = RuvC_P4
  SITE 92: note = RuvC_P5
  REGION 211..297: note = Tnp_domain
  SITE 219: note = Tnp_P1
  SITE 249: note = Tnp_P2
  SITE 257: note = Tnp_P3
  SITE 258: note = Tnp_P4
  SITE 270: note = Tnp_P5
MKITTLGIDLAKSVFQLHGVDAAGAVVLQKKLRRGSVLDFLGKLEPCLIGMEACATSHHWARESAALGHDVRLIPPAYVKPYVKRQKNDAADAEAICEAVSRPNMRFVPIKTEEQQSVLVLHRSRDLLMRQRTMMLNAIRAHLAEFGTITAQGPSKVVELVAKLGSEETFAVPEIARVGLLALAAQLDSLATAIRDIERQLLAWHRQNAASQRLETIPGVGIITATALAASVPDPSVFKSGRQFAAFLGLVPRQNSSGGKDRLGHISKMGNGYLRRLLVVGATSVTRRAETNDTRTGAWVRSLLGRKPTRLVTVAIANKTARTAWAMLARNEDYRASAMA

SEQ ID NO: 18274 - protein, 349 aa, unidentified
  source 1..349: note = protein_aa786fd
  REGION 6..147: note = RuvC_domain
  SITE 9: note = RuvC_P1
  SITE 52: note = RuvC_P2
  SITE 87: note = RuvC_P3
  SITE 89: note = RuvC_P4
  SITE 92: note = RuvC_P5
  REGION 211..299: note = Tnp_domain
  SITE 219: note = Tnp_P1
  SITE 249: note = Tnp_P2
  SITE 257: note = Tnp_P3
  SITE 258: note = Tnp_P4
  SITE 270: note = Tnp_P5
MNRTTYGLDIAKNVMQLHWVDTETGEIGRKKLARAKLSEFFAQLQPVRVVMEACGSAHHWARVLGALGHEVELLPARHVRAFVRSNKDDAADARAIWLAAQQSDIRRVPLKSVAQQAALSLHRTRQHWVSVRTATLNALRGTLYEFGVVLPGGKQAGLKVLGAHRAQIDAMMPATMQRLIDGQLATLKDIQRRIDELEAEIGVQHKQLDKAAKLREVPGIGLLGATALAATLGDGSGWKSGREFSASLGLVPAHSGTGGKARVGHLSKRGDPYLRTLLIHGARSVIRHAKAKPKWLEQLLARRPMNVAVVALANKMARTAWALVAHGREYQREWKSTPPKGCAAQAAAA

SEQ ID NO: 18275 - protein, 401 aa, unidentified
  source 1..401: note = protein_ab19203
  REGION 14..168: note = RuvC_domain
  SITE 17: note = RuvC_P1
  SITE 65: note = RuvC_P2
  SITE 105: note = RuvC_P3
  SITE 107: note = RuvC_P4
  SITE 110: note = RuvC_P5
  REGION 276..359: note = Tnp_domain
  SITE 283: note = Tnp_P1
  SITE 312: note = Tnp_P2
  SITE 320: note = Tnp_P3
  SITE 321: note = Tnp_P4
  SITE 333: note = Tnp_P5
MQDTQQRDAVDVFVGVDVGKGHHHAVALDRNGKRLYNKALPNDEAKLRALIAELKTHGRLLFVVDQPSTIGALPVAVARAEGVLVAYLPGLAMRRIADLHAGEAKTDARDAAIIAEAARSMPHTLRSLRLADEQLAELTMLCGFDDDLAAQVTQTSNRIRGLLTQIHPALERVLGPRLDHPAVLELLERYPSPAALARTSEKTLANRLTKLAPRMGKGLAAEIVQALSEQAVTVPGTQAATIVMPRLAQQLAALRKQRDEVAAEVERLVLAHPLWPVLTSMPGVGVRTAARLLTEVAHKAFASAAHLAAYAGLAPVTRRSGSSIRGEHPSRRGNKVLKRALFLSAFAALRDPVSRAYYARKIQQGKRHNQALIALARRRCDVLFAMLRDGTIYQPKSAPNA

SEQ ID NO: 18276 - protein, 340 aa, unidentified
  source 1..340: note = protein_54b3c86
  REGION 7..149: note = RuvC_domain
  SITE 10: note = RuvC_P1
  SITE 53: note = RuvC_P2
  SITE 88: note = RuvC_P3
  SITE 90: note = RuvC_P4
  SITE 93: note = RuvC_P5
  REGION 211..297: note = Tnp_domain
  SITE 219: note = Tnp_P1
  SITE 249: note = Tnp_P2
  SITE 257: note = Tnp_P3
  SITE 258: note = Tnp_P4
  SITE 270: note = Tnp_P5
MSEVSIIGVDLAKRFFQVHGALPDGNVAFRKKLSRSQFMKFLAEQPPCLIAMEACATAHYWGREALGSGHEVRLIPPIYVKPFVKRQKNDAADAEAIVEAALRPTMRFVEVKSADQQSLGLLFRTRELLVRQRTQLINALRGHLAEYGIVVAIGVRNVKVFQQVLLDHGTRLPKTVLSISGVYFEQIAALTEKVTELEIALRRETARDGQATLLQTMPGIGPMSAAAIQAFAPPLENFARGRDFAAWLGLVPRQHSSGGKDRLGRISKMGQRDIRRLLIIGAMSIVNWASRKGSRDSWLMRLLESKPKMVVAVALANKMARRLWAMCVKKEVYEIPILVA

SEQ ID NO: 18277 - protein, 332 aa, unidentified
  source 1..332: note = protein_57e7a6e
  REGION 10..152: note = RuvC_domain
  SITE 13: note = RuvC_P1
  SITE 57: note = RuvC_P2
  SITE 97: note = RuvC_P3
  SITE 99: note = RuvC_P4
  SITE 102: note = RuvC_P5
  REGION 193..278: note = Tnp_domain
  SITE 201: note = Tnp_P1
  SITE 230: note = Tnp_P2
  SITE 238: note = Tnp_P3
  SITE 239: note = Tnp_P4
  SITE 250: note = Tnp_P5
MMAQNDLVVAGIDVAKDKVDVCIRSLWQRQAFPSSPEGRRALIRWLRKQKVGKAAMEASGGYEREWAKALREAGIEALVVDPKRVRNFARSAGRLAKNDPIDAQMIAWFAETFIESRGQAYDAAREKLVQIVSARQALIDVQTSLQNRREHSTPDVVEKMQDRLLKQIAAEIAKLEAAIAALIKTTPRFAELAEIIESVPGLAQGTSAGLIGAMPELGQISSKVAAALLGAAPYDDDSGKRRGTRHIQGGRRKVRNVFYMACMGAATRHNPVLKAFYDRLIAKGKEPKVALTACMRKLIVILNVMIARGEKWDPNRYQASDSARLLPSACTA

SEQ ID NO: 18278 - protein, 338 aa, unidentified
  source 1..338: note = protein_f45b2c8
  REGION 4..157: note = RuvC_domain
  SITE 7: note = RuvC_P1
  SITE 55: note = RuvC_P2
  SITE 96: note = RuvC_P3
  SITE 98: note = RuvC_P4
  SITE 101: note = RuvC_P5
  REGION 219..304: note = Tnp_domain
  SITE 227: note = Tnp_P1
  SITE 257: note = Tnp_P2
  SITE 265: note = Tnp_P3
  SITE 266: note = Tnp_P4
  SITE 277: note = Tnp_P5
MYVIGIDPHKGSHTAAVLDVGEQLVGELRVVADRGQRDRLLRFAEPFTPRTWAIEAAGGLGALLAQQLVAVGETVLDVPPTLSARVRLLDVGRTDKTDPHDARSAAIVALRHSRLRTVTAVDHSAVLRLLADRHRDLVAQRTRVICRLHALLCLLIPGGLPRLLSAQRAANALRGLRPLTLVDIERKRMAGEMLTDVRRLDTQLAAIRTRIADAVESSGTTVTEVYGVGPVAAALIVGHTGDVCRFPTAGHYARYNGSAPIEASSGPRIRHRLNPRGNRRLNHALHVAAITQVSHDTPGRAYFDRKLAEGKSRKEALRALKRRISDAVYRQLLIDSRR

SEQ ID NO: 18279 - protein, 403 aa, unidentified
  source 1..403: note = protein_da60a3e
  REGION 4..160: note = RuvC_domain
  SITE 7: note = RuvC_P1
  SITE 57: note = RuvC_P2
  SITE 97: note = RuvC_P3
  SITE 99: note = RuvC_P4
  SITE 102: note = RuvC_P5
  REGION 274..361: note = Tnp_domain
  SITE 282: note = Tnp_P1
  SITE 312: note = Tnp_P2
  SITE 320: note = Tnp_P3
  SITE 321: note = Tnp_P4
  SITE 334: note = Tnp_P5
MNAVGIDISKGKSMVAIARPFGEIVSKPFEVRHTSDDIAALTKYLHTLDGDTRIVMEHTGRYYEPMARQLAGADFFVSAVNPKLIKDYGNNSLRKVKTDKADALKIARYALDNWQDLCQYTSMDTSRNQLKTLNQQFAFYTKQKTASKNNLIALLDMTYPGVNTLFDSPARDDGSQKWVDFAESFWHVDCVRSIGLTAFTERYRKWCKRHGYNFQPHKPQEIYCAAKNLIAVFPKDAMTKSLIKQAILQLNTVSQTVEHLRAEMNHLASQLPEYPVVMAMYGVGESLGPQLMAEIGDISRFHRRENLTAFAGVDPGANQSGTYEAQSVRTSKRGSPRLRKTLFQIMDCLVRTKPQNDAVYRFIDKKRSEGKPYFVYMTAGANKFLRIYYGRVKEYLASITETK

SEQ ID NO: 18280 - protein, 400 aa, unidentified
  source 1..400: note = protein_a5b9464
  REGION 10..158: note = RuvC_domain
  SITE 13: note = RuvC_P1
  SITE 62: note = RuvC_P2
  SITE 98: note = RuvC_P3
  SITE 100: note = RuvC_P4
  SITE 103: note = RuvC_P5
  REGION 228..311: note = Tnp_domain
  SITE 233: note = Tnp_P1
  SITE 264: note = Tnp_P2
  SITE 272: note = Tnp_P3
  SITE 273: note = Tnp_P4
  SITE 284: note = Tnp_P5
MTTRLEKIFAGVDTHADTHHAAVIDSNGKQLGDAQFPTTPAGYAALAAFLTAFGMAVRVGVEGTGSYGAGLARHLGAAGFVVVEVLRPSRQLRRTRGKSDPLDAYAAARAALAQEEHATPKAGAGQVEAIRYLLVARRSAVKARTAAIVQIKSLLVTAPDLIRERYRSLGDKALIAALARLRLSTDPLLAAVGQGLRSLARRHQLLGEEVSDLDQALAALTAGANPGLVAAKGIGTITAAQLLVTAGDNPDRLRSEASFAALAGVSPIPASSGKTNRHRLNRGGDRQANAALHRIALVRMSYEPRTRDYVARKRALGHSNKEIIRCLKRALAREVFTLLTTRVEVPVIDDLRPLRQARKLSLTTVAEHFNVWPATISKLELGKHRDDDLANSYREWLTAA

SEQ ID NO: 18281 - protein, 344 aa, unidentified
  source 1..344: note = protein_d5f781e
  REGION 6..147: note = RuvC_domain
  SITE 9: note = RuvC_P1
  SITE 52: note = RuvC_P2
  SITE 87: note = RuvC_P3
  SITE 89: note = RuvC_P4
  SITE 92: note = RuvC_P5
  REGION 212..300: note = Tnp_domain
  SITE 220: note = Tnp_P1
  SITE 250: note = Tnp_P2
  SITE 258: note = Tnp_P3
  SITE 259: note = Tnp_P4
  SITE 271: note = Tnp_P5
MQITTIGLDLAKNVFQVHGVDATGKVVVTRQLRRSHVIEFFKKQPACLVGMEACATAHHWTRELSALGHTVKLMPASYVKAYVRRQKNDAADAAAICEAVTRPSMRFVPMKTVEQQSALMLHRSCDLLVRQRTQLISALRAHLAEVGLVAATGVDGLKTLLTIVHKTDEPGTLPVAMQDALRALVTQLASLQEQIDALEKSIHAQHRASEASRRLESIPGIGVIGATAIAATVTDPTAFKSGREFAAWIGLVPRQSSTGGKQKLGGISKQGDRYLRRLLVVGATAVIRHARAHPEKHPWLMTLLAKMPAKKAAVALANKTARIAWAILAKGGVYRSPPVLAAAA

SEQ ID NO: 18282 - protein, 343 aa, unidentified
  source 1..343: note = protein_b27a196
  REGION 7..149: note = RuvC_domain
  SITE 10: note = RuvC_P1
  SITE 53: note = RuvC_P2
  SITE 88: note = RuvC_P3
  SITE 90: note = RuvC_P4
  SITE 93: note = RuvC_P5
  REGION 212..303: note = Tnp_domain
  SITE 220: note = Tnp_P1
  SITE 250: note = Tnp_P2
  SITE 258: note = Tnp_P3
  SITE 259: note = Tnp_P4
  SITE 271: note = Tnp_P5
MQAVTTIGLDIAKSVFQIHGVDAAGNVIVRRQLKRRYVLPFFQKLPPCLVGIEACASSHHWSRELQALGHTVRLMPPAYVKPYVKRHKNDAADAEAICEAVTRANMRFVAIKTPEQQSCLMLHRTRHLFIRQQTSVINAIRAHLAEFGIVAPVGRNGVEQLLDVVADASDRRLPEVARACLLALGAQLRTLKAQILNFDQQIMAWHRSNEASKRLDDIPGVGPTLATALVASVADPKAFRSGRNFSAWIGLVPKQHSSGGKDKLGSISKQGDRYLRSLFTAGALAVIRYAKIHGTRHRPWLTALLARRPTKVAAIALANKIARMAWAMMARGDRYKEPVALAA

SEQ ID NO: 18283 - protein, 320 aa, unidentified
  source 1..320: note = protein_e59c04b
  REGION 10..151: note = RuvC_domain
  SITE 13: note = RuvC_P1
  SITE 57: note = RuvC_P2
  SITE 97: note = RuvC_P3
  SITE 99: note = RuvC_P4
  SITE 102: note = RuvC_P5
  REGION 193..278: note = Tnp_domain
  SITE 201: note = Tnp_P1
  SITE 230: note = Tnp_P2
  SITE 238: note = Tnp_P3
  SITE 239: note = Tnp_P4
  SITE 250: note = Tnp_P5
MMAQDDLVVVGIDVAKNKVDACIRALCVRRTFPSTAQGRRKLVCWLRKHKASAAVMEASGGYEREWAKVLREKAVEVRIVDPKRVRNFARSAGRLAKNDVIDAEMIAWFAGTFAEASSQGHDAAREKLAHIVNARCALIDLQIKLQNREEHPAPEPVQKMQARLLRQLAREIAELEAAIAAMIKATAHFAELAEIIESVPGLGRITSAGLIAAMPELGQVSNQAISALLGVAPYDDDSGKRRGERQIKGGRRKMRNLFYMACLGAATRHNAVLKAFYDRLIAKGKERKVALVACMRKLIVILNTMIARRQKWDASRYAVS

SEQ ID NO: 18284 - protein, 382 aa, unidentified
  source 1..382: note = protein_9caa4d5
  REGION 8..163: note = RuvC_domain
  SITE 11: note = RuvC_P1
  SITE 67: note = RuvC_P2
  SITE 108: note = RuvC_P3
  SITE 110: note = RuvC_P4
  SITE 113: note = RuvC_P5
  REGION 209..297: note = Tnp_domain
  SITE 217: note = Tnp_P1
  SITE 247: note = Tnp_P2
  SITE 255: note = Tnp_P3
  SITE 256: note = Tnp_P4
  SITE 269: note = Tnp_P5
MNYFKQNLGLDVDSAELKASFQKMSDEQEMKIVASRTFKNTVKGFEDMQVWVEKKRIKDLPIHVTMEATGVYYENVAYFFHEQKNYVVHVVLPNMSSAYMKSLNSKSKTDKIDAKNLAQMGLERKLSIWNPGSDQMRSIKKLVRERLRFQKLKTMVSNQLHAENSSHQPNLRVVIRSEQTITFIADQIVEIEKELKATVKADEQLEQRISNVCTAPGLAFITVIGLVAETDGFALFKNRKQLVSYAGYDVIQNESGKSILGKTRISKKGNSYIRQMLFMPGMSATTYNEQYKKLHARITDRTKIKMKGNVAVQRKLLLLVYTLYKNNTTFDALYQQKVEDELAKRRNQKKQLAEQKRIKELNELLNNPNKVVDHVQDMAYSG

SEQ ID NO: 18285 - protein, 405 aa, unidentified
  source 1..405: note = protein_1dc83ab
  REGION 4..157: note = RuvC_domain
  SITE 7: note = RuvC_P1
  SITE 59: note = RuvC_P2
  SITE 94: note = RuvC_P3
  SITE 96: note = RuvC_P4
  SITE 99: note = RuvC_P5
  REGION 284..371: note = Tnp_domain
  SITE 292: note = Tnp_P1
  SITE 323: note = Tnp_P2
  SITE 331: note = Tnp_P3
  SITE 332: note = Tnp_P4
  SITE 344: note = Tnp_P5
MLGVGIDWAEDFHLVALGRPGDGVIDIARVEHRPKAIDVLIAKIAELEPDPAEVRVVIESRHGLLVERLVDAGYVVVPVNPDLVARRRGPAKKKDDTEDARIACLLALDRFERLRPLVPHGEIAGELRAIARDDERAARDERRLLNRLRQDLITTFPAALDIGGSDLGGPTFLRMLERWPTTDALASASRDDLEGFARSCRHSRPTSFADKVQSALGGDHFVPRDYLVRAKADTIRLAATQLLAIEAQRRAWERRMGELLLGAPRRGRDKQPREDERGQCFPGGEIYLSFPGLGDRLAARVAAEIGDHPEQFCSPNALQCYAGKAPVTRRSGKSELVVACRLAHNGFLGNAVQMWAFCSLRGSGWAREFYDGQRARGKGHHAALRALGNRWLEVPLTEAAPWVEP

SEQ ID NO: 18286 - protein, 345 aa, unidentified
  source 1..345: note = protein_e8963f2
  REGION 9..163: note = RuvC_domain
  SITE 12: note = RuvC_P1
  SITE 68: note = RuvC_P2
  SITE 108: note = RuvC_P3
  SITE 110: note = RuvC_P4
  SITE 113: note = RuvC_P5
  REGION 209..296: note = Tnp_domain
  SITE 217: note = Tnp_P1
  SITE 247: note = Tnp_P2
  SITE 255: note = Tnp_P3
  SITE 256: note = Tnp_P4
  SITE 269: note = Tnp_P5
MKRVLKQVAGIDVAQKELVVTLGRMFDDFTIELFSHRVFKNHDSGIKSLVDWVNKLADYEIPVRYVMEATGVYHQKFAYHLVNNGYEVSIVLPNKISNYIRTIELKTITDKSCSQAIAQFGLERKLDKWLKPKSIYRELQQLTRERDQIVQERSIIKNQLHAENVEANPNQRSLDRMSSRILFLNSQEKEIKEDIATLVKMNPDIKSTIERIKTIPGVGELTAVIVLAETNGFELIRNKSQLSSYAGLDVKEKQSGTSVKGKARISKKGNRNLRKAVHLPALTAVKWDDNFRNVYARLVSKHGIKMKVLVAVQRKILELIYILFKNETVYDKQYITKNSVQTQMV

SEQ ID NO: 18287 - protein, 320 aa, unidentified
  source 1..320: note = protein_897efd6
  REGION 5..154: note = RuvC_domain
  SITE 8: note = RuvC_P1
  SITE 52: note = RuvC_P2
  SITE 92: note = RuvC_P3
  SITE 94: note = RuvC_P4
  SITE 97: note = RuvC_P5
  REGION 188..272: note = Tnp_domain
  SITE 196: note = Tnp_P1
  SITE 225: note = Tnp_P2
  SITE 233: note = Tnp_P3
  SITE 234: note = Tnp_P4
  SITE 245: note = Tnp_P5
MLSLCGIDVSKDRLDVIVLPEEQRSSVSNNRAGWADLVERLRGCSIAAIGLEASGGYERGVMRALLAGGLPVRQVNPFKLRQFARASGVLAKNDPLDARMIASFVGIMPTRPAQRPTPAAELVAEMLAVRRQLSSEKVAAENASRLLEDALLRRLSRRRIGRLAADIELLDKRLVEIVATDAALAHRYRLLTSMPGVGPVLACTLIVLLPELGGMTRKQVAALVGVAPYAFESGTLKGRRCIWGGRANVRQVLYMAAMSASNWNPGLKAFHDRLEAAGKKPKVTIVAVMRKMITTLNAMVRDDVVWADRHSGRNSVTTAR

SEQ ID NO: 18288 - protein, 338 aa, unidentified
  source 1..338: note = protein_7335199
  REGION 6..152: note = RuvC_domain
  SITE 9: note = RuvC_P1
  SITE 53: note = RuvC_P2
  SITE 91: note = RuvC_P3
  SITE 93: note = RuvC_P4
  SITE 96: note = RuvC_P5
  REGION 211..297: note = Tnp_domain
  SITE 219: note = Tnp_P1
  SITE 249: note = Tnp_P2
  SITE 257: note = Tnp_P3
  SITE 258: note = Tnp_P4
  SITE 270: note = Tnp_P5
MSIVYVGIDLAKNVFAVHGVDEHGKPALVRPAVARARLHELIAALPPCTVAMEACTGAHHWARLFAAHGHSVRLIAPKFVTPYRMSGARGKNDAADAAAICEAVQRPSMRFVPVKSVEQQARLMVHRARQGFVEARTGCINRLRGLLSELGIVLPLKAATVRREAGAALEDLPGWANTVVGDLLSELHRLDERIAQYDHHISVIARDDERARQLMRLSGVGPTTATAVVAMIGNGHEFRCGRQFAAWLGLTPGQYSSGGKTRLGRITKAGDAYLRTLLILGARAVLAAAKNKTDGLSRWAIALEARRGYWKAVVAIAAKNARMAWAVLSRGEQFKLAA

SEQ ID NO: 18289 - protein, 343 aa, unidentified
  source 1..343: note = protein_9122e0d
  REGION 7..149: note = RuvC_domain
  SITE 10: note = RuvC_P1
  SITE 53: note = RuvC_P2
  SITE 88: note = RuvC_P3
  SITE 90: note = RuvC_P4
  SITE 93: note = RuvC_P5
  REGION 212..298: note = Tnp_domain
  SITE 220: note = Tnp_P1
  SITE 250: note = Tnp_P2
  SITE 258: note = Tnp_P3
  SITE 259: note = Tnp_P4
  SITE 271: note = Tnp_P5
MQEITTIGLDIAKSVFQVHGIDAFGAVIVRRQLRRSQVLPFFRKLSGCVIGIEACATAHHWARELEKVGHEVRLMPPRYVKPYVKRNKNDAADAEAICEAVQRPTMRFVPIKSPEQQSVLMLHRTRQLFIRQRTALINAIRAHLAEFGIVAGIGRHGVEKLLDLITRGEDERIPPAAHACLMALAAQLAMVKRQILEADRRLLAWRRTSKTSKRLEAIPGVGPLIATALVASIPDPNVFRSGRDLSAWIGLVPKQSSTGGKERLGSITKAGNRYLRSLLVVGALSVIRRAKQLGYTRHPWLVRLMERRSVKIAAIALANKIARIAWAMMAHNESYRTPLPASA

SEQ ID NO: 18290 - protein, 340 aa, unidentified
  source 1..340: note = protein_0204134
  REGION 7..147: note = RuvC_domain
  SITE 10: note = RuvC_P1
  SITE 53: note = RuvC_P2
  SITE 88: note = RuvC_P3
  SITE 90: note = RuvC_P4
  SITE 93: note = RuvC_P5
  REGION 210..300: note = Tnp_domain
  SITE 218: note = Tnp_P1
  SITE 248: note = Tnp_P2
  SITE 256: note = Tnp_P3
  SITE 257: note = Tnp_P4
  SITE 269: note = Tnp_P5
MLEVNTIGLDLAKNVFQAHGADASGTVLFRKKLRRDYVLRFLADQPACTVAMEACAGGHYWAREIAKLGHEVRLIAPGYVKPFVKRQKNDAADAEAICEAQRPTMRFVTAKSEEQQAAAMVFRVRDLVVRQRTQTINAIRGHLAEFGLVSAQGLFHVAKLVAAIENKDAAIPEAARPILSLLVAQLRSLDERVAVLDREIARRAREDAEARRLMTIPGIGPITATALAALAPSASTFKRGRDFAAWLGLTPLQRSSGGKQKLGETSRMGERTLRRLLIIGASATVRWAMRRGSAADPWLSRMLERKPPMLVIVALANKTARIVWALMANGGTYRTPAIAG

SEQ ID NO: 18291 - protein, 328 aa, unidentified
  source 1..328: note = protein_93f3acd
  REGION 4..155: note = RuvC_domain
  SITE 7: note = RuvC_P1
  SITE 60: note = RuvC_P2
  SITE 100: note = RuvC_P3
  SITE 102: note = RuvC_P4
  SITE 105: note = RuvC_P5
  REGION 200..286: note = Tnp_domain
  SITE 208: note = Tnp_P1
  SITE 237: note = Tnp_P2
  SITE 245: note = Tnp_P3
  SITE 246: note = Tnp_P4
  SITE 259: note = Tnp_P5
MFFIGIDVSKAKLDCSLLVDVASGKRRAKTVANSKTGVSDLLTWCAKQHAANHELHAILEGTGVYHEQAALALVDAGVTVSIVNPAQVKDFGRSLGVRTKNDGVDSFVLARYGALLKPRAWTPPSLEARTLQALLARREAIAQDLQRERNRQEKAEATETPFSIQESLLDSIVFLEKQLAKLQQDIDDHIDKHPTLKADRELLLTIPAVGPQVGNHLLAVMHNHRFQSAEQLAAYLGLVPVERQSGTSILGRPRLSKAGPARIRAVLYMAAIVGTRHNLHIKALYQRLQQRGKSKMSALGASMRKLVHLCFGVLKTRQPYQPDYVPQR

SEQ ID NO: 18292 - protein, 323 aa, unidentified
  source 1..323: note = protein_1b4da17
  REGION 8..150: note = RuvC_domain
  SITE 11: note = RuvC_P1
  SITE 52: note = RuvC_P2
  SITE 92: note = RuvC_P3
  SITE 94: note = RuvC_P4
  SITE 97: note = RuvC_P5
  REGION 191..278: note = Tnp_domain
  SITE 199: note = Tnp_P1
  SITE 229: note = Tnp_P2
  SITE 237: note = Tnp_P3
  SITE 238: note = Tnp_P4
  SITE 251: note = Tnp_P5
MNKYTETFGIDISKDVFDCHGSNQGHLQFKNTEKGFIKFLKILNDNTLVVMEATGYYHYRLAQFLYKKRHVVSVVNPLSVKRFIQMKLAKVKTDKSDAKAICEYGIINEVPLYNALTEVQSECLQLFRLLDNFIKKRTATKNKLHGEEVLGIPSNWVYRSLKRDRKHLDKEILGIQTKLLSLVRQDQQAQLTLLQSIPGIGIKTALFLIVITDGFKKFETASQLCSYVGITPTIRESGSSVRGRSRISKVGNRKLRTLLFLCSFNACKHNKGCRDIYERIINKGKSKKLALIAVSNKLLKQAFAIAKSGNPYDASFVSVLKIK

SEQ ID NO: 18293 - protein, 402 aa, unidentified
  source 1..402: note = protein_f1eea47
  REGION 4..161: note = RuvC_domain
  SITE 7: note = RuvC_P1
  SITE 57: note = RuvC_P2
  SITE 98: note = RuvC_P3
  SITE 100: note = RuvC_P4
  SITE 103: note = RuvC_P5
  REGION 275..362: note = Tnp_domain
  SITE 283: note = Tnp_P1
  SITE 313: note = Tnp_P2
  SITE 321: note = Tnp_P3
  SITE 322: note = Tnp_P4
  SITE 335: note = Tnp_P5
MNAVGIDVSKGKSTVTIRQPGNVVVLPPCDIRHTRSGIDSLIDQIKALDGETKVCMEHTGRYYEPMALWLSSAGISVSAVNPVLVKNFDTDESLRRPKTDKADSCKPARYTLDKWDSLPQYGLMDKTRNQLKTMNRQFAFYMDEKTAMKNNLISLLDQTFPGANDFFPSPARPDGSQKWVDFVYTYWHVDCVRSKSPDMFTEHYRNWCSRNNYNFSADKAGYIYETAKDLIAVFPKNPDTKLLVRQAVRLLDTASRTVETLRIQMNDTASKLPEYPVVMAMNGVGPSLGPQLMAEIGDVTRFVKKSAITAFAGVDPGVNESGSYRQQSVPATKKGSPHLRRTLFQVMDGLIKRAPLDDPVYAFMAKKRSEGKPYYVYMTAGANKFLKIYYGRVKEYLASLPQ

SEQ ID NO: 18294 - protein, 348 aa, unidentified
  source 1..348: note = protein_2496618
  REGION 7..150: note = RuvC_domain
  SITE 10: note = RuvC_P1
  SITE 53: note = RuvC_P2
  SITE 89: note = RuvC_P3
  SITE 91: note = RuvC_P4
  SITE 94: note = RuvC_P5
  REGION 213..302: note = Tnp_domain
  SITE 221: note = Tnp_P1
  SITE 251: note = Tnp_P2
  SITE 259: note = Tnp_P3
  SITE 260: note = Tnp_P4
  SITE 272: note = Tnp_P5
MEKVSTIGLDIAKSVFQVEGTNEAGEVSVRRQLRRPHLLKFFAKLPPCLVGMEACASAHHWARELTALGHEVRLMPPRRVKAYVKWGAKNDQADAAACNEAVTRPSMQFVPIKSIEQQAVLMLHRARSLLDKQCTQLSNAIRGHLAEFGIVAAKGNSGFASLLAKIGKDNDPQIPPMIRPIVVVLAEQWRSTCEQMDKLERQIIAWHKSNSESQRLATIPQFGPIISSAVVASMGNASRFKSGRAYGASLGLVPRQDSTGGKPHLGPITKAGDHYIRRLLVNAAAGMVRRVRANPDLMPWFAKLLARKPAKEAIVALANKLARIAWAILAKGGVYRASMTTTVSVEMP

SEQ ID NO: 18295 - protein, 336 aa, unidentified
  source 1..336: note = protein_34f8980
  REGION 4..155: note = RuvC_domain
  SITE 7: note = RuvC_P1
  SITE 60: note = RuvC_P2
  SITE 100: note = RuvC_P3
  SITE 102: note = RuvC_P4
  SITE 105: note = RuvC_P5
  REGION 200..286: note = Tnp_domain
  SITE 208: note = Tnp_P1
  SITE 237: note = Tnp_P2
  SITE 245: note = Tnp_P3
  SITE 246: note = Tnp_P4
  SITE 259: note = Tnp_P5
MFQLGIDVGKKTLDLCLLREGVKGRVKTRKLKNDFNAANAVINWLYKQHCEPADVHIIMEATGVYHESLAYGLYKAGARVSLANPYRSREFARGMDILTKNDQVDAYMLACYGALKAPEPWIPPPESVRYLSALLRRRDALVTDSSREKNRLEKCRATDVPPVVAESIENVLLNLSAELEHLEALILTHLDQHPELKKDYDLLTSIKSVGVQLGLNMLVILRSHRFETAEQAAAFLGVVPVEKSSGTSVRGRSRLSKIGPPEIRAKLYLASLCGLRFNPVMKAMYKRLCQRGKAKMCAIGALMRKLVHWCYGVLKTQKPFDAEYLSLDARSACKAA

SEQ ID NO: 18296 - protein, 392 aa, unidentified
  source 1..392: note = protein_6b7dfc1
  REGION 5..164: note = RuvC_domain
  SITE 8: note = RuvC_P1
  SITE 61: note = RuvC_P2
  SITE 102: note = RuvC_P3
  SITE 104: note = RuvC_P4
  SITE 107: note = RuvC_P5
  REGION 267..354: note = Tnp_domain
  SITE 275: note = Tnp_P1
  SITE 305: note = Tnp_P2
  SITE 313: note = Tnp_P3
  SITE 314: note = Tnp_P4
  SITE 327: note = Tnp_P5
MVVSVGVDVSKDKYDCFILSSEGEVLADVFTIPNNLDGFRFLLRRIRDCTHAQDKIKVGLEATGHYSYNLLGFLLDNGLPTYVLNPLRTNLYRKSLSLRKTKTDRVDARTITAMLLSDAGLKPYTNTAYHNEELKSLTRYRFNRVKERAKLKSSIARLVCILFPELEKLVPSLHIASVYALLEEFPGAKQIAAAYLTRLKALLETASKGRYKRDMALEIRDAARNSIGSWMPAKSLELQHTIRLIRELDVEIAEIEEQIQSIMDELHSPITTIPGVGFCMAAMILAEVGDFTRFDSSDKLLAYAGMSPSTYQSGQLKNCYPHMEKRGSRYLRYALYNAAKYVCHWDPTFAAYLAKKRAEGKHYNVALSHAAKKLVRLIFAMEKSRQPYCSAA

SEQ ID NO: 18297 - protein, 399 aa, unidentified
  source 1..399: note = protein_2f7d692
  REGION 4..161: note = RuvC_domain
  SITE 7: note = RuvC_P1
  SITE 60: note = RuvC_P2
  SITE 100: note = RuvC_P3
  SITE 102: note = RuvC_P4
  SITE 105: note = RuvC_P5
  REGION 266..353: note = Tnp_domain
  SITE 274: note = Tnp_P1
  SITE 304: note = Tnp_P2
  SITE 312: note = Tnp_P3
  SITE 313: note = Tnp_P4
  SITE 326: note = Tnp_P5
MFYCGIDIAKRNHEASVIDAEGKPLLDSITITNTQEGCEKLFSLFERLNICKDSIIIGMEATGHYWLSVYEHLNEQGYDVRVINPIQSDAFRKMYIRQTKNDSKDSFIIAQVMRFGQYSEITLSDENTVAMRQLTRFRMALVDNCGDCKRRIIALLDQVFPEYADLFSDTFGTTSKELLLNYPTPDDMLAVSTRKLTTFLNKTSHGRFGEEKAKEIRSAASNSFGVGFAKNAFAFQIKQLVEQLVFLEAQIEELDEQIAHLLKQTNQVITTIPGIGDTLGAIIISEIGDINRFDAPNKLVAFAGLDVKVVQSGDFTGTKQKISKRGSPYLRRAIWLAANRAAFCDPILSEYYQSLKARGKHHLTAVGAVSRKMCNIIFTILRENRPYEATPPKKGNVES

SEQ ID NO: 18298 - protein, 412 aa, unidentified
  source 1..412: note = protein_7f4c66e
  REGION 4..160: note = RuvC_domain
  SITE 7: note = RuvC_P1
  SITE 57: note = RuvC_P2
  SITE 97: note = RuvC_P3
  SITE 99: note = RuvC_P4
  SITE 102: note = RuvC_P5
  REGION 274..361: note = Tnp_domain
  SITE 282: note = Tnp_P1
  SITE 312: note = Tnp_P2
  SITE 320: note = Tnp_P3
  SITE 321: note = Tnp_P4
  SITE 334: note = Tnp_P5
MNAVGIDVSKGKSMVSVIRPFGELVVKPYEVRHTTSELSDLANSLKSLEGETRVILEHTGRYYEPVAQILHDAGIFVCAVNPLLIKEYGNNSLRKVKTDKADSLKIARYGLDNWVDLREHTSMDTIRYQLKTMNRQYGLYTKNKVAFKNNLIALLDQTYPGVNALFDSPVRADGSQKWVDFAASFWHVDCVRSMSQTAFTERYRKWCKRHGYNFNTAKAAEIYAESKEQIAMLPKNSLSEVMVQEALTQLNTVSKTVEVFRAEMNRLAEQLPEYDVVMNLYGVGNSLGPQLMAEIGDVRRFAHKGSLTAFAGVDPGANQSGTYEATSTRSSKRGSPELRKTLFVVMTVLLQKAPPDDPVFQFLDKKRVEGKPYYVYMTAGCNKFLRIYYGRVKEYLDTMNEPVDLDSTGLSR

SEQ ID NO: 18299 - protein, 356 aa, unidentified
  source 1..356: note = protein_a93d83f
  REGION 4..162: note = RuvC_domain
  SITE 7: note = RuvC_P1
  SITE 60: note = RuvC_P2
  SITE 101: note = RuvC_P3
  SITE 103: note = RuvC_P4
  SITE 106: note = RuvC_P5
  REGION 268..326: note = Tnp_domain
  SITE 276: note = Tnp_P1
  SITE 306: note = Tnp_P2
  SITE 314: note = Tnp_P3
  SITE 315: note = Tnp_P4
MIYAGVDIAKTDHVIGAVDERGAEVCRPLPFKNTEAGLERAVAWLEGLAGSPSDVVVGMEATGRYWMACYSFLVARGYSVAVINPMQVKAVRKLKGLDKVKNDRVDAGLIAEALRIGRYDETRLATDEVASLRSLSRYLQSLRGMVAELKTQCVCLMDAHFPEYAGVFSDMFGAGSRAVLSKSPLPFELARRRADSLARDIAEASGRGGKSAGYAAKIKAAARSSIGVRLGQEAASFQIKSLIRQIEFADSECAKVEARVRALLDEVEPLVLTIPGVSYVTGAQIVSEIGDVSRFRSAPALVSYAGLNSSVSQSGKFDSGGGPAAHFAMPGKHSIFGSQAATFGQLTVLENLRFSP

SEQ ID NO: 18300 - protein, 263 aa, unidentified
  source 1..263: note = protein_5428281
  REGION 1..94: note = RuvC_domain
  SITE 34: note = RuvC_P3
  SITE 36: note = RuvC_P4
  SITE 39: note = RuvC_P5
  REGION 154..242: note = Tnp_domain
  SITE 162: note = Tnp_P1
  SITE 192: note = Tnp_P2
  SITE 200: note = Tnp_P3
  SITE 201: note = Tnp_P4
  SITE 213: note = Tnp_P5
MSQWLFSGMAEAGLPVVCIETRHTKAFLKAQVNKSDRNDARGIAQMMRVQLFRPVHVKTLTSQKHRALLTARKLLQEKFIAIENDIRGLLRNFGLKVGVVGVLKFDQRIRELVEGLPDLVEIMEPLLASRKQLREAFMALHRRLLAIVRDDAVCRRLMTIPGVGPVVSLAFRSTIDSPARFTSSKAVGPALGLTPVLHQSGESHRLGRISLCGDEMMRHLLYEAAQVMLTRAQTWSWLKAWAMSIAKRRGQQRRLSRSPADWR

SEQ ID NO: 18301 - protein, 347 aa, unidentified
  source 1..347: note = protein_7293972
  REGION 7..147: note = RuvC_domain
  SITE 51: note = RuvC_P2
  SITE 86: note = RuvC_P3
  SITE 88: note = RuvC_P4
  SITE 91: note = RuvC_P5
  REGION 207..294: note = Tnp_domain
  SITE 215: note = Tnp_P1
  SITE 245: note = Tnp_P2
  SITE 253: note = Tnp_P3
  SITE 254: note = Tnp_P4
  SITE 266: note = Tnp_P5
MKRIAVDLAKSVYQVAESVRAGVVSQRRRLSREAFGRYIQEQAEAVEWLMEACGTAHYWGRLMQARGHRVMLLHPRYVRSYRRRNKTDRNDCEAMLEAARCAGLHPVPVKSHEQQQLQQLHGLRETWKKSRTQRINLLRGILREAGIEAPASTAAFLRRANELIERPELARLRGLLQIVLGEINLYQQCMADCERQLQQWHAEDEIVRRLDEVSGIGLLTASALKTAVGNPQRFASGRQLSAWLGLTPREFSSGNRRKLGHISCQGNVYVRTLLVHGSRAALLAAQRCLANTPERLTALQRWATQTAARIGHNKAAVALANKLVRICWAVWCHERRFSGNWQSVRPA

SEQ ID NO: 18302 - protein, 392 aa, unidentified
  source 1..392: note = protein_94d6184
  REGION 4..162: note = RuvC_domain
  SITE 7: note = RuvC_P1
  SITE 59: note = RuvC_P2
  SITE 99: note = RuvC_P3
  SITE 101: note = RuvC_P4
  SITE 104: note = RuvC_P5
  REGION 265..352: note = Tnp_domain
  SITE 273: note = Tnp_P1
  SITE 303: note = Tnp_P2
  SITE 311: note = Tnp_P3
  SITE 312: note = Tnp_P4
  SITE 325: note = Tnp_P5
MFYIGIDVAKLTHYAAVIDSNGEVIVKPFEFSNDIRGFEGFKTNCLKFLKPDNHLIGLEDTGHYGDNLVKWLLDQDYQVALINPITTSNMRKIQLKTSKNDRIDSVLIASMLTYKPIKYRLISKSNFGFREIKHLTRMHHNLKEQLNIFKNRLQSKIDILFPEYNELFNSKYGIHYLEILENMPSAHFIANTDIRTIRKIMDIKGKGIRCAFTAQQLKDKAKKSIGEDNPILEMEVRHLISLIKLMNSQITEIDSKIREFSQQLNSPILDIPGISHFSCMSIISEIGNINSFSSPSKLIRFAGVDPYDYQSGLYKANTTSINKLGSRYLRKTLYQIIIPVIRFNPVFQQYYTRKIQQGKSHRCACGHCVRKLLRIIYHLLFSNVIFDNSKMI

SEQ ID NO: 18303 - protein, 346 aa, unidentified
  source 1..346: note = protein_a66d9f5
  REGION 6..148: note = RuvC_domain
  SITE 9: note = RuvC_P1
  SITE 52: note = RuvC_P2
  SITE 87: note = RuvC_P3
  SITE 89: note = RuvC_P4
  SITE 92: note = RuvC_P5
  REGION 211..300: note = Tnp_domain
  SITE 219: note = Tnp_P1
  SITE 249: note = Tnp_P2
  SITE 257: note = Tnp_P3
  SITE 258: note = Tnp_P4
  SITE 270: note = Tnp_P5
MKITTTGIDLAKTIFQIHGVNEHGKVAARKKLKRAEMLPYFANLPPCLIGMEACGSAHHWARKLQAFGHTVKLMAPQFVKPYVKTNKNDMADAEAICEAVSRPNMRFVPIKNIEQQAILSVHRARQGFVKARTAQANQIRGLLSEFGIVIPQGIHAVMKQIPDILEDGENDLPGTFRHLIARLADNLKEMDRQVDELEKEINLWHRQNEASRKLADIPGIGPITASAIVATVGRAQEFENGRQLAAWMGLVPRQSSSGGKQNLLGISKRGDTYLRTLMIHGARSVIYHAENKAAPDSWLRKLMDRRNKNIAAVGLANKNARIIWAMLAHDRIFHPDYAATSITVAA

SEQ ID NO: 18304 - protein, 402 aa, unidentified
  source 1..402: note = protein_8dbf3de
  REGION 10..163: note = RuvC_domain
  SITE 13: note = RuvC_P1
  SITE 61: note = RuvC_P2
  SITE 102: note = RuvC_P3
  SITE 104: note = RuvC_P4
  SITE 107: note = RuvC_P5
  REGION 225..310: note = Tnp_domain
  SITE 233: note = Tnp_P1
  SITE 263: note = Tnp_P2
  SITE 271: note = Tnp_P3
  SITE 272: note = Tnp_P4
  SITE 283: note = Tnp_P5
MSKAIGRVVIGVDPHKLSATIEVIDQHEKKLGNGRFTTDHAGYTAMRAYASTWPDRVWAVEGANGAGRPLAQRLLEAGENVVDVPAKLAARVRLFDTGHNRKTDALDAHSVAVVGVRTKTLRVLHVDAELEAMRMLTDRRETLTRRRVQIVCRLQALLAELQPGQAKKDLTSGQAKAMLASVRPRDIAGKTRRRIAAEELADLIAIEVKMKKATAELKAMVQARESHLMDIHGIGPVVAARIHADVGDVARFADRNRFASWTGTAPLDASSGEQNRHRLSRAGNRRVNHMIHIAAVTQLRLDTEGRAYYRRKRAAGKKPQEALRCLKRRISDAIYKQLVADTIASPTSPGGHCGASQESSAVDLPPHIDTSDQPLPDPHLRRYAAQHSTRQSPEQSDLRNTG

SEQ ID NO: 18305 - protein, 340 aa, unidentified
  source 1..340: note = protein_630b70c
  REGION 7..148: note = RuvC_domain
  SITE 10: note = RuvC_P1
  SITE 53: note = RuvC_P2
  SITE 88: note = RuvC_P3
  SITE 90: note = RuvC_P4
  SITE 93: note = RuvC_P5
  REGION 211..294: note = Tnp_domain
  SITE 219: note = Tnp_P1
  SITE 249: note = Tnp_P2
  SITE 257: note = Tnp_P3
  SITE 258: note = Tnp_P4
  SITE 270: note = Tnp_P5
MTHATIIGLDLAKNVFHAHGAIHDGTPIFRKKLSRGQVLAFLSEQPHCIVAMEACATAHDWAREIGKIGHTTKLIPPQYVKPYVKRQKNDSADAEAITEAVSRRNMRFVEVKTEDQQVSAMAYRTRQMFIGQRTQTINALRSHLSEHGVIAPKSKAGVRKLVSMIEDDTVIISEKIREIARVYVDHIEKLTEQISDATEAMKAAAKTSQVAKRLQTVPGVGIQTAMAIEAFAPDMTCFNRGRDFSAWLGLVPRQHSTGGKSRLGKISKMGQADIRSQLIRGAMSVITAATRFGIEKGSWLGRLLARKPKLVAAVTLANRMARAIWAMLTHNENYRNPEAA

SEQ ID NO: 18306 - protein, 341 aa, unidentified
  source 1..341: note = protein_1f7f250
  REGION 7..148: note = RuvC_domain
  SITE 10: note = RuvC_P1
  SITE 53: note = RuvC_P2
  SITE 88: note = RuvC_P3
  SITE 90: note = RuvC_P4
  SITE 93: note = RuvC_P5
  REGION 212..297: note = Tnp_domain
  SITE 220: note = Tnp_P1
  SITE 250: note = Tnp_P2
  SITE 258: note = Tnp_P3
  SITE 259: note = Tnp_P4
  SITE 271: note = Tnp_P5
MKNTSIICIDLAKSKFQAGLFNKHNILKSNKQYSESALLKFVAMHPEAIICMEACATSNYLGRYFQNQGHKVLLIPAQVVAKYRLGNKNDANDVLAIYEAANRPKVKFVAVKTIEQQDLAALLKLRESYVKRRTQLSNRIRGVAMEYAVKMPQGLNQLRKNLPVHLSDMNNDLTHIARFVLSDLYEQLIKIDENIAKVTTQLIEFAKQIPSCQLLITLPGVGWIVASGLYSRFGDASMFRFGRDASASLGLVPAHNGTGGKNVNIGISKSGDRTLRSLVVHGARAVVSNIKEKQDPLSCWIRELLKRNHPNKATIAVANKIVRMACAMLKTSQPYQPQFAN

SEQ ID NO: 18307 - protein, 392 aa, unidentified
  source 1..392: note = protein_ab03241
  REGION 5..163: note = RuvC_domain
  SITE 8: note = RuvC_P1
  SITE 62: note = RuvC_P2
  SITE 102: note = RuvC_P3
  SITE 104: note = RuvC_P4
  SITE 107: note = RuvC_P5
  REGION 267..356: note = Tnp_domain
  SITE 275: note = Tnp_P1
  SITE 305: note = Tnp_P2
  SITE 313: note = Tnp_P3
  SITE 314: note = Tnp_P4
  SITE 327: note = Tnp_P5
MERVVGVDVAKGSSVIQAFLTRNVPYGKLESISHKEDGFDRLNELLAQLKAETASDPIVVLEATGHYHRGLTDYLERSGWTYFIVNPLQAKRAKGTHLRKVKTDAADAWHLAEMYYRGDVMPHRRWNETYTELQHMTRHHEFITGLFVQAKLNMRSLLDQVFPAYEKIFSNLYSVTSLKVLAHCLEGCVGGHGEVIKLNAGRSHSKRWVKEKVERLEEALIHWNEQPKSRSQTVILQGMVALLLSFSEQLSELEEQMTEIALRLPEVALVKSIPGIGDKLAAVIVAEIGDVRQFNDPKKLVAFAGLDPAIFSSGKFTATSLRITKRGSKRLRRALYLAVQCAIRKSANSRIQEYYKKKREEGKPYKVVVIACANKLLHHIYAILSKCQPYRT

SEQ ID NO: 18308 - protein, 396 aa, unidentified
  source 1..396: note = protein_2573ae7
  REGION 19..165: note = RuvC_domain
  SITE 22: note = RuvC_P1
  SITE 67: note = RuvC_P2
  SITE 106: note = RuvC_P3
  SITE 108: note = RuvC_P4
  SITE 111: note = RuvC_P5
  REGION 233..319: note = Tnp_domain
  SITE 241: note = Tnp_P1
  SITE 271: note = Tnp_P2
  SITE 279: note = Tnp_P3
  SITE 280: note = Tnp_P4
  SITE 292: note = Tnp_P5
MLSTNLQNPIDFKGQKFYVGLDVHKKSWAVTIRSLGIQVGHFTQPPGADTLLKYLQRNFPGGQYHSAYEAGFCGTGIHEQLCELGIKNIVVHAADIPATDKQKKNKTDLHDSRSIADYLEKGNLKGIHVFTRDQQELRSLFRLREAKVKEVTRSNNRLKSFLMYFDIQIPETVSKKEQLSLKALAWLNFELESAAGTIALQQHVEELKYQRKRLSEITKQLRRQIQEFHAKSYECLLSVPGIGAVTAMGLIAEIADFGRFEDPDEYCSLLGLCPWEDSSGNTIKTKGMQPRCNKHLRPLLVEASWTAIRRSPVLFAYYSKHAVKDSKKAIVKVARKLALAARGVVLKQQLYQEDYLQKKRAEQATQKEASKRRFSSGITEQHINKQPGNVLASQPG

SEQ ID NO: 18309 - protein, 340 aa, unidentified
  source 1..340: note = protein_7202f46
  REGION 6..148: note = RuvC_domain
  SITE 9: note = RuvC_P1
  SITE 52: note = RuvC_P2
  SITE 87: note = RuvC_P3
  SITE 89: note = RuvC_P4
  SITE 92: note = RuvC_P5
  REGION 211..299: note = Tnp_domain
  SITE 219: note = Tnp_P1
  SITE 249: note = Tnp_P2
  SITE 257: note = Tnp_P3
  SITE 258: note = Tnp_P4
  SITE 270: note = Tnp_P5
MNFTPVGVDIAKQVFQVHWVDPQTGEVISRQIRRAAFLEHFANRTPCLIGMEACGGAQHWARRLGEMGHQVRLMPGKAVKAFVIGNKNDVADARAIWNAVQQPCVRAVAVKTETQQAVLALHRMRQQLVRFRTMQINGLRGLLTEYGEVMAVGRAALNRAMAGVLARLSERLPAMLMDTLREQWQRLDVLDEQIAQIERRLSEWMKEERACRQIADIPGVGLLTATAAVATMGDPKTFSSGREFAAWLGLVPRQTGTGGKLRLHGISKRGDVYLRTLLIHGARSVLARTKEPGPWIEQLRRRRPNNVVTVALANKLARTIWALLAHDRKYEKAHVSVRPV

SEQ ID NO: 18310 - protein, 400 aa, unidentified
  source 1..400: note = protein_ba09502
  REGION 4..160: note = RuvC_domain
  SITE 7: note = RuvC_P1
  SITE 57: note = RuvC_P2
  SITE 97: note = RuvC_P3
  SITE 99: note = RuvC_P4
  SITE 102: note = RuvC_P5
  REGION 274..361: note = Tnp_domain
  SITE 282: note = Tnp_P1
  SITE 312: note = Tnp_P2
  SITE 320: note = Tnp_P3
  SITE 321: note = Tnp_P4
  SITE 334: note = Tnp_P5
MNSVGIDISKGGSTVAVMRPFGEVVISPFEVRHTDSELSKLARQLKSLDGVTRVVMEATGNYHAPVAKLLHDAGLYVSVINAKLVHSYGNNDLRRVKTDRKDAIKPTNYGLDRWLALPRYVPEENTRLLLKNCYRQYRQYSKVQTVLKNNLISLLDTVFPNANRLFSSPARADGSEKWVDFVAEFWHCECVSGRTEKAFISKYQKWCRKHGYNFSEGKACDIYAETGGHIGVMPKSETTKLLVEQAVSQLRATSAALAALKQEMHSLTSQLPEYPVVMKMFGVGPTLGPQLIAEIGDVRRFYSKKALVAYAGLDAPPNDSGDVTGRHKNMSKIGASSLCRTLFLVMSVYLQNSPLDEPVYQFMDRKRAEGKPYRVYMMASANKFLRIYYATVKAYLEALD

SEQ ID NO: 18311 - protein, 427 aa, unidentified
  source 1..427: note = protein_a10d7f3
  REGION 7..164: note = RuvC_domain
  SITE 10: note = RuvC_P1
  SITE 63: note = RuvC_P2
  SITE 103: note = RuvC_P3
  SITE 105: note = RuvC_P4
  SITE 108: note = RuvC_P5
  REGION 279..373: note = Tnp_domain
  SITE 287: note = Tnp_P1
  SITE 317: note = Tnp_P2
  SITE 325: note = Tnp_P3
  SITE 326: note = Tnp_P4
  SITE 339: note = Tnp_P5
MAHTTIIGIDVSKNFADACAISAQGEVMLETKIFYDTVGLQHFLKQLDQLAGEQRHCAVAVMESTAHYHRILETYLRRSGIDVVVINPLQSGSMKNLEIRKIKNDRTDAKRIAQLYLFKMLRGNAVDSILVGALKDLTRQRSDIISERVKFSNKLTALLDQGFPGFRKVFSSLRTKSALAVLARFPGPEEICGANRIDIAKTIAFAAGRNTESAYAVKKANHLLDIAEQAMQLQVERGSFKTLITLFAEMLIQIQRAADQIERQIFETAQCDRTFWSQVELLTSIPGIGQYAAVVILAEIGDFSRFKKAKQLVAFAGIDPAVKQSGTSAYKHNKISKRGSPYLRKILDTCTHVAAHKGRNQQPANPILAAYYEEKRSVKPANVAQCACIHKMLGYIFSVLRNQKPFELRSPEEHLALMRSKTADIAA

SEQ ID NO: 18312 - protein, 428 aa, unidentified
  source 1..428: note = protein_9fa3272
  REGION 20..181: note = RuvC_domain
  SITE 23: note = RuvC_P1
  SITE 79: note = RuvC_P2
  SITE 120: note = RuvC_P3
  SITE 122: note = RuvC_P4
  SITE 125: note = RuvC_P5
  REGION 288..376: note = Tnp_domain
  SITE 296: note = Tnp_P1
  SITE 326: note = Tnp_P2
  SITE 334: note = Tnp_P3
  SITE 335: note = Tnp_P4
  SITE 347: note = Tnp_P5
MNCNTQNAKIASITEKTLIVGIDVGSETHYARAFDWRNYEYTRKPLEFSNTEAGFQTFKAWMEDIAAKHGKTAVIPGMEPTGHYWFALGKFLQDSGMRPVHVNPHHVKKSKELDDNNPNKNDRKDPKTIAALVNEGRFSYPYIPTGIYAEIRSLSNLRFQTQEELTRIKNRLARWFAIYFPEYKDVYGDLKAVSGRMVLKEAPLPEDIRKLGVEGVNRIWRDAKLRGAGMKRAKTLVSAAGHSVGSKEAPGAARMELKNLLNDMDVYTSRLEELLLKIEEKLKEIPYVDKLMGIKGIGLATVSGFIAEVGDIGRFDNPKQLQKLAGYAIVANDSGKHNGESRISYRGRKRLRYVLYEAAISLIGKNAEFRAIHEYYRTRKENPLKKMQSVVAVACKVLRVFYTILTKGVDYDAGKLMGDIRRPQIQAA

SEQ ID NO: 18313 - protein, 403 aa, unidentified
  source 1..403: note = protein_95836a0
  REGION 9..163: note = RuvC_domain
  SITE 12: note = RuvC_P1
  SITE 61: note = RuvC_P2
  SITE 101: note = RuvC_P3
  SITE 103: note = RuvC_P4
  SITE 106: note = RuvC_P5
  REGION 270..357: note = Tnp_domain
  SITE 278: note = Tnp_P1
  SITE 309: note = Tnp_P2
  SITE 317: note = Tnp_P3
  SITE 318: note = Tnp_P4
  SITE 330: note = Tnp_P5
MATRPEIWVGIDVGKQMHHACAVDESGKTVFSQKLGNDQAAIEALIGRAAQAADRVRWAIDLTSPLALLLITVLLAAEQAVTYVPGRVVNSMTHGFRGEGKTDARDAKVIAETARMRRDLTEVTMPDELVVGLTQLTGYRTDLMGDWVAGINRLRSLLGSIFPALEAAFDYSNRTPLILVAGMCTPAELRAAGLEGIQAYLAANGAWKPGIGKTAATAADAAGRQTLALPGEADTAILVKRIAAKLLDLDREIKDTDKLITSRFRQHPWAHIIESLPGMGPGLGAEFLVGTGGDLATFSSAGRLASYAGLVPVPRDSGRVSGNLHRPKRYNRRMRRVFYMAALSSLRVPGPSRRFYNRKRGERLIHTQALLALARRLVDVLWALLRDGREFTLDTTNPVATAA

SEQ ID NO: 18314 - protein, 345 aa, unidentified
  source 1..345: note = protein_d9b4ca6
  REGION 6..147: note = RuvC_domain
  SITE 9: note = RuvC_P1
  SITE 52: note = RuvC_P2
  SITE 87: note = RuvC_P3
  SITE 89: note = RuvC_P4
  SITE 92: note = RuvC_P5
  REGION 211..296: note = Tnp_domain
  SITE 219: note = Tnp_P1
  SITE 249: note = Tnp_P2
  SITE 257: note = Tnp_P3
  SITE 258: note = Tnp_P4
  SITE 270: note = Tnp_P5
MELHTIGIDLGKTVFHLVGLNLSGEVVVRKKFSRKQLLHFTANRQVNLIGMEACGGSHFLGRALREQGHEVRLIPAQYVKPYVKTNKSDYIDAEAIAEAVARPSMRFVPIKSDDQLDLQSLHRVRERWVARRTAVINQIRGLLLERGITVRKGRCHIEAALPGILEDADTKLSGAVRLLLAQLQLELDHLQRRIDEADTVIKQTAGDNEACQRLVTIPGIGPVTATAVIAAIGNGAAFRRGREFAAWIGLVPREHSTGGKQKLLGISKRGNSYLRRLFVHGARAVLQQSAKQSPGLSAWLAHLTSRTHRNVAGVALANKLARMAWAVLAKKEPYRYPRLAAATTA

SEQ ID NO: 18315 - protein, 331 aa, unidentified
  source 1..331: note = protein_512156a
  REGION 6..158: note = RuvC_domain
  SITE 9: note = RuvC_P1
  SITE 63: note = RuvC_P2
  SITE 101: note = RuvC_P3
  SITE 103: note = RuvC_P4
  SITE 106: note = RuvC_P5
  REGION 202..289: note = Tnp_domain
  SITE 210: note = Tnp_P1
  SITE 240: note = Tnp_P2
  SITE 248: note = Tnp_P3
  SITE 249: note = Tnp_P4
  SITE 262: note = Tnp_P5
MKNFYIGADVSKKTLDCVLYDADKEKMRASYIKIANDKNGADELIKWMKEHKIVKKQAIVCMEYTGKYSFDFAELLEKKRVDFVMVPALKIKGAFAGARGKNDKVDAERIASYAYRYRDELAPTSLKDDKIIRLRDLMNDRKLAVKHAAAYKTIIKEYKTKKSSPRRKRAEKIVAEYRKQIVAIEKEIMQLINNDEKMKKNYDLLTSIPGISLVNAANFIVFTCNFTLFDDARKFASYAGVAPFEHSSGTSINRGTHVSKMANKVLKADLSQAAKAAISFDPSLRDYYERKRAEGKSYGCVLNAVKFKLITRAFAVIKREAPYVNFMRYTA

SEQ ID NO: 18316 - protein, 345 aa, unidentified
  source 1..345: note = protein_a96c0c8
  REGION 14..164: note = RuvC_domain
  SITE 17: note = RuvC_P1
  SITE 65: note = RuvC_P2
  SITE 105: note = RuvC_P3
  SITE 107: note = RuvC_P4
  SITE 110: note = RuvC_P5
  REGION 206..293: note = Tnp_domain
  SITE 214: note = Tnp_P1
  SITE 244: note = Tnp_P2
  SITE 252: note = Tnp_P3
  SITE 253: note = Tnp_P4
  SITE 266: note = Tnp_P5
MNKPTSTSTSTLFCGIDVSARSLSVALIEPDHSVSQREFANSTSGHKALLGWLVKHNAPVRVSIEATGIYSLDLALALNAAPHIELAVLNPRQVNRFAQTLRRSKTDAADAIVLAEYSQRMPFTAWQRPGVEHLHLRTISRHIESLVVDLAEVKNRLHTVANSSTTPRVILVDLKQAQAAFERRLVKMRSEASKLIQAEPVLRLRFQLLVSVPGIAQVSALHILSELLLLPPGMTVRQWVAYSGLDPVHQVSGTSLHKPSHISRAGNRHLRRALYMPSLSAVRFDPHLRAFYQTLKTRHKTGLQALMAVERKLLHAIYGIFKSGQPYDGKRLFPNIQLEVESIAG

SEQ ID NO: 18317 - protein, 343 aa, unidentified
  source 1..343: note = protein_0f79fc0
  REGION 7..149: note = RuvC_domain
  SITE 10: note = RuvC_P1
  SITE 53: note = RuvC_P2
  SITE 88: note = RuvC_P3
  SITE 90: note = RuvC_P4
  SITE 93: note = RuvC_P5
  REGION 212..296: note = Tnp_domain
  SITE 220: note = Tnp_P1
  SITE 250: note = Tnp_P2
  SITE 258: note = Tnp_P3
  SITE 259: note = Tnp_P4
  SITE 271: note = Tnp_P5
MEKIITVGLDLAKSIFQVHGIAENGKVLVRRTLRRSQLLPFFQSLPACLVGIEACGTAHYWANAIGEFGHTVRLMPPAYVKAYVKRNKTDAADAEAICEAVSRPSMRFVPVKSPEEQAGGMVLKTRELLVRQRSQSANAMRAHMAELGIIAATGMPSIAKLVAVLRDDQERRLPASARAALLGMAEHIESLTTRIDVLDTKIVAAVKADDAARRLTTIPGVGPIIAATVRATVQNPAAFRTGRDLAAWIGITPRAHSSGGKERLGKISKQGNKQLRTLLIVGATSILKQARRGVKLPAWVVSIMARRPYKVAAVALANKMARTIWALLVKGGTYRSPTTPVTA

SEQ ID NO: 18318 - protein, 400 aa, unidentified
  source 1..400: note = protein_6908653
  REGION 4..160: note = RuvC_domain
  SITE 7: note = RuvC_P1
  SITE 57: note = RuvC_P2
  SITE 97: note = RuvC_P3
  SITE 99: note = RuvC_P4
  SITE 102: note = RuvC_P5
  REGION 274..361: note = Tnp_domain
  SITE 282: note = Tnp_P1
  SITE 312: note = Tnp_P2
  SITE 320: note = Tnp_P3
  SITE 321: note = Tnp_P4
  SITE 334: note = Tnp_P5
MNSVGIDISKGRSTVAVMRPFGEVIISPFEVSHTASELSELARRLKSLDGETRVVMEATGNYHAPVAKLLHDAGLYVSVVNAKLVHGYGNNELRRVKTDRKDAVKLANYGLDRWLTLPRYIPEEDTRLLLKNCYRQYRQYSKVQTLLKNNLISLLDMVFPNVNRLFSSPIRGDGSEKWVDFVAEFWHCCCVSEKSEKAFISKYQRWCRKHRYNFSEAKAHTIYTEASGHIGVMPKSETTKLLVEQAVSQLRATSAALATLKQEMQSLASQLPEYPVVMGMYGVGQTLGPQLMAEIGDVRRFYSKKALVAYAGLDAPPNDSGDVTGRHKSMSKIGASSLRRTLFLVMSVYLQKAPPDEPIYQFMDRKRAEGKPYRVYMMASANKFLRIYYATVKAYLESSR

SEQ ID NO: 18319 - protein, 339 aa, unidentified
  source 1..339: note = protein_944dee7
  REGION 6..148: note = RuvC_domain
  SITE 9: note = RuvC_P1
  SITE 52: note = RuvC_P2
  SITE 87: note = RuvC_P3
  SITE 89: note = RuvC_P4
  SITE 92: note = RuvC_P5
  REGION 211..297: note = Tnp_domain
  SITE 219: note = Tnp_P1
  SITE 249: note = Tnp_P2
  SITE 257: note = Tnp_P3
  SITE 258: note = Tnp_P4
  SITE 270: note = Tnp_P5
MEVTTIGLDLGKDVFQVHGVTADGTVAFNRSIRRRQLLKFFEALPRCLVGIEACGSAHHWARELTAIGHDVRLMPATYVKPYVKRGKTDAVDAEAICEAVTRPTMRFVAVKSKEQQALLTIHRVRQLVVRQKTQMLNVIRGLLREFGHVIGNGPVAAMRFIKTFQTDNCLDMPDVAKSMLKTLCEQVNALDDRVTFYDKLIEYHSRIDERAKRIRTVPGVGPITASAIVATIGDGQQFKNGREFAAWLGLTPLNKSSGGKERLGRISKKGDRYLRRLLVIGMTSQVQRARGYPERVHPWIMQLLERKPVRLATIAMANKAARIIWAILTKDTYYRQSAA

SEQ ID NO: 18320 - protein, 324 aa, unidentified
  source 1..324: note = protein_9aa7c6d
  REGION 4..160: note = RuvC_domain
  SITE 7: note = RuvC_P1
  SITE 59: note = RuvC_P2
  SITE 99: note = RuvC_P3
  SITE 101: note = RuvC_P4
  SITE 104: note = RuvC_P5
  REGION 199..285: note = Tnp_domain
  SITE 207: note = Tnp_P1
  SITE 236: note = Tnp_P2
  SITE 244: note = Tnp_P3
  SITE 245: note = Tnp_P4
  SITE 258: note = Tnp_P5
MNIIGIDVSKAKLDCAWFKEDNKVKTKVFTNQLEGWKELVSWAKTQTGNELSELHFVMEATGIYHENVATWLHDSGATVSIANPAHVNYYAQSLGGRTKNDKKDSIVLARYGIKEHPMLWHPAPQEMRALKALLTRLDAVEKDLQREKNRHEKIIVSDTPTAVLASIKQMIEHLETEQKTLEKLIDDHIKAHKNLKENKALLETIPGIGKVMSQRMLMILGTHQFKDAHQCAAYLGLVPVQKQSGSSIKGRSQLAKNGNKTVRAKLYMATVTATRYNPDIKAQYERLTKKGKSKMSALGAAMRKLVQICFGVFKHQLPYQPQSA

SEQ ID NO: 18321 - protein, 401 aa, unidentified
  source 1..401: note = protein_7544c5c
  REGION 11..165: note = RuvC_domain
  SITE 14: note = RuvC_P1
  SITE 63: note = RuvC_P2
  SITE 103: note = RuvC_P3
  SITE 105: note = RuvC_P4
  SITE 108: note = RuvC_P5
  REGION 271..357: note = Tnp_domain
  SITE 279: note = Tnp_P1
  SITE 309: note = Tnp_P2
  SITE 317: note = Tnp_P3
  SITE 318: note = Tnp_P4
  SITE 330: note = Tnp_P5
MEQPERARVWVGVDAGKGHHWAAAVDGTGAQVWSKKIANDESAILDAIGEAFALAEAVGWAVDIAGTSSALLLALLAAHGARPVYVPGRTVHRMSGAYTGEAKTDARDAYVIAETSRLRRDFTAIDVPAQLAADLALLTTHRADLVADRVRLVNRLRDVLTGVFPALERAFDYSAHKGALVLLTGYQTPAALRRRGPARLEAWLRKRGVRGAGQVAATALAAAHAQHTTLPGEAVAAQIIADLATELLTLDDRLKRLDAQITETFRGHPQAEIIESMPGIGPILGAEFVVAAGDLAAYADAGRLASAAGLVPVPRDSGRRTGNLHRPKRYSRRLRRVFYMSAQSSIIKPGPNRDFYLKKRGQGLKHTQAVIALARRRVDVLWALLRDGRLFTPTQPVTQAA

SEQ ID NO: 18322 - protein, 345 aa, unidentified
  source 1..345: note = protein_14f2639
  REGION 6..147: note = RuvC_domain
  SITE 9: note = RuvC_P1
  SITE 52: note = RuvC_P2
  SITE 87: note = RuvC_P3
  SITE 89: note = RuvC_P4
  SITE 92: note = RuvC_P5
  REGION 210..297: note = Tnp_domain
  SITE 218: note = Tnp_P1
  SITE 248: note = Tnp_P2
  SITE 256: note = Tnp_P3
  SITE 257: note = Tnp_P4
  SITE 269: note = Tnp_P5
MNITTVGIDLAKNVLQVHAVDARGKAVLRKQFKRIEVSAFFANLAPCLIGMEACGGAHYWGRTLEQFGHTVRLIPPQFVKPYVKSNKNDVADAEAICEAVARPHMRFVPMKSVEQQSVIALHRVRQGFVRARTKQANQIRGLLGEMGLIIPQGIWRIAPRVPALLEARSDLPAVFKNLIERLTEHLKFLDRQVDDIHRQIVAWGRSCELSQKLQKVPGVGPLTATALIATVADARTFKNGRQMAAWLGLVPRQHSSGGKAKLLGISKRGDKYLRTLLVHGARSVILAAKLKRAKSHFPWLAQLLDRRHINIATVALANKNARIMWALMAHGREFDPAFVVAPAAA

SEQ ID NO: 18323 - protein, 388 aa, unidentified
  source 1..388: note = protein_31929c8
  REGION 4..160: note = RuvC_domain
  SITE 7: note = RuvC_P1
  SITE 58: note = RuvC_P2
  SITE 99: note = RuvC_P3
  SITE 101: note = RuvC_P4
  SITE 104: note = RuvC_P5
  REGION 262..348: note = Tnp_domain
  SITE 270: note = Tnp_P1
  SITE 300: note = Tnp_P2
  SITE 308: note = Tnp_P3
  SITE 309: note = Tnp_P4
  SITE 321: note = Tnp_P5
MYLVGIDISKYKHNCFIATETGVPLNEFVFENNLEGFKLFHQVLSKLDQDQDIRIGLESTGHYGTNLKQFIVASGYTYLEFNPYLTHQFSKAMSLRRTKTDKVDAKTISNMLGSVDYKTLHTQFYHINELKQLVRERDDILTNRSKTMVKLTNLLDIIFPEFKPFFNNRLGVTALFLLKKYKSPARISKFIMHDYECLRSVSNGRLTYPKFSRLKSLAKDTIGVQSIVYNKRMLALIRDYEYFDQSLDEIDQEIIQLFSEVNTKLRTIPGLGIIQAATIYAEIGDIHLFSNPQKLIAYVGFDVSISQSGMSEHHGKIVKRGSPLLRKAIWTYALPSLRFIPTLNDYYHRKKAEGKHHRVALTHVCRKLIRIIYHIEYNQIDFDNKKSK

SEQ ID NO: 18324 - protein, 354 aa, unidentified
  source 1..354: note = protein_6d234ff
  REGION 7..149: note = RuvC_domain
  SITE 10: note = RuvC_P1
  SITE 53: note = RuvC_P2
  SITE 88: note = RuvC_P3
  SITE 90: note = RuvC_P4
  SITE 93: note = RuvC_P5
  REGION 212..300: note = Tnp_domain
  SITE 220: note = Tnp_P1
  SITE 250: note = Tnp_P2
  SITE 258: note = Tnp_P3
  SITE 259: note = Tnp_P4
  SITE 272: note = Tnp_P5
MFDCNVIAIDLAKNLFQVCKTDKNGQVIYNKAISRAKLKGLLIKEKKSLVAMESCSSTHYWARFAKQVGHYVKAINARQVKAFRQGQKTDANDALAISVAARQPHIKESRLLSVQEQCLQGIECMRDLLVKQKVNLSNQLRALLLELGHAIAQGDAQLIQAIPGILEDAENDLTHRFRFSIQLTFRRFIGTIEEVKLIEEKLREIVKQDPICTRLQALEGVGPVCAILMKIALGNTTHFKNGREAAACLGLTPVQHSSGGKEKIGSISKVIGNKKLRSALYKGALAVVCQLEKRESRSQKDIWLRELTVRRGKKIAAIALANKTVRTAFALLSIMQSISHNYLWLKLVRKSVLK

SEQ ID NO: 18325 - protein, 344 aa, unidentified
  source 1..344: note = protein_4cd00be
  REGION 9..150: note = RuvC_domain
  SITE 12: note = RuvC_P1
  SITE 55: note = RuvC_P2
  SITE 90: note = RuvC_P3
  SITE 92: note = RuvC_P4
  SITE 95: note = RuvC_P5
  REGION 213..297: note = Tnp_domain
  SITE 221: note = Tnp_P1
  SITE 251: note = Tnp_P2
  SITE 259: note = Tnp_P3
  SITE 260: note = Tnp_P4
  SITE 272: note = Tnp_P5
MSEHSIAVLGIDLGKNSVSLAGLDAAGAVVVRKRTTREGAIKFAASLSPCVVAMEACCGAHFMGRILVGQGHTIRLMSPEYVKPYVKAQKNDDWDAEAITEAATRPTMRFVTQKSEAQLDLQTIHRVRDRLVMARTALTNQLRAILLERGTTFPKGRKVLMRRLAQPAETFEGLGERMRRLVEDIRAECAELDARIAALNDELAEVARQDESARLLSTIPGIGVINATALVAAVGDASAFARGRDLSAWLGLVPRQFSTGGKTKLLGISKRGNEYLRRQLIHGARAALLRLKDTPTPLGNWLRGLLARSHMNVAVVALASKLARIAWAVIRQRTEFDRRALVGA

SEQ ID NO: 18326 - protein, 350 aa, unidentified
  source 1..350: note = protein_bb61ecc
  REGION 13..155: note = RuvC_domain
  SITE 16: note = RuvC_P1
  SITE 59: note = RuvC_P2
  SITE 94: note = RuvC_P3
  SITE 96: note = RuvC_P4
  SITE 99: note = RuvC_P5
  REGION 218..303: note = Tnp_domain
  SITE 226: note = Tnp_P1
  SITE 256: note = Tnp_P2
  SITE 264: note = Tnp_P3
  SITE 265: note = Tnp_P4
  SITE 277: note = Tnp_P5
MAHCNLPRPAPVYGIDIGKNLFHVVGLSCDCTPDQKVRFRRDTLLQFFARAQPSIVGMESCAGSQWLARKIQALGHKVRLIPAQFVKPYVKSNKNDIIDAEAIAEATTRPTMRFVAVKEEDQVDLQALHRIRDQMVGARTRLINQMRAFCLEYGVPLRQGAGIFKLELPRALNDEGNDLSPVMRRLVGDLFADLRRLEERIREVTQEIEAVADREDVTRRLMTIPGIGALGATAVLAAVGDGLQFRKARDLAAWLGLVPRQYSTGGKQTLLGVSKRGNRYVRKLLVHGARSCFRHLDRTRDRLGSWLDGLQARMHPNKAVVALAAKMARIVWVVLNKPGALYERRDPAFA

SEQ ID NO: 18327 - protein, 393 aa, unidentified
  source 1..393: note = protein_f7fa31b
  REGION 25..173: note = RuvC_domain
  SITE 28: note = RuvC_P1
  SITE 77: note = RuvC_P2
  SITE 113: note = RuvC_P3
  SITE 115: note = RuvC_P4
  SITE 118: note = RuvC_P5
  REGION 239..324: note = Tnp_domain
  SITE 246: note = Tnp_P1
  SITE 276: note = Tnp_P2
  SITE 284: note = Tnp_P3
  SITE 285: note = Tnp_P4
  SITE 297: note = Tnp_P5
MGGLEPHPGISLTEASMNNNSTLYVGLDVHKESITVAYAINSEPVELMGKIGTTPTDIERLCKRLTSKAGQVQVVYEAGPCGYGLYRRLMKKGFDCMVCAPSLIPKKPGERVKTDRRDAARLVRSLRAGDLSAVYVPDVKDEAFRDLARAWASARDDLRHARQRLKSFLLTHGIHYVGRADWRAAHRRWLSKYSFEDAWRQLAFDEHRRTIEDRLAQCERLEAALREAVTEWRLYPVVLALQAMRGIQFITAVGLISELGDLSRFEHPRQLMAWFGVTPSEHSSGGTRRQGSITKTGNSYARKLLVEAAWSYRHTARISPQLQIRQENLPKPIIDRAWDAQVRLCRRCHRLVAKGKNANIAIVAVARELAGFIWDIGRLAMSLSLEPHNTRMA

SEQ ID NO: 18328 - protein, 396 aa, unidentified
  source 1..396: note = protein_b1b4813
  REGION 4..158: note = RuvC_domain
  SITE 7: note = RuvC_P1
  SITE 59: note = RuvC_P2
  SITE 99: note = RuvC_P3
  SITE 101: note = RuvC_P4
  SITE 104: note = RuvC_P5
  REGION 264..354: note = Tnp_domain
  SITE 272: note = Tnp_P1
  SITE 302: note = Tnp_P2
  SITE 310: note = Tnp_P3
  SITE 311: note = Tnp_P4
  SITE 327: note = Tnp_P5
MMTIGIDIGGRSHVIARCRDGQARADREILRVDQSRAGFTALDTWLDRQTERVSLVTMESSGHYWMPLASHLRQHDVPVAVVNPLAAKYFAKSRLGRTKSDPADARSLAEMGMRDRPVVRDPLAGAELRQAARFAMTLVTEQARVCQRLIRLVDIGFPELGELFDDPTCRTAREVLRIAPTARAASRRRTATLAGANAGPGHRRLGAAKAERLQAAAADSIAVPELDAEVAFEVGLLLDQFDLLERQIEVADARVAGLLDGETARRLQTIPGVGPSITATLLAEIGDIGRFSDFDQLLAFAGVHPAERSSGRKGSNPETAWRMSKAGNSHLRAAAYRMAVVGVVHNPVIAAHYARKRAAGKSKMNALGHCMRKALSLVWGVWRNEADFDPDWGLET

SEQ ID NO: 18329 - protein, 428 aa, unidentified
  source 1..428: note = protein_a0a3ff7
  REGION 30..182: note = RuvC_domain
  SITE 33: note = RuvC_P1
  SITE 81: note = RuvC_P2
  SITE 119: note = RuvC_P3
  SITE 121: note = RuvC_P4
  SITE 124: note = RuvC_P5
  REGION 289..375: note = Tnp_domain
  SITE 297: note = Tnp_P1
  SITE 328: note = Tnp_P2
  SITE 336: note = Tnp_P3
  SITE 337: note = Tnp_P4
MKSASKTPTESMSSQRSVTLPETAPNDVTAGIDWARDDHAACIVNGRGRKVATTTVEHTASGLRELVGFLRRHGVDEVAIERPDGPVIDTLLAAGLSVVVISPNQVKNLRGRYGSAGNKDDRFDAYVLADTLRTDRTRLRPLIPDRDDTVALRRACRARKDLVKHRVAVANQLRAHLRNVFPGAIGLFRDIDSEISLTFLTRFDTQDRADWLTPQRLGGWLTKQGYSGRTDPAVLHARLLDAPRGATGIHATTQAAITASYVTLLLTLVEQIKILSTQIDRQLDAHTDAHIFTSLPKAGRVRAARLLAEIGDCRARFPTPESLTCLAGAAPSTRQSGKHRAVGFRWSCDKQLRDAVVDFAADSRHANPWAADYYNRARARGHDHAHAVRILARAWLHIIWHCWQDNLAYNPETHRALQRVITQQNKAA

SEQ ID NO: 18330 - protein, 340 aa, unidentified
  source 1..340: note = protein_caea550
  REGION 7..148: note = RuvC_domain
  SITE 10: note = RuvC_P1
  SITE 53: note = RuvC_P2
  SITE 88: note = RuvC_P3
  SITE 90: note = RuvC_P4
  SITE 93: note = RuvC_P5
  REGION 210..295: note = Tnp_domain
  SITE 218: note = Tnp_P1
  SITE 247: note = Tnp_P2
  SITE 255: note = Tnp_P3
  SITE 256: note = Tnp_P4
  SITE 268: note = Tnp_P5
MTELTRVAVDTSKSVFTLHGVDAQDRPVLRRNLKRGEFVAFFEKLAPVEVAMEACGGSHHWGRMLTKYGHRVRLIPAQYVKPFVKRGKNDRNDAEAISEAAARPGMRTVAVKSADAQAGAMLLSVRELLVRQRTQLVNALRGHASEMGLVAPVGNKGLAKLQAEIAADATLPAAAAEALGLLGREIDRLEARLAEVEAKLNAQHKKDADSRRLSSMPGVGPMIALNFVLRVDASQFESGRHFAAWLGLVPRERSTGGKTRLGGISRAGDERLRQLLVLGATAVIKTAKPGRKGVSPWLLKLLERKPRKVAAVALANKMARALWAMLTSGEAYRPAVLAAA

SEQ ID NO: 18331 - protein, 353 aa, unidentified
  source 1..353: note = protein_d51cd95
  REGION 14..154: note = RuvC_domain
  SITE 17: note = RuvC_P1
  SITE 60: note = RuvC_P2
  SITE 95: note = RuvC_P3
  SITE 97: note = RuvC_P4
  SITE 100: note = RuvC_P5
  REGION 219..306: note = Tnp_domain
  SITE 227: note = Tnp_P1
  SITE 257: note = Tnp_P2
  SITE 265: note = Tnp_P3
  SITE 266: note = Tnp_P4
  SITE 278: note = Tnp_P5
MHTHQSSSNPVATIGIDIGKNTFHLVGLDKRGAIVLRIKVSRSQLERRLVNVPCCLVGLEAGCGAHHIARQLRALGHNVRLIPAQYVKPFLKGHKNDYRDAEAIAEAVQRPTMNFVAIKTPEQSDLLSLHRVRSRLVGQRTAVINQIRGFLIERGITVRQGPAPLRKALPAILSSPIDVLSPRMVRLIADLSQDWRRLDERIQAVSTEIETVAENDGSCQRLMTVPGIGPIISSAVVAAIGNGSGFNQGRDFGAWLGLVPKQESTGDRTKLGKISKRGNKYLRTLFVQAAHVVLVRRPAAATRGLWPWIERAAKRLAHRNLLAIALANKLARIAWAVLARGRDYEPRITTHAA

SEQ ID NO: 18332 - protein, 389 aa, unidentified
  source 1..389: note = protein_26aa67d
  REGION 4..163: note = RuvC_domain
  SITE 7: note = RuvC_P1
  SITE 60: note = RuvC_P2
  SITE 101: note = RuvC_P3
  SITE 103: note = RuvC_P4
  SITE 106: note = RuvC_P5
  REGION 266..353: note = Tnp_domain
  SITE 274: note = Tnp_P1
  SITE 304: note = Tnp_P2
  SITE 312: note = Tnp_P3
  SITE 313: note = Tnp_P4
  SITE 326: note = Tnp_P5
MIYVGIDVAKDKHDCCILGSEADKLYPVFTIPNNKVGFNELYEKIFSVTDDKNEIKVGLEATGHYSLNLLGSLIDKGLPTCVINPLHTNLYRKGLSLRKTKTDKVDASTIAMMLMTARTLKPYSDTSYHSEELKSLTRYRFDKVQERAKLKSSVSRLVNILFPELEKLVPSLHMASVYALLSEFPGASYIAESHLTRLKNLLETASKGRYRRDMAITLRDAARDSIGSVMPAKSMELKHTIHLIEVMTDEIDEIESSIKSIMDTLDSPILTIPGINYRMGAMILAEVGDFSRFNNADQILAYAGLSPSTYQSGQLESSHSHMEKRGSRYLRYALFNATKFVCHWDEEFGKYLAKKLGEGKHYNVAISHATKKLIRTIYRMELTGEAFRK

SEQ ID NO: 18333 - protein, 327 aa, unidentified
  source 1..327: note = protein_619872a
  REGION 4..158: note = RuvC_domain
  SITE 7: note = RuvC_P1
  SITE 61: note = RuvC_P2
  SITE 101: note = RuvC_P3
  SITE 103: note = RuvC_P4
  SITE 106: note = RuvC_P5
  REGION 203..287: note = Tnp_domain
  SITE 211: note = Tnp_P1
  SITE 240: note = Tnp_P2
  SITE 248: note = Tnp_P3
  SITE 249: note = Tnp_P4
  SITE 261: note = Tnp_P5
MMFIGIDISKEKVDLSWLRDQLTNKIKTKVFKNKHQDFEKIEKWLLNTTKSVASELVITLEPTGVYHEALMYFLHEQGFNIILANTGKAKKYADALNIIHKTDKSDATMLAHYGCAKHAVVDYWQPEALEVRELKALIRRLDALESNRQREANRLEASEFSNVSARVRQSIKVTIAFLDDEIKQLKSDIDDHIDNEPGLKRNRKLLESIPGIGHVLSRELTYLFAAKKFNKAKEAAAYCGLIPRHNESGKLKGRTTISKLGPARIRCKLYMAAIVAGQWNKRIKRHKLTLINNGKTPMQAVCANMRKLIHICFGVIKNQEAFKLQES

SEQ ID NO: 18334 - protein, 322 aa, unidentified
  source 1..322: note = protein_25ee7f6
  REGION 9..156: note = RuvC_domain
  SITE 12: note = RuvC_P1
  SITE 56: note = RuvC_P2
  SITE 96: note = RuvC_P3
  SITE 98: note = RuvC_P4
  SITE 101: note = RuvC_P5
  REGION 195..279: note = Tnp_domain
  SITE 203: note = Tnp_P1
  SITE 232: note = Tnp_P2
  SITE 240: note = Tnp_P3
  SITE 241: note = Tnp_P4
  SITE 252: note = Tnp_P5
MSGLNPHCAGIDVSKGTLDIAISGTASQFAVPNDIDSFNQILKELKRNGTRLILMEATGGLESGVACYLQSEGFDVVVINPRQARDFARAMGYLAKTDRIDARVLLQMAEVINLHPEREKYIRPMPDTHRQLLAAMVVRRRQLTIMLTAERNRLHPSNPLSHRSIRSIIKALKDEIARIEGEMANHIAKNFSDISALLSAVKGVGAATVAVLLAEVPELGSLSRREISALIGVAPVNRDSGTMRGRRTIFGGRASVRTALYMSALVGTRHNPVIKEFYERLVAAGKPKKVALTACIRKLLTILNAMLKKNEAWDSSFHRHAS

SEQ ID NO: 18335 - protein, 353 aa, unidentified
  source 1..353: note = protein_89fb1f5
  REGION 34..159: note = RuvC_domain
  SITE 63: note = RuvC_P2
  SITE 98: note = RuvC_P3
  SITE 100: note = RuvC_P4
  SITE 103: note = RuvC_P5
  REGION 221..305: note = Tnp_domain
  SITE 229: note = Tnp_P1
  SITE 259: note = Tnp_P2
  SITE 267: note = Tnp_P3
  SITE 268: note = Tnp_P4
  SITE 280: note = Tnp_P5
MFTATKRRGRQDEGYDDRSGSGKNVFQLHGASLAGQVRYRKKLSRAQFLRFMSEQPSALVVMEASGSAHHWARELTKVGHEVKLIAPQYVRPFVKRQKNDAADAEAIVVAARQPEMRFVEPKTSDQQARAVLFRARERIVHQRTELVNALRSTLYEYGQVVPLGISHIKRIEAIIEDADVDLPEIVREECRDLLAQIGEKTARIASKAAKLAELSRQSDTARRLQTMPGVGPMTAMAVDAFAPAMETFRCGRDFAAWLGLVPRQLSSGGKEKLGRVSKAGQADIRRLLIIGAMSRLNWLGRKAIADGSWLTQLLARKPRMLVAIALANKMARAIWAMLTKGENYRDPALGVVA

SEQ ID NO: 18336 - protein, 340 aa, unidentified
  source 1..340: note = protein_1c980ff
  REGION 7..148: note = RuvC_domain
  SITE 10: note = RuvC_P1
  SITE 53: note = RuvC_P2
  SITE 88: note = RuvC_P3
  SITE 90: note = RuvC_P4
  SITE 93: note = RuvC_P5
  REGION 209..296: note = Tnp_domain
  SITE 217: note = Tnp_P1
  SITE 247: note = Tnp_P2
  SITE 255: note = Tnp_P3
  SITE 256: note = Tnp_P4
  SITE 268: note = Tnp_P5
MEDVTLVGIDLGKHTFHLHGQDKKGKGLFRKKLNRKQTIEFFATFHACTVVMEACAGAHHMARKLASFGHQVKLISPQFVRPFVKSNKNDFVDAEAICEAASRPAMRFVTPKTEARQVLSALHRVRESLVRDRTKTVNQVHGFLLEFGVSLPVGKATMTRLAAILAEHSLPPTLVVILERLHAHYKYLNEQVTENDKEISRHLAADELGQRLLAIPGVGPITASVLTAEMGDGTQYQNSRDFAAAVGLVPRQYSTGGRANLLGISRRGDKNIRRLLVSCARSYMMRLDKQTGALADWVRTLLTRRHSNVVACALANKLARTAWAMATHHTVFHSDPTAVV

SEQ ID NO: 18337 - protein, 347 aa, unidentified
  source 1..347: note = protein_3b45ed8
  REGION 5..152: note = RuvC_domain
  SITE 8: note = RuvC_P1
  SITE 55: note = RuvC_P2
  SITE 92: note = RuvC_P3
  SITE 94: note = RuvC_P4
  SITE 97: note = RuvC_P5
  REGION 212..293: note = Tnp_domain
  SITE 220: note = Tnp_P1
  SITE 250: note = Tnp_P2
  SITE 258: note = Tnp_P3
  SITE 259: note = Tnp_P4
  SITE 271: note = Tnp_P5
MNYYAGIDVSLECSSVCVVDGTGKIAREAKVASEPEALIAWFGSLGLSLERIGLEAGPLSQWLYAALREAGFAVELLETRHVKAALSAMPVKTDRNDARGIAQLMRLGWFRPVHCKSAEAQEIRALLTARKLVQSRLYDVEMSLRGILRGFGLKVGRTTPKRFAERIRELVVGHATLEAVGAALLSVHAVLLREFNGFEKRVRAIARSDGRVRLLMSTPGVGAIVGLTYISAIDDPARFKSSKSVGAHFGLTPTKYQSGETDVTGRISKLGDSSVRTALYEAANVILTRPIKGGGLKSWAMKLAKRAGMKKAKVALARKLAVILHRMLADASKFIAEKASGCVRVAA

SEQ ID NO: 18338 - protein, 343 aa, unidentified
  source 1..343: note = protein_16c137b
  REGION 5..152: note = RuvC_domain
  SITE 8: note = RuvC_P1
  SITE 55: note = RuvC_P2
  SITE 92: note = RuvC_P3
  SITE 94: note = RuvC_P4
  SITE 97: note = RuvC_P5
  REGION 212..300: note = Tnp_domain
  SITE 220: note = Tnp_P1
  SITE 250: note = Tnp_P2
  SITE 258: note = Tnp_P3
  SITE 259: note = Tnp_P4
  SITE 271: note = Tnp_P5
MDHFAGLDVSVKETSVCIVDETGKIVREVKVASEPDALVEVLTSPSYHFKRIGLEAGPLSQWLYNALAEAGLPVICVETRHMRAVLKAQINKTDRNDARGMAQMMRVGLYRPVHVKTLRSQKLRMLLTHRKLLQSKAIAIDNDLRGTLRNFGLKVGMVGTAKFEARINELVENLPDLAMLVEPLLVVRRVLREQIGVLHRSLLAIVRDDDVCRRLMTVPGVGPVVALTYRATVDVPARFKNSKAVGAVFGLTPSRHQSGESDRPGSVSRCGDEMMRMMLYEAAQTMLVVSTKWSWLKAWAMKIARHRGMKKAIVALARRLAVIMHRIWVDGTEFQWTREVTAA

SEQ ID NO: 18339 - protein, 320 aa, unidentified
  source 1..320: note = protein_4b4db89
  REGION 10..155: note = RuvC_domain
  SITE 13: note = RuvC_P1
  SITE 55: note = RuvC_P2
  SITE 95: note = RuvC_P3
  SITE 97: note = RuvC_P4
  SITE 100: note = RuvC_P5
  REGION 191..275: note = Tnp_domain
  SITE 198: note = Tnp_P1
  SITE 227: note = Tnp_P2
  SITE 235: note = Tnp_P3
  SITE 236: note = Tnp_P4
  SITE 248: note = Tnp_P5
MTILTSPTVVGIDVAKAEIVAYREDLNATQAITNDRDALGRWLNTLPANSSIALEATSTYHLDTAELAHEIGHRVYVVDAYRLSHYRESIGQRAKTDPCDARLLARYLSSEQKRLRLWSPPPQAYKLLKSLLHRRAELINLRVSLTLSWSGEPLLKDELAQQLKSFKQAEQVIQKLLHKVSKEAGITENIKRCKAIEGVGDLTATGLATAFMRGQFANGDAFIAFLGMDLRPKDSGKKAGPRHLSKKGDSELRRLAHNAAMAASRSATWKPYYESYLARGLAKTQALVILARKLCRVAFALMKNQSEYQPNLRLQGLPAT

SEQ ID NO: 18340 - protein, 312 aa, unidentified
  source 1..312: note = protein_5198a80
  REGION 5..153: note = RuvC_domain
  SITE 8: note = RuvC_P1
  SITE 52: note = RuvC_P2
  SITE 92: note = RuvC_P3
  SITE 94: note = RuvC_P4
  SITE 97: note = RuvC_P5
  REGION 184..270: note = Tnp_domain
  SITE 192: note = Tnp_P1
  SITE 222: note = Tnp_P2
  SITE 230: note = Tnp_P3
  SITE 231: note = Tnp_P4
  SITE 243: note = Tnp_P5
MATYIGIDISKDTFDAATSEHTKSVSFKNTAAGYKKFRTWISKFNEPSVCMEATGKYYLGLATFLYEKTIFVSVVNPLRIKRYAQSALKRVKTDSEDAKVIARFCETESLAPWAPDKPVIQELQEWYQLKELLIRQKTQLKSGLNSHVKKVQEKQIQQIEKNIETVLSKIKACIQSDKALCQNVKLLESITSIGEKTAMDLMTFIKDIKRFDKAKNLASFAGLTPQIMQSGTSVNSSRLSKMGNANLRKCLYMPAINAMAYNTPLKKFADGLRARGVASGKIKAAVMRKLIHIVFAVLNSGKPFDPEYKMCA

SEQ ID NO: 18341 - protein, 333 aa, unidentified
  source 1..333: note = protein_8b90bfc
  REGION 4..152: note = RuvC_domain
  SITE 7: note = RuvC_P1
  SITE 55: note = RuvC_P2
  SITE 96: note = RuvC_P3
  SITE 98: note = RuvC_P4
  SITE 101: note = RuvC_P5
  REGION 197..284: note = Tnp_domain
  SITE 205: note = Tnp_P1
  SITE 235: note = Tnp_P2
  SITE 243: note = Tnp_P3
  SITE 244: note = Tnp_P4
  SITE 257: note = Tnp_P5
MNHVGIDVSSKELVVVVSVKGKARSAKTFENTASGHQAIIGMLSKLKGGSRACIEATGIYHFDLAVALSRAEGIEVMVINPKVAHNFAKVLMKRSKTDAVDAGTLAVYCERMSFEAWQRPADGHLALRAVSRRITALTKLKTQTKNQLHALKATGGTPDLVIGHTDALIEVLEKQIQAHRDSALELIAGHDGLATAFALITGIKGIAQASAVQLLGELMILPQDMTAKQWVAYAGLDPRHFESGSSVSKKPRISKAGNKFIRQALYMPALVATRYEPNIKGYYAHLVEDNGLKKIQAVCAVMRKLLHAIHGMLKAKKEFDGTRFYTRPAQATS

SEQ ID NO: 18342 - protein, 339 aa, unidentified
  source 1..339: note = protein_9fb467d
  REGION 6..147: note = RuvC_domain
  SITE 9: note = RuvC_P1
  SITE 52: note = RuvC_P2
  SITE 87: note = RuvC_P3
  SITE 89: note = RuvC_P4
  SITE 92: note = RuvC_P5
  REGION 210..298: note = Tnp_domain
  SITE 218: note = Tnp_P1
  SITE 248: note = Tnp_P2
  SITE 256: note = Tnp_P3
  SITE 257: note = Tnp_P4
  SITE 269: note = Tnp_P5
MKLTTVGVDIAKSVMQLHYVDAETGEIVNKPVKRVAFLEHFANRSPCLIGMEACGGSQHWARKLTAMGHQVKLMPGKFVKAFVMGNKNDAADARAIWMAVQQPGKSVAVKTETQQAVLGLHRMREQLVKFRTMQTNSLRGLLTEYGEVMGKGRPALDKAIPGVLERLVDRLPTILIDTLREQWNGLAELDKQIAQIERRLQTWMKKDNACKAIAAIPGVGLLTATAAVATMGDAKTFRSGREFAAWIGLVPAQTGSGGKVQLQGISRRGDTYLRTLLIHGARSVLFHAKEPGPWIEQIKKRRPLNVVIAAQANKMARMIWAILAHDRPYEKSYVSVKPV

SEQ ID NO: 18343 - protein, 406 aa, unidentified
  source 1..406: note = protein_4e8c39a
  REGION 4..162: note = RuvC_domain
  SITE 7: note = RuvC_P1
  SITE 57: note = RuvC_P2
  SITE 99: note = RuvC_P3
  SITE 101: note = RuvC_P4
  SITE 104: note = RuvC_P5
  REGION 277..363: note = Tnp_domain
  SITE 285: note = Tnp_P1
  SITE 315: note = Tnp_P2
  SITE 323: note = Tnp_P3
  SITE 324: note = Tnp_P4
  SITE 337: note = Tnp_P5
MNAVGIDVSKDKSTVAILRPFGEVVASPFDVYHNPNELQALVTRLKSLDGDTKVVMEYTGNYYLPIAQFLSNNGLFVSVVNPILVKDYSSKSLTVRKVKTDKKDAVKIANFAFDRWAELTPFSPFTQIRLQLKALNRQYDKCNKPKTMLKNNLISLLAQTFPEVNLLFTSSVKKSNGKEKWVDFVLKYYHAECVSGRSLVSFSKSYRSWCEKNGYRFSEKKALQIYAFACNCVPTLPLSEGTKLLVSCAATQLNDMDATLASLIAQMHSIAKALPEYDVVMSMYGVGYVLGPQLIAEIGDISRFKKKQSLAAYAGVDPEQKQSGKNDPKSRPITKRGSPHLRKTLFQILSVFLQNAPEDEPVFQFIDKKRKQGKLYLVYMTAGANKFLKIYYARVTEYLNSLQQAA

SEQ ID NO: 18344 - protein, 345 aa, unidentified
  source 1..345: note = protein_6a9990b
  REGION 5..152: note = RuvC_domain
  SITE 8: note = RuvC_P1
  SITE 55: note = RuvC_P2
  SITE 92: note = RuvC_P3
  SITE 94: note = RuvC_P4
  SITE 97: note = RuvC_P5
  REGION 212..295: note = Tnp_domain
  SITE 220: note = Tnp_P1
  SITE 250: note = Tnp_P2
  SITE 258: note = Tnp_P3
  SITE 259: note = Tnp_P4
  SITE 271: note = Tnp_P5
MKQYAGIDVSLEYSSVCVVDADGRIVREAKILSEPDALIAWFGEHGVAMERIGLEAGPLSQWLHAGMVKAGLSVELIETRHVRSAFKTMPVKTDKKDARGIAQLMRLGWFRPVHCKSLPAQEVRALLTARKLIQGKLHDIEMSIRGILRGFGLKVGPTTRRTYAGRIRELTAGHSTLEAIAASLLKVRDALVHEFADFERKLRAMARQDDNALRLMTTPGVGVLVALTFVAAVDAPERFRSSRAVGPHFGLTPRKYQSGETDHSGRISKIGDGSVRTALYEAANVILTRPVKGSDLKGWALAVARRAGPRKARVALARKLAVVLHCMLRDRTNFIPHKVAPALAA

SEQ ID NO: 18345 - protein, 343 aa, unidentified
  source 1..343: note = protein_820eb00
  REGION 7..149: note = RuvC_domain
  SITE 10: note = RuvC_P1
  SITE 53: note = RuvC_P2
  SITE 88: note = RuvC_P3
  SITE 90: note = RuvC_P4
  SITE 93: note = RuvC_P5
  REGION 212..277: note = Tnp_domain
  SITE 220: note = Tnp_P1
  SITE 250: note = Tnp_P2
  SITE 258: note = Tnp_P3
  SITE 259: note = Tnp_P4
  SITE 271: note = Tnp_P5
MHTVTTIGLDIAKSVFQVHGIDAQGKVVIRRQLRRRYVLAFFQKLPPCLVGIEACASSHHWSRELQALGHTVRLMPAAYVKPYVKRQKNDATDAEAICEAVTRANMRFVKTKTAERQSCLMLHRTRHLFIRQQTAVINAIRAHLAEFGIVAPVGRNGVEELLEVVADPSDKRVPEVARVCLAALGAQLRLLKLRILEFDRMINAWHRSSETSRRLDEIPGIGPALATALVASVADPKAFRSARDFSAWIGLVPRQRSSGGREKLGSISKQGRSLSARPVHGWRAGRDPLCQIHGTKHRPWLTALLARRRTKVAAIALANKIARMAWALMARSERYREPVALAA

SEQ ID NO: 18346 - protein, 335 aa, unidentified
  source 1..335: note = protein_a7f4de9
  REGION 8..150: note = RuvC_domain
  SITE 11: note = RuvC_P1
  SITE 54: note = RuvC_P2
  SITE 89: note = RuvC_P3
  SITE 91: note = RuvC_P4
  SITE 94: note = RuvC_P5
  REGION 208..299: note = Tnp_domain
  SITE 216: note = Tnp_P1
  SITE 246: note = Tnp_P2
  SITE 254: note = Tnp_P3
  SITE 255: note = Tnp_P4
  SITE 267: note = Tnp_P5
MEKEVVTVGLDLAKNVFQIHAIGSDGEVLVRRKLRRAEVIRFFTDLPACLVGMEACASAHHWGRELMALGHEVRLMPPAYVKPYVKRGKTDAADAEAICEAVTRPTMRCVAVKTVEQQAVLMLHKSRDFLVRQRTMLINGLRGHLAEYGIVTRVGAGGVTASLKALHDEQSRLPAHARSALHGIAAQLRALSSEIDRLETQILAWQTSRRLATIPGIGPITASAIAAAVPDASLFRSGRQFAAWLGLTPRPHSSGGKERLGGITKQGDGYLRRLLVVGATAVMRVARKDASPQPWMAQLLERKPTKIATVALANKTARIAWAVMARKEVYTPTAV

SEQ ID NO: 18347 - protein, 422 aa, unidentified
  source 1..422: note = protein_3380e6e
  REGION 21..177: note = RuvC_domain
  SITE 24: note = RuvC_P1
  SITE 74: note = RuvC_P2
  SITE 114: note = RuvC_P3
  SITE 116: note = RuvC_P4
  SITE 119: note = RuvC_P5
  REGION 291..376: note = Tnp_domain
  SITE 299: note = Tnp_P1
  SITE 329: note = Tnp_P2
  SITE 337: note = Tnp_P3
  SITE 338: note = Tnp_P4
  SITE 351: note = Tnp_P5
MRILEPLQIFILEESVMLNAVGIDVSKGRSTVAVLQPGGVIVHKPFDVPHKSKDLHDLAQYLGALEGDTKVVMESTGRYHEPIRNVLSEAGFFVCTVNPHLIKNYGNNTIRKVKTDSADAKKIARYTLDNWAELREYTSMDTTRTQLKTLNSQFSFFTKQKTAAKTNLIALLDTTYPGVNKLFDSPVRADGSEKWVDFAYSFWHVDCVRKAGITAFTDRYKRFCKHHGYEFQENKANTIYKNSKNLIATLPKEAVYKELIQESIRQLNLLSENVEHLRKMMNELASTLPEYHTVMNMYGVGPTFGPQLMAEIGDISKFQHREALTAYAGVDPGKNDSGQEVHNSSHASKCGPSRLRHTLFQIMTTMLQNGVKENDAVSSFLFKKKAENKPYLVYMTAGANKFLRVYYGKVKECLRDQEEAEQ

SEQ ID NO: 18348 - protein, 344 aa, unidentified
  source 1..344: note = protein_685fb2b
  REGION 5..152: note = RuvC_domain
  SITE 8: note = RuvC_P1
  SITE 55: note = RuvC_P2
  SITE 92: note = RuvC_P3
  SITE 94: note = RuvC_P4
  SITE 97: note = RuvC_P5
  REGION 212..300: note = Tnp_domain
  SITE 220: note = Tnp_P1
  SITE 250: note = Tnp_P2
  SITE 258: note = Tnp_P3
  SITE 259: note = Tnp_P4
  SITE 271: note = Tnp_P5
MEHFAGLDVSVNETSICIVDDAGRIVRETKVASEPDALLAVLKNTAYHFKRIGLEAGPLSQWLYSALGEANLPVICVETRHMRAILQAQINKTDRNDARGIAQMMRAGLYRPVHVKTLRSQKLRMLLTHRKLLQSKAIAIENDLRGTLRNFGLKVGTVGAVKFEVRIKELVENLPDLATLVEPLLVVRRVLREQIAVLHRRLLAIARDDEVCRRLMTIPGVGPVVALTYRATVDVPARFRNSRSVGAVLGLTPCKYQSGESDYTGAISKCGDEMMRVMLYEAAQILLMRATKWSWLKAWAMQVARRRGMKKAIVALARRLAVIMHRVWTDGTEFWWTRQQAAAA

SEQ ID NO: 18349 - protein, 336 aa, unidentified
  source 1..336: note = protein_6cef44c
  REGION 7..149: note = RuvC_domain
  SITE 10: note = RuvC_P1
  SITE 53: note = RuvC_P2
  SITE 88: note = RuvC_P3
  SITE 90: note = RuvC_P4
  SITE 93: note = RuvC_P5
  REGION 207..297: note = Tnp_domain
  SITE 215: note = Tnp_P1
  SITE 245: note = Tnp_P2
  SITE 253: note = Tnp_P3
  SITE 254: note = Tnp_P4
  SITE 266: note = Tnp_P5
MSGVGTIGLDLAKHVFQVHGSSVSGAVIFRKKLRRDQVLKFFATQPASTVAMEACASSHHWGREIAKLGHQIRLIAPAYVKPFVKRQKNDAADAEAICEAAQRPTMRFVAIKTEEQQAASLVFRARDLLVRQRTQIINAIRGHLAEFGIVVAKGPCHVAKLLGRIADTPAMAQSILQLLVDQLQSLDEKIAHLDRELAHRVKADTEAKRLMTIPGIGPVTATALVALAPTAQAFEKGRDFAAWLGLTPLQRSTGGKQKLGETSRMGERTLRRLLIIGASAAVRWAKRKGSSNPWLMNMLNRKPPMLVTVALANKMARIVWALMARGGTYRAPAMAS

SEQ ID NO: 18350 - protein, 391 aa, unidentified
  source 1..391: note = protein_6ecc40d
  REGION 6..163: note = RuvC_domain
  SITE 9: note = RuvC_P1
  SITE 61: note = RuvC_P2
  SITE 102: note = RuvC_P3
  SITE 104: note = RuvC_P4
  SITE 107: note = RuvC_P5
  REGION 267..351: note = Tnp_domain
  SITE 273: note = Tnp_P1
  SITE 303: note = Tnp_P2
  SITE 311: note = Tnp_P3
  SITE 312: note = Tnp_P4
  SITE 324: note = Tnp_P5
MSLYFVGIDISKYKHDCCIISAADQKVISKFTIKNDKAGFEELITTFNSLSNPEDIKIGFESTAHYSLNLELFLENANHSFVEVNPVLIKEYKKSTTLRRTKTDSVDCESIARWLMTVEYKPHSKGFYHAYSLKSLTRLRDRLIRQRSFYLVKITNVLDHTFPEFNPFFNERLSKTALYLLENYGSAEKMARMNSASYDKLRCISRGKFSIQQFLRLKELASNTVGVNNSIFDIELNSLLTLHKSLCTEINTLENEIIKLIGKVHPHYMSIPGIGPISAAVIYAEYGDISNFDNPGQMLAFAGIEPGINESGTESHRGRMVKHGSSQLRYVLLNACLPLIRFDLTFATYYAKKRAEGKKHRVAMTHVAKKLIRVIYALERQDIDFNAQKIR

SEQ ID NO: 18351 - protein, 281 aa, unidentified
  source 1..281: note = protein_44de54c
  REGION 6..96: note = RuvC_domain
  SITE 34: note = RuvC_P3
  SITE 36: note = RuvC_P4
  SITE 39: note = RuvC_P5
  REGION 156..227: note = Tnp_domain
  SITE 164: note = Tnp_P1
  SITE 194: note = Tnp_P2
  SITE 202: note = Tnp_P3
  SITE 203: note = Tnp_P4
  SITE 215: note = Tnp_P5
MGGSHFMARKLEELGHFPKLISPQFVRPFVKSNKNDFVDAEAICEAASRPIYGVSCSPEPNLQQAMRALHRVRESLVQDKVKTTNQMHAFLLEFGISVPRGAAVISRLSTLLEDSSLPLYLSQLLLKLQQHYHYLVEQIKDLESQLKRKLDEDEVGQRLLSIPCVGTLTASTISTEIGDGKQYASSRDFAAATGLVPRQYSTGGRTTLLGISKRATKRSELCWFSVPGYSYKNWNTSPGKLADWVRELLCRKSNFVVTCALANKLARIAWALTARQQTYEA

SEQ ID NO: 18352 - protein, 401 aa, unidentified
  source 1..401: note = protein_47e65c7
  REGION 12..167: note = RuvC_domain
  SITE 15: note = RuvC_P1
  SITE 65: note = RuvC_P2
  SITE 105: note = RuvC_P3
  SITE 107: note = RuvC_P4
  SITE 110: note = RuvC_P5
  REGION 273..360: note = Tnp_domain
  SITE 281: note = Tnp_P1
  SITE 312: note = Tnp_P2
  SITE 320: note = Tnp_P3
  SITE 321: note = Tnp_P4
  SITE 333: note = Tnp_P5
MSGIKGSFNGFVGIDVSKDKFDVCGITSDEAKLFQLSATMDRKGFDKLKGHLASVSVSSVLIGMESTASYHVNLFSYLVSEGYNVILINPLLISNYVKMQLRKTKTDKKDAVVIAQFLRTNGDSLIQRVTSSLISVLRDLARQRESLDDEMNALKMEIKRLLNITFPELEHMVGIFTKSILKLLQRYPSAFALKDADLGQLSQTLIADSYGHKREAFATELIKTAHTSIGSSSPAKEMILKQKIALLLHLEDALQEITDVLIEMSRKLMEEDINIMTSIKGIGDKTAVNFLIEMGCDINQYDRSGKIIAMAGLDPAVYQSGNHEGKGRITKRGNRHLRRVIWLMTTRVIHYSDIFKAYYLRRRKEGLPYKMAVLATAHKLIRVIYAMLTQRTSFCPQANSL

SEQ ID NO: 18353 - protein, 351 aa, unidentified
  source 1..351: note = protein_e97e17a
  REGION 7..149: note = RuvC_domain
  SITE 10: note = RuvC_P1
  SITE 53: note = RuvC_P2
  SITE 88: note = RuvC_P3
  SITE 90: note = RuvC_P4
  SITE 93: note = RuvC_P5
  REGION 210..295: note = Tnp_domain
  SITE 218: note = Tnp_P1
  SITE 248: note = Tnp_P2
  SITE 256: note = Tnp_P3
  SITE 257: note = Tnp_P4
  SITE 269: note = Tnp_P5
MGKITTIGLDIAKNVFQVHGIDADGHVVLRKTLRRCQMQPFFETLAPCLIGMEACATAHHWARVLLQAGHDARLIPPSYIKPYLRRQKNDAADAAAICEAVTRPSMRFVPVKSGGQQATLMLHSARELLMSQRTALINALRGHFAELGIVVPQGARNVRQLIALLEDEQHSSPAVRVALIPLAMALTETEAQVAKLDKAILAAHRNDDVSVRLAAVPGIGPIIATCLSASVPDAKLFEGGREFAAWLGLVPRQHSTGGKPRLGTISKMGNRHLRKLLVVGAHAALYRMRKESRDTPLANWARGLLSKKPFKLVAVALANKIARIAWVIMARSINFQPGYATGDSAKVAASA

SEQ ID NO: 18354 - protein, 313 aa, unidentified
  source 1..313: note = protein_8332f80
  REGION 10..160: note = RuvC_domain
  SITE 13: note = RuvC_P1
  SITE 55: note = RuvC_P2
  SITE 95: note = RuvC_P3
  SITE 97: note = RuvC_P4
  SITE 100: note = RuvC_P5
  REGION 191..274: note = Tnp_domain
  SITE 198: note = Tnp_P1
  SITE 227: note = Tnp_P2
  SITE 235: note = Tnp_P3
  SITE 236: note = Tnp_P4
  SITE 248: note = Tnp_P5
MPVALSNPIVGVDVAKNELVIYQADSDLLEAIPNTKTSIKQWLKALLGPVSIAIEATNIYHLEFADLAYAAGCTIYMVGGYELKHYREGVKIRAKTDALDAKLLARYLKNEAEELRPWTPPSPLYRQLLSLFRRRAALVQARVGLVQSWSNEPLLKAAFAEQIKSMQRLETMIEKTINDQLKQAGLLGQLKRCLKVEGIGFLTGARLLTAFQRGEFSKADAFIAFLGMDLRVSKSGQKDGRRSLTKRGDPEARRLLHNAAMSASRTKAWKGFYEAQRARGFSTTQALVMLARKLARVVFALLKRQSEYQTKVS

SEQ ID NO: 18355 - protein, 316 aa, unidentified
  source 1..316: note = protein_c41dc81
  REGION 8..154: note = RuvC_domain
  SITE 11: note = RuvC_P1
  SITE 53: note = RuvC_P2
  SITE 93: note = RuvC_P3
  SITE 95: note = RuvC_P4
  SITE 98: note = RuvC_P5
  REGION 188..272: note = Tnp_domain
  SITE 196: note = Tnp_P1
  SITE 225: note = Tnp_P2
  SITE 233: note = Tnp_P3
  SITE 234: note = Tnp_P4
  SITE 246: note = Tnp_P5
MTSQVAVIGIDVAKETLSVCDTRSGEVFELANDRRTIKAWLKTLPGCCAIAIEATGIYHMDVATLAHTKGHRIYVINGFRLSNYRKGIGGRNKDDRSDAQLLARYLSHEQTQLDPWQPPSKAYCRLQTLLHRRATLVRSATSLRQSFSQDRTLANALKPVLKRMAVLERRLEKAIQTTLDEAGLKEQSKRCQAIEGIGPLTAAALNLAFLRGYFRNSDAFIAFLGLDVRLKESGRYSGRRKLTKQGDPEIRRLLHNAAMSAARTKRWKEIYLGYLARGLKKTEALTILARKLARIAFALMQTQTAYQPQEVRPSLT

SEQ ID NO: 18356 - protein, 340 aa, unidentified
  source 1..340: note = protein_68d8596
  REGION 6..148: note = RuvC_domain
  SITE 9: note = RuvC_P1
  SITE 52: note = RuvC_P2
  SITE 87: note = RuvC_P3
  SITE 89: note = RuvC_P4
  SITE 92: note = RuvC_P5
  REGION 210..295: note = Tnp_domain
  SITE 218: note = Tnp_P1
  SITE 248: note = Tnp_P2
  SITE 256: note = Tnp_P3
  SITE 257: note = Tnp_P4
  SITE 269: note = Tnp_P5
MDAAIIGVDLAKRVIQIHGAEKSGETVYRKKLTRDQFYRFMTEIPSCIVAFEACGSANHWARQMELIGHEARLIPPQYVRPFVKRQKNDAADAEAIVTAARQPGMRFVSAKTEEQQSKIVVFRGRERLVHQRTELVNALRSTLYEFGYVFPIGRASMPQIAALIDDPSADLPSIVRLECQDLLQQIAEKTARIDEKSKKLQEAGAQGEKGKLLQSMPGVGPMTALAVQAFAPEMTQFKSGRDFAAWLGLVPRQFSSGGKARLGRVSKAGQADIRRLLIIGAMSRIVGRARNNIAPDTWLGRMLARKPKMLVAVALANKMARQIWAMLTREERYRDPVMSA

SEQ ID NO: 18357 - protein, 347 aa, unidentified
  source 1..347: note = protein_518b308
  REGION 6..148: note = RuvC_domain
  SITE 9: note = RuvC_P1
  SITE 52: note = RuvC_P2
  SITE 87: note = RuvC_P3
  SITE 89: note = RuvC_P4
  SITE 92: note = RuvC_P5
  REGION 211..298: note = Tnp_domain
  SITE 219: note = Tnp_P1
  SITE 249: note = Tnp_P2
  SITE 257: note = Tnp_P3
  SITE 258: note = Tnp_P4
  SITE 270: note = Tnp_P5
MDITTIGIDLAKLVFQVHAVNAHGKVVLKKQLKRNQMAEYFVNLKPCLIGMEACGSAHHWARKLQSYGHTVKLMPPQYVKPYVKTNKNDAADAEAICEAVARPNMHFVPIKTLEQQGILTIHRIRQGYVKARTAQANQIRGLLAEFGIEIPLGIGYITKRVPELIEDASNDLPGIVRIEIQELLEHFKNLQVRVNDCEKKIVCWHRKDGTSKKLEAIPGIGPITASALVASIGDSKHFKNGRQVAAWIGLVPKQHSSGGKQTLLGISKRGDSYLRTLLIHGARAVIHHSVGKIKPTGTQSWVNQLAARKNKNIAAVALANKNARIVWALLNHDRDYQDNHKTLRVAA

SEQ ID NO: 18358 - protein, 408 aa, unidentified
  source 1..408: note = protein_d53244e
  REGION 9..156: note = RuvC_domain
  SITE 12: note = RuvC_P1
  SITE 62: note = RuvC_P2
  SITE 96: note = RuvC_P3
  SITE 98: note = RuvC_P4
  SITE 101: note = RuvC_P5
  REGION 251..338: note = Tnp_domain
  SITE 259: note = Tnp_P1
  SITE 290: note = Tnp_P2
  SITE 298: note = Tnp_P3
  SITE 299: note = Tnp_P4
  SITE 310: note = Tnp_P5
MEVLYARCAGLDVHQQTVVACARVASGTTVEQDVRTFGTATGDLLALADWLAAHGCTHVAMESTGVYWKPIWHVLDGHFELILANALQIRSVPGRKTDVNDAMWIADLLAHGLIRGSFVPPAAIHELRDLTRTRKQLVREVSQHTLRIQKVLEDANLKLTSVLSDVMGMSGRAMIEAIIRGEADAERLADLSVGRLKASRPAVVAALQGRVTAHHRFLLQLHLNQIDALEVAVRDVEARLGDALAPFQAAIDRLMTIPAVGRTVARVIVAEIGVDMHRFPTAAHLVSWAGLCPRQAESAGKRLSTRTRPGNPWLKTTLVQVAWVAARTRNTYLRAQFLRLKSRRGPKKAILAVAASILTAAYHILNDGTTYRDLGADYFERRSKDHLTRRLIHRLKELGLTVEVKPAA

SEQ ID NO: 18359 - protein, 387 aa, unidentified
  source 1..387: note = protein_9954a54
  REGION 6..158: note = RuvC_domain
  SITE 9: note = RuvC_P1
  SITE 57: note = RuvC_P2
  SITE 98: note = RuvC_P3
  SITE 100: note = RuvC_P4
  SITE 103: note = RuvC_P5
  REGION 221..306: note = Tnp_domain
  SITE 229: note = Tnp_P1
  SITE 259: note = Tnp_P2
  SITE 267: note = Tnp_P3
  SITE 268: note = Tnp_P4
  SITE 279: note = Tnp_P5
MGRVIIGMDPHKRSATIEVIDDGENMLAQGRFGTDTAGYQAMLKAGRKYRHRTWAVEGCNGIGHHIAQRLVADGETVLDVPAKLSARARVFATGQGRKTDPVDAHSVAVAALRTKGLRQVVVDDATVALRLLADRRDELGRARTDTVNRLHLLLLELVAGGAKKDLSALQARALLNTVRPRDIVGRTRRQLAAELITELAVIDKKIKTADARLTALIAATGSRLQELTGIGPSGAARLIGDVGDIARFASRGHFASWNGTAPLDASSGDQERHRLSRAGNRRINRALHIMAVVQLRHDTEGRAYYRRRVAAGKTPMEAMRALKRRLSDVVYRQMAADAKAARTGPGGQSGAALQSSAAGPIPMASSSDQSLPGPADTHPRTLLLARY

SEQ ID NO: 18360 - protein, 343 aa, unidentified
  source 1..343: note = protein_33c2c4d
  REGION 6..147: note = RuvC_domain
  SITE 9: note = RuvC_P1
  SITE 51: note = RuvC_P2
  SITE 86: note = RuvC_P3
  SITE 88: note = RuvC_P4
  SITE 91: note = RuvC_P5
  REGION 210..301: note = Tnp_domain
  SITE 218: note = Tnp_P1
  SITE 250: note = Tnp_P2
  SITE 258: note = Tnp_P3
  SITE 259: note = Tnp_P4
  SITE 272: note = Tnp_P5
MKNTIVGVDLAKDVIQVCVYTNKNVRSNTEMTPSDLIDFLANSKSLTIVFEACGTSNYWKQKAISLGHDARLISAKLVAAVRQNQKTDRNDALAIIQATLLPDVTFISGKSIEQQQLQSIMRLRELCVKQKTAVGNQLTALLLEFNIKVSNRNGGLKGAIESTLEDAENGLSFEFREALDMAWKQYLLLTQSIKTYDDCLEKAMETHSDCKKLLKLEGVGTLNAINLYIALGCAELGVFEKGKDASACIGLTPVQYSSGGKTRLGSIGKYVKNSVLRSQLITGAMSAVNHATNREARTTKDQWIKAMVERRGKKCTAVALANKTVRTAYSMLTQNTEYKAELI

SEQ ID NO: 18361 - protein, 391 aa, unidentified
  source 1..391: note = protein_bbdcabb
  REGION 6..163: note = RuvC_domain
  SITE 9: note = RuvC_P1
  SITE 61: note = RuvC_P2
  SITE 102: note = RuvC_P3
  SITE 104: note = RuvC_P4
  SITE 107: note = RuvC_P5
  REGION 267..351: note = Tnp_domain
  SITE 273: note = Tnp_P1
  SITE 303: note = Tnp_P2
  SITE 311: note = Tnp_P3
  SITE 312: note = Tnp_P4
  SITE 324: note = Tnp_P5
MSMYFVGIDISKYKHDCCIISAADQKLVSRFTVKNDKTGFEQLLTIFNSLSNPQDIRIGFESTAHYALNLELFLENANHSFMEINPVLIKEYKKSTSLRRTKTDSIDCESIARWLMTVEYKPHSKGFYHAYSLKSLTRLRDRLVRQRSFYLVKITNVLDHTFPEFKPFFHERLSKTALYLLENYGSAEKMARMNSASYEKLRSLSRGKFSPQQFIRLKELAANTVGVNNSIFDVELNSLLTLYKSLVKEIDTLETEINKLIEEVRPHYMSVPGIGAISAAVIYSEYGDISNFSTPAQMLAFAGIEPGVNDSGTESHGGRMVKHGSSGLRYVLINCCLPLIRFDMTFATYYAKKRGEGKPHRVAITHVAKKLVRVIYALEKQGVDFNAQKLR

SEQ ID NO: 18362 - protein, 361 aa, unidentified
  source 1..361: note = protein_e9798d2
  REGION 18..165: note = RuvC_domain
  SITE 21: note = RuvC_P1
  SITE 67: note = RuvC_P2
  SITE 105: note = RuvC_P3
  SITE 107: note = RuvC_P4
  SITE 110: note = RuvC_P5
  REGION 236..322: note = Tnp_domain
  SITE 244: note = Tnp_P1
  SITE 274: note = Tnp_P2
  SITE 282: note = Tnp_P3
  SITE 283: note = Tnp_P4
  SITE 295: note = Tnp_P5
MKRVQSNKLDFSGQNIYVGIDVHLKSWSVAILSEYSALKRFSQSPEPEALHKYLVSNYPGANYFSVYEAGFCGFWIHEKLTGLGITNIVVHPADVPTMSKEKLRKTDAVDCNKLARELRSGSLEGIYVPKADVLEIRSLIRTRNMIVKDSTRTKNRIKSLLRFHGVDIPEEFTRSSIGRWSKRFLAWLHSIELSTEYGKKTLELHLEQFVRLRNMLLQETRAIREISRKAPFEKPMRLLTSVPGIGVTTAATLMVELDDIVRFKNADHLASFIGLVPMCHSSGESNGTGDITVRRHFMLRCLLVEAAWIAIRKDPAMTVAYTEYRRRMNPQKSIIKIARRLVNRIYYVLKHEKEYIPCVVE

SEQ ID NO: 18363 - protein, 346 aa, unidentified
  source 1..346: note = protein_c709d12
  REGION 6..148: note = RuvC_domain
  SITE 9: note = RuvC_P1
  SITE 52: note = RuvC_P2
  SITE 87: note = RuvC_P3
  SITE 89: note = RuvC_P4
  SITE 92: note = RuvC_P5
  REGION 211..302: note = Tnp_domain
  SITE 219: note = Tnp_P1
  SITE 249: note = Tnp_P2
  SITE 257: note = Tnp_P3
  SITE 258: note = Tnp_P4
  SITE 270: note = Tnp_P5
MKISTVGLDLAKNVFQVHAVDEAGEGVVRKALRRRQVMPFFERLEPCLVGMEACGTSHYWGRELSALGHEVKLMPPAYVKAYVKRGKTDAGDAAAICEAVTRPSMRFVAIKSPDQQSLLAVHRARDLLIRQRTQLVNMIRGQLAEFGIVVAKGIHHVLNLVARLLDGEALGIPALAAKVVITLAEQLRDLQARIGDLEKDLVSWSREDPVVKCLQSIPGIGIITASALAASVTDPHQFTSGRQFAAWLGLTPRANCSGGRERLGRISKMGDQYLRRLLVNGMTSRLRWLHRHPETHPWAAKLLRRKPAKLVAVAMANKTARIAWAVMTRGEIYRAPQPSSQQQAAA

SEQ ID NO: 18364 - protein, 330 aa, unidentified
  source 1..330: note = protein_4ef02f7
  REGION 1..95: note = RuvC_domain
  SITE 33: note = RuvC_P3
  SITE 35: note = RuvC_P4
  SITE 38: note = RuvC_P5
  REGION 201..288: note = Tnp_domain
  SITE 209: note = Tnp_P1
  SITE 240: note = Tnp_P2
  SITE 248: note = Tnp_P3
  SITE 249: note = Tnp_P4
  SITE 261: note = Tnp_P5
MLITLLLDASQRLLYIPGRSVYYASGAYRGDAKSDAKDAAIIADQARMRRDLQPLRSGDQITVQLRILTARRADLVADRTRALNRLRAQLLEYFPALERAFDYGQHKAALILLTGYQTPEALRRAGAARLVAWLRKRKARTAEAVAAAALEAAHAQHTVLPGQDLAAAMVARLAQEVITLNTEIADTETMLEERFRRHRHAEIILSMPGFGVILGAEFLAATRGDMSAFDSADRLAGICGLAPVPRDSGRISGNLKRPRRYHRRLLRTCYLAAQSAARTDPASRAYYERKRAEGKHHRQAVLALARRRLNVLWAMLRDHTTYQIPTAAAA

SEQ ID NO: 18365 - protein, 342 aa, unidentified
  source 1..342: note = protein_f9027c0
  REGION 7..149: note = RuvC_domain
  SITE 10: note = RuvC_P1
  SITE 53: note = RuvC_P2
  SITE 88: note = RuvC_P3
  SITE 90: note = RuvC_P4
  SITE 93: note = RuvC_P5
  REGION 211..297: note = Tnp_domain
  SITE 219: note = Tnp_P1
  SITE 249: note = Tnp_P2
  SITE 257: note = Tnp_P3
  SITE 258: note = Tnp_P4
  SITE 270: note = Tnp_P5
MTKVSTIGLDLAKHVFQVHGVDERGAVIVRRRLRRSEVLKYFARLEPTIVGMEACSTSHHWARELRALGHEVRLMPAQYVKAYVKRQKNDAADAAAICEAVSRPSMRFVPVKTAEQQAALMLHRARDLLVRQRTMLINSLRAHLAEFGVIEARGPSRIVPLVTAIENGDAPVPELARRALLPLIAQLRASETQIDAIDAEILGWHQASDTSRRLATIPGIGPVIASAIAASVPDPSAFATGRQFAAWLGLVPRQTSTGGKPRLGRISKQGDANLRRLLIIGAQSVLRWARPGKSNAWIIALLGRRPRKVAAVALANKMARIAWALMARGERYRAPTIVTAAA

SEQ ID NO: 18366 - protein, 358 aa, unidentified
  source 1..358: note = protein_63d04bd
  REGION 6..169: note = RuvC_domain
  SITE 9: note = RuvC_P1
  SITE 68: note = RuvC_P2
  SITE 106: note = RuvC_P3
  SITE 108: note = RuvC_P4
  SITE 111: note = RuvC_P5
  REGION 213..299: note = Tnp_domain
  SITE 220: note = Tnp_P1
  SITE 250: note = Tnp_P2
  SITE 258: note = Tnp_P3
  SITE 259: note = Tnp_P4
  SITE 272: note = Tnp_P5
MKKIVIGIDISKEKIDASAIDVRNTRQGVLKLGYQTFENRPMGFRRMLVWARHLIKGTPLGEVLFCCETTGGYDRSLCDYIYAKDLDIWRESALQIKRSMGVRKGKDDKADSLMIAEYAMRHMDKAVIYETPSSTVRELKALLQYRHKLVQEKTEKKVRMSHLSDTAAKSKSMSFILRDARKSIKALEKSVKQCERQILELIKGDEELARSYGHIVSVSGIGIVNATALIVYSNNFRGITTANRMASYYGIASFRDTSGTSVDKKAYVKCYSNSLLKAYLTQSAEWTIRENGIYHDYYLRLKEKGKPYGIIINNARNKLIHLVFSLVKNDTDYERNYEYIRKLRREKVDFATELENIN

SEQ ID NO: 18367 - protein, 316 aa, unidentified
  source 1..316: note = protein_11d4d6a
  REGION 10..157: note = RuvC_domain
  SITE 13: note = RuvC_P1
  SITE 54: note = RuvC_P2
  SITE 94: note = RuvC_P3
  SITE 96: note = RuvC_P4
  SITE 99: note = RuvC_P5
  REGION 189..273: note = Tnp_domain
  SITE 197: note = Tnp_P1
  SITE 226: note = Tnp_P2
  SITE 234: note = Tnp_P3
  SITE 235: note = Tnp_P4
  SITE 247: note = Tnp_P5
MAMPVQRPHVGIDVGKFRLDIATDDGGHQSIENTPTAIGEWLDSLGESVRIALEATSHYHLELALEAHRRGHEIFLINGYRLNRYRDSIGTRAKTDAGDARLLLRYLSREIDELRPWSPPGKAYRQLQTLLRRRATLVQVRVALQQSLAGIPTLKASLQRIVAQLKQTDQLIQKHIRQCLKEAGWEADAKRCQAIEGVGPVTAASLTTLFHRGNFRNSDAFIAFLGLDVRVRDSGIKSGKRRLTRQGDPEARRLLYLAAMQAKRQPAWEAFYQRHVARGMAPTQALVALARKLARVAFSLMQKQTDYVPRIPCGET

SEQ ID NO: 18368 - protein, 312 aa, unidentified
  source 1..312: note = protein_19c0492
  REGION 3..149: note = RuvC_domain
  SITE 6: note = RuvC_P1
  SITE 50: note = RuvC_P2
  SITE 90: note = RuvC_P3
  SITE 92: note = RuvC_P4
  SITE 95: note = RuvC_P5
  REGION 185..269: note = Tnp_domain
  SITE 193: note = Tnp_P1
  SITE 222: note = Tnp_P2
  SITE 230: note = Tnp_P3
  SITE 231: note = Tnp_P4
  SITE 242: note = Tnp_P5
MFVGIDVSKATLDIAIRPSGERESVSNNESGIKALITRLAEVHPALIVLEATGGVEHQLTRALVSAELPVVVVNPRQVRDFAKATGQLAKTDAIDAMVLARFAEAVRPAVRPLPDETLLELRALIVRRRQLTEMIVAEKNRLGTVSKTVTKRIAAHIRWLQAELGRADKDLDQSIRRSPIWQENQDLLRSVPAIGPVVSRTLLAELPELGQLNRKQIAALAGVAPLNRDSGTLRGRRVIWGGRATVRATLYMAALVASRRNPVIAAFYKRLRAAGKTPKLALVACMRKLLTILNSMIKHRTRWSENTPLQTT

SEQ ID NO: 18369 - protein, 341 aa, unidentified
  source 1..341: note = protein_ceba7c0
  REGION 10..166: note = RuvC_domain
  SITE 13: note = RuvC_P1
  SITE 65: note = RuvC_P2
  SITE 105: note = RuvC_P3
  SITE 107: note = RuvC_P4
  SITE 110: note = RuvC_P5
  REGION 206..293: note = Tnp_domain
  SITE 214: note = Tnp_P1
  SITE 244: note = Tnp_P2
  SITE 252: note = Tnp_P3
  SITE 253: note = Tnp_P4
  SITE 266: note = Tnp_P5
MTAASPTLFVGIDIAAKTLAAAWLRPGEAASRPITLAQSPQGFAALQERLGQTGCVPAEVHVVMEATGSYWIALATTLVHSGYRVSVINPAQAHHFAKALLKRAKTDAIDAQTLAQLAALLQPAPWTPPPTVYYEVQQRLAQRDALLDVQRQLMNQLHALLLTPFVVASVKARMEELIDTLGQQITALDAEVREALAADAAWAASAARLQSIKGVGLITAAWLLVTTLNFTICPTPEAAAAYAGLAPNPYESGTSVRGRPRIGHTGNGRLRTALYLATLSAAQHNPVIKAFYERLRAAGKPTKVARCAAARKLLHIAWAVVRKEEDFDPAYAQRHPQPMAA

SEQ ID NO: 18370 - protein, 399 aa, unidentified
  source 1..399: note = protein_781ecd6
  REGION 24..187: note = RuvC_domain
  SITE 27: note = RuvC_P1
  SITE 83: note = RuvC_P2
  SITE 123: note = RuvC_P3
  SITE 125: note = RuvC_P4
  SITE 128: note = RuvC_P5
  REGION 224..311: note = Tnp_domain
  SITE 232: note = Tnp_P1
  SITE 262: note = Tnp_P2
  SITE 270: note = Tnp_P3
  SITE 271: note = Tnp_P4
  SITE 283: note = Tnp_P5
MSKDQCNFLFIILKYGIMNLKYSVGLDVSSKKINACMSCIDEKQKVIVKSSTVISNNKKGFKILQDWVLKHVKENVPVVVCMEATGIYHENCAYYLFEKGFSVSIILPNKAKKYLEAIGLKSKNDSIDAKGLSQMGAEQCLDTWQPMGTFFYELRLYTRQHQNVTELKTVLKNQFDALSFAMHQVDPVTNQLKETIILFDKQLKELEKVINNHIKSDAKIAERVANILEIKGIGILTLATILAETNGFELFNNYKQLVSYAGYDVVEAQSGTRVGKTKISKKGNSRIRRAMHMPSLVVIKCEVKPFKEPFKELFERTYNKHGIKMKSYVAVQKKLLTMIYYMWKKKERFEPNYIKSIQEKEQKSFSMFAFEKGIKNSPNKIEAAQGKHPVNDHSKFPLC

SEQ ID NO: 18371 - protein, 416 aa, unidentified
  source 1..416: note = protein_83fe43b
  REGION 4..160: note = RuvC_domain
  SITE 7: note = RuvC_P1
  SITE 56: note = RuvC_P2
  SITE 97: note = RuvC_P3
  SITE 99: note = RuvC_P4
  SITE 102: note = RuvC_P5
  REGION 269..355: note = Tnp_domain
  SITE 277: note = Tnp_P1
  SITE 308: note = Tnp_P2
  SITE 316: note = Tnp_P3
  SITE 317: note = Tnp_P4
  SITE 328: note = Tnp_P5
MYYVGIDWADENHQVFITDDSAQRLDAFSIENSRSGVEELFERIRYFVKDQKQALFALETSKGLLIDSILDAGYTVYPINPKSVDRYRDRYKVSGHKSDDFDAMVLANILRTDRHNYRPILPDSPITRELKILTRECCSLIRLKTLLSNQLTSCLKDYYPVALELFCKLDQPITLLFLKNFPTYQQAKQVSLPQWCKFLSKHHYRVGVKKKANEIYLKLQEPQFNVEPFVDNAKARYTLALVEQLQLLLAQIKSFENKIEQLLKQHTDSEIFLSLPGAGITLAARMVSEFGDNRERYKKVSSVQAEAGTTPITESSGNWKFVHFRSACRKSFRNTMHQFAFCSIKESSWAKQRYQQYVASGKKHTQSIRCLANAWLEIIFPMWKNYMPYSEQRHLLKYVKEQKPVNYSRNLNYLSV

SEQ ID NO: 18372 - protein, 412 aa, unidentified
  source 1..412: note = protein_414e38a
  REGION 4..160: note = RuvC_domain
  SITE 7: note = RuvC_P1
  SITE 57: note = RuvC_P2
  SITE 97: note = RuvC_P3
  SITE 99: note = RuvC_P4
  SITE 102: note = RuvC_P5
  REGION 274..361: note = Tnp_domain
  SITE 282: note = Tnp_P1
  SITE 312: note = Tnp_P2
  SITE 320: note = Tnp_P3
  SITE 321: note = Tnp_P4
  SITE 334: note = Tnp_P5
MNAVGIDVSKGKSTVTIRRPGDVVLMPPCDIPHTQSAISALIQQIKELDGETKACMEHTGRYYEPVATWLSDAGIFVSAVNPILIRDFGDDSLRAPKTDKADSKKIARYTLDRWAKLKQYGSMDKTRNQLKTMNRQFGFYMDQKTAMKNNLIALLDQTYPGANDFFDSPARSDGSQKWVDFVYTYWHVDCVRSKSLPAFTEHYQNWCKRKGYNFSADKAEKVYQASCDLIAVFPKDSNTKMLIRQAVAMLNTASETVESLRRRMDETAATLPEYPVVLAMNGVGPTLGPQLIAEIGDVTRFTHRGALTAFAGVDPGKNDSGQHVQKSVRTSKKGSPSLRKTLFQIMDSLIKRSPGDDAVYAFMDKKRAQGKPYYVYMTAGANKFLRIYYGRVNEYLASLDQAPKGKENTDGV

SEQ ID NO: 18373 - protein, 380 aa, unidentified
  source 1..380: note = protein_e52ca73
  REGION 1..137: note = RuvC_domain
  SITE 34: note = RuvC_P2
  SITE 74: note = RuvC_P3
  SITE 76: note = RuvC_P4
  SITE 79: note = RuvC_P5
  REGION 251..338: note = Tnp_domain
  SITE 259: note = Tnp_P1
  SITE 289: note = Tnp_P2
  SITE 297: note = Tnp_P3
  SITE 298: note = Tnp_P4
  SITE 311: note = Tnp_P5
MIRKPFDVSHTSQNLNELADYLSSLDGTTKIVMECTGRYHEPMIKALSEAGLFISIVNPHLIKNFGNNSLRKVKSDPADARKIARYTLDNWTELRQYSGMDNTRTQLKTLNSQFSFFMKQKVAAKANLIALLDNTYPGVNKLFDSPTREDGSEKWVDYAYSFWHADCVRKIGLKAFTERYMSFCKKHHYIFQQDKPEKLFNASKELVAVFPKEKTYKLLIQQSIQQLNLASEHVERLRREMNELASTLPEYSTVMGIYGVGKTYGPQLIAEIGDVSRFTHREALTAFAGVDPGVDESGQHKSKSNRASKVGSARLRKTLFQIMTTLLQNAPEADPVYRFLDKKRSQGKPYYVYMTAGANKFLRIYYGKVKECLRNLEQTE

SEQ ID NO: 18374 - protein, 339 aa, unidentified
  source 1..339: note = protein_e3327b1
  REGION 6..147: note = RuvC_domain
  SITE 9: note = RuvC_P1
  SITE 52: note = RuvC_P2
  SITE 87: note = RuvC_P3
  SITE 89: note = RuvC_P4
  SITE 92: note = RuvC_P5
  REGION 210..298: note = Tnp_domain
  SITE 218: note = Tnp_P1
  SITE 248: note = Tnp_P2
  SITE 256: note = Tnp_P3
  SITE 257: note = Tnp_P4
  SITE 269: note = Tnp_P5
MKLIPVGIDIAKSVFQVHYADEETGEIVSKAVKRAKFLEFFANRAPCLIGMEACGGAHHWARRLIAMGHQVRLLPARFVKAFNIRNKNDAADARAIWLAVQQPGKAVAVKTEMQQAMLALHRMRSQLVKMRTMQSNGLRGLLAEYGEIAGAGRASLAKAVPEILERLAERLPAVLIDSWREHWAEIVRLDERITLIEQRMQAWKKEDPAVKAISDIPGVGLLTATAAVAVMGDAQAFRSGREFAAWLGLVPRQTGSGGKIQLHGISKRGDTYLRTLLIHGARSVLANARKPGPWVEEITKRRPHNVVAVALANKMARTIWALLAHGRTYQRDYVSVRPA

SEQ ID NO: 18375 - protein, 425 aa, unidentified
  source 1..425: note = protein_4016d40
  REGION 9..157: note = RuvC_domain
  SITE 12: note = RuvC_P1
  SITE 63: note = RuvC_P2
  SITE 97: note = RuvC_P3
  SITE 99: note = RuvC_P4
  SITE 102: note = RuvC_P5
  REGION 259..347: note = Tnp_domain
  SITE 267: note = Tnp_P1
  SITE 298: note = Tnp_P2
  SITE 306: note = Tnp_P3
  SITE 307: note = Tnp_P4
  SITE 318: note = Tnp_P5
MKVTYLTCCGVDVHKSFLVATIVKTTGGIEPSYQKKRFSTFNNSILMFKQWLIENDCHDVCMESTGKYWVPVFNLLEDEINVTIANPKWVKAVKGNKDDTKDSKWIGDLFRLGLVKGSYIPCKKIRILREYTRYRYKLVSCRSSEKNRYQNALTVCNVALDSVVSDIFGKSSTSIIDYLLEQTDNSINHEEIASKLLRSLKSKEDAVIESIDGYQMTDSQKYRMRLVRAHMDYITAEINDVDSMIESMISSDPDYENAIRFLMTIPGVKRDSAIAIISEIGIDMSQFCSSKRLCCWAGLVPGSNESGGKKKSVRITRAGVYLKPALVQCAHAAVRSEKSPYHKKKYESLMKRRGKKRAIVAIARMILTAVYQMLSTGEEWNPSDLYKIDMPETLVEKQKAKAIKQAMKLLEREGLYPPPEEPLAS

SEQ ID NO: 18376 - protein, 340 aa, unidentified
  source 1..340: note = protein_232a33e
  REGION 7..149: note = RuvC_domain
  SITE 10: note = RuvC_P1
  SITE 53: note = RuvC_P2
  SITE 88: note = RuvC_P3
  SITE 90: note = RuvC_P4
  SITE 93: note = RuvC_P5
  REGION 211..297: note = Tnp_domain
  SITE 219: note = Tnp_P1
  SITE 249: note = Tnp_P2
  SITE 257: note = Tnp_P3
  SITE 258: note = Tnp_P4
  SITE 270: note = Tnp_P5
MSTINVIGIDIGKSTFHLVGHDSSGREVCRKKLSRPKLIQFLAKTERTTVAMESCGGSHWLARKCQEFGHKALLIPPQYVKPYVKTNKNDFIDADAIAEAATRPSMRFVSIKTESPQVVSVIQRIRSSYLKDRTACMSRIGSILLEFGMSFPKSHAKMKALFQWIADFGEPIPAMLLLELRDHHEYYLKLNQLILTQDKKLKEIVDHDERAQLLKTIPGVGNLTASRCLSDISNASDFKNGRHLAAWIGLVPRQFSTGGKPRLLGISKRGSKGLRELFIHGARAVLARPENAIATFGNWILELLSRKPYNVVVVALANKLARIAWSVLSTKQAFEVRVQA

SEQ ID NO: 18377 - protein, 388 aa, unidentified
  source 1..388: note = protein_f421217
  REGION 5..163: note = RuvC_domain
  SITE 8: note = RuvC_P1
  SITE 62: note = RuvC_P2
  SITE 102: note = RuvC_P3
  SITE 104: note = RuvC_P4
  SITE 107: note = RuvC_P5
  REGION 263..352: note = Tnp_domain
  SITE 271: note = Tnp_P1
  SITE 301: note = Tnp_P2
  SITE 309: note = Tnp_P3
  SITE 310: note = Tnp_P4
  SITE 323: note = Tnp_P5
MEPVVGLDVSKGMSVAQAFTSRNVAVGKSKTILHTEDGFEEFGEWLGELRQKTGKEPVVVLEATGHYHRGLVVYMERSGFCHMVINPLQSKRAKGSQLRKVKTDAADAWHLAEMYYRGDVKPHRKGDEQLLELQHLTRQHEFITAMYVQAKLNMRALLDQVFPSYEAVFYDLYSSTALRVLHQYLSGVTITEETIRETVQRSHSQTWIKGKLAQLQSIAPIKGQSPAQTIALQSMLSLLIAFQEQLGHMEQQIEETVVVIPEVALLKTIPGVGDKLAAALVAEIGDANQFGHAKQLVAYAGLDPSVFSSGKFTASSSKITKRGSKRLRRALYIAVQCGLRKGQNERIKAYYDKKKKEGKPYKVAVIACANKLLHHVYAILTRGEPYRM

SEQ ID NO: 18378 - protein, 340 aa, unidentified
  source 1..340: note = protein_9e0b8e4
  REGION 6..148: note = RuvC_domain
  SITE 9: note = RuvC_P1
  SITE 52: note = RuvC_P2
  SITE 87: note = RuvC_P3
  SITE 89: note = RuvC_P4
  SITE 92: note = RuvC_P5
  REGION 211..297: note = Tnp_domain
  SITE 219: note = Tnp_P1
  SITE 249: note = Tnp_P2
  SITE 257: note = Tnp_P3
  SITE 258: note = Tnp_P4
  SITE 270: note = Tnp_P5
MTAHVCGIDIGKTVFHLIGLSKEGQIVIKKRFTRKQLITHTVNMPACLIGMEACPGAHFLARVLGAQGHEVKLMPAEYVRPFVKSNKNDYVDAEAIAEAVQRPTMRFVPIKCEAQLDLQALHRVRDRWMGRRTAVINQIRGFLLEHGITIAVGPAHLKRQIPSILEDADNLLSSRMRALLVELRDEWEKLETQIEEIDREFAQAAKKEENCRRLLTIPGIGPLTATALTAAIGNGTAFHKSRDLAAWLGLVPRQHSTGGKSRLLGISKRGNPYLRRLFIHGGRAVVARVRRENHTFGSWLDHLEARSPRNVVVVAMANKLARIAWAVLTRGQVYCATACP

SEQ ID NO: 18379 - protein, 305 aa, unidentified
  source 1..305: note = protein_f113f15
  REGION 9..112: note = RuvC_domain
  SITE 52: note = RuvC_P3
  SITE 54: note = RuvC_P4
  SITE 57: note = RuvC_P5
  REGION 172..259: note = Tnp_domain
  SITE 180: note = Tnp_P1
  SITE 210: note = Tnp_P2
  SITE 218: note = Tnp_P3
  SITE 219: note = Tnp_P4
  SITE 231: note = Tnp_P5
MIKDPKWQIGRIGLEAGPLSQWLYEGLAKAGLPVICIETRHAKAFLKAQPNKTDRNDARGMAQMMRVNLYRPVHVKTLTSQKHRALLTARKLLQEKAIAIANDIRGSLRNFGLKVGLAGKIKFEERINELVEDRPDLYEIMQPLLAARKLLRDEFTKLHKKVLDLVRDDEVCRRLTTIPGVGPVVALTYTATIDTPGRFAHSKAVGSVLGLTPKLNESGESKRVGRVSCCGDAMMRSLLYEAAQVLLVNVKKWSWLKAWAMNIAKRRGRQKAVVASARRLAVIMHRMWSDGTEFCWTRESLPVAA

SEQ ID NO: 18380 - protein, 346 aa, unidentified
  source 1..346: note = protein_d20eef8
  REGION 5..147: note = RuvC_domain
  SITE 8: note = RuvC_P1
  SITE 51: note = RuvC_P2
  SITE 86: note = RuvC_P3
  SITE 88: note = RuvC_P4
  SITE 91: note = RuvC_P5
  REGION 210..294: note = Tnp_domain
  SITE 218: note = Tnp_P1
  SITE 248: note = Tnp_P2
  SITE 256: note = Tnp_P3
  SITE 257: note = Tnp_P4
  SITE 269: note = Tnp_P5
MITTVGLDLAKSIFQVHAIAGDGKVIERRTLRRSQVLPFFKKLSPCLVGIEACASANYWARQLQELGHDVRLMPPAYVKAYVKRNKTDAADAEAICEAVTRPTMRFVPIKAEDEQAAGMVLKTRELLIRQRTQAVNALRSHLAEVGIVAATGMTSIAKLSAIVRDATDNRLPDAARMALMEIAEQIELLADSIERLDKEILTSVKADEAARRLISIPGVGPIIAATVRSAVPDPAGFRTGRDFAAWIGLTPRAHSSGGKERIGSISKRGNQQLRTLLVLGATAVLKLARTGFKMPQWIVALLQRRPFKVVAVALANRIARIIWALLVKGGIYRTPLIATPVNRTRQ

SEQ ID NO: 18381 - protein, 342 aa, unidentified
  source 1..342: note = protein_64eae20
  REGION 4..164: note = RuvC_domain
  SITE 7: note = RuvC_P1
  SITE 59: note = RuvC_P2
  SITE 99: note = RuvC_P3
  SITE 101: note = RuvC_P4
  SITE 104: note = RuvC_P5
  REGION 268..337: note = Tnp_domain
  SITE 276: note = Tnp_P1
  SITE 306: note = Tnp_P2
  SITE 314: note = Tnp_P3
  SITE 315: note = Tnp_P4
  SITE 328: note = Tnp_P5
MILVGIDIGKNKHTFSIIDKGACEILLNPSVFDNNQTGFLYLIKKLSSYTKSELLIGMEDTGHYHLALLKHLLDNRYTVALINPTTTDLTRKIQGGITKNDTLDSITICDVIFSNHRKKPYRITKVNRFDLYEQKQLTHHHHNLKEELNIYKNRLQKCIDIVFPEFNSLFNSKYGIVYMSILKTFSSANAIANADISSIRKYFEFKGQGGRRISLSAEQLKTTAKISIGIPSAAEEIQIHHLVGQIELLEEQLSEIDKRIAEFSIKNNSAILSIPGISRFSGTSILAELGDICNYQKSSQIIKFAGVAPYHYESSQFTAQHTAITKKGSRYLEKPCIRLFCL

SEQ ID NO: 18382 - protein, 321 aa, unidentified
  source 1..321: note = protein_2a6a0e0
  REGION 8..147: note = RuvC_domain
  SITE 11: note = RuvC_P1
  SITE 52: note = RuvC_P2
  SITE 92: note = RuvC_P3
  SITE 94: note = RuvC_P4
  SITE 97: note = RuvC_P5
  REGION 191..278: note = Tnp_domain
  SITE 199: note = Tnp_P1
  SITE 229: note = Tnp_P2
  SITE 237: note = Tnp_P3
  SITE 238: note = Tnp_P4
  SITE 251: note = Tnp_P5
MNKCSQIYGVDISKNVFDVVDSKGNHSQFKNDGNGFKAFQKALPADALVVMEATGYYHYRLAQFLYEQSVKVSVVNPLSVKRFIQMKLSRIKTDKSDAKAICEYATVNEVPLYTARDKNQAECLQLMRLIDIYLKQSTALKNKLHGEKTLGTPSKVVYHSLNRSLKAVQKEIQILEDRLTEIVKEEQQKQLTLLKSIPGMGSKTAIMLIVLTEGFSNFENARQLCSYTGITPTLRESGISVRGRSRITKMGNAKLRNLLFMCSFSACKHNKACREIYERIIAKGKSKKLALIAVCNKLLKQEFAIAKSGLPYEENFVSRLA

SEQ ID NO: 18383 - protein, 388 aa, unidentified
  source 1..388: note = protein_9d25e58
  REGION 4..160: note = RuvC_domain
  SITE 7: note = RuvC_P1
  SITE 58: note = RuvC_P2
  SITE 98: note = RuvC_P3
  SITE 100: note = RuvC_P4
  SITE 103: note = RuvC_P5
  REGION 264..351: note = Tnp_domain
  SITE 272: note = Tnp_P1
  SITE 302: note = Tnp_P2
  SITE 310: note = Tnp_P3
  SITE 311: note = Tnp_P4
  SITE 324: note = Tnp_P5
MIYVGIDIAKLNHFAAAISSDGEILIEPFKFSNNYDGFYLLLSHLAPLDQNSIIIGLESTAHYGDNLVRFLISKGFKVCVLNPIQTSFMRKNNVRKTKTDKVDTFVIAKTLMMQDSLRFMALEDLDYIELKELGRFRQKLVKQRTRLKIQLTSYVDQAFPELQYFFKSGLHQNSVYAVLKEAPTPNAIASMHLTHLAHTLEVASHGHFGKDKARELRVLTQKSVGVDDSSLSIQITHTIEQIELLDSQLFSTELEMANLVTCLHSVIMTIPGIGVVNGGMILGEIGDIHRFSNPKKLLAFAGLDPTVYQSGNFQAHRTRMSKRGSKMLRYALMNAAHNVVKNNATFKAYYDAKRAEGRTHYNALGRCAGKLVRVIWKMLTDEVAFNLE

SEQ ID NO: 18384 - protein, 344 aa, unidentified
  source 1..344: note = protein_462994f
  REGION 6..147: note = RuvC_domain
  SITE 9: note = RuvC_P1
  SITE 52: note = RuvC_P2
  SITE 87: note = RuvC_P3
  SITE 89: note = RuvC_P4
  SITE 92: note = RuvC_P5
  REGION 211..296: note = Tnp_domain
  SITE 219: note = Tnp_P1
  SITE 249: note = Tnp_P2
  SITE 257: note = Tnp_P3
  SITE 258: note = Tnp_P4
  SITE 270: note = Tnp_P5
MKVTTVGIDLAKNLFQLHGVNEYGKVVFKKQLRRDQMAEFFVNLPACLIGMEACSSAHHWARKLQQFGHTVKLMAPQFVKPYVKTNKNDAADAEAICEAVTRPNMRFVPIKNVEQQAVLALHCVRQGFVKARTAQANQIRGLLGEFGLIVPQGIGHIAGRVPELIEDASNDLPGSFRLLVQRMLDHLKELGRQVDELEMQIVKWHRQSDASSKLAKVPGIGPITASALVASIGDAKSFDNGRQVAAWLGLVPKQHSSGGKQNLLGISKRGDTYLRTMLIHGARAVIYWAEKKPDNCSWINRIVSRRNRNVASVALANKNARIVWALLAHDREFRPDYTTAKASA

SEQ ID NO: 18385 - protein, 411 aa, unidentified
  source 1..411: note = protein_bbc12e4
  REGION 5..163: note = RuvC_domain
  SITE 8: note = RuvC_P1
  SITE 62: note = RuvC_P2
  SITE 102: note = RuvC_P3
  SITE 104: note = RuvC_P4
  SITE 107: note = RuvC_P5
  REGION 273..373: note = Tnp_domain
  SITE 281: note = Tnp_P1
  SITE 311: note = Tnp_P2
  SITE 319: note = Tnp_P3
  SITE 320: note = Tnp_P4
  SITE 333: note = Tnp_P5
MNPVVGLDISKGESQVQAFLDKGKPYRKSFKVDHTLEGLNDLFMFLGDVQKEAGRKPTVILEATGHYGAPVVHYLEERGYLMIIINPLISYKARGSSLRKVKTDAIDAYLLCELFYKEELEPYKKRGVQLLNLRNLTRQHENITGVMIQTKLQFQAVLEQVFPEYKGVFGDLYSVVSLLTLSEFPSSEDILKASEESITDKIFELCKSRSIKWANEKAVQLKIAAARNPFEKTVYLSHILSLDMYINILLQYKEHLSKLESEIDALAKEIEEYTIIKSIPGIGQKIAATIISEIGEIDRFNNPKKLVAFAGVDPSVFESGKFSATKNRITKRGSSRLRHVLFMAVRCAIRDCRKAKTDDIVIPRNKKLREFYDKKREEGKPYKVAMIACVNKLLHWIFALLKNKTTFQDLA

SEQ ID NO: 18386 - protein, 317 aa, unidentified
  source 1..317: note = protein_ee9c911
  REGION 9..152: note = RuvC_domain
  SITE 12: note = RuvC_P1
  SITE 56: note = RuvC_P2
  SITE 96: note = RuvC_P3
  SITE 98: note = RuvC_P4
  SITE 101: note = RuvC_P5
  REGION 191..275: note = Tnp_domain
  SITE 199: note = Tnp_P1
  SITE 228: note = Tnp_P2
  SITE 236: note = Tnp_P3
  SITE 237: note = Tnp_P4
  SITE 248: note = Tnp_P5
MTTPNDAYVGIDVGKTWLDVALWGNNAVWRVSNDDEGVAEIMARVAALGLQLIAVEATGGYEQLVVQTMLLNSLPVAVVNPTRVRALSKATGKLAKTDVIDARLIAEYAFKIQPEALAPKEAQEIRLNALVTRREQLVEMRTAEQNRLGTAHNSMQVDIREHIEWMNARIQELEVEINGLVDSLPEWRKQAERLDSIPGVGKITAVTVLAEMPELGQLNRQKIAALAGLAPFNRDSGQKRGKRRIFGGRKGIRRVLYMACLSATKCNPVIRSLYLRLTKKGKLFKVAITACMRKMLTIMNAMTRDQVNWRPPEPIPN

SEQ ID NO: 18387 - protein, 400 aa, unidentified
  source 1..400: note = protein_4e441ec
  REGION 4..161: note = RuvC_domain
  SITE 7: note = RuvC_P1
  SITE 57: note = RuvC_P2
  SITE 98: note = RuvC_P3
  SITE 100: note = RuvC_P4
  SITE 103: note = RuvC_P5
  REGION 276..364: note = Tnp_domain
  SITE 284: note = Tnp_P1
  SITE 314: note = Tnp_P2
  SITE 322: note = Tnp_P3
  SITE 323: note = Tnp_P4
  SITE 336: note = Tnp_P5
MISVGVDVSKGKSTVCVLKPYGEIVCSPFEVLHVEKELESLDSLLQKLDGEIRVVMEATGIYHLPILLFLQEKGYFVSVVNPYAMKKYAKDNSIRGAKTDRLDSVMIAHYGIEKWFKLQKYDSDEELYAELKLLGRRYRYYMELHVKALQELTHILDYVMPGIKKLFNSWDEASGKDKLSDFVERFWHFDLITSMSLDEFVDEYLIWAEEKKYHRSRSKAETVYELASGGISTLSSSTPSTKMLVQEAVTVLRAVDNSLSLILSRMQELAKSLPEYSTVRAMGGVGDVLAPKLIAEIGDVRRLHSAKALIAWAGIDPPPYESGQFVGSRRKITKRGSSTLRKVGYEVMRVLKSHKAPKDDAVYNYILKKEREGKDKKHAKIAGLNKFLRIYYARVMAVYQ

SEQ ID NO: 18388 - protein, 452 aa, unidentified
  source 1..452: note = protein_965af99
  REGION 26..185: note = RuvC_domain
  SITE 29: note = RuvC_P1
  SITE 84: note = RuvC_P2
  SITE 124: note = RuvC_P3
  SITE 126: note = RuvC_P4
  SITE 129: note = RuvC_P5
  REGION 301..394: note = Tnp_domain
  SITE 308: note = Tnp_P1
  SITE 338: note = Tnp_P2
  SITE 346: note = Tnp_P3
  SITE 347: note = Tnp_P4
  SITE 360: note = Tnp_P5
MPAGKDKTMHYKKVLAMIADIPYLSVGLDVGADFSWMSIMLPNGTLTGKPFKILHSDPSSRELAVTKIKEAQEMYSLESRCFLESTGIYHIPLLCFLRDKGFDCSVINPIITKNSTNLNIRKLHNDKFDSKKAAKIGLDASLKISIVPDDDIIDLRNLVRDYYYFKDLQSAIVLKLNAELKVSFPAYLQVFSKITTQTSLKLLEAYPLASDMLNAPKDEVIETIRTTARFGTKYAFTKYESLCAAAKDAAVFGRALPSNAIRIRLYINSYQEYQKYLDSILEELHKAVDKLQGKPAYDRICILQSLRGGGFLSAVVLIAEMGSFDLFSSPKKLYAYFGLDPAVKQSGKFNGDNVHMSKRGSSLARRILHMVALNNLKVDKGTKLPVNPVIYDYYVRKCSSKKKKVAVGAVMHKICNIIFAMLRDNKPFEIITPEEHCDRYAVEHPEIINKAA

SEQ ID NO: 18389 - protein, 353 aa, unidentified
  source 1..353: note = protein_6d15ab0
  REGION 4..158: note = RuvC_domain
  SITE 7: note = RuvC_P1
  SITE 56: note = RuvC_P2
  SITE 97: note = RuvC_P3
  SITE 99: note = RuvC_P4
  SITE 102: note = RuvC_P5
  REGION 220..306: note = Tnp_domain
  SITE 228: note = Tnp_P1
  SITE 258: note = Tnp_P2
  SITE 266: note = Tnp_P3
  SITE 267: note = Tnp_P4
  SITE 278: note = Tnp_P5
MIVIGIDPHKSTHTATALDSATNSDLGSIRIDASITEYKRLITWAKAWPERRWAIENADGLGHHLALWLLALGEVVLDIPTTATARVRELSRGGRRKNDRIDAAAAASVAALQGDARRVHPETTNDALALLDERRVNLSYSRTRTVNQLHALLRDLMAGGAPTSLTPKKAAAAIRGFRAKTAPDKIRVELAKDLIADFERLDQQLAANSRKIVTLLDEHGTRLRDIDGVGPVLAARILGRSGHASRFPSAAAYANYTGTAPVQIASADASHHRLSRYGDRQLNSAIYTIAMVQIRMPASSGRAFYDKKIAEGKSPRSAARALKRHLASHLWRVMLADEKRANRAPSNQVSTAA

SEQ ID NO: 18390 - protein, 424 aa, unidentified
  source 1..424: note = protein_2743a58
  REGION 23..183: note = RuvC_domain
  SITE 26: note = RuvC_P1
  SITE 81: note = RuvC_P2
  SITE 122: note = RuvC_P3
  SITE 124: note = RuvC_P4
  SITE 127: note = RuvC_P5
  REGION 290..376: note = Tnp_domain
  SITE 298: note = Tnp_P1
  SITE 328: note = Tnp_P2
  SITE 336: note = Tnp_P3
  SITE 337: note = Tnp_P4
  SITE 349: note = Tnp_P5
MKFKMQNKQNQLIERISVKHLVVGVDIAQQFHVARAVNFRGIVIGDPLTFKNDEEGFTSLLKWIKNLQRLNNLCEAIVGMEPTGHYWINLSKWLLKQNIEVVTVNPHLVKRNKENRDNTQSKSDKKDALVIADMVKNGYYSEVRYTSESFEKLRVLMSNRDVVVKRLVSSINQLNRWVDIVFPELRQVFKDITANGAITTLRLFPTPMELATKQPHEIILGWKSLMKRQPGLKKAQLLLQVAKNSIGSRQALDAYKFHLEQLLEEYDLAIIQLERVEKQVIDVLNKIPYAKKLLTIKGISEISLAGILGEAGDISGFSHGNSLLRHAGLHLAEASSGKWKGQIVLSKRGRSRLRRFLFLATMSLVVNNPEFQAIHTHNVKVKKIKKMKSIMKLVGKLARIFVGMARRNESYNSEKLQTITPMAA

SEQ ID NO: 18391 - protein, 321 aa, unidentified
  source 1..321: note = protein_caf5859
  REGION 8..150: note = RuvC_domain
  SITE 11: note = RuvC_P1
  SITE 52: note = RuvC_P2
  SITE 92: note = RuvC_P3
  SITE 94: note = RuvC_P4
  SITE 97: note = RuvC_P5
  REGION 191..278: note = Tnp_domain
  SITE 199: note = Tnp_P1
  SITE 229: note = Tnp_P2
  SITE 237: note = Tnp_P3
  SITE 238: note = Tnp_P4
  SITE 251: note = Tnp_P5
MNKNNQIYGVDISKGVFDVVNSTGEHFQFKNNVSGFKSFLKILIKEDLVVMEATGYYHYRLAQFLYEKGIKVSVVNPLSVKRFIQMKLSKIKTDKSDAKAICEYASTNEVPLYTARDKSQAEALQILRLIAIYTKQSTALKNKLHGEKVLGKPSKVVYHSLNRSLKVLQNEIKTLESRLTEIVKDDQQKQLTLLKSIPGLGNKTAIMLIVLTHGFTSFEDASQLCCYAGITPTIRASGSSVRGKSRISKIGNPKLRNLLFMCSFTACKHNKACRDIYERIIAKGKSKKLALIAVCNKLLKQAFAVATSGLPYDENYASRLG

SEQ ID NO: 18392 - protein, 358 aa, unidentified
  source 1..358: note = protein_d095380
  REGION 5..160: note = RuvC_domain
  SITE 8: note = RuvC_P1
  SITE 58: note = RuvC_P2
  SITE 99: note = RuvC_P3
  SITE 101: note = RuvC_P4
  SITE 104: note = RuvC_P5
  REGION 264..318: note = Tnp_domain
  SITE 270: note = Tnp_P2
  SITE 278: note = Tnp_P3
  SITE 279: note = Tnp_P4
  SITE 291: note = Tnp_P5
MLYYIGINISKFKHDIAEINSDGEVITPSWTFYNTDEGFSSLKEFLAGISVKIRIGFESTGHYGQNLKLFLEANHYTFMEFNPLVLKKFVASKTLRRTKTDSLDAFSIAQYLMTVEYKPYPNSFYHIKAPKSLTRFRNNLIKQRSRQLVELTNILDLVFPEFKPFFKNILVTTALYILFNYQIPEKIANMNSKSFEILRAKSKGRFTTAKFNKLKQLDKNTVGHSTDYLVMQMEMTIEIYNQMDAKIDLWESEIKTILSDLHIPIVSIPGIEPGYYHSGTSERGGRMVKHGSPYLRYALMNCALTLVQHNIVFAEYYSKKLAEGKTHRVSLSNAAKKFVRMINTMQIKNITFDYDLAH

SEQ ID NO: 18393 - protein, 338 aa, unidentified
  source 1..338: note = protein_63e2515
  REGION 6..147: note = RuvC_domain
  SITE 9: note = RuvC_P1
  SITE 52: note = RuvC_P2
  SITE 87: note = RuvC_P3
  SITE 89: note = RuvC_P4
  SITE 92: note = RuvC_P5
  REGION 209..294: note = Tnp_domain
  SITE 217: note = Tnp_P1
  SITE 246: note = Tnp_P2
  SITE 254: note = Tnp_P3
  SITE 255: note = Tnp_P4
  SITE 267: note = Tnp_P5
MEFKRIAIDTSKHVFTIHGVDEQERPVLRRELKRGQVEAFFSKLAGTEVVLEACGGSHHWGRMFQKMGHDVRLIPPQYVKPFVKRSKNDRNDAEAISEAAARPAMRSVAVKSLDQQANGIIVKHREMLVGQRSQAINALRGHATEFGVVAAKGAAKVESLLAVLAGDINIPAAARAMFEHMGGHIAALENRIAVLDAELVALHKAHPVSRLLVEIPGVGPMIAATMALTVDPANFASGRHFSAWLGLTPREHSSGGKQRLGRISKAGNERLRTLLVVGAMSVIRFAKPGSKSASTWLLQLLERRPRKLAAVALANKMARIIWAMMARGEAYRRQPIVA

SEQ ID NO: 18394 - protein, 391 aa, unidentified
  source 1..391: note = protein_4cd4cd3
  REGION 6..163: note = RuvC_domain
  SITE 9: note = RuvC_P1
  SITE 61: note = RuvC_P2
  SITE 102: note = RuvC_P3
  SITE 104: note = RuvC_P4
  SITE 107: note = RuvC_P5
  REGION 267..351: note = Tnp_domain
  SITE 273: note = Tnp_P1
  SITE 303: note = Tnp_P2
  SITE 311: note = Tnp_P3
  SITE 312: note = Tnp_P4
  SITE 324: note = Tnp_P5
MSMYFVGIDISKYKHDCCIISAADQQIVSKFTVKNDKDGFEHLLTTLNSLSNPEDIKIGFESTAHYALNLELFLENAHHNFMEVNPVLIKEYKKSTTLRRTKTDSVDCESIARWLMTVEYKPHSKGFYHSYSLKSLTRLRDRLIRQRSFYLVKITNVLDHTFPEFKPFFNKRLSKTAIYLLENYGSAEKMAHMNSASYDKLRCASRGKFSIQQFLHLKELAANTVGVNNSIFDIELNSLLTLYNSLCKEIKTLEAEITKLIEEVHPHYMSIPGIGPISAAVIYAEYGDISNFSNPGQMLAFAGIEPGINDSGTESHGGRMVKHGSSQLRYVLLNACLPLIRFDITFATYYAKKRAEGKKHRVAITHVAKKLIRVIYALERQDVDFNVQKLR

SEQ ID NO: 18395 - protein, 330 aa, unidentified
  source 1..330: note = protein_ba886f1
  REGION 5..151: note = RuvC_domain
  SITE 8: note = RuvC_P1
  SITE 55: note = RuvC_P2
  SITE 95: note = RuvC_P3
  SITE 97: note = RuvC_P4
  SITE 100: note = RuvC_P5
  REGION 196..280: note = Tnp_domain
  SITE 204: note = Tnp_P1
  SITE 234: note = Tnp_P2
  SITE 242: note = Tnp_P3
  SITE 243: note = Tnp_P4
  SITE 256: note = Tnp_P5
MSVYAGLDIGAYSVDLVTRQADKPSKARRYKQTADGHNALIAQLKKSKPALIVMEATGIYYFDLAVTLAEAGLPVAVINPKSFRHFAELKLQTSKTDAIDSELLAEYGQRMAPAPWTPPDHHHQALRSLGRQINRLVGCRAQARNRLHALKATRSTPGLLIEDEKDGIAMLERRIDRLRQAALDLLAEAPELQRRYHHLLAAKGIGEASALSILAELCVLPTSLKSGQISRHAGLDVRQHQSGTSVNRPARISKAGNVYLRSALYMPALSAVDMTPRQGLLRGPGGPGKKKIQALVAVMRKYLTGLWASLKTDTPFDSARLFQTAGLKNT

SEQ ID NO: 18396 - protein, 340 aa, unidentified
  source 1..340: note = protein_ea3ead9
  REGION 5..145: note = RuvC_domain
  SITE 8: note = RuvC_P1
  SITE 51: note = RuvC_P2
  SITE 86: note = RuvC_P3
  SITE 88: note = RuvC_P4
  SITE 91: note = RuvC_P5
  REGION 210..296: note = Tnp_domain
  SITE 218: note = Tnp_P1
  SITE 248: note = Tnp_P2
  SITE 256: note = Tnp_P3
  SITE 257: note = Tnp_P4
  SITE 269: note = Tnp_P5
MEQVIGIDLAKRVFQLHIASPLGKMMKNTVVSRDKLTAFLAQQPPSKIVIEACGSANYWSCQFKRFGHEVKQISPQYVAPFRMGSKNDKNDAAAIVEADSRPGMRYVPEKTQEQQDIQCLHRVCQRLMKNRTALINQIRGLGLEYGIAIPESAHKVEQCLPDHLENAENDLTPLSRELFQELLFELKEQQQRLMELNKRLDHLNAQQEDIRRLLTLPGIGPLGASALMVALGDSKDFKNGRHFASYLGRVPREHSSGGKVRLLGITKRGDGYLRGILIHGARSVAYRVQKLRDEQCNGLQRWLKGVIARSGITKAAVALANKNARIAWALVNQQSVDETR

SEQ ID NO: 18397 - protein, 383 aa, unidentified
  source 1..383: note = protein_f0c4df0
  REGION 21..177: note = RuvC_domain
  SITE 24: note = RuvC_P1
  SITE 74: note = RuvC_P2
  SITE 114: note = RuvC_P3
  SITE 116: note = RuvC_P4
  SITE 119: note = RuvC_P5
  REGION 291..378: note = Tnp_domain
  SITE 299: note = Tnp_P1
  SITE 329: note = Tnp_P2
  SITE 337: note = Tnp_P3
  SITE 338: note = Tnp_P4
  SITE 351: note = Tnp_P5
MCLRWLSIATNLKELIVLNAVGIDVAKGKSVVSILRPFGEVISSPFELCHTSSDINDFIHSLSHLEGDVKIVMEYTGRYHEPVAHWLSDADFYVSVVNPKLIKDFGNNSLRKVKSDKKDAVKIARYALDNWNDLRQYNLMDKTRDQLKIMNRQFDFYMKHKTALKNNLISLLDQTFPEANTFFTSPVRKDGSQKWVDFVTSFWHVDCVRKGSLTAFTERYQKFCIRKSYDFHPEKAAQIFEASKELIALLPKDKMTKSLIVQAINQLNTLSKTVEQLRLQMDQTASQLPEYPIVMAMKGVGPSLGPQIMAEIGDVRRFSRRSALTAFAGVDPGVNQSSTYNQKSVRTSKRGSAQLRKSLFQVMDVLVKTSPENEQRESHTMFT

SEQ ID NO: 18398 - protein, 389 aa, unidentified
  source 1..389: note = protein_2eafdc4
  REGION 4..160: note = RuvC_domain
  SITE 7: note = RuvC_P1
  SITE 59: note = RuvC_P2
  SITE 99: note = RuvC_P3
  SITE 101: note = RuvC_P4
  SITE 104: note = RuvC_P5
  REGION 264..350: note = Tnp_domain
  SITE 271: note = Tnp_P1
  SITE 301: note = Tnp_P2
  SITE 309: note = Tnp_P3
  SITE 310: note = Tnp_P4
  SITE 323: note = Tnp_P5
MLLLGIDIAKLNHVASLVDSESGELVFSNFKFQNNMPGFFSLYEKIVDFSIKDIIIGLESTAHYGENFINFFFQKGFKIAVINPLQTSHLRKANIRDTKNDHLDSITVAKALLFDNFKFISQNNVSNFALKKLTRFRKSLVKQRSRSKIQLVSLLDIIFPELQYVFKAGIHTKALYALLKKYPSTEKIAALREKSLFSILSKASKGHYDLDSALLLKSHARSSVGVKDTSISIHIPQLIELIELLDKQIKSIEEEIEDSLDNESPVLTIPGISNVAAASIIGEINDISNFDSPSKLLAYAGLDPKVRQSGNFNASSCRMSKKGSPYLRYALIFTAWNLVRNSKRFKEYYLIKRAHGKSHYNALGHVAHKLVRTIYTLLKKNISYQELII

SEQ ID NO: 18399 - protein, 406 aa, unidentified
  source 1..406: note = protein_423d37d
  REGION 6..164: note = RuvC_domain
  SITE 9: note = RuvC_P1
  SITE 59: note = RuvC_P2
  SITE 101: note = RuvC_P3
  SITE 103: note = RuvC_P4
  SITE 106: note = RuvC_P5
  REGION 278..364: note = Tnp_domain
  SITE 286: note = Tnp_P1
  SITE 316: note = Tnp_P2
  SITE 324: note = Tnp_P3
  SITE 325: note = Tnp_P4
  SITE 338: note = Tnp_P5
MNMNAVGIDVSKRKSTIAVLRPGGEVVVKPFDVPHRSTGFQSLTELINSLDGETRIVMECTGRYYEPVARQLSQAGFFVSAVNPQIIHNFQGQDNPLRRVKTDKADSVKIARYTLDCWANLKQYNLMDELRTQLKTMNRQFDFYMKHKTAMKNNLIGLIDQTHPGANTYFDSPAREDGSQKWVDFLDTYWHVDCGRKMSLNAFTDRYQKWCGRKKFNFSKSKAEEIYRTAKELIPVLPKDNFTKRIVKQAIQQLNAASQTVEQLRSLMNETASKLPEYSVVMAMKGVGPSLGPQLMAEIGDVARFTHKGAITAFAGVDPGVNDSGDYSQKSVHASKHGSPVLRKTLFQVMDVLIKTKPDDAVYLFMDKKRTQGKPYYVYMTAGANKFLRIYYGRVKEYLATLPTSD

SEQ ID NO: 18400 - protein, 343 aa, unidentified
  source 1..343: note = protein_6b03382
  REGION 6..150: note = RuvC_domain
  SITE 9: note = RuvC_P1
  SITE 54: note = RuvC_P2
  SITE 89: note = RuvC_P3
  SITE 91: note = RuvC_P4
  SITE 94: note = RuvC_P5
  REGION 213..299: note = Tnp_domain
  SITE 221: note = Tnp_P1
  SITE 251: note = Tnp_P2
  SITE 259: note = Tnp_P3
  SITE 260: note = Tnp_P4
  SITE 272: note = Tnp_P5
MKLSRVGIDLAKNVYQLHGVDRHGKTVWKRRLNRHQWFRALLDKIEPGCVIGMEACASAHHWARQLQSRGYTVRLMPPQFVKPYVKSNKNDARDAEAICEAMSRPNMRFVTVKRVEQQDIQATHRIRAELITQRTAKANQIRGLVAEYGLVAPKQMSSLRAAIPCWLEDAENGLTGDFRRLLQGVWNDLLILDDRVGEMDKAIKQLADKHEACVRLQQLRGVGPMIATAMIATVGDARQYRTSRQMAAAIGITPKQHSSGDRDRLLGISKRGDVYLRTLMIHGARSAVAAAKHKDDRLSRWVTGIAKKRHPNVAAVALANKTARMAWAMLRNETDYDPDFAIS

SEQ ID NO: 18401 - protein, 323 aa, unidentified
  source 1..323: note = protein_ce3718e
  REGION 5..155: note = RuvC_domain
  SITE 8: note = RuvC_P1
  SITE 58: note = RuvC_P2
  SITE 98: note = RuvC_P3
  SITE 100: note = RuvC_P4
  SITE 103: note = RuvC_P5
  REGION 195..281: note = Tnp_domain
  SITE 203: note = Tnp_P1
  SITE 233: note = Tnp_P2
  SITE 241: note = Tnp_P3
  SITE 242: note = Tnp_P4
  SITE 254: note = Tnp_P5
MSAFVGVDMAKNTFDVATPLENGKHRTKGKLSNDAKGFAEFESWLQKHATADALIVIEATGNYHEALADFLFQKGYRLHIANPATTAAHAKSELSRNKTDKTDAKLISDFAMQKHRKLRLWVPEPQSRRRLRALVRRLEDLNEIRQMEKNRLEVASPNVVTSIESVIAHVSEEITETEKAIKQHIDDDPDLRGKSELMTSINGLGEKTAALILAELGDPLDYEGPKKLSAFAGLSPRQDRSGGYVGPTRISRTGSSRLRGGLYMPAIVGIQHNEVLREFAKRLKANGKAPKQVICAVMRKMLHLVYGVLKSNKPFDPGIALAA

SEQ ID NO: 18402 - protein, 322 aa, unidentified
  source 1..322: note = protein_1334c3b
  REGION 10..152: note = RuvC_domain
  SITE 13: note = RuvC_P1
  SITE 57: note = RuvC_P2
  SITE 97: note = RuvC_P3
  SITE 99: note = RuvC_P4
  SITE 102: note = RuvC_P5
  REGION 192..276: note = Tnp_domain
  SITE 200: note = Tnp_P1
  SITE 229: note = Tnp_P2
  SITE 237: note = Tnp_P3
  SITE 238: note = Tnp_P4
  SITE 249: note = Tnp_P5
MENISVSQWVGIDVSKATLDVYIRPMGKALKVGNTVLEISNLIEQLKLYDLNLIVLEATGGLETELVIQLQAALLPVALINPRQGRDFAKATGRLAKTDAIDAQILAHFGEAMKPQILAIESDSARQLTELISRRRQLVEMQTAEKNRHARARGKALADIDAHIEYLEGRLKQLNQEIEDLTRSNLEWIDKVNLLKTTPGIGQVISTTLVSDLPELGKLTAKQISRLVGVAPINHDSGQHKGKRMIHGGRAHVRATLYMGAVVAMRYNPVIKAFYERLVERGKSKKLALTACVHKMLVILNAMVRDNLPWRVTDNLQPIVNT

SEQ ID NO: 18403 - protein, 393 aa, unidentified
  source 1..393: note = protein_4d89ed3
  REGION 4..163: note = RuvC_domain
  SITE 7: note = RuvC_P1
  SITE 60: note = RuvC_P2
  SITE 101: note = RuvC_P3
  SITE 103: note = RuvC_P4
  SITE 106: note = RuvC_P5
  REGION 266..355: note = Tnp_domain
  SITE 274: note = Tnp_P1
  SITE 304: note = Tnp_P2
  SITE 312: note = Tnp_P3
  SITE 313: note = Tnp_P4
  SITE 328: note = Tnp_P5
MICVGIDVAKDKHDCFILSSEGEVLADVFTIPNNRDGFETLLRRIRTCVLPADIVKVGLEATGHYSYNILGFLLDKGLATYVINPLHTNLFRKSLSLRKTKTDRIDARTIAAMLMSDVDLKSYTDTAYHNEELKSLTRYRFDKVRQKAKLKQSVSRLVNILFPELETLVPTLHIASVYALLNEFPSAQQIAEAHLTHLKALLSGASRGHYGRDKAVEIRDAARRSIGSGMPAKSLELRHTIQLIQVLDTEIDEIEAAIEEIMSGIQSPITTIPGIGIRMGAMILAEIGDFSNFDSPDKILAYAGLSPSTYESGKLKATGAYSHMEKRGSRYLRYALFNAAKYVCLWDPLFAAYLAKKRAEGKHYNVAISHAAKKLVRVIYALQKSGKAYQSAA

SEQ ID NO: 18404 - protein, 391 aa, unidentified
  source 1..391: note = protein_779d4a0
  REGION 4..163: note = RuvC_domain
  SITE 7: note = RuvC_P1
  SITE 60: note = RuvC_P2
  SITE 101: note = RuvC_P3
  SITE 103: note = RuvC_P4
  SITE 106: note = RuvC_P5
  REGION 266..353: note = Tnp_domain
  SITE 274: note = Tnp_P1
  SITE 304: note = Tnp_P2
  SITE 312: note = Tnp_P3
  SITE 313: note = Tnp_P4
  SITE 326: note = Tnp_P5
MICVGIDVAKDKHDCFILSSEGEVLADVFTIPNNAEGFGILLQTIRRCTRPADKIKVGLEATGHYSYNILGFLLDCGLPTFVINPLHTNLYRKSLSLRKTKTDRIDARTIATMLMSDVDLKSYTDTSYHNEELKSLTRYRFDKVRERAKLKCSVARLVCILFPELEKLVPTIHMASVYALLSEFPGAHQISEAHLTHLKSVLSDASKGRYGREKAVEIRDAARNSIGSRMHAKSLELKHTIRLIRELDAEIEEIESEINSIMGEIQSPITTIPGISTRMGAMILAEVGDFSNFDSADKILAYAGMSPSTYQSGQLTSSHSHMEKRGSRYLRYAIFNATRFVCNWDPAFAAYLAKKRAEGKHYNVAISHAAKKLVRLIYAMEKSQQPYRQAA

SEQ ID NO: 18405 - protein, 348 aa, unidentified
  source 1..348: note = protein_2e2b6fa
  REGION 1..105: note = RuvC_domain
  SITE 2: note = RuvC_P2
  SITE 42: note = RuvC_P3
  SITE 44: note = RuvC_P4
  SITE 47: note = RuvC_P5
  REGION 219..306: note = Tnp_domain
  SITE 227: note = Tnp_P1
  SITE 257: note = Tnp_P2
  SITE 265: note = Tnp_P3
  SITE 266: note = Tnp_P4
  SITE 279: note = Tnp_P5
MEHTGRYYEVLAHQLSKADLFVSAINPKLIKDFDNDSLRKVKSDKADAVKIARYALDKWQNLKQYSVMDELRNQLKTMNRQFNFYMKHKTAMKNNLIGILDQTYPGINTYFDSPARSDGSQKWVDFASTYWHVDCVRKMSLHAFIDHYQKWCKRKKYNFSLSKAEEIYGKAKELVPVLPKDGITKLIIKQAVDQLNSASVTVEELRSLMNETASKLPEYPIVMQMKGVGPSLGPQLIAEIGDVTRFTHKGALTAFAGVDPGVNGSGSYEQKSVPTSKRGSAALRKTLFQVMDVLIKTMPQDDPVYQFLDKKRAQGKAYYVYMTAGANKFLRIYYGRVKEYLSSLPESE

SEQ ID NO: 18406 - protein, 407 aa, unidentified
  source 1..407: note = protein_777f535
  REGION 4..161: note = RuvC_domain
  SITE 7: note = RuvC_P1
  SITE 57: note = RuvC_P2
  SITE 98: note = RuvC_P3
  SITE 100: note = RuvC_P4
  SITE 103: note = RuvC_P5
  REGION 277..363: note = Tnp_domain
  SITE 284: note = Tnp_P1
  SITE 314: note = Tnp_P2
  SITE 322: note = Tnp_P3
  SITE 323: note = Tnp_P4
  SITE 336: note = Tnp_P5
MISIGIDISKDKSTICALKSGSETIWKPFDLRHLQSDMQSFISKLEVLTGELRIVMEATGKYHLPILYSLKSKGYFVTVVNPLKMKQFCRSMSFRKAKNDNIDSRLIAEYGLIYWHKLEEYKLDREVYQNLKHLNRSYHHYMNLRISQMNFLDTFIDQVFPGLKKLLPHGSGDFSKDKLLDFLEVWWHKDVVISKDEEKFIKDYQKWAKEKRYHPNAKKAQAIYKVALEGISTQPSNSPYIKADVYESIQLVKRINQSLNCILSQMLDLAEPLEEFQEAKKFSGISDKLAVQITAEFGDLSKFRNKKCLISFVGIDAPTYESGDFKGNRRKISKRGNAILRKVGYQAMKCMMSAKNPENPVYCYMVKKEEEGKAKKVSKFAGLNKFLRIYYARVIEAKEEKTSKKAA

SEQ ID NO: 18407 - protein, 338 aa, unidentified
  source 1..338: note = protein_31f7e62
  REGION 6..148: note = RuvC_domain
  SITE 9: note = RuvC_P1
  SITE 52: note = RuvC_P2
  SITE 87: note = RuvC_P3
  SITE 89: note = RuvC_P4
  SITE 92: note = RuvC_P5
  REGION 211..298: note = Tnp_domain
  SITE 219: note = Tnp_P1
  SITE 249: note = Tnp_P2
  SITE 257: note = Tnp_P3
  SITE 258: note = Tnp_P4
  SITE 270: note = Tnp_P5
MHITTLGIDLAKNVFQLHGVDARGHAVLSRRVKRSQLVETVASLPPCVIGMEACGSAHHWGRAFEQLGHTVKLMSPKYVKPYVKTNKNDARDAEAICEAVSRPTMRFVSIKTVEQADLQALHRTRSLLVKHRTAVINQIRGLLAEYGLVIAQSPEKVRPAVVRFLDDAESGLTAFARETFSELSEQLRDLESRIERVTHRVEGVYRAHPVCRKLAAVPGIGPLTATALLATVGRPQAFHNGRHLAAWLGLVPRQYSSGGKDKLGGLSKRGSRYVRTLLIHGARAVVQRAERRVDTQGRWLWALKRRKGTNVAAVALANKNARVVWALLAHDEVYRQPA

SEQ ID NO: 18408 - protein, 407 aa, unidentified
  source 1..407: note = protein_2ab5b8c
  REGION 7..163: note = RuvC_domain
  SITE 60: note = RuvC_P2
  SITE 100: note = RuvC_P3
  SITE 102: note = RuvC_P4
  SITE 105: note = RuvC_P5
  REGION 273..359: note = Tnp_domain
  SITE 281: note = Tnp_P1
  SITE 312: note = Tnp_P2
  SITE 320: note = Tnp_P3
  SITE 321: note = Tnp_P4
MLFVRDHWAEDHHDIELQGGDGRVLRTARVSEGVDGMARLHELIATVLPDDAYPSRVLVCIETDRGPWVRALVAAGYRVFGVNPKQAARHRELLSLSGAKSDKADAHTLADMVRTRRHQLRQVAVDSDLAEAVKVVTRAHQTLIWERTRHMLRLRAALRDYFPAALEAYKPLGLTGHDTLELLAKAPTPAAAAKLTRTQISAALKRARRRDIPAKAALIQAALRTEHLGQAEIVAGAYAATVRSTVAVLQTLNAEIHALEGQVEAHFGQHPDAEVYLSQPGIGAILGARVLAEFGDAPGRYADAKSRKNYAGTAPITRQSGKSKTVHARFIHNDRLVDALHMQAGAAILHDPGSRAYYDELRAREIGHNAALRQIGNRLVGILHGCLKTDTRYDAHTAWSHRTAHAA

SEQ ID NO: 18409 - protein, 343 aa, unidentified
  source 1..343: note = protein_33155ea
  REGION 5..152: note = RuvC_domain
  SITE 8: note = RuvC_P1
  SITE 55: note = RuvC_P2
  SITE 92: note = RuvC_P3
  SITE 94: note = RuvC_P4
  SITE 97: note = RuvC_P5
  REGION 212..300: note = Tnp_domain
  SITE 220: note = Tnp_P1
  SITE 250: note = Tnp_P2
  SITE 258: note = Tnp_P3
  SITE 259: note = Tnp_P4
  SITE 271: note = Tnp_P5
MDHFAGLDVSVKETSVCVVDDTGRIVREVKVASEPEALLEVLTNPAYHFKRIGLEAGPLSQWLFSALAEAGLPVICVETRHMRAVLKAQINKSDRNDARGMAQMMRVGLFRLVHVKTLRSQKLRMLLTHRKLLQSKAIAIENDLRATLRNFGLKVGMVGTVKFETRIKELVEKVTDLAMLVEPLLMVRRVLREQVNILHRRLLAVVRDDDVCRRLMTVPGVGPVVALTYRATIDVPARFRNSKAVGAVLGLTPSKYQSGEIDRTGAISRCGDEMMRAVLYEAAQSMLVVSTKWSWLKAWAMKIAKNRGMKKAIVALARRLAVIMHRIWVDGTEFRWTREVAAP

SEQ ID NO: 18410 - protein, 404 aa, unidentified
  source 1..404: note = protein_3052963
  REGION 4..160: note = RuvC_domain
  SITE 7: note = RuvC_P1
  SITE 57: note = RuvC_P2
  SITE 97: note = RuvC_P3
  SITE 99: note = RuvC_P4
  SITE 102: note = RuvC_P5
  REGION 275..362: note = Tnp_domain
  SITE 283: note = Tnp_P1
  SITE 313: note = Tnp_P2
  SITE 321: note = Tnp_P3
  SITE 322: note = Tnp_P4
  SITE 335: note = Tnp_P5
MNAVGIDVSKGKSTVAVLRPFGEVVASPFDVAHTGSDLKILADFIKKLPGESKVVMEATGNYYEPIARYLHEQNIFVSVVNPVLISDFGGNTLRKPKTDKKDSLKIASFALTYWLELKKYVPQEDLRKSLKLLNRQYQQASKLKTMMNNNLISLLDLTFPGINKLFTSSSRESDGHEKWVDFVLAFPHCDMISKLTIKAFSKKYKKWCASNSYYFTEAACERIYDYSKDCISSVSLEESTAFAVIQASKMLNSAIENCHAIQLEMNRIAAQLPEYDTVMSMYGVGKSVGSQLIAEIGDTRRFHSRKAITAYFGYDSENNDSGKKVSISNPMTKKGSGALRRTLFIIMQVLLQTKPIDNPVYDFRIKKQSKGKHYYSYMNAAANKFLRIYYARVKEVLIAADIST

SEQ ID NO: 18411 - protein, 338 aa, unidentified
  source 1..338: note = protein_7af8542
  REGION 7..149: note = RuvC_domain
  SITE 10: note = RuvC_P1
  SITE 53: note = RuvC_P2
  SITE 88: note = RuvC_P3
  SITE 90: note = RuvC_P4
  SITE 93: note = RuvC_P5
  REGION 212..299: note = Tnp_domain
  SITE 220: note = Tnp_P1
  SITE 250: note = Tnp_P2
  SITE 258: note = Tnp_P3
  SITE 259: note = Tnp_P4
  SITE 271: note = Tnp_P5
MKKITTIGLDLAKNVFHVICCNEHGKVIRKRMLRRKEVILFFTQMPPCLVGMEACSGACYWAHQFTSLGHRVKLIPAQFVKPFVQGNKNDYNDALAIAEAVVRPNMRFVTPKTTAQQAVQALHRLRERRLQERTALCNQIRGLLAEYGLILPQGVNVTRRSIPELLEDAENGLNDLFRQLLAQCYQQLQELDEHIAFYTQTLEVQNQQNEACQRLQTIPGFGPIVASVFYATVGDGSAFRRGRDVSASLGLVPRQHSSGGVNTLLGISKRGDSYLRSLRVHGARSVVLHAQKKDDRLSRWINKIRSERGYNKATVALANKLARIGWAISSQQTVYRTV

SEQ ID NO: 18412 - protein, 410 aa, unidentified
  source 1..410: note = protein_b63a7be
  REGION 4..163: note = RuvC_domain
  SITE 7: note = RuvC_P1
  SITE 60: note = RuvC_P2
  SITE 100: note = RuvC_P3
  SITE 102: note = RuvC_P4
  SITE 105: note = RuvC_P5
  REGION 273..359: note = Tnp_domain
  SITE 281: note = Tnp_P1
  SITE 312: note = Tnp_P2
  SITE 320: note = Tnp_P3
  SITE 321: note = Tnp_P4
MLFVGDDWAEAHHDIEIEDDQGRVLARRRLPEGMAGITLLHELVGEHLDPTAEPDQVQLGIETDRGPWVQALLAAGYVVFAINPLQVARYRERHSPSGAKSDPADAHLLAEIVRLDRAHHRPVAGDSEIAEHVKIAARAHQTMIWSRVRQVNMLGSLLREYYPAALAAFGTDLAGREALAVLTVAPNPDLGRRLSQSRIETLLRRAGRQRNLASTAAKIRNALISEQLTARPGVIPAYTASASALLAVLTAIAAQTEVLARQVEQGFGQHPDAEIYGSQPGLGVILGARVLAEFGDDPGRYADAKARKNYSGMSPITKASGTKRVVLARFARNRRLGDALFFQAFASLNNSPGARAFYDRQRARGATHYQALRTLANRLVGILHGCLRTHTLYDEHLAWRNEPDKLSSAA

SEQ ID NO: 18413 - protein, 339 aa, unidentified
  source 1..339: note = protein_3715d2f
  REGION 6..147: note = RuvC_domain
  SITE 9: note = RuvC_P1
  SITE 52: note = RuvC_P2
  SITE 87: note = RuvC_P3
  SITE 89: note = RuvC_P4
  SITE 92: note = RuvC_P5
  REGION 210..297: note = Tnp_domain
  SITE 218: note = Tnp_P1
  SITE 248: note = Tnp_P2
  SITE 256: note = Tnp_P3
  SITE 257: note = Tnp_P4
  SITE 269: note = Tnp_P5
MKYTPVGVDIAKHLIQVHFINENTGEVVDKQLRSKDFLIFFSNREPCLIGMEACGGSQHWARELEKQGHKVRLMQGRFVKAFVMGNKNDVMDARAIWMAVQQPGKAIAVKTEEQQSVLVLHRSRRQLVKFRTAQINALHGTLLEFGETIHKGRSAMDKELPAALERMRIKLPPYLIAVLENQYNRLNELDSLIDNLEKQLISVARQNETCKRLMEIPGVGPLTATAAVATMGEAAAFKSGREFAAYIGLVPKQTGSGGKVRLLGMSKRGDTYLRTLFIHGARAASLVAKEPGPWITELKKRRPTGVAIVAMANKLARTVWAIAAHDRKYDKNHVSIRPY

SEQ ID NO: 18414 - protein, 339 aa, unidentified
  source 1..339: note = protein_1083a50
  REGION 6..148: note = RuvC_domain
  SITE 9: note = RuvC_P1
  SITE 52: note = RuvC_P2
  SITE 87: note = RuvC_P3
  SITE 89: note = RuvC_P4
  SITE 92: note = RuvC_P5
  REGION 211..298: note = Tnp_domain
  SITE 219: note = Tnp_P1
  SITE 249: note = Tnp_P2
  SITE 257: note = Tnp_P3
  SITE 258: note = Tnp_P4
  SITE 270: note = Tnp_P5
MYVTTVGLDVTKNVFQVHGVTDGGTVAFNRSLRRAQMLSFFERLEPCVVGMEACSTSHHWARELTRLGHTVRLIPPSYVKPYLKRGKSDAADAEAICEAVTRPAMRFVEVKSCEQQAILSLHRTRDLVVRQRTQTINMLRGLLAEFGIVLPKGVGHAVRFARQGRDEACAALPEQAHTAIDDLCDALVALHMRVASYGRRIAALAKVDPSIARLQTIPGVGPITASAIAATIGSARQFRSGRDLAAWLGLTPLNRSSGGKERLGRVSKMGDRYIRRLLVVGMTSRIKQIRQRPDAYDPWFSTILERKPAKLAAVAMVNKTARIVWAVLSRGEPYRLRAT

SEQ ID NO: 18415 - protein, 339 aa, unidentified
  source 1..339: note = protein_5e4da7a
  REGION 7..149: note = RuvC_domain
  SITE 10: note = RuvC_P1
  SITE 53: note = RuvC_P2
  SITE 88: note = RuvC_P3
  SITE 90: note = RuvC_P4
  SITE 93: note = RuvC_P5
  REGION 212..297: note = Tnp_domain
  SITE 220: note = Tnp_P1
  SITE 250: note = Tnp_P2
  SITE 258: note = Tnp_P3
  SITE 259: note = Tnp_P4
  SITE 271: note = Tnp_P5
MKEVSTIGLDLAKKVFQVHGVDAAGEAVVQRTVRRSRVVAYFAKLPPCLIGMEACATAHYWARELGKLGHKVKLIPPAYAKAYVRRNKNDAADAAAICEAVSRPSMRFVEVKTEAQQAAAGVHKVRETMMKQRTMLINALRGLMAEFGIVVAEGTRHVGELEAILADPQEQRIPAPLHDGLVRMAQSLRGLERQLESIDKQIVDWGRANATCRHLITAPGYGPILSSAMAAMVVKPAVFRSGRDFAASLGLVPRQDGTGGKVKLGPISKRGNGYLRRLLVNGAMSVLNSKRAKQDPWLVKLLANKERKVAAVALANKMARIGWALMMRQEDFRATPAAA

SEQ ID NO: 18416 - protein, 400 aa, unidentified
  source 1..400: note = protein_37614dd
  REGION 4..157: note = RuvC_domain
  SITE 7: note = RuvC_P1
  SITE 56: note = RuvC_P2
  SITE 94: note = RuvC_P3
  SITE 96: note = RuvC_P4
  SITE 99: note = RuvC_P5
  REGION 265..351: note = Tnp_domain
  SITE 273: note = Tnp_P1
  SITE 304: note = Tnp_P2
  SITE 312: note = Tnp_P3
  SITE 313: note = Tnp_P4
MYFVGIDWADLHHDVAVLDEKGRELKYFTIPHSREGMEQLKQKLLSINPSPESFACLLETKNGLLVQFLLEAGFLVYPLNPKVVDYRRKPSGAKSDPIDARLLANIGRSDLGQLKRLKPDTELISELKMLTRDQDSLIQESTRLTNKLIACLKEYYPMALEFFSKPTLPVALKFLKHYPLPDLVRETTVPELAAFLKACKHPQPNQTAISIWQKAQEPQLRASAPTVRAKCRLMLALVAQLETVKEQIAAYDEEINRLFQLHSDSRIFASLPGAAGRLAPRLLAEWGDDRERYEDAAVVQALAGTSPVLFQSGKYRFARQRRSCIKPFRRVMHLFAFQSIRQVCWAREYYSTKRSQGKTHHEALRALANIWVRIIFAMWKNGTCYNEATFVAARARHRAA

SEQ ID NO: 18417 - protein, 340 aa, unidentified
  source 1..340: note = protein_fb9fa92
  REGION 7..149: note = RuvC_domain
  SITE 10: note = RuvC_P1
  SITE 53: note = RuvC_P2
  SITE 88: note = RuvC_P3
  SITE 90: note = RuvC_P4
  SITE 93: note = RuvC_P5
  REGION 209..296: note = Tnp_domain
  SITE 217: note = Tnp_P1
  SITE 247: note = Tnp_P2
  SITE 255: note = Tnp_P3
  SITE 256: note = Tnp_P4
  SITE 268: note = Tnp_P5
MQEISTIGLDLAKSVFQVHGADSSGAPVLRRKLRRDALLSFFAQLPPCLVAMEACAGAHYWARAIAGFGHTTKLIPAEYVKAFVKRQKNDAADAEAICEAALRPTMRFVAPKSAEQQASAIVFRARDLLVRQRTQIINALRGHLAEFGIVVAKGPAHVAKLVAMIEEEKAPPDALPALQCLVSTLKALEEKVAALDREIAARAKADDVAARLMSIPGIGPVISTAIAALAPPADTFSKGRDFAAWLGLTPRQHSSGGKERLGRTTKMGERSLRRLLIIGASAVVRWAVRNPPAAGSWLARMLARKPRQLVTVALAGKMARIAWALMAKGGIYRASGVVAA

SEQ ID NO: 18418 - protein, 316 aa, unidentified
  source 1..316: note = protein_b66030c
  REGION 8..150: note = RuvC_domain
  SITE 11: note = RuvC_P1
  SITE 55: note = RuvC_P2
  SITE 95: note = RuvC_P3
  SITE 97: note = RuvC_P4
  SITE 100: note = RuvC_P5
  REGION 190..274: note = Tnp_domain
  SITE 198: note = Tnp_P1
  SITE 227: note = Tnp_P2
  SITE 235: note = Tnp_P3
  SITE 236: note = Tnp_P4
  SITE 247: note = Tnp_P5
MSQSERVIGIDVSKNLLDVAVVPEKDTWSVANDEEGIRTLIKDAKRFRPRLIVLEATGGLETAVVALLAAARLPVVVVNPRQVRDFAKSLGKLAKTDKIDALVLAHFGEATKPEVRSLKDQQAQQLSALVARRKQLVEMLTAEKNRLMTAPEPVDNDIKAHIAWLEQRLSGINKDLRKAIKASAVWRAKEELLRTVPGVGPVLSVSLLAGLPELGKLNRKQIAALVGVAPFNRDSGKFRGRRSIWGGRAHVRAVLYMGTLTAIRFNPVISAFYQRLCAAGKAHKVALTACMRKLLTILNAMMKNHAPWQPYFRETA

SEQ ID NO: 18419 - protein, 395 aa, unidentified
  source 1..395: note = protein_fa8eac6
  REGION 4..161: note = RuvC_domain
  SITE 7: note = RuvC_P1
  SITE 60: note = RuvC_P2
  SITE 100: note = RuvC_P3
  SITE 102: note = RuvC_P4
  SITE 105: note = RuvC_P5
  REGION 266..353: note = Tnp_domain
  SITE 274: note = Tnp_P1
  SITE 304: note = Tnp_P2
  SITE 312: note = Tnp_P3
  SITE 313: note = Tnp_P4
  SITE 326: note = Tnp_P5
MYYLGIDIGKNNHEAGFIRDDGSHVGKSLRFTNTQEGFQKLLQFLEQRLPEQESFCVGMEATGHYWLALYSFLREQGFVLHVINPIQSDSLRNFHIRQQKTDSVDCFLVAEVIRFGKFSETHLADEDILVLRNLARFRESLKDSCADYKRQVITVLDQVFPEYDTLFSSIFGESSKAFLKTYGTPDQVVEVNTKSLATLLRKASRGRHSTDKAREIKSLAANSVGLTLCADAFAFQIRILIEQIEFTEKQIDEIDKKISKQLKKLNSVILTIPGVGPATGAIILGEIGDIGRFSNPKKLVAFAGIDPTSYQSGNFVGQHNRLSKKGSPYLRRAVWMSALIAARYDPVFKAFYEKKRREGKAHGTALGAVARKLLYTIHAVLKANEPYEVRLDTIE

SEQ ID NO: 18420 - protein, 408 aa, unidentified
  source 1..408: note = protein_1cb6f5c
  REGION 2..162: note = RuvC_domain
  SITE 5: note = RuvC_P1
  SITE 60: note = RuvC_P2
  SITE 101: note = RuvC_P3
  SITE 103: note = RuvC_P4
  SITE 106: note = RuvC_P5
  REGION 269..355: note = Tnp_domain
  SITE 277: note = Tnp_P1
  SITE 307: note = Tnp_P2
  SITE 315: note = Tnp_P3
  SITE 316: note = Tnp_P4
  SITE 328: note = Tnp_P5
MIGIDIAKHNHYATFVDERGRVLKKAFLVKQTRKGFEQFYQEILEGMKEFDKSHVIVGVEPTGHYWLNLAYFLEDYGIPLVVINPMHVKKVKELDDNLQTKNDKKDALTIARLMKDGRFSYPKLLRDQAANIRSCFTLEQTLIDDRTILKNRIHRWVDKYFPELFEVFSDFGAMVLGVLETTPLPAELVNMTTADLADQCAKASQMKQRRPKIAAKVIEVAQTSIGITVAPWGAKREIQCLIRQYRLLEEELAMIEEEIQSLIVQTADYEYLASFPGISRRTISGLLAEIGSFTDFESPRQLIKLAGLTLHENSSGKHKGMKKISKRGRRRLRAILFRAMHPILRNNPAFMKLHQYYTQRPQNPLRKKESMVVLCSKLLKVLHAMCTKKRKFDGEQMLADLHCLQLVA

SEQ ID NO: 18421 - protein, 340 aa, unidentified
  source 1..340: note = protein_26aadc8
  REGION 6..147: note = RuvC_domain
  SITE 9: note = RuvC_P1
  SITE 52: note = RuvC_P2
  SITE 87: note = RuvC_P3
  SITE 89: note = RuvC_P4
  SITE 92: note = RuvC_P5
  REGION 211..298: note = Tnp_domain
  SITE 219: note = Tnp_P1
  SITE 249: note = Tnp_P2
  SITE 257: note = Tnp_P3
  SITE 258: note = Tnp_P4
  SITE 270: note = Tnp_P5
MKTITIGIDLAKSVFQVHGVDAAGLITVRKKLRRAEVLTFFASLEPCLVGMEACATAHFWARELSRLGHEVRLMPPSYVKAYLRRQKNDAADAEAICEAVMRPSMRFVPVKSAERQGVLVLHRTRELLVRQRTMLINAIRGHCAEFGMIAPQGARRSAELIGQVQAADAAVLPDLARSALLRLADQLDALAIEIHALERQLMAWHRQDEASQRLATIPGVGIITATALAASVTDPSLFRSGREFAAFLGLVPRQNSSGGKDRLGRISKMGDGYLRKLLVVGATSVIRRAGDNASATGAWVRSLMERKPSRVVTVAMANKTARIAWAVLSRREDYRAPAMI

SEQ ID NO: 18422 - protein, 406 aa, unidentified
  source 1..406: note = protein_26ec754
  REGION 4..159: note = RuvC_domain
  SITE 7: note = RuvC_P1
  SITE 58: note = RuvC_P2
  SITE 96: note = RuvC_P3
  SITE 98: note = RuvC_P4
  SITE 101: note = RuvC_P5
  REGION 267..353: note = Tnp_domain
  SITE 275: note = Tnp_P1
  SITE 306: note = Tnp_P2
  SITE 314: note = Tnp_P3
  SITE 315: note = Tnp_P4
MKFCGIDWANDHHDALSIDEHGQPLGSIRVAHSPQGLSQLDTYLEGIAGPTGREQIACIVETTHGLLIAHLLEQGWPVYPVNPRTVEKRRAPSGAKTDTIDAYLLAKTGRADFPDLRRLNPDSEQIQELKTLTRDQDALIQMQTRLVNQLTACLKAYYPVALEVFGKLQQPSTLAFLRAYPTLQAARAASAEELTTLLKQARYPGARQKAQQLVRHLQQPALQATEVTTRTKARLMLALVDQLEPLLKQIAAYDKEIERLFLSHADSELFQSLPGAGARLAPRLLAELGDDRSRYESASSLQALAGTSPVLFQSGTYQKAHRRLGCIKPWRNALHQFAWQSTQQEAWAKEYYQRKRAEGKSHTVAVRALANVWARILYAVWQTKQPYHTATFEAARRTHASHQPAA

SEQ ID NO: 18423 - protein, 348 aa, unidentified
  source 1..348: note = protein_4d50786
  REGION 6..148: note = RuvC_domain
  SITE 9: note = RuvC_P1
  SITE 52: note = RuvC_P2
  SITE 87: note = RuvC_P3
  SITE 89: note = RuvC_P4
  SITE 92: note = RuvC_P5
  REGION 211..296: note = Tnp_domain
  SITE 219: note = Tnp_P1
  SITE 249: note = Tnp_P2
  SITE 257: note = Tnp_P3
  SITE 258: note = Tnp_P4
  SITE 270: note = Tnp_P5
MTAAFIGLDLAKSVFQVHGVDVHGKVVRTKRLRRDAMLVFFATLTPCVVGMEACAGSHFWAREIARFGHTVRLMAPQYVRPYVKRHKTDRADAEAICEAVQRPSMRFVPVKTEQQQGTLVVHRVREVLVAQKTQLINALRGHLAEFGIVAPQGAGKVAELTAVLADPEDTRIPALAWEVLQGLVDHLRDTERRVGELDARLAGQAKEDEVCRRLMTVPGIGPVTATALAATIGDATVFASGRHLAAWLGLVPRQHSSGGKERLGGISKAGDGYLRRMLVNGARTVMRWQGKTAPWLAGLLSRRPFNVAAVALAGQPCPALCAVLWARTGRDEEVVPAVEQRGWTMKRQ

SEQ ID NO: 18424 - protein, 322 aa, unidentified; identical to SEQ ID NO: 10179
  source 1..322: note = protein_b0d5a60
  REGION 8..155: note = RuvC_domain
  SITE 11: note = RuvC_P1
  SITE 60: note = RuvC_P2
  SITE 100: note = RuvC_P3
  SITE 102: note = RuvC_P4
  SITE 105: note = RuvC_P5
  REGION 211..278: note = Tnp_domain
  SITE 229: note = Tnp_P2
  SITE 237: note = Tnp_P3
  SITE 238: note = Tnp_P4
  SITE 251: note = Tnp_P5

SEQ ID NO: 18425 - protein, 359 aa, unidentified
  source 1..359: note = protein_e897c9d
  REGION 17..163: note = RuvC_domain
  SITE 20: note = RuvC_P1
  SITE 66: note = RuvC_P2
  SITE 104: note = RuvC_P3
  SITE 106: note = RuvC_P4
  SITE 109: note = RuvC_P5
  REGION 234..320: note = Tnp_domain
  SITE 242: note = Tnp_P1
  SITE 272: note = Tnp_P2
  SITE 280: note = Tnp_P3
  SITE 281: note = Tnp_P4
  SITE 293: note = Tnp_P5
MPTLSNKIDFNGQHIYVGFDVHLKSWKVTIMTEKLLHKTFSQPPKPEVLHQYLVRNFPGGIYHSAYEAGFCGYWIHNKLKYLGIDSIVVNPADIPTTGKEKIQKDDVRDSNKIARSLRNGDLVPIHVPTSFTLEDRGLVRSRANLVQDLTRCKNRIKSFLYFRGLEIPESFRSPNSHWSNRFVQWLEGIELPESSSKATLNVYLSQSRQLRSAILETTRIIRELSRTERYKSRQELLRTIPGIGYITAMILLTELETIERFATFDHLCGFVGLVPSTKSSGENESIGDLTPRGHSVLRTALIESAWVAARIDPALNKSYHEYCRRMEPNKAIIRIARKLLSRIRFVLKNNLPYEYSVVK

SEQ ID NO: 18426 - protein, 262 aa, unidentified
  source 1..262: note = protein_bc0152f
  REGION 2..92: note = RuvC_domain
  SITE 29: note = RuvC_P3
  SITE 31: note = RuvC_P4
  SITE 34: note = RuvC_P5
  REGION 134..221: note = Tnp_domain
  SITE 142: note = Tnp_P1
  SITE 172: note = Tnp_P2
  SITE 180: note = Tnp_P3
  SITE 181: note = Tnp_P4
  SITE 194: note = Tnp_P5
MELMPDLQCFFYVINPLHIKKSMGLVRGKNDKVDAFRIAQFIKKNNDESQSYIPQRNEIRLIQILLSERRFRVNQKKQLLTKNKENILLSNKKTARSLTTKNNRLIKELKKQIKDIETEINQLISQDESLKKLRTQLKSVPGVGNILCWNIIVKTNEFKTITTPRKLACYSGVVPFSNSSGISKFGNNRLSLYADKNLKTLLHMGALSAIRLENNLSIYYKRKIAEGKNKMSVLNAVRNKITHIIFALVKNQTFYKNHLEVS

SEQ ID NO: 18427 - protein, 407 aa, unidentified
  source 1..407: note = protein_bf595db
  REGION 5..162: note = RuvC_domain
  SITE 8: note = RuvC_P1
  SITE 58: note = RuvC_P2
  SITE 99: note = RuvC_P3
  SITE 101: note = RuvC_P4
  SITE 104: note = RuvC_P5
  REGION 276..360: note = Tnp_domain
  SITE 284: note = Tnp_P1
  SITE 314: note = Tnp_P2
  SITE 322: note = Tnp_P3
  SITE 323: note = Tnp_P4
  SITE 336: note = Tnp_P5
MLNAVGIDVAKRKSTITIRRPGDEIVLPPCDVHHNQTEINELISYIKSLEGETKVCMEHTGRYYEPMAYWLSNAGIFVSAVNPILIKDFKDDDSFRAPKTDKADAAKIARYTLDRWSKLKQYGLMDEIRNQLKTMNRQFGFYMDQKTAMKNNLISLLDETYPGANSFFDSSVREDGSQKWVDFVYTYWHVDCVRGKSLKAFTEHYQNWCKRKGYNFSVRKVKEIYEKSSGLIAMFPKDGNTKMLIHQAIDVLNSISATVELLRREMDKVASTLPEYPIVMAMDGVGPTLGPQLIAEIGDVTRFTKRGALTAFAGVDPGGDQSGDHERKSNRTSKKGSPHLRKTLFVVMDGILKRSPMDNPVYLFMDKKRSQGKPYYVYMTAGANKFLRIYYGRVKEYLEKLEESQES

SEQ ID NO: 18428 - protein, 329 aa, unidentified
  source 1..329: note = protein_05e98d4
  REGION 7..163: note = RuvC_domain
  SITE 10: note = RuvC_P1
  SITE 63: note = RuvC_P2
  SITE 100: note = RuvC_P3
  SITE 102: note = RuvC_P4
  SITE 105: note = RuvC_P5
  REGION 201..288: note = Tnp_domain
  SITE 209: note = Tnp_P1
  SITE 239: note = Tnp_P2
  SITE 247: note = Tnp_P3
  SITE 248: note = Tnp_P4
  SITE 261: note = Tnp_P5
MKRNWFIGIDISKKTLDVVIYDQEKKRARKHFKVNNELKGFKEIIKTLKAEGVILDNAFICLEYCGIYGLELGFFLEGKISFCFCAPLHIKRSLGLTRGKNDKLDAYKIAWFSYLFRDELSPSTMPTKTMLKLKSLMGERYRVVKAATIEKQVLRELSSQLDNKAIIRVKHRLKILTADVKAIENEIKELIMSSPELKKSYKLLQSITGIALVNATMMILCTNNFKGITNARSFACYCGVAPFEYSSGTSIRGKTKVSNLANKRMKADLTNAARSAIVHDPEMRIYYKRKRAEGKEHGTVINAVKFKIITRAFAVIKRGTPFVKLRQAG

SEQ ID NO: 18429 - protein, 414 aa, unidentified
  source 1..414: note = protein_3ade78a
  REGION 31..186: note = RuvC_domain
  SITE 34: note = RuvC_P1
  SITE 85: note = RuvC_P2
  SITE 125: note = RuvC_P3
  SITE 127: note = RuvC_P4
  SITE 130: note = RuvC_P5
  REGION 290..377: note = Tnp_domain
  SITE 298: note = Tnp_P1
  SITE 328: note = Tnp_P2
  SITE 336: note = Tnp_P3
  SITE 337: note = Tnp_P4
  SITE 350: note = Tnp_P5
MNFHLPQVYDGKTKWNIRSDYLLGVDFMIYVGIDIAKKKHFSAFMDSNGEVLFKPFSFSNDMSGFKKLLSHLGSFPVNDLLIGLESTAHYGENLICFLYDKGFNICIINPIQTAAIRKSNIRKTKTDKVDCYLIIKSLIMNRYRLFTEQDFESLKLKNLCRFRQNLMKARTKVKIQLVSYVDLLFPELQYFFKSGIHTKTCYTLLKECSNPDEIANMHLTRLTNLLTKSSHGRFKRSTAVSLKELASQSVGTKNNTLSLQILQSIIQIELFTKQLAEVEDSINDIMNGLDSVIKSIPGIGNVNGAMIIGEIGDINRFKKPSQLLAYAGLDPSVFQSGNFKASNTKMSKRGSKLLRYALINAAWQLTLNNKTFKDYYDLKVSQGRRHYCALGHVAHKFVRVLHKIMTDNIEFDLA

SEQ ID NO: 18430 - protein, 393 aa, unidentified
  source 1..393: note = protein_35d4384
  REGION 4..163: note = RuvC_domain
  SITE 7: note = RuvC_P1
  SITE 60: note = RuvC_P2
  SITE 101: note = RuvC_P3
  SITE 103: note = RuvC_P4
  SITE 106: note = RuvC_P5
  REGION 266..355: note = Tnp_domain
  SITE 274: note = Tnp_P1
  SITE 304: note = Tnp_P2
  SITE 312: note = Tnp_P3
  SITE 313: note = Tnp_P4
  SITE 328: note = Tnp_P5
MICVGIDVAKDKHDCFILSSEGEVLADVFTIPNNRDGFETLLQRIRSCTRPTDKIKVGLEATGHYSYNILGFLLDSGLATYVINPLHTNLYRKSLSLRKTKTDRIDAQTIAAMLMSDVDLKSYTDTAYHNEELKSLTRYRFDKVRQRAKLKQSVSRLVNILFPELETLVPTLHMASVYALLCELPGAQQIAVAHLTHLKTLLDSASKGRYDRDKAMEIRDAARRSIGSKMPAKSLELRHTIQLIWELDKEIHEIEAAIEDIMISIQSPITTIPGIGYRMGAMILAEVGDFANFDSPDKILAYAGLSPSTYESGKLKATGVYAHMEKRGSRYLRYAIFNATKYVCHWDPTFAAYLAKKRAEGKHYNVAVSHAAKKLVRVIYALQKFGQPYRTAA

SEQ ID NO: 18431 - protein, 327 aa, unidentified
  source 1..327: note = protein_546af0b
  REGION 16..135: note = RuvC_domain
  SITE 39: note = RuvC_P2
  SITE 74: note = RuvC_P3
  SITE 76: note = RuvC_P4
  SITE 79: note = RuvC_P5
  REGION 198..284: note = Tnp_domain
  SITE 206: note = Tnp_P1
  SITE 236: note = Tnp_P2
  SITE 244: note = Tnp_P3
  SITE 245: note = Tnp_P4
  SITE 257: note = Tnp_P5
MFQIHEVSRATGEIVRVQLKRAKFLAYFVNRPPCVIGMEACGGAYHWARELIALGHAVKLLPPQKVRPFAAGNKNDVADAQAIWTAMQQPGMKAVAVKTESQQAVLAMHRMRTQLVKFRTAQVNALRGLFGEYGEVMPVGRLSAMKAIPEVLGRLEDRLPTVLIETLREQFQRIHDLDGQVLMIEQRLKQWFEMEPECQRIAAIPGVGLLSATAAVATIGDPATFRSGREFAAWLGLVPRQVGTGGRVKLLGISKRGDTYLRTLLIHGARAVLARNKTPSPWVARLCERRPQNVVVVAMANKMARTLWALMAHQRTYLANYAGAEVL

SEQ ID NO: 18432 - protein, 403 aa, unidentified
  source 1..403: note = protein_67ae441
  REGION 4..160: note = RuvC_domain
  SITE 7: note = RuvC_P1
  SITE 57: note = RuvC_P2
  SITE 97: note = RuvC_P3
  SITE 99: note = RuvC_P4
  SITE 102: note = RuvC_P5
  REGION 274..361: note = Tnp_domain
  SITE 282: note = Tnp_P1
  SITE 312: note = Tnp_P2
  SITE 320: note = Tnp_P3
  SITE 321: note = Tnp_P4
  SITE 334: note = Tnp_P5
MNAVGIDVSKGKSTVAIFQPGEKVVLKPRDFRHTQSGIGSLIEIIKGLDGDTKVCMEHTGRYYEPVATWLSDAGIFVSAVNPTLIRSFGDDSLRAPKTDKADAKKIARYTLDRWTKLKQYGHMDETRNQLKTMNRQFGFYMDQKTAMKNNLIALLDQTYPGANAFFDSPARSDGSQKWVDFVYTYWHADCVRGKSLNAFTEHYKSWCKRKGYNFCAAKAEKIYNDSADLIAVFSKNANTKMLVHQAVEMLNLVSKTVESLREEMNRLAATLPEYPVVMAMNGVGPTLGPQLMAEIGDVTRFEKRGSLTAFAGVDPGKNDSGQHSQKSVPTSKKGSPHLRKTLFLIMESLIQRAPEDDPVYAFMDKKRAQGKPYYVYMTAGSNKFLRIYYGRVNEYLASLSESN

SEQ ID NO: 18433 - protein, 341 aa, unidentified
  source 1..341: note = protein_2a1846a
  REGION 6..148: note = RuvC_domain
  SITE 9: note = RuvC_P1
  SITE 52: note = RuvC_P2
  SITE 87: note = RuvC_P3
  SITE 89: note = RuvC_P4
  SITE 92: note = RuvC_P5
  REGION 211..296: note = Tnp_domain
  SITE 219: note = Tnp_P1
  SITE 249: note = Tnp_P2
  SITE 257: note = Tnp_P3
  SITE 258: note = Tnp_P4
  SITE 270: note = Tnp_P5
MKATTIGIDLAKEVFQVHGVDEHGKRLFNKQLKRSQIASFFANIPPCLIGMEACASAHFWANKLQGLGHTVKLMAPQFVKPYVKTNKHDAADAEAICEAVTRPNMRFVPIKSPEQQAVLALHRSRQGFIKQRTAQANQIRGLLAEFGIVMPIGIHQLLRRLPEILEDAENQLPNLFRVQLSLLQKHIEYLFDVVSTLDKQIEHCHQQNALCQRIGKIPGIGPITASALIATIGNANNFENGRQLAAWLGLVPRQHSSGGKQVLLGISKRGDTYLRTLLIHGARAVLQSVKRKQDTVSGWASRLLERRNNNIASVALANKNARIVWALLAKDQEYSAPVMNA

SEQ ID NO: 18434 - protein, 337 aa, unidentified
  source 1..337: note = protein_d66b60e
  REGION 6..148: note = RuvC_domain
  SITE 9: note = RuvC_P1
  SITE 52: note = RuvC_P2
  SITE 87: note = RuvC_P3
  SITE 89: note = RuvC_P4
  SITE 92: note = RuvC_P5
  REGION 211..297: note = Tnp_domain
  SITE 219: note = Tnp_P1
  SITE 249: note = Tnp_P2
  SITE 257: note = Tnp_P3
  SITE 258: note = Tnp_P4
  SITE 270: note = Tnp_P5
MSQSIYGIDLAKHSFSIHGEDEHDKVLIHKSITRSKVLSTFANISPAIVGMEACGTSYYWARELAKLGHTTRIMASKYVAPFRTGAKNDLNDAVAICVAVTRPSTRFVKIKSPEQQAILLLHRARDNWVHERTALLNQIRAMLAEFGIIAPKGRHALQTAIPEALEDAENQLPDLARAILSDSYDHLLSINQRIADQENCFNMLVSRSHNAQKIMKTAGIGLITATAIIASIGKGEQFDKDRGFATWLGLVPTQYSTGGKPRLGLITKKSDKYLRTLLVHGARAFISANGNRTERLSLWCKDLVERRSFKRAVVGLAAKNARIIWSLLSNDTEYQPL

SEQ ID NO: 18435 - protein, 333 aa, unidentified
  source 1..333: note = protein_ba65ca5
  REGION 25..171: note = RuvC_domain
  SITE 28: note = RuvC_P1
  SITE 72: note = RuvC_P2
  SITE 112: note = RuvC_P3
  SITE 114: note = RuvC_P4
  SITE 117: note = RuvC_P5
  REGION 207..292: note = Tnp_domain
  SITE 215: note = Tnp_P1
  SITE 244: note = Tnp_P2
  SITE 252: note = Tnp_P3
  SITE 253: note = Tnp_P4
  SITE 264: note = Tnp_P5
MVEGTVGSHHKEGSTKMKHYSAVCAGIDTGKHKLDVAVDGSDERLQLDNSPEGHRLLSAWLRKRGVERLGIEASGGYEQVVVSALRADGFVVIVFQPAQVRAYAKFVLQHAKNDKIDAALIARCTAAATEIREPPDARLAPLAQHLTMIEQLTEDVAQIKTRRETCQDQRIRDFWTDEINRLKRLIKQELKLLVAAIRTHRDLSNRLDLIASVDGVGLRTAVAILVRMPEIGRISREHAAAIAGLAPFDDDSGLRRGLRHIKGGRQRLRQSLYAAALPAAFYWNPQLKALYRRLIERRKAHKAALVACARKLLIFVNTVVARGTPWEPTLAAD

SEQ ID NO: 18436 - protein, 344 aa, unidentified
  source 1..344: note = protein_ed6b749
  REGION 7..150: note = RuvC_domain
  SITE 10: note = RuvC_P1
  SITE 54: note = RuvC_P2
  SITE 89: note = RuvC_P3
  SITE 91: note = RuvC_P4
  SITE 94: note = RuvC_P5
  REGION 213..297: note = Tnp_domain
  SITE 221: note = Tnp_P1
  SITE 250: note = Tnp_P2
  SITE 258: note = Tnp_P3
  SITE 259: note = Tnp_P4
  SITE 271: note = Tnp_P5
MNTIRVVGIDIAKSVFQVCVWMIDGSVAWNRKISRQKLLDTLHQFEPGTLIAMEACSTSHYWGRTFSAMGFSIRLIPAQYVKAFVRSQKNDANDALAICETACRPGIHFVPVKTTEQQDIKALRNTRQLMVEQRTALANQLRSLLAEYGLIIPVGIQCLQQHLSEFIEDTSNDLTFTLRRLISSLREDMQALNERISGLNSEITALSSQQAAYRHLLTIQGVGPLIAAAFISEVDAVQFSSGRELSAWCGLVPRQHSSGGKQRLSSVTKNGNRSLRTLVIHGARSVMRCMKKRDDRLGLWLKKLEARRGFLKTTVALANKLTMIIWRVLTDSVDFNINKAFAMS

SEQ ID NO: 18437 - protein, 394 aa, unidentified
  source 1..394: note = protein_bb4b500
  REGION 4..164: note = RuvC_domain
  SITE 7: note = RuvC_P1
  SITE 59: note = RuvC_P2
  SITE 99: note = RuvC_P3
  SITE 101: note = RuvC_P4
  SITE 104: note = RuvC_P5
  REGION 267..354: note = Tnp_domain
  SITE 275: note = Tnp_P1
  SITE 305: note = Tnp_P2
  SITE 313: note = Tnp_P3
  SITE 314: note = Tnp_P4
  SITE 327: note = Tnp_P5
MKLIGIDIGKNKHFFCIMDKDTGEVVVSPSSFPNNKEGFDSLIQKIKLYSKDSVLIGMEDTGHYHFALLKYLLDNHFAVALINPKTTDFARKMQGGITKNDKLDTITICDVLDTHERKKQYRITRVDRFDLYEQKQLTRHHHNLKEELNVYTNRLQKSIDIVFPEFNRLFKSKYGSVYMNILKTFGSADNIANTDIRTLRKCFESKGRGRRISLTPEQLKECAKISIGIPSAAEVIQIRHLISQIELVNEQIAEIDKKIEEFSVQNNSPILTIPGISHFSGTSILAELGEICNYSKPSQIIKFAGVAPYHYESSQYNAQHTAITKKGSKYLRKTLYQIILPVIRFNPVFKEYYQLKISQGKGHRCAQGHCVRKLLRIVYHLLSTNQQFNPGLLR

SEQ ID NO: 18438 - protein, 355 aa, unidentified
  source 1..355: note = protein_7c50240
  REGION 4..62: note = RuvC_domain
  SITE 7: note = RuvC_P1
  SITE 57: note = RuvC_P2
  REGION 226..313: note = Tnp_domain
  SITE 234: note = Tnp_P1
  SITE 264: note = Tnp_P2
  SITE 272: note = Tnp_P3
  SITE 273: note = Tnp_P4
  SITE 286: note = Tnp_P5
MNSVGIDISKGRSTVAVMRPFGEVVISPFEVRHTDSELSELARQLKSLDGETRVVMEAANYGLDRWLALTRYVPEEDTRLLLKNCYRQYRQYSKVQTVLKNNLISLLDTVFPNVNRLFSSPAREDGSEKWVDFVAEFWHCRCVSEKSEKAFANKYQRWCRKYGYNFNEAKAHTIHAEASGHIGVMPMSETTKLLVEQAVAQLRATSTALAALKHEMQALTSMLPEYPVVMDMFGVGPTLGPQLIAEIGDVRRFYSKKALVAYAGLDAPPNDSGDVTGRHKSMSKIGASSLRRTLFLVMSVYLQTAPLDEPVYQFMDRKRAEGKPYRVYMMASANKFLRIYYATVKAYLESLEHTA

SEQ ID NO: 18439 - protein, 356 aa, unidentified
  source 1..356: note = protein_b8194be
  REGION 15..156: note = RuvC_domain
  SITE 18: note = RuvC_P1
  SITE 61: note = RuvC_P2
  SITE 96: note = RuvC_P3
  SITE 98: note = RuvC_P4
  SITE 101: note = RuvC_P5
  REGION 219..304: note = Tnp_domain
  SITE 227: note = Tnp_P1
  SITE 257: note = Tnp_P2
  SITE 265: note = Tnp_P3
  SITE 266: note = Tnp_P4
  SITE 278: note = Tnp_P5
MNRLPKAKPAVIATLGVDIGKNTFHLIGLDKRGAIVLRERLSRAQIEARLANMAPCLVGMEACVGAHHLGRRLEALGHDVRLMAAKYVRPFCRKQKNDFNDAQAIAEAVTRPTVRYVALKTPAQLDLQALHRVRERLMSQRTGVINQIRAFLLERGIAIRQGWRSLRAELPRALAMTDKLTPRMVHIVEDLAGDWRRLDERIEAVSAEIEELAHADEGAVRLMSVPGIGPLISSATVAGIGKGDVFDKGRDFAAWLGLVPKQTSTGGRPILGRISKRGNRYLRQLFVQAARVVLLRPQSWERYGLKHWIGAAAQRLHYNKLAVALANKLARIAWGVLHSGRSFHIRTETSHAPQPA

SEQ ID NO: 18440 - protein, 392 aa, unidentified
  source 1..392: note = protein_16be2e2
  REGION 4..163: note = RuvC_domain
  SITE 7: note = RuvC_P1
  SITE 60: note = RuvC_P2
  SITE 101: note = RuvC_P3
  SITE 103: note = RuvC_P4
  SITE 106: note = RuvC_P5
  REGION 267..354: note = Tnp_domain
  SITE 275: note = Tnp_P1
  SITE 305: note = Tnp_P2
  SITE 313: note = Tnp_P3
  SITE 314: note = Tnp_P4
  SITE 327: note = Tnp_P5
MIYVGIDVAKDKHDCFITNSDGEVLFKSFTISNNRDGFETLFQRIESVSDDLTKIKVGLEATGHYSYNLLGFLLDKGLTTFVINPLHTNLYRKSLSLRKTKTDKVDSRTIATMMISDMNLKSYSDTSYHNEELKSLTRYRFDKVKERAKLKSSIARLVNILFPEMEALVPSLHLASVYALLFEFPGASHVASAHLTRLTNLLSNASKGRYGKDTSILFRDTARNSIGSVMPAKSLELKHTIKLIQELTSEIDEIEAAIERIMDEEIQSPILTIPGISYRMGSMILAEIGDFSRFDSADKILAYAGMSPSTYQSGQLDNCYSHMEKRGSRYLRYALYNATKYVCHWDKSFGAYLEKKRSEGKHYNVALSHATKKLVRLIFAMEKSGQAYIPAV

SEQ ID NO: 18441 - protein, 392 aa, unidentified
  source 1..392: note = protein_55b6116
  REGION 4..164: note = RuvC_domain
  SITE 7: note = RuvC_P1
  SITE 62: note = RuvC_P2
  SITE 103: note = RuvC_P3
  SITE 105: note = RuvC_P4
  SITE 108: note = RuvC_P5
  REGION 267..354: note = Tnp_domain
  SITE 275: note = Tnp_P1
  SITE 305: note = Tnp_P2
  SITE 313: note = Tnp_P3
  SITE 314: note = Tnp_P4
  SITE 327: note = Tnp_P5
MIYIGIDVAKNKHDCCIINSDGAILNDSLRISNSRQGFEFLYSSILSILPDKDISNVKIGLESTGHYSTNLQNFLYAKGFRLSILNPLATNLFRKAQTLRKTKTDKTDALVIAKMLFSDDTKSYSPVSYQIQELKSLTRHRYRLIGYRAKLKISVNRLIDIIFPELPKLFWSIHQSSSYALLSILPNANEIAACHLTKLTNILSAASKGKYSKDKAISIKKSAVDSIGTSSRALSFELQQTIRLIQSVQVEIDALELQIKEILIEINSPLISIPGISYTLAAIILSEIGDIERFTSPCKLLAFAGLDPSTYQSGKYNASHTPMVKRGSTYLRWAVLTAARTVSMRDATFFAYLSKKRSEGKHYYVALSHVAKKLVRVIFYLLKTNTAFVPQM

SEQ ID NO: 18442 - protein, 404 aa, unidentified
  source 1..404: note = protein_4858e27
  REGION 4..160: note = RuvC_domain
  SITE 7: note = RuvC_P1
  SITE 57: note = RuvC_P2
  SITE 97: note = RuvC_P3
  SITE 99: note = RuvC_P4
  SITE 102: note = RuvC_P5
  REGION 275..362: note = Tnp_domain
  SITE 283: note = Tnp_P1
  SITE 313: note = Tnp_P2
  SITE 321: note = Tnp_P3
  SITE 322: note = Tnp_P4
  SITE 335: note = Tnp_P5
MISVGIDVSKEKSTVCILKPYGEIVRSPYEITHTESQIAELVSTIKCLDDEVRVVMEATGNYHLPVLSFLKEHGIFVAVINPLIMKKYASIILRKGKTDKLDSIKIANYGLDNWFYLINHESSEEIYVQLRLLGRQYGHYIKLRIESKLSLTTMLDYTMPGIKTMLKSRSDKPEKDKLNDFIEEYWHYDNITKKSENQFISNYKNWAKKKGYQQSEAKAIKIYDLAQQGIPTLSSNAPSTKMLVLEAVRVLREIDKTLALILSQMQELAKSLKEYTVVREMAGVGDIIAPRLMAEIGDIRRFHSGKALIAYAGIDAPPYQSGQFTGTRRRISKRGSATLRKTGFEIMKCLKSNKPESDTVYLFVLKKEAEGKASKVAKIAGLNKFLRIYYVRVKKYISNKQFNK

SEQ ID NO: 18443 - protein, 331 aa, unidentified
  source 1..331: note = protein_0f5bef4
  REGION 7..158: note = RuvC_domain
  SITE 10: note = RuvC_P1
  SITE 59: note = RuvC_P2
  SITE 97: note = RuvC_P3
  SITE 99: note = RuvC_P4
  SITE 102: note = RuvC_P5
  REGION 202..289: note = Tnp_domain
  SITE 210: note = Tnp_P1
  SITE 240: note = Tnp_P2
  SITE 248: note = Tnp_P3
  SITE 249: note = Tnp_P4
  SITE 262: note = Tnp_P5
MKFEEVIGIDVSKLTLDACIHSQQIFTQVPNTKKGYLKLLSWASKSTGCSLERALFCFEHTGMYSYALACYMSEKQMNYIMVPGLEIKRSLGIQRGKNDRVDSMRIAQYAYRRREEVTTYQLPEKSINRIRQLLSLREKLVRQCAGYEASLKDLSDFIESSENKLLVGVQRNMVKALGREIEKVETEIDRVLEGSPDIMNNYKLITSITGVGRQTALHLIIVTNNFLSFDDHRKLASYAGVAPFANTSGTSIKGRTKVSPLANRKLKSLLSACAISAIRHDPEMKIYFNRRTEMGKHKMNSINAVRNKLLARVFAVVRRGTPYVPLCQYAA

SEQ ID NO: 18444 - protein, 342 aa, unidentified
  source 1..342: note = protein_60b5fc2
  REGION 7..149: note = RuvC_domain
  SITE 10: note = RuvC_P1
  SITE 53: note = RuvC_P2
  SITE 88: note = RuvC_P3
  SITE 90: note = RuvC_P4
  SITE 93: note = RuvC_P5
  REGION 212..297: note = Tnp_domain
  SITE 220: note = Tnp_P1
  SITE 250: note = Tnp_P2
  SITE 258: note = Tnp_P3
  SITE 259: note = Tnp_P4
  SITE 271: note = Tnp_P5
MGEIITIGVDLAKNVFQVHGVDAEGAVIVRRQLRRAQVLPFFTKQPACLVGMEACATAHHWARELTGLGHAVKLMPPRYVKPYVKRNKNDAADAEAICEAVTRPTMRFVAVKSTDQQGVLMLHRSRELLVRQRTMLVNAIRAHMAEFGIVVPAGIQRVKTLLVVIADAEDDRLPSVARFCLEGLARQLASLHEEITVLEKRIHAWHRSSEVSQRLQTIPGIGPITASALVASIGDPSLFKSGREMAAWIGLVPRQNSSGGKERLGRISKQGDQYIRWLLVAGAMSVVKQARMRDTPSWLTQMIATKPAKVVAVAQANKTARIVWALLQHGGIYQAPPLKQAA

SEQ ID NO: 18445 - protein, 340 aa, unidentified
  source 1..340: note = protein_22dbe2e
  REGION 6..148: note = RuvC_domain
  SITE 9: note = RuvC_P1
  SITE 52: note = RuvC_P2
  SITE 87: note = RuvC_P3
  SITE 89: note = RuvC_P4
  SITE 92: note = RuvC_P5
  REGION 211..297: note = Tnp_domain
  SITE 219: note = Tnp_P1
  SITE 249: note = Tnp_P2
  SITE 257: note = Tnp_P3
  SITE 258: note = Tnp_P4
  SITE 270: note = Tnp_P5
MKVHVCGVDIGKTVFHLVGLSKEGHIVTKKRFSRKQLLTHTVNMPACLIGIEACPGAHFLARALLQQGHDVKLMPAEYVRPFVKSNKNDYVDAEAIAEAVQRPTMRFVPVKNEAQLDLQALHRVRDRWIGRKIAVINQLRGFLLEHGITVRVGPAHLKRQIPSILEDAENLLSPRMRMLLLELRDEWVKLEEQIDASTRELALFAKKEDGCRRLLTIPGIGPLTATALTAAIGNGAAFRKSRDLAAWLGLVPRQHSTGGKARLLGISKRGDPYLRRLFVHGGRAVLAQVKRERHQFGGWLDRLEARSPRSVAIVAMANKIARMAWAVLTSGQSYNAAFST

SEQ ID NO: 18446 - protein, 335 aa, unidentified
  source 1..335: note = protein_ed50e5b
  REGION 7..161: note = RuvC_domain
  SITE 10: note = RuvC_P1
  SITE 64: note = RuvC_P2
  SITE 104: note = RuvC_P3
  SITE 106: note = RuvC_P4
  SITE 109: note = RuvC_P5
  REGION 209..296: note = Tnp_domain
  SITE 217: note = Tnp_P1
  SITE 247: note = Tnp_P2
  SITE 255: note = Tnp_P3
  SITE 256: note = Tnp_P4
  SITE 269: note = Tnp_P5
MHYLYYVGLDVSKETFDASLVASEDANEMAHRKFANSRKGICSCLHWVEKRHGIRLDDVIFCAEDMGSYISEMAVCASDRTLNFNFSLISPLVIKYSMGIARGKTDRVDARRIAEYAITHYRKIALYLPAEKELCQLRTWLILRAHLAKQRVAKLVLLEKLDYKEKFADVSIQRSMLQEEIAYAETHMKTIEREMKELIAADSNICRNYKLLTSIKGVGPITAIVMLCSTLNFTKITDHRKFACYCGLAPFEHSSGTSVRGGCHTSSMANRDIKVQLNRSALIAIRCDPQLKAYYERKVAEGKHKFSVLNAVRAKIAARCFAVVRRGTPYVALQI

SEQ ID NO: 18447 - protein, 412 aa, unidentified
  source 1..412: note = protein_3d73f21
  REGION 5..163: note = RuvC_domain
  SITE 8: note = RuvC_P1
  SITE 62: note = RuvC_P2
  SITE 102: note = RuvC_P3
  SITE 104: note = RuvC_P4
  SITE 107: note = RuvC_P5
  REGION 273..372: note = Tnp_domain
  SITE 281: note = Tnp_P1
  SITE 311: note = Tnp_P2
  SITE 319: note = Tnp_P3
  SITE 320: note = Tnp_P4
  SITE 333: note = Tnp_P5
MNPVVGLDVAKGESQVQMFLDKKMPYKNSVKIQHTVEGLEELHAYLLDLERKTGLKPPVVLESTGHYHAPVVQFLEAQEYIVIIVNPLVSYRAKSSNLRKTKTDAIDAYHLGELYYKEDLEPQKKRGIQLLNLRHLTRQHENMTGIMVQTKLQFQAILDQVFPEYKGVYGDLYAEISLRTLQSFPTSESVLKAGVEEIAQFIDKHCKARSFNWAYERAEDLIAAAERNPFQSTLYQSLLVSLNMYIDLLQAYRQQLSTLEREMDQLAAQLEEYELIQSLPGIGEKIAATILSEIGKIERFNHPKKLVAFAGLDPSVFESGRFKGTKNHITKRGSARLRHTLYTAVRCSIRDSRKKKTTDETIARNKRLRSFYDLKRDEGKPYKVAVIACANKLLHWIYAILKTKTPFQETIK

SEQ ID NO: 18448 - protein, 343 aa, unidentified
  source 1..343: note = protein_5321b79
  REGION 7..149: note = RuvC_domain
  SITE 10: note = RuvC_P1
  SITE 53: note = RuvC_P2
  SITE 88: note = RuvC_P3
  SITE 90: note = RuvC_P4
  SITE 93: note = RuvC_P5
  REGION 212..304: note = Tnp_domain
  SITE 220: note = Tnp_P1
  SITE 250: note = Tnp_P2
  SITE 258: note = Tnp_P3
  SITE 259: note = Tnp_P4
  SITE 271: note = Tnp_P5
MQKVTTIGLDIAKSVFQVHGVDAAGNVIIRRQLKRRYVVAFFEKLPPCLVGIEACATSHHWSRELQALGHRVRLMPPAYVKPYVKRQKNDAADAEAICEAVTRANMRFVETKTSEQQSCLMLHRTRHLFIRQQTAVINSIRAHLAEFGIVARVGRNGVEDLLDVVADSGDQRVPELARACLTVLGAQLRMLKAQILEFDRRIMAWHRSNATSKRLDEIPGVGPALATALVGSVADPTAFRSARHFSAWVGLVPRQHSSGGKDKLGSISKQGDRYLRSLFTTGALAVIRYAKIHGTKHRPWLAALLARRPTKVAAIALANKIARMAWAMMIKGERYKEPAALAA

SEQ ID NO: 18449 - protein, 440 aa, unidentified
  source 1..440: note = protein_09c6b57
  REGION 43..201: note = RuvC_domain
  SITE 46: note = RuvC_P1
  SITE 100: note = RuvC_P2
  SITE 140: note = RuvC_P3
  SITE 142: note = RuvC_P4
  SITE 145: note = RuvC_P5
  REGION 314..403: note = Tnp_domain
  SITE 322: note = Tnp_P1
  SITE 352: note = Tnp_P2
  SITE 360: note = Tnp_P3
  SITE 361: note = Tnp_P4
  SITE 374: note = Tnp_P5
MTMIEAGWDTRSRITSDAMERQEPLGATGKSIRIGRDLMNPVIGLDISKEESHGQAFLERGKPYKGTFHFAHTRDGLEELLQAIQEVEHASRLRPLLILEATGHYQCPVVQFLEEHRYLYIVINPLISNRLRKSNLRKVKTDAADAYLLGELFYKEEFEPFKKRGVQLLNLRYLTRQYESLSKMCVQTKLQFQAVLDQVFPAYKGVFGAMYSGVSLRFLSEFPTSYSVLQTDEETLKAKIKDMLSTKRGRSKDWINERVKRLLDAAKQNPFEQTLYASHLINLKVLITLILQYQEHLAELEQNINALAEEIEEYDLIQSIPGIGHKIAATILSEVGEIDRFDHPKKLVAFAGIDPSVFASGKFTATRNRITKRGSRQLRYALVMAVQCGLIRSRNMRIKEFYDRKRAEGKPHKVALVACANKLVHWIHAILKSKKAFRQA

SEQ ID NO: 18450 - protein, 343 aa, unidentified
  source 1..343: note = protein_7587aa1
  REGION 7..148: note = RuvC_domain
  SITE 10: note = RuvC_P1
  SITE 53: note = RuvC_P2
  SITE 88: note = RuvC_P3
  SITE 90: note = RuvC_P4
  SITE 93: note = RuvC_P5
  REGION 212..303: note = Tnp_domain
  SITE 220: note = Tnp_P1
  SITE 250: note = Tnp_P2
  SITE 258: note = Tnp_P3
  SITE 259: note = Tnp_P4
  SITE 271: note = Tnp_P5
MQAITTIGLDIAKSVFQVHGVDAGGQVVLRRQLKRRYVLAFFGKLAPCLVGIEACASSHYWARRLQALGHNVRLMPPAYVKPYVKRQKNDSTDAEAICEAVSRANMRFVPTKTPEQQSGLVLHRTRHLFIRQQTSVINAIRAHCAEFGIVAPVGRRGVEELLNVIANAKDEQVPAIARACVVALGAQLHRIKQQILEFDRMITAWHRCCDTSRRLDEIPGVGPALATALVASVANPRAFRSGRDFSAWIGLVPKQNSSGGKPKLGSISKQGDRYLRGLFTAGALAVIRYAKIHGTRHRPWLTALLARRPIKVAAIALANKIARMAWAMMTRGEHYREPIALAA

SEQ ID NO: 18451 - protein, 390 aa, unidentified
  source 1..390: note = protein_6c99564
  REGION 4..163: note = RuvC_domain
  SITE 7: note = RuvC_P1
  SITE 60: note = RuvC_P2
  SITE 101: note = RuvC_P3
  SITE 103: note = RuvC_P4
  SITE 106: note = RuvC_P5
  REGION 266..353: note = Tnp_domain
  SITE 274: note = Tnp_P1
  SITE 304: note = Tnp_P2
  SITE 312: note = Tnp_P3
  SITE 313: note = Tnp_P4
  SITE 326: note = Tnp_P5
MILIGIDVAKDKHDCCIINSDGEFPEEVFSILNNREGYETLYKWICSLAVDFTKVKVGLESTGHYSSNLLAFLLDKHLTAYVINPLRVNLFRKGQSLRRTKTDKIDSRDIAHLLMTDSSLKPYSLSSYHMEELKSLTRYRASMVRERTKLKTSIARLVTILFPELEQMVSSIHIHSIYAMLEEFPGSAYIAAAHLTRLTALLLKASRGRFGRGMAIRIRDTAKQSVGAVSPAKSMELRHTIAHLRVYDQEIGEIESEIEKIMDDVNSPITSVPGIGMQMGAVILAEIGSFRRFDSPDKILAYAGMSPSTYQSGKLTGSYSRMEKRGSRYLRYALFNVTRYVCHYDPGFTAYLSKKRKEGKHYYVAISHAVKRLVRVLYAMEISGNWYQTA

SEQ ID NO: 18452 - protein, 338 aa, unidentified
  source 1..338: note = protein_ab37669
  REGION 5..151: note = RuvC_domain
  SITE 8: note = RuvC_P1
  SITE 54: note = RuvC_P2
  SITE 90: note = RuvC_P3
  SITE 92: note = RuvC_P4
  SITE 95: note = RuvC_P5
  REGION 211..297: note = Tnp_domain
  SITE 219: note = Tnp_P1
  SITE 249: note = Tnp_P2
  SITE 257: note = Tnp_P3
  SITE 258: note = Tnp_P4
  SITE 270: note = Tnp_P5
MKTHVGVDLHQRFCYLTAVDASGKTRKQGQVANEGAALRCWLRGLEQPRQVVVEASGFWPAFARAVGPESERLVMVHPQRVKAIASAKLKNDRVDSETLAHLSRCDLLPEAWMADTGTQQLRLLVRLRITLGRHRARAKNQLQAVLHQEGFKKPVTDVFGKRGRVWLAGLELSAAGRLVVDTWLREVDHLDVELAVQTGELERLAGADARARILQTVPGIGPYAAMVILAELGDVERFQNKRALASYAGLTPVVRESAGKRKRGGITHQGSNTLRWIMLQVAQVAARCSPGARSYYAGLRARKPAQVARIALARKLLTVVWALLHHGVCWDEDSFTRG

SEQ ID NO: 18453 - protein, 351 aa, unidentified
  source 1..351: note = protein_e9a2ac2
  REGION 6..147: note = RuvC_domain
  SITE 9: note = RuvC_P1
  SITE 52: note = RuvC_P2
  SITE 87: note = RuvC_P3
  SITE 89: note = RuvC_P4
  SITE 92: note = RuvC_P5
  REGION 211..298: note = Tnp_domain
  SITE 219: note = Tnp_P1
  SITE 249: note = Tnp_P2
  SITE 257: note = Tnp_P3
  SITE 258: note = Tnp_P4
  SITE 270: note = Tnp_P5
MNLHAIGIDLGKTVFHLVGLSHAGEVVVRKKFSRTQLLRFTANVQVDLIGMEACAGSHFLGKALREQGHEVRLMPAQYVKPFVKTNKNDFIDAEAIAEAVSRPSMRFVPIKTDEQLDMQSLHRVRERWIMRRTAVVNQIRGLLLERGITVRTGRCHLDAALPNILEDGSTPLSGTLRCLLVELKRELEQLAGHIEQAEALIQRAAQQSEACQRLDAIPGIGPLTATALIAAIGNGEAFRKGRDLAAWMGLVPREPSTGGKQKLLGISKRGNGYLRKLFVQGARAVLQFREMQSPGLRKWLEELSARTHYNVVGVALANKLARIAWAVLARGEAYRPPVLADSLTGLQMEPV

SEQ ID NO: 18454 - protein, 342 aa, unidentified
  source 1..342: note = protein_814896a
  REGION 6..148: note = RuvC_domain
  SITE 9: note = RuvC_P1
  SITE 52: note = RuvC_P2
  SITE 87: note = RuvC_P3
  SITE 89: note = RuvC_P4
  SITE 92: note = RuvC_P5
  REGION 211..297: note = Tnp_domain
  SITE 219: note = Tnp_P1
  SITE 249: note = Tnp_P2
  SITE 257: note = Tnp_P3
  SITE 258: note = Tnp_P4
  SITE 270: note = Tnp_P5
MNISTVGIDLAKNVFQVHGANERGKKLWNKQLQRKQVLKFFTRIPPCLIGMEACGSAHFWARKLEELGHTVKLMAPQFVKPYVKTNKNDAADAEAICEAVTRPSMRFVPIKNGEQQAILSIHRARQGFVKARTAQANQIRGLLMEYGIIIPQGIVNINKNTPEILEDAENELPGIFRQLLQRLTSHLKELNLQVIALDSQIQAYHKANEASKKLAEIPGIGPITASALTASIGDAKCFKNGRQLAAWLGLVPRQHSSGGKPSLGGISKRGDSYLRTLLIHGARSVVRVATSQKTATHCWAINLVERRNKNVAAVALANKNARIVWALLAQNREYQHNFNSVA

SEQ ID NO: 18455 - protein, 387 aa, unidentified
  source 1..387: note = protein_d4b5a54
  REGION 4..159: note = RuvC_domain
  SITE 7: note = RuvC_P1
  SITE 57: note = RuvC_P2
  SITE 98: note = RuvC_P3
  SITE 100: note = RuvC_P4
  SITE 103: note = RuvC_P5
  REGION 262..347: note = Tnp_domain
  SITE 269: note = Tnp_P1
  SITE 299: note = Tnp_P2
  SITE 307: note = Tnp_P3
  SITE 308: note = Tnp_P4
  SITE 320: note = Tnp_P5
MYFVGIDISKFKHDCAIVDELGDVITPSWSFQNNCEGFSLLRELLDALDGEKKIGFEATGHYGQNLKLFLESNGFSFMEINPLLISRFVRSKSLRNTKTDSIDALAIAQYLMTVEYKPYPPSFYHLDKLKSLTRFRDSLVRQRSRQLVELTNILDKVFPEFKPFFGGRFSVTALYILANYQSPERIANINAKSYEALRKKSKGKFTMAKFVQLKSLAKNTVGRSDDFLLQQMEMTLDIYSQMDSKVDEVEVQIQECITGINPPIMTIPGVGYLSAAVILSEFGDFSKFENPSKMLSFAGLKPGYFQSGQSEHTGRMVKHGSSHLRYALMNTCLPLITNEPVFAEYYAKKRAEGKPYRVALTHVAKKLLRVIYTLQTKNIPYDANLIR

SEQ ID NO: 18456 - protein, 405 aa, unidentified
  source 1..405: note = protein_0bf0396
  REGION 4..160: note = RuvC_domain
  SITE 7: note = RuvC_P1
  SITE 59: note = RuvC_P2
  SITE 97: note = RuvC_P3
  SITE 99: note = RuvC_P4
  SITE 102: note = RuvC_P5
  REGION 271..357: note = Tnp_domain
  SITE 279: note = Tnp_P1
  SITE 310: note = Tnp_P2
  SITE 318: note = Tnp_P3
  SITE 319: note = Tnp_P4
MIFVGNDWASDHHDVCVMDEHGTTLATRRIPENAAGATTMHELIARYAQEPGEVVIGIETDHGMWVTALVAAGYQVYAINPLSVSRYRDRHHVGGTKSDKADAKTLADLVRTDRHNHRLVAADTVAADAITVMARTHQNLVWARSAQQNVLRSQLGAYYPAAVDAFGGDLAHKDCLAVLRRAPTPRQGAALSVAAIRSALKKGGRQRNTDTRARDIQHALRGGGHLGAPEALTAAYAATVTATVEMLAALNTQIIQLETTMAQSFRAHPDAEIYLSMPGVGDITGARMLGEFGDDPERYATAKSRRNYAGTSPRTIASGKGHVVLARHIRNTRLNAAALCMAQSALTGSPGARVYYDSLRDQKKSHTQALRAVANRLIGILHGCLTHRTPYNEHTAWNHRTHLAA

SEQ ID NO: 18457 - protein, 357 aa, unidentified
  source 1..357: note = protein_eba1267
  REGION 18..159: note = RuvC_domain
  SITE 21: note = RuvC_P1
  SITE 64: note = RuvC_P2
  SITE 99: note = RuvC_P3
  SITE 101: note = RuvC_P4
  SITE 104: note = RuvC_P5
  REGION 223..307: note = Tnp_domain
  SITE 231: note = Tnp_P1
  SITE 261: note = Tnp_P2
  SITE 269: note = Tnp_P3
  SITE 270: note = Tnp_P4
  SITE 282: note = Tnp_P5
MVVGKSQTEDIVMQIQSVGIDLGKTTFHLVALNGHSQVVIRKKFSRQQLLVFTATLPSSLVGMEAGVGSHFLGRALREQGHEVRLIPAQFVRPFVKSNKNDYCDAEAIAEAVERENMRFVPIKTEDQLDLQALHRVRERLVSRRTSVINQIRAFLLERGISFRKGPASLRRQMPEILENADEKLTARMRRLLDFLWQEWKHLQLQIESLSEDLEKIANSDAACVRLQQIPGVGPLVATAVVSAIGNGAAFHKGRQFAAWLGLVPRQWSTGGKPKLLGISKRGNPYLRKMFIHGARAAVLRVKREGSCLGQWMSGLESRAARNVVIVATANKLARISWAVLSSGNDYRPLHPAVDCSS

SEQ ID NO: 18458 - protein, 391 aa, unidentified
  source 1..391: note = protein_a57c4f2
  REGION 4..163: note = RuvC_domain
  SITE 7: note = RuvC_P1
  SITE 60: note = RuvC_P2
  SITE 101: note = RuvC_P3
  SITE 103: note = RuvC_P4
  SITE 106: note = RuvC_P5
  REGION 266..353: note = Tnp_domain
  SITE 274: note = Tnp_P1
  SITE 304: note = Tnp_P2
  SITE 312: note = Tnp_P3
  SITE 313: note = Tnp_P4
  SITE 326: note = Tnp_P5
MIYVGIDVAKDKHDCFITNSDGQVLFKAFTIPNNRMGFDDLYQKITSSTDDLTNVKVGLEATGHYSYNILGFLLDKGLTTFVINPLHTSLFRKSLSLRKTKTDKVDSHTIATMLMSDVNLKSYSDSSYHNEELKSLTRYRFDKVKERAKLKASVSRLVTILFPELEKLVPTLHMASVSALLREFPGALQIASAHLTRLTNLLYEASKGRYGRDTAILFKESAKNSIGSNMPAKSLELKHTLKLIGELNSEIDEIEQEIKRIMDDIHSPILTIPGISYRMGAMILAEIGDFSRFDSPDKILAYAGLSPTTYQSGQLESSYSHMEKRGSRYLRYALFNATKFVCNWDPVFASYLTKKRAEGKHYNVAVSHAAKKLVRVIYHLEKSGQAYGKAS

SEQ ID NO: 18459 - protein, 318 aa, unidentified
  source 1..318: note = protein_157bf85
  REGION 7..159: note = RuvC_domain
  SITE 10: note = RuvC_P1
  SITE 54: note = RuvC_P2
  SITE 94: note = RuvC_P3
  SITE 96: note = RuvC_P4
  SITE 99: note = RuvC_P5
  REGION 193..277: note = Tnp_domain
  SITE 201: note = Tnp_P1
  SITE 230: note = Tnp_P2
  SITE 238: note = Tnp_P3
  SITE 239: note = Tnp_P4
  SITE 250: note = Tnp_P5
MTETICVGIDVAKASLEIALSTQGIVMTFPNTPEGHDQLASILANYEIDLVVLEATGGYEMPVACVLQARGLAVAIVNPRQARDFAKAMGYLAKTDKIDAQMLAQLALVLSQQTDRDKIIRVLPSAQQQVLQAMITRRRQLVTLSVSERQRLGSCHPEIRESITLMISFIQEQLKVIKSALSNHIKAYYRPKLDLLSTVKGVGPATIATLIADVPELGQLTRREISALVGVAPFNRDSGFFRGKRTIFGGRAMVRRMLYMATLTAIRFNPVLCAFYKRLTEAGKPNKVAIVACMRKLLVILNAMIKTNKPWDESFHTV

SEQ ID NO: 18460 - protein, 346 aa, unidentified
  source 1..346: note = protein_2054311
  REGION 8..149: note = RuvC_domain
  SITE 11: note = RuvC_P1
  SITE 54: note = RuvC_P2
  SITE 89: note = RuvC_P3
  SITE 91: note = RuvC_P4
  SITE 94: note = RuvC_P5
  REGION 214..298: note = Tnp_domain
  SITE 222: note = Tnp_P1
  SITE 252: note = Tnp_P2
  SITE 260: note = Tnp_P3
  SITE 261: note = Tnp_P4
  SITE 273: note = Tnp_P5
MKTKVSVIGIDIGKNVCSVVGLDADGVVVLRRRATRETLIGLAAKLPACIIAMEACCGAHHLGRIFSAHGHQVRLMSPEYIRPYVKAQKNDERDAEGIAEATTRPTMRFVELKTQDQLDIQTLHRARDRLVGERTALINQLRAILLERGIVVPKGKRHLADYLVVLLDEGVGHALGDRMYRLVDDARTQWLELDKRIAAFDAEFAAFAKENADARRSATIPGVGALIASALLAAIGKADSVEHGRDLAAWLGLVPRQATTGGRPKLLGISKRGNRYLRRQLIHGARAALPHVAKRDTPLGRWLTALLARVHQNVAVVAFANKLARISWAVLRRGETLTDKEAILTV

SEQ ID NO: 18461 - protein, 340 aa, unidentified
  source 1..340: note = protein_6678c01
  REGION 9..169: note = RuvC_domain
  SITE 12: note = RuvC_P1
  SITE 68: note = RuvC_P2
  SITE 108: note = RuvC_P3
  SITE 110: note = RuvC_P4
  SITE 113: note = RuvC_P5
  REGION 209..296: note = Tnp_domain
  SITE 217: note = Tnp_P1
  SITE 247: note = Tnp_P2
  SITE 255: note = Tnp_P3
  SITE 256: note = Tnp_P4
  SITE 269: note = Tnp_P5
MTNIVKQVAGIDVAQKELVVSIGRMDQELTLEIYGYKTFPNNEKGFKALIEWAQKITAEEIKLRYVMEATGVYHEPLAYYLADNGFELSIVLPNKISNYFRTLEVNTITDKTASQTITRFGLERKLETWQKPKKIFRELKQLTRERDQLIAERTLLKNQLHAEQAEAFPHEKSIHRVHTRIALLNDQEKEIKGEIAEIVKRDKDLVKKVETITSIPGVGKLTAIIVLAETNGFELIRSKKQLVSYSGLDVREKQSGTSVKGKPRISKKGNRHLRKAMHLPALSAIKHNDRFKAIFTRLVSRHGIKMKAAVALQRKLLELIYVIWKTGKLYDKDYLIIKTN

SEQ ID NO: 18462 - protein, 342 aa, unidentified
  source 1..342: note = protein_22aa809
  REGION 7..149: note = RuvC_domain
  SITE 10: note = RuvC_P1
  SITE 53: note = RuvC_P2
  SITE 88: note = RuvC_P3
  SITE 90: note = RuvC_P4
  SITE 93: note = RuvC_P5
  REGION 210..296: note = Tnp_domain
  SITE 218: note = Tnp_P1
  SITE 248: note = Tnp_P2
  SITE 256: note = Tnp_P3
  SITE 257: note = Tnp_P4
  SITE 269: note = Tnp_P5
MGEVSTIGLDIAKSVFQVHGEDVDGGVVIRKRIGRSKVLQFFGALPPCLIGIEACPSAHYWSRRLQGLGHTVRLMPPSYVKAYLKRGKNDANDAAAICEAVTRPSMRFVPIKSEQQQSGLMLHRSRQLLVRQRTMLSNAIRGHMAELGIISAKGRKGTAELIKIIGNDDRIPAAARFSLSVLARQYEAIAAEIGAIEKHIHAWHRSCEESRRLEGIPGIGPIVATALVAEVGDWTAFSSGRNLAAWIGLVPRQHSTGGKDRLGGISKQGNRYLRWLLIAGAMAVIRYARQHGTKRLWLVRLMERRPPKVAAVALANKIARMAWAIMVRGERFEESKLLPAAA

SEQ ID NO: 18463 - protein, 342 aa, unidentified
  source 1..342: note = protein_d1b5b72
  REGION 7..149: note = RuvC_domain
  SITE 10: note = RuvC_P1
  SITE 53: note = RuvC_P2
  SITE 88: note = RuvC_P3
  SITE 90: note = RuvC_P4
  SITE 93: note = RuvC_P5
  REGION 211..296: note = Tnp_domain
  SITE 219: note = Tnp_P1
  SITE 249: note = Tnp_P2
  SITE 257: note = Tnp_P3
  SITE 258: note = Tnp_P4
  SITE 270: note = Tnp_P5
MENVSIIGLDIAKSVFQAHGADANGAVVFRKKISRAKLLEFFASQPACKVVMEACGGAHYWAREIARFGHEVKLIAPKYVKPFVKRQKNDAADAEAICEAATRPTMRFVAAKSETAQANGLVFRTRDILVRQRTQITNAVRGHLAEYGLVAPQGAGHFLRLATQLEDPATSLPQEVRSILSLLTQTAQALNEKIAQLDKEIARRTREDEVARRLMTVPGVGAITATAIAALAPPATTFRKGRDFAAWVGLTPLQKSTGGKQKLGATSKMGERTIRRLLVIGAASAIHHATRAGLAPTSWLARLLARKPRMLVIVALANKMARIVWALLIKGEDYRAPASAAA

SEQ ID NO: 18464 - protein, 390 aa, unidentified
  source 1..390: note = protein_dc663f7
  REGION 4..162: note = RuvC_domain
  SITE 7: note = RuvC_P1
  SITE 60: note = RuvC_P2
  SITE 101: note = RuvC_P3
  SITE 103: note = RuvC_P4
  SITE 106: note = RuvC_P5
  REGION 265..352: note = Tnp_domain
  SITE 273: note = Tnp_P1
  SITE 303: note = Tnp_P2
  SITE 311: note = Tnp_P3
  SITE 312: note = Tnp_P4
  SITE 325: note = Tnp_P5
MFYAGIDVAMDKHDCVVLDSDGNVVFEVFTFENSREGFKTLKKVLQSCSKNPKKIKVGLEATGHYSDNLLEFLNSIGFAPVLFNPLHTNLFRKGLSLRKTKTDHVDAHTIAIMLRTEDLKSYSQQSYHLAELKSLTRYRSMLVSDCSRHKISLVRLCQILFPELKNLVPSLHQSSVYTLLSELPSADKIANCNLTHLTALLSSASKGHYGRDKAIEIRDTARASIGIKSVVKELELQQTIELIQIYQQQIEAVEEQINNLMDEIDSPITSIPGIANRMAAVILAETNNFQDFERAEQVLAFAGLEPSVYQSGQLTSTHSKMVKRGSKYLRYAIFNATKYVCHWDPTFKAYLAKKRAEGKPYNVAVSHAAKKLTRVMFHLAKTNKEFVPQA

SEQ ID NO: 18465 - protein, 362 aa, unidentified
  source 1..362: note = protein_c0a5950
  REGION 28..170: note = RuvC_domain
  SITE 31: note = RuvC_P1
  SITE 74: note = RuvC_P2
  SITE 109: note = RuvC_P3
  SITE 111: note = RuvC_P4
  SITE 114: note = RuvC_P5
  REGION 230..315: note = Tnp_domain
  SITE 238: note = Tnp_P1
  SITE 268: note = Tnp_P2
  SITE 276: note = Tnp_P3
  SITE 277: note = Tnp_P4
  SITE 289: note = Tnp_P5
MVTPTLRAGNAGRVFFFAEAIMQNVTLVGVDLGKHVFHLHGQDRQGKAVFRKKVSRKQLVEFFATFHSCTVVMEACAGAHHMARKLASFGHQVKLVSPQFVRPFVKGNKNDFVDAEAICEAASRPSMRFVTPKTESQQALSALHRVRESLIRDRTKTINQIHGFLLEFGISLPVGQAVIKRLPAVLAEHPLPPRLIGILERLHAHNKYLSEQIAEIDREMGRQLAEDDLGQRLLSIPGVGPVTASVLAAEMGDGKQYGSSRDFAASLGLVPRQYSTGGRANLLGISKRGDKNLRRLLVQCARAYMQRLERQSGCLADWVRNMLMRRHSNVVACALANKLARIAWALATRNATFKTDASAASA

SEQ ID NO: 18466 - protein, 346 aa, unidentified
  source 1..346: note = protein_60a8f81
  REGION 6..148: note = RuvC_domain
  SITE 9: note = RuvC_P1
  SITE 52: note = RuvC_P2
  SITE 87: note = RuvC_P3
  SITE 89: note = RuvC_P4
  SITE 92: note = RuvC_P5
  REGION 211..301: note = Tnp_domain
  SITE 219: note = Tnp_P1
  SITE 249: note = Tnp_P2
  SITE 257: note = Tnp_P3
  SITE 258: note = Tnp_P4
  SITE 270: note = Tnp_P5
MKITTIGIDLAKEVFQIHGVDVHGKAVLRKQLRRSEMARFFANLEPCLIGMEACGSSHHWARKLGEFGHTVKLMSPQFVKPYVKTNKNDMADAEAICEAVNRPNMRFVPIKNVEQQAILSIHRARQGFVKARTAQANQMRGLLSEFGIVMPQGIRSINKRMSDILEDAENGLPGTLRKLLERLNDHLKELNRQVEELELQIKLWHKQNEASQKLEAIPGVGPITASAIVATVGGAAEFKNGRQLAAWFGLVPKQRSSGGKQILLGISKRGDTYLRTLMIHGARAVIRFAENKTEPESWVRKLMARRNKNVAAVALANKNARIIWALLAKGTTFHPKHTSAAPATGA

SEQ ID NO: 18467 - protein, 323 aa, unidentified
  source 1..323: note = protein_fab38a7
  REGION 8..147: note = RuvC_domain
  SITE 11: note = RuvC_P1
  SITE 52: note = RuvC_P2
  SITE 92: note = RuvC_P3
  SITE 94: note = RuvC_P4
  SITE 97: note = RuvC_P5
  REGION 191..278: note = Tnp_domain
  SITE 199: note = Tnp_P1
  SITE 229: note = Tnp_P2
  SITE 237: note = Tnp_P3
  SITE 238: note = Tnp_P4
  SITE 251: note = Tnp_P5
MNKYKETFGVDISKDVFDVYGSVCGHSQFKNEASGFKQFLKSLSQNSLVVMEATGYYHYRLAQFLYKNGISVSVVNPLSVKRFVQMKLAKVKTDKSDAQAICDYALSNQPPLYNALTDVQAECLQLFRLMDSYLKKRTATKNKLHGEEALGIPSRYAYRSLKRDLKHLNMEVKGIEDRLLELVKQEQQQQLTLLTGIPGIGIKTALFLVVITDGFSKFEKASQLCSYVGITPTIRESGSSVRGRSRISKVGNKKLRNLLFLCAFNACKHNRGCRMLYERIVAKGKSKKLALIAVANKLLKQAFAIATSGLPYDENYVSVLARG

SEQ ID NO: 18468 - protein, 342 aa, unidentified
  source 1..342: note = protein_9c3ec10
  REGION 7..149: note = RuvC_domain
  SITE 10: note = RuvC_P1
  SITE 53: note = RuvC_P2
  SITE 88: note = RuvC_P3
  SITE 90: note = RuvC_P4
  SITE 93: note = RuvC_P5
  REGION 211..294: note = Tnp_domain
  SITE 219: note = Tnp_P1
  SITE 249: note = Tnp_P2
  SITE 257: note = Tnp_P3
  SITE 258: note = Tnp_P4
  SITE 270: note = Tnp_P5
MDQVTIIGLDLAKRAFQVHGARGDGGVVYRQKFSRDKILTFLAQQPRCVIAMEACGSAHHWGRAIRDLGHEVRLIPPIYVKPFVKRQKNDAADAEAIAEAAVRPTMRFVAVKSEDQQARAMLFRTRDLLVRQRTQTINALRGHLAEHGIVAPQGPANVKVLGQAIEDGETSLPLLVVELARIYLDQIEGLSKKIAKLQMVTVQEAKREPLTRRLQTMPGVGPITAMAIETFAPPMELFKRGRDFAAWVGLVPRQHSTGGKQFLGRTSKMGQRDIRRLLITGAMAVVRLAGRKGVPEGTWLNRMLVRKPRMLTAIALANKMARTMWAMLTKGEDYRVPAAVTT

SEQ ID NO: 18469 - protein, 403 aa, unidentified
  source 1..403: note = protein_e0d216d
  REGION 4..160: note = RuvC_domain
  SITE 7: note = RuvC_P1
  SITE 57: note = RuvC_P2
  SITE 97: note = RuvC_P3
  SITE 99: note = RuvC_P4
  SITE 102: note = RuvC_P5
  REGION 274..361: note = Tnp_domain
  SITE 282: note = Tnp_P1
  SITE 312: note = Tnp_P2
  SITE 320: note = Tnp_P3
  SITE 321: note = Tnp_P4
  SITE 334: note = Tnp_P5
MNAVGIDVSKRKSTVTIRRPGDQVVLKPCDFRHTQSGINALIQIIRDLDGETKVCMEHTGRYYEPVARWLSDAGIFVSAVNPILVKQFGNDSLHAPKTDKADAKKIARFALDRWPNLKQYGPMDEIRNQLKTMNRQFGFYMDQKTAMKNNLIALLDQTYPGANDFFACPVRSDGSQKWVDFVRTYWHVDCVRGRSLKAFTEHYQNWCRRKSYNFSAAKAEQIYRASADLIAVFPKDVRTKRLIQQAVDMLDSISRTVETLRAEMDKTASTLPEYPVVMAMNGVGPTLGPQLMAEIGDITRFEKRGSLTAFAGVDPGKNESGDYVQKSVHTSKKGSPHLRKTLFQIMESLIQRAPADDPVYAFMDKKRAQGKPYHVYMTAGANKFLRIYYGRVKEYIAGLSESD

SEQ ID NO: 18470 - protein, 404 aa, unidentified
  source 1..404: note = protein_d3ed602
  REGION 4..160: note = RuvC_domain
  SITE 7: note = RuvC_P1
  SITE 59: note = RuvC_P2
  SITE 97: note = RuvC_P3
  SITE 99: note = RuvC_P4
  SITE 102: note = RuvC_P5
  REGION 270..356: note = Tnp_domain
  SITE 278: note = Tnp_P1
  SITE 309: note = Tnp_P2
  SITE 317: note = Tnp_P3
  SITE 318: note = Tnp_P4
MVFLGVDWAEEHHDVCLLDEQGEVLGRAQVANSLEGVGHIHALVAEHSEESGEVVVGIETDRGLLVQALLAAGYQIYAINPLAVDRYRDRHAVSGAKSDAGDAKVLADLVRTDRNNHRPVAGDSEQVEAVKLLARAHQGLVHSRQRQVNQLRSALREFYPAALEAFKDDLGGRDAMAILEYAPTPSRGRSVSQAKLISALRKAGRERNLEARAGELQKILQQPHLELPATLVAAYAVIVKSCVRIIRELNAQTTALEEELTKSFELHPDAELYLSLPGLGFVLGARVIGEFGDDPNRYSDAKGRRAYSGMAPITRASGTRHVVLARYARNRQLADACYLWAFSSLKRSAGAHQYYRALRARGKSHAQALRALGNRWVSILHGCLRRRQLYSEEVAWRAPVTVAA

SEQ ID NO: 18471 - protein, 340 aa, unidentified
  source 1..340: note = protein_28091ab
  REGION 6..147: note = RuvC_domain
  SITE 9: note = RuvC_P1
  SITE 52: note = RuvC_P2
  SITE 87: note = RuvC_P3
  SITE 89: note = RuvC_P4
  SITE 92: note = RuvC_P5
  REGION 211..298: note = Tnp_domain
  SITE 219: note = Tnp_P1
  SITE 249: note = Tnp_P2
  SITE 257: note = Tnp_P3
  SITE 258: note = Tnp_P4
  SITE 270: note = Tnp_P5
MSIVTLGIDLGKTVCSLVGLDAAGTVVIRKRLRRAGLVAFVQDLEQCVVAMEACCGAHHLGRVFDRSGFDVRLMSPEYVKPYVKAQKNDDRDAEAIAEAATRPTMRFVRIKTQEQSDVQSLHRARSRLVSERTALINNLRSLLLERGITVAQGRKKLEAELTVFADEEHPDLSPRIRGLIEDMRAQWRSLDERISAFDKEFMTMAREDMAAQRLMSIPGIGAINATAFVAAVGNAEAFGRGRDLAAWLGLTPRQASTGGRQKLLGISKRGNRYLRSTLIHGARAVLHRLIHEPSQLGAWLRDLSTRAHKNVVVVALAAKLARTIWALLRKEQGYQRVLAA

SEQ ID NO: 18472 - protein, 341 aa, unidentified
  source 1..341: note = protein_15a47dd
  REGION 6..161: note = RuvC_domain
  SITE 9: note = RuvC_P1
  SITE 67: note = RuvC_P2
  SITE 105: note = RuvC_P3
  SITE 107: note = RuvC_P4
  SITE 110: note = RuvC_P5
  REGION 210..296: note = Tnp_domain
  SITE 218: note = Tnp_P1
  SITE 248: note = Tnp_P2
  SITE 256: note = Tnp_P3
  SITE 257: note = Tnp_P4
  SITE 269: note = Tnp_P5
MLMFIVGADISKDKINFALRHSNDFLLEKEIENTTSALTKFIKEVKSLVKSFAKEKKSDYVLEFIMEHTGIYGNLLIECLSGLKITMYVASGLEIKKSGGITRGKNDIIDAQRIADYGVRFSDKLKPYTISIATITQLKGLRTKRSQLVAVRSQLTQANDDNKKFMDKELFKMITKINDPIVKELDEAIEKIETEILNLIKSDYDIYENYKIAQSVPGIGPVTATAFICATDNFTKFDSAKALGSYCGVVPFTNSSGRYKGKNKLSPIANKEIKTLLQMGALSIICGKSFFAAYYHRKVNVDKKNKMLAQNNVRNKILKTLFACIKNKTKYQTDYSFSFAA

SEQ ID NO: 18473 - protein, 398 aa, unidentified
  source 1..398: note = protein_a0e5ffd
  REGION 4..160: note = RuvC_domain
  SITE 7: note = RuvC_P1
  SITE 57: note = RuvC_P2
  SITE 97: note = RuvC_P3
  SITE 99: note = RuvC_P4
  SITE 102: note = RuvC_P5
  REGION 275..362: note = Tnp_domain
  SITE 283: note = Tnp_P1
  SITE 313: note = Tnp_P2
  SITE 321: note = Tnp_P3
  SITE 322: note = Tnp_P4
  SITE 335: note = Tnp_P5
MNAVGIDVSKGKSMVVIVQPFGIVVAEPFEVSHDGQSLSVLVERVKRLPGETKAVMEYTGTYYEPIANALHNASIFVSVVNPLLIDDYGTNRVRKVKADKKDAFKIANYALDKWTQLREYIPDEDTRKTLKVLNRQYTQYNKLLIMQKNSLIALIDSCFPTANTFFLSPRRESDGHEKWIDFVLKFPHIDCVSKLCLSAFKAKYQSWCKAGHYKYSESKAAQIHAYSRTQVSSLPITGTTTKAVELSAAMINSTLETLAAIRAEMDKLASTLPEYETVMSLYGVGCIMCSQLIAEIGDVKRLKHSKSLVAMAGIDPPPDQSGQHDPKSRSISKRGSPLLRKTLFQIMQVIIQKQPVNEPVYQFLDRKRAEGKPYRVYMIAAAHKFLRIYYARVMEAVG

SEQ ID NO: 18474 - protein, 317 aa, unidentified
  source 1..317: note = protein_77e305f
  REGION 6..148: note = RuvC_domain
  SITE 9: note = RuvC_P1
  SITE 52: note = RuvC_P2
  SITE 87: note = RuvC_P3
  SITE 89: note = RuvC_P4
  SITE 92: note = RuvC_P5
  REGION 210..296: note = Tnp_domain
  SITE 218: note = Tnp_P1
  SITE 248: note = Tnp_P2
  SITE 256: note = Tnp_P3
  SITE 257: note = Tnp_P4
  SITE 269: note = Tnp_P5
MQITTVGLDLAKSVFQAHGVDEAGGTVLVKRLHRKQMLPFFSKLPPCLIGMEACGTAHHWARTLAAMGHEVRLIPPSYVKAYVKRGKSDALDAEAICEAVQRPTMRFVPVKTVAQQSILMTHRARSLLVRQRTMVANALRAHLAELGFVANPGIANLAKLAQQALSGESSLPSYARTTLDILIRQILVFADEIAALDQQLLAWHADSEASRRLSAIPGLGIVTATAVAATVTDPEQFRSGRQFAAWLGLTPQQCSTGGKTQLGGISKQGDRYLRRLLVVGATAVIRHTKDKATPMANWIRKLLEKKAVQAGLRCPRQ

SEQ ID NO: 18475 - protein, 396 aa, unidentified
  source 1..396: note = protein_ffb5afd
  REGION 19..166: note = RuvC_domain
  SITE 22: note = RuvC_P1
  SITE 68: note = RuvC_P2
  SITE 106: note = RuvC_P3
  SITE 108: note = RuvC_P4
  SITE 111: note = RuvC_P5
  REGION 233..319: note = Tnp_domain
  SITE 241: note = Tnp_P1
  SITE 271: note = Tnp_P2
  SITE 279: note = Tnp_P3
  SITE 280: note = Tnp_P4
  SITE 292: note = Tnp_P5
MPRTNLQKQNDFSGQNFYVGLDVHKKSWSVTIRSMGIQVGHFTQPPGAEALHDYLQRNFPGGSYLSAYEAGFCGTYAHEDLCKLGIKNILLHAADIPVTDKQKKNKSDMRDSRAIAENLERGNLKGIHVLTRDQQELRGLFRLRESKVADVVRSNNKLKSFLMYHSIVVPETVSKTEFLSGKVLDWLAIELCSTAGTLTLKQYIADLKYQREQLSKITKLLRTEIITIHKQAYENLLSVPGIGSVTAMGLLAELADFSRFDDPDEYASYLGLCPWEDSTGDYIQTKGIQPRCNKHLRPLLVEASWKAISSSRNIFAYYSKHAVGKNGKKAIIKVARKLAMIAKGVVTTGKPYQEDYLKQKQLEYEKMKAERFSSGMSEQHNNKQPGKERFVVSIPG

SEQ ID NO: 18476 - protein, 398 aa, unidentified
  source 1..398: note = protein_1dcc5ad
  REGION 4..160: note = RuvC_domain
  SITE 7: note = RuvC_P1
  SITE 57: note = RuvC_P2
  SITE 97: note = RuvC_P3
  SITE 99: note = RuvC_P4
  SITE 102: note = RuvC_P5
  REGION 275..362: note = Tnp_domain
  SITE 283: note = Tnp_P1
  SITE 313: note = Tnp_P2
  SITE 321: note = Tnp_P3
  SITE 322: note = Tnp_P4
  SITE 335: note = Tnp_P5
MISVGIDVSKEKSTVCILKPYGEIVRSPYEITHTESQMAELASMINSFNDEVRVVMEATGNYHLPVLSFLKEREIFVAVINPLVMKKYASVILRKGKTDKLDAVRIANYGLDNWLHLINYESSEDIYVQLRLLGRQYGHYIKLRIESKLSLTTMLDYTMPGIKAMLKSRSSKPEKDKLNDFVEEYWHYDNITEKSKKQFINSYRNWAKKKGYQQSEAKAIKIYDLAQQGIPTLSSNAPSTKMLVLEAVRVLREIDKTLALILSQMQELAKSLKEYRVVREMGGVGDIIAPRLIAEIGDIRRFHRGKALIAYAGIDAPPYQSGQFTGTRRRISKRGSAILRKTGFEIMKCLKSNKPQNNEVYLFMLKKEDEGKASKVAKIAGLNKFLRIYYARVKEVYK

SEQ ID NO: 18477 - protein, 414 aa, unidentified
  source 1..414: note = protein_67aefd4
  REGION 17..173: note = RuvC_domain
  SITE 20: note = RuvC_P1
  SITE 70: note = RuvC_P2
  SITE 110: note = RuvC_P3
  SITE 112: note = RuvC_P4
  SITE 115: note = RuvC_P5
  REGION 287..374: note = Tnp_domain
  SITE 295: note = Tnp_P1
  SITE 325: note = Tnp_P2
  SITE 333: note = Tnp_P3
  SITE 334: note = Tnp_P4
  SITE 347: note = Tnp_P5
MGPSCEFCIGGMNVNCVGVDVSKGKSMIAVMRPLGELVIPPFEVGHTGIELCELSSRLRELGGETRVVMEATGNYHLPVASFLYDSGFYVSVVNAMLVHSYGNNSLRRAKTDKKDAIKLANYGLDHWLALPRYIPEDEVRLMLKTTYRQYQQCAKVQTMLKNNLISLLDTAFPDANRLFSSPARADGSEKWVDFVAAFWHCECVCGLSEKAFAAKYQKWCKKHGYNFSQDKALDIYASACGHFSVMPKTDTAKLLVEQAVSQLRAASAALATLRNEMQSLAASLPEYPVVMGMFGVGPALGPQLMAEIGDVRRFHSKKALVAFAGIDAPPYQSGQMEVRSRSISKRGSSALRRTLFLVMSAILRCSPADEPVYQFMDKKRAEGKPYRVYMMASANKFLRIYYATVKRHLDSLEA

SEQ ID NO: 18478 - protein, 354 aa, unidentified
  source 1..354: note = protein_fbeb7a5
  REGION 8..168: note = RuvC_domain
  SITE 11: note = RuvC_P1
  SITE 67: note = RuvC_P2
  SITE 107: note = RuvC_P3
  SITE 109: note = RuvC_P4
  SITE 112: note = RuvC_P5
  REGION 208..295: note = Tnp_domain
  SITE 216: note = Tnp_P1
  SITE 246: note = Tnp_P2
  SITE 254: note = Tnp_P3
  SITE 255: note = Tnp_P4
  SITE 268: note = Tnp_P5
MTILKQVAGIDVAQKELVVSLGRMDQELTLEIFDYKVFPNNPKGFKALTQWAEKQVKNDVKIHYVMEATGVYHESLAYFLTDNGSEVSIVLPNKISNFFRTLDVNTVTDKTASQAITRFGLERKLEVWQKPKKIFRDLKQLTRERGQLIADRTVLKNQLHAENAEAFPNQSSINRTNKRIRLIDKQDLEIKAEIGALVKKDTELVKKINMITTIPGVGKLTAVIALAETNGFELIKSKKQLVSYSGLDVKLKDSGTSVKGTPRISKKGNRHLRKAMHMPALSAMRFNDQHKALFVRLVSKHGIKMKAAVAVQRKILELIYVIFKTDKPFDKDYMPSNVPKEVAVIQKLEQPLRK

SEQ ID NO: 18479 - protein, 328 aa, unidentified
  source 1..328: note = protein_a5f31bc
  REGION 5..159: note = RuvC_domain
  SITE 8: note = RuvC_P1
  SITE 62: note = RuvC_P2
  SITE 102: note = RuvC_P3
  SITE 104: note = RuvC_P4
  SITE 107: note = RuvC_P5
  REGION 204..289: note = Tnp_domain
  SITE 212: note = Tnp_P1
  SITE 241: note = Tnp_P2
  SITE 249: note = Tnp_P3
  SITE 250: note = Tnp_P4
  SITE 262: note = Tnp_P5
MKAYAGIDVGKDKLDVSWLRDATTNKKKTKVLKNTPKGHKELVTWLLKNTKYQPHEIVITVEPTGVYSEPLMYYLHEQGFILLQANPSKASQYAKALNLVHKTDKSDATMLARYGHDQQHSLCRWQPEPVESRALKAMLRRLEALEQDLQREENRFEAANFSGASARVIQSLEDMIAVLKDEIDKLTQEIDDHIDGHPSLKKNRKLLQSISGVGVVVSRVMVSLLACKNFKNAKQFSAYLGLIPKLKESGKQAGKTTLSKQGPSYVRVKLYMAAVVAGQHNPDIKAQKTRLLQQGKNKMQALGAAMRKLAQICFGVVKTQTEYQPQVN

SEQ ID NO: 18480 - protein, 349 aa, unidentified
  source 1..349: note = protein_328b73d
  REGION 12..153: note = RuvC_domain
  SITE 15: note = RuvC_P1
  SITE 58: note = RuvC_P2
  SITE 93: note = RuvC_P3
  SITE 95: note = RuvC_P4
  SITE 98: note = RuvC_P5
  REGION 217..302: note = Tnp_domain
  SITE 225: note = Tnp_P1
  SITE 255: note = Tnp_P2
  SITE 263: note = Tnp_P3
  SITE 264: note = Tnp_P4
  SITE 276: note = Tnp_P5
MIRNAPRDAAVYGVDLGKNIFHVVGLDERGAVVQRVKFRRDTLLSFFERAKRSVVGMEACPGAQWLARKLIAMGHQVRIVPVQFVKPYVKSQKNDTIDAEAIAEAVTRPTMRFTHIRTTEQVDLQALHRIRDQLVSSRTRLINQMRGFCLEYGVAIRQGAGVFRLDLPRVLADEGNDLTLSMRRILAELFEDVGRIDQRLAAVTREIEGLAARDDRARRLMTVPGIGPLAATALLAAVGDGRQFHRARDLAAWLGLVPRQYSTGGKTTLLGISKRGNRYVRKLLIHGARSCVVHLDRSRDRLGGWLDALQTRMHVNKVTVALAAKIARMVWAILTKPGASYERRDPAIA

SEQ ID NO: 18481 - protein, 323 aa, unidentified
  source 1..323: note = protein_4a6a60c
  REGION 5..154: note = RuvC_domain
  SITE 8: note = RuvC_P1
  SITE 56: note = RuvC_P2
  SITE 96: note = RuvC_P3
  SITE 98: note = RuvC_P4
  SITE 101: note = RuvC_P5
  REGION 195..282: note = Tnp_domain
  SITE 203: note = Tnp_P1
  SITE 233: note = Tnp_P2
  SITE 241: note = Tnp_P3
  SITE 242: note = Tnp_P4
  SITE 255: note = Tnp_P5
MKKSIGIDVSMNTVDVVRYDGKFTKNTQYKNTVEGFQKLEDEISKGDTSETIITMEATGIYHLQAAYYFSEKGYTVSVVNPLIIKRYSEMKMLRAKTDSVNARTIAEYGFHEKPWYFIQKDDGRDHIVQLLKQIDALHTMRTENKNRLHALQRIPHADTKALEIYQEIDTMLKRKEQEAEQRIDTIANELYADVYKRLLAIPGVGKRLASLILGFFGEFENFSNAKQVSSFIGLNPSANQSGVSVHGRGVISKKGNRYMRKIFYMAALSAKEYNKTCREQYNRLISNGKCKKVALVAVANKLARQIFAIVKNGMIYDPWYQKI

SEQ ID NO: 18482 - protein, 344 aa, unidentified
  source 1..344: note = protein_ef3cadc
  REGION 6..148: note = RuvC_domain
  SITE 9: note = RuvC_P1
  SITE 52: note = RuvC_P2
  SITE 87: note = RuvC_P3
  SITE 89: note = RuvC_P4
  SITE 92: note = RuvC_P5
  REGION 211..298: note = Tnp_domain
  SITE 219: note = Tnp_P1
  SITE 249: note = Tnp_P2
  SITE 257: note = Tnp_P3
  SITE 258: note = Tnp_P4
  SITE 270: note = Tnp_P5
MQITTIGLDLAKSVFQVHGVDATGQVVVRKSLRRSQMLPFFTKLPPCLVGIEACSTSHHWARELIKLGHEVRLMPPAYVKPYVKRGKTDAADAEAVCEAVARPTMRFVPVKSPQQQAALSMHRTRDLLVKQRTQLINMIRGLLAEFGVDIPKGLERALLMARQIVDGKAPDVPIEAAKILGTLSQQVLTTHVRLREIDRDLAVWLRGNEAARRLMTIPGIGPVGATALAASVTDPHQFRSGRQFAAWLGLTPLQKSSGGKERLGRITKMGDKYLRKLLIVGMTSLVRRAKYNPGKIDPRLADLLTRKPTRVATVAMANKTARIIWAIMTRGETYRAGHRPTLAA

SEQ ID NO: 18483 - protein, 345 aa, unidentified
  source 1..345: note = protein_bcce063
  REGION 6..147: note = RuvC_domain
  SITE 9: note = RuvC_P1
  SITE 51: note = RuvC_P2
  SITE 86: note = RuvC_P3
  SITE 88: note = RuvC_P4
  SITE 91: note = RuvC_P5
  REGION 210..301: note = Tnp_domain
  SITE 218: note = Tnp_P1
  SITE 250: note = Tnp_P2
  SITE 258: note = Tnp_P3
  SITE 259: note = Tnp_P4
  SITE 272: note = Tnp_P5
MDSTIVGVDLAKRVIQVCIYTNKKVHSNIEMTSDEFLLWLFQQKPVTIIYEACSGSNYWKQKAIEAGHKALLISAQLVSTIRQNQKTDKNDALAIIQASQLADIGFINGKTHKQQQLQTILKLRELAVKHQTALRNQLVALLAEFNIHCSSRNGGIKSAVANLLEDFDNGFTCEFRAGINVAYGHLITQSEIIEQYNKQLEHSIEQHEDCKRLLRIEGVGPINAINLYVALGCGELGTFKRGKDASACIGLTPKQYSSGGIIKLGAIGSRVKHGRLRSQLIVGAMAVVTHLAKRTPKTKKECWLMGLIERKGKKCAAVALANKTVRTAFAMLSQGTEYKAELLAA

SEQ ID NO: 18484 - protein, 250 aa, unidentified
  source 1..250: note = protein_c819303
  REGION 7..149: note = RuvC_domain
  SITE 10: note = RuvC_P1
  SITE 53: note = RuvC_P2
  SITE 88: note = RuvC_P3
  SITE 90: note = RuvC_P4
  SITE 93: note = RuvC_P5
  REGION 209..250: note = Tnp_domain
  SITE 217: note = Tnp_P1
  SITE 247: note = Tnp_P2
MENIALIGIDLGKNSFHIHCQDHRGKAVYRKKFTRPKLIEFLATCPATTIAMEACGGSHFMARKLEELGHFPKLISPQFVRPFVKSNKNDFVDAEAICEAASRPSMRFVQPRTESQQAMRALHRVRESPVQDKVKTTNQMHAFLLEFGISVPRGAAVISRLSTLLEDSSLPLYLSQLLLKLQQHYHYLVEQIKDLESQLKRKLDEDEVGQRLLSIPCVGTLTASTISTEIGDGKQYASSRDFAAATGLVP

SEQ ID NO: 18485 - protein, 263 aa, unidentified
  source 1..263: note = protein_2d21ebe
  REGION 7..149: note = RuvC_domain
  SITE 10: note = RuvC_P1
  SITE 53: note = RuvC_P2
  SITE 88: note = RuvC_P3
  SITE 90: note = RuvC_P4
  SITE 93: note = RuvC_P5
  REGION 209..255: note = Tnp_domain
  SITE 217: note = Tnp_P1
  SITE 247: note = Tnp_P2
MENIALIGIDLGKNSFHIHCQDHRGKAVYRKKFTRPKLIEFLATCPATTIAMEACGGSHFMARKLEELGHFPKLISPQFVRPFVKSNKNDFVDAEAICEAASRPSMRFVQPRTESQQAMRALHRVRESLVQDKVKTTNQMHAFLLEFGISVPRGAAVISRLSTLLEDSSLPLYLSQLLLKLQQHYHYLVEQIKDLESQLKRKLDEDEVGQRLLSIPCVGTLTASTISTEIGDGKQYASSRDFAAATGLVPRQYSRRSDDIVRD

SEQ ID NO: 18486 - protein, 256 aa, unidentified
  source 1..256: note = protein_d2ca7f7
  REGION 7..148: note = RuvC_domain
  SITE 10: note = RuvC_P1
  SITE 53: note = RuvC_P2
  SITE 88: note = RuvC_P3
  SITE 90: note = RuvC_P4
  SITE 93: note = RuvC_P5
  REGION 208..256: note = Tnp_domain
  SITE 216: note = Tnp_P1
  SITE 246: note = Tnp_P2
MENIALIGIDLGKNSFHIHCQDRRGKAVYRKKFTRPKLIEFLATCPATTIAMEACGGSHFMARKLEELGHSPKLISPQFVRPFVKSNKNDFVDAEAICEAASRPSMRFVQPRTESQQAMRALHRVRESLVQEGKTTNQMHAFLLEFGISVPRGAAVISRLSTILEDNSLPLYLSQLLLKLQQHYHYLVEQIKDLESQLKRKLDEDEVGQRLLSIPCVGTLTASTISTEIGDGKQYASSRDFAAATGACTSAVQHGR

SEQ ID NO: 18487 - protein, 391 aa, unidentified
  source 1..391: note = protein_0ad8151
  REGION 6..163: note = RuvC_domain
  SITE 9: note = RuvC_P1
  SITE 61: note = RuvC_P2
  SITE 102: note = RuvC_P3
  SITE 104: note = RuvC_P4
  SITE 107: note = RuvC_P5
  REGION 265..351: note = Tnp_domain
  SITE 273: note = Tnp_P1
  SITE 303: note = Tnp_P2
  SITE 311: note = Tnp_P3
  SITE 312: note = Tnp_P4
  SITE 324: note = Tnp_P5
MSMYFVGIDISKYKHDCCIISAADQQVVAKFVIQNDKNGFNELLTHLHSLSNTEDIRIGFESTSHYALNLKLCLEKAHHSFMEINPCLISAFNKSTTLRRTKTDKVDCESIARWLMTVEYKPHLIGFYHSYSLKSLTRLRDCLVRQRSLYLVKITNVLDHTFPEFKPFFKERFSKTALYLLNNYGSAEKMSRMNTASYEKLYSLSRGKFSPQQFLELKSLAVNTVGVNNEIFDTELKCLLTLYSTLDEQISVLESKIIELINDVHPYFMSIPGIGPISAAVIYAEYGDISNYSSPAQMLAFAGLEPGINQSGTENHGGRMVKRGSSQLRYVLLNCTLPLIRFDVTFATYYAKKRSEGKPHRVAISHVAKKLVRVIFALERQKTYFNTKALR

SEQ ID NO: 18488 - protein, 391 aa, unidentified
  source 1..391: note = protein_7310e08
  REGION 4..163: note = RuvC_domain
  SITE 7: note = RuvC_P1
  SITE 60: note = RuvC_P2
  SITE 101: note = RuvC_P3
  SITE 103: note = RuvC_P4
  SITE 106: note = RuvC_P5
  REGION 266..353: note = Tnp_domain
  SITE 274: note = Tnp_P1
  SITE 304: note = Tnp_P2
  SITE 312: note = Tnp_P3
  SITE 313: note = Tnp_P4
  SITE 326: note = Tnp_P5
MIYVGIDVAKDKHDCIIKNSVGEVVFRTFTIKNNLDGFNDLYQKIESVMEDVSKVKVGLEATGHYSYNLLGYLVDKGLPTFVINPLHTNLYRKSLSLRQTKTDKVDASTIASMLMSDVNLKSYSDTSYHNEELKSLTRYRFDKVKERAKLKTSISRLICILFPELEKLVPTLHMNSVYSLLYEFPGAKQVANAHLTKLSNLLAEASKGHYDKDAAITFRDAARASIGSNMPAKSLELKHTIKLIRELDSEIDEIEGEIKAIMDTINSPILSIPGISYRMGAMIIAEIGDFDRFDSADKILAYAGLSPSTYQSGQLDNCHPRMEKRGSRYLRYALFNATIYVCHWDSTFNAYLAKKRAEGKHYYVAVSHATKKLVRLIYQLEKSHQSYNKAA

SEQ ID NO: 18489 - protein, 338 aa, unidentified
  source 1..338: note = protein_f841532
  REGION 19..163: note = RuvC_domain
  SITE 22: note = RuvC_P1
  SITE 67: note = RuvC_P2
  SITE 105: note = RuvC_P3
  SITE 107: note = RuvC_P4
  SITE 110: note = RuvC_P5
  REGION 210..297: note = Tnp_domain
  SITE 218: note = Tnp_P1
  SITE 248: note = Tnp_P2
  SITE 256: note = Tnp_P3
  SITE 257: note = Tnp_P4
  SITE 270: note = Tnp_P5
MIPIILNFHYKIMQNQTIAGIDVSNETLDICISSSKGQYSFVIKNEVRSISKFFKAYEHETIFIGMENTGRYNWALYEVLKDLHHRIFVVSPLHLKKSVGLVRGKNDKIDAVRIAAFILKNHSDLPQWKPSTPSVQKLKILLTERNARVKAKSILLKQQKDHARMKLLGLDKYLQGLNKQQLAVLTRQIHQIENDMEALIRADEQMHTQSKLIRSIPGVGKVLCWTMIAKTENFTTITEPRKMACYSGVVPFRNSSGTSLRGKDHVSNYADKAVKTILHMAAMRAVRLTNDLQTFYLRKVSEGKNKMSVLNAIRNKIIHRIFAVIKNQTSYQNNLLMS

SEQ ID NO: 18490 - protein, 388 aa, unidentified
  source 1..388: note = protein_03060bb
  REGION 4..160: note = RuvC_domain
  SITE 7: note = RuvC_P1
  SITE 58: note = RuvC_P2
  SITE 98: note = RuvC_P3
  SITE 100: note = RuvC_P4
  SITE 103: note = RuvC_P5
  REGION 264..351: note = Tnp_domain
  SITE 272: note = Tnp_P1
  SITE 302: note = Tnp_P2
  SITE 310: note = Tnp_P3
  SITE 311: note = Tnp_P4
  SITE 324: note = Tnp_P5
MIYVGVDIAKLNHFVSAISSDGEIIIEPFKFTNDNDGFQLLISKLESFDKNSLIIGLESTAHYGDNLVRYLVAGNYKVCVLNPIKTSTMRKNNVRKTKTDKVDTYIICKTLMMQDSLRFVTYYDLDLMDLKALGRFRQKSIKQRTRLKIQLTSYVDEVFPELQYFFKSGLHQKSVYALLKEAPTPEAIASMHMTHPAHLLKVNSHGHFDKEMAQQLRVLAQKSVGASDSALSIQITHTIAQIELLDSQLERVEAAMTDIMKFNDSVIMTIPGIGYINGGMILGEIGDIHRFSSPNKLLAYAGLDPSVYQSGNFQAKKTRMSKRGSKVLRYALVNAAHNVVKNNATFKAYYDAKMAEGRTHYNALGHCAGKLVRVIWKMLTDEVEFNLE

SEQ ID NO: 18491 - protein, 391 aa, unidentified
  source 1..391: note = protein_763fa64
  REGION 4..163: note = RuvC_domain
  SITE 7: note = RuvC_P1
  SITE 59: note = RuvC_P2
  SITE 100: note = RuvC_P3
  SITE 102: note = RuvC_P4
  SITE 105: note = RuvC_P5
  REGION 264..350: note = Tnp_domain
  SITE 272: note = Tnp_P1
  SITE 302: note = Tnp_P2
  SITE 310: note = Tnp_P3
  SITE 311: note = Tnp_P4
  SITE 323: note = Tnp_P5
MYLVGIDISKFKHDCFIMTETGEVINNSFSFDNNDSGFTLLLNTLKSLDQSQKIKIGLEATGHYGNNLKLFLTENNYSFMELNPYLVKKFSQALTLRRTKTDKLDAMTIASVLGSPNLTYEPYQISSYHISSLKSLTRYREAFIKERSLHLVQLTNIMDQIFPEFKPFFNGKFGTTAIYILKKYKTPERISKLTDEDILKIKNVSRKISAAKLVKLRDLAKNTVGHSSISNQILLKSILNLYTNVDDEVTEIEKQIDSIMSEYKNHIVSIPGISKYSAAQIIGEVGDFKRFSSASKLLAFAGMEPSTIQSGTMDFKGKMVKHGSGHLRYVLMNIAMTIIIHNPTFYSYYSKKHRQEGKNHRVALSHVVRKLVRIIYHLEVTNQDFNSNLLK

SEQ ID NO: 18492 - protein, 315 aa, unidentified
  source 1..315: note = protein_7103cb0
  REGION 3..145: note = RuvC_domain
  SITE 6: note = RuvC_P1
  SITE 50: note = RuvC_P2
  SITE 90: note = RuvC_P3
  SITE 92: note = RuvC_P4
  SITE 95: note = RuvC_P5
  REGION 189..276: note = Tnp_domain
  SITE 197: note = Tnp_P1
  SITE 227: note = Tnp_P2
  SITE 235: note = Tnp_P3
  SITE 236: note = Tnp_P4
  SITE 249: note = Tnp_P5
MVTGIDCSKDYFDISVQSGQKEVFKGRFSNDEAGFVEALGHMHGSHIAMEATGPYYFRLAKFLWERDERVSVINPLVIRRFSQMTLARTKTDRKDAQLIAKFTSMTEPAQWRLPEEHVLRIRNLEGYIKGQKECRTMLTNRLHAYEHAGTLEPTLRKTIEEGIKRYDQDINEHERQVQQIIMENYGELNENLRSIPGIGPRSAALLIILTDGFSRFEGYRQLISYFGLAPRIFESGSSVRGKGHICKMGMGQVRKVLYMAAISAIRSNTACSGLYGRLMEKGKPYKVAIIAVVNKLIKQAFAIAKSGKGYIAKAA

SEQ ID NO: 18493 - protein, 340 aa, unidentified
  source 1..340: note = protein_2047757
  REGION 7..149: note = RuvC_domain
  SITE 10: note = RuvC_P1
  SITE 53: note = RuvC_P2
  SITE 88: note = RuvC_P3
  SITE 90: note = RuvC_P4
  SITE 93: note = RuvC_P5
  REGION 212..299: note = Tnp_domain
  SITE 220: note = Tnp_P1
  SITE 250: note = Tnp_P2
  SITE 258: note = Tnp_P3
  SITE 259: note = Tnp_P4
  SITE 271: note = Tnp_P5
MGNVTTIGLDLAKSVFQVHGVDADGAAVLRQRLTRGRMLKFFAKLPRCLVGIEACASSHYWARELIALGHDVKLMPAQYVKPYVKRGKNDAADAEAICEAVTRPTMRFVGIKSPEQQSAMMLHRVRLILSRQRTQLSNALRAHLAEFGVVAPIGRNGMDQLVSIIADTADDRVPTDARICLTMLVAQLHIVKQQILENDRRIMASARETELGRRLMEIPGVGPLLASAIVATVPDPAIFRSGRNLAAWIGLVPRQNSSGGKELLGSITKAGHRYLRQMLIVGAMAVVRYAERNGTKRPWLVQLLARRKAKVAAVALANRNARMIWAMMASGERYREPQVA

SEQ ID NO: 18494 - protein, 345 aa, unidentified
  source 1..345: note = protein_a3cf414
  REGION 6..147: note = RuvC_domain
  SITE 9: note = RuvC_P1
  SITE 51: note = RuvC_P2
  SITE 86: note = RuvC_P3
  SITE 88: note = RuvC_P4
  SITE 91: note = RuvC_P5
  REGION 210..299: note = Tnp_domain
  SITE 218: note = Tnp_P1
  SITE 250: note = Tnp_P2
  SITE 258: note = Tnp_P3
  SITE 259: note = Tnp_P4
  SITE 272: note = Tnp_P5
MYPTRVGVDLAKKVIQVCIYKNKKVQSNIEMTPEAFLSWLINNKPVTIIFEACSSSNYWKQKATEAGHDARLISAKLVSVVRQNQKTDKNDALAIVQTTFMPDVTFIGGKTVEQQQLQSIKRLRELAVKQQDASQKQLIALLFELNIKISSRKGGIISAIEGVLEDATNGLSAECRRAIFLAKEHLRGLFESARHYDDCINKSVAAHPECKKLMKLEGVGPMNAINLYIALGCAEIGTFNKGKDASACIGLTPIQHSSGGVVKLGSIGKLCKNSRLRSQLVCGATAAVQHAVKRKAITKKDVWIQGLVERRGKKCAAVALANKTVRTAFAMLTQGTEYKAELLAA

SEQ ID NO: 18495 - protein, 337 aa, unidentified
  source 1..337: note = protein_6978629
  REGION 6..147: note = RuvC_domain
  SITE 9: note = RuvC_P1
  SITE 52: note = RuvC_P2
  SITE 87: note = RuvC_P3
  SITE 89: note = RuvC_P4
  SITE 92: note = RuvC_P5
  REGION 211..300: note = Tnp_domain
  SITE 219: note = Tnp_P1
  SITE 249: note = Tnp_P2
  SITE 257: note = Tnp_P3
  SITE 258: note = Tnp_P4
  SITE 270: note = Tnp_P5
MKHTVMGMDIAKRVFQLHAVDPETGEIERIKLARNEVLAFFAQRCPALVAIEACGSAHWWGRQLMALGHDVRLIAPKSVRPFVVGNKTDAADARAIWTAVQQPGAHFVAIKTEQQQAILSLHRMRAQLMKFRIMQTNALRGLLYEFGVVLPEGVRALTKAWPAAMATVADQLPGMLIDSLREQWARVQTTEAEIAAIERRLASALRENPSCQQIAAIPGVGLLTATAAVAVMGNANTFKSGREFAAWLGLVPRQTGTGGRIRQLGLSKRGDTYLRTLLIHGARAVIAKAHHSPWIEALLKRRPYSVVIAALANKLARTIWAVLAKNRPYDPAALSAV

SEQ ID NO: 18496 - protein, 401 aa, unidentified
  source 1..401: note = protein_3871135
  REGION 4..160: note = RuvC_domain
  SITE 7: note = RuvC_P1
  SITE 57: note = RuvC_P2
  SITE 97: note = RuvC_P3
  SITE 99: note = RuvC_P4
  SITE 102: note = RuvC_P5
  REGION 274..361: note = Tnp_domain
  SITE 282: note = Tnp_P1
  SITE 312: note = Tnp_P2
  SITE 320: note = Tnp_P3
  SITE 321: note = Tnp_P4
  SITE 334: note = Tnp_P5
MNAVGIDVSKGKSMVAILRPLGEVVSKPFEVVHSASGISSLIDRIKSIVGETRIVMEHTGRYYEALANELSRANLFVSAVNPKLIRDFGSKSLRKVKSDKADALKIARYALDSWNDLKQYCLMDELRSQLKTMNRQFSFYMKHKTAMKNNLVGILDQTYPGANAYFSSPTRTDGSQKWIDFAATYWHVDCVRKMSPGAFTNHYQKWCRRKKYNFSSSRAEEIYREAQEIVPVLPKNDLTKLIVKQAIEQLDIASKALEELRALMNETASKLPEYPVVMEMNGVGPSLGPQLMAEIGDVMRFNHKGALAAFAGVDPGVNQSGTHEQKSVHTTKRGSATLRKTLFQVMDVLIQTKPQDDDVYMFMDKKRSEGKPYFVYMTAGANKFLRVYYGRVKRYLNSETQ

SEQ ID NO: 18497 - protein, 398 aa, unidentified
  source 1..398: note = protein_cb8ef92
  REGION 4..160: note = RuvC_domain
  SITE 7: note = RuvC_P1
  SITE 57: note = RuvC_P2
  SITE 97: note = RuvC_P3
  SITE 99: note = RuvC_P4
  SITE 102: note = RuvC_P5
  REGION 276..362: note = Tnp_domain
  SITE 283: note = Tnp_P1
  SITE 313: note = Tnp_P2
  SITE 321: note = Tnp_P3
  SITE 322: note = Tnp_P4
  SITE 335: note = Tnp_P5
MISVGIDVSKEKSTVCILKPYGEIVRSPYEITHTESQMSELVSMIKCLDDEVRVVMEATGSYHLPVLSFLEEHGIFVAVINPLVMKKYASIILRKGKTDKLDSIKIANYGLDNWFHLINYKSSDEVYVQLRLLGRQYAHYIKLRIESKLSLTTMLDYTMPGIKTMLKNRSDKPEKDKLNDFVEEYWHYDNITKKTEKQFINCYKNWAKKKGYQQSEAKAIKIYDLAQQGIPTLSSDTPSTKMLVLEAVRVLREIDKTLALILSQMQELAKSLKEYIVVREMGGVGDIIAPRLIAEIGDIRRFHSGKALIAYAGIDAPPYQSGQFTGTRRRISKRGSSTLRKTGFEIMKCLKSIKPENNAVYLFMLKKEAEGKASKVAKIAGLNKFLRIYYARVSEVYK

SEQ ID NO: 18498 - protein, 318 aa, unidentified
  source 1..318: note = protein_878d369
  REGION 9..156: note = RuvC_domain
  SITE 12: note = RuvC_P1
  SITE 61: note = RuvC_P2
  SITE 97: note = RuvC_P3
  SITE 99: note = RuvC_P4
  SITE 102: note = RuvC_P5
  REGION 222..308: note = Tnp_domain
  SITE 230: note = Tnp_P1
  SITE 260: note = Tnp_P2
  SITE 268: note = Tnp_P3
  SITE 269: note = Tnp_P4
  SITE 281: note = Tnp_P5
MNNNNTLYVGLDVHKESITVAYAINSEPVELMGKIGTSPTDIQNLCKRLRSKSSQVSIVYEAGPCGYGLYRRLVKSGFDCMVCAPSLIPKKPGERVKTDRRDAIRLVRSLRAGDLSAVYVPGIEDEAFRDLARAWASARDDLRHARQRLKSFLLVHGVHYVGRADWGPAHRRWLSKYSFESPWRQLAFDEHRRTIEDRQAQCERLESALKEAVTEWRLYPVVEALQAMRGIQFITAVGLISELGDLTRFEHPRQLMSWFGITPSEYSSGGSRHQGSITKAGNSYARKLLVEAAWSYRHPARISPAIQKKAGKFTPPRH

SEQ ID NO: 18499 - protein, 344 aa, unidentified
  source 1..344: note = protein_b8bb67f
  REGION 6..147: note = RuvC_domain
  SITE 9: note = RuvC_P1
  SITE 52: note = RuvC_P2
  SITE 87: note = RuvC_P3
  SITE 89: note = RuvC_P4
  SITE 92: note = RuvC_P5
  REGION 213..297: note = Tnp_domain
  SITE 221: note = Tnp_P1
  SITE 251: note = Tnp_P2
  SITE 259: note = Tnp_P3
  SITE 260: note = Tnp_P4
  SITE 272: note = Tnp_P5
MKVTTIGLDLAKSVFQVHGIADDGTVVVVKRLLRKQMINFFSKLPNCLIGMEACATAHHWARALAVLGHEVKLMPPAYVKAYVKRGKNDAADAEAICEAVRRPTMRFVPVKTPEQQSILMVHRTRALVVRQRTMAANALRAHLAEFGLVCNPGVVNLIKLMRAVFDEHDPQTMLPEMAQVAMTTLVRRLLELEDELRKLDKVLHEWHRQNEASRRLAAVPGIGVITATAIVATVSEPGQFRSGRQFAAWLGLVPKQNSSGDRQRLGGISKQGDRYLRRLLVVGATAVIRHNRGKQTPGAQWLQSLLAKKPVRLVSVALANKTARIAWALLARGQQFSPYRISAC

SEQ ID NO: 18500 - protein, 345 aa, unidentified
  source 1..345: note = protein_f71ae32
  REGION 6..147: note = RuvC_domain
  SITE 9: note = RuvC_P1
  SITE 51: note = RuvC_P2
  SITE 86: note = RuvC_P3
  SITE 88: note = RuvC_P4
  SITE 91: note = RuvC_P5
  REGION 210..300: note = Tnp_domain
  SITE 218: note = Tnp_P1
  SITE 250: note = Tnp_P2
  SITE 258: note = Tnp_P3
  SITE 259: note = Tnp_P4
  SITE 272: note = Tnp_P5
MYRTRVGVDLAKEVIQVCIYRNKKVQSNSEMTPTEFLSWLVNAKPVTIIFEACGTSNYWRQKAIEAGHDARLISAKLVSVVRQNQKTDKNDALAIVQTSLLPDVTFIGGKTVEQQQLQSIKRLRELAVKHQGASQKQLVSLLLEMNIRISNRKGGIISAIEGVLEDATNGLSVECRAAIFTSKEHLQSLIKAVHRYDECLEKSVIAHADCKKLLKLEGVGTMNAINLYIALGCWDIGVFTKGKDASACIGLTPIQHSSGGLVKLGSIGKHCKNSILRSQLVCGAMAAVTQAVNREAKTKKDVWIKGLVERRGKKCAAVALANKTVRTAYAMLTKGSEYKAELLTA

SEQ ID NO: 18501 - protein, 392 aa, unidentified
  source 1..392: note = protein_29f5aae
  REGION 5..164: note = RuvC_domain
  SITE 8: note = RuvC_P1
  SITE 61: note = RuvC_P2
  SITE 102: note = RuvC_P3
  SITE 104: note = RuvC_P4
  SITE 107: note = RuvC_P5
  REGION 267..354: note = Tnp_domain
  SITE 275: note = Tnp_P1
  SITE 305: note = Tnp_P2
  SITE 313: note = Tnp_P3
  SITE 314: note = Tnp_P4
  SITE 327: note = Tnp_P5
MVISVGIDVSKDKHDCFIVSSEGEVLADVFTIPNTMDGFHCLLQRVRDCITPQDKIKVGLEATGHYSYNLLGFLLDNGLATYVLNPLRTNLYRKSLSLRKTKTDRVDARTIAAMLLSDAGLKPYTDTAYHNEELKSLTRYRFDKVKERAKLKSSVSRLVCILFPELEKLVPTLHMASVYALLEVFPGAKQIAAAHLTRLKALLESSSKGRYKRDMALEIRDAARNSIGSRMPAKSLELQHTIRLIRELNAEITEIEEQIQSIMDELHSPITTIPGLGFRMAAMILAEVGDFTRFDSPDKLLAYAGMSPSTYQSGQLKNCYPHMEKRGSRYLRYALYNATKYVCHWNPTFADYLAKKRAEGKHYNVALSHAAKKLVRLIFAMEKSRATYRLAA

SEQ ID NO: 18502 - protein, 322 aa, unidentified
  source 1..322: note = protein_2780260
  REGION 8..150: note = RuvC_domain
  SITE 11: note = RuvC_P1
  SITE 52: note = RuvC_P2
  SITE 92: note = RuvC_P3
  SITE 94: note = RuvC_P4
  SITE 97: note = RuvC_P5
  REGION 191..278: note = Tnp_domain
  SITE 199: note = Tnp_P1
  SITE 229: note = Tnp_P2
  SITE 237: note = Tnp_P3
  SITE 238: note = Tnp_P4
  SITE 251: note = Tnp_P5
MNKYKETFGVDISKDVFDVHGSTSGHNQYKNDATGFTKFLKDLPKASLVVMEVTGYYHYRLAQFLYKNGTVVSVVNPLSVKRFIQMKLAKVKTDKSDAKMICEYGVLNEVPLYTALTDMQSECLQLFRVLDNFIKHRTATKNKMHGEEVLGIPSKFTYRALRRNKKHYDIEIKAIEAKILSLVKEDQQQQLTLLTSVPGIGQKTALFLIIVTDGFSKFETASQLCSYVGITPTIRESGSSVRGKARISKVGNRKLRNLLFLCSFNASKHNKACRELYERIVSKGKSKKLALIAVVNKLIKQCFAIAKSGRPYDETYVSILPR

SEQ ID NO: 18503 - protein, 343 aa, unidentified
  source 1..343: note = protein_4b2fe12
  REGION 5..152: note = RuvC_domain
  SITE 8: note = RuvC_P1
  SITE 55: note = RuvC_P2
  SITE 92: note = RuvC_P3
  SITE 94: note = RuvC_P4
  SITE 97: note = RuvC_P5
  REGION 212..300: note = Tnp_domain
  SITE 220: note = Tnp_P1
  SITE 250: note = Tnp_P2
  SITE 258: note = Tnp_P3
  SITE 259: note = Tnp_P4
  SITE 271: note = Tnp_P5
MDHFAGLDVSVKETSVCIVDNTGRIVREVKVPSEPEALLAVLKNPAYHFKRIGLEAGPLSQWLYSALAEAGLPVICVETRHMRAVLKAQINKTDRNDARGMAQMMRVGLYRRVHVKTLRSQKLRMLLTHRKLLQSKAIAIDNDLRATLRNFGLKVGMVGTVKFEARIKELVENLPDLAVLVEPLLIVRRVLREQTGVLHCRLLAIVRDDDVCRRLMTVPGVGPVVALTYRATVDVPARFRNSKAVGAVFGLTPAKYQSGESDRTGRISRCGDEMMRMMLYEAAHTMLVCSAKWSWLKAWAMKIARHRGMKKAIVALARRLAVIMHRIWVDGTEFRWTREVVAA

SEQ ID NO: 18504 - protein, 273 aa, unidentified
  source 1..273: note = protein_d7dc669
  REGION 10..160: note = RuvC_domain
  SITE 13: note = RuvC_P1
  SITE 55: note = RuvC_P2
  SITE 95: note = RuvC_P3
  SITE 97: note = RuvC_P4
  SITE 100: note = RuvC_P5
  REGION 191..253: note = Tnp_domain
  SITE 198: note = Tnp_P1
  SITE 227: note = Tnp_P2
  SITE 235: note = Tnp_P3
  SITE 236: note = Tnp_P4
  SITE 249: note = Tnp_P5
MTILNSPTVIGIDVAKAEIVVYREDLKITQAIANHREALGRWLKTLPAQSSIALEATSFYHLDTAELAHGMGFHVYVVDPYRVAHYRESIGLRAKTDPCDARLLARYLTNEQARLRIWSPPPEAYKVLKNLLRKRAALIKARVSIVLSFSNEPCLKDILARQLEVFKESDQAIQKLMREASQAAGITENINRCKAIEGIGELTAIGLATAFMRGHFVSGDAFIAFLGMDLRPKDSGEEAQSSSLEQKRGRGATTPGAQRRDGGLSVSCLETLL

SEQ ID NO: 18505 - protein, 343 aa, unidentified
  source 1..343: note = protein_82d3f0f
  REGION 6..150: note = RuvC_domain
  SITE 9: note = RuvC_P1
  SITE 54: note = RuvC_P2
  SITE 89: note = RuvC_P3
  SITE 91: note = RuvC_P4
  SITE 94: note = RuvC_P5
  REGION 213..299: note = Tnp_domain
  SITE 221: note = Tnp_P1
  SITE 251: note = Tnp_P2
  SITE 259: note = Tnp_P3
  SITE 260: note = Tnp_P4
  SITE 272: note = Tnp_P5
MNIIRVGVDLAKNVFQVHGVDRNEKPVWRRKLNREEWLKVLLEKITPGCEVGMEACGGAHHWARQLEAKGYVVKLIAPQFVKPYVKSNKNDANDAEAICEAMSRPGMRFVAVKTIEQQDTQAVHRIRTGLLEQRTAKVNQIRGLVSEYGLVAPKQISHLRAVIPLWLEDAENGLTSQFRKLLNGVWADLLLLDQRLKELDQEIEFIAAADPVARRLQQLRGVGPMIATALLATVGDASQFKNGRQMAASLGLTPRQNSSGGKEKLLGITKRGDSHVRCLLIHGARSMINASKGKEDRLSQWVMRIATTRHPNIAAVAMANKTVRIAWAMIRSGADYQPQLAAG

SEQ ID NO: 18506 - protein, 390 aa, unidentified
  source 1..390: note = protein_9c1bae7
  REGION 7..163: note = RuvC_domain
  SITE 10: note = RuvC_P1
  SITE 66: note = RuvC_P2
  SITE 106: note = RuvC_P3
  SITE 108: note = RuvC_P4
  SITE 111: note = RuvC_P5
  REGION 207..294: note = Tnp_domain
  SITE 215: note = Tnp_P1
  SITE 245: note = Tnp_P2
  SITE 253: note = Tnp_P3
  SITE 254: note = Tnp_P4
  SITE 266: note = Tnp_P5
MNLKYSVGLDVSSKKIDACMSIIDEKQRVVVKSSTQITNTRKGFENLAQWIIKHKKEDIPVVICMEATGIYYENCAYYLFEKGFDTSIILPNKAKKYLEAIGLKSKNDSIDAKGLSRMGAEQFLERWQPMGTFFYELRLLTRQYQNITELKTVIKNQLDALSFAMHKLDSVTDQLKQTIQLFESQLKELDKAILQHIKSNQEVAERVKNICTMKGLGVLSVATVLAETNGFNLFKNYKQVVSYAGYDVVEAQSGTRVGKTKISKKGNSRIRRMLHMPSLVVIQCEVKQFKDLFDRTYKKHGIKMKSYVAVQKKILTMIYYLWNKNEPYDDNYKINIQEEEQKLSSRACGFVEDKIEKNSPKQVEATQGKHPVNNRKKLPLGVTKLKKITT

SEQ ID NO: 18507 - protein, 412 aa, unidentified
  source 1..412: note = protein_9b5cf91
  REGION 4..160: note = RuvC_domain
  SITE 7: note = RuvC_P1
  SITE 57: note = RuvC_P2
  SITE 97: note = RuvC_P3
  SITE 99: note = RuvC_P4
  SITE 102: note = RuvC_P5
  REGION 274..361: note = Tnp_domain
  SITE 282: note = Tnp_P1
  SITE 312: note = Tnp_P2
  SITE 320: note = Tnp_P3
  SITE 321: note = Tnp_P4
  SITE 334: note = Tnp_P5
MNAVGIDVSKGKSMVSVIRPFGELVAKPFEVRHTSSELSELAKHLKSLEGETRVVLEHTGRYYEPIAQMLHDFGIFVSAVNPLLIKEYGNNSLRKVKTDKADALKIARYGLDNWTELRQHTPMDTIRYQLKSMNRQYGLYTKNKTAMKNNLIALLDQTYPGVNALFDSPVRADGSQKWVDFAASFWHVDCVRGIEQTAFVELYHKWCRRHGYNFNVGKAAQIHAESKELIAMLPKNSLSKVMVQEAITQLNAVSKTVEVFRKEMNRLARQLPEYDVVMSLYGTGPSLGPQLMAEIGDVRRFAHKGSLTAFAGVDPGANQSGTYEAKSTRSSKRGSPELRKTLFVLMTILLQKAPSDDPVFQFLDKKRAEGKPYHVYMTAACNKFLRVYYGRVKEFMNMVDTPVDMDPTGLSR

SEQ ID NO: 18508 - protein, 342 aa, unidentified
  source 1..342: note = protein_f221eaa
  REGION 7..149: note = RuvC_domain
  SITE 10: note = RuvC_P1
  SITE 53: note = RuvC_P2
  SITE 88: note = RuvC_P3
  SITE 90: note = RuvC_P4
  SITE 93: note = RuvC_P5
  REGION 209..296: note = Tnp_domain
  SITE 217: note = Tnp_P1
  SITE 247: note = Tnp_P2
  SITE 255: note = Tnp_P3
  SITE 256: note = Tnp_P4
  SITE 268: note = Tnp_P5
MEDAALVGIDLGKHSFHLHGQDKNGKEVFHRKVTRKQLVQLLANFPTCTIAMEACSGAHFMARTLSSFGHKVRLIAPHFVRPFVKSNKNDFADAEAICEAASRPSMRFVTPRTESQQVLLALHRVRDSFVRDRVGTGNQVHAFLLEFGISLPVGSTVMKRLPAVIAEHPLPPQLIAILERLHTHYKYLDAQIAEIDKEQARQLSTDDIGQRLMTIPGVGPITASVLSAEVGDGKQYRNSRDFAASIGLVPRQYSTGGRANLLGISKRGDKNIRRLLVQCARSYMRDVDKRAGALAEWVRSLLARRHSSVVACALANKLARVAWAIAAKHTTFVASNRQPLPV

SEQ ID NO: 18509 - protein, 343 aa, unidentified
  source 1..343: note = protein_5d7882c
  REGION 6..150: note = RuvC_domain
  SITE 9: note = RuvC_P1
  SITE 54: note = RuvC_P2
  SITE 89: note = RuvC_P3
  SITE 91: note = RuvC_P4
  SITE 94: note = RuvC_P5
  REGION 213..298: note = Tnp_domain
  SITE 221: note = Tnp_P1
  SITE 251: note = Tnp_P2
  SITE 259: note = Tnp_P3
  SITE 260: note = Tnp_P4
  SITE 272: note = Tnp_P5
MKLSYVGVDLAKNVFQLHGIDRHGQAVWRRRLRRKQWLKVLLETVEPGCIIGMEACSSAHHWARQLQANGYDVRLVAPQFVKPFVKSNKNDRNDAEAICEAITRPHMRFVPVKTVEQQDIQAIHRVRCTLMSQRNAKANQIRGLVAEYGIVAPPQVLSLRRAIPDWLEDAENGLSTCFRALLHDLWMDLQQLQERLAELDRQIEQIAKDNPVTRRLQQLRGVGPMVATALVATVGDGSHFRKGRQMAAAIGLTPRQHSSGDKRRLLGISKRGDAYLRTLLIHGARAVVSQAKRRDDPLSLWVTSIAERSHTNVAAVALANKTVRIAWSMLRNESDYNPAVAVA

SEQ ID NO: 18510 - protein, 396 aa, unidentified
  source 1..396: note = protein_f601f29
  REGION 6..160: note = RuvC_domain
  SITE 9: note = RuvC_P1
  SITE 58: note = RuvC_P2
  SITE 98: note = RuvC_P3
  SITE 100: note = RuvC_P4
  SITE 103: note = RuvC_P5
  REGION 265..352: note = Tnp_domain
  SITE 273: note = Tnp_P1
  SITE 304: note = Tnp_P2
  SITE 312: note = Tnp_P3
  SITE 313: note = Tnp_P4
  SITE 325: note = Tnp_P5
MPQIWAGVDIGKEHHHCVVVDERGERLLSRRVFNDESVLLELIADVLALSEDTLWAVDINHGGAALLISLLLSHEQPMVYINGLAVHQASAAYRGQGKTDEKDAFVIADQARMRKDLGLLRPGDEIAVDLRTLTARRLDLVNDRTRQTNRLRAQLPAFLPALERALNLSKKGPVVLLTSYQVPAAIHRSGATRIGTWLRNRKVKNAAALAETAVEAARAQHTALPGETLAAAIVARIAKGVLALDEEIAELDALIQARFNEHRHATVIRSLPGMGTLLSAEFIAATGGDLDAFGTADRLASFAGLSPVPRDSGRVSGNMRRPRRYHRGLLRAFYLSAMASLRTCSASQAYYGRKRNERKGHKQALLALARRRANVLWAMLRDGECYEALPTVTAPA

SEQ ID NO: 18511 - protein, 391 aa, unidentified
  source 1..391: note = protein_ff2f3e1
  REGION 4..161: note = RuvC_domain
  SITE 7: note = RuvC_P1
  SITE 60: note = RuvC_P2
  SITE 100: note = RuvC_P3
  SITE 102: note = RuvC_P4
  SITE 105: note = RuvC_P5
  REGION 266..353: note = Tnp_domain
  SITE 274: note = Tnp_P1
  SITE 304: note = Tnp_P2
  SITE 312: note = Tnp_P3
  SITE 313: note = Tnp_P4
  SITE 326: note = Tnp_P5
MYIVGIDIGKRHHEASIIDGQGNLQGKSLRFTNTHTGFNKLLEAARKAADRDHQIVFGMEATGHYWLALYTHLRREGYPVHVINAVQSDALRGMYIRQAKNDSRDSFIIAEVIRFGRFCETAISAPDLHVLRELCRHRFWIVDSISDLKRKVIALLDQVFPEYEKLFTNTFGKTSLQLLSEYTTPEELLAVDTDKLAETIYAASHGHHGLEKALEIKDAARNSFGILLTCDSIALLIRQYIEQIRFVEKQVDSIDIEIARLFSAFDNQLTTITGIGPTLAATILSEIGDIRRFDAPPKLAAFAGIDPSVKQSGNFTGTRVHMSKRGSPYLRRAIWLVATVAAFKDSAISIYYQRKRAEGKSHLTALGHVSRKMVNIIFAVLRDNSPYSPAV

SEQ ID NO: 18512 - protein, 306 aa, unidentified
  source 1..306: note = protein_32a7a43
  REGION 2..135: note = RuvC_domain
  SITE 40: note = RuvC_P2
  SITE 80: note = RuvC_P3
  SITE 82: note = RuvC_P4
  SITE 85: note = RuvC_P5
  REGION 175..262: note = Tnp_domain
  SITE 183: note = Tnp_P1
  SITE 213: note = Tnp_P2
  SITE 221: note = Tnp_P3
  SITE 222: note = Tnp_P4
  SITE 235: note = Tnp_P5
MCCVLMRHRTKKFANTTKGHDELVSWLKGHKIDHAHICIEATGTYMEPVAECLYDAGYIVSVINPALGKAFAQSEGLRNKTDTVDARMLAEFCRQKRPAAWEAPHPLERALRALVVRHQALTDMHTQELNRTETAREVQRPSIDAHLLWLEAELKRLEKQIKDLTDDDPDMKHRRKLLESIPGIGEKTSAVLLAYIGLKDRFAHARQFAAFAGLTPRRYESGSSVRGASRMSKAGHVSLRRALYMPAIVATSKTEWGRAFRDRLAANGKKGKVILGAMMRKLAQVAYGVLKSGVPFDASRHNPVAA

SEQ ID NO: 18513 - protein, 402 aa, unidentified
  source 1..402: note = protein_fa1fbb9
  REGION 4..161: note = RuvC_domain
  SITE 7: note = RuvC_P1
  SITE 60: note = RuvC_P2
  SITE 100: note = RuvC_P3
  SITE 102: note = RuvC_P4
  SITE 105: note = RuvC_P5
  REGION 270..357: note = Tnp_domain
  SITE 278: note = Tnp_P1
  SITE 308: note = Tnp_P2
  SITE 316: note = Tnp_P3
  SITE 317: note = Tnp_P4
  SITE 330: note = Tnp_P5
MFFLGIDIGKQHHEVGVIDQHGKSIGKTIRISNTKFGSEQLLAFFNKHALLPENTMVGMEATGHYWLSIYTFVHKLGFHTTVFNPIQSDVLRDFYIRKTKTDTIDALLIAQVIRLDLPDKTELPAEDIFRLKQLERFRYGLVDRCSDLKRKILACLDQVFPEYDQIFSDVFGCSSTQVLLNSPIPEDLLEIDAERLIETINTASEKRLGIARSEEKVLKLKEAAAHSFGISIASDVFKLEIQIMLEQIQLLDSQIKIIEAEIQEIVSKQENYLTTITGIGDITAAVLMAEVGDIKRFERPNQLLAFAGLDASVHQSGDFTGTKNRLSKRGSPYLRRAIWQAAFVAAFKDPALSLYYQKLRKRGKSHGTAIGAVARKLVNIIFAVWTQNKPYEVHFPEDISEK

SEQ ID NO: 18514 - protein, 330 aa, unidentified
  source 1..330: note = protein_134fd5f
  REGION 8..157: note = RuvC_domain
  SITE 11: note = RuvC_P1
  SITE 59: note = RuvC_P2
  SITE 97: note = RuvC_P3
  SITE 99: note = RuvC_P4
  SITE 102: note = RuvC_P5
  REGION 202..289: note = Tnp_domain
  SITE 210: note = Tnp_P1
  SITE 240: note = Tnp_P2
  SITE 248: note = Tnp_P3
  SITE 249: note = Tnp_P4
  SITE 262: note = Tnp_P5
MKNWNVILGVDVSKLSLDICCAERRLHIKIENCSKGFKQFIQWCRLNGITLNEVLVLLEYTGGYEYRFLQFCESINIAYCRIPGLEIKKSMGMVRGKNDKVDAYRIGQYGEEKSKRLVPSRPMNNSILDLRQLMSYRKRVVREKAGQLSTLKERIHMYGQRKADPIIKLLEMQIKNNSLVLAMVEGQIKELIGADDAMSKNYRILKSIKGIGPINAQMSIAYTENFCSFTDGRKYAVYVGVIPFEHSSGTSIRGRRRVSHMANKELKQELNQAAKSAMQHDPEIKSYAERKLKTKPYNLVLNNIKFKLIMRMFSLVRREEMYVENYKISA

SEQ ID NO: 18515 - protein, 310 aa, unidentified
  source 1..310: note = protein_e00c656
  REGION 1..105: note = RuvC_domain
  SITE 2: note = RuvC_P2
  SITE 42: note = RuvC_P3
  SITE 44: note = RuvC_P4
  SITE 47: note = RuvC_P5
  REGION 219..306: note = Tnp_domain
  SITE 227: note = Tnp_P1
  SITE 257: note = Tnp_P2
  SITE 265: note = Tnp_P3
  SITE 266: note = Tnp_P4
  SITE 279: note = Tnp_P5
MESTGYHHTPVAWLLHDAGLYVSVVNAMLVHDYGNNSLRRAKTDKKDAVKLANYGLDHWLTLPRYIPEEDTRLMLKICYRQYQQYSKVQTMLKNNLISLLDTTFPDANRLFTSPPRADGSEKWVDFVATFWHCECVCGRSEKAFTTQYQKWCRKHGYNFSEDKALDIYASACRHFGVIPKTDTAKLLVEQAISQLRATSAALAALKQEMQSLAASLPEYPVVMGMFGIGPALGPPLMAEIGDVRRFHSKKALVAVAGIDAPPYQFGQMDVRSHSISKRGSASLRRTLFLVMSVILQHAPMNEPVYQFMNK

SEQ ID NO: 18516 - protein, 344 aa, unidentified
  source 1..344: note = protein_6703f26
  REGION 7..147: note = RuvC_domain
  SITE 10: note = RuvC_P1
  SITE 53: note = RuvC_P2
  SITE 88: note = RuvC_P3
  SITE 90: note = RuvC_P4
  SITE 93: note = RuvC_P5
  REGION 210..297: note = Tnp_domain
  SITE 218: note = Tnp_P1
  SITE 248: note = Tnp_P2
  SITE 256: note = Tnp_P3
  SITE 257: note = Tnp_P4
  SITE 269: note = Tnp_P5
MEQIIRIGMDTSKSVFQLHGVNAAEQPLLRKKLSRREMVKFFEKAPPTTIALESCGGSHHWARLLSSFGHEVKLIAPQLAKPYVKRGKNDAADAEALCEAMSRPTMRFVPVKTADQQAALMLVGVRERLIRNRTQLANAIRGFAMEFGIAAAKGTCRIEPLLERIAADQSLPELARELFAMHGEEYRDLLAETKTIEEKLMALHRSDECSKRLAEIPGVGPVGASLLIMKTPDPRMFKSGRDFAAWIGLTPKDHSTAGKVRLGVITRAGDEMLRSILVVGATALLQHVRAGRSRHTSRWLIELLQRKKPKLVAVALANKIARIAWKLMVSGETYRRPEGQPLAV

SEQ ID NO: 18517 - protein, 418 aa, unidentified
  source 1..418: note = protein_3cb9e22
  REGION 6..159: note = RuvC_domain
  SITE 9: note = RuvC_P1
  SITE 57: note = RuvC_P2
  SITE 98: note = RuvC_P3
  SITE 100: note = RuvC_P4
  SITE 103: note = RuvC_P5
  REGION 221..307: note = Tnp_domain
  SITE 229: note = Tnp_P1
  SITE 259: note = Tnp_P2
  SITE 267: note = Tnp_P3
  SITE 268: note = Tnp_P4
  SITE 279: note = Tnp_P5
MVDVMIGIDPHKSSHTAVAIGAGEEPLGELRVDACLSQAEQLLAWAAGWPQRAWAVEGAAGLGHLLAQQLVAAGEQVLDVPPKLAARVRLLQAGDTNKNDPNDAFSVAVAALRSPARRPVLAEDHAVVLKIWAKRHRDLARIRNQAACRLHAVLCGLVPGGVRKEISAGQAARILEQVRPSDAVIKARYELAGEFLSDLRHLDAQLRDTNKKLAAAVRASGTSLTGLFGVGPVIAGTVIGDVRQVFRFGSRDHFAAYNGTAPAEVSSGGRKVFRLSLRGNRRLNHAIHMAAVTQIRHKHSEGRAYYDKKLAEGKTHKEALRALKRRISDAIYAALVADARHAAAACPEGPGGQPGNRSVSRAAGSHPARRLFGQATPGPATTIRPGTTAGPAPIQPNRAHQRRARHSPPAPKKPRTTT

SEQ ID NO: 18518 - protein, 340 aa, unidentified
  source 1..340: note = protein_dd00e55
  REGION 7..148: note = RuvC_domain
  SITE 10: note = RuvC_P1
  SITE 53: note = RuvC_P2
  SITE 88: note = RuvC_P3
  SITE 90: note = RuvC_P4
  SITE 93: note = RuvC_P5
  REGION 212..297: note = Tnp_domain
  SITE 220: note = Tnp_P1
  SITE 250: note = Tnp_P2
  SITE 258: note = Tnp_P3
  SITE 259: note = Tnp_P4
  SITE 271: note = Tnp_P5
MTYITTIELDLAKTVFQVHGADKDGRPVLRRKLRRGQVLGFFAGISSCRVGLEACGSAHYWARELQALDHDVCLIPPQYVKPFVKTNKNDACDAEAICEALLRPTMHFAPIKSAEQQSVLVLHQARELLVRQRTMLINALRGHCAEFGLISAQGASKVTDLIHIIHDREDTRLPDLAREALGLLVEQLTTVRAQVKALEARLLAWHRLNEASRRLETIPGVGVITATALVATIGDGSQFHSGRQLSAWLGLVPRQPSSGGKTRLGRISKRGDGYIRRLLVHGARTVLRWRRARPETGTGWTDQLLVRRPTNVVLVAMANKTARVAWALLRHQRDYQAVSA

SEQ ID NO: 18519 - protein, 341 aa, unidentified
  source 1..341: note = protein_390ce9b
  REGION 7..148: note = RuvC_domain
  SITE 10: note = RuvC_P1
  SITE 53: note = RuvC_P2
  SITE 88: note = RuvC_P3
  SITE 90: note = RuvC_P4
  SITE 93: note = RuvC_P5
  REGION 211..297: note = Tnp_domain
  SITE 219: note = Tnp_P1
  SITE 249: note = Tnp_P2
  SITE 257: note = Tnp_P3
  SITE 258: note = Tnp_P4
  SITE 270: note = Tnp_P5
MANATLIGIDLGKHCFFVHAQDAHGHELWRRKASRSQLYTQIANCPACTVAMESCAGAHWLARKFRACGHEVRLIAPQFVKPFVKGNKTDFADAEAICEAASRPSMRFVAVKTPEQQILLALHRMREALVRERTATSNQIHAFLLEFGVSLPIGSVAITRLPVLLDDPAHALPPPMVSLLLRLHRRHGQLSNEIAELETELRRQLAGNEAGQRLLTIPGIGPMTASSLLAMAGDVHGFRCGRDFAASLGLVPRQHSTGGRATLLGISKRGDRHLRSLLVQGARAVLRCVDRRADALGVWVQALLRRRHTNVVACALANKMARIVWAILARGGEYRANPRPA

SEQ ID NO: 18520 - protein, 342 aa, unidentified
  source 1..342: note = protein_84e6641
  REGION 9..169: note = RuvC_domain
  SITE 12: note = RuvC_P1
  SITE 68: note = RuvC_P2
  SITE 108: note = RuvC_P3
  SITE 110: note = RuvC_P4
  SITE 113: note = RuvC_P5
  REGION 209..295: note = Tnp_domain
  SITE 217: note = Tnp_P1
  SITE 247: note = Tnp_P2
  SITE 255: note = Tnp_P3
  SITE 256: note = Tnp_P4
  SITE 269: note = Tnp_P5
MADIVKQTVGIDVAQDELVVSLGRMSHDTGTEIFASGTFANSPKGFSELLKWTDKLAAVGIGTGYVMEATGVYHEKLAYFLSDHGREVSIVLPNKISNYFRTLEVKTVTDRTASQAICRFGLERKLEPWQRPKRIFRDLKQLTRERDQLVMDRTSLKNQLHAERSEAFPNQGSIKRIGMRIHMINSHELEIRTEIAGLVRTDTELSKKIDAITSIPGVGKLTAVIALAETNGFEHIRNKGQLVSYAGLDVRLKESGTSVKGRPRISKKGNRHLRKAMYMPALAAMRFNELHKALFVRLVSKHGIKMKAAVAVQRKVLELIYIVYKTGKAFERNYQSPTKDGL

SEQ ID NO: 18521 - protein, 402 aa, unidentified
  source 1..402: note = protein_7dd77c2
  REGION 4..160: note = RuvC_domain
  SITE 7: note = RuvC_P1
  SITE 57: note = RuvC_P2
  SITE 97: note = RuvC_P3
  SITE 99: note = RuvC_P4
  SITE 102: note = RuvC_P5
  REGION 274..361: note = Tnp_domain
  SITE 282: note = Tnp_P1
  SITE 312: note = Tnp_P2
  SITE 320: note = Tnp_P3
  SITE 321: note = Tnp_P4
  SITE 334: note = Tnp_P5
MNSVGIDVSKGKSTIAVMRSLGEIVLSPFDVSHTSGELSALTKQLKSPDGETRVVMEATGNYHLPIAMALHEAEIYVSVVNAMLIHNYGNNTLRKTKTDRKDAIKLANYGIDSWLKLPRFIPEDEVRSLLKSCYRQYRQYSKVQTMLKNNLISLLDTVFPDVNRLFSSPARADGSEKWVDFVETFWHCKCVCGISQTAFEKKYRKWCQKLHYNFSTEKAIDIYRSACGHIGVFPKNESRHVLVKQTVSQLKATSSALAELRKEMLRLAETLPEYPVVTQMFGVGPALGPQLLAEIGDVRRFYSKKALVAFAGLDAPANDSGQIVDNHRSMSKIGSAALRRTLFLIMSVYLQQAPDNEPVYRFMDKKRAEGKPYRVYMMASANKFLRIYYASVKAYLDALDAA

SEQ ID NO: 18522 - protein, 402 aa, unidentified
  source 1..402: note = protein_05ee89a
  REGION 8..164: note = RuvC_domain
  SITE 11: note = RuvC_P1
  SITE 60: note = RuvC_P2
  SITE 101: note = RuvC_P3
  SITE 103: note = RuvC_P4
  SITE 106: note = RuvC_P5
  REGION 270..356: note = Tnp_domain
  SITE 278: note = Tnp_P1
  SITE 308: note = Tnp_P2
  SITE 316: note = Tnp_P3
  SITE 317: note = Tnp_P4
  SITE 329: note = Tnp_P5
MTAVQLWAGVDVGKEHHWVCVVDDHGAVVLSRKFVNDEQQIRGLVSDVDKLGGQVSWTVDLTTVYATLLLTVLADAGKSVRYLAGRQVWQASATYRGGEAKTDAKDARVIADQSRMRGADLPVLHPGDDVITELRMLTAHRTDLVADRTRTINRLRQQLVAVCPALERAAQLTQDRGWVVLLARYQRPKAIRQSGLSRLTRVLADAGVRNAAAIAAAAVAAAKTQTVRLPGEEVAAGLVAQLAQEVISLDERIKTTDADIEGRFRRHPLAEVITSMPGMGFRLGAEFLAAVGDPALIESADQLAAWAGLAPVSRDSGKRTGRLHTPKRYSRRLRRVMYMSALTAIRCDPLSKAYYQRKRNEGKRPIAATICLARRRTNVLYALIRDNRTWQPDSPPITQSAA

SEQ ID NO: 18523 - protein, 340 aa, unidentified
  source 1..340: note = protein_9fd3e10
  REGION 7..149: note = RuvC_domain
  SITE 10: note = RuvC_P1
  SITE 53: note = RuvC_P2
  SITE 88: note = RuvC_P3
  SITE 90: note = RuvC_P4
  SITE 93: note = RuvC_P5
  REGION 212..301: note = Tnp_domain
  SITE 220: note = Tnp_P1
  SITE 250: note = Tnp_P2
  SITE 258: note = Tnp_P3
  SITE 259: note = Tnp_P4
  SITE 271: note = Tnp_P5
MEDVAVVGVDLAKSVFQVHGIDARGQVVLRRRLRRSKLLSFFAKLPACLVGMETCASATHWARELMALGHEVRLMPPQYVKPYVKRSKNDASDAEAICEAVTRPTMRFVGVKSAEQQSVLVLHRTRLILTRQRTQTGNAIRAHLAEFGIVAPVGRLGLDRLLAVIADEGDQRLPTSARSCLAMLIEQHRLVLTHLLYTDRAIRAHSRASELGRRLQEIPGVGPLVASALVAAVPDPHVFRSGRSLSAWLGLVPRQNSSGGKERLGRITKAGDTYLRKMLFVGAMAVIRHAERYGTRKPWLIKLLGRRHPRIAAIALANKIGRIAWALMTSGKRYREPVPA

SEQ ID NO: 18524 - protein, 326 aa, unidentified
  source 1..326: note = protein_8b605fe
  REGION 8..148: note = RuvC_domain
  SITE 11: note = RuvC_P1
  SITE 52: note = RuvC_P2
  SITE 92: note = RuvC_P3
  SITE 94: note = RuvC_P4
  SITE 97: note = RuvC_P5
  REGION 193..280: note = Tnp_domain
  SITE 201: note = Tnp_P1
  SITE 231: note = Tnp_P2
  SITE 239: note = Tnp_P3
  SITE 240: note = Tnp_P4
  SITE 253: note = Tnp_P5
MSENTNYFGIDISKDVFDVTGSDSKHYQFKNDLSGFKKFLRLTNKSSHCVMESTGVYHLRLSYYLYEKGVAVSVENPLSIKRFIQMRLTKIKTDKRDSHMIYEYAVSSGAELRLWKGQSGTQIACSQIIGLTNLYTKQATALKNKLQTEESMGSPCGNVVRSLKRSLKYLKNEIDKLEGSLLELVKQDNQDLLTRVESIPGIGRRSGMLLIVLTGGFERFNKASELCSFAGLTPMIRQSGSSIRSRPRISKMGNRRLRKTLFMCSLSAKKHNKACRDIFNRIVAKGKSKKVALIAVCNKLLKQAFALAKSGLIYDQNYRSVLVNLN

SEQ ID NO: 18525 - protein, 343 aa, unidentified
  source 1..343: note = protein_c3e5bcf
  REGION 6..149: note = RuvC_domain
  SITE 9: note = RuvC_P1
  SITE 54: note = RuvC_P2
  SITE 89: note = RuvC_P3
  SITE 91: note = RuvC_P4
  SITE 94: note = RuvC_P5
  REGION 213..300: note = Tnp_domain
  SITE 221: note = Tnp_P1
  SITE 251: note = Tnp_P2
  SITE 259: note = Tnp_P3
  SITE 260: note = Tnp_P4
  SITE 272: note = Tnp_P5
MKLIRIGVDLAKDVFQVHGVDRHEKAVWRRKLRRNEWLKVLVSTVEPGCEIGMEACGGAHHWARKLQGMGFKVKLIAPQFVKPYVKGDKSDANDAEAICEAMSRPSMRFVTVKSAEQQDIQAVHRIRVGLVEQRTAKANQIRGLAAEYGLVAPKELGQLRTALPCWLEDAQNGLSDRFRQLLSGVWEDLRALDERVGELDREITVIAKSDPLAKRLQQLRGVGPVIATALVGALGNGEQFARGRQMAAALGLTPKQHSSGGKERLLGISKRGDAYLRTLLIHGARSVIRTAKCKEDRLSRWVVALAARSHPNVAAAALANKTARMAWAMMRNGTDYQPDLVTD

SEQ ID NO: 18526 - protein, 376 aa, unidentified
  source 1..376: note = protein_62b6480
  REGION 1..146: note = RuvC_domain
  SITE 44: note = RuvC_P2
  SITE 85: note = RuvC_P3
  SITE 87: note = RuvC_P4
  SITE 90: note = RuvC_P5
  REGION 251..338: note = Tnp_domain
  SITE 259: note = Tnp_P1
  SITE 289: note = Tnp_P2
  SITE 297: note = Tnp_P3
  SITE 298: note = Tnp_P4
  SITE 311: note = Tnp_P5
MMDESGKVVFKAFSFPNTSDGGHALFSKLASYSSSPDDFEIGMEATGHYWLSIYSFLFEKKFLLHVINPIQTDGWRRGTEIRKRKNDIIDSVLIADLIRYGQFVETRLADEDLFSLRSLTRFRTYLVESISDLKRKVVCVLDQVFPEYQSIFSDIFGKTSKEILLQFSSPIDFESVSSQTLAELLAKLSRKQIGPAKAAQLKAAASCSFGVTFAKSSFTFQLKALIEQIAFIEKQVKETETEIAGIMEKLESPITTITGIGNITGAAIISEIGDISKFDSPRKLVAFAGLDATVTQSGEFEAAHNVMSKRGSPYLRKAIFQAALVAAFKDPVLSAYYQKKRAEGKHHLTCIGAVARKMCNIIYAVVKNNQPYVPKA

SEQ ID NO: 18527 - protein, 397 aa, unidentified
  source 1..397: note = protein_3edb1fc
  REGION 4..160: note = RuvC_domain
  SITE 7: note = RuvC_P1
  SITE 57: note = RuvC_P2
  SITE 97: note = RuvC_P3
  SITE 99: note = RuvC_P4
  SITE 102: note = RuvC_P5
  REGION 274..361: note = Tnp_domain
  SITE 282: note = Tnp_P1
  SITE 312: note = Tnp_P2
  SITE 320: note = Tnp_P3
  SITE 321: note = Tnp_P4
  SITE 334: note = Tnp_P5
MIAVGIDVSKSKSTVAILDSCGTVLATPFNMAHTQPEMNALVSRLKAFDEPVTILLEYTGHYHYPVLKKLQEEGFPVCVVNPYQMKKYGDVEIRKAKTDKKDALRIATFALEKSYKLVPYSSMEQKYEDLKFLSRQYQQRISFVSTLKVQLINMLDQTMPGITKILALKSRDPEKCALLLFIKRYKSFDEIQRIGKTRFLSTYATLMKKTPDRYAPKKGLEIYELARDSITTRGEDPYIWSAQDQCVGLLATAQNAADEIITQMQNIAETIPEYTVLRAMNGVGDRLGPVILAEIGDIRRFHSGKALNSFAGNDAPPYQSGQFESRNRHISKRGSSSLRKACFEVMQALKLTKPQDDPVYQFILKKEQEGKPYNVAKMAGVNKFLRIYYARAMELYR

SEQ ID NO: 18528 - protein, 397 aa, unidentified
  source 1..397: note = protein_d8dd484
  REGION 4..160: note = RuvC_domain
  SITE 7: note = RuvC_P1
  SITE 57: note = RuvC_P2
  SITE 97: note = RuvC_P3
  SITE 99: note = RuvC_P4
  SITE 102: note = RuvC_P5
  REGION 274..361: note = Tnp_domain
  SITE 282: note = Tnp_P1
  SITE 312: note = Tnp_P2
  SITE 320: note = Tnp_P3
  SITE 321: note = Tnp_P4
  SITE 334: note = Tnp_P5
MIAVGVDISKNKSTVAILNSDCSVRAKPFDMHHNQTEMNALVKYLKNLSEPLIILMEYTGHYHYPVLKKLQAEGFQVCLVNPYQMKKFGEVEIHTSKTDKKDAIRIATFALEKSYMLKPYSPLDRKYEDLKFLSRQYKQRISYLTKTKVQLTNLLDETMPGITSLLKLTSRHPERCVLLLFIKRYGSYDSIIKMGKKRFLATYSTLMKKTNDRYAPQKGLAIFELASNGITTRGDNIYTLSAQNQLVDLVSAAQNAADEVISQMQNIAETIPEYKILRAMNGVGDRLGPVILAEIGDIRRFHSGKALNSFAGNDAPPYQSGQYESKNRHISKRGSATLRKACYEVMQSLKVSKPLTDPIYLFMVKKEQEGKPFKVAKMAGVNKFLRIYYARAMELYQ

SEQ ID NO: 18529 - protein, 299 aa, unidentified
  source 1..299: note = protein_6d38699
  REGION 7..149: note = RuvC_domain
  SITE 10: note = RuvC_P1
  SITE 54: note = RuvC_P2
  SITE 89: note = RuvC_P3
  SITE 91: note = RuvC_P4
  SITE 94: note = RuvC_P5
  REGION 213..295: note = Tnp_domain
  SITE 221: note = Tnp_P1
  SITE 250: note = Tnp_P2
  SITE 258: note = Tnp_P3
  SITE 259: note = Tnp_P4
  SITE 271: note = Tnp_P5
MNTIKVVGIDLAKNVFQVCVWMADGSVASNRKISRQKLLDVVWTFPPSTVIAMEACATSHYWGRTLQAMGYTVRLVPTQHVKAFSHHQKNDANDALAICETACRPGIHFVPVKTVEQQDIKALRSARQLMVEQRTALANQLRAFLAEQGVIIPVGIQSLQHHLPDVLEDENKTLSSVLRRLLYTSWEDLRALNLRIHDMDKEIAALSRQQPGYDPLLTIPGVGPLIAAAFVSDVSTSQFANGRQLSAWCGLVPRQHSSGGKNRLSSLSKQGNRHLRTLIIHGARAMMRGVQKRDDPLGE

SEQ ID NO: 18530 - protein, 400 aa, unidentified
  source 1..400: note = protein_e1912de
  REGION 8..163: note = RuvC_domain
  SITE 11: note = RuvC_P1
  SITE 60: note = RuvC_P2
  SITE 101: note = RuvC_P3
  SITE 103: note = RuvC_P4
  SITE 106: note = RuvC_P5
  REGION 269..355: note = Tnp_domain
  SITE 277: note = Tnp_P1
  SITE 307: note = Tnp_P2
  SITE 315: note = Tnp_P3
  SITE 316: note = Tnp_P4
  SITE 328: note = Tnp_P5
MTDSHLWAGIDVGKEHHWICVLDASGEVVLSRRFANDEKEIISVITDTESLGDSVSWTVDLTTVYATLLLTVLTKAGTPVRYLSGRSVWQASTVYRGGEAKTDARDARVIADQSRMRSDLPVLHPDDELIRELQMLTGHRADLVADRTRTINRLRQQLVAVCPGLERVAQISSDRGWVVLLTRYQRPKAIRRAGAARLATMLAGSGVRNAESIAQAAVAAAKAQTVRLPGEDIAAELVAELAQGVIDLDVRVRAADAAIEARFRRHPLAEAIVSLPGIGFCLGAEFLSAVGDPALIGSADRLAAWAGLVPRPKDSGKRTGRLHTPQRYSRRLRRVMYMSALTAARCDPVSRAYYTRKRAEGKRPIQATICLARRRVDVLYALIRDNRTWQPDAPVATVAA

SEQ ID NO: 18531 - protein, 294 aa, unidentified
  source 1..294: note = protein_0331695
  REGION 9..157: note = RuvC_domain
  SITE 12: note = RuvC_P1
  SITE 56: note = RuvC_P2
  SITE 96: note = RuvC_P3
  SITE 98: note = RuvC_P4
  SITE 101: note = RuvC_P5
  REGION 195..279: note = Tnp_domain
  SITE 203: note = Tnp_P1
  SITE 232: note = Tnp_P2
  SITE 240: note = Tnp_P3
  SITE 241: note = Tnp_P4
  SITE 252: note = Tnp_P5
MSLPGPLCVGIDVSKATLDIAASYAIEQFSVASDADGFDSIIAELRQHDVTLVLMEATGGLEAAVACALQAEGFEIAVVNPRQARDFARAMGYLAKTDRIDARVLAQMAEVINRHPERERFIRALPDAERQVLSAMVVRRRQLIAMLVAERNRLYPAHPQSRKSINIIIKALEDELARIDKDMNNHIQNNFKELSERLSSVKGVGTMTAAALLAEVPELGSLSRRQISALVGVAPVNRDSGTMRGRRTIFGGRAGVRTTLYMATLVATRFNPVIKAFYTRLVAAGKPKKVALVA

SEQ ID NO: 18532 - protein, 341 aa, unidentified
  source 1..341: note = protein_1db0ac8
  REGION 7..149: note = RuvC_domain
  SITE 10: note = RuvC_P1
  SITE 53: note = RuvC_P2
  SITE 88: note = RuvC_P3
  SITE 90: note = RuvC_P4
  SITE 93: note = RuvC_P5
  REGION 209..295: note = Tnp_domain
  SITE 217: note = Tnp_P1
  SITE 247: note = Tnp_P2
  SITE 255: note = Tnp_P3
  SITE 256: note = Tnp_P4
  SITE 268: note = Tnp_P5
MQDVTLVGIDLGKHSFHLHGQDRHGKAVFRKKVGRKQLQEFFAKFHACIVVMEACAGAHHMARKLVSFGHRVKLISPQFVRPFVKSNKNDFVDAEAICEAASRPAMRFVTPKTESQQTLSALHRVRDSLVHDRVKAVNQMHGFLLEFGISMPIGNAVIKRLPAVLAEHSLPPRIVAILERLHVHFKYLSEQIGEIDKEMARQLADDEFGQRLLTIPGVGPITANVLSAEMGDGKQYGCSRDFAASIGLVPRQYSTGGRANLLGISKRGDKNIRRLLVQCARAYMQRLELQRGPLADWVRALLARRHSNVVACALANKLARTAWALVTRNTVFDAKAAVIPA

SEQ ID NO: 18533 - protein, 285 aa, unidentified
  source 1..285: note = protein_9e4f83d
  REGION 10..150: note = RuvC_domain
  SITE 13: note = RuvC_P1
  SITE 54: note = RuvC_P2
  SITE 94: note = RuvC_P3
  SITE 96: note = RuvC_P4
  SITE 99: note = RuvC_P5
  REGION 158..242: note = Tnp_domain
  SITE 166: note = Tnp_P1
  SITE 195: note = Tnp_P2
  SITE 203: note = Tnp_P3
  SITE 204: note = Tnp_P4
  SITE 216: note = Tnp_P5
MAIPVQPTLFGVDVSKAELIIAAQDGAVQALANDPRTIERWLATLAGPCWFALEATSTYHQALAQAAYRQGHRVYLLDGYRLARYRDSIGGRAKTDHHDALLLVRYLTREHDELRPWAPPPAAYTRLKTLLRQLARLDTLIQKQLREALADAGWRDHARRCQAIEGIGPLTATALTTVFHRGRFRSSDAFIAFLGLDVRVRDSGQARGRRKLTKQGDPELRRLLYLAAMTARRSPTWAGFYQRYLDRGLKSTQALTILARKLARIAFAILKNGSDYVPRKLCLAT

SEQ ID NO: 18534 - protein, 448 aa, unidentified
  source 1..448: note = protein_46e89aa
  REGION 22..181: note = RuvC_domain
  SITE 25: note = RuvC_P1
  SITE 80: note = RuvC_P2
  SITE 120: note = RuvC_P3
  SITE 122: note = RuvC_P4
  SITE 125: note = RuvC_P5
  REGION 297..391: note = Tnp_domain
  SITE 304: note = Tnp_P1
  SITE 334: note = Tnp_P2
  SITE 342: note = Tnp_P3
  SITE 343: note = Tnp_P4
  SITE 356: note = Tnp_P5
MFIMHYKRLLTFIDGVSSYLSVGLDVGADFTWMSIALPNGSFVGKPFKIIHSDSRSRDLAVTKIKEAQETYSLKSRCFLESTGIYHIPLLCFLRDKGFDCSVINPIITKNSTNINIRKLHNDKFDSKKAALVGLNVSLKTSILPDDSVVDLRNLVRDYYYFKDLQSAVALKLTAELKVSFPAYAKVFSKVTTQSSLKLLSSYPLPADMLAASKEDIVDIIRSTARFGEAYALRKYDAIIAAAQDAAVFSRALPSNAVRIRLYIDTYQEYQKHLDALLKALHETVEKLQDTLIYDQICLLQSLRGIGFLSAVVLIAEMGDFKLFSSPKKLYAYFGLDPAVKQSGKLNGDKVHMSKRGSSLARRVLHMAALNNVKVDKGSGTPVNPVIYDYYTRKCSGKKKPVAMGAVMHKICNIIFAMLRDNKPFEIITPEEHCRRFATEHPDKIRKAA

SEQ ID NO: 18535 - protein, 318 aa, unidentified
  source 1..318: note = protein_ef2501a
  REGION 9..153: note = RuvC_domain
  SITE 12: note = RuvC_P1
  SITE 56: note = RuvC_P2
  SITE 96: note = RuvC_P3
  SITE 98: note = RuvC_P4
  SITE 101: note = RuvC_P5
  REGION 191..275: note = Tnp_domain
  SITE 199: note = Tnp_P1
  SITE 228: note = Tnp_P2
  SITE 236: note = Tnp_P3
  SITE 237: note = Tnp_P4
  SITE 248: note = Tnp_P5
MSVSNQRCAGIDVSKGTLDIAISNIASQLAVPNGTDGFTQIIGELKRNETRLILMEATGGLESGVACYLQSEGFDVVVINPRQARDFARAMGYLAKTDRIDARVLLQMSEVINQHPEREKYISPLPDAHRQILAAMVVRRRQLTAERNRLHPSHPLSHASIRSIISALKGELARIESEMAIHIKEHFCELSELLNAVKGIGTATVAVLLAEVPELGSLSRREISALIGVAPVNRDSGTMRGRRTVFGGRASVRTALYMSALVGTRHNPIIKEFYTRLVAAGKPKKVALTACIRKLLTILNAMLKRNEVWDPMYHQHAS

SEQ ID NO: 18536 - protein, 344 aa, unidentified
  source 1..344: note = protein_6fc1859
  REGION 7..149: note = RuvC_domain
  SITE 10: note = RuvC_P1
  SITE 53: note = RuvC_P2
  SITE 88: note = RuvC_P3
  SITE 90: note = RuvC_P4
  SITE 93: note = RuvC_P5
  REGION 211..297: note = Tnp_domain
  SITE 219: note = Tnp_P1
  SITE 249: note = Tnp_P2
  SITE 257: note = Tnp_P3
  SITE 258: note = Tnp_P4
  SITE 270: note = Tnp_P5
MNNVTIIGIDLAKSVFQVHGAGSDGSVVYRKKLSRPQFSKFMADQPACIVAMEACGSAYFWARMMEDLGHEVRLVPPIYVKPFVKRQKNDSADAEAIAEAASRSNMRFVPIKSVQQQSRSIMFRTREMLIGQRTQTVNALRSHLAEFGVIFPKGLHNLKRLAAYVESADESIPIEVVQIGEVYLEQITQHTDRIKVLEKTIKGLAETSETPRRLRTVPGVGPITAMAIEAFAPEMERFEKGRNFSAWLGLVPRQHSTGGKQVLGRTSKMGQKDIRNLLIVGAMSVIKAAIYKKDESNPSWLGQLLERKPRMVVAVALANKMARTIWAMLTKGEDYRNPATVAVA

SEQ ID NO: 18537 - protein, 347 aa, unidentified
  source 1..347: note = protein_d0b214b
  REGION 5..158: note = RuvC_domain
  SITE 8: note = RuvC_P1
  SITE 57: note = RuvC_P2
  SITE 97: note = RuvC_P3
  SITE 99: note = RuvC_P4
  SITE 102: note = RuvC_P5
  REGION 220..305: note = Tnp_domain
  SITE 228: note = Tnp_P1
  SITE 258: note = Tnp_P2
  SITE 266: note = Tnp_P3
  SITE 267: note = Tnp_P4
  SITE 278: note = Tnp_P5
MEVGIGVDPSKSSLAVAAVDPLGRVLGTAEFSNDPRGHRALLRWARERGPGRVIGIECSLSFGARLSRLLLKSGEDVREVPTTLTHRPRRRRASQGKSDMVDSVAIARIVASGEVLPSAHRLEVLTDLRALVEYRDQLVRARTQVANRTHADLMNVLPGYERRVPNLRAKAHRTTARSLLRGDRSVRAELVRKRLGELSRLEGEIAAMDRRIRATVQKTGTSLTSIPGVGPFIAAKILGEVGDPSRVRSKPAFAVLSGTAPLSASSGQVQRHRLNRGGNRQLNWALHYIALVQCRISPDAQAYMDRAAGSGQVPQRGHALPEAAPFERGLPSPRRRREEGGAGGLTT

SEQ ID NO: 18538 - protein, 399 aa, unidentified
  source 1..399: note = protein_2044d42
  REGION 5..164: note = RuvC_domain
  SITE 8: note = RuvC_P1
  SITE 62: note = RuvC_P2
  SITE 102: note = RuvC_P3
  SITE 104: note = RuvC_P4
  SITE 107: note = RuvC_P5
  REGION 274..363: note = Tnp_domain
  SITE 282: note = Tnp_P1
  SITE 312: note = Tnp_P2
  SITE 320: note = Tnp_P3
  SITE 321: note = Tnp_P4
  SITE 334: note = Tnp_P5
MKPVIGMDVAKGKSVAQAFVKRNYPFGRVQEILHTPKGFEKLKQLLEELEQKTTHKPAVILEPTGHYHRILVFYLQQAGYEVILVNPLQAQRARRTGLRKVKTDASDAWHLGELYYQEENWSTYPGRKEALVDLQFLTREHEFITSLYVQAKLNMRTLVDQIFPSYEGVFKDLYSKTSLNLLEACLTSEGVKAQTPEAWMGMVKAATQASRSETWMNRKVEALQNAIADNPVQRVPYGLEMALRSLLALVREFQKQLTELEKVILELSQTLNEVQLLESIPGVGTKLATAIVSEIGDASQFRHPKQLVAYAGIDPSVFSSGKFVATQNKITKRGSKRLRRAMYLAVTCGLRRGINPGLREYYDRKKSEGKPHKVAVIACANKLLHHVYAMLKKGQPYTL

SEQ ID NO: 18539 - protein, 343 aa, unidentified
  source 1..343: note = protein_05007f4
  REGION 7..149: note = RuvC_domain
  SITE 10: note = RuvC_P1
  SITE 53: note = RuvC_P2
  SITE 88: note = RuvC_P3
  SITE 90: note = RuvC_P4
  SITE 93: note = RuvC_P5
  REGION 212..299: note = Tnp_domain
  SITE 220: note = Tnp_P1
  SITE 250: note = Tnp_P2
  SITE 258: note = Tnp_P3
  SITE 259: note = Tnp_P4
  SITE 271: note = Tnp_P5
MGEVSTIGFDIAKSVFQVHGVDGTGAVVMRKRVGRSKVLEFFGGLSPCLVGIEACPSAHYWSRELQTLGHTVKLMPPSYVKAYLKRSKNDANDAAAICEAVTRPSMRFVAIKTKEQQTGLMLHRTRQLLVRQRTMLSNAIRGHMAELGIIAAKGRNGTAELLQIIADVADDRIPPVARFCLDLLARQYLTLSAEVSTIDKRIHAWHRSCEESRRLEEIPGIGPIVATALIAEIGDWGAFRSGRSLAAWIGLVPKQHSTGGKERLGSITKQGNRYLRWLLVAGAMAVIRYARQHGTKRPWLIRIMDRRPAKVAAVALANKIARIAWAIMVRGERYREPKLLLAA

SEQ ID NO: 18540 - protein, 346 aa, unidentified
  source 1..346: note = protein_0f9da7a
  REGION 10..152: note = RuvC_domain
  SITE 13: note = RuvC_P1
  SITE 56: note = RuvC_P2
  SITE 91: note = RuvC_P3
  SITE 93: note = RuvC_P4
  SITE 96: note = RuvC_P5
  REGION 215..302: note = Tnp_domain
  SITE 223: note = Tnp_P1
  SITE 253: note = Tnp_P2
  SITE 261: note = Tnp_P3
  SITE 262: note = Tnp_P4
  SITE 274: note = Tnp_P5
MKTTAQLPIIGMDIAKSVFQLHIVDPETGEIERLKLKRDRVAAFFANRQRSLVAVEACGGAHHWGRFLQSQGHQVKLLPPKQVRPFVSRDKTDARDAQAIWVAAQQPHIFEVPVKSEQQQACLTLHRMRAQLMKMRIMQTNALRGLLYEFGIVLPEGHRILLNRIQDELAKASDKLPVVITESVLEQLARVDRLQEDIDHIDKRLVMMGKQNQQMLALQTIPGIGPMTATALAATATDMSDFRSGRQFAAWLGLTPKQTGTGGKIRQMGISKRGDPYVRTLLMHGARAIIARSQRTAWITALLARRPYSVVVAALANKLARTAWAVLTKGKAFDQVKWNPAELAAT

SEQ ID NO: 18541 - protein, 344 aa, unidentified
  source 1..344: note = protein_33a9fe9
  REGION 7..149: note = RuvC_domain
  SITE 10: note = RuvC_P1
  SITE 53: note = RuvC_P2
  SITE 88: note = RuvC_P3
  SITE 90: note = RuvC_P4
  SITE 93: note = RuvC_P5
  REGION 211..297: note = Tnp_domain
  SITE 219: note = Tnp_P1
  SITE 249: note = Tnp_P2
  SITE 257: note = Tnp_P3
  SITE 258: note = Tnp_P4
  SITE 270: note = Tnp_P5
MSTIKVLGIDLGKSSFHAIGRDYSDNQVIRKKFSRSALITYLHQLPPCIIAFEACGGAHWLGRQCESMGHTVKLIPPQYVKPYVKSNKNDFIDAEAICEASTRPKMRFVSVKSEDAQVISAIHKARQGYIKDRTACMSRIGSLLLEFGIALPTGHSVMKQLFNWLAQQPQKLPSLLMQELMELHEYYLFLYNSIEKQDKKLKQLVDTNPIGQLLKTIPGIGDMTASLCIANISSATDFKNGRNMAAWLGLVPAQHSTGGKPRLLGISKRGNKELRTLFIHAARAVMSKPDKTGTVYGEWLINLRATKPFNVVTVALANKLARIAWAVMKTKQAFNSNELAPGLQ

SEQ ID NO: 18542 - protein, 346 aa, unidentified
  source 1..346: note = protein_57e341a
  REGION 18..174: note = RuvC_domain
  SITE 21: note = RuvC_P1
  SITE 71: note = RuvC_P2
  SITE 111: note = RuvC_P3
  SITE 113: note = RuvC_P4
  SITE 116: note = RuvC_P5
  REGION 288..346: note = Tnp_domain
  SITE 296: note = Tnp_P1
  SITE 326: note = Tnp_P2
  SITE 334: note = Tnp_P3
  SITE 335: note = Tnp_P4
MVLIHCINPKENYFMNAVGIDVSKSKSVIAILRPYGEIVSPPFEIKHISGNIQSLIEQIKSIDGESRIVMEHTGRYYEPLAHELSQANLFVSDINPKLIKDFGDNSLRKVKSDKADAIKIARYALDSWTDLKQYGLMDKIRNQLKTMNRQFTFYTKHKTSMKNNLIGILDQTYTGANTYFDSIARNDGSQKWVDFAATYWHVDCVRKMSLNAFLDHYQKWCKRKKYNFSKAKAEKIYGTAKELIPVLPKNDLTKLLIKQAIEQLNIVSKTVEELRSLMNETASKLPEYPVVMAKKGVGKSLGPQLMAEIGDVTRFTHKGAITAFAGVDPGMNQSGTYDQKSIHASK

SEQ ID NO: 18543 - protein, 392 aa, unidentified
  source 1..392: note = protein_4f9fae4
  REGION 5..163: note = RuvC_domain
  SITE 8: note = RuvC_P1
  SITE 62: note = RuvC_P2
  SITE 102: note = RuvC_P3
  SITE 104: note = RuvC_P4
  SITE 107: note = RuvC_P5
  REGION 267..356: note = Tnp_domain
  SITE 275: note = Tnp_P1
  SITE 305: note = Tnp_P2
  SITE 313: note = Tnp_P3
  SITE 314: note = Tnp_P4
  SITE 327: note = Tnp_P5
MEPVVGLDVSKGISVVQAFVRRNEPYAKLECIKHEESGFKRLGELLDELEELSGMEPVIVMEATGHYHRGLVAYLVRGTYKHYVINPLQSKRARSTQLRKVKTDAADAWHLADMYYRGDVKPHRTWDEQYTDLQHVTRQHEFITSMYVQAKLNTRALLDQVFPAYELVFRNLFSATALKVLQCCLSNENEDVENIMLKQVGKSHSKTWIGEKAAQLRQVSLNGSIEKRSSSQSIALAGMVCLLIEFQNQLSRLEEQIEDVSSKLLEVELVKTIPGIGNKLAAAIIAEIGDARQFTNAKQLVAFAGLDPGVYSSGKFTATSNRITKQGSKRLRRALFLAVQCGLRRGANNRLKLYYDKKKKEGKPYKVVVIACANKLLHHVYAILIKGQPYQN

SEQ ID NO: 18544 - protein, 401 aa, unidentified
  source 1..401: note = protein_cacf14c
  REGION 7..147: note = RuvC_domain
  SITE 10: note = RuvC_P1
  SITE 53: note = RuvC_P2
  SITE 88: note = RuvC_P3
  SITE 90: note = RuvC_P4
  SITE 93: note = RuvC_P5
  REGION 209..294: note = Tnp_domain
  SITE 217: note = Tnp_P1
  SITE 247: note = Tnp_P2
  SITE 255: note = Tnp_P3
  SITE 256: note = Tnp_P4
  SITE 268: note = Tnp_P5
MTKIIRIGMDTSKSVFVLHGVDAAEQPILRRKLRRKQVLEFFAKLEPTKVGLEACGAAHYWARELRALGHEVVLVPPQYVKPYVKRNKNDAADAEAICEAMSRPTMRFVPVKTAEQQAALMLAGTRDGLIRRRTQLTNTIRGYAAEFGLTAAKGLDKIEPLLARIAEAALPKLAKELFATHAREYARLKIEIAKIEAKLMAWHKHNELSRRLEEVPGVGPIGASLAAMKVPDPHAFRCGRDFSAWLGVTPKDHSTAGKTRLGVITRAGDEALRSVLVVGATAVIQKVKQGKGQPSPWLVELLRRKPPKLAAIALANKNARIIWKLMVSGERYNPARAVAARGEGVEVPSCTSVTPCSPPSRTLRAAAGGGPRGPSLTAAALGVTGPRQVGTQKRPQVEQRN

SEQ ID NO: 18545 - protein, 327 aa, unidentified
  source 1..327: note = protein_5e7b9d0
  REGION 5..160: note = RuvC_domain
  SITE 8: note = RuvC_P1
  SITE 62: note = RuvC_P2
  SITE 102: note = RuvC_P3
  SITE 104: note = RuvC_P4
  SITE 107: note = RuvC_P5
  REGION 202..287: note = Tnp_domain
  SITE 210: note = Tnp_P1
  SITE 239: note = Tnp_P2
  SITE 247: note = Tnp_P3
  SITE 248: note = Tnp_P4
  SITE 260: note = Tnp_P5
MSYFIGIDIAKDKFDCLWLRDIETLKIKTKVLANTPDGFKLLRQWFEKNITHNLSDIHVCMEATGIYHEALAYALHEMGIKVSVINPAFIRDFAKSLGVRSKTDKKDSMVIARYCALMRPRLWQPEPKNIRVLKAMLARLGALEKDMQRELNRLEKAQVSQASVDVIESIHIMTEGLKQEISRVQKQIDLHIDQHPDLKQNKEKLQSIPGIGDVVSREMLAVLLSRDFKRASQAAAFIGLVPKLWESGKMKGRTTLCKNGPGRLRAKLYMAAIVAKQHNPDIKAQYERLLLAGKTKMQALGAAMRKLVQICFGVIKHQCEYQPQLIK

SEQ ID NO: 18546 - protein, 390 aa, unidentified
  source 1..390: note = protein_f7a303f
  REGION 4..160: note = RuvC_domain
  SITE 7: note = RuvC_P1
  SITE 59: note = RuvC_P2
  SITE 99: note = RuvC_P3
  SITE 101: note = RuvC_P4
  SITE 104: note = RuvC_P5
  REGION 264..351: note = Tnp_domain
  SITE 272: note = Tnp_P1
  SITE 302: note = Tnp_P2
  SITE 310: note = Tnp_P3
  SITE 311: note = Tnp_P4
  SITE 324: note = Tnp_P5
MFLLGIDIAKLNHVASYIDSSTNEVIFSNFKFKNDFKGFSALLNKIKSFDAKNLIIGLESTSHYGENLINFLFRHDFKVALINPLQTSHLRKANIRDAKNDNLDSLNIAKSLLFTKLNFVSEKNIECFSLKKLTRFRNNLIKQRSKAKIQLTSLLDLLFPELQYLFKSKIHSKAIYSLLKKYPSTEEIAALKDDEISNLLYASSKGHFKKEKSIELKSLAKTTVGIKDTSISLHLIQLIELIELYTKQIKDIEIKITDTVNKLDTTLLSVPGISIIACAIILGETNNFENFSSSKKLLAFAGLDPKIRQSGNFNASSCRMSKKGSPYLRYALIFTAWNIVRHSEKFNKYYFLKRSQGKSHYNALGHVAHKLVRILFTLIKKNISYQEEKL

SEQ ID NO: 18547 - protein, 343 aa, unidentified
  source 1..343: note = protein_fca2df2
  REGION 6..146: note = RuvC_domain
  SITE 9: note = RuvC_P1
  SITE 52: note = RuvC_P2
  SITE 87: note = RuvC_P3
  SITE 89: note = RuvC_P4
  SITE 92: note = RuvC_P5
  REGION 211..297: note = Tnp_domain
  SITE 219: note = Tnp_P1
  SITE 249: note = Tnp_P2
  SITE 257: note = Tnp_P3
  SITE 258: note = Tnp_P4
  SITE 270: note = Tnp_P5
MKLHAVGIDLGKTVFHLVGLDSTGRVVIRKKCSRKQLLAFSANLEVKLIGMESCSGSHFLGRALRDQGHEVRLMPAQYVKPYVQTNKSDFLDAEAIAEAVQRPRMRFVPIKTEEQLDLQALHRVRERWVMRRTSVVNQIRSLLLERGLTLPKGRRYVDQMLPRILEDATLRLSDSFRVLLAQLKLELGQVTARVDEVDRVIQKTAKENEDCQRLTEIPGVGPVTATALVAGVGNASEFRKGRNLSAWMGIVPGEYSTGGKQKLLGISKRGNKYLRTLFIQGARSVLQQRHKQAPGLSEWLAQLLARAHQNVVIVALANKLVRMAWAVLCKKERYRAPVLAVTT

SEQ ID NO: 18548 - protein, 343 aa, unidentified
  source 1..343: note = protein_95eb699
  REGION 6..147: note = RuvC_domain
  SITE 9: note = RuvC_P1
  SITE 52: note = RuvC_P2
  SITE 87: note = RuvC_P3
  SITE 89: note = RuvC_P4
  SITE 92: note = RuvC_P5
  REGION 211..297: note = Tnp_domain
  SITE 219: note = Tnp_P1
  SITE 249: note = Tnp_P2
  SITE 257: note = Tnp_P3
  SITE 258: note = Tnp_P4
  SITE 270: note = Tnp_P5
MQIRSVGIDLGKTTFHLVALSAAGKVLLRKKFTQKQLITFTANMQTSLIGMEACSGAHFLGRVLREQGHDVKLIPAQFVKPFVKSNKNDFLDAEAIAEAVDRQNMRFVPIKTDDQLDLQAMHRVRDRLVARRTSVINQLRAFLLERGMVFAKTPFKLKQAMPEILENAEANLTPRMRSLVSLLWSEWKDLEQQIVAMNEEVEQIASSDPACQRLRQIPGIGPLVATAIVAAIGNGSAFRKGREFSSWLGLVPRQYSTGGNARLFGISKRGNCYLRKLLVHGARSAVLRVKRERSPFGPWLDALEQRAPVKVVVTAAANKLARIAWAVLASGDDYRPATVSMAA

SEQ ID NO: 18549 - protein, 406 aa, unidentified
  source 1..406: note = protein_c9a0c27
  REGION 4..163: note = RuvC_domain
  SITE 7: note = RuvC_P1
  SITE 60: note = RuvC_P2
  SITE 100: note = RuvC_P3
  SITE 102: note = RuvC_P4
  SITE 105: note = RuvC_P5
  REGION 271..357: note = Tnp_domain
  SITE 279: note = Tnp_P1
  SITE 310: note = Tnp_P2
  SITE 318: note = Tnp_P3
  SITE 319: note = Tnp_P4
MLLVGDDWAEDHHDVELMDAAGRRLARARLPEGVAGIAALHELIGQHVGEDPDAAEVVIGIETDRGPWVAALIAAGYRVFAINPLQVARFRERHNVSGAKSDAADAHTLADMVRTDAHQLRPVAGDSAEAEAIKVVARAHKTLIWERTRHSQRLRHALRDYFPAALEAFTDLAALDTLLLLGKAPDPVSAARLTIPQISKALQRARRRNIAEKATAIQAALRSEQLSQPAVVTTAYAASVRAQVAILTTLNEQIKTLQGEVEAHFGRHPDAEIILSQPGLGMILGARVLAEFGDDPDRYTSAKARKNYAGTSPITRASGKKKTVLARYVHNDRLIDALSHQAFAALSVSPGARAYYDRLRARGAGHPGALRQLANRLVGILHGCLTTRTLYDETTARSHHTDTAAA

SEQ ID NO: 18550 - protein, 404 aa, unidentified
  source 1..404: note = protein_d70c878
  REGION 6..162: note = RuvC_domain
  SITE 9: note = RuvC_P1
  SITE 60: note = RuvC_P2
  SITE 100: note = RuvC_P3
  SITE 102: note = RuvC_P4
  SITE 105: note = RuvC_P5
  REGION 271..358: note = Tnp_domain
  SITE 279: note = Tnp_P1
  SITE 310: note = Tnp_P2
  SITE 318: note = Tnp_P3
  SITE 319: note = Tnp_P4
  SITE 331: note = Tnp_P5
MPELWAGTDAGKVEHHCTVIDTTGATVLTRRVPNNEDELLQLLGDVWDLADGTPVTWAVDLNAGGAALWIALLVNHGQRLFYIPGRTVHHASGAYRGSGKTDAKDAFVIADQARMRRDLQPLQETSEIAVDLKILTARRMDLSADRTRAINRLRAQMLEYFPALERAFDYSNSKTSLALLTKYQTPAALRRIGRARLATWLKNHGVRMLSTAKSAADAAVTAAEAQHTVVPGEKTAAKMVHTLAREVMALDQEIAGLEALIEGRFREHPDAEVITSMPGIGAMLGAEFIAATGGDMTAFGSPDRLAGVAGLAPVPRDSGKVSGNLRRPRRYSRRLLRMFYLSAQVASVHCPESKRFYQRKRAEGKNHKQAVLALARRRLNVLWALIRDHRIFETATTRSVAVAA

SEQ ID NO: 18551 - protein, 341 aa, unidentified
  source 1..341: note = protein_a7d20d4
  REGION 7..149: note = RuvC_domain
  SITE 10: note = RuvC_P1
  SITE 53: note = RuvC_P2
  SITE 88: note = RuvC_P3
  SITE 90: note = RuvC_P4
  SITE 93: note = RuvC_P5
  REGION 209..295: note = Tnp_domain
  SITE 217: note = Tnp_P1
  SITE 247: note = Tnp_P2
  SITE 255: note = Tnp_P3
  SITE 256: note = Tnp_P4
  SITE 268: note = Tnp_P5
MSESALVGIDLGKHSFHLHGQDKSGCEVFRKKLSRPQMMQFFGNLPACVVVMEACAGAHFVARQLIAMGHQAKLISPQFVRPFVKGNKNDFVDAEAICEAASRPSMRFVSPKTEAQQTLSVLHRLRESLVHDRTKVANQMHGFLLEFGISLPKGLAIMKRLANILAEHELPVRLTVLLQRLHDHFVYLDEQIKELDKELASQLAADDLGSRLLSLPCVGPITASLLAVEMGDGQQFKCSRDFAASVGLVPRQYSTGGKANLLGISKRGDKHLRQLLVQCARVYLQRLDYQHGRLADWVRSMLMRRHSNVVACALANKLARIAWALAAHHTQYETGPDALNA

SEQ ID NO: 18552 - protein, 326 aa, unidentified
  source 1..326: note = protein_c5b0e07
  REGION 4..157: note = RuvC_domain
  SITE 7: note = RuvC_P1
  SITE 61: note = RuvC_P2
  SITE 101: note = RuvC_P3
  SITE 103: note = RuvC_P4
  SITE 106: note = RuvC_P5
  REGION 201..287: note = Tnp_domain
  SITE 209: note = Tnp_P1
  SITE 238: note = Tnp_P2
  SITE 246: note = Tnp_P3
  SITE 247: note = Tnp_P4
  SITE 260: note = Tnp_P5
MATIGIDVSKKKLDLCWLRDAQAGKVKTRVFPNAHDHYPALLSWLLKQIDASPGELQVYLEATGIYHEPLAYWLHQSGVTVYVLNPARVSYYARSLGDQGKSDKKDSKRIVHFAQANPELTPWQPEPEEVRTLKQLAKRLETVQKDIQREQNRLEKAQFNRDTQAEHSITHVLALLRREAKRLIKEVDDHIDRHDGLKRDRRLLESIPGIGEVLSVHLLVTLRSRRFKSGRQVAAFMGLVPVEWTSGSSVRHAPRLSKNGDPALRQKLYMGAVVAMRHNPSIRRQYQRLCAAGKRKMSALGAAMRKLVHIAYGVLAHQKEYEPQPT

SEQ ID NO: 18553 - protein, 418 aa, unidentified
  source 1..418: note = protein_da2a550
  REGION 10..172: note = RuvC_domain
  SITE 13: note = RuvC_P1
  SITE 67: note = RuvC_P2
  SITE 113: note = RuvC_P3
  SITE 115: note = RuvC_P4
  SITE 118: note = RuvC_P5
  REGION 292..378: note = Tnp_domain
  SITE 299: note = Tnp_P1
  SITE 329: note = Tnp_P2
  SITE 337: note = Tnp_P3
  SITE 338: note = Tnp_P4
  SITE 351: note = Tnp_P5
MSQELTTLYIGIDVSKESNFVYITNFNQSFNQSFNTLNNVHGAELIETKLLEILHNVEYSNIICVLESTGIYSAHIATYLSASKKLFQYNVLVYCINPKISRNYRASFSDMDKTDPKDSYILADIARVGRTKTLHPFKGSQKLALQRLTRHRVHLAELLSKEKTYALTNIYLKFSEFGKKDSKFSSDKWGNTAISILEEFSSPEEIIKTSLEDLVAFVIKTSRNRFSSPTEVAKLIKKAANASYRLDKVAYEPINHAISSSLILIRCYEDEIKKINKAIESLIKDFADDQYLSLKSIPGIGIVYASGIISEIGSVHQFRNEEALAKYAGITWRKNQSGNFEADTTKMTKTGNHYLRYYLIEAANSVKNYVGTYNDFYHKKFNEVTVHQHKRALALTSRKLVKLIYGLLSKGQLYNKNY

SEQ ID NO: 18554 - protein, 315 aa, unidentified
  source 1..315: note = protein_151e696
  REGION 1..88: note = RuvC_domain
  SITE 26: note = RuvC_P3
  SITE 28: note = RuvC_P4
  SITE 31: note = RuvC_P5
  REGION 191..276: note = Tnp_domain
  SITE 199: note = Tnp_P1
  SITE 229: note = Tnp_P2
  SITE 237: note = Tnp_P3
  SITE 238: note = Tnp_P4
  SITE 251: note = Tnp_P5
MGFPTYVINPLHTNLYRKGLSLRKTKTDKVDASAIAMMLMTDRTLKPYSETSYHNEELKSLTRYRFDKVHERSKLKASLARLVNILFPELEGLVPSLHLNSVYTLLEELPGATYIADCHLTHLKKLLEASSKGRYGRDKAIEIRNTAIDSIGAPMAAKSMELVHTIRLVRMLSEEIEEIEESIKSIMDELHSPIMTIPGISYRMGAMIIAEVGDFKCFDNTDRILAYAGLSPSTYQSGQLDSSYSHMEKRGSRYLRYALFNATKFVCKWDESFGIYLGRKISEGKHYNVAISHATKKLTRTIYRMELTGEAYSPR

SEQ ID NO: 18555 - protein, 402 aa, unidentified
  source 1..402: note = protein_31ba81d
  REGION 10..164: note = RuvC_domain
  SITE 13: note = RuvC_P1
  SITE 61: note = RuvC_P2
  SITE 101: note = RuvC_P3
  SITE 103: note = RuvC_P4
  SITE 106: note = RuvC_P5
  REGION 271..356: note = Tnp_domain
  SITE 279: note = Tnp_P1
  SITE 308: note = Tnp_P2
  SITE 316: note = Tnp_P3
  SITE 317: note = Tnp_P4
  SITE 329: note = Tnp_P5
MVTDDIDVFIGIDVGKSDHWATALTRDGKKLFDRALPNDEARLRDLYDRLGSHGRVLVVVDQPATIGALAVAVAQDEGLAVGYLPGLSMRRIADLTPGNAKTDARDAAVIAEAARTMPHTLRAISSSDEDAAALGMLTGFDLDLARQVNQISNRIRGLYTQIHPALEKVLGPWLEHDAVLEVIASWPTPAALRKAGRGSVDAKLEAHGARRHTTWANAIIDALDSQSVVVVGTDAAGVVLPHLARQLAALHAQRADVAAKVEALVEAHPLYEVLTSMPGIGVRTAAVFIAETLGRTFETGAHLASYAGLTPVTRRSGSSIRGEYVSHAGNKRLKRAMFLSAFASLRSDPTSRAYYDRKITQGKRHNQALIALAHRRILTLHAMIRDGALYNPNPTTHLPTAA

SEQ ID NO: 18556 - protein, 349 aa, unidentified
  source 1..349: note = protein_e2a48d9
  REGION 6..152: note = RuvC_domain
  SITE 9: note = RuvC_P1
  SITE 53: note = RuvC_P2
  SITE 91: note = RuvC_P3
  SITE 93: note = RuvC_P4
  SITE 96: note = RuvC_P5
  REGION 211..298: note = Tnp_domain
  SITE 219: note = Tnp_P1
  SITE 249: note = Tnp_P2
  SITE 257: note = Tnp_P3
  SITE 258: note = Tnp_P4
  SITE 270: note = Tnp_P5
MTIIAVGIDLAKHVFAVHGVDEAGRAALVRPSVARDKLHELIATLPPCLIGMEACTGAHHWARLFMGHGHSVRLIAPKFVTPYRLSGKRGKNDAADAQAICEAVQRPQMRFVPVKSEAQQAQLMVHCARQGFVKERTATINRIRGLLAEFGHILAAKADTVRREAAKLLEALPGQSNRVIGDLLSQTHHLDQRIAEYDALIRTMAREDSRCAELQRLSGLGQITATALRATIGNGAEFKCGRQVAAWLGLVPGQYSSGGKTRLGRITKAGDTYLRTLLVLGARAMLAAAQRAVAEEQENPAKPASQLAHWAAALAARRGHGKAVVAIAAKNARLAWAMLRTGEDFRMPA

SEQ ID NO: 18557 - protein, 360 aa, unidentified
  source 1..360: note = protein_bb758a3
  REGION 7..149: note = RuvC_domain
  SITE 10: note = RuvC_P1
  SITE 53: note = RuvC_P2
  SITE 88: note = RuvC_P3
  SITE 90: note = RuvC_P4
  SITE 93: note = RuvC_P5
  REGION 209..295: note = Tnp_domain
  SITE 217: note = Tnp_P1
  SITE 247: note = Tnp_P2
  SITE 255: note = Tnp_P3
  SITE 256: note = Tnp_P4
  SITE 268: note = Tnp_P5
MQNVTLVGIDLGKHSFHLHGQDRHGKAVFRKKVNRKQLIEFLATLQACTVVMEACAGAHCMARKLETLGHQVKLISPQFVRPFVKGNKNDFVDAEAICEAASRPSMRFVTPKTESQQTLSALHRVRESLIRDRTKAVNQIHGFLLEFGISLPVGMAVINRLPAVLAEHPLPPHLVGILERLHAHFKYLGEQIGEIDRELGQQLAEDDLGQRLLSIPGVGPITASALAAEMGDGKQYGCCRDFAASLGLVPRQYSTGGRANLLGISKRGDKNIRRLLVQCARAYMQRLERQTGRLADWVRAMLMRRHSNVVACALANKLARIATPHSRPRQQLNTPELPPYHHCCIEAHSPGFATADILMT

SEQ ID NO: 18558 - protein, 424 aa, unidentified
  source 1..424: note = protein_4b0b2ad
  REGION 33..187: note = RuvC_domain
  SITE 36: note = RuvC_P1
  SITE 84: note = RuvC_P2
  SITE 124: note = RuvC_P3
  SITE 126: note = RuvC_P4
  SITE 129: note = RuvC_P5
  REGION 294..378: note = Tnp_domain
  SITE 302: note = Tnp_P1
  SITE 331: note = Tnp_P2
  SITE 339: note = Tnp_P3
  SITE 340: note = Tnp_P4
  SITE 352: note = Tnp_P5
MDAETNRRRTANVLTIWRPNDRNRHYESVDVFIGVDVGKGEHHAVALSCTGKRLFDKALPNDETRLRTLITELQAHGQLLLVVDQPATIGALPVAVARDGGILVAYLPRLSMRRITDLHAGEAKTDARDAAIIAEAARCMPHTLRSLKLADEQVSELTMLCGFDNDLAAQITQTSNRIRGLLTQIHPALERVLGPRLDHPAVLDLLERYPSPAKLASVTEKQLANRLTKLAPRLGKNLAAEIVLALSEQAVVVPGTNAAMIVLPRLARQLAGLRCQREEVSQEVERLVQAPPLYPVLSSMPGVGVRTAARLLTEVACKAFASAAHLAAYVGLAPVTHRSGSSIRGEHPSRRGNKILKRALFLSAFAALRDPISRTYYTRKINQGKRHNQVLIALARRRCDVLFAMLRDGSFYCQQSIKLPLTTT

SEQ ID NO: 18559 - protein, 311 aa, unidentified
  source 1..311: note = protein_803bbdf
  REGION 6..155: note = RuvC_domain
  SITE 9: note = RuvC_P1
  SITE 52: note = RuvC_P2
  SITE 92: note = RuvC_P3
  SITE 94: note = RuvC_P4
  SITE 97: note = RuvC_P5
  REGION 188..272: note = Tnp_domain
  SITE 196: note = Tnp_P1
  SITE 225: note = Tnp_P2
  SITE 233: note = Tnp_P3
  SITE 234: note = Tnp_P4
  SITE 245: note = Tnp_P5
MTNDTIGVDISKDHLDAHRMSDGESRRFANDKAGHRAFVGWAGRCGARIVYEPTGPYHRAFERRLAEAGFALVKVNPRQARRFAEATGRLAKTDRLDAAMLARMGTLLDLEARPVRSPILNDLKDLHMAREALVKNRTAAKNRAKTLALVILKRHNAEQLRQIERQMAAIEAEIKALIKSDPGLARRFDILVSIPSVSTITAFALIIDMPELGTLENGRAASLAGLAPVARQSGQWTGRAFIRGGRANVRQALYMPALVAMRFNPNLKVKYDQLIAVGKAPKVAITAIMRRLVVLANALLRDGRKWAQNLP

SEQ ID NO: 18560 - protein, 405 aa, unidentified
  source 1..405: note = protein_c46f838
  REGION 4..160: note = RuvC_domain
  SITE 7: note = RuvC_P1
  SITE 57: note = RuvC_P2
  SITE 97: note = RuvC_P3
  SITE 99: note = RuvC_P4
  SITE 102: note = RuvC_P5
  REGION 274..361: note = Tnp_domain
  SITE 282: note = Tnp_P1
  SITE 312: note = Tnp_P2
  SITE 320: note = Tnp_P3
  SITE 321: note = Tnp_P4
  SITE 334: note = Tnp_P5
MNAVGIDVSKGRSTVTIRRPGDIVIMPPRDIPHTQSEINALIEQIRGLDGETKVCMEHTGRYYEPVATWLSDAGIFVSAVNPILIKDFGDDSLRTPKTDKADSKKIARYTLDRWAKLPQYGSMDKARNQLKTMNRQFGFYMAQKTATKNNLIALLDQTYPGANDFFDSPARSDGSQKWVDFIATYWHVDCVCSKSLKAFTEHYQNWCRRKGYNFSADKAEKIYRLSSDLIAVFPKDNNTKMLIRQAVTMLDTASQTVESLRLEMDEIAATLPEYPVVMAMNGVGPTLGPQLMAEIGDVTRFTHRGALTAFAGVDPGRDESGQRVRKSVPTTKKGSPYLRKTLFQIMDGLIKRSPADDAVYAFMDKKRAQGKPYYVYMTAGANKFLRIYYGRVKEYLATLADSEET

SEQ ID NO: 18561 - protein, 323 aa, unidentified
  source 1..323: note = protein_10d95d6
  REGION 8..152: note = RuvC_domain
  SITE 11: note = RuvC_P1
  SITE 52: note = RuvC_P2
  SITE 92: note = RuvC_P3
  SITE 94: note = RuvC_P4
  SITE 97: note = RuvC_P5
  REGION 191..278: note = Tnp_domain
  SITE 199: note = Tnp_P1
  SITE 229: note = Tnp_P2
  SITE 237: note = Tnp_P3
  SITE 238: note = Tnp_P4
  SITE 251: note = Tnp_P5
MTKDIKYFGIDISQLVFDVTDSDGNYYQFKNNASGYKKFTKLLNSGSYCVMEATGYYHYQLAYYLLENGIKVSVENPLAVKRFIQMKLSKIKTDKSDSKLICDYAHQVDLKLWKGNTKNEMECLQITRALSVYTKQSTMLKNKLHGEAVLGQPSKVVVSSLKRSLKQLDKEMKNLEDKLLILVKQSHQDLLTRLETIPGIGRKTAIMLVVLTGGFERFSSGSELCSYAGLTPIIRQSGSSVNGRARISKIGNQKLRNLLFMCSFNACKYNKACRDLYERIVAKGKSKKLALIAVCNKLLKQAFAIAKSGLIYDDTYRSTLVKN

SEQ ID NO: 18562 - protein, 344 aa, unidentified
  source 1..344: note = protein_81b8085
  REGION 7..149: note = RuvC_domain
  SITE 10: note = RuvC_P1
  SITE 53: note = RuvC_P2
  SITE 88: note = RuvC_P3
  SITE 90: note = RuvC_P4
  SITE 93: note = RuvC_P5
  REGION 212..301: note = Tnp_domain
  SITE 220: note = Tnp_P1
  SITE 250: note = Tnp_P2
  SITE 258: note = Tnp_P3
  SITE 259: note = Tnp_P4
  SITE 271: note = Tnp_P5
MSEVITIGVDLAKNIFQVHGIDAEGAVIFCRQLRRTQMLPFFKKQPPCLVGMEACATSHHWARQLIELGHEVKLMPPHYVKPYVKRNKNDMADAEAICEAVTRPTMRFVSVKSMEQQSVLMLHRTRNLLVRQRTMLINAIRAHMAEFGIVAPGGVPQVKKLLSIIADTDDARLPPIARTCLESLARHFLSLHQEIHVAEKHIHAWHRSNDASRRLETIPGIGPIIASALTASITDPEVFKNGRELAAWIGLVPRQNSTGGKQRLGKISKQGDQYLRWLLVAGAMSVILHAKRRGTTNLPWLANIIARKPAKVAAVALANKNARIVWALLRQGGTYEKPATTPAI

SEQ ID NO: 18563 - protein, 340 aa, unidentified
  source 1..340: note = protein_58c202f
  REGION 6..148: note = RuvC_domain
  SITE 9: note = RuvC_P1
  SITE 52: note = RuvC_P2
  SITE 87: note = RuvC_P3
  SITE 89: note = RuvC_P4
  SITE 92: note = RuvC_P5
  REGION 210..298: note = Tnp_domain
  SITE 218: note = Tnp_P1
  SITE 248: note = Tnp_P2
  SITE 256: note = Tnp_P3
  SITE 257: note = Tnp_P4
  SITE 269: note = Tnp_P5
MNIKRIGLDLAKQVFQLHAVDHQERIVLRKTLHRARMLTFFTRLEPCLIGIEACGSSHYWARELTRLGHTVRIIPPQFVKPYLKGNKNDANDAEAICEAVSRPGMRYVAIKSEAQQSMQAEHRVRARLIHDRTALSNEIRGMLGEFGFVLPAGLSALRKALPEIFSQQEKWDNRFIRLLSELTEELQALDERLNRYDRRLKQLAQEDERIRRLQEISGIGPVTASALVAAVGDAKQFKSGREMAAWLGLVPRQHSSGGKTKMGHISKRGDSYLRTLLIHGARAVLNACDHKEDRRSRWLQSVAERRNRNIATVAMANKNARIAWSVLSRGGRVSCDVIQT

SEQ ID NO: 18564 - protein, 399 aa, unidentified
  source 1..399: note = protein_7b8744d
  REGION 4..160: note = RuvC_domain
  SITE 7: note = RuvC_P1
  SITE 57: note = RuvC_P2
  SITE 97: note = RuvC_P3
  SITE 99: note = RuvC_P4
  SITE 102: note = RuvC_P5
  REGION 275..363: note = Tnp_domain
  SITE 283: note = Tnp_P1
  SITE 313: note = Tnp_P2
  SITE 321: note = Tnp_P3
  SITE 322: note = Tnp_P4
  SITE 335: note = Tnp_P5
MISVGIDISKEKSTVCILKPYGEIISMPFEIKHAEKALSELATMLLRFNEEVKVVMEATGIYHLPVLSYLQEKGIFVAVINPFEMKQYRNQGLRSVKTDKKDAITIANYGIDYWFRLRKYEVTEEIYQELKILGRQYSHYMCMRIESVQSLTHLLDYTMPGIKGLLKGWQDANGKDKLSDFVEAYWHFDNITKMSEENFVNSYVNWAKEKGYHQSQNKAVKIYSLAKEGIPTLSAEMESTKIMLQQAVSVLKQVNTTLTIILARMKDLAKRLPEYPIVRAMGGVGDVLAPKLIAEIGDIRRFHSGKALIAYAGIDAPPYQSGQFVGTNRKISKRGSSTLRKIGYETMRVLKTHRAPEDSAVYWYILKKEAEGKAKRVAKIAGLNKFLRIYYARVKEVYQ

SEQ ID NO: 18565 - protein, 412 aa, unidentified
  source 1..412: note = protein_6ecb6c4
  REGION 4..170: note = RuvC_domain
  SITE 7: note = RuvC_P1
  SITE 67: note = RuvC_P2
  SITE 107: note = RuvC_P3
  SITE 109: note = RuvC_P4
  SITE 112: note = RuvC_P5
  REGION 278..364: note = Tnp_domain
  SITE 286: note = Tnp_P1
  SITE 317: note = Tnp_P2
  SITE 325: note = Tnp_P3
  SITE 326: note = Tnp_P4
MLFVGDDWAEDHHDVEIVDEAGRLLARRRLPEGLQGVTRLHALIAEQMPDDWADLEPGAATGRVKVGIETDRGPWVGALVAAGYEVFGINPLSVARYRERHSTSGAKSDAADAHLLAEIVRLDRAHHRPVAADSAEAEAIKLTARTHQSLIWDRTRHVLRLRSTLREYFPVALQAFPDLDAPDALELLGRAPDPDQAARLSHTTITAALRKARRRHLEDRAHELQRLLRTQGLRQPPVLQDAYAAVVASEVAVIATLNMQIERLGAVVGEYFGRHRDAEIYTSLPGLGVILAARILGEFGDDPDRYADAKARKNYAGTSPITKASGTKKVVLARYARNRRLGDALQQWAFCSLRGSPGAAAYYQQLRARNIGHQAALRQLANRLVGILHGCLKTHTSYDENTAWAHIQTSAA

SEQ ID NO: 18566 - protein, 339 aa, unidentified
  source 1..339: note = protein_cf9716f
  REGION 6..147: note = RuvC_domain
  SITE 9: note = RuvC_P1
  SITE 52: note = RuvC_P2
  SITE 87: note = RuvC_P3
  SITE 89: note = RuvC_P4
  SITE 92: note = RuvC_P5
  REGION 210..297: note = Tnp_domain
  SITE 218: note = Tnp_P1
  SITE 248: note = Tnp_P2
  SITE 256: note = Tnp_P3
  SITE 257: note = Tnp_P4
  SITE 269: note = Tnp_P5
MNRTAVGVDIAKNVFQVHYIDQETGEIVNKPIKRAKFLEHFANRAPCLIRIEACGGAHHWARQLTKMGHEVKLMPGEFVKAFNVRNKSDAADARAIWLAVQQPGKPVAVKTEMQQAMLGLHRMRQQLLKFRTMQTNSLRGLLTEYGEVMSKGRSKLDKEIPVVLERLAERLPAVIIDTFREQWNGLAKLDEQVAQIERRMREWKKEDKSVKAIGDIPGVGLLTATAAVAMMGDPKAFSSAREFAAWVGIVPRQTGSGGKVNLHGISKRGDTYLRTLLIHGARSVLEHAKEPGEWVEQMKKRRPKNVVVVALANKMARTIWAVLAHNRPYRKDYVSVNPA

SEQ ID NO: 18567 - protein, 399 aa, unidentified
  source 1..399: note = protein_e4d4342
  REGION 9..163: note = RuvC_domain
  SITE 12: note = RuvC_P1
  SITE 60: note = RuvC_P2
  SITE 100: note = RuvC_P3
  SITE 102: note = RuvC_P4
  SITE 105: note = RuvC_P5
  REGION 270..355: note = Tnp_domain
  SITE 278: note = Tnp_P1
  SITE 308: note = Tnp_P2
  SITE 316: note = Tnp_P3
  SITE 317: note = Tnp_P4
  SITE 329: note = Tnp_P5
MTSSYGVFLGLDVGKDAHHAVGLDPEGKRLHDGPLPNSEPKLRALFDKLAQHGPLLVVVDQPATIGALPVAVARATGHQVAYLPGLAMRRIADLYPGKAKTDARDAFIIADAARSLPHALRPVDVGDEALAELDVLVGFDDDLASEATRLVNRIRGLLTGIHPALERTIGPRISHPAVLEILSRCGGPTGIAKAGRRKLAAIAKVHAPRMGDKLVEAIMTALGEQTVTVPGTAAADTVLPRLADSLRAVLQQRAQLATEVEEILDAHPLAGVLTSMPGIGVRTAARILLEIGDASNFASSGHLAAYAGIAPVTRSSGTSIKGEHPAHTGNRKLKRAFFLAAFAALSDPTSRAYYQRKRAEGKKHNAALICLARRRCDVIYAMLRNKTHYRHPAPTPAAA

SEQ ID NO: 18568 - protein, 342 aa, unidentified
  source 1..342: note = protein_c188ca6
  REGION 7..148: note = RuvC_domain
  SITE 10: note = RuvC_P1
  SITE 53: note = RuvC_P2
  SITE 88: note = RuvC_P3
  SITE 90: note = RuvC_P4
  SITE 93: note = RuvC_P5
  REGION 212..299: note = Tnp_domain
  SITE 220: note = Tnp_P1
  SITE 250: note = Tnp_P2
  SITE 258: note = Tnp_P3
  SITE 259: note = Tnp_P4
  SITE 271: note = Tnp_P5
MGQVTTIGVDIAKSVFQVHGVDATGEVILRRRLTRARVVPFFAKLAPCLVGIEACATSYHWARELRKLGHEVRLMPPSYVKAYVKRQKNDTADAEAICEAVTRPTMRFVEVKSPEQQSIMVVHGTRTMLMRQRIQLSNAIRGHMAEFGVVAPVGREGLLTLTDTLHDEADDRVPAEARHCLQMLAAQLRLVNAQILENDRRIRLSARATDVGRRLMGIPGVGPVLASAFVATVPDPHAFRSGRNLAAWIGLVPRQNSSGGKERLGGITKQGNRYLRQLLFVGAMAVIRYAERHGTRRPWLVRLLARRTTKIAAAALANKTARMVWAIMTSGQSYREPELRTA

SEQ ID NO: 18569 - protein, 320 aa, unidentified
  source 1..320: note = protein_97c7e1c
  REGION 8..163: note = RuvC_domain
  SITE 11: note = RuvC_P1
  SITE 56: note = RuvC_P2
  SITE 96: note = RuvC_P3
  SITE 98: note = RuvC_P4
  SITE 101: note = RuvC_P5
  REGION 195..279: note = Tnp_domain
  SITE 203: note = Tnp_P1
  SITE 232: note = Tnp_P2
  SITE 240: note = Tnp_P3
  SITE 241: note = Tnp_P4
  SITE 252: note = Tnp_P5
MSATSVVVGIDVAKTHVDVAALGTVFETQRFTNDVDGHLALAAALAPLGAVLVVMEATGGYEAALACALQAAGLVVAVVNPRQARDFAKSMGNLAKTDRIDARMLAEFAAVVARRDDLAHFIRPLANAEQQALAALVTRRRQLLTMLLGERQRLQLAMALVRPSIEAMIDAIRAQLDDVEAQMVAHVREHFTELDQLLQSASGIGPVASATMIAELPELGRLNRRQIAALVGVAPIANDSGNSRGRRRVQGGRFEIRRVLYMATLSAARHNPSIKAFYHRLLAAGKFPKVALVACMRKLLTTLNAMVRTHQPWDKSLHRA

SEQ ID NO: 18570 - protein, 325 aa, unidentified
  source 1..325: note = protein_1d2d873
  REGION 10..160: note = RuvC_domain
  SITE 13: note = RuvC_P1
  SITE 63: note = RuvC_P2
  SITE 103: note = RuvC_P3
  SITE 105: note = RuvC_P4
  SITE 108: note = RuvC_P5
  REGION 199..283: note = Tnp_domain
  SITE 207: note = Tnp_P1
  SITE 236: note = Tnp_P2
  SITE 244: note = Tnp_P3
  SITE 245: note = Tnp_P4
  SITE 256: note = Tnp_P5
MVHERAEAYAGVDVSKERLEVCVRRDREARVGEDTFGISNDPAGTQTLLARLLQERPALVILEATGGFERPVAAALAAAGLPVAVVNPRQARDFARATGRLAKTDRIDAQILARFAQAVRPAPRPVPEEEAQALAEITARRRQVVGMLTAEKNRLGAATTKPVRKRLEAHVRWLEKELSRTDRDLEEAIAKSPTWRENEKLLRSVPGVGPVVARTLLAELPELGSLRPKQLAALVGVAPLNRDSGAFRGRRAVWGGRATVRAALYMGALVATRHNPQIKEFYERLLGAGKPRKVALVACMRKLLTILNAMLKNRTPWRTPQTRAP

SEQ ID NO: 18571 - protein, 338 aa, unidentified
  source 1..338: note = protein_9e9655c
  REGION 6..152: note = RuvC_domain
  SITE 9: note = RuvC_P1
  SITE 53: note = RuvC_P2
  SITE 91: note = RuvC_P3
  SITE 93: note = RuvC_P4
  SITE 96: note = RuvC_P5
  REGION 211..297: note = Tnp_domain
  SITE 219: note = Tnp_P1
  SITE 249: note = Tnp_P2
  SITE 257: note = Tnp_P3
  SITE 258: note = Tnp_P4
  SITE 270: note = Tnp_P5
MAILYVGIDLAKNVFALHAVDEAGHAVLVRPSVPRAKLMELVASLPACTIGMEACSGAHHWARQFMALGHTVRLIAPKFVVPYRLSGKRGKNDAADAAAICEALQRPQMRFVPLKSEAQQAQLTVHRARQGLVEARTATLNRMRGLLSEFGVVLPLKAATVKRQAAAVLEELPGQANWVIGDLLSEVHHLDERIAQYDRLIAQMAKEDARAQQLMRLDGVGETTATALVATIGSGHEFKGGRQLAAWLGLVPGQYSSGGKARLGRITKAGDPYLRSLLVMGARALLNAAKAKTDSVSRWAIALAERRGYWKAIVAIAAKNARMAWAVLDRGERFVMPS

SEQ ID NO: 18572 - protein, 332 aa, unidentified
  source 1..332: note = protein_868635d
  REGION 23..166: note = RuvC_domain
  SITE 26: note = RuvC_P1
  SITE 69: note = RuvC_P2
  SITE 109: note = RuvC_P3
  SITE 111: note = RuvC_P4
  SITE 114: note = RuvC_P5
  REGION 209..293: note = Tnp_domain
  SITE 217: note = Tnp_P1
  SITE 246: note = Tnp_P2
  SITE 254: note = Tnp_P3
  SITE 255: note = Tnp_P4
  SITE 266: note = Tnp_P5
MRPVWTAEQKEEGMNKVSHEQIIGIDVSRDWLDVHCLPETRRLRLPNSDEGHAQLVCLAQSTHALVCFEATGGQEWRLWTALDAAGIATRQLPPAQIKAFAASRGTRAKTDRIDAELIARFMAFRPDAGRELPHGKLRLLRALASKRAQLVETRKRLLAQIRAHEKLGTDGIFTEVDAELRELLDRQIGTLEDQIAQTIAADQGLAKTADILRSVPGIGPVASTILIAEMPELGQLSGEQAAALTGLAPIAHDSDAMRGKRAIGGGRRQVRHVMFQAALVASHHNPHLKIFADRLRDAGKPHKVIITAVARKLVTIANALLKSRQNWSAQTA

SEQ ID NO: 18573 - protein, 345 aa, unidentified
  source 1..345: note = protein_a7f5b39
  REGION 6..147: note = RuvC_domain
  SITE 9: note = RuvC_P1
  SITE 52: note = RuvC_P2
  SITE 87: note = RuvC_P3
  SITE 89: note = RuvC_P4
  SITE 92: note = RuvC_P5
  REGION 211..297: note = Tnp_domain
  SITE 219: note = Tnp_P1
  SITE 249: note = Tnp_P2
  SITE 257: note = Tnp_P3
  SITE 258: note = Tnp_P4
  SITE 270: note = Tnp_P5
MNITTVGIDLAKNVFQVHAVDERGKVVLRKQLRRGQVAEFFVNLPPCLIGMEACASSHHWGRTLERFGHTVRLMAPQFVKPYVKTNKNDAADAEAICEAVGRPNMRFVPIKSIEQQAVLSVHRVRQGFVKARTAQANQIRSLLGGFGLVIPQGIRHIAQRVPALLEDASNELPLAFRQLIERLAEHLKDLDQQVREFERQIVAWHRSSDLSRELERIPGIGPLAATALVASIADARSFDNGRQVSAWLGLVPRQSSSGGKSTLLGISKRGNVYLRTLLIHGARSAILAAKRQSECKNVWLTNLLNRRHANIAAVALANKNVRTVWALLAHGRKFQADYVPTRMAA

SEQ ID NO: 18574 - protein, 321 aa, unidentified
  source 1..321: note = protein_65de713
  REGION 8..154: note = RuvC_domain
  SITE 11: note = RuvC_P1
  SITE 53: note = RuvC_P2
  SITE 93: note = RuvC_P3
  SITE 95: note = RuvC_P4
  SITE 98: note = RuvC_P5
  REGION 189..273: note = Tnp_domain
  SITE 197: note = Tnp_P1
  SITE 226: note = Tnp_P2
  SITE 234: note = Tnp_P3
  SITE 235: note = Tnp_P4
  SITE 247: note = Tnp_P5
MQVNPVFVGVDVAKATLVICIHGTATRVKLANEEAEIERWLETLPANVVVAMESTGRYHAALARQVHRSGREAYVLNARDVYFYAKGIGTRSKTDRVDAQVIARYVAEHHGALHAWKPGSDAQVALQTLLQRRARLVTHRVAVRQLLRGVEGLDEPAQDLEEQFERLLEQIDRQVDTWVASEPDLARRCRLLRTITGIGLQSSALLTALLSRIPFANGDALVAYSGLDPRANDSGPKNGRRRLSKRGNADLRRQLYLAAFSASHSKALGPLYRSLKAKGFKTTEAMVILARKLLRVVWAVWKSGKPFDPTRFASPVTCAQT

SEQ ID NO: 18575 - protein, 343 aa, unidentified
  source 1..343: note = protein_188b65d
  REGION 6..149: note = RuvC_domain
  SITE 9: note = RuvC_P1
  SITE 54: note = RuvC_P2
  SITE 89: note = RuvC_P3
  SITE 91: note = RuvC_P4
  SITE 94: note = RuvC_P5
  REGION 213..300: note = Tnp_domain
  SITE 221: note = Tnp_P1
  SITE 251: note = Tnp_P2
  SITE 259: note = Tnp_P3
  SITE 260: note = Tnp_P4
  SITE 272: note = Tnp_P5
MNITRVGVDIAKSVFHVHGVDRHDQVHWQGKYSRETWLEALSKRVPTEAEIGMEACASSHHWARELQQRGYRVRLVAAHFVKPYVKSNKNDRVDAEAICEAMSRPSMRFVAVKTATQQDIQAAHRIREELVGQRTAKANQIRGLVGEYGLVAPTGVQRLRCALPRWLEDAENGLSEAFRALLAGLAEDLRYLEDRIAILDERIARSVKDDPVAQRLLALRGIGPLTASALSGALGDGRAFRRGRDFAASLGLTPRQHSTGGRDRLLGISKRGDSYVRKLLVHGARAVLRHAAAKNDALSQWLNALAARKHINVAIVALANKTARVAWAVTRHETTYDPILAAG

SEQ ID NO: 18576 - protein, 297 aa, unidentified
  source 1..297: note = protein_3972111
  REGION 1..51: note = RuvC_domain
  REGION 159..245: note = Tnp_domain
  SITE 167: note = Tnp_P1
  SITE 198: note = Tnp_P2
  SITE 206: note = Tnp_P3
  SITE 207: note = Tnp_P4
  SITE 218: note = Tnp_P5
MRLDRDHHRLIAGDTDLAEAVKLVARAHQTAIWERTRHVLRLRSTLLQYFPAAVEAFEDLAATDSLILLGRAPSPMRAAKLTRAQIDSALRAARRHHIETKTPALMALLRAPALQQPPTIDGAFAAVVLGEVRILTALNMQIAELQLVVADHFSRHPAAEIYLSQPGCGPILAARVLGEFGDDADRFTDARGRKNYSGQSPITRASGKKSVVMARYATNRRLGAALHLQAFSALTGSPGARAYYDELRARKIGHHAALRQLANRLVGILHGCLKTATKYDEDTAWQHRRPDIQTVAA

SEQ ID NO: 18577 - protein, 400 aa, unidentified
  source 1..400: note = protein_5d46c1b
  REGION 11..166: note = RuvC_domain
  SITE 14: note = RuvC_P1
  SITE 63: note = RuvC_P2
  SITE 103: note = RuvC_P3
  SITE 105: note = RuvC_P4
  SITE 108: note = RuvC_P5
  REGION 273..358: note = Tnp_domain
  SITE 281: note = Tnp_P1
  SITE 311: note = Tnp_P2
  SITE 319: note = Tnp_P3
  SITE 320: note = Tnp_P4
  SITE 332: note = Tnp_P5
MHHESEIDVYLGLDVGKGEHHGTAITPAGKRVFDKPLPNSETRLRELFTKLQARHGTVLVVVDQPASIGALPLAVARDSGCRVAYLPGLTMRRIADLYPGESKTDARDAAIIADAARTMPHTLRELAPDDETVAELNMIIGFDDDLAGEVTRIKNRMRGLLTQIHPSLERILGPRLDHPAVLFLLERYGSPAQLRKAGRRRLITMLRPKAPRMAERLVEDIFTALDEQTVIVPGTDAAALIIPSLAGSLTAVLDQRKLLAARIEELLEAHPLSQVLISMPGIGVRTAARILVDVGDGSGFATAGHLAAYAGLAPATRRSGSSIRSEHPSKRGNRQLKRAFYLAAFASLSQPDSRAYYDRKRREGKHHVAAIICLARRRTDVLFAMLRDGTFYQPPTTATA

SEQ ID NO: 18578 - protein, 340 aa, unidentified
  source 1..340: note = protein_8ba83ce
  REGION 7..149: note = RuvC_domain
  SITE 10: note = RuvC_P1
  SITE 53: note = RuvC_P2
  SITE 88: note = RuvC_P3
  SITE 90: note = RuvC_P4
  SITE 93: note = RuvC_P5
  REGION 212..299: note = Tnp_domain
  SITE 220: note = Tnp_P1
  SITE 250: note = Tnp_P2
  SITE 258: note = Tnp_P3
  SITE 259: note = Tnp_P4
  SITE 271: note = Tnp_P5
MNEVITIGVDLAKNVFQVHGVDDEGIVVIRRQLRRSRVLPFFEKQPPCLVGMEACATAHHWARQLIGLGHAVKLMPPAYVKPYVKRGKNDAADAAAICEAVTRPTMRFVSVKSVEQQGVLMVHRTRELLVRQRTMLINAIRAHMAEFGIVAPVGVPQVKKLLAVIADADDDRLPPVARTCLESLAAQFLSLNDEIHAAEKRIHAWHRSNEASRRLETIPGIGPITASALAASITDPGVFKNGRELAAWIGLVPRQTSTGGKQRLGRISKQGNQYLRWLLVAGAMSVILHAKRRGTTNQAWLADMIARKPTKVAAVALANKIARVAWVVLMRGETYRPAAL

SEQ ID NO: 18579 - protein, 339 aa, unidentified
  source 1..339: note = protein_84b8ef3
  REGION 6..147: note = RuvC_domain
  SITE 9: note = RuvC_P1
  SITE 52: note = RuvC_P2
  SITE 87: note = RuvC_P3
  SITE 89: note = RuvC_P4
  SITE 92: note = RuvC_P5
  REGION 210..297: note = Tnp_domain
  SITE 218: note = Tnp_P1
  SITE 248: note = Tnp_P2
  SITE 256: note = Tnp_P3
  SITE 257: note = Tnp_P4
  SITE 269: note = Tnp_P5
MGYTTVGVDIAKNVMQMHWVESETGEVINRSIKRAAFLEHFANRAPCLIGMEACGGSQHWARRLIEMGHKVKLVPAKFAKAFNIGNKNDAADARAIWMAIQMPSKSVAVKTEAQQAVLALHRIRRQKLKFRTMQVNSLRGLLTEYGEVMGKSRAALDKAVPHVLARLADRLPAMLIESLREQWNDLENLDRQIADIERRLLNWMKENNACKAIAEIPGVGLLTATAAVATMGDAKSFRSGREFAAWLGLVPAQTGTGGKVQLLGISKRGDTYLRTLLIHGARSVLHHTKDPSNWLRQISLRRPSNVVAVALANKMARTIWAMLAHDRPYERAHISVKPA

SEQ ID NO: 18580 - protein, 267 aa, unidentified
  source 1..267: note = protein_9b91672
  REGION 2..76: note = RuvC_domain
  SITE 15: note = RuvC_P3
  SITE 17: note = RuvC_P4
  SITE 20: note = RuvC_P5
  REGION 138..224: note = Tnp_domain
  SITE 146: note = Tnp_P1
  SITE 176: note = Tnp_P2
  SITE 184: note = Tnp_P3
  SITE 185: note = Tnp_P4
  SITE 197: note = Tnp_P5
MIPPIYVKPYVKRQKNDANDAEAIAEAASRPTMRFVAVKSAEKQASGLALRTRDLLVRQKTQTINALRGHLAEYGLVAPSGTVHLNRLQAAISHPETELPAAVINHAQVLLDHIEMLAGKIDKLGAELRAGARQDPAAKRLMTIPGIGPITAMALTALSPDPSTFSKGRDFAAWTGLTPKQFSSGGKERIGRRSKMGQRDLRRLLVISAASVVRWAIRRGADQSGWLGQMLARKPRMLVTVALANKLARIAWALMTKNENYKNPAFA

SEQ ID NO: 18581 - protein, 343 aa, unidentified
  source 1..343: note = protein_d3efe78
  REGION 6..149: note = RuvC_domain
  SITE 9: note = RuvC_P1
  SITE 54: note = RuvC_P2
  SITE 89: note = RuvC_P3
  SITE 91: note = RuvC_P4
  SITE 94: note = RuvC_P5
  REGION 213..300: note = Tnp_domain
  SITE 221: note = Tnp_P1
  SITE 251: note = Tnp_P2
  SITE 259: note = Tnp_P3
  SITE 260: note = Tnp_P4
  SITE 272: note = Tnp_P5
MKLTRIGVDIAKQVFQLHGTDRTEHTVWRRRVPRERWIQALCEVAEPGCEVGMEACGGAHHWARQLQALGYRVKLIAPQFVKPYVKSNKNDANDAEAICEAMSRPTMRFVSVKTVPQQDIQAMHRIRRGLIEQRTAKGNQIRGLVAEYGLVAPKELSSLRRAIPCWMEDADNGLSASFRPLLDGLWRDLCVADDRIEELDRTIANLAHTDPDTRRLQHLRGVGPLVATALIALVGDATQFENGRHMAASLGLTPRQHSSGGKERLLGISKRGDAYVRALLVHGARSALRTAANKDDPLSRWAVRLSQRAHPNIACVALANKTARLAWALLRYQRDYQPAMAAA

SEQ ID NO: 18582 - protein, 333 aa, unidentified
  source 1..333: note = protein_0197a09
  REGION 25..166: note = RuvC_domain
  SITE 28: note = RuvC_P1
  SITE 72: note = RuvC_P2
  SITE 112: note = RuvC_P3
  SITE 114: note = RuvC_P4
  SITE 117: note = RuvC_P5
  REGION 207..292: note = Tnp_domain
  SITE 215: note = Tnp_P1
  SITE 244: note = Tnp_P2
  SITE 252: note = Tnp_P3
  SITE 253: note = Tnp_P4
  SITE 264: note = Tnp_P5
MVEGTKGSHHKEGSTKMSRHTMICAGIDTGKCKLDVALDQSPDRLQVDNDGEGHAELVTWLRKRRVERIGIEASGGYEQAVVSALRRNGFVVIVFQPAQVRAYAKYRLQRAKNDKIDAALIATCTAEAKKIYPPPDPRLAPFAELLTIIEQLTDDVARYKTRREMSRDEEARRFWTEEIARLKRLVSQRLKQLVTAIRQHRDLAHRLDLIASVEGVGLRTAVAILVRMPEIGRITRGQAAALVGVAPYDADSGGHVGSRHVEGGRERLRESLYTAALPAAFHWNPELIAIYRRLRAAGKPHKLALIACTRKLIIFVNTVVARDATWVPRVAIT

SEQ ID NO: 18583 - protein, 348 aa, unidentified
  source 1..348: note = protein_d7b6826
  REGION 6..147: note = RuvC_domain
  SITE 9: note = RuvC_P1
  SITE 52: note = RuvC_P2
  SITE 87: note = RuvC_P3
  SITE 89: note = RuvC_P4
  SITE 92: note = RuvC_P5
  REGION 211..297: note = Tnp_domain
  SITE 219: note = Tnp_P1
  SITE 249: note = Tnp_P2
  SITE 257: note = Tnp_P3
  SITE 258: note = Tnp_P4
  SITE 270: note = Tnp_P5
MEIDIIGIDLGKTVFHLVGVNRSGEVVVRRKCSRSQLLRFTANLRVRLMGMEACAGSHFLGRSLREQGHEVRLMPAQYVKPYVKTNKNDYIDAEAIAEAVGRPKMRFVPIKSDDQLDMQSLHRVRDRWVGRRTSVINQIRGLLLERGITFRKGRRYAVASLPGVLEDPENGLSGALRMLLAQLEGELRQLQSQIDEADALIARAADEHEPCRRLMAIPGVGPLTATAVVASIGNGASFGKGRSFATWLGLVPGQYSTGGKQKLLGISKRGNGYLRRLLVHGARAVVERRDKQSPGLSAWLNQLAARTHSNVVTIALANKTARIIWAVLSKAEAYRPPLLACPTNAVPR

SEQ ID NO: 18584 - protein, 346 aa, unidentified
  source 1..346: note = protein_0fdc33b
  REGION 6..148: note = RuvC_domain
  SITE 9: note = RuvC_P1
  SITE 52: note = RuvC_P2
  SITE 87: note = RuvC_P3
  SITE 89: note = RuvC_P4
  SITE 92: note = RuvC_P5
  REGION 211..298: note = Tnp_domain
  SITE 219: note = Tnp_P1
  SITE 249: note = Tnp_P2
  SITE 257: note = Tnp_P3
  SITE 258: note = Tnp_P4
  SITE 270: note = Tnp_P5
MQITAIGLDLAKNVFQVHGVNEHGIGVLRKQLRRDQVAAFFANLPTCLVGIEACASAHHWARKLQTMGHTVRLMAPQFVKPYVKSNKNDVADAEAICEAVTRPSMRFVPIKNIEQQAVLSLHRVRQGFVKARTAQANQIRGLLGEYGLIVPQGIAYLTQRVPSLIEDACNELPGSFRILIQRLLEHLKLLQQQVDEIESQIKAWHRSSEASSRLEQIPGIGPLTATALVASVGDAKNFDNGRQLAAWLGLVPRQHSSGGKPTLLGISKRGDSYLRTLLIHGARFVIYQAQARQRASAQGWLLKLIGRRNANVAAVALANKNARIVWALLARGEGFRPPCASVAAVA

SEQ ID NO: 18585 - protein, 277 aa, unidentified
  source 1..277: note = protein_a19a6bd
  REGION 7..148: note = RuvC_domain
  SITE 10: note = RuvC_P1
  SITE 53: note = RuvC_P2
  SITE 88: note = RuvC_P3
  SITE 90: note = RuvC_P4
  SITE 93: note = RuvC_P5
  REGION 211..274: note = Tnp_domain
  SITE 219: note = Tnp_P1
  SITE 249: note = Tnp_P2
  SITE 257: note = Tnp_P3
  SITE 258: note = Tnp_P4
  SITE 270: note = Tnp_P5
MVTVSTIGLNLAKNVFQAHGADAGGTVVFRKKLRRDQVLGFFAVQPACIVAMEACASAHYWAREIAKLGHTTRLIAAHYVKPFIKRQKIDAADAEAICEAAQRPTMRFVTIKSEEKQASAVVFRTCDLLVRQRTQVINALRGHLAEYGDVVRHGPAHVAKLIALVQDTRCDLPEAARAILTILVETLQALEAKLKVLDAEIARRAKQDDVARRLMTIPGVGAVVATAVEALAPPMEVFRAGRDFAAWLGLTPLQRSTGGKQRLGKMSKMASGRYAGF

SEQ ID NO: 18586 - protein, 338 aa, unidentified
  source 1..338: note = protein_a745e6c
  REGION 6..152: note = RuvC_domain
  SITE 9: note = RuvC_P1
  SITE 53: note = RuvC_P2
  SITE 91: note = RuvC_P3
  SITE 93: note = RuvC_P4
  SITE 96: note = RuvC_P5
  REGION 211..298: note = Tnp_domain
  SITE 219: note = Tnp_P1
  SITE 249: note = Tnp_P2
  SITE 257: note = Tnp_P3
  SITE 258: note = Tnp_P4
  SITE 270: note = Tnp_P5
MSIVTLGIDLAKNVFALHGIDATGRVVLARPSVTRGKLLELVASLPPCLIGMEACSGAHHWARLFAAHGHTVKLMAPKFVAPYRLSGKRGKNDAADAAAICEAVTRPAMRFVPVKNIHQQGELLVHRARQGFVVQRTATINRIRGLLSEFGIVLPLKAATVRREALAQLEDLPGWCNTVIGDLLSEVHRLDERIAQYDRHIEAIARQSKSAQQLMQLPGVGATTATALIAMIGSGHEFKSGRQLSAWLGLVPGQYSSGGKQRLGRITKAGDPYMRMLLILGARSVLQTAKDKSDAVSRWAVQLAARVGYWKAIVAIAAKNARMCWAVLARGESFKLPA

SEQ ID NO: 18587 - protein, 387 aa, unidentified
  source 1..387: note = protein_a648ca5
  REGION 4..159: note = RuvC_domain
  SITE 7: note = RuvC_P1
  SITE 58: note = RuvC_P2
  SITE 98: note = RuvC_P3
  SITE 100: note = RuvC_P4
  SITE 103: note = RuvC_P5
  REGION 263..350: note = Tnp_domain
  SITE 271: note = Tnp_P1
  SITE 301: note = Tnp_P2
  SITE 309: note = Tnp_P3
  SITE 310: note = Tnp_P4
  SITE 323: note = Tnp_P5
MIYVGIDIAKLNHFASAISSDGEILIQPFKFTNDYDGFHLLVSKLNSLEQDSLIIGLESTAHYGNNLVEFLVLHNYKVCVINPIQTSTMRKNNIRKTKTDKVDTYIIAKTLMMNPHRLFTTYDLDLLHLKNFGRFRQKLIKQRTRVKIQLTSYVDQSFPELQYFFKSGVLINTCYCLLKEASSPNAIASMHLTHLTHLLEKASHGHFGRDTANSLRILAQKSVGSSDSSISMQITQSIEQIELLDSQVDKIESEMKVIMLSLDSVIMTIPGIGYINGGMILGEIGDVTRFSNPGKLLAFSGLDPAVYQSGNFNASHTKMSKRGSGPLRYALVNAAHNTVRNNQTFHLYYDKKMSEGRTHYNALGHCAGKLVRIIYKMLTDNIPFNLE

SEQ ID NO: 18588 - protein, 327 aa, unidentified
  source 1..327: note = protein_018b4fd
  REGION 4..160: note = RuvC_domain
  SITE 7: note = RuvC_P1
  SITE 59: note = RuvC_P2
  SITE 99: note = RuvC_P3
  SITE 101: note = RuvC_P4
  SITE 104: note = RuvC_P5
  REGION 199..285: note = Tnp_domain
  SITE 207: note = Tnp_P1
  SITE 236: note = Tnp_P2
  SITE 244: note = Tnp_P3
  SITE 245: note = Tnp_P4
  SITE 258: note = Tnp_P5
MMYLGIDISKAKLDCTLLDPATDKRKTKAVSNDLKGFEALSAWLDKQGTAPGDVHGVMEATGVYHEQAALWLTDAGVRLSVVNPAQVRDFARGLAMRTKTDGTDSVALARYGALIQPEPWEAPPLEIRELKALITRLEALETDARRELNRREKALVAQAPALVRESLDNHLAALKQEIARLQQAINDHINRHPGLKADRERLLSIPAVGDKTANRMLAVLHSRKFRSADQVAAFLGLVPVEHQSGSSVQKRPRLAKNGDARTRAVLYMAAIVAAQYNPHVKALYTWLCAKGKTKMAALGAAMRKLVHLCFGVVKHQTFYQADWQPGG

SEQ ID NO: 18589 - protein, 268 aa, unidentified
  source 1..268: note = protein_cec045d
  REGION 1..77: note = RuvC_domain
  SITE 16: note = RuvC_P3
  SITE 18: note = RuvC_P4
  SITE 21: note = RuvC_P5
  REGION 139..223: note = Tnp_domain
  SITE 147: note = Tnp_P1
  SITE 177: note = Tnp_P2
  SITE 185: note = Tnp_P3
  SITE 186: note = Tnp_P4
  SITE 198: note = Tnp_P5
MIPPAYVKPYVRRGAKNDAADAAAICEAVTRPNMRFVPIKSVENQGFLMLHRARGLLVRQRTMTACAIRAHFAEFGIIVGQGRQRVDGLVDLLDDEALSLPANARLALAALVNQLKELDQQVEAIERELALIQRTNPMAKLLSSIPGIGPITATALAATVPDPTMFRSGREFAAWLGLTPKQNSTGGKDRLGRITKQGDSYLRHLLVIGARNVVRYPKARSRVGGGWIEALLERRRPMVVAIAVANKLARIIWAMMTTGEFYRPKLAA

SEQ ID NO: 18590 - protein, 400 aa, unidentified
  source 1..400: note = protein_fe2a084
  REGION 5..163: note = RuvC_domain
  SITE 8: note = RuvC_P1
  SITE 62: note = RuvC_P2
  SITE 102: note = RuvC_P3
  SITE 104: note = RuvC_P4
  SITE 107: note = RuvC_P5
  REGION 273..362: note = Tnp_domain
  SITE 281: note = Tnp_P1
  SITE 311: note = Tnp_P2
  SITE 319: note = Tnp_P3
  SITE 320: note = Tnp_P4
  SITE 333: note = Tnp_P5
MNPVVGLDVSRGESQVQAFLDKGKPYRKSFKVSHTNEALDSLLHFLKEVENESGLEPTVILESTGHYHAPIIQFLEEKNYLYIMINPLLSYQAKKSSLRKVKTDAIDAFHLCELYYKEDLEPYKKRGIQLLNLRNLTRQHDTITGLYVQAKLQFHAILDQVFPEYKGVFGDMYSKVSLNTLLEFKTSESVLQAGERNLTDKIAGLCITRSERWAHERAKKLIEAAQRNPFKNTLYQSHLISLEMYIQMLLQYQEHLAKLDDQIDALAGEIEEYKIIQSISGIGKKIAATILSEIGEVERFNHPKKLVAFSGIDPSVHSSGKFTATINRITKRGSSRLRHALYMAVLCGIRGSRNKKLKEFYDRKRDEGKPFKVAVIACINKLIHWIYALLKRKETFLDLE

SEQ ID NO: 18591 - protein, 343 aa, unidentified
  source 1..343: note = protein_ffb3016
  REGION 6..147: note = RuvC_domain
  SITE 9: note = RuvC_P1
  SITE 52: note = RuvC_P2
  SITE 87: note = RuvC_P3
  SITE 89: note = RuvC_P4
  SITE 92: note = RuvC_P5
  REGION 211..306: note = Tnp_domain
  SITE 219: note = Tnp_P1
  SITE 249: note = Tnp_P2
  SITE 257: note = Tnp_P3
  SITE 258: note = Tnp_P4
  SITE 270: note = Tnp_P5
MQIVRIGLDLAKYVFEVHGVDADETVVLRKTLRRDAVVSFFADLPPCVVDMEACSSAHYWAKVLSDLGHEVRLMSPQFVTPYVKSNKSDRNDAEAICEAVGRPSMRFVPQKSPDQLALQAVHRVRQRLVSDRTRLVNQIRGLLAEQGIAIARDISRLRHALAKIVDGDRSGLGDLILDLVRDARDELEALDRRISSYNRRLKTLFQSDEMCRRIGEIEGIGPVTATALVAAVGDRTCFKNGREFAAWLGLVPRQRSSGGKTRLLGISKRGDRYIRTLMIHGARAVLGRAGGKQDTRSQWIGRMRERRHPNVVAVALANKNARIVWSILARGEAYRPALVATAA

SEQ ID NO: 18592 - protein, 332 aa, unidentified
  source 1..332: note = protein_9f134d4
  REGION 24..166: note = RuvC_domain
  SITE 27: note = RuvC_P1
  SITE 71: note = RuvC_P2
  SITE 111: note = RuvC_P3
  SITE 113: note = RuvC_P4
  SITE 116: note = RuvC_P5
  REGION 206..291: note = Tnp_domain
  SITE 214: note = Tnp_P1
  SITE 243: note = Tnp_P2
  SITE 251: note = Tnp_P3
  SITE 252: note = Tnp_P4
  SITE 263: note = Tnp_P5
MVAGTHGSLNKAGSRKMTQISRTAGIDTSKARLDIAIYGGSEHWQVVNTIVGWRRLAAEFASADVRRVGIEASGGYECDVVGYLRERGFTVLVLQPIQVKAYARLHLRRAKNDKLDAVLIAACAATIDRPRIEPDQRLAKLAHHLTFVEQIEEDIARHKVRLEHVGDPRLRRVVLADIARLKARRASELLRIITALRAHDDLARRLDLVLSVPGIGERTAVALIIRMPELGRISREQAAALAGLAPYDDDSGKRHGQRHIAGGRGRLRRSLFAAALPAAFRWNKALIELYRRLVTRGKAHNAALIACARKLLIYANTVVQRGTPWTERLVGI

SEQ ID NO: 18593 - protein, 326 aa, unidentified
  source 1..326: note = protein_186877e
  REGION 19..187: note = RuvC_domain
  SITE 22: note = RuvC_P1
  SITE 67: note = RuvC_P2
  SITE 107: note = RuvC_P3
  SITE 109: note = RuvC_P4
  SITE 112: note = RuvC_P5
  REGION 203..287: note = Tnp_domain
  SITE 211: note = Tnp_P1
  SITE 240: note = Tnp_P2
  SITE 248: note = Tnp_P3
  SITE 249: note = Tnp_P4
  SITE 260: note = Tnp_P5
MTHPVAASKAELPPASITIGIDVSKDHLDAARHPGGDTVRVANTRKGQTALLRWIGDIKAAARVVFEPTGPYHRTLEERLAAVGIPQVKVNPRQARRFAEATGKLAKTDRVDALMLARYGALLDPVARPVRTDLQNRLAELMAARRSLMRDRTATLNRLRTLTIGLLQRHARHRLRQIEAQVTSLDAATDALEAEDAHLSRRRDVLASIPGLGRVTAHALLADMPELGMMEEGQAAALAGLAPITRQSGTWRGRSFIQGGRATVRQALYMPAIVAMRFNPDLKRVYDRLIAKGKHAKIAITAIMRKLVVLANALLHKDRLWTPKAA

SEQ ID NO: 18594 - protein, 386 aa, unidentified
  source 1..386: note = protein_5e0e2a7
  REGION 41..184: note = RuvC_domain
  SITE 79: note = RuvC_P2
  SITE 118: note = RuvC_P3
  SITE 120: note = RuvC_P4
  SITE 123: note = RuvC_P5
  REGION 255..342: note = Tnp_domain
  SITE 263: note = Tnp_P1
  SITE 292: note = Tnp_P2
  SITE 300: note = Tnp_P3
  SITE 301: note = Tnp_P4
  SITE 313: note = Tnp_P5
MQTLNNLSRSLIALEPASTLIAVIEMSLSSWLVAGIVPGIERQPLKKLAVDESALLRLLHRWREEAEKAGCRIERIVVAFEAGRDGFWLARWLKARSIEAHVIHAASVAVSREHRRAKTDRLDAELLKRAFLGWLRGERNHCKVVAIPTLKDEDAKRPSRERESLVGEQSRIVNRMKAALIRLGIRGFNPKLKRAAGRLDSLRTPEGEPIPPNTLAELRRDMERRRLISNQIRQIEEARLKHFEQAPNDGPHAMVRLLARVIGVGIETADMLVHEVLSRNMHDRRAIARYAGLTGSPDESGRKRREKGLARSGNGRVRRGMVQLAWRFLTYQKESALAQWYRARTENARGARKPMIVALARKLLIALWRFVWQGVVPDGIVLRPAQ

SEQ ID NO: 18595 - protein, 398 aa, unidentified
  source 1..398: note = protein_b32e11a
  REGION 4..160: note = RuvC_domain
  SITE 7: note = RuvC_P1
  SITE 57: note = RuvC_P2
  SITE 97: note = RuvC_P3
  SITE 99: note = RuvC_P4
  SITE 102: note = RuvC_P5
  REGION 275..361: note = Tnp_domain
  SITE 282: note = Tnp_P1
  SITE 312: note = Tnp_P2
  SITE 320: note = Tnp_P3
  SITE 321: note = Tnp_P4
  SITE 334: note = Tnp_P5
MNSVGIDISKGKSMVAALRPMGEVAMRPTEYLHTEVEIERLAYAILALGEDTRVVMEATGRYHEPVAAALHEYGIYVSVLNPILIHQSGGGSVRKVKSDKKDAVKIAKYGLDNWVDLREYTPVDAVRQQLKLCCRQYDLYMKSVISLKNNLISLTDKVFPGVNECFTSPDKANGHQKWIDFITTFWHCDCISLVSEKAFTERYRKWCKRLGYHFTVEKALDLYADSCGHITTLPKNSNTKLLITTAAKQLTAFKCQVAALKAEIISLAKQLPEYDTVVGMYGVGEISAAQLMAEIGDVRRFHNRNALVGFAGVDPIVDESGKDVSKCHPTTKRGSAHLRRTLFQVISTYVKRAPANEPVYQFITRKRSEGKPYYVYMTAAANKFLRIYYARVKECLAD

SEQ ID NO: 18596 - protein, 390 aa, unidentified
  source 1..390: note = protein_89e7897
  REGION 4..163: note = RuvC_domain
  SITE 7: note = RuvC_P1
  SITE 60: note = RuvC_P2
  SITE 101: note = RuvC_P3
  SITE 103: note = RuvC_P4
  SITE 106: note = RuvC_P5
  REGION 266..353: note = Tnp_domain
  SITE 274: note = Tnp_P1
  SITE 304: note = Tnp_P2
  SITE 312: note = Tnp_P3
  SITE 313: note = Tnp_P4
  SITE 326: note = Tnp_P5
MIYVGIDVAKDKHDCCILNQEADLLFPVFTIENNLAGYEQLYEKIRSVSKDLKEIKVGLEATGHYSYNILGSLLEHGYRTCVINPLHTNLYRKGQSLRKTKTDKVDARSIAEMLVTDKTLKPYTDTSYHSEELKSLTRYRFDKVQERAKLKTSLSRLVNILFPELEKLVPTLHMSTVYALLEEMPGASFVADANLTHLKSLLEKASKGHYQRDKAVEIRNAAINSVGSAMPAKSMELKHTINLIRVLTEEIDEIEASIKKIMDKCDSPITTIPGIKYRMGAIILAEIGDFSRFDNADQILAYAGMSPSTYQSGQLESSYARMEKRGSRYLRYALFNATQYVCIWDERFRLYLAKKRAEGKHYFIAISHAAKKLLRTIYRMEMTHTAYQPL

SEQ ID NO: 18597 - protein, 369 aa, unidentified
  source 1..369: note = protein_823299d
  REGION 29..176: note = RuvC_domain
  SITE 32: note = RuvC_P1
  SITE 79: note = RuvC_P2
  SITE 116: note = RuvC_P3
  SITE 118: note = RuvC_P4
  SITE 121: note = RuvC_P5
  REGION 236..323: note = Tnp_domain
  SITE 244: note = Tnp_P1
  SITE 274: note = Tnp_P2
  SITE 282: note = Tnp_P3
  SITE 283: note = Tnp_P4
  SITE 295: note = Tnp_P5
MLRFELMIERGLSKQPQASGKEAQHETFAGLDVSVKETSVCIVDETGKICREVKVVSHPDDLIAVLKDPTLRIERIGLEAGPLSQWLFEGLANAGLPAICIETRHTKAFLKAQPNKSDRNDARGIAQMMRVNLYRPVHVKTMTSQKRRALLTARKLLREKALAIENDLRGLLRNFGLKVGVVGAVKFEARICELVKGHFDLSEIVEPLLDARRKLRENFATLHRKLLTIVRNDEVCRRLMTIPGVGPVVALAYTATIDIPQRFRNSKAVGPILGLTPAMNQSGESRRIGCISLCGDGMMRTLLYEAAQVLLANVKKWSWLKAWAMNVAKRRGRQKAIVALSRRLAVIMHRMWVDGTEFRWTRKEITPAA

SEQ ID NO: 18598 - protein, 399 aa, unidentified
  source 1..399: note = protein_449e35c
  REGION 12..166: note = RuvC_domain
  SITE 15: note = RuvC_P1
  SITE 63: note = RuvC_P2
  SITE 103: note = RuvC_P3
  SITE 105: note = RuvC_P4
  SITE 108: note = RuvC_P5
  REGION 273..357: note = Tnp_domain
  SITE 281: note = Tnp_P1
  SITE 310: note = Tnp_P2
  SITE 318: note = Tnp_P3
  SITE 319: note = Tnp_P4
  SITE 331: note = Tnp_P5
MIKDHHLVDVFIGVDVGKTNHHAVALNREGKKLLDKALPQDEAKLRSIIGSLTKHGTLLLVVDQPATIGALPVAVAQAAGIMVGYLPGLAMRRIADLHPGEAKTDARDSFIIAEAARTMPHTLRSIAVADEQTAELSMLCGFDDDLAQQATATSNRIRGLLTQIHPALERVIGPHLDHPAMAELLIKYPTPAALRKAGQTRVGEYLRKWAPRAGTGWAAEIFTALSEQTVVVAGTGAAGIVLPRLAAQLAQLRAARAEVLTRVEAIVEAHPLHTVLTSMPAVGARTEARIITEVIGKDFNTAGHLASYSGLAPVTWRSGTSIRGDHPSRKGNKILKRAFFLSAFAALKDPASRAYYDRKRAEGKRHNQALIALARRRCDVLFAMLRDMTLYEAPKPKAA

SEQ ID NO: 18599 - protein, 406 aa, unidentified
  source 1..406: note = protein_ea2e304
  REGION 5..161: note = RuvC_domain
  SITE 8: note = RuvC_P1
  SITE 58: note = RuvC_P2
  SITE 98: note = RuvC_P3
  SITE 100: note = RuvC_P4
  SITE 103: note = RuvC_P5
  REGION 275..362: note = Tnp_domain
  SITE 283: note = Tnp_P1
  SITE 313: note = Tnp_P2
  SITE 321: note = Tnp_P3
  SITE 322: note = Tnp_P4
  SITE 335: note = Tnp_P5
MMNAVGIDVSKGKSTVTIRRPGDEIVLPPRDVRHTRSGIDALIDQIKSLDGETKICMECTGRYYEPMATWLTEAGLFVSTVNPALIKAFGDDSLRAPKTDKADSKKIARYTLDRWAKLKQYGRMDETRNQLKTMNRQFGFYMDQKTSMKNNLIALLDQTFPGANDFFDSPARSDGSQKWVDFVYTYWHVDCVTGRTLDAFTEHYRNWCSRKGYNFSAAKAKTIYDVSKDLIAVFPKDDVTKMIIHQAVDLLNAASKTVETLRAKMDETASKLPEYPIVMDMNGVGPTLGPQLMAEIGDVMRFEKRGSLTAFAGVDPGKNESGQYVQKSVPTSKKGSPHLRKTLFQIMDGLIQRSPVGDAVYDFMDKKRAQGKPYYVYMTAGANKFLRIYYGRVKEYLASLAANKSE

SEQ ID NO: 18600 - protein, 323 aa, unidentified
  source 1..323: note = protein_faa8cda
  REGION 5..154: note = RuvC_domain
  SITE 8: note = RuvC_P1
  SITE 58: note = RuvC_P2
  SITE 98: note = RuvC_P3
  SITE 100: note = RuvC_P4
  SITE 103: note = RuvC_P5
  REGION 195..281: note = Tnp_domain
  SITE 203: note = Tnp_P1
  SITE 233: note = Tnp_P2
  SITE 241: note = Tnp_P3
  SITE 242: note = Tnp_P4
  SITE 254: note = Tnp_P5
MSNFIGIDVAKNTFDIATHLPNGKHKTKAKLTNDPKGFKEFEAWLSKQVEPSSLIVMEATSVYHLELAEFVYNKGYRVCVVNPATTNAYAGSELRRIKTDKSDAKLIADFAREKAEKLPLWAPEPLKYRQLKAMVRRLDDLQEMEQMELNRLDVSDEKVKDSINSVLRHIEKEIVETHKAIKKHIDDDPDMRQMRDLIVTIDGIGQKTLERLLAELGDLRKYDDPRKLVAAAGLNPKLQDSGLLKGRTVISKIGSARVRAGLYMPGLVALKHNKAIIAMKDRLKANGKAPKQIICAAMRKLLHFVHAVLKSGQPFDPEFGLAR

SEQ ID NO: 18601 - protein, 389 aa, unidentified
  source 1..389: note = protein_9d693d0
  REGION 4..159: note = RuvC_domain
  SITE 7: note = RuvC_P1
  SITE 57: note = RuvC_P2
  SITE 98: note = RuvC_P3
  SITE 100: note = RuvC_P4
  SITE 103: note = RuvC_P5
  REGION 264..351: note = Tnp_domain
  SITE 272: note = Tnp_P1
  SITE 302: note = Tnp_P2
  SITE 310: note = Tnp_P3
  SITE 311: note = Tnp_P4
  SITE 324: note = Tnp_P5
MFYLGIDIGKNTHVAYLLDSKKKVVFKAFSFSNSIDGAESLICKLEPFKNELEIGMEATGHYWLSLYSYLSEKNFTVRVINPIQTDGWRQGIEIRKRKTDIIDSLLIADLLRYGDFVETSLSDEYYLSLRNLSRFRSYLVSSIGDLKRKTIALLDQIFPEYASSFSNIFGKTSKEILANFSSPSDFEDISSEKLTSFLENVTMKKFATRKLEELSKKASTSFGVNFCLDSFGLQIKMLIEQISFIQNQVLDVENELATILEKLNSPITTIPGIGSVNAATILGEIGDIKRFSNPSKLVAYAGLDASISQSGEFESTFNHMTKRGSPYLRRALFQSALRAEFCDPVFSNYYQKKITEGKHHLVATNAVDRKLCHTIFAVLTKNEPYQEQS

SEQ ID NO: 18602 - protein, 342 aa, unidentified
  source 1..342: note = protein_f474d7c
  REGION 7..147: note = RuvC_domain
  SITE 10: note = RuvC_P1
  SITE 53: note = RuvC_P2
  SITE 88: note = RuvC_P3
  SITE 90: note = RuvC_P4
  SITE 93: note = RuvC_P5
  REGION 210..303: note = Tnp_domain
  SITE 218: note = Tnp_P1
  SITE 248: note = Tnp_P2
  SITE 256: note = Tnp_P3
  SITE 257: note = Tnp_P4
  SITE 269: note = Tnp_P5
MNIPVRIGMDTSKSIFQLHGVDENEVVVVRRQFRRAEMIRYFERLPPALVAIESCGSSHHWARLLQSFGHEVKLIPPQYVKAYVKRGKNDAADAEALCEAVTRPSMRFVPVKSKERQAACMLMTVRERLVSAKSQLSNAFRSYAAEFGIIGPAGRQNVNALIKRVLEDDTLPEMARDLFRFQAQEYAAVEARLAEIERKVMKWHREDDVSRRLSTIPGVGPIGSTMLSMKAPPPETFRSGRDFAAWIGLTPKDHSTGSRQRHGGITKAGDSALRPTLIVGATALLRHIRKGRHKPTPWLAALLERKPPKLVAVALANKFARIAWRLMVSGGVYTRPLAAMPT

SEQ ID NO: 18603 - protein, 311 aa, unidentified
  source 1..311: note = protein_d709275
  REGION 6..152: note = RuvC_domain
  SITE 9: note = RuvC_P1
  SITE 52: note = RuvC_P2
  SITE 92: note = RuvC_P3
  SITE 94: note = RuvC_P4
  SITE 97: note = RuvC_P5
  REGION 188..272: note = Tnp_domain
  SITE 196: note = Tnp_P1
  SITE 225: note = Tnp_P2
  SITE 233: note = Tnp_P3
  SITE 234: note = Tnp_P4
  SITE 245: note = Tnp_P5
MTETTIGVDISKDRLDAHRLPDGATGQFPNSKAGHRAFLEWAGQDVARIVYEPTGPYHRAFEGALARTGLPLCKVNPKKARRFAEAIGTLAKTDRIDARMLARMGQLLEPESRPVADEALGSLRELLLVRRALIKERTAVTNRRHTLTIALLRRQHTQRLAQIERQLLKIDQAIMAMIKEDPTLKRRFEILMTIPGVANVTAFTMLIDMPELGTMDAKQAAALCGLAPLTRQSGQWRGRAMIGGGRRLLRQALYMPAMVAARYNDDLRATYERLKANGKPGKLAITAVMRKLIILANALIRDDREWAPRMA

SEQ ID NO: 18604 - protein, 251 aa, unidentified
  source 1..251: note = protein_63e3694
  REGION 7..146: note = RuvC_domain
  SITE 10: note = RuvC_P1
  SITE 53: note = RuvC_P2
  SITE 88: note = RuvC_P3
  SITE 90: note = RuvC_P4
  SITE 93: note = RuvC_P5
  REGION 209..251: note = Tnp_domain
  SITE 217: note = Tnp_P1
  SITE 247: note = Tnp_P2
MQDVTLVGIDLGKHSFHLHGQDRHGKALFRKKVTRKQLIEFFATLHACTVVMEACAGAHHMARKLAGFGHQAKLISPQFVRPFVKGSKNDFVDAEAICEAASRPSMRFVTPKTEAQQTLSALHRVRESLVRDRTKTVNQMHGLPLEFGVSLPIGKAVITRLPAVLAEQPLPPRLIAILERLHAHFKYLSEQLGELDKEMARQLADDDLGQRLLTIPCVGLITASVLATEMGDGKQYGCSRDFAASIGLVQR

SEQ ID NO: 18605 - protein, 327 aa, unidentified
  source 1..327: note = protein_b92d489
  REGION 8..158: note = RuvC_domain
  SITE 11: note = RuvC_P1
  SITE 64: note = RuvC_P2
  SITE 102: note = RuvC_P3
  SITE 104: note = RuvC_P4
  SITE 107: note = RuvC_P5
  REGION 194..281: note = Tnp_domain
  SITE 202: note = Tnp_P1
  SITE 232: note = Tnp_P2
  SITE 240: note = Tnp_P3
  SITE 241: note = Tnp_P4
  SITE 254: note = Tnp_P5
MEQFSFFTGIDVSKLWLDIAVLNPTDGLVHQSRINNNVKAIRSFLKGLKKQLKAEITEHLFCMEHTGKYGHAFLAASVLEKVRVWVELPVQIKRSQGLVRGKTDQWDAVRIAKYAHRFADKAVFWVPADKTIQDMKDLQVKRSQLVKTYSQLSQENKNDPLFKKPLQAIKQGIQAIELKMEQLMEDNQVARQQYDLLTSVPGIGKQTAMALIVVTNGFTRLTDSRKLSCYSGLAPFPYSSGSSVKGRTKVSKMGDMKLKVLLNLSAWNAIRAIPALKDYFKRKVGEGKHKMSVINAVRNKLLALALAVVKRNSPFIKEYTSNLLLLP

SEQ ID NO: 18606 - protein, 348 aa, unidentified
  source 1..348: note = protein_6c8c57e
  REGION 1..119: note = RuvC_domain
  SITE 18: note = RuvC_P2
  SITE 58: note = RuvC_P3
  SITE 60: note = RuvC_P4
  SITE 63: note = RuvC_P5
  REGION 223..312: note = Tnp_domain
  SITE 231: note = Tnp_P1
  SITE 261: note = Tnp_P2
  SITE 269: note = Tnp_P3
  SITE 270: note = Tnp_P4
  SITE 283: note = Tnp_P5
MLEELQVETGLAPVIVLEATGHYHRAWVSYLERSGYTCYIVNPLQSKRAKGTQLRKVKTDAVDAWHLAEMYYRGDVKPHRTWEETFTELQHLTRQHEFVTGIFVQAKLNSRALLEQVFPAYEQVFYNLFSLTSLQVLSRCLEGTMENWDEVIEEGSRKSHSKRWVSEKVKTLEDVLCDWRETRRSSSQSKALLGMVTLLLTMVRQLEDLERQMEDVAVSLPEVELVKSIPGIGTKLAAAIVAEMGDVRQFNDAKQLVAFAGLDPGIFSSGKFTATSTRITKRGSKRLRRSLYLAVQCGIRKSANAKICAYYEKKRKEGKPYKVVVIACANKLLHHIFAILQKGEPYQA

SEQ ID NO: 18607 - protein, 361 aa, unidentified
  source 1..361: note = protein_071d561
  REGION 4..120: note = RuvC_domain
  SITE 7: note = RuvC_P1
  SITE 57: note = RuvC_P2
  SITE 97: note = RuvC_P3
  SITE 99: note = RuvC_P4
  SITE 102: note = RuvC_P5
  REGION 230..317: note = Tnp_domain
  SITE 238: note = Tnp_P1
  SITE 268: note = Tnp_P2
  SITE 276: note = Tnp_P3
  SITE 277: note = Tnp_P4
  SITE 290: note = Tnp_P5
MNAVGIDVSKGKSTVTIRRPGDVVLMPPCDIPHTQYAINDLIVYLQNLDGETKACMEHTGRYYEPVASWPSDAGIFVSAVNPILIRDFGDDSLRTPKTDKADSKKIARYTLDRTYPGANDFFNSPARSDGSQKWGDFVHTYWHVDCVRSKLLNAFTEHYQSWCKRRGYNFSADKAEKIYHLSSDLIAVFPKDDITKMLIRQAVALRNTASETEEPLRLKMNGLASTLPEYPIVMDMNGVGSTLGPHLIAEIGDVTRFTHREALTAFAGVDPGKNDSGQHVQKSVRTSKKGSPYLRKALFQVMDSLIKRSPVEDPVYAFMDKKRAQGKPYYVYMTAGANKFLRIYYGRVKEYLSTLPENEGV

SEQ ID NO: 18608 - protein, 339 aa, unidentified
  source 1..339: note = protein_0afdb27
  REGION 6..146: note = RuvC_domain
  SITE 9: note = RuvC_P1
  SITE 52: note = RuvC_P2
  SITE 87: note = RuvC_P3
  SITE 89: note = RuvC_P4
  SITE 92: note = RuvC_P5
  REGION 211..299: note = Tnp_domain
  SITE 219: note = Tnp_P1
  SITE 249: note = Tnp_P2
  SITE 257: note = Tnp_P3
  SITE 258: note = Tnp_P4
  SITE 270: note = Tnp_P5
MEIDILGIDLAKHVFQLHGAERSGRAVHRSKVGRGALIETVHKLRPRIVAMEACSSAHHWARRFIALGIEVRLISPQYVSPFVKTNKNDRNDAEAIVEAVSRPTMRFVSIKSVEQEDIQAVHRMRAILVRQRTAIINQIRGLLAERGLVTARSPQAFKRAIPISLGNEGSELTAFCQALLTEMLQHLQALEARIHWLEVSIKEFVKNSELCRKITAVEGVGPLTATAIVGAIGDAKQFSNGRHLAAWLGLVPRQYSSGGKARLQGISKRGDTYLRTLLIHGARTVLQYAGAKTDKRSRWLQQLIARRGYNCAAVALANKNARILQVLLSSDAAYRPAAA

SEQ ID NO: 18609 - protein, 440 aa, unidentified
  source 1..440: note = protein_87e0d8d
  REGION 9..165: note = RuvC_domain
  SITE 12: note = RuvC_P1
  SITE 62: note = RuvC_P2
  SITE 102: note = RuvC_P3
  SITE 104: note = RuvC_P4
  SITE 107: note = RuvC_P5
  REGION 280..322: note = Tnp_domain
  SITE 288: note = Tnp_P1
MNTGTITAVGIDVSKHKSTVAARRPGGEVVLLPFDVEHTAEGLKKLITKLRELDGEIRIVMEHTEMYWRPIAMTLKEAGFYVSVVNAILIHNFSDNSIRKVKTDRADAMKIANYGLTFWSDLQEYAGEDENRQLLKIQSRLYERTATTAGMLRNGLISLLDQTFPGANKLFRDESRNSKGHVKWIDFVLRFWHKECVAALSLATFTDTFQKWCKRTGYKFSASDAERIHAIARNAVATLPKNDSTKLLITQATNSLNAIYDSLQAIRTEMDRLASMLPEYELVMGMEGIGKVTGPQLMAEVGDVRRFSHKGALVDSVGGRTRTRPVSRLPAPGCVFLLEGHKARLRRQALPDTDRRPTGSEIFERARRLRAMTAACRRALCPSSGDGDAMGRRARSKTGPGYAAHAMQALTLLHTSQEASIRKAVMCPNAALHILEECCL

SEQ ID NO: 18610 - protein, 337 aa, unidentified
  source 1..337: note = protein_ee72847
  REGION 9..165: note = RuvC_domain
  SITE 12: note = RuvC_P1
  SITE 62: note = RuvC_P2
  SITE 102: note = RuvC_P3
  SITE 104: note = RuvC_P4
  SITE 107: note = RuvC_P5
  REGION 280..316: note = Tnp_domain
  SITE 288: note = Tnp_P1
MNTGTITAVGIDVSKHKSTVAARRPGGEVVLLPFDVEHTAEGLKKLITKLRELDGEIRIVMEHTGMYWRPIAMTLKEAGFYVSVVNAILIHNFSDNSIRKVKTDRADAMKIANYGLTFWSDLQEYTGEDENRQLLKIQSRLYERTATTAGMLRNGLISLLDQTFPGANKLFRDDSRNSRGHVKWIDFVLRFWHKECVAALSLAAFTDTFQKWCKRTGYKFSASDAERIHAIARNAVATLPKNDSTKLLITQATNSLNAIYDSLQAIRTEMDRLASMLPEYELVMGMEGIGKVTGPQLMAEVGDVRRFSHKGALVERGRHNPDPPCEPPASARLRFPP

SEQ ID NO: 18611 - protein, 316 aa, unidentified
  source 1..316: note = protein_2f7ba2d
  REGION 6..148: note = RuvC_domain
  SITE 9: note = RuvC_P1
  SITE 53: note = RuvC_P2
  SITE 93: note = RuvC_P3
  SITE 95: note = RuvC_P4
  SITE 98: note = RuvC_P5
  REGION 189..273: note = Tnp_domain
  SITE 197: note = Tnp_P1
  SITE 226: note = Tnp_P2
  SITE 234: note = Tnp_P3
  SITE 235: note = Tnp_P4
  SITE 246: note = Tnp_P5
MGKMMIGVDVAKEWIDVAIAGDGRVKRIVNSEQTIAAWLVQTGAGSIGLVAFEPTGGYERHLRRCLLRAKVASKQVHPNEVVAYRRRRGIKAKTDRIDARLLADFAGEELARREFEPVPQADEVLRELASRRRQLQALLHAETCRCDVADSAIVRKSLQAVIATLERSLATVDKAIAEHIASSAHAETSRRLQTFCGVGPAISETLIADLPELGHLSGKKIAALCGVAPHTRDSGKQCGHATTGHGRPGVRKVLFNGARSAIQHNPVMKAFYRHLVDDNHRFGKVALTAVMRKMLVTLNAMVRDGSDWKHAAGPAA

SEQ ID NO: 18612 - protein, 339 aa, unidentified
  source 1..339: note = protein_35c0be4
  REGION 6..148: note = RuvC_domain
  SITE 9: note = RuvC_P1
  SITE 52: note = RuvC_P2
  SITE 87: note = RuvC_P3
  SITE 89: note = RuvC_P4
  SITE 92: note = RuvC_P5
  REGION 211..282: note = Tnp_domain
  SITE 219: note = Tnp_P1
  SITE 249: note = Tnp_P2
  SITE 257: note = Tnp_P3
  SITE 258: note = Tnp_P4
  SITE 269: note = Tnp_P5
MQVSTLGIDLAKSVFQLHGVDHNGNTVLRKRLSRARFVQFVINLPPCLIGMEACSSSHHFGRLFREHGHQVKLIPPQYVKPYVKTNKTDAADAEAICEAVTRPNMRFVEIKTVEQQAVLTLHIERSLLIRERTAVINSLRAMLAEFGFVIPGGRRQVHQCASDILGDDENGLSPLVRSSAARQLAHIRELDNQLSQVEKELTAWFRSRPDCQRVAQVPGVGLLTATYVVASVGNVQQFGSAKQFAACVGLTPREHSSGGHQKWGTSANGGTAIFASFWFTGRERWQPGFSEPVREPPWLLALMQRKPHNVAVTAQANKTTRILWAMLRRGTEYHPATPA

SEQ ID NO: 18613 - protein, 369 aa, unidentified
  source 1..369: note = protein_7762628
  REGION 9..159: note = RuvC_domain
  SITE 12: note = RuvC_P1
  SITE 63: note = RuvC_P2
  SITE 99: note = RuvC_P3
  SITE 101: note = RuvC_P4
  SITE 104: note = RuvC_P5
  REGION 224..311: note = Tnp_domain
  SITE 232: note = Tnp_P1
  SITE 262: note = Tnp_P2
  SITE 270: note = Tnp_P3
  SITE 271: note = Tnp_P4
  SITE 283: note = Tnp_P5
MGKYSEVFVAFDVAKKKHAVAIAEGGRTGEVRFLGDVENSPLPIERTIKRLAGRYDRLHVCFEAGPTGYGLYRQIQALGHECMVVAPALIPKRSGERIKTNRRDAVTLARLHRAGELTGVWAPDAAHEAVRDLVRAREAAADDLRRKRQQLLSFLLRHSRIYSGGGHWTMAHRRWLASQKFEHAAQQIVFQEAIDAIEDALQRLRRLEEQLALIVPEWSMAPVVEAYQAMRGASFLVSVTFAAEIGDVRRFDTPRKLMAFLGLVPAERSTGDTIRRKGLTLAGNRRARRALIEAAWTYRYPARVSETLRARLEGLPKPVRDIAWKAQVRLCARYRRLSATGKKLPVVVAAIAREMAAFLWAIGREVAPA

SEQ ID NO: 18614 - protein, 404 aa, unidentified
  source 1..404: note = protein_0ffe726
  REGION 13..167: note = RuvC_domain
  SITE 16: note = RuvC_P1
  SITE 64: note = RuvC_P2
  SITE 104: note = RuvC_P3
  SITE 106: note = RuvC_P4
  SITE 109: note = RuvC_P5
  REGION 274..359: note = Tnp_domain
  SITE 282: note = Tnp_P1
  SITE 312: note = Tnp_P2
  SITE 320: note = Tnp_P3
  SITE 321: note = Tnp_P4
  SITE 333: note = Tnp_P5
MNGLPERTYAVYLGLDVGKEHHHACALDPAGKRLHDKTLPQDEQRIRDLLTDLSVHGDVLVVVDQPASIGALPVAVARSMNIQVAYLPGLAMRRIADLHPGNAKTDARDAYVIADAARTLPHALRRVDVGDDALADLEVIVGFDDDLAAETTRVTNRVHGLLTQIHPALERAIGGSLHHPAVLELLSRFGGPSGLRTAGRRRLLAVAKPRAPRKHEAFVDAIMTALDEQTVTVPGTRAADLVLPKLADQLARLLAQRAEAATQVEEMLDAHPLAQVLTSMPGVGVRTGARILLEVGDASSFATPGHLAAYAGLAPVTRRSGTSIRGEHPSRSVNKNLKRAFFLAAFAELKDPASRAYYDRKRAEGKRHNAALICLARRRCDVLYAMLRDGTTYQPGRPVTPIAA

SEQ ID NO: 18615 - protein, 341 aa, unidentified
  source 1..341: note = protein_8e53c6e
  REGION 7..149: note = RuvC_domain
  SITE 10: note = RuvC_P1
  SITE 53: note = RuvC_P2
  SITE 88: note = RuvC_P3
  SITE 90: note = RuvC_P4
  SITE 93: note = RuvC_P5
  REGION 211..297: note = Tnp_domain
  SITE 219: note = Tnp_P1
  SITE 249: note = Tnp_P2
  SITE 257: note = Tnp_P3
  SITE 258: note = Tnp_P4
  SITE 270: note = Tnp_P5
MSEAFIIGIDLAKRVFQIHGADAAGKVLYRRKLSRPQFNKFLNEHPSCIFAMEACASAHHWGREALAAGHEVRLVPARYVKPFVKRHKSDVVDAEAITEAAMRPSMRFVPVKAPEQQAQAMLFRTRELFVRQRTQLINSLRGYLAEFGIVLRLRIRNADILKREVEEQAHKLPDEAKRLAERLLAQIETISAEVEGLDHSIKMHAETSEETRLMQTMPGVGPMSAIAISAFCPPAKNFRTGRDFAAWLGLVPRQHSTGGKERLGRITKMGQKDVRRLLIIGAMSVINSIERWKRCAEPWLARMLETRPRMVVAVALANRMARRLWAMLMTGQIYRIRGAVA

SEQ ID NO: 18616 - protein, 388 aa, unidentified
  source 1..388: note = protein_3c17f00
  REGION 6..161: note = RuvC_domain
  SITE 9: note = RuvC_P1
  SITE 61: note = RuvC_P2
  SITE 101: note = RuvC_P3
  SITE 103: note = RuvC_P4
  SITE 106: note = RuvC_P5
  REGION 263..350: note = Tnp_domain
  SITE 271: note = Tnp_P1
  SITE 301: note = Tnp_P2
  SITE 309: note = Tnp_P3
  SITE 310: note = Tnp_P4
  SITE 323: note = Tnp_P5
MTKLFCGIDVAKYEHVASIYNPSTGEIILDSLHFTNDDKGFKTLLANLRKNKDNEIMIGFESTGHYHQTLFNYLTSKKYKCYLINPYMTSKFRSISLRDAKNDNIDSKAIAQFLSFEHLNLNNEEFLNNELKELAFQRQFLMTDVSKMKIKLKSYLDRVFPELESLVDINTAGIRAILKEYPTAKDISEVRIDKLKNLVKTASMGKYPVSKIEAVKKAAKTSIGIHSLSIGLNITQCIETLDLKEKQIDRIEKEIKKHPTVLNSPLHQLIGINDIEIGYIMSAIINITRFDSPKKLVAYAGLDPKVRQSGTWSANRTRMSKRGSKLLRYALIWSAYNMTRRPGSMKDYFELKKFQGKSHYNALGHCAAKLCRYIFWILNHPNEEFKYQ

SEQ ID NO: 18617 - protein, 266 aa, unidentified
  source 1..266: note = protein_175a0e4
  REGION 12..70: note = RuvC_domain
  SITE 14: note = RuvC_P5
  REGION 133..218: note = Tnp_domain
  SITE 141: note = Tnp_P1
  SITE 171: note = Tnp_P2
  SITE 179: note = Tnp_P3
  SITE 180: note = Tnp_P4
  SITE 192: note = Tnp_P5
MSQNVSRDQRLADDAEAICEAVGRPNMRFVPIKSAQQQNIQALHRIRSGLVQERTAKANRIRGLLGEYGIVFSARINVLRKALPEVLEDGDNGLLPAFRSLLEGLRQDLVYLDERVSELDRSIEQLAREHADASRLMSLRGVGPITATALVAALGDGSDFKRGRDVSAWAGLVPGQHSSGGKERLLGISKRGDAYLRTLLIHGARAVIQGAKDKQDGLSRWIQSLCHRRNKNIAAVALANKTLRMAWALLRTETEYQADYAAGRPA

SEQ ID NO: 18618 - protein, 339 aa, unidentified
  source 1..339: note = protein_e4d1ee0
  REGION 4..155: note = RuvC_domain
  SITE 7: note = RuvC_P1
  SITE 55: note = RuvC_P2
  SITE 96: note = RuvC_P3
  SITE 98: note = RuvC_P4
  SITE 101: note = RuvC_P5
  REGION 219..304: note = Tnp_domain
  SITE 227: note = Tnp_P1
  SITE 257: note = Tnp_P2
  SITE 265: note = Tnp_P3
  SITE 266: note = Tnp_P4
  SITE 277: note = Tnp_P5
MTMIGIDPHKATHTAVAVDDDEQVIDEFTLGSSNDQAERLTSWAEGLGKREWAVESANGLGYLVARQLVAAGETVFDVPPVLASRVRLLGSGRSQKNDPNDARSIAIAALRSHRLRVVEPDDHVVVLRLLVKRHRDMARLRNKHCSRLHALLIELEAGGIGVKISVTNASGLLDRIDVVDEASRYRILVAREVVDDIARLDQTLKASKKRIADAVTASGTSLTDIVGVGPIGAATIIGYTKDVTRFPTRGHYATYNATAPIEVSSGGNTRHRLNLRGNRILNHAIHIAAVTQLRHDTNGRVYFDKKIAEGKTPKEAIRALKRRISDAVYRRLIADTNNQ

SEQ ID NO: 18619 - protein, 342 aa, unidentified
  source 1..342: note = protein_e351581
  REGION 6..147: note = RuvC_domain
  SITE 9: note = RuvC_P1
  SITE 52: note = RuvC_P2
  SITE 87: note = RuvC_P3
  SITE 89: note = RuvC_P4
  SITE 92: note = RuvC_P5
  REGION 210..294: note = Tnp_domain
  SITE 218: note = Tnp_P1
  SITE 248: note = Tnp_P2
  SITE 256: note = Tnp_P3
  SITE 257: note = Tnp_P4
  SITE 269: note = Tnp_P5
MTDTMIGVDLAKTVFQIHAASLTGELLFRKKVRRPQFLQFMASQPPALVVMEACGSAHYWARELMNAGHEVKLIAPQYVRPFVKRQKNDAADAEAIVIAARQPEMRFVMPKSEDQQARAVLFRCRDRLVHQRTELVNALRATLYEFGLIVPKGIAHLKRMEEFVEDESVSLPTLVRKECRDLLEQIDEQLARIMEKTRAMVGLSEESGVAQRLETMPGVGPLTALAVEAFAPSMESFRSGRDFAAWLGLVPRQFSSGGKERLGRVSKAGQADIRRLLIIGAMTRVNWASRKPPLPGTWMARMLARKPRMLVAIALANKMARTIWAMLTKQENYRDPVLSAAA

SEQ ID NO: 18620 - protein, 343 aa, unidentified
  source 1..343: note = protein_1f610b9
  REGION 7..149: note = RuvC_domain
  SITE 10: note = RuvC_P1
  SITE 53: note = RuvC_P2
  SITE 88: note = RuvC_P3
  SITE 90: note = RuvC_P4
  SITE 93: note = RuvC_P5
  REGION 212..297: note = Tnp_domain
  SITE 220: note = Tnp_P1
  SITE 250: note = Tnp_P2
  SITE 258: note = Tnp_P3
  SITE 259: note = Tnp_P4
  SITE 271: note = Tnp_P5
MSEVTTIGLDIAKNVFHAHGADASGKPLFSRKISRTKLLEFFAKHPRCLVALEACGGAHHWARELTQQGHQVRLIPPAYVKPFVKRNKNDAVDAEAICEAAQRPNMRFVAIKSEEQQASALVFRTRDLMVRQRTQLINAIRGHLTEYGWVAPKGPSHIAVLTDLLDGEIGSSLPDEATPMFRIMLELLEVLNGKIAELDKEIARRAREDVIARRLMTIPGVGPITATAIAALAPPVETFTKGRDFAAWLGLAPRQLSSGGKQKLGSITKMGERTLRRLIIIGCSAVVLQASKRGAPAGSWLEQMMARKPRMLVTVALANKTARIIWALLIKQEEYKAPVAAAA

SEQ ID NO: 18621 - protein, 362 aa, unidentified
  source 1..362: note = protein_69b652e
  REGION 7..149: note = RuvC_domain
  SITE 10: note = RuvC_P1
  SITE 53: note = RuvC_P2
  SITE 88: note = RuvC_P3
  SITE 90: note = RuvC_P4
  SITE 93: note = RuvC_P5
  REGION 209..307: note = Tnp_domain
  SITE 217: note = Tnp_P1
  SITE 247: note = Tnp_P2
  SITE 255: note = Tnp_P3
  SITE 256: note = Tnp_P4
  SITE 268: note = Tnp_P5
MNEVGIVGVALAKQVFRVHGAAADGRVLFRKKLSRPQFPRFQAALPRCVVAMEACGTAHYWGRELAGHGHDVRLIPPVHLKPFVKRQKNDAADAEAVAEAALRPTMRSVAVKTAGQQARAMLFRTRDLPVGQRTQLINALRGHLAGHGIVLARGIGNIDRLATRLEEEGLPDLVRDLGRLYLHRIAGLSDEIDKLDGRIAAAAKESDVARRLQTMPGIGPVCAMAIATFASDIREFRRARDFSAWLGLVPRQHSSGGKQKLGRTSRMGQRVANGRSDQWRNHWQLRRLLIVGAMSVVHWRGRDGGARVVALPHAGPETAHAGRDRPGQQDGPDGPSHALAQRGLPGSGRRGLLTAAAGVSAM

SEQ ID NO: 18622 - protein, 337 aa, unidentified
  source 1..337: note = protein_32b3f09
  REGION 6..161: note = RuvC_domain
  SITE 9: note = RuvC_P1
  SITE 67: note = RuvC_P2
  SITE 105: note = RuvC_P3
  SITE 107: note = RuvC_P4
  SITE 110: note = RuvC_P5
  REGION 207..295: note = Tnp_domain
  SITE 215: note = Tnp_P1
  SITE 246: note = Tnp_P2
  SITE 254: note = Tnp_P3
  SITE 255: note = Tnp_P4
  SITE 268: note = Tnp_P5
MKKLFIGIDFSKEKIDVAIIFAEGLTETSMRLFNEFKNSVSGYKQLVKWVEESSNETEPSLWLFCGENTGDYSKPLCNFLYGRGFDMWLENAKSIKDASGIRRLKSDRTDANMIAEYAMRNNDKAIVYEPLSESLSQLRELFLYRQMVVRHRCSFQVRRGEKRLNMEKSPVKTMISQSGRHIVTELNKIDKRIAELIDSDEELAQVFTIVTSIPGIGTQNAVCLMVYTDNFRRFNFDSRKIACYYGIAPFGRDSGTSVHTDPHVHYMANRQIKAMLSQAALSAAKFNPVIASYYSRLIERGKKRQIVLNNVKNKLVHIVTAMVRNKQLFDKDYKISA

SEQ ID NO: 18623 - protein, 388 aa, unidentified
  source 1..388: note = protein_5775e8b
  REGION 4..160: note = RuvC_domain
  SITE 7: note = RuvC_P1
  SITE 58: note = RuvC_P2
  SITE 98: note = RuvC_P3
  SITE 100: note = RuvC_P4
  SITE 103: note = RuvC_P5
  REGION 264..351: note = Tnp_domain
  SITE 272: note = Tnp_P1
  SITE 302: note = Tnp_P2
  SITE 310: note = Tnp_P3
  SITE 311: note = Tnp_P4
  SITE 324: note = Tnp_P5
MIYLGIDIAKLNHFASAISSDGEILIEPFKFTNDYDGFYLLLSKLAPLDQNSIIIGLESTAHYGDNLVRFLISNDFNVCVLNPIQTSSMRKNNIRKTKTDKVDTFIIAKTLMMQDSPRFLTLEDLDFIELKELGRFRQKTVKQRTRLKIQLTSYLDQVFPELQYFFKSGIHQNSVYALLKEAPTPNAIASMHMTHLASLLTKTSHGHFNKETARNLRVLAQKSVGINDSALSIQITQTIAQIELLDSQLFHTELEKANLVTCLHSVIMTIPGIGSTNGGMILGEIGDIHRFSTPNKLVAFAGLDPSVHQSGNFQAQRTRMSKRGSRVLRFALMNAAHNVVKNNLTFKTYYDKKRAEGRSHYNALGHCAGKLVRVIWKMLTDNVEFNLN

SEQ ID NO: 18624 - protein, 283 aa, unidentified
  source 1..283: note = protein_2c87113
  REGION 5..89: note = RuvC_domain
  SITE 28: note = RuvC_P3
  SITE 30: note = RuvC_P4
  SITE 33: note = RuvC_P5
  REGION 151..236: note = Tnp_domain
  SITE 159: note = Tnp_P1
  SITE 189: note = Tnp_P2
  SITE 197: note = Tnp_P3
  SITE 198: note = Tnp_P4
  SITE 210: note = Tnp_P5
MARQILKLGHEVKLIAPQYVRPFVKRQTNDAADAEAIVIAAQRPEMRFVEMKSAEQRANAVLFRARERIVHQRTELVNALRAVLYEYRHIVPQGLVQLKRIEAILAERDSDLPMLVREECRDLLAQIAEKTARIEAKTRKARELAGGTNMARRLQTMPGVGPLTALAVEAFAPKMATFARGRDFAAWLGLVPRQHSSGGKERLGRVSKAGQVDIRRLLIIGAMSRLNWRGRRSIDEGSWLARMLARKPRMLVAIALANKMARAIWAMLTKEKDYQDPALAVAA

SEQ ID NO: 18625 - protein, 342 aa, unidentified
  source 1..342: note = protein_e886430
  REGION 8..150: note = RuvC_domain
  SITE 11: note = RuvC_P1
  SITE 54: note = RuvC_P2
  SITE 89: note = RuvC_P3
  SITE 91: note = RuvC_P4
  SITE 94: note = RuvC_P5
  REGION 212..298: note = Tnp_domain
  SITE 220: note = Tnp_P1
  SITE 250: note = Tnp_P2
  SITE 258: note = Tnp_P3
  SITE 259: note = Tnp_P4
  SITE 271: note = Tnp_P5
MMSNIHILGIDLGKRTFHCVGHDRHGHEVLRKKLNRAKLLLFLSDLPTTTIAFESCGGAHWLARKCKSYGHEVKLIPPQYVKPYIKSNKNDYIDASAIAEAASRPSMRFVAIKSENAQVISVILRARDAYLKERTATMLRIGAILVEFGLSLPKGHATMKKLFQWLAEQHESLPHLLILELKELHEHYLYLSERIQRQETKLIQMTAENEVGELLMTIPGIAHITASTCLAAIASPSHFKCGRDMAAWIGLVPRQYSTGGKNTLLGISKRGNKRLRTLFIHCARSILSKPETTGKCFESWLTKLRATKPFNVVIVALANKLARIAWAVMNTHQAFNARMLVS

SEQ ID NO: 18626 - protein, 347 aa, unidentified
  source 1..347: note = protein_a0f8dba
  REGION 13..155: note = RuvC_domain
  SITE 16: note = RuvC_P1
  SITE 59: note = RuvC_P2
  SITE 94: note = RuvC_P3
  SITE 96: note = RuvC_P4
  SITE 99: note = RuvC_P5
  REGION 218..305: note = Tnp_domain
  SITE 226: note = Tnp_P1
  SITE 256: note = Tnp_P2
  SITE 264: note = Tnp_P3
  SITE 265: note = Tnp_P4
  SITE 277: note = Tnp_P5
MDKYSDREVIKVVGIDLAKSIFHLHGVDMHGKVVMRRKLSRDKLTTLMSRLTPCLVGMEACGGSHDWARKLMSMGHDVRLMSPQFVKPYVKSNKNDMVDAEAICEAVQRPNMRFVPIKGVEQQDIQSLHRARSLAVSHRTALVNQMRGLLLEYGMPVVKGVASLRKALPEMLEDADNGLTPMFRGLLSGLQDELHRLNERIAAYDMQIKCLSEQSDACRRLMTIPGVGPMTATALVAAVADAKVFKSGREMSAWLGLVPRQHSTGGKPKLLGISKRGDTYLRKLLIHGARAALRFADRKQDRRSRWVVELEVRRGRNIAAVALANKTVRTAWVLLCGSEEYKAATAA

SEQ ID NO: 18627 - protein, 346 aa, unidentified
  source 1..346: note = protein_ba61f81
  REGION 5..152: note = RuvC_domain
  SITE 8: note = RuvC_P1
  SITE 55: note = RuvC_P2
  SITE 92: note = RuvC_P3
  SITE 94: note = RuvC_P4
  SITE 97: note = RuvC_P5
  REGION 212..300: note = Tnp_domain
  SITE 220: note = Tnp_P1
  SITE 250: note = Tnp_P2
  SITE 258: note = Tnp_P3
  SITE 259: note = Tnp_P4
  SITE 271: note = Tnp_P5
MKHYAGLDVAVKETAICIVDETGAICREGKVPSHPEDLVRALTDPAWALERIGLEAGPLSQWLFSGLAEAGLPVTCIETRHTKAFLKAQPNKSDRIDARGIAQMMRVNLFRPVHVKTLTSQKRLALLTARKLLQEKAIAIDNDIRGLLRNFGLKVGMVGAVKFAHRIRELTEDMPELAEILEPLLDARDKLRQHFGALHRKVLMLVRKDETCRRLMSIPGVGPVTSMAYTATIDIPQRFRNSKAVGPILGLTPVLHESGESRRIGRITLCGDGLLRSLLYESAQVLLTRATKWSWLKAWAMNVAKRRGARKAIVALARRLAVIMHRIWIDGTQFRWTRQDLVPVAG

SEQ ID NO: 18628 - protein, 394 aa, unidentified
  source 1..394: note = protein_b5201d8
  REGION 4..164: note = RuvC_domain
  SITE 7: note = RuvC_P1
  SITE 59: note = RuvC_P2
  SITE 99: note = RuvC_P3
  SITE 101: note = RuvC_P4
  SITE 104: note = RuvC_P5
  REGION 267..354: note = Tnp_domain
  SITE 275: note = Tnp_P1
  SITE 305: note = Tnp_P2
  SITE 313: note = Tnp_P3
  SITE 314: note = Tnp_P4
  SITE 327: note = Tnp_P5
MLTVGIDAGKLSHYFAIVNTNDGEVLIEPTKFKNNKQGFDTLLQSLKKLSKEDLLIGIEDTGHYHFALLKFLLDNDYTVALINPVTTDLTRKLQGGISKNDKLDSLTLCDVLSSNSRKKPYRITKVNTFDLYEQKQLTRHHHNLKEELNVHSNRLQKCIDIVFPEFNSLFKSKYGAVYMNILRTFTSADKIAHSDIRSIRKCFEIQGRGNRISLTAEELKEAAKNSIGIPSVADELQIKHLVFQIELIKEQIAEIDKKIEEFSAKNNSPILTIPGISHFSGTSILAELGDIRNYSKASKIIKFAGVAPYEYESSQFRAEHTAIAKKGSKYLRKTLYQIILPVINHNSVFKQYYSLKISQGKSHRCAQGHCVRKLLRVIYHLLSTNQKFDPSLLR

SEQ ID NO: 18629 - protein, 284 aa, unidentified
  source 1..284: note = protein_b7fb078
  REGION 6..147: note = RuvC_domain
  SITE 9: note = RuvC_P1
  SITE 52: note = RuvC_P2
  SITE 87: note = RuvC_P3
  SITE 89: note = RuvC_P4
  SITE 92: note = RuvC_P5
  REGION 211..273: note = Tnp_domain
  SITE 219: note = Tnp_P1
  SITE 249: note = Tnp_P2
  SITE 257: note = Tnp_P3
  SITE 258: note = Tnp_P4
MNVTTIGIDLAKTVISIHGTNQHGEVVVRKRLNRPKLLAFFAQLPPCLTGMEACSGAHYWARELTKLGHDAWIIAPRFVAPNRKSSKNDDNDAEAICEAASRPNMRFVPIKTQDQQAVLSLHRIRRGLIKERTAQINQIRGLLAKFGLIMPLGRYHARRRIPEILEDAENGLPILARRLLSNINQRILQLDEEILAYDREIEAMARRDEQVKRLMAIPGIGPQTATAILASAPDPRQFKSGRHFAAWLGLVPRQYSTGGKPRLAESLNAGTNICEPCSSMTPER

SEQ ID NO: 18630 - protein, 328 aa, unidentified
  source 1..328: note = protein_b7d07cb
  REGION 4..155: note = RuvC_domain
  SITE 7: note = RuvC_P1
  SITE 60: note = RuvC_P2
  SITE 100: note = RuvC_P3
  SITE 102: note = RuvC_P4
  SITE 105: note = RuvC_P5
  REGION 200..286: note = Tnp_domain
  SITE 208: note = Tnp_P1
  SITE 237: note = Tnp_P2
  SITE 245: note = Tnp_P3
  SITE 246: note = Tnp_P4
  SITE 259: note = Tnp_P5
MIYLGIDVSKLKLDCTLLLDPDNDKRKTKVVANSRDGVRELIRWCVKHGVDAGQVHAVLEATGPYHEQAATTLHDNGVAVSIANPANVRDFSRALAMRSKTDALDSVVLARYGVAMRPAAWQPPPPHVRELRALITQLEALSKDRLRTINRQEKIEVSAVSELVERSISDTLDFYDREIARLTKAIEDHIDRHPDLKEDTRLLSSIPGVGPKVARTILRVIRTHQFKCAEDLAAYLGLVPVQRQSGSSLRGRSRMSKAGPADVRAIVYMAGIVASKHNPHVRAMYQRLLAAGKTKMSAIGACMRKVVHLCFGVLKTRQVYRPDYAFST

SEQ ID NO: 18631 - protein, 412 aa, unidentified
  source 1..412: note = protein_0c50db2
  REGION 5..164: note = RuvC_domain
  SITE 8: note = RuvC_P1
  SITE 63: note = RuvC_P2
  SITE 103: note = RuvC_P3
  SITE 105: note = RuvC_P4
  SITE 108: note = RuvC_P5
  REGION 274..374: note = Tnp_domain
  SITE 282: note = Tnp_P1
  SITE 312: note = Tnp_P2
  SITE 320: note = Tnp_P3
  SITE 321: note = Tnp_P4
  SITE 334: note = Tnp_P5
MNPVVGLDISKGESQVQAFLDKSQPYRKSFSIKHTLDGLGGLLEFLKEIERLADGKQPSVILESTGQYHIPVIQFLEEQQYVYIIVNPLVSHRARSTNLRKVKTDAIDAYHLCELYYKEELEPYKKRGIQLLNLRNLTRQQETISSTAAQTKLQLQSILDQIFPEYRGVFGNLYSKISLQILSLFPTSEDVLSVGECDLTDKIAELCTTRSEKWAKEKAHKLREAALRNPFQNNLYQSHIFNLKMFINIVLQYQEHLSMLATEIDALAKEIEECEIIQSIPGIGEKIAATIISEIGEIDRFNHPKKLVAFAGIDPSVYSSGRFTASINRITKRGSSRLRQALFMAVQCGIRDARKQKTSDEIIPRNKRLRKFYDKKREEGKPFRVAIIACANKLLHWIYALLKRKVTFQNEA

SEQ ID NO: 18632 - protein, 403 aa, unidentified
  source 1..403: note = protein_562d51c
  REGION 6..159: note = RuvC_domain
  SITE 9: note = RuvC_P1
  SITE 57: note = RuvC_P2
  SITE 98: note = RuvC_P3
  SITE 100: note = RuvC_P4
  SITE 103: note = RuvC_P5
  REGION 221..306: note = Tnp_domain
  SITE 229: note = Tnp_P1
  SITE 259: note = Tnp_P2
  SITE 267: note = Tnp_P3
  SITE 268: note = Tnp_P4
  SITE 279: note = Tnp_P5
MQQIIIGVDPHKLSATIELVDDRERFLGSGRFTTDQAGYTAMLRYAKAWPERVWAVEGANGAGRPLAQRLLEAGESVVDVPAKLAARVRLFDTGHNRKTDALDAHSIAIVAVRTEGLRVLKVDGELEALRMRTDRREALTRRRVQTVNRLQALLAELLPGQAKRDITTLQAKAMLASVRPRDIAGKTRRCIAVEELAELVAVEAKIKKATAELKAIVLARDSHLMDIHGVGPVVAARVLADVGDVARFADRNRFASWTGTAPLDASSGEQNRHRLSRAGNRRMNHMIHIAAVTQIRLDTEGRAYYRRKRAEGKKPLEAMRCLKRRISDALYRQLLADQQRVAGAEPGAGPGGHCGASQESSAVDLPPHIDTSDQPLPGPAEPTLRPAPTSRKTDRGRNLEATG

SEQ ID NO: 18633 - protein, 428 aa, unidentified
  source 1..428: note = protein_fb83370
  REGION 26..171: note = RuvC_domain
  SITE 29: note = RuvC_P1
  SITE 75: note = RuvC_P2
  SITE 110: note = RuvC_P3
  SITE 112: note = RuvC_P4
  SITE 115: note = RuvC_P5
  REGION 272..359: note = Tnp_domain
  SITE 280: note = Tnp_P1
  SITE 311: note = Tnp_P2
  SITE 319: note = Tnp_P3
  SITE 320: note = Tnp_P4
  SITE 331: note = Tnp_P5
MTIDRVPCRKFIPGGAIMDKIYDKCCGIDVHKKLIVACFRRGNRQEVREFGATTRELLTLADWLKEGGCQMVAMESTASYWKPLYNILESSDLNAMVVNAHHMKAVPGRKTDVKDAEWIADLLQHGLLQASYIPDKDQRELRELVRYRKSLVGERTRELNRLQKMLEGANIKLSGTVEDINGRSARNLLEYLLTGKPFDEAKYDEMYEKKLIAHNLKATKEQIIEDLNGVMTPLQRRMMKELPAHLDELNVHIKNLDDEIDNFMKPEEKQASQAIQSVTGIGNTSAQAVISVTGTDMERFPTDAHISSWAGLCPGDNESAKKRKSGKTRKGNALLRTTLITCAHSAVKNKSSCFYAQYMRISAHRGKKRAYVAVAHSMLTAIYHILKEGVVFKDPGADYYNQFNKERKINAYLKKLKSLGWEPTVVAT

SEQ ID NO: 18634 - protein, 393 aa, unidentified
  source 1..393: note = protein_e822ec3
  REGION 5..159: note = RuvC_domain
  SITE 8: note = RuvC_P1
  SITE 59: note = RuvC_P2
  SITE 98: note = RuvC_P3
  SITE 100: note = RuvC_P4
  SITE 103: note = RuvC_P5
  REGION 268..354: note = Tnp_domain
  SITE 275: note = Tnp_P1
  SITE 305: note = Tnp_P2
  SITE 313: note = Tnp_P3
  SITE 314: note = Tnp_P4
  SITE 327: note = Tnp_P5
MQNVLAIDVAKSKSMVTLISSSGEVLIDPYEINHSINDFTNLLNRINKLKLENISVIMESTGVYHRPIERYFLEQNFKVFVINPIYGKMHKRNIRKTKTDKEDCFNLANLFFTNTFKEYIKPEQLYLDLNALSRQYFALDELCVNLKNRYRNLVYLCFPEYELIFKNNTIYSSIALDFIEKYPHANIISNTRIDCLQNFFKKHNFKYWKSKPIRIKEYAINSYPSVDMNDELVSNLSQIARLVNEYQKAIDVIKYKITFLAKKSKYFESINSIYGIGEFTTSIIIAELGDINRFNNIKELTAYCGLDPSIKQSGKSVDIHGPISKAGNKYMRKILYIACSNIIRLTAISKQENDIEIYYRKKRNEGKHHYASIVACTTKLLRKILALCKQLDK

SEQ ID NO: 18635 - protein, 346 aa, unidentified
  source 1..346: note = protein_fdd7a87
  REGION 11..153: note = RuvC_domain
  SITE 14: note = RuvC_P1
  SITE 57: note = RuvC_P2
  SITE 92: note = RuvC_P3
  SITE 94: note = RuvC_P4
  SITE 97: note = RuvC_P5
  REGION 215..298: note = Tnp_domain
  SITE 223: note = Tnp_P1
  SITE 253: note = Tnp_P2
  SITE 261: note = Tnp_P3
  SITE 262: note = Tnp_P4
  SITE 274: note = Tnp_P5
MEASVEKVSIIGLDIAKSVFQAHGAEASGAVVFRKKINRAKLLEFFASQPPCTVAMEACGGAHHWGREMAKLGHEVKLIAPKYVKPFVKRQKNDAADAEAICEAACRPTMRFVAVKSETTQASALVFRTRDLLVRQRTQITNAMRGHLTEYGLVVPQGAGHFKKLVAHLEDPASPLPNEVRSILSLLSQTAMRLDEKISLLDKEIARRTRDDEIARRLMTIPGVGPITATAIAALAPPAATFRKGRDFAAWVGLTPLQKSTGGKQKLGATSKMGERTIRRLLIIGAAAAIHHATRRGVPPTTWLGRMLARKPRMLVTVALANKMARIVWALLVKGEDYRAPGGAAA

SEQ ID NO: 18636 - protein, 329 aa, unidentified
  source 1..329: note = protein_ddc8a6a
  REGION 6..157: note = RuvC_domain
  SITE 9: note = RuvC_P1
  SITE 60: note = RuvC_P2
  SITE 98: note = RuvC_P3
  SITE 100: note = RuvC_P4
  SITE 103: note = RuvC_P5
  REGION 204..290: note = Tnp_domain
  SITE 211: note = Tnp_P1
  SITE 241: note = Tnp_P2
  SITE 249: note = Tnp_P3
  SITE 250: note = Tnp_P4
  SITE 263: note = Tnp_P5
MKKLFIGLDVSKDVFDFCALNDLGEQESSKKVFQNSKQGIDQFCKSLKKWNDSDILICLEHTGHYGYLLSYELAKRNLKYALINPLEIKNSIGMTRGKNDAIDAYRIAYYALTHYRKIKPHVLPIEDLQKLKALMGIRDGYVKIIVQLKNSLKALEIINESVNIKSQINDHKLLIKRFEKSIDKVEKQMMEIINKNEDIKKAFTKINTVIGVGMLTAIKCIIETDNFTKFKDGRKFSCHCGLAPFEYQSGSSVRGRTRTSSLNNKELKSILFKAAATAIQHDPQLKGYYLRKLDQGKHKLSVLNAVANKIVLRIFAVVKREEPFVKLIA

SEQ ID NO: 18637 - protein, 354 aa, unidentified
  source 1..354: note = protein_e522617
  REGION 8..149: note = RuvC_domain
  SITE 11: note = RuvC_P1
  SITE 54: note = RuvC_P2
  SITE 89: note = RuvC_P3
  SITE 91: note = RuvC_P4
  SITE 94: note = RuvC_P5
  REGION 213..299: note = Tnp_domain
  SITE 221: note = Tnp_P1
  SITE 251: note = Tnp_P2
  SITE 259: note = Tnp_P3
  SITE 260: note = Tnp_P4
  SITE 272: note = Tnp_P5
MCKAATLIGIDLAKNVFHIHSVDNKGNQIKALKLSRHKLEEYLHRSQPVIVAMEACASSHFWGRLCMSLGHEVRLVSPQFVKPFVKSNKNDRNDARAICEAALRPDMHFVPAKTVEQQAVLSLHRIREVLIGQRTATINQLRGLLSEFGLPTPVGRSGLYKILPTLLEELSELSPGFLVTCISQQWVHLQQLEQHINNVTHQIEAHARQSDVAYRLQTIPGIGPITASALDASIGNARQFRAGRHLAAWLGLVPRQHSTGGKPVLLGTSKRGDCYLRQLFVHGARAVISVAQRNEGKRDKTITGWLSRKHINVAVVAMANRNARIAWAIIVHERTYDAQFREELAGRLLARKDE

SEQ ID NO: 18638 - protein, 388 aa, unidentified
  source 1..388: note = protein_9b826a5
  REGION 44..187: note = RuvC_domain
  SITE 82: note = RuvC_P2
  SITE 121: note = RuvC_P3
  SITE 123: note = RuvC_P4
  SITE 126: note = RuvC_P5
  REGION 258..345: note = Tnp_domain
  SITE 266: note = Tnp_P1
  SITE 295: note = Tnp_P2
  SITE 303: note = Tnp_P3
  SITE 304: note = Tnp_P4
  SITE 316: note = Tnp_P5
MPQQRKPNDLSRSLTALDMDTTLIAVVELSLSSWLVAGIVPGVERQPLKKLKTDESALLALLNRWRDEAVRSGYKISRIAVAFEAGRDGFWLARWLNARGIEAHVIHASSVAVSREHRRAKTDRLDTEHLKRAFVGWLRGERDHCKMAAIPSFREEDAKRPSRERESLVGEQSRLVNRMKATLIRLGIRGFNPKLRHAEQQLEALRTPEGEPIPPNTLAELKRDMQRRRFICDQIRSIEQERLERLERTPDTKPHAMVRLLARVTGIGIETADLLVHELLLRNMRDRRAVARYGGLTGSPERSGATSREKGMARSGNARVRRGMVQLAWRFLLFQKDSALAQWYRQRTEKAPKARKTMIVALARKLLIALWRLVREGVIPEGVVMRPA

SEQ ID NO: 18639 - protein, 319 aa, unidentified
  source 1..319: note = protein_2b1efb5
  REGION 6..161: note = RuvC_domain
  SITE 9: note = RuvC_P1
  SITE 57: note = RuvC_P2
  SITE 97: note = RuvC_P3
  SITE 99: note = RuvC_P4
  SITE 102: note = RuvC_P5
  REGION 192..278: note = Tnp_domain
  SITE 200: note = Tnp_P1
  SITE 230: note = Tnp_P2
  SITE 238: note = Tnp_P3
  SITE 239: note = Tnp_P4
  SITE 251: note = Tnp_P5
MSNVIIGVDIAKLKFDVARLCDGKYKHAKFTNDAQGYADFIVWLISFGDENLRICMEATGAYSLPLAEFMTDKGYFVSVINPAQIHAFGKSELSRTKTDKADAKLIARYGMQAKLDAWVPLPVNIRELQAMTRRIEHLLEMQQMERNRLDTADTAIIDSINTVLNTLEAELKATRKAIHDHIDNDPDLKRRSGLLDSIPGIGSATIAHLLVALSPHHGYTSAKQAVAHAGLAPAIRESGQWTGKTRIAKNGDAALRKALYMPALVAWQHNPVIRAFCERLKGNGKNGKAIACAAMRKLIHLAFAILKSGEPFDPNFSLA

SEQ ID NO: 18640 - protein, 344 aa, unidentified
  source 1..344: note = protein_ce24a5e
  REGION 7..148: note = RuvC_domain
  SITE 10: note = RuvC_P1
  SITE 53: note = RuvC_P2
  SITE 88: note = RuvC_P3
  SITE 90: note = RuvC_P4
  SITE 93: note = RuvC_P5
  REGION 213..297: note = Tnp_domain
  SITE 221: note = Tnp_P1
  SITE 251: note = Tnp_P2
  SITE 259: note = Tnp_P3
  SITE 260: note = Tnp_P4
  SITE 272: note = Tnp_P5
MSEVTTIGLDIAKTVFHAHGADERGGLVFSRKLGRAKLLDFFAKQPACLVAMEACSGAHHWARELRTMGHEVRLIPPAYVKPFVKRHKNDAVDAEAICEAVQRPGMRFVAVKSEEQQAAGMVFRTRDLVVRQRTQLVNALRGHLAEFGWVAPRGLAQVTMLADLLDEEEMASSLPEAAQAMLRVMADMLAGLDDRIADLDKEIARRAREDEVARRLMTIPGIGPIAATAIVALAPPAETFTKGRDFAAWLGLAPLQHSTGGRQKLGRISKMGERTIRRLLIIGGSSVVRQATVRGAPAGSWLERMLARKPHMLVSVALANKMARIAWALMTRNEDYRDPAAVAA

SEQ ID NO: 18641 - protein, 355 aa, unidentified
  source 1..355: note = protein_c03c6ab
  REGION 24..179: note = RuvC_domain
  SITE 26: note = RuvC_P1
  SITE 77: note = RuvC_P2
  SITE 117: note = RuvC_P3
  SITE 119: note = RuvC_P4
  SITE 122: note = RuvC_P5
  REGION 283..355: note = Tnp_domain
  SITE 291: note = Tnp_P1
  SITE 321: note = Tnp_P2
  SITE 329: note = Tnp_P3
  SITE 330: note = Tnp_P4
  SITE 343: note = Tnp_P5
MIIDGGHHGIRLYEREVQPHDLRSIDIAKLNHFAAAISVEGEVLIEPFKFTNDFDSFQLLISKLDSFEKDSIIIGLESTVHYGDNLVRYLVTESYQVCVLTPIKTSQMRKNSIRKTKTDKVDTVVIAKTLMMQDSLRFVSFYDLDLMDLKALGRFRHKTIKQRTRLKIQLTTYVDQVFPEIQYFFKSGLHQKAIYALLKEAPSPKEVASMHMTHLANLLKVNSHGHFTKEQAKELRVLAQKSVGANNSSISIQITQTIQQIELPDSQLVKIESEMADIMKFNDSVIMTIPGIGYINGGMILGEIGNIHRFSNPNKLLAFSGLDPSVYQSGNYQAKKTRISKRGSHTLRYALVNAA

SEQ ID NO: 18642 - protein, 395 aa, unidentified
  source 1..395: note = protein_cc15435
  REGION 5..156: note = RuvC_domain
  SITE 8: note = RuvC_P1
  SITE 57: note = RuvC_P2
  SITE 96: note = RuvC_P3
  SITE 98: note = RuvC_P4
  SITE 101: note = RuvC_P5
  REGION 266..351: note = Tnp_domain
  SITE 274: note = Tnp_P1
  SITE 304: note = Tnp_P2
  SITE 312: note = Tnp_P3
  SITE 313: note = Tnp_P4
  SITE 325: note = Tnp_P5
MKHILSFDIAKGKSVYCFIDELRNTIIDATLIEHNKSEFDNLFKLVKDYSNLIVLMESTSIYHLPVENYFRSKGIDTVVINPKLVKQFKDTLNKSKTDKLDCFKIARCYLGTIDNFYFKNDEYFIYNPLARQYWSLVEGQTRLKNRYKQLIEIVFPEFNLIFNDLYDDLALNFIHDFPHPALFINRRTDYLMNYLKDKNGTTQAFRFKNKVLKMKELASNSLCFVCFDSYQVQNLVQVIEIIQFHKSEINKIKNHLINEMKNKKLFKIINSIPGFGEFSSALFLAEVGDITRFDDKYQFISFVGIDSVTSQSGVAAYHGPISKTGCKFGRTILFNVVTTLLQISAHTDKTNPIYLFFRKKQSEGKHHYKCIIACETKLCKIIYKLCTSNCLYSNK

SEQ ID NO: 18643 - protein, 344 aa, unidentified
  source 1..344: note = protein_ef087ef
  REGION 5..152: note = RuvC_domain
  SITE 8: note = RuvC_P1
  SITE 55: note = RuvC_P2
  SITE 92: note = RuvC_P3
  SITE 94: note = RuvC_P4
  SITE 97: note = RuvC_P5
  REGION 212..300: note = Tnp_domain
  SITE 220: note = Tnp_P1
  SITE 250: note = Tnp_P2
  SITE 258: note = Tnp_P3
  SITE 259: note = Tnp_P4
  SITE 271: note = Tnp_P5
MEHFAGLDVSVNETSICIVDDAGRIVRETKVASEPDALLAVLKNTAYHFKRIGLEAGPLSQWLYSALAEVNLPVICVETRHMRAVLKAQINKTDRNDARGIAQMMRAGLYRPVHVKTLRSQKLRMLLTHRKLLQSKAIAIENDLRGTLRNFGLKVGVVGAAKFEARIRELVEKLPDLAVLVEPLLIVRRTLREQLGILHRHLLDLARDDEVCRRLMTVPGIGPVVALTYRASIDVPARFRNSRAVGAVLGLTPCKYQSGERDHTGAISKCGDEMMRVMLYEAAQILLMRSTKWSWLKAWAMQIARRRGVKKAIVALARRLAVVMHRIWVDGTEFRWSRQAATAA

SEQ ID NO: 18644 - protein, 340 aa, unidentified
  source 1..340: note = protein_b92bb86
  REGION 6..147: note = RuvC_domain
  SITE 9: note = RuvC_P1
  SITE 52: note = RuvC_P2
  SITE 87: note = RuvC_P3
  SITE 89: note = RuvC_P4
  SITE 92: note = RuvC_P5
  REGION 211..302: note = Tnp_domain
  SITE 219: note = Tnp_P1
  SITE 249: note = Tnp_P2
  SITE 257: note = Tnp_P3
  SITE 258: note = Tnp_P4
  SITE 270: note = Tnp_P5
MQITTIGLDLAKSIFQVHGIDASGQTAVRKKLRRAEVLRFFQALPPCLVGMEACATAHYWAREIGACGHDVRLMAPSYVKAYLRRQKNDAADAEAICEAVQRPTMRFVPVKSAERQGVLVLHRTRELLVRHRTMLINAIRGHCAEFGIVAPQGARRAVELIEHIRQTEAGDISQLVRASLLTLADQLDAIAVQIHALERRLLVWHRQDQDSQRLATIPGVGIISATALAASVPDPKLFRSGREFAAFLGLVPRQNSSGGKARLGRISKMGDRYLRKLLVVGATSVIRRARTGALAAAPWIRSLLERRPARVVTVAMANKTARIVWAVLARGEVYRAPASA

SEQ ID NO: 18645 - protein, 391 aa, unidentified
  source 1..391: note = protein_dc7c344
  REGION 4..163: note = RuvC_domain
  SITE 7: note = RuvC_P1
  SITE 60: note = RuvC_P2
  SITE 101: note = RuvC_P3
  SITE 103: note = RuvC_P4
  SITE 106: note = RuvC_P5
  REGION 266..353: note = Tnp_domain
  SITE 274: note = Tnp_P1
  SITE 304: note = Tnp_P2
  SITE 312: note = Tnp_P3
  SITE 313: note = Tnp_P4
  SITE 326: note = Tnp_P5
MIFVGIDVAKDKHDCFITNSDGEVLFQSFTIANNLFGFDDLYQKVVSVMENVSKVKVGLEATGHYSYNLLGYLFDKGFPTYIINPLHTNLYRKSLSLRQTKTDKVDARTIASMLMSDVNLKSYSDTSYHNEELKSLTRYRFDKVKERSALKVSISRLVCILFPELEKLVPVLHCSSVYSMLYEFPGAKQVAAAHLTRLSNLLDKASKGHYKKDTAITFREAARNSIGSNMPAKSLELKHTIRLIRELDSEIDEIENEIKVIMDRISSPILSIPGISYRMGAMIIAEIGDFTRFDSPDKILAYAGLSPSTYQSGQMDNSHARMEKRGSKYLRYALFNAMIYVCTWDPTFKTYLAKKRSEGKHYYVAVSHAAKKLVRVIYQLEKSRQPYQKQF

SEQ ID NO: 18646 - protein, 340 aa, unidentified
  source 1..340: note = protein_640b3b8
  REGION 6..147: note = RuvC_domain
  SITE 9: note = RuvC_P1
  SITE 52: note = RuvC_P2
  SITE 87: note = RuvC_P3
  SITE 89: note = RuvC_P4
  SITE 92: note = RuvC_P5
  REGION 210..297: note = Tnp_domain
  SITE 218: note = Tnp_P1
  SITE 248: note = Tnp_P2
  SITE 256: note = Tnp_P3
  SITE 257: note = Tnp_P4
  SITE 269: note = Tnp_P5
MNIKRIGLDLAKNVFQIHAVDHREHVVLRKTLRRDRMAAFFTQLSPCLIGIEACGSAHYWARELTRMGHTVRIIPPRLVKPYLKGQKNDANDAEAICEAVSRPGMRFVAIRTERQQMLQAEHRVRARLIRARTALSNEIRGLLGEFGVVLPAGIAQLRKALPEIVSQQVQWDECFIRLLCELSEELQGLDERVARHDRRLQQSARDDIRIKRLLAIEGMGPVVASALVAAVGDGRQFRSGREMAAYLGLVPRQHSSGGKARLGHISKRGDRYVRTLIIHGARAVLNACQNKTDRRSQWLQGVSERRNRNIATVALANKNARIAWALLSREEDYHGIQVTG

SEQ ID NO: 18647 - protein, 342 aa, unidentified
  source 1..342: note = protein_d1ffc53
  REGION 12..152: note = RuvC_domain
  SITE 15: note = RuvC_P1
  SITE 58: note = RuvC_P2
  SITE 93: note = RuvC_P3
  SITE 95: note = RuvC_P4
  SITE 98: note = RuvC_P5
  REGION 217..302: note = Tnp_domain
  SITE 225: note = Tnp_P1
  SITE 255: note = Tnp_P2
  SITE 263: note = Tnp_P3
  SITE 264: note = Tnp_P4
  SITE 276: note = Tnp_P5
MRTKPIPETAAFGIDIGKKVFHVVALNAAGTVIQRAKFSRDTLMAFFEVAPKVLIGMEACPGSQWLARRLAAMGHDARIIPARFVKPYVKSNKTDTVDAAAIAEAVTRPTMRFVKVRTPEQVDLQALHRIRDRLVGQRTAVMNQARAFCIEYGLAMRVGAGGFHADIRRHLANEENDLTSTMRVLLAELLDDLGYIEGRIKAVNGKVEAYARENDTVSRLVTIPGIGALSATAVVAAAGDGRQFRKARDLAAWLGLVPAGHSTGGKQTLLGISKRGNRYVRRLIIHGARSCFLHLNRANHALGSWLSALEARTHRNKAVVALANKLTRIVWDVMTKRLIDHG

SEQ ID NO: 18648 - protein, 315 aa, unidentified
  source 1..315: note = protein_44218d4
  REGION 8..124: note = RuvC_domain
  SITE 11: note = RuvC_P1
  SITE 52: note = RuvC_P2
  SITE 92: note = RuvC_P3
  SITE 94: note = RuvC_P4
  SITE 97: note = RuvC_P5
  REGION 187..273: note = Tnp_domain
  SITE 195: note = Tnp_P1
  SITE 224: note = Tnp_P2
  SITE 232: note = Tnp_P3
  SITE 233: note = Tnp_P4
  SITE 245: note = Tnp_P5
MQPSTLFVGVDISKAELVICIAGQRPCSIANDAASIRAWLRTVPAHALIAMESTGRYHALLAQLAYQAGLQVYVLNARDVFFYARALGTRAKTDAVDAVVIARYLEQHHCALASLAPRQRHPAAAAGIARAPCTGSGASNRLDPGVCRRADGAQLAGLNAAFQALLKSIDAQVQRLIDSDARMARGYRLLLTITGIGPQSGALLTTLFSRLEFANADALVGYSGLDPRANDSGTRHGRRRLSKKGPALLRRQMWLAGFSASRSKLFAPWYQTLRAKGFASTEAIVIMGRKLLRVAFAVWKSDQAFDSQKLGPKPA

SEQ ID NO: 18649 - protein, 391 aa, unidentified
  source 1..391: note = protein_896fa49
  REGION 4..161: note = RuvC_domain
  SITE 7: note = RuvC_P1
  SITE 59: note = RuvC_P2
  SITE 99: note = RuvC_P3
  SITE 101: note = RuvC_P4
  SITE 104: note = RuvC_P5
  REGION 265..351: note = Tnp_domain
  SITE 272: note = Tnp_P1
  SITE 302: note = Tnp_P2
  SITE 310: note = Tnp_P3
  SITE 311: note = Tnp_P4
  SITE 324: note = Tnp_P5
MINIGIDVGKFKHCASAIDDKTGEILIKPFFFNNDQKGFNLFYSKTKQYIHRKHSVGMEDTGHYMINLTDFLLDKKFTVRFINPRSTCLRRKELGMSAKNDRKDSILIAEMLSEKKFWRSVTRITQETDKLREITRLYHQLQEQQNEDMNRLQRALDIVFPEVNKLSWTRYSKTYMQFLAKYPTAASIASEDIRNLRNALKTDGRGRQCKLTAEDIKEAAKCSVGEDNIAVALEVQSIIAIINTRKQQIENLENKIEEFSLKLNSPIISIPGISHITGMTIIAEIGDIHDFSDAAHLISYAGMEPLVHQSGKYDAAHMPISKHGSRYLRKALYQAVFTVCKYCPTFNAYYTKKRNQGKTYRCAQGHCVRKLLRVIYKLLESNIAFDENLVK

SEQ ID NO: 18650 - protein, 343 aa, unidentified
  source 1..343: note = protein_7af6b83
  REGION 7..149: note = RuvC_domain
  SITE 10: note = RuvC_P1
  SITE 53: note = RuvC_P2
  SITE 88: note = RuvC_P3
  SITE 90: note = RuvC_P4
  SITE 93: note = RuvC_P5
  REGION 212..300: note = Tnp_domain
  SITE 220: note = Tnp_P1
  SITE 250: note = Tnp_P2
  SITE 258: note = Tnp_P3
  SITE 259: note = Tnp_P4
  SITE 271: note = Tnp_P5
MQAVTTIGLDIAKSVFQVHGVDANGLVVIRRQLKRRYVLAFFAKQPPCLVGIEACASSHHWSRELQALGHTVRPMPPAYVKPYVKRQKNDMADAEAICEAVTRANMRFVPTKTPEQQSGLVLHRTRHLFIRQQTSVINAIRAHLAEFGVTAPVGRKGIEELLRIIADPSDKRVPDVVRACLAALGSQLLSLKKQILDFDRMIVAWHRSDPTSKRLNCILGVGPLLATALVSSVGDPKVFRSGRNFSAWIGLVPKQHSSGGRARLGSISKQGDRYLRSLFVAGALAVIRYAKLHGTKYRPWVAALLARRPTKVAAIALANKLARMAWAMMARGERYNYPTALRV

SEQ ID NO: 18651 - protein, 266 aa, unidentified
  source 1..266: note = protein_06ed074
  REGION 5..89: note = RuvC_domain
  SITE 28: note = RuvC_P3
  SITE 30: note = RuvC_P4
  SITE 33: note = RuvC_P5
  REGION 133..221: note = Tnp_domain
  SITE 141: note = Tnp_P1
  SITE 171: note = Tnp_P2
  SITE 179: note = Tnp_P3
  SITE 180: note = Tnp_P4
  SITE 193: note = Tnp_P5
MQQKSIGVYLCLEDAAKIKYCHGIPRGKNDKIDACRIAMYAERYNDCLQPYTASELIIQKLKNLSTERSMLVADRAKYQSQLKDQVDYMEHSIYIAKCNRVEGIINTFTDYIAQIDLEIKELINQAPVIAHQMDLLMSVDGVGERVALKMIMETDAFTSFTDPRKFCCHAGVVPFVYVSGSSQRSKNRVSNRADKSIKHLLHMAALSVSQVKNSPLKKYYDRKVEEGKNKMSVLNAVRAKLVTIMFAVIRADAFFREIIKIRLRNP

SEQ ID NO: 18652 - protein, 391 aa, unidentified
  source 1..391: note = protein_685929b
  REGION 4..161: note = RuvC_domain
  SITE 7: note = RuvC_P1
  SITE 60: note = RuvC_P2
  SITE 100: note = RuvC_P3
  SITE 102: note = RuvC_P4
  SITE 105: note = RuvC_P5
  REGION 266..353: note = Tnp_domain
  SITE 274: note = Tnp_P1
  SITE 304: note = Tnp_P2
  SITE 312: note = Tnp_P3
  SITE 313: note = Tnp_P4
  SITE 326: note = Tnp_P5
MFYIGIDIAKKNHEASIIDSSGKSLSKSISFPNSTKGIEKFNNFISEFGVTTNNCIIGMEATGHYWISLFSYIIDLGFTCYVINPIQSDAFRKMYVRQTKNDSVDSFIIAQIMRFGEFSISNFSDENTFALRNLTRYRFALVDECSDWKRKLVAILDQVFPEYSSLFSNIYGVASKELLSKYPLPEDMLSIPAEELGNLLYECSKGRLGINKAEEIQSRARESFGIKFAKRSFSFQIKQIISQISFLEEQLKEIEIEISCLLEDICPVITTITGIGSVLGASIVSEIGNITRFERANQLVAYAGLDTRVKQSGDFSATNTKLSKRGSPYLRRSIWLAATVAAFKDPALSIYYQGLRARGKAHGTAIGAVARKLTNIIFAVLRDQKPYTPNI

SEQ ID NO: 18653 - protein, 326 aa, unidentified
  source 1..326: note = protein_7e4e5c8
  REGION 4..155: note = RuvC_domain
  SITE 7: note = RuvC_P1
  SITE 60: note = RuvC_P2
  SITE 100: note = RuvC_P3
  SITE 102: note = RuvC_P4
  SITE 105: note = RuvC_P5
  REGION 200..286: note = Tnp_domain
  SITE 208: note = Tnp_P1
  SITE 237: note = Tnp_P2
  SITE 245: note = Tnp_P3
  SITE 246: note = Tnp_P4
  SITE 259: note = Tnp_P5
MLFVGIDVSKAKLDCSLLLDASSAKRRAKTVTNSKVGVSELLMWCAKYQAEPNELHAILEGTGVYHEPAALALADAGVTVSIVNPAQVKDFGRSLGVRTKTDGVDSWVLARYGALLNPRPWTPPAQEARVLQALLSRREAIAQDLQRERNRLEKAEATETPLLIRQSLLDSIAFLQQQLAKLQHDIDDHINKHPALKADRELLLSIPAVGPQVSNHLLAVMHNHRFQSAEQLAAYLGLVPVERQSGSSILGRPRLSKAGPARVRAVLYMAAIVGTQYNPHIKALYQRLQERGKTKMSALGAAMRKLVHLCFGVLKTRQPYQPNYGI

SEQ ID NO: 18654 - protein, 317 aa, unidentified
  source 1..317: note = protein_1c43d32
  REGION 7..149: note = RuvC_domain
  SITE 10: note = RuvC_P1
  SITE 53: note = RuvC_P2
  SITE 88: note = RuvC_P3
  SITE 90: note = RuvC_P4
  SITE 93: note = RuvC_P5
  REGION 190..276: note = Tnp_domain
  SITE 198: note = Tnp_P1
  SITE 228: note = Tnp_P2
  SITE 236: note = Tnp_P3
  SITE 237: note = Tnp_P4
  SITE 249: note = Tnp_P5
MSTIKTIGIDLGKSTFHVVGHDYFGRQLYRYKFSRAKLLQFVSVHDPVVIAMEACCGAHWLARRCQEYGHQVKLIPPQYVKPYVKSHKNDFIDADAIAEAATRPRMRFISPKTEQAQLGVVIRRIRTGYIRERTATMNRLFQWLAETGQVVHPLLIFELRNQLDHYNELNDKIKEQDKKLETLNGENELFSVLQTVPGVGPMTAACCLSSVSDPKDFPNGRNFAAWLGLVPFQYSTGGKPRMLGISKRGNKELREHFIHAARAVLWRDETAEKYFGTWLIYLKRRKPFNVALVALANKLARITWSVMATKKPFEIRA

SEQ ID NO: 18655 - protein, 342 aa, unidentified
  source 1..342: note = protein_dbc9d86
  REGION 5..151: note = RuvC_domain
  SITE 8: note = RuvC_P1
  SITE 55: note = RuvC_P2
  SITE 91: note = RuvC_P3
  SITE 93: note = RuvC_P4
  SITE 96: note = RuvC_P5
  REGION 211..299: note = Tnp_domain
  SITE 219: note = Tnp_P1
  SITE 249: note = Tnp_P2
  SITE 257: note = Tnp_P3
  SITE 258: note = Tnp_P4
  SITE 270: note = Tnp_P5
MEHFAGLDVSVKETSVCIVDDTGRIVREVKVTSEPEALLAVLTNPAYHFKRIGLEAGPLSQWLFSALEASLPVICVETRHMRAVLKAQINKTDRNDARGIAQMMRAGLYRPVHVKTLRSQKLRTLLMHRKLLQSKTIAIENDLRASLRNFGLKVGMVGTVKFEARIQELVANLPDLVVLVEPLLIVRRVLREQIGILHRRLLTIVRDDDVCRRLMSIPGVGPVVALTYRVTVDVSARFRNSKAVGAVFGLTPSKHQSGEINRTGAISRCGDEMMRMMLYEAAQVMLLRSVKWSWLKAWAMKIAKHRGMKKAIVALARRLAMIMHRIWVDGTEFRWTREVAAV

SEQ ID NO: 18656 - protein, 345 aa, unidentified
  source 1..345: note = protein_5cef718
  REGION 11..153: note = RuvC_domain
  SITE 14: note = RuvC_P1
  SITE 57: note = RuvC_P2
  SITE 92: note = RuvC_P3
  SITE 94: note = RuvC_P4
  SITE 97: note = RuvC_P5
  REGION 216..301: note = Tnp_domain
  SITE 224: note = Tnp_P1
  SITE 254: note = Tnp_P2
  SITE 262: note = Tnp_P3
  SITE 263: note = Tnp_P4
  SITE 275: note = Tnp_P5
MKKRIEGVTVYGIDIGKNTFHVVGLDNSGKPMLHSKFKRDRLLVHFANTPAALIGMESCPGSQWLARKLQASGHTVKIIPAQFVKPYVKSNKNDMVDAAAIAEAVTRPTMRFTQIRQPEQSARQALHRVRDRYMSQRTGLISQMRGFLLEFGIAIRQGAGVFRLDVPRVLGDEENELPPSMRTLLGDLWNDFKLLENRIEELSKQIQRSVQYSDTARRLMTVPGIGPLAASALEASAGNGHQFANGRFFAAWLGLTPREYYTGGKTTLLGISKRGNTYLRRTQIHGARSCVQTCDRQRHPLGEWITKLEQRMHRNKVIVALANKIARVAWKILTRPEEIYRWADA

SEQ ID NO: 18657 - protein, 360 aa, unidentified
  source 1..360: note = protein_2b4e9f6
  REGION 30..172: note = RuvC_domain
  SITE 33: note = RuvC_P1
  SITE 76: note = RuvC_P2
  SITE 111: note = RuvC_P3
  SITE 113: note = RuvC_P4
  SITE 116: note = RuvC_P5
  REGION 234..320: note = Tnp_domain
  SITE 242: note = Tnp_P1
  SITE 272: note = Tnp_P2
  SITE 280: note = Tnp_P3
  SITE 281: note = Tnp_P4
  SITE 293: note = Tnp_P5
MVSSHTRHRFAMIELQTIEMGEDQMQITTISIDIAKNIFHFIGCNLSNKIVVKKAIKRRQLLTYLAQMPNCKLVMEACGTSNYWGREISQLGFQVELIPPQHVKPFLTGNKNDYNDAYAILIASQQAHIRSVPVKTLEQQDSQTIHKVRELAIGQRTALSNQIRGLLLEYGIAITKGIENVRKEVAALLGEERVLTASFKQVLSQLYKLLQVLDESIETYNQQIKEQVKNNEICVNLQSIPGIGPIVASSYFNEVGNGSGYTKGRDVSASLGLVPKQRSTGGKSVLLGISKRGNRYLRCLLIQGAKSVVSRAKYKTDQLSLWINRLVQTRGHNKACVAYANKMARVAWAITVSKEAYQAR

SEQ ID NO: 18658 - protein, 405 aa, unidentified
  source 1..405: note = protein_023b80b
  REGION 4..160: note = RuvC_domain
  SITE 7: note = RuvC_P1
  SITE 57: note = RuvC_P2
  SITE 97: note = RuvC_P3
  SITE 99: note = RuvC_P4
  SITE 102: note = RuvC_P5
  REGION 274..361: note = Tnp_domain
  SITE 282: note = Tnp_P1
  SITE 312: note = Tnp_P2
  SITE 320: note = Tnp_P3
  SITE 321: note = Tnp_P4
  SITE 334: note = Tnp_P5
MNAVGIDVSKGKSTVTIRRPGDVVVMPPCDIRHTQSSINALIEQIKNLDGETKVCMEHTGRYYEPVATWLSDAGIFVSAVNPILIREFGDDSLRSPKTDKADSKKIARYTLDRWTKLKQYGSMDKTRNQLKTMNRQFGFYMAQKTAMKNNLIALLDQTYPGANDFFDSPARSDGSQKWVDFVHTYWHVDCVRSKSLSAFTEHYQNWCKRKSYNFSAEKAEKIYQASCDLIAVFPKDDSTKMLIRQAVAMLNTASETVETLRLKMNEAASTLPEYPVVMAMNGVGPTLGPQLMAEIGDVMRFTHRGALTAFAGVDPGKNDSGQHIQKSVPTTKKGSPNLRKTLFQIMDGLIKRSPVDDPVYAFMDKKRAQGKPYYVYMTAGANKFLRIYYGRVKEYLAFLSEAEEI

SEQ ID NO: 18659 - protein, 398 aa, unidentified
  source 1..398: note = protein_217c9cc
  REGION 4..160: note = RuvC_domain
  SITE 7: note = RuvC_P1
  SITE 57: note = RuvC_P2
  SITE 97: note = RuvC_P3
  SITE 99: note = RuvC_P4
  SITE 102: note = RuvC_P5
  REGION 275..362: note = Tnp_domain
  SITE 283: note = Tnp_P1
  SITE 313: note = Tnp_P2
  SITE 321: note = Tnp_P3
  SITE 322: note = Tnp_P4
  SITE 335: note = Tnp_P5
MNAVGIDVSKGKSTVTVIQPFGVVIAEPFDVFHTDSDLKKLADFIKSLSGETKVVMEYTGAYYEPIANALHNEGIFVSVVNPLLIDDYGTNRVRKVKTDKKDALKIALFAIDKWLNLREYIPADDIRKTLKVLNRQYIQYNKILVMQKNNLIALLDSCFPNVNTLFTSPRRESDGHEKWVDFVLKFPHINSVSKLSLSAFKSKYQSWCRKHNYNYSETKAAEIHAYSKTQVSVLPMTDSVVKIITEAALLINSTLETLCAFRDEMDRLSSMLPEYEVVMELYGVGKVLGSQLIAEIGDVRRLDSSKSLVAMAGIDPPPNQSGQVDQKSRSISKRGSSALRKTLFQIMTIIIQNKPVDEPVYQFLDKKRSEGKPYRVYMIAAAHKFLRIYYARVMETVT

SEQ ID NO: 18660 - protein, 328 aa, unidentified
  source 1..328: note = protein_4fa16f3
  REGION 4..155: note = RuvC_domain
  SITE 7: note = RuvC_P1
  SITE 60: note = RuvC_P2
  SITE 100: note = RuvC_P3
  SITE 102: note = RuvC_P4
  SITE 105: note = RuvC_P5
  REGION 200..286: note = Tnp_domain
  SITE 208: note = Tnp_P1
  SITE 237: note = Tnp_P2
  SITE 245: note = Tnp_P3
  SITE 246: note = Tnp_P4
  SITE 259: note = Tnp_P5
MFYLGIDVAKAKLDCCLLLDPESTKRKSKSVANTKAGFATLLEWLAGKGVALPQLHAVMEGTGVYHEQAALALADAGVTVSIINPAQIRDFGRGLAVRTKTDGVDSFVLARYGALLKPAAWQPPALEARVLRALLARQEAIAQDLQRELNRLEKANATETPAIIRQSIDDSIAFLRKQLAKLLEDIDHHIDHHPNLRRDMDLLTSIPAVGRQTGSNLLAIVHAHRFESAEQLAAYLGLVPVERKSGSSILGRARLSKAGPPRIRAILYMAAIVATKYNPHVKTVYERLVARGKAKKAALGAAMRKLVHLCFGVLNTRMCYQADYVKNG

SEQ ID NO: 18661 - protein, 362 aa, unidentified
  source 1..362: note = protein_96ba20c
  REGION 5..152: note = RuvC_domain
  SITE 8: note = RuvC_P1
  SITE 55: note = RuvC_P2
  SITE 92: note = RuvC_P3
  SITE 94: note = RuvC_P4
  SITE 97: note = RuvC_P5
  REGION 212..300: note = Tnp_domain
  SITE 220: note = Tnp_P1
  SITE 250: note = Tnp_P2
  SITE 258: note = Tnp_P3
  SITE 259: note = Tnp_P4
  SITE 271: note = Tnp_P5
MKHYAGLDVSIKETSVCIVDESGKICHEMKVVSHPDDLSAALTGAGLRLERIGLEAGPLSQWLFEGLAKAGLPTICIETRHAKAFLKAQINKTDRNDARGIAQMMRVNLYRPVHVKTLTSQKRRALLTARKLLQGKSIAIENDIRGLLRNFGLKVGLVGTAKFENRIRVFIEDMPDMVEILTPLLAARRKIREEFTCLHHKVLAIVRYDADCNRLMTIPGVGPITALAFVSTIDIPARFRNSRAVGPAIGLTPVLNQSSESRRVGRISQCGDNMMRALLYEAAQVLLTRVKKWSWLKAWATKLAKRSSHRQAIVALARRLAVIMHRMWSDGTEFHWAGESLIGHRKEILSSVLGGKMSFAGR

SEQ ID NO: 18662 - protein, 263 aa, unidentified
  source 1..263: note = protein_0f65323
  REGION 7..149: note = RuvC_domain
  SITE 10: note = RuvC_P1
  SITE 53: note = RuvC_P2
  SITE 88: note = RuvC_P3
  SITE 90: note = RuvC_P4
  SITE 93: note = RuvC_P5
  REGION 209..256: note = Tnp_domain
  SITE 217: note = Tnp_P1
  SITE 247: note = Tnp_P2
MQDTTLVGIDLGKHSFHLHGQSCSGKQTLRKKLTRKQLIEFFVKEQACTVVMEACTGAHCMVRTLTAFGHTVKLISPHFVRPFVKSNKNDFVDAEAICEAAVRPAMRFVTPKTEAQQTLSALHRVRDSLVQDRVRTVNQIHGFLPEFGISLPTGKAVITCLPVVLSEHSLPPRLVAILKRLHAHFKYLSEPTAEVDKEMGRQLAEDDLGQRLMTVPGVGPVTASLLSAEMGDGKQYDGSRDFAASTGLVPVSTAPADGPTCSA

SEQ ID NO: 18663 - protein, 411 aa, unidentified
  source 1..411: note = protein_3122449
  REGION 5..163: note = RuvC_domain
  SITE 8: note = RuvC_P1
  SITE 62: note = RuvC_P2
  SITE 102: note = RuvC_P3
  SITE 104: note = RuvC_P4
  SITE 107: note = RuvC_P5
  REGION 273..373: note = Tnp_domain
  SITE 281: note = Tnp_P1
  SITE 311: note = Tnp_P2
  SITE 319: note = Tnp_P3
  SITE 320: note = Tnp_P4
  SITE 333: note = Tnp_P5
MNPVVSLDVSKGKSEVQAFLDKGKPYGKSFSINHNLDGLGSLLEFLEGIKDKTGIQPPVVLEATGHYHTPVVQYLEQHQYLLIIVNPLISHRAKSASLRKVKTDAIDAYRLCELYYKEDLEPYKKRGIRLLNLRNLTRQHENITGMYVQTKLQFQTVLDQIFPEYQGVFGDLYSVVSLLTLQAYPASEDILAVNEVTLTNKIKELCRSRSIRWAKEKAQQLKKAAAKNPFQKTLYHSHLLSLSMYINMLLQYKEHLSELEAEIDTLAKEIEEYKIIQSIPGIGEKIAATIISEIGEIDRFNHPKKLVAFAGVDPEVFESGKFKATLVRITKRGSSRLRHALYMAVRSGIRDCRKQKTTDEIIPRNKRLRAFYDKKREEGKLYKVAVIACVNKLLHWIYAILKNRTTFQDIA

SEQ ID NO: 18664 - protein, 351 aa, unidentified
  source 1..351: note = protein_a6165b7
  REGION 13..153: note = RuvC_domain
  SITE 16: note = RuvC_P1
  SITE 59: note = RuvC_P2
  SITE 94: note = RuvC_P3
  SITE 96: note = RuvC_P4
  SITE 99: note = RuvC_P5
  REGION 218..305: note = Tnp_domain
  SITE 226: note = Tnp_P1
  SITE 256: note = Tnp_P2
  SITE 264: note = Tnp_P3
  SITE 265: note = Tnp_P4
  SITE 277: note = Tnp_P5
MSHQSTPRTVATIGIDTGKNTFHLVGLDQRGNIVLQLKTSRAQLERRLANLPSCLVGMEACSGTHHIARQLEALGHDVRLIPAQYVKPFLKGHKNDYRDAEAIAEAVQRPTMHFVSIKTPDQMDLLALHRVRSRLVSRRTGVINQIRGFLIERGITVRQGPAPLRKALSDILSSNSPTLSPRLVRLISDLAEDWRRLDDRIATVSAEIEALAEQDGPCQRLMTVPAIGPIISSAVVAAIGNGTGFRQGRDFGAWLGLVPKQESTGDRTILGKISKRGNKYLRTLFVQAAHVILARRPRAAMRGLWPWIEQASKRLHRNMLAIALANKLARIAWAVLARGRQYQPRITPQGV

SEQ ID NO: 18665 - protein, 346 aa, unidentified
  source 1..346: note = protein_d353c5b
  REGION 6..147: note = RuvC_domain
  SITE 9: note = RuvC_P1
  SITE 52: note = RuvC_P2
  SITE 87: note = RuvC_P3
  SITE 89: note = RuvC_P4
  SITE 92: note = RuvC_P5
  REGION 211..298: note = Tnp_domain
  SITE 219: note = Tnp_P1
  SITE 249: note = Tnp_P2
  SITE 257: note = Tnp_P3
  SITE 258: note = Tnp_P4
  SITE 270: note = Tnp_P5
MKITTVGIDLAKNVFQVHGIDERGKAVLKKQLRREQMAAFFVNLPACLVGMEACGSAHHWARKLQELGHTVRLMAPQFVKPYVKTNKNDAADAEAICEAVGRPNMRFVPIKNVEQQAVLALHRVRQGFVKARTAQANQIRGLLGEFGLIIPQGIGYIGTRVPELIEDASNDLPGAFRVLVQRLLDHLKELDRQVGELEAQIQAWHRRSDLSRKVAQVPGIGPITASALVASIGDARNFDSGRQVAAWLGLVPRQHSSGGKANLLGMSKRGDSYLRTLLIHGARSVIYRAGQKPESSACSWINGVVNRRNKNVAAVALANKNARIVWALLAHDRHYEVGYVSAVETI

SEQ ID NO: 18666 - protein, 351 aa, unidentified
  source 1..351: note = protein_3661928
  REGION 13..154: note = RuvC_domain
  SITE 16: note = RuvC_P1
  SITE 59: note = RuvC_P2
  SITE 94: note = RuvC_P3
  SITE 96: note = RuvC_P4
  SITE 99: note = RuvC_P5
  REGION 218..304: note = Tnp_domain
  SITE 226: note = Tnp_P1
  SITE 256: note = Tnp_P2
  SITE 264: note = Tnp_P3
  SITE 265: note = Tnp_P4
  SITE 277: note = Tnp_P5
MDRKATDSIVTAIGIDIGKNTFHLVGLDKRGAIALRQKLSRGQVAARLANMPPCLVGMEACVGAHHLSRQLLALGHDVKLVPAQFVKPFLKGQKNDFRDAEAVAEAIQRPTMRFVPTKSVDQLDLQALHRVRARLVGQRTATVNQIRAFLLERGIAVRQGLRFLRQVLPDILANRTDVLTPRMVNMIEGLAADLHHLDQRIDDVTGEIETVAGDDEACQRLMTIPGIGPIIASAMVATIGDGSAFRRGRDFGAWLGLVPRQISTGDRTILGRISKRGNNYLRMLFVQAARVVLLRPANWPKHSFGRWLQAAAKRMHHNVVATALANKLTRIAWSVLYHGRGYEPRMSAELT

SEQ ID NO: 18667 - protein, 341 aa, unidentified
  source 1..341: note = protein_1a16fc0
  REGION 6..148: note = RuvC_domain
  SITE 9: note = RuvC_P1
  SITE 52: note = RuvC_P2
  SITE 87: note = RuvC_P3
  SITE 89: note = RuvC_P4
  SITE 92: note = RuvC_P5
  REGION 211..297: note = Tnp_domain
  SITE 219: note = Tnp_P1
  SITE 249: note = Tnp_P2
  SITE 257: note = Tnp_P3
  SITE 258: note = Tnp_P4
  SITE 270: note = Tnp_P5
MNIKRVGIDLAKQVFQVHGVDYQDKVVLRKQLRRNQLLSYFATLPPCLIGMEACGGAHHWARELQKLGHTVKLIAPQFVKPYVKSNKNDANDAEAICEAVGRPTMRFVSVKTVAQQDLQAIHRIRSELVRQRTAKVNQIRGFLAEYGLVVGRQVATLRRALPELLEDAENGLSFDFRALLEDLRQDLIRLDERVAEMDKKVHTLADSMPAAKLLQSIPGIGPISATAIVCAVGDGKQFKRGRDLAAWLGLTPRQQSSGGKDRLLGISKRGDTYLRTLLIQGAKSVLKVVDKKTDPRSLWLQNLCARKHKNIAAVALANKNARIAWALLSNETSYLPEGKPA

SEQ ID NO: 18668 - protein, 343 aa, unidentified
  source 1..343: note = protein_b5ac3fe
  REGION 7..148: note = RuvC_domain
  SITE 10: note = RuvC_P1
  SITE 53: note = RuvC_P2
  SITE 88: note = RuvC_P3
  SITE 90: note = RuvC_P4
  SITE 93: note = RuvC_P5
  REGION 212..294: note = Tnp_domain
  SITE 220: note = Tnp_P1
  SITE 250: note = Tnp_P2
  SITE 258: note = Tnp_P3
  SITE 259: note = Tnp_P4
  SITE 271: note = Tnp_P5
MLEFAVLGVDLGKNSCSVVGLDAAGRVVLRRRLHREGVAKLAAGSPGCVVAMEACCGAHHLGRRLREAGHEVRLMSPEYVQPYVKAQKNDERDAEAIAEAATRPTMRFVALKGEAQLDMQSLHRARDRLVGERTALINQLRAILLERGITVPQGRRKLEVYLETLLAGDRIPLSPRTRLLVEDQRAEWRELDRRIEAFDEEFAAEARSDEAARLLTTIPGIGPLNATALVAAIGRAETFGRGRDLAAWLGLVPRQMTTGGKPKLLGISKRGNGYLRKMLIHGARAALPTLSKGETPLGGWLRGLAARAHVNTVVVALAAKLARIICAVLRTGQKFEMKAATVS

SEQ ID NO: 18669 - protein, 346 aa, unidentified
  source 1..346: note = protein_9e152f2
  REGION 7..149: note = RuvC_domain
  SITE 10: note = RuvC_P1
  SITE 53: note = RuvC_P2
  SITE 88: note = RuvC_P3
  SITE 90: note = RuvC_P4
  SITE 93: note = RuvC_P5
  REGION 212..304: note = Tnp_domain
  SITE 220: note = Tnp_P1
  SITE 250: note = Tnp_P2
  SITE 258: note = Tnp_P3
  SITE 259: note = Tnp_P4
  SITE 271: note = Tnp_P5
MKQVSTIGLDLAKHVFQVHGADNEGSPMFNRKLRRTEVLRFFERLPPCLVGMEACGGAHYWAREIAKLGHDVRLIPPAYVKPFVKRGKTDAADAEAISEAVIRKTMRFVPIKSAEQQAEAMVLKTRSLLVQQRTQSVNALRAHLAELGIIAASGLPNVAALVAIVREVEDTRLPAAARFALTAIVDQIDALADQLDVLERTIVTESKRDEDMRRLTTIPGVGAITAATIKALVPDPGGFKSARHFAAWVGLTPRPHSSGGKERLGRISKMGNPELRVLLVLGATAVLRIARNDDRARPWLKALLARRPFKVAAVALANKMARIIWALLNNGGVYNRPKPLSITAAA

SEQ ID NO: 18670 - protein, 390 aa, unidentified
  source 1..390: note = protein_30c8c56
  REGION 46..188: note = RuvC_domain
  SITE 85: note = RuvC_P2
  SITE 122: note = RuvC_P3
  SITE 124: note = RuvC_P4
  SITE 127: note = RuvC_P5
  REGION 259..346: note = Tnp_domain
  SITE 267: note = Tnp_P1
  SITE 296: note = Tnp_P2
  SITE 304: note = Tnp_P3
  SITE 305: note = Tnp_P4
  SITE 317: note = Tnp_P5
MEHPMQKLNDLSRSLAPLEPDGTLIAVIEMSQSSWLVAGIVPGVERQPLKKLAADEVALLKLLHRWREEAEKAGRRIERTAVAFEAGRDGFWLARWLRTRSIEAHVIHASSVAVSREHRRAKTDRLDTELLKRAFLGWLRGERDHCKMVAIPTSKDEDAKRPNRERESLVGEQTRIVNRMKATLIRLGIRGFNPKLKKAAGRLEDLRTPEDEPIPPNTMAELRRDMDRRRLVSDQIRQIEEARLDRLKQAPDDGPHAMLRLLARVIGVGIETADMLVQEVLARNMRDRRAIARYAGLTGSPDESGTKRREKGLARSGNARVRRGMIQLAWRFLIFQKNSTLAQWFRARTENARGTRKLMIVALARKLLIALWRLVREGVVPDGVVLRPTQ

SEQ ID NO: 18671 - protein, 333 aa, unidentified
  source 1..333: note = protein_a18389c
  REGION 5..150: note = RuvC_domain
  SITE 8: note = RuvC_P1
  SITE 54: note = RuvC_P2
  SITE 90: note = RuvC_P3
  SITE 92: note = RuvC_P4
  SITE 95: note = RuvC_P5
  REGION 211..297: note = Tnp_domain
  SITE 219: note = Tnp_P1
  SITE 249: note = Tnp_P2
  SITE 257: note = Tnp_P3
  SITE 258: note = Tnp_P4
  SITE 270: note = Tnp_P5
MNEYIGIDFHRQSSYITRMDKEGNILEQLKVRNREEELGAFLAKHIEESKIAIEATGNWYYFYELIEEKQPDVVLAHPLKTRAIASARIKTDKIDSATIAHLLRSNLLPTAYIPPREVRDVKEILRYRASLVSLRVAIKNKVRAILSKNGIVLNYTDIFGKKAMIYLKDLEIRSCYRREMDGYIMLAETLNFLIDETSRTIREMVEDNPKAMLLTTMPGISYYSALLILAEIGDIKRFCDARHLCSYAGLVPSTYQSSDRTRHGKITKQGSRWFRWILVEVSTHAINSSKKFKSLYIRVAKKHGKNTARVAVAREMLKVIFYMLKYNEPFKNG

SEQ ID NO: 18672 - protein, 425 aa, unidentified
  source 1..425: note = protein_372dc4b
  REGION 9..157: note = RuvC_domain
  SITE 12: note = RuvC_P1
  SITE 63: note = RuvC_P2
  SITE 97: note = RuvC_P3
  SITE 99: note = RuvC_P4
  SITE 102: note = RuvC_P5
  REGION 259..347: note = Tnp_domain
  SITE 267: note = Tnp_P1
  SITE 298: note = Tnp_P2
  SITE 306: note = Tnp_P3
  SITE 307: note = Tnp_P4
  SITE 318: note = Tnp_P5
MKVTYQTCCGVDVHKSFLVATIIKTTAGIAPSYQKKRFSTFNNSILDFKSWLLENECHDVCMESTGKYWVPVFNLLEDQINVTIANPKWVKAVKGNKDDTKDSKWIGDLFRLGLVKSSYIPCRLIRILREYTRYRYKLVSCRSSEKNRYQNALTVCNIALDSVVSDIFGKSSSSIIDYQLEQSGTTINHEEIASKLLKSLKSKEDAVIESIEGYQMTDAQKYRMRLIRTHMDYITAEINDIDKQIESLISSDPDYDKAIRLLTTIPGVKHDSAITIISEIGIDMSQFCNSKRLCCWAGLTPGNNESAGKKKSVRITCAGVYLKPALVQCAHAAVKSDKSPYYKTKYESLLNAVARKRAVIAIARMILTAIYRMLSTERYGIQAIFTKIDMPAPLAEKNRRLRLSSKPKKLLQKEGLLPPDEPLAS

SEQ ID NO: 18673 - protein, 398 aa, unidentified
  source 1..398: note = protein_017f72e
  REGION 33..183: note = RuvC_domain
  SITE 36: note = RuvC_P1
  SITE 84: note = RuvC_P2
  SITE 124: note = RuvC_P3
  SITE 126: note = RuvC_P4
  SITE 129: note = RuvC_P5
  REGION 271..357: note = Tnp_domain
  SITE 279: note = Tnp_P1
  SITE 309: note = Tnp_P2
  SITE 317: note = Tnp_P3
  SITE 318: note = Tnp_P4
  SITE 330: note = Tnp_P5
MLIEYIVLHALIIGKTAAGMGRITDPEEYMEYIGIDIAKRKFDFCIIDIVLNKVRAGIIITNDTGFKEFLGTIEGYDNIRIGMESTNIYHANLYNFLIESGYNPVLLSPVETKLMKRCRIRRNKTDKIDSWGIARYLVISKNNTINMVEYPELKQYVSTYFRLIKKPAAVKNQLIGDLDLLYPRMSSMVNINAMHFNDIINNIDSIADNNYRVKYLNSEKYEILKSLIIMGNRNSSAVNHDIRMNIQLMELLNNQLKETMELIGKQYSNADSGIKTIPGIGTLTGSIILSHIGDINRFDSAVKFRAYVGMDPVTKQSGGYSISSHISKSGNPLMRYTLELSTVSAIRYNPVVKRYYSHKKEQGMNGNKLMITCANKLLNILYSFMKNNMDFKDPELVD

SEQ ID NO: 18674 - protein, 321 aa, unidentified
  source 1..321: note = protein_fa38df8
  REGION 4..150: note = RuvC_domain
  SITE 7: note = RuvC_P1
  SITE 52: note = RuvC_P2
  SITE 92: note = RuvC_P3
  SITE 94: note = RuvC_P4
  SITE 97: note = RuvC_P5
  REGION 191..278: note = Tnp_domain
  SITE 199: note = Tnp_P1
  SITE 229: note = Tnp_P2
  SITE 237: note = Tnp_P3
  SITE 238: note = Tnp_P4
  SITE 251: note = Tnp_P5
MVYIGIDISKSNFVAAYPSTNGYRTKTYPNTTAGVRKFIVTLSVTEHHCVMEATGNYGFLLLYLLYQSGIAVSLVNPKQIKHFSRMMMAVTKTDEKDACMIAMYGEKMNPPIYKMPSQAILLLKQKKTVIRQFRKQLVASKNLRESLVVLPYRDKACLRTLDKAIDFLTKQIEQLEAELADIASSEFDKQLKALTSIKGIGITLATALILTTGGFTYFDNAKQLSRFIGICPTYQQSGTSVNIKGHINRNGDEHLRSLLYIASWTALRYNTACKECYVRLKANGKPSKVALIAVANKLVRQAFAIATTDSTYIDGLVSTKK

SEQ ID NO: 18675 - protein, 343 aa, unidentified
  source 1..343: note = protein_fe80a3f
  REGION 6..147: note = RuvC_domain
  SITE 9: note = RuvC_P1
  SITE 51: note = RuvC_P2
  SITE 86: note = RuvC_P3
  SITE 88: note = RuvC_P4
  SITE 91: note = RuvC_P5
  REGION 210..306: note = Tnp_domain
  SITE 218: note = Tnp_P1
  SITE 250: note = Tnp_P2
  SITE 258: note = Tnp_P3
  SITE 259: note = Tnp_P4
  SITE 272: note = Tnp_P5
MNNTIVGVDLATKVIQVCVSTNKKVRSNQEMTPSEFNQWLITSKPMTIVFEACGSSNYWKQVALKAKHDARLICPKLVAHIRQSQKTDKNDALAIVQASQLPDIRFISGKNHGQQQLQSMMRLRELAVKQKTALSNQLTSLLLEFNIRCFGKKGGLNKVITEVLEDGENGFSFAFREMLHTARQQYLALIKSIAIYDDKLEEAAKEHSDCHKLRQIEGIGVLSAINLYILLGCTDLLALKKAKDASACIGLTPLQHSSGGKVKIGAIGKHIKNSMMRSYLIVGAMSAINQIVKRSAKTKKEQWIQQLVERRGKRCAAVALANKNVRTAFAMITQGSQYKAELL

SEQ ID NO: 18676 - protein, 344 aa, unidentified
  source 1..344: note = protein_1c1399a
  REGION 7..149: note = RuvC_domain
  SITE 10: note = RuvC_P1
  SITE 53: note = RuvC_P2
  SITE 88: note = RuvC_P3
  SITE 90: note = RuvC_P4
  SITE 93: note = RuvC_P5
  REGION 213..297: note = Tnp_domain
  SITE 221: note = Tnp_P1
  SITE 251: note = Tnp_P2
  SITE 259: note = Tnp_P3
  SITE 260: note = Tnp_P4
  SITE 272: note = Tnp_P5
MSEVTTIGLDIAKTVFHAHGADGMGRMVFSRRLTRAKLLDFFAAQPACTIALEACGGAHHWARQLTHLGHDVRLIPPAYVKPFVKRQKNDAVDAEAICEAAQRPGMRFVAIKTEEQQAAGMVFRTRDLLVRQRTQLINALRGHLTEYGWAAPRGRAQVLMLADLLDEEEMASSLPEAARAMFKVMVDHLYRLDAQIADLDREIERRAKADEAARRLMTIPGIGPIAATAILALAPPIETFAKGRDFAAWLGLTPRQHSTGGKQRLGSISKMGERTIRRLLIIGGSSVVRQASRRGAPAGSWLEGMLARKPRMLVSVALANKMARTVWALLTKKEDYRAPAPVAA

SEQ ID NO: 18677 - protein, 362 aa, unidentified
  source 1..362: note = protein_0e42b0a
  REGION 4..161: note = RuvC_domain
  SITE 7: note = RuvC_P1
  SITE 59: note = RuvC_P2
  SITE 100: note = RuvC_P3
  SITE 102: note = RuvC_P4
  SITE 105: note = RuvC_P5
  REGION 266..350: note = Tnp_domain
  SITE 272: note = Tnp_P1
  SITE 302: note = Tnp_P2
  SITE 310: note = Tnp_P3
  SITE 311: note = Tnp_P4
  SITE 323: note = Tnp_P5
MYLIGIDISKFKHDCFIATETGQVVKSSFSFDNNQEGFNQLLTVLLSLDHSQQIRIGLEATGHYGTNLKLFLHEHNFSFMEFNPILSDRFRQVSSLRKTKNDKIDAKLISQMLLSFDYKPNSLLSYHISKLKSLTRFRKKLVKDCTIYKERLINILDLVFPEYSNYFTQVWGKVSLYILKNYPTIQDIANINVESVLPIIKALSRGHYSMPKLIKLIEAAKVSIGCKNDSHTLELKLTINLIEQMNYAIENVENEITIIMNKYNFKTATIPGIGIISAASIVSEFNDFSNFNSSNQLLSFAGLEPSIYESGTQTTYGHLVKRGSSYLRETLMNVAPFVMNYNNVFYQYYLKKEMKANTIEWL

SEQ ID NO: 18678 - protein, 304 aa, unidentified
  source 1..304: note = protein_a97e117
  REGION 4..156: note = RuvC_domain
  SITE 7: note = RuvC_P1
  SITE 50: note = RuvC_P2
  SITE 90: note = RuvC_P3
  SITE 92: note = RuvC_P4
  SITE 95: note = RuvC_P5
  REGION 182..266: note = Tnp_domain
  SITE 190: note = Tnp_P1
  SITE 219: note = Tnp_P2
  SITE 227: note = Tnp_P3
  SITE 228: note = Tnp_P4
  SITE 239: note = Tnp_P5
MNGIGIDVSKRQLDVGTTDGETLQVWNNRSGFSELDVWLKKRPVSQIVLEATGGYERPVLDFLHAAGHPVVRANALRARRLAQGMGQMAKTDRLDAYALAQMAALVKLPAYQPLEPWQQKMREVVRARRQAMHALTIARQQQEMVGDRELRRLLQANITRLQTLVERLGKQIAEQVAQQPQLAVLKSMKGVGPGLQAVLASYLPELGRISGKAIASLVGVAPMSHDSGTMRGKRSIHGGRAEIRQVLYMASMSAMRHEPRLRDFYQSLRARGKEGKVAIVAVMRKMLVILNARVRDAENGLVPA

SEQ ID NO: 18679 - protein, 321 aa, unidentified
  source 1..321: note = protein_d303463
  REGION 1..154: note = RuvC_domain
  SITE 4: note = RuvC_P1
  SITE 52: note = RuvC_P2
  SITE 90: note = RuvC_P3
  SITE 92: note = RuvC_P4
  SITE 95: note = RuvC_P5
  REGION 195..282: note = Tnp_domain
  SITE 203: note = Tnp_P1
  SITE 233: note = Tnp_P2
  SITE 241: note = Tnp_P3
  SITE 242: note = Tnp_P4
  SITE 255: note = Tnp_P5
MGIDISKDKIDYCLINSESHQVIQRGEVVNDRKELLKFLNKIDLQQTSFAMEHTGHYGAMLSWVLSEKKAFYYLLNPLELKRSLGVHRGKTDAIDAYRIANYAIKNSHALKAFELPCENLRKLKAMVSTRQQIVKISVQLQNSIKANVILSKTLDIKRMIKEQKAQLKSVKKLINSLAEQMQAVIDSCEQLKKSYRKITQVIGVGPLTAIKCISETDNFTRFINARKFSCHCGLAPFPYQSGSSIKGRTRTHYLKNASLKGILFKAATSAIQHDPQLRNYYNRKLDEGKHKLSVLNAIANKIVLRIFAVVNRDEPFIKLNA

SEQ ID NO: 18680 - protein, 339 aa, unidentified
  source 1..339: note = protein_cc557a7
  REGION 6..147: note = RuvC_domain
  SITE 9: note = RuvC_P1
  SITE 52: note = RuvC_P2
  SITE 87: note = RuvC_P3
  SITE 89: note = RuvC_P4
  SITE 92: note = RuvC_P5
  REGION 210..295: note = Tnp_domain
  SITE 218: note = Tnp_P1
  SITE 248: note = Tnp_P2
  SITE 256: note = Tnp_P3
  SITE 257: note = Tnp_P4
  SITE 269: note = Tnp_P5
MNCTAVGVDIAKHVFQVHYVDQETGEIVNKPIKRAKFLEHFANHARCLIGMEACSGVHHWSRQLTKMGHEVKLMPAEFVKAFNVRNKNDAADARAIWLAVQQPGKPVAVKTEMQQAMLALHRMRQQLIKFRTMQINNLRGLLTEYGEVMSKGREKLAKEIPAVLERIEERLPAVLVDTFREQWNGLTKLDEQVTEIERRMREWKKEDKAVKAISEIPGVGLLTATAAVAMMGDAKAFRSGREFAAWVGLVPKQTGSGGKVNLHGISKRGDTYLRTLLIHGARSVLAHAKEPGEWVVQMQKRRPKNVVVVALANKMARTIWAVLAHDRPYQKGYVSVKPV

SEQ ID NO: 18681 - protein, 338 aa, unidentified
  source 1..338: note = protein_df6efdf
  REGION 6..147: note = RuvC_domain
  SITE 9: note = RuvC_P1
  SITE 52: note = RuvC_P2
  SITE 87: note = RuvC_P3
  SITE 89: note = RuvC_P4
  SITE 92: note = RuvC_P5
  REGION 209..295: note = Tnp_domain
  SITE 217: note = Tnp_P1
  SITE 246: note = Tnp_P2
  SITE 254: note = Tnp_P3
  SITE 255: note = Tnp_P4
  SITE 267: note = Tnp_P5
MEFKRISIDTSKHVFTIHGVDDQERPLLRREIRRAQVEPFFVKLAPTEVVLEACAGSHHWGRVLGGMGHRVRLIPPQYVKPFVKRSKDDRNDAEAISEAASRPTMRTVPVKSVDEQAAAIIVKHRELLVNQRTQAINALRGHAAEFGIVAAKGCANVSALLVLLSAEEAIPAIAKAMFEQMGQHVTDLDAKIDALERQLLEQHKANAVSKLLAAIPGVGAITAITMALNVNPANFETGRHFAAWLGLTPREHSTGGKHRMGKISKAGNERLRQLLVVGAMAVIRFAKPGSKSATAWLLQLLERKPRKVAAIALANKMARIIWAMMARGEAYRRQPVAA

SEQ ID NO: 18682 - protein, 314 aa, unidentified
  source 1..314: note = protein_1c2fdfe
  REGION 10..160: note = RuvC_domain
  SITE 13: note = RuvC_P1
  SITE 55: note = RuvC_P2
  SITE 95: note = RuvC_P3
  SITE 97: note = RuvC_P4
  SITE 100: note = RuvC_P5
  REGION 190..274: note = Tnp_domain
  SITE 198: note = Tnp_P1
  SITE 227: note = Tnp_P2
  SITE 235: note = Tnp_P3
  SITE 236: note = Tnp_P4
  SITE 248: note = Tnp_P5
MAMPVTPIEIGIDVSQEELVIARSDQAGLETIANDPAAIRCWLKTLPGPARVGVEATNTFHVALVEAAHRARHTVYVVDGYCLKQYRKALRGRAKTDASDARLLRRYVSREWPDLRPWSPPSAGYRRLQRLVHRRAVVTQAKQRLRQSLKDLPELKQTVAKSLRTLKTLEDRLTQAMQRALRTHDWRDDAERCQAIEGIGEVIAPALVMAFHRGRFRSSDAFIAFIGYDVRVRQSGKYQGQRKLTKQGDPELRRLLYLAAMTARRTATWEPYYQRCLDRGLTTTQALVALARKLARVAFALLKNQTTYVPQTAS

SEQ ID NO: 18683 - protein, 389 aa, unidentified
  source 1..389: note = protein_59f5263
  REGION 4..163: note = RuvC_domain
  SITE 7: note = RuvC_P1
  SITE 60: note = RuvC_P2
  SITE 101: note = RuvC_P3
  SITE 103: note = RuvC_P4
  SITE 106: note = RuvC_P5
  REGION 266..353: note = Tnp_domain
  SITE 274: note = Tnp_P1
  SITE 304: note = Tnp_P2
  SITE 312: note = Tnp_P3
  SITE 313: note = Tnp_P4
  SITE 326: note = Tnp_P5
MIYVGIDVAKDKHDCCILGSEADKLYPVFTIPNNKAGFDELYGKIFSVTDDKTEIKVGLEATGHYSLNLLGSLIDKGLPTCVINPLHTNLYRKGLSLRKTKTDKVDASSIAMMLMTDKTLKPYSDTSYHSEELKSLTRYRFDKVQERAKLKSSVARLVNILFPELEKLVPSLHMASVYALLSEFPGASLIADCHLTHLKNLLETASKGRYGRDMAIIIRDAARGSIGSVMPAKSMELKHTIHLIEVMTDEIDEIESSIKSIMDASRSPITTIPGINYRMGAMILAEVGDFSKFSNADQILAFAGLSPSTYQSGQLESSYSHMEKRGSRYLRYALFNATKYVCHWDEEFGKYLSKKIGEGKHYNVAVSHAAKKLIRTIYRMELIGEAYRK

SEQ ID NO: 18684 - protein, 339 aa, unidentified
  source 1..339: note = protein_0e020ac
  REGION 8..150: note = RuvC_domain
  SITE 11: note = RuvC_P1
  SITE 54: note = RuvC_P2
  SITE 89: note = RuvC_P3
  SITE 91: note = RuvC_P4
  SITE 94: note = RuvC_P5
  REGION 212..301: note = Tnp_domain
  SITE 220: note = Tnp_P1
  SITE 250: note = Tnp_P2
  SITE 258: note = Tnp_P3
  SITE 259: note = Tnp_P4
  SITE 271: note = Tnp_P5
MQQDIVTVGVDLAKNVFQVHAIGADGKVLVRRQLRRAEVLKFFSTLPPCLVGMEACASAHHWGRELMALGHDVRLMPPAYVKPYVKRGKTDAADAEAICEAVTRPTMRFVAVKTPEQQAVLMLHKTRDLLVRQRTGLINALRAHLAEYGIISGKGPGGVNVLMKVLHEAQERLPAHARSALHTIGSQLRALASEVQRLEAQILAWHRSDAASTRLATIPGIGPITASAIAAAVPDATMFRSGRQFAAWLGLTPRPHSSGGKEKLGGISKQGDGYLRRLLVVGATAVMRMARKDAARQPWAAQLLTRKPVKIATVALANKTARVAWAVMARHEVYAAAAA

SEQ ID NO: 18685 - protein, 314 aa, unidentified
  source 1..314: note = protein_37c8627
  REGION 10..151: note = RuvC_domain
  SITE 13: note = RuvC_P1
  SITE 55: note = RuvC_P2
  SITE 95: note = RuvC_P3
  SITE 97: note = RuvC_P4
  SITE 100: note = RuvC_P5
  REGION 190..274: note = Tnp_domain
  SITE 198: note = Tnp_P1
  SITE 227: note = Tnp_P2
  SITE 235: note = Tnp_P3
  SITE 236: note = Tnp_P4
  SITE 248: note = Tnp_P5
MAMPANCLEIGIDVAKDDLVIYLLNGNQTLTIDNTPQAIRQWLATLPKGCDIAIEATSTYHMDLTERAHAKGHRVYVVDGYRLSNYRKGVGGRAKTDLADAQLLARHLHKEKDELRPWSPPPKTYRVLQSLLRRRAALVKARTALRQSLSGEPELKAPLQALIAEMDRVDTVIQKRLKGAVSTAGLQAQVQRCDAINGVGEITAIALVMAFLRGDFKNSDAFVAFLGLDVRVRDSGTLRGKRKLTKQGDTEVRRLLHCAAMSASRHPVWRAFYQRYRDRGLHTTQALVILARKIARTAFALMKQQQEYCPAKLF

SEQ ID NO: 18686 - protein, 344 aa, unidentified
  source 1..344: note = protein_a5bf150
  REGION 6..147: note = RuvC_domain
  SITE 9: note = RuvC_P1
  SITE 52: note = RuvC_P2
  SITE 87: note = RuvC_P3
  SITE 89: note = RuvC_P4
  SITE 92: note = RuvC_P5
  REGION 212..295: note = Tnp_domain
  SITE 220: note = Tnp_P1
  SITE 250: note = Tnp_P2
  SITE 258: note = Tnp_P3
  SITE 259: note = Tnp_P4
  SITE 271: note = Tnp_P5
MRISVLGVDLGKNVCSLVGLDASGAVVLRRRAKRETVVALAAKLSPCIVGMEACCGAHHLGRVFAAHGHEVRLMSPEYVRPYVKAQKNDDRDAEGIAEAVTRPTMRFVELKSQEQLDMQTLHRSRDRLVGERTALINQLRAILLERGIVAPQGKRKLEQFLVELMDEQGGPGLSPRMITLVADARAQWAELDRRIAAFDAEFIRWTKENEDARRLATIPGVGATIASALIAAIGKAETFEHARDLAAWLGLVPRQFTTGGKPKLLGISKRGNKYLRRLLIHGARAALPYVAERDTPLGRWAKALMSRAHPNVAVVAFANKLARIAWAVLRRGEAFAVKGSLMAA

SEQ ID NO: 18687 - protein, 261 aa, unidentified
  source 1..261: note = protein_3028a24
  REGION 7..149: note = RuvC_domain
  SITE 10: note = RuvC_P1
  SITE 53: note = RuvC_P2
  SITE 88: note = RuvC_P3
  SITE 90: note = RuvC_P4
  SITE 93: note = RuvC_P5
  REGION 209..257: note = Tnp_domain
  SITE 217: note = Tnp_P1
  SITE 247: note = Tnp_P2
MENIALIGIDLGKNSFHIHCQDHRGKAVYRKKFTRPKLIEFLATCPATTIAMEACGGSHFMARKLEELGHFPKLISPQFVRPFVKSNKNDFVDAEAICEAASRPSMRFVQPRTESQQAMRALHRVRESLVQDKVKTTNQMHAFLLEFGISVPRGAAVISRLSTLLEDSSLPLYLSQLLLKLQQHYHYLVEQIKDLESQLKRKLDEDEVGQRLLSIPCVGTLTASTISTEIGDGKQYASSRDFAAATGLVPDSTAREVGRHC

SEQ ID NO: 18688 - protein, 343 aa, unidentified
  source 1..343: note = protein_0c707a4
  REGION 6..147: note = RuvC_domain
  SITE 9: note = RuvC_P1
  SITE 52: note = RuvC_P2
  SITE 87: note = RuvC_P3
  SITE 89: note = RuvC_P4
  SITE 92: note = RuvC_P5
  REGION 211..298: note = Tnp_domain
  SITE 219: note = Tnp_P1
  SITE 249: note = Tnp_P2
  SITE 257: note = Tnp_P3
  SITE 258: note = Tnp_P4
  SITE 270: note = Tnp_P5
MTINMLGIDIAKSTFQLHGADCSGKAVYKKRLTRSELAAHIANLPACTIVMEACGGANYWARVFQGNGHSVKLISPQFVKPFVKTNKNDANDAEAIVEAASRPSMNFVPIKQVEQQDIQSVHRIRTRVVKNRTALINEIRGLCLEYGVVLRPGAASVKSSLCAAIANSDNELTPSSRESMQALYEELVDIEVRVKNLDSRIRQLCRQNERCQRILEVPGVGELTATAIVAAVPDPKEFRNGRHMSAWLGLVPRQSSSGDKRVLLGISKRGDRYLRTLLIHGARAVLSHYKDKDNDYTRWVGRKKAKLSHNKAAVALANKNARIIWSMLATGESFNYGEHATAA

SEQ ID NO: 18689 - protein, 328 aa, unidentified
  source 1..328: note = protein_8cd6b50
  REGION 8..154: note = RuvC_domain
  SITE 11: note = RuvC_P1
  SITE 57: note = RuvC_P2
  SITE 95: note = RuvC_P3
  SITE 97: note = RuvC_P4
  SITE 100: note = RuvC_P5
  REGION 201..287: note = Tnp_domain
  SITE 208: note = Tnp_P1
  SITE 238: note = Tnp_P2
  SITE 246: note = Tnp_P3
  SITE 247: note = Tnp_P4
  SITE 260: note = Tnp_P5
MKTNSIFVGIDISKSVLDICILQPTPNYFTIENNKKSIKTFIKTHLSKIAPCHICMENTGKYGWLLIDILSEMDYFMYVVNPIHLKKSLGLIRGKNDKIDAFRIAQFIKKNYQELPRHEKKSVALITLQVLLSERQYKVKQRKSLLIKLKDYQLIDNPKLQELLRDQNKKLIIEITDQIKIIEKQITQVIKQEPILKSKYGQITSVPGVGKVLAWNLLVKTNAFTLINNPRKLACFAGIAPFENRSGSSVFGKSRVSLFADKHLKTLLHMASISAVKSKNDIQLYFLRKIEQGKNKMSVLNAVRNKIIHIICALIKNQSFFQNRLVLS

SEQ ID NO: 18690 - protein, 379 aa, unidentified
  source 1..379: note = protein_ce3fea4
  REGION 6..159: note = RuvC_domain
  SITE 9: note = RuvC_P1
  SITE 57: note = RuvC_P2
  SITE 98: note = RuvC_P3
  SITE 100: note = RuvC_P4
  SITE 103: note = RuvC_P5
  REGION 221..306: note = Tnp_domain
  SITE 229: note = Tnp_P1
  SITE 259: note = Tnp_P2
  SITE 267: note = Tnp_P3
  SITE 268: note = Tnp_P4
  SITE 279: note = Tnp_P5
MGQVIIGVDPHKRSSTIEVIDQRERVLGKGRFGTDRDGYQAMLAAGRKHTDRVWAVEGCNGIGRHVAQRLVADGETVLDVPAKLSARARVFSTGQGRKTDPVDAHSVAVVALRTPDLRHVVIDDTTMALRLLVDRRDQLGYARTVIVSRLHHLLLELIPGGAKKFLSAQQARALLNTVRPRDVVGKTRRRLASELIHELTVVDKKIKIANQELTELVASTGSRLQQLHGIGPSGAARLIGDISDISRFTSRGHFASWNGTAPIDASSGDQNRHRLSRAGNRRINRVLHIMAVVQLRNDTEGRRYYRRKIAQGKTTMEAMRALKRRLSDVVYRQMTADAKRLKTGPGGHVGATLQSSAADPNPKADTSEKVTSRTRRTPA

SEQ ID NO: 18691 - protein, 400 aa, unidentified
  source 1..400: note = protein_5b589d4
  REGION 4..161: note = RuvC_domain
  SITE 7: note = RuvC_P1
  SITE 57: note = RuvC_P2
  SITE 98: note = RuvC_P3
  SITE 100: note = RuvC_P4
  SITE 103: note = RuvC_P5
  REGION 276..364: note = Tnp_domain
  SITE 284: note = Tnp_P1
  SITE 314: note = Tnp_P2
  SITE 322: note = Tnp_P3
  SITE 323: note = Tnp_P4
  SITE 336: note = Tnp_P5
MISVGIDISKEKSTICILKPYGEIVCRPFEMQHVEKDLEEFHGLLQKLDGEIRIVMEATGIYHLPVLTFLHDKGYFVSVVNPYAMKKYAKDNNIRGAKTDKLDSMMIANYGIEKWFKLQKYEGDEETYAELKLLGRRYRYYMELHVKALQELTHLLDYVMPGIKKIFNSWNETNGKDKLSDFVERFWHFDLITSMSLEEFTEKYIAWAKEKKYHRSRSKAESVYELASSGIPTLSSGTPSTKMLVQEAVSTLRTVDSSLSLILTRMQVLAKSLPEYSTVREMGGVGDVLAVKLIAEIGDVRRLHNAKALIAWAGIDPPPYESGQFIGSKRKITKRGFSTLRKVGYEVMRVLKSHPAPKDDAVYNYILKKEREGKSKKHAKIAGLNKFLRIYYARVMEVYQ

SEQ ID NO: 18692 - protein, 343 aa, unidentified
  source 1..343: note = protein_6203e03
  REGION 7..149: note = RuvC_domain
  SITE 10: note = RuvC_P1
  SITE 53: note = RuvC_P2
  SITE 88: note = RuvC_P3
  SITE 90: note = RuvC_P4
  SITE 93: note = RuvC_P5
  REGION 211..299: note = Tnp_domain
  SITE 219: note = Tnp_P1
  SITE 249: note = Tnp_P2
  SITE 257: note = Tnp_P3
  SITE 258: note = Tnp_P4
  SITE 271: note = Tnp_P5
MLRTNVIGIDLAKNVFQVCNISCQGELLSNKAISRQKLKELLAKAKPSLVALEGCATCHYWGRYAESFGHEVRIINPKKVKAYVEGHKTDANDALAIANAALQIGIKYSKPKSMEQQTLMSLEANRQFLSKTIVSLGLHIRSIINEYGIVRAKGTKGLAALVTSALDERDVLPASLIATLSMLWQQYLNLKEELSHLQKSMNATTRQIEPCKRLMALEGVGEVTASMLYANLGDGTQFTNGRQASAFIGLTPKQYSSGGKVTMMGIDKFGGVKDLRSMLYLGAMAYIYRLPDSPTNQKQAWLIKLVNRVGFKRACIALANKTVRTAWAMLRYETKYQSKTLSC

SEQ ID NO: 18693 - protein, 367 aa, unidentified
  source 1..367: note = protein_d9c0647
  REGION 51..124: note = RuvC_domain
  SITE 63: note = RuvC_P4
  SITE 66: note = RuvC_P5
  REGION 232..318: note = Tnp_domain
  SITE 240: note = Tnp_P1
  SITE 271: note = Tnp_P2
  SITE 279: note = Tnp_P3
  SITE 280: note = Tnp_P4
MLEVWVLLVGDDWAEDHHDIEVQDETGRVLKRARLAEGMAGIARFHDLLGRFVADDAEASESDKGDAHALADMIRTRRHQLREVAGDSGIAEAVKVVTRAHQTLIWERTRHMLRLRAALREYFPAALAAYKSLDLTSDAVLRLLVKAPTPEAAAKLTISQITACLKGRRGIPDKAAAIQDVLRAEHLGQAPLVTTAYAATVKSLVAIITVLNSEIKTLQGEVEAHFGRHPDAEIILSQPGLGVILGARVLAEFGDAPGRYASAKARKNYAGTSPITRQSGKTKTVQARFVHNDRLIDALHNQASCAILHDPHVRAYYDQLKARDISHNAALRQVGNRLVGILHGCLKTGSIYDQATAWSHHDHDLAA

SEQ ID NO: 18694 - protein, 414 aa, unidentified
  source 1..414: note = protein_25d410f
  REGION 10..171: note = RuvC_domain
  SITE 13: note = RuvC_P1
  SITE 68: note = RuvC_P2
  SITE 108: note = RuvC_P3
  SITE 110: note = RuvC_P4
  SITE 113: note = RuvC_P5
  REGION 279..365: note = Tnp_domain
  SITE 287: note = Tnp_P1
  SITE 318: note = Tnp_P2
  SITE 326: note = Tnp_P3
  SITE 327: note = Tnp_P4
MTGVGLRLFVGDDWAQDHHDVEVVDSSGVTLARARLPEGVAGMARLHAMIGGLAGDRAEEQDVQVLVGIETDRGPWVQALSAAGYLVFGVNPLQAARYRERHGVSGAKSDAGDAHVLADMVRTDSHQLRPVAGDSAEAGAVKVVTRMHKTLIWERTRHVQRLRHALHDYFPAALEAFEDLDAPDTLELLARAPAPDEAARLTIAQISAALKRARRRKIGEKAAAIQAALRAEHLGQPAVITAAYAASVRALVAVLGTLNEQVKALEGQVEAHFGAHPAAEIILSQPGLGPVLGARVLAEFGDGPGRYASAKARKNYAATSPITRASGKRKIALARYVHNDRLIDALLTQAFASLRTSPGARAYYGKQRARGSDYNAALRQLANRLVGILHGCLKTGTLYDEETAWPHHSGGVAA

SEQ ID NO: 18695 - protein, 345 aa, unidentified
  source 1..345: note = protein_1310de4
  REGION 6..147: note = RuvC_domain
  SITE 9: note = RuvC_P1
  SITE 53: note = RuvC_P2
  SITE 86: note = RuvC_P3
  SITE 88: note = RuvC_P4
  SITE 91: note = RuvC_P5
  REGION 210..300: note = Tnp_domain
  SITE 218: note = Tnp_P1
  SITE 250: note = Tnp_P2
  SITE 258: note = Tnp_P3
  SITE 259: note = Tnp_P4
  SITE 272: note = Tnp_P5
MHNIIAGVDLAKEEIQVCVCKHNKVQSNRAQTPTQFASWLASSKPMTIVFEACSTSNYWKQIALTHGHDARLISAKLVASVRQNQKTDKNDALAVAQAAQLTDVSFINGKSKEQQELQTLARLRELAVKHKVAMQNQIKSLLLEFNIRVSPSQGGLSRVVQGVLEDAENGFSMVFREALNTGWQQLLLSIEAIHKYDSYLEKAANQHVICKTLQALEGVGPLNAINPYIALGCGEMGQFKKGRDASACIGLTPVQHTSGGKVKLGSVGKYVQNNTIRSCLVSGAMSAVNHATRRTAKTKKDLWIQQMVERRGKRCTAVALANKTVRTAFAMLANGTEYKAELLAA

SEQ ID NO: 18696 - protein, 340 aa, unidentified
  source 1..340: note = protein_d022462
  REGION 5..145: note = RuvC_domain
  SITE 8: note = RuvC_P1
  SITE 51: note = RuvC_P2
  SITE 86: note = RuvC_P3
  SITE 88: note = RuvC_P4
  SITE 91: note = RuvC_P5
  REGION 210..296: note = Tnp_domain
  SITE 218: note = Tnp_P1
  SITE 248: note = Tnp_P2
  SITE 256: note = Tnp_P3
  SITE 257: note = Tnp_P4
  SITE 269: note = Tnp_P5
MEQVIGIDLVKRVFQLNIVSPLGKTIKNTVIMREKLTEFIAQQPPSKIVMEACGSANYWSRQFKRFGHEVKQISPQYVSPFRMGSKNDKNDAVAIVEADRRPGMRYVPEKTQEQPDIQCLHRVRQRLMKNRTALINQIRGLGLEYGIAIPESAHKVEQCLPDYLENAENDLTPLSRELFQELLRELKEQQQRLNVLDKRLDQLNAQQEDIRRLLTLPGIGPLGASALMVTLGDSTYFKNGCHFASYLGRVPREHSSGGKVRLLGITKRGDSYLRGILIHGARSVVYRVQKLPDEQCNGLQRWLKGVIARSGSNKAAVALANKNARIAWALVNQQSVYEAR

SEQ ID NO: 18697 - protein, 414 aa, unidentified
  source 1..414: note = protein_4fab7b4
  REGION 4..160: note = RuvC_domain
  SITE 7: note = RuvC_P1
  SITE 57: note = RuvC_P2
  SITE 97: note = RuvC_P3
  SITE 99: note = RuvC_P4
  SITE 102: note = RuvC_P5
  REGION 274..361: note = Tnp_domain
  SITE 282: note = Tnp_P1
  SITE 312: note = Tnp_P2
  SITE 320: note = Tnp_P3
  SITE 321: note = Tnp_P4
  SITE 334: note = Tnp_P5
MNAVGIDISKGKSMVSVIRPFGELVVKPYEVRHTSSELGELAKQLKSLEGETRVVLEHTGRYYEPIAQMLHDAGIFVSAVNPLLIKEYGNNSLRKVKTDRADSLKIARYGLDNWVELREHTSMDTIRYQLKTANRQYSLYVKNKTAFKNSLIALLDQTYPSVNALFDSPVRADGSQKWVDFAASFWHVDCVRSMSQTAFVERYHKWCKRHGYNFNAAKAAIIHAEAKELIAMLPKNTLSKVMVQEAITQLKTVSKTVEVFRTEMNELAKQLPEYEVVMGLYGTGKSLGPQLMAEIGDVRRFAHKGSLTAFAGVDPGANQSGTYEAKSTHSSKRGSPELRKTLFVLMTVLLQNAPSDDPVFQFLDKKRAEGKPYYVYMTAGCNKFLRIYYGRVKEYFSSLVNLPPVDYDSTGLSR

SEQ ID NO: 18698 - protein, 349 aa, unidentified
  source 1..349: note = protein_2d2c35a
  REGION 8..168: note = RuvC_domain
  SITE 11: note = RuvC_P1
  SITE 67: note = RuvC_P2
  SITE 107: note = RuvC_P3
  SITE 109: note = RuvC_P4
  SITE 112: note = RuvC_P5
  REGION 208..295: note = Tnp_domain
  SITE 216: note = Tnp_P1
  SITE 246: note = Tnp_P2
  SITE 254: note = Tnp_P3
  SITE 255: note = Tnp_P4
  SITE 268: note = Tnp_P5
MKELKQVVGIDVAQKELVVTLGRMLEDLSIELYAYKVFKNTEKGFVSLLDWVKKLTNDEVKVIFSMEATGIYHQKFAYYLDKNDYPVCIVLPNKISNYIRTLDIKTITDKTCSQAIAQFGLERKLDLWKRPKSVYKNLQQLTRERDQIVAERVVVKNQLHAEISEAEPNEKSLKRIKTRIRFLNSQEKEIKNDINAIVKSDENLKKEIDIICTLPGVGELTAVIVLAETNGFELIRNKKQLVSYAGLDVKEKQSGTSVKGKPRISKKGNRSLRKAMHFPALVAVKWDENFRELYARLVSKHGIKMKALVAVQRKLLEMIYTLFKNKSTYDKEYENKKQAQKNSVQAQMA

SEQ ID NO: 18699 - protein, 313 aa, unidentified
  source 1..313: note = protein_ddf3bd5
  REGION 9..153: note = RuvC_domain
  SITE 12: note = RuvC_P1
  SITE 56: note = RuvC_P2
  SITE 96: note = RuvC_P3
  SITE 98: note = RuvC_P4
  SITE 101: note = RuvC_P5
  REGION 191..274: note = Tnp_domain
  SITE 199: note = Tnp_P1
  SITE 227: note = Tnp_P2
  SITE 235: note = Tnp_P3
  SITE 236: note = Tnp_P4
  SITE 247: note = Tnp_P5
MAAGTVQDVGIDVAKRWLDVAVFQTQEQARFDNDKDGWVKLSKWLKGRNVRAIGMEPSGGYERGVAKALRKAGLPARNVNPHKLRHYARALGRLAKNDRIDALLIARYTAELPTRPVQCDPIAEQLADLVVARRQLSDDKVSLANQLEQVREPTVKRIFTQRLRRIEFDIALLAKRMADLVASQPAFAARDRLIQSFHGAGPVFSHTVLALAPEIGQQRREIAALAGLAPYDFDSGTFKGRRIIWGGRHAVRRVVYMAALTASRSNPVLKAFHQRLIAKGKEPKVALVAVARKILTILSAMIQNNEPWNPNRS

SEQ ID NO: 18700 - protein, 342 aa, unidentified
  source 1..342: note = protein_c56c4b3
  REGION 7..149: note = RuvC_domain
  SITE 10: note = RuvC_P1
  SITE 53: note = RuvC_P2
  SITE 88: note = RuvC_P3
  SITE 90: note = RuvC_P4
  SITE 93: note = RuvC_P5
  REGION 211..296: note = Tnp_domain
  SITE 219: note = Tnp_P1
  SITE 249: note = Tnp_P2
  SITE 257: note = Tnp_P3
  SITE 258: note = Tnp_P4
  SITE 270: note = Tnp_P5
MSEITTVGLDLAKNVFQAHGAAASGHVLFRKKLRRDQVLAFFSQLQPCVVAMEACGGAHFWGREIGKLGHEVRLIPPAYVKPFVKRQKNDAADAEAICEAAARPTMRFVPVKSAETQGAAMVFRIRELLIRQRTQAINALRGHLTEFGQIVPQGAANAARLIAIVEDPDNGLPADAVATLTVLVAALSHLEAEIGMLNAEIERRAREDVMARRLMTVPGIGPLIATAIAVLAPPPETFRKARDFAAWLGLVPRQHSTGGKQRLGATTKMGERSLRRLLIIGANSVIIKRHVHASARPGTWLGGMLTRKPAMLVRVALANKMARIVWALMARGGVYKAPAAAV

SEQ ID NO: 18701 - protein, 344 aa, unidentified
  source 1..344: note = protein_e002188
  REGION 5..152: note = RuvC_domain
  SITE 8: note = RuvC_P1
  SITE 55: note = RuvC_P2
  SITE 92: note = RuvC_P3
  SITE 94: note = RuvC_P4
  SITE 97: note = RuvC_P5
  REGION 212..300: note = Tnp_domain
  SITE 220: note = Tnp_P1
  SITE 250: note = Tnp_P2
  SITE 258: note = Tnp_P3
  SITE 259: note = Tnp_P4
  SITE 271: note = Tnp_P5
MDHFAGLDVSVKETSVCIVDDTGRIVREVRVASEPATLLAVLRNPGYRFKRIGLEAGPLSQWLYSALAEAGLPVICVETRHMRGLLKAQINKTDRNDARGIAQMMRAGLYRAVHVKTLRSQKLRMLLTHRQLLQSKAIAIENDLRGTLRNFGLKVGVVGTVKFEARIKELVENLPDVVILVEPLLIVRRVLREQLGVLHRRLLAVVRDDEVCRRLMTVPGVGPVVALTFRATVDVPARFKNSKAVGAVFGLTPSRHQSGESDRPGGISRCGDEMMRMMLYEAAQILLVRSTKWSWLKAWAMQIARRRGMKKAIVALARRLAVIMHRIWVDGTEFRWTREQAAAA

SEQ ID NO: 18702 - protein, 328 aa, unidentified
  source 1..328: note = protein_729fc02
  REGION 5..159: note = RuvC_domain
  SITE 8: note = RuvC_P1
  SITE 62: note = RuvC_P2
  SITE 102: note = RuvC_P3
  SITE 104: note = RuvC_P4
  SITE 107: note = RuvC_P5
  REGION 204..289: note = Tnp_domain
  SITE 212: note = Tnp_P1
  SITE 241: note = Tnp_P2
  SITE 249: note = Tnp_P3
  SITE 250: note = Tnp_P4
  SITE 262: note = Tnp_P5
MFYFTGIDVSKDKIDIGWLRDAAKGKKKSKVLKNTAQGHQQAVNWLFKNTQASAEDIVVVLEPTGIYHEGLMYALHDKGIKVLLVNPGKAKKYAESINLLHKTDKTDAIMLAYYGHAQKQQLTFWQPETPEIRELKAMIRRLDALEKDLQREQNRQEATEFSLTSQRVSQSLMDMIDVLKTEIKGLQKEIDNHINQHPQLKKNRELLESIKGIGPVMSRELVYLFASKTFTHAKQVAAYLGLIPKLRESGKYKGRTTLSKTGSARIRAKLYMAAVCASTHNLDIKAQKARLLKSGKVKMQALGAAMRKLIQICFGVIKHQTEYQPRVI

SEQ ID NO: 18703 - protein, 341 aa, unidentified
  source 1..341: note = protein_d956f7a
  REGION 6..160: note = RuvC_domain
  SITE 9: note = RuvC_P1
  SITE 67: note = RuvC_P2
  SITE 105: note = RuvC_P3
  SITE 107: note = RuvC_P4
  SITE 110: note = RuvC_P5
  REGION 210..296: note = Tnp_domain
  SITE 218: note = Tnp_P1
  SITE 248: note = Tnp_P2
  SITE 256: note = Tnp_P3
  SITE 257: note = Tnp_P4
  SITE 269: note = Tnp_P5
MLKFTIGADISKDKINFALRYLNDFLLEREVENTTSALNRFIKEVLSFVKKFAKENKSIHSIDFIMEHTGIYGNLLIECLAGHKLNMYVVSGLEIKNSTGISRGKNDKIDAKRIADYGLRFADKLKPYTLCDKMLTELKGLNTKRAQLVRIKSQLTQANDDNKKFISKDLLKKLNKIDEPIVKNLEDAIEKIEAEMLDLIKSNTAFYDNYKIAQSVPGVGKIIAIAFICATNNFNKFESAKALGSYCGVVPFGKESGRYKGKDKVSPIANKTLKTLLHLGALASIGGKNAFAAYYQRKITEEKKNKMLAINNVRNKILKTLFACIKNKTKYTADYSFKFAA

SEQ ID NO: 18704 - protein, 342 aa, unidentified
  source 1..342: note = protein_3989179
  REGION 6..148: note = RuvC_domain
  SITE 9: note = RuvC_P1
  SITE 52: note = RuvC_P2
  SITE 87: note = RuvC_P3
  SITE 89: note = RuvC_P4
  SITE 92: note = RuvC_P5
  REGION 210..295: note = Tnp_domain
  SITE 218: note = Tnp_P1
  SITE 248: note = Tnp_P2
  SITE 256: note = Tnp_P3
  SITE 257: note = Tnp_P4
  SITE 269: note = Tnp_P5
MKDTMIGVDLAKSVFQLHGADMAGHLKFRKKMTRVQFRDFLAKHEPAVVVMEACGSASYWAREVAKLGHEVRLIAPQYVRPFVKRQKNDAADAEAIVVAAQRPEMRFVEPKSEDQQACAVLFRARERLLHQRTELVNALRSVLYEYGHVFPRGLAHLKRIEAVLAEPASDLPALVREECQDLLEQIAEQTTRIEAKTAKARNLARTNDTARRLQTMPGVGPQTALAINSFAPPMESFKRGRDFAAWLGLVPRQYTSGGKERLGRISKAGQTDIRYLLIIGAMSRLTVLARKSIQEGSWLARMLHRKPLMLVAIALANKMARTIWAMMTRKEDYRDPASAVPA

SEQ ID NO: 18705 - protein, 311 aa, unidentified
  source 1..311: note = protein_d0db0cd
  REGION 5..153: note = RuvC_domain
  SITE 8: note = RuvC_P1
  SITE 52: note = RuvC_P2
  SITE 92: note = RuvC_P3
  SITE 94: note = RuvC_P4
  SITE 97: note = RuvC_P5
  REGION 188..272: note = Tnp_domain
  SITE 196: note = Tnp_P1
  SITE 225: note = Tnp_P2
  SITE 233: note = Tnp_P3
  SITE 234: note = Tnp_P4
  SITE 245: note = Tnp_P5
MNNTIGIDVSKDTLDVHRLGDGQHKQFLNSKTGHAHLIKWIESQPDPLVIFEATGAYHRLLERELGNRPVPFVKVNPKQARRFAQASGKLAKTDRVDCEMLAKMGAALQLTPKPLTAESLYDLRDLLCARRALIKDRTAAKARNATVTHALLKGQLAKRLRHVECDIEKIDTAMLALANQDRQMRERLDILSSIPGIGMTTALMILVDMPEIGGLDGKQVASLAGLAPMSQSSGKWQGKARIQGGRPNLRHAIFMPALVAIRHNADMRAKYDQLIAVGKEKKVAITAVMRKLLVLANALLRDHRKWVEKTA

SEQ ID NO: 18706 - protein, 408 aa, unidentified
  source 1..408: note = protein_248280d
  REGION 6..165: note = RuvC_domain
  SITE 9: note = RuvC_P1
  SITE 62: note = RuvC_P2
  SITE 102: note = RuvC_P3
  SITE 104: note = RuvC_P4
  SITE 107: note = RuvC_P5
  REGION 273..359: note = Tnp_domain
  SITE 281: note = Tnp_P1
  SITE 312: note = Tnp_P2
  SITE 320: note = Tnp_P3
  SITE 321: note = Tnp_P4
MGLLFIGDDWAEDHHDIEVQDPTGRRLAKARLPEGLAGVAQLHELVAQHHDDDNGADQVAIGIETDRGPWVTALIAAGYRVFAINPLQVARYRERQSVSGAKSDAGDAHTLADMVRTDSHQLRPVAGDSDQAEAVKVVARAHKTLIWERTRHAHRLRNALREFFPAALQAFDDLSAADTLELLAKAPDPDAAARLTTAQITAALKRARRHHASDKARAIQAALRTQQLRQPAAVTSAYAATVRAQVALIGALNAQIKTMGAQVEEHFGRHPDAEIYLSQPGMGAILGARVLAEFGDDDHRYADASSRKNYAGTSPITRASGKKKTVLARYVHNNRLIDALGQQAFSALSASPGARAYYNELRRRGTGHRAALRQLANRLVGILHGCLKTGTRYDETTAWSHHIRTAAA

SEQ ID NO: 18707 - protein, 344 aa, unidentified
  source 1..344: note = protein_8106c5f
  REGION 6..148: note = RuvC_domain
  SITE 9: note = RuvC_P1
  SITE 52: note = RuvC_P2
  SITE 87: note = RuvC_P3
  SITE 89: note = RuvC_P4
  SITE 92: note = RuvC_P5
  REGION 211..297: note = Tnp_domain
  SITE 219: note = Tnp_P1
  SITE 249: note = Tnp_P2
  SITE 257: note = Tnp_P3
  SITE 258: note = Tnp_P4
  SITE 270: note = Tnp_P5
MQITTIGLDLAKHVFQVHAVDAAGVVVLRKALRRAQVLPFFAKLAPCLIGIEACGTSHYWARELIRLGHEVRLMPPAYVKPYVKRGKTDAADAEAICEAVTRPTMRFVPVKSRDQQAALSMHRARNLLVKQRTQLVNMMRGLLAEFGIDIPQGLGRALLMAQRVVEGATPDVPEAAAKIVGMLSQQALDTDVQLREIDRALLALQRTDDVARRLATIPGIGPVGATALAAAVTDPGQFRSGRQFAAWLGLTPLQNSSGGKERLGRISKMGDKYLRKLLVIGATSLVRRARHKPETVDPRLTDLLARKPVRVATVAMANKMARIVWAIMTRGEVYQTSHMPVLAA

SEQ ID NO: 18708 - protein, 344 aa, unidentified
  source 1..344: note = protein_440b167
  REGION 6..147: note = RuvC_domain
  SITE 9: note = RuvC_P1
  SITE 52: note = RuvC_P2
  SITE 87: note = RuvC_P3
  SITE 89: note = RuvC_P4
  SITE 92: note = RuvC_P5
  REGION 211..301: note = Tnp_domain
  SITE 219: note = Tnp_P1
  SITE 249: note = Tnp_P2
  SITE 257: note = Tnp_P3
  SITE 258: note = Tnp_P4
  SITE 270: note = Tnp_P5
MKATTIGIDLAKNVFQIHGVNEFGKPVIKKQLKRDQMAAFFANTPPALIGMEACASAHHWARKLQSFGHTVRLMAPQFVKPYVKSNKNDANDAEAICEAVARPNMRFVPIKDVEQQAVLSLHRVRQGFVAARTAQANQIRGLLGEFGLVIPQGIAHIARRVPELIEDASNELPGSFRLLIERLMEHLKGLHRQVLDLEALIEAWHRKSEASRKLEAIPGIGPITASALVASIGDANNFADGRQLAAWLGLVPRQHSSGGKQTLLGISKRGDSYLRTLLIHGARACIQAFSRKGNSSGWLHELLQRRNHNVAAVALANKNARIVWALLAQKRQYVAGYSRPVTMA

SEQ ID NO: 18709 - protein, 341 aa, unidentified
  source 1..341: note = protein_172e9cf
  REGION 7..149: note = RuvC_domain
  SITE 10: note = RuvC_P1
  SITE 53: note = RuvC_P2
  SITE 88: note = RuvC_P3
  SITE 90: note = RuvC_P4
  SITE 93: note = RuvC_P5
  REGION 210..295: note = Tnp_domain
  SITE 218: note = Tnp_P1
  SITE 248: note = Tnp_P2
  SITE 256: note = Tnp_P3
  SITE 257: note = Tnp_P4
  SITE 269: note = Tnp_P5
MKKFIRIGVDLAKNYFQVHALESENGPAVTRKLKRSKMHEFFSQIEPCLIGMEACGTAHYWARELKAMGHEVLLMPPAYTKPYVKRGKNDAVDADAICEAMSRPGMRFVPIKSAEQQATLMLHKTRELLIKQRTMSVNALRGHLSEFGIVAAKGIGRVDELLDLAESDATLPNAARASVKVLVHALEGLDKAIDDLEKEISSAHAQNEMSRLLDKVPGIGKLIASVIAASVPDPSVFKSGRDFAAWLGLSPRQNSSGGKQTLGSITKQGNRYIRKMLVLGATSLLNVVGKRKGALRDWIVALLAKKPARLVTVALANKLARILWAMMKTGECFRTEMFAKA

SEQ ID NO: 18710 - protein, 407 aa, unidentified
  source 1..407: note = protein_0e29e7c
  REGION 4..160: note = RuvC_domain
  SITE 7: note = RuvC_P1
  SITE 59: note = RuvC_P2
  SITE 99: note = RuvC_P3
  SITE 101: note = RuvC_P4
  SITE 104: note = RuvC_P5
  REGION 273..360: note = Tnp_domain
  SITE 281: note = Tnp_P1
  SITE 311: note = Tnp_P2
  SITE 319: note = Tnp_P3
  SITE 320: note = Tnp_P4
  SITE 333: note = Tnp_P5
MFYCGIDIAKHRHELCLLEQDGTQILSMHFDNSQKGLSKLLDALSTFEVKPDNILFCLEATGHYWLALYCHLQELSFEVRVINPLQSDALRNLYMRKAKTDKKDAFILADLIRIGRAPVTKLATEKFLKLQTLSRLRLEFVHQIGGLKSRVLGILDRIFPEYPECFSDVFIRTSRELLKEYPEPELLAEADLSELTAFLKQHSKGRLDRQRAEQIQDLARGTFGIRLALDAFTLELKLLVEQIEFIEEQVNILEEALFQVLEEFRTNPEQPYRHVLETIPGIGPVLAAAIIGEVGDISRFPNAKALVAYAGLDATVRASGQFEGTRNRMSKRGSPVLRNSLWMAAVTARRFNPELKAYYEAKKTEGKHSGVATGAVARRMVHLIYSIWKDNRPFEPDYKWSPPGSDC

SEQ ID NO: 18711 - protein, 325 aa, unidentified
  source 1..325: note = protein_26ec9ab
  REGION 5..157: note = RuvC_domain
  SITE 8: note = RuvC_P1
  SITE 58: note = RuvC_P2
  SITE 98: note = RuvC_P3
  SITE 100: note = RuvC_P4
  SITE 103: note = RuvC_P5
  REGION 196..281: note = Tnp_domain
  SITE 204: note = Tnp_P1
  SITE 234: note = Tnp_P2
  SITE 242: note = Tnp_P3
  SITE 243: note = Tnp_P4
  SITE 255: note = Tnp_P5
MAIVVGVDIAKKTFDIAVLQSNGKYRTKGNLSNDQSGFSVFDQWLQKHAEPGAWVVMEATNIYHEALGDYLLARGYRVCVMNPARIASYAQSQLQRVKTDKVDAKLIALYGARHAEDLQLWQPDPVSVRQLRALVRRYEELKELFQMEINRLETAKSDVVKESILSVSAHLEQQIEQTLEAIRQHIDDDPDLRGKRDLLTSIEGISDKTAALLLAELGSISRFESARAVVAFAGLNPRLRESGQHKGQVRISKIGSRLLRAGLFMPAICAMSHNQAIRALRLRLEEKGKAGKQIICAAMRKLLQIAYGVLKSGQPYNVELALARG

SEQ ID NO: 18712 - protein, 320 aa, unidentified
  source 1..320: note = protein_9830fb7
  REGION 4..150: note = RuvC_domain
  SITE 7: note = RuvC_P1
  SITE 51: note = RuvC_P2
  SITE 91: note = RuvC_P3
  SITE 93: note = RuvC_P4
  SITE 96: note = RuvC_P5
  REGION 190..277: note = Tnp_domain
  SITE 198: note = Tnp_P1
  SITE 228: note = Tnp_P2
  SITE 236: note = Tnp_P3
  SITE 237: note = Tnp_P4
  SITE 250: note = Tnp_P5
MMYIGIDVSKDSFVAAYPRKNGYTTKTFKNDTKGVRGFITSLPEDCHCVMEATGNYSMLLLYLLQQAGIPTSMENPQKIKHFSRAMMTVTKTDEIDAKLIALYGEKMNPEPYKIPTESILLLKQKRTVLRQLKKHLTATKNLQQALAVLPKQDLASKRTVEKTIKFLERQIAELEDEITNLSNKEYARQMSLLTSIKGISNTIASALIVATGGFTYFSNAKQISRYLGLCPTYQQSGTSVNVKGHINRNGDPHLRGQLYVAALVCIQHNKACKDTYEKLRAKGKSAKVALIAIANKLIRQAFAVVTNNQPYIDGFVSSIA

SEQ ID NO: 18713 - protein, 380 aa, unidentified
  source 1..380: note = protein_c3174d0
  REGION 3..135: note = RuvC_domain
  SITE 32: note = RuvC_P2
  SITE 72: note = RuvC_P3
  SITE 74: note = RuvC_P4
  SITE 77: note = RuvC_P5
  REGION 249..336: note = Tnp_domain
  SITE 257: note = Tnp_P1
  SITE 287: note = Tnp_P2
  SITE 295: note = Tnp_P3
  SITE 296: note = Tnp_P4
  SITE 309: note = Tnp_P5
MPPCDIPHTQSGINDLIGKIRSLDGETKACMEHTGRYYEPVASWLADAGIFVSAVNPILIRDFGDDSLRSPKTDKADSKKIARYTLDRWAKLKQYGRMDKTRNQLKTMNRQFGFYMNQKTAMKNNLIALLDQTYPGANDFFDSPARSDGSQKWVDFVHTYWHVDCVRGRSLNAFTEHYQNWCRRKGYNFSADKAAKIYHLSSDLIAVFPKDNNTRLLIRQAVAMLNTASETVESLRQEMDAAASTLPEYPVVMSMNGVGPTLGPQLMAEIGDVTRFTHRGALTAFAGVDPGKNDSGQHIQKSVRTSKKGSPNLRKTLFQIMDSLIKRSPADDPVYAFMDKKRAQGKPYYVYMTAGANKFLRIYYGRVKEYLSTLPENEEM

SEQ ID NO: 18714 - protein, 398 aa, unidentified
  source 1..398: note = protein_1968b26
  REGION 9..162: note = RuvC_domain
  SITE 12: note = RuvC_P1
  SITE 60: note = RuvC_P2
  SITE 101: note = RuvC_P3
  SITE 103: note = RuvC_P4
  SITE 106: note = RuvC_P5
  REGION 228..309: note = Tnp_domain
  SITE 232: note = Tnp_P1
  SITE 262: note = Tnp_P2
  SITE 270: note = Tnp_P3
  SITE 271: note = Tnp_P4
  SITE 282: note = Tnp_P5
MSKTQAVIIGVDPHKLSVTIEVVDTHEQLLGTGRFATDRAGYAALQHFVKQWPDRVWAVEGANGAGRPLALRLVAAGERVVDVPAKLAARVRLFDTGHNRKTDALDAHSIAVVAVRTEGLRMVVEDGELEALRMLTDRRDELAHQRVQTVNRLQRLLSELLPGQRKRDLSATQAKAMLATVRPRDIAGKTRRRIAAEEIADLVAVDAKLKRIKGELKAAVTARGSGPMDIYGVGPAGAARVLADVGDVARFADRNRFASWTGTAPLDASSGEQTRHRLSRAGNRRLNHVLHVAAIVQIRHDTEGRAYYRRKLAAGKTPMEALRCLKRRLSDVVYRQLIADAHQHHGADPGGHYGATLQSSAADSHPLIDTSDQPLPGPAHPTLRPDHDPVKNLVPSIR

SEQ ID NO: 18715 - protein, 320 aa, unidentified
  source 1..320: note = protein_71bf443
  REGION 10..150: note = RuvC_domain
  SITE 13: note = RuvC_P1
  SITE 55: note = RuvC_P2
  SITE 95: note = RuvC_P3
  SITE 97: note = RuvC_P4
  SITE 100: note = RuvC_P5
  REGION 190..274: note = Tnp_domain
  SITE 198: note = Tnp_P1
  SITE 227: note = Tnp_P2
  SITE 235: note = Tnp_P3
  SITE 236: note = Tnp_P4
  SITE 248: note = Tnp_P5
MAMTVSQSIIGVDVAKAEVVVYQSETAETKIVSNKKSELKAWLKSLPAGSAIAIEATNIYHVDTVNLAHSMGHIVYVIDGYRLSHYRKGTGGRAKTDFSDAQLLARYLKNEQADLRAWNPPPKIYTKLQSLLRRRAALVKMRVALNQSWAGEPSLKASSKSISACLDRHEGLIEKRILDAVTEAGLLHQVKRCQAVEGIGFLTAVALVMAFQRGEFESADAYIAFLGMDLRVSDSGQMSGRRSLSKKGDSEIRRLLHNAASAGIRSEAWKPLYEGYLARGLKTTQAPVIIGRKLARIAFSLMKNLSEYQSKAVLGASPKP

SEQ ID NO: 18716 - protein, 410 aa, unidentified
  source 1..410: note = protein_326a214
  REGION 23..177: note = RuvC_domain
  SITE 26: note = RuvC_P1
  SITE 74: note = RuvC_P2
  SITE 114: note = RuvC_P3
  SITE 116: note = RuvC_P4
  SITE 119: note = RuvC_P5
  REGION 284..368: note = Tnp_domain
  SITE 292: note = Tnp_P1
  SITE 321: note = Tnp_P2
  SITE 329: note = Tnp_P3
  SITE 330: note = Tnp_P4
  SITE 342: note = Tnp_P5
MVSLGLLSGGSMIEDHGQVDVFIGVDVGKTNHHAVAVDRDGKKLLDKPLPQDEDKLRAIIDKLAKHGTILLVVDQPATIGALPVAVAQDAGIMVGYLPGLAMRRIADLHPGEAKTDARDAFIIAEAARTLPHTLRSIAVADEQTAELSMLCGFDDDLAKQSTAASNRIRGLLTQIHPALERVIGPHLDHPAMAELLRKYPTPAALRRAGQTRIATYLRRWAPRAGKRWAADVITALSEQTVVVAGTDAAGIVLPQLAAQLTQLRASRAEVHARVEAIVEAHPLHPVLTSIPAVGVRTEARILTEVVGKDFKNAGHLASYAGLAPVTWRSGTSIRGDHPSRKGNKVLKRALFLSAFAALKDPVSRDYYDRKRGEGKRHNQALIALARRRCDVLYAMLRDGTFYETPTAKAA

SEQ ID NO: 18717 - protein, 343 aa, unidentified
  source 1..343: note = protein_e0d9c0f
  REGION 6..148: note = RuvC_domain
  SITE 9: note = RuvC_P1
  SITE 52: note = RuvC_P2
  SITE 87: note = RuvC_P3
  SITE 89: note = RuvC_P4
  SITE 92: note = RuvC_P5
  REGION 211..300: note = Tnp_domain
  SITE 219: note = Tnp_P1
  SITE 249: note = Tnp_P2
  SITE 257: note = Tnp_P3
  SITE 258: note = Tnp_P4
  SITE 270: note = Tnp_P5
MKVTTVGIDLAKNVFQVHGVDQRGKTVLRKQLKRAQVAAFFANLPACLIGMEACGSAHFWARKLQCLGHEVRLMAPQFVKPYVKTNKNDAADAEAICEAVARPNMRFVPIKNVEQQAVLALHRVRQGFVKARTAQSNQIRGLLAEFGIVIPKGLSHLSAKVPDLIEDATVELPMPFRLLVQRLLEHLKELDRQVGEIEAQIKAWHRDNALSRKLERIPGIGPITASALLATIGDAKCFENGRQLSAWMGLVPAQSSSGGKHNLLSISKRGDTYLRTLLIHGARSVVRVMQGKSGESWLHKLIGRRNANVAAVALANKNARIVWALLARDRDYQPDYVPAHAAA

SEQ ID NO: 18718 - protein, 391 aa, unidentified
  source 1..391: note = protein_7432895
  REGION 19..165: note = RuvC_domain
  SITE 22: note = RuvC_P1
  SITE 69: note = RuvC_P2
  SITE 106: note = RuvC_P3
  SITE 108: note = RuvC_P4
  SITE 111: note = RuvC_P5
  REGION 233..319: note = Tnp_domain
  SITE 241: note = Tnp_P1
  SITE 271: note = Tnp_P2
  SITE 279: note = Tnp_P3
  SITE 280: note = Tnp_P4
  SITE 292: note = Tnp_P5
MLSTNLQNPIDFNGQKFYVGLDVHKKSWAVTIRSLGIQVAHFTQPPGADALLNYLQKNFPGGEYSSAYEAGFCGTSIHEQLCNLGISNILVHAADIPATDKQKKNKTDLHDSRSIAGYLEKGSLNAIHVLTQEQQELRSLFRLREAKVKEVTRSNNRLKSFLMYFDIKIPETVSKKDYLSLKALEWLNLELASAAGTITLQQHVEELKYQRKRLFEITKLLRKQIQSFHARSYEYLLSVPGIGAVTAMGLIAEIADFGRFDDPDEYCSILGLCPWEDSSGDTIKTKGMQPRCNRHLRPLLVEASWTAIKKSPALFAYYSKHAVKDSKKAIVKVARKLALTVRGVVLKQQLYQEDYLQKKAEQMALKKTSNKRFSSGIAEQHINKQPGNILA

SEQ ID NO: 18719 - protein, 343 aa, unidentified
  source 1..343: note = protein_582ee2d
  REGION 7..149: note = RuvC_domain
  SITE 10: note = RuvC_P1
  SITE 53: note = RuvC_P2
  SITE 88: note = RuvC_P3
  SITE 90: note = RuvC_P4
  SITE 93: note = RuvC_P5
  REGION 211..296: note = Tnp_domain
  SITE 219: note = Tnp_P1
  SITE 249: note = Tnp_P2
  SITE 257: note = Tnp_P3
  SITE 258: note = Tnp_P4
  SITE 270: note = Tnp_P5
MTKSIMIGVDLAKNVFQLHAASLAGQVQFRKKLSRRTFFKFMAEQPPAVVVMEACGSAHYWAREMIRLGHEVKLIAPHYVKPFVKRQKNDAADAEAIVIAAQRPEMRFVEPKSAEQQGRAILFRARERLVHQRTELVNALRACLYEFGHVVAQGVRQIKRIEAIVEEPHSELPELMREECRDLLDQIAALTTRIKAKTAKVQAVSAERDVARRLQTMPGVGPLTALAIEAFAPPMENFRCGRDFAAWLGLVPRQFSSGGKERLGRISKAGQADIRKLLIIGAMSRLNWLGRKSIPESSWLARITARKPRMLVAIALANKMARTIWAMLTKDEDYRDPAQAVAA

SEQ ID NO: 18720 - protein, 409 aa, unidentified
  source 1..409: note = protein_cddaf9d
  REGION 9..167: note = RuvC_domain
  SITE 12: note = RuvC_P1
  SITE 64: note = RuvC_P2
  SITE 104: note = RuvC_P3
  SITE 106: note = RuvC_P4
  SITE 109: note = RuvC_P5
  REGION 275..361: note = Tnp_domain
  SITE 283: note = Tnp_P1
  SITE 314: note = Tnp_P2
  SITE 322: note = Tnp_P3
  SITE 323: note = Tnp_P4
MGVRVRLFTGDDWAEDHHDIEVMDGAGKVLARRRLPEGMAGISQLHALLGGLGDDDDEVEVLVGIETDHGPWVAALVAAGYRVFAVNPQQSARFRARHAVSGAKSDAGDAHVLADMVRTDSHQLREAAGDSPDAAGIKVLARTHKTMIWNRTREVQRLRHQLLQYFPAALEAFSDLDAPEALELLGKVPDPARARKLTRAQVSAALKRAGRRDITGRATAILAALRSEQLTQPAALAAAYAATARSLIAVITALNEQIRLLEEQVREHFGRHPDAEIILSQPGMGMILGARVLAEFGDDPGRYRDGKARKNYAGTSPVTRASGRKKVVAARPVHNDRLVDALNAQAFSALSVSPGARACYDQLRARGIGHNDALRRLANRLVGILHGCLKTRTPYNENTAWGHRQQLAA

SEQ ID NO: 18721 - protein, 316 aa, unidentified
  source 1..316: note = protein_e6a1ff8
  REGION 2..153: note = RuvC_domain
  SITE 5: note = RuvC_P1
  SITE 52: note = RuvC_P2
  SITE 92: note = RuvC_P3
  SITE 94: note = RuvC_P4
  SITE 97: note = RuvC_P5
  REGION 191..275: note = Tnp_domain
  SITE 199: note = Tnp_P1
  SITE 228: note = Tnp_P2
  SITE 236: note = Tnp_P3
  SITE 237: note = Tnp_P4
  SITE 248: note = Tnp_P5
MVGIDVASLHVDVAAIGAELPASLARLSNDADGHSALADGLVRLAPGLVLIEATGGYEAALACALQAAGLRVAVINPRMARDFARAMQRLAKTDRIDAATLAELAGVLARRPDAERFIRPVSEPEQQDLAALVTRRRQLVAMQLSERQRLRLARPVARPSIEAMIEAIKHQLDDVEAEMARHVEQHHAQMAALLQGVAGIGKVAAATLIAELPELGRLNRRQICALVGVAPYANDSGSSRGRRRIAGGRFEVRRALYMATLTAVRYNPPIRDFYERLVAAGKLKKVALIACMRKLITHLNAIARDHLNAHDRLAIA

SEQ ID NO: 18722 - protein, 344 aa, unidentified
  source 1..344: note = protein_924441f
  REGION 5..152: note = RuvC_domain
  SITE 8: note = RuvC_P1
  SITE 55: note = RuvC_P2
  SITE 92: note = RuvC_P3
  SITE 94: note = RuvC_P4
  SITE 97: note = RuvC_P5
  REGION 212..299: note = Tnp_domain
  SITE 220: note = Tnp_P1
  SITE 250: note = Tnp_P2
  SITE 258: note = Tnp_P3
  SITE 259: note = Tnp_P4
  SITE 271: note = Tnp_P5
MDHFAGLDVSVNETSVCIVDDTGRIVREVKVASEPDALLPVLTNPAYRFKRIGLEAGPLSQWLFSALAEAELPVVCVETRHMQAVLKAQINKTDRNDARGIAQMMRVGLYRPVHVKTLRSQKLRMLLTHRKLLQSKAIAIENDLRATLRNFGLKVGMVGKVRFEERIKELVENRPDLAALVEPLLVVRRVLREQIVILHRRLLAIVRDDEVCRRLMTTPGVGPVVALTYRATVDVPARFRKSKAVGAVFGLTCSKYQSGEIDRSGRISRCGDEMMRVMLYEAAQSTLRSKKWSWLKAWAMQIAKRRGMKKAIVALARRLAVILHRIWVDGTEFRWTREQATAAA

SEQ ID NO: 18723 - protein, 282 aa, unidentified
  source 1..282: note = protein_d1f0608
  REGION 1..48: note = RuvC_domain
  REGION 155..240: note = Tnp_domain
  SITE 163: note = Tnp_P1
  SITE 193: note = Tnp_P2
  SITE 201: note = Tnp_P3
  SITE 202: note = Tnp_P4
  SITE 214: note = Tnp_P5
MPHTLRRVDVGDETLTELGVLVGFDDDLAGEATRVSNRIRGLLTGIHPALERVLGPRINHLAVLEILSRYGGPAGIRQAGKRRITTLAVKHAPRMGARLAEEIFAALDAQTVTVPGSKAAEIVLPKLADSLKEVLQQRRTIGDDVERILDEHPLSQVLTSMPGIGVRTAARILIEIGDGSDFATAGHLAAYAGIAPVTHRSGTSIRGEHPARSGNRKLKRALFLSAFAALHDPTSRAYYDRKRAEGKRHNAALICLARRRCDVLHAMLKNKTFYQPPTADAA

SEQ ID NO: 18724 - protein, 340 aa, unidentified
  source 1..340: note = protein_0a16753
  REGION 6..147: note = RuvC_domain
  SITE 9: note = RuvC_P1
  SITE 52: note = RuvC_P2
  SITE 87: note = RuvC_P3
  SITE 89: note = RuvC_P4
  SITE 92: note = RuvC_P5
  REGION 210..300: note = Tnp_domain
  SITE 218: note = Tnp_P1
  SITE 248: note = Tnp_P2
  SITE 256: note = Tnp_P3
  SITE 257: note = Tnp_P4
  SITE 269: note = Tnp_P5
MTIVTIGLDLAKNVFQAHGVDEEGNAVLAKKLHRKQMLPFFSKLSPCLIGVEACGTAHYWARTLAAMGHEVRLIPPAYVKAYVKRGKSDALDAEAICEAVQRPTMRFVPTKTVEQQGILMTHRARSLLVRQRTMLANALRAHLAVLGLVANPGIANLAKLAEQAMADKDALPPYARSALEILIRQIMTINSEVAALDQQLIAWHAASEASRRLAAIPGLGIITATAIAATVTDPDQFRSGRQFAAWLGLTPQQHSTGGKTRLGGISKQGDRYLRRLLVVGATAVMRHVKDKPTPMADWIRKLSEKKPFRLVSVALANKLARIAWVVLTRKETYHPYAHLA

SEQ ID NO: 18725 - protein, 320 aa, unidentified
  source 1..320: note = protein_8222954
  REGION 10..152: note = RuvC_domain
  SITE 13: note = RuvC_P1
  SITE 55: note = RuvC_P2
  SITE 95: note = RuvC_P3
  SITE 97: note = RuvC_P4
  SITE 100: note = RuvC_P5
  REGION 191..274: note = Tnp_domain
  SITE 198: note = Tnp_P1
  SITE 227: note = Tnp_P2
  SITE 235: note = Tnp_P3
  SITE 236: note = Tnp_P4
  SITE 248: note = Tnp_P5
MTILTSPTVVGVDVAKAEIVVYREDLETIQAVVNDRQTLGRWLKMLPAQSSIALEATSTYHLDTAELAHEMGHRVYVVDAYRLSHYRESIGQRAKTDPCDARLLARYLASEQDRLRVWSPPPQAYKVLKSLLHRRAELIRLRVSITLSWSSEPLLKDELALQLKSFKQAEQSIQKLLQKVSKEAGLTENIKRCKAIEGVGDLTALGLATAFMRGHFVSSDAFIAFLGMDLRAKDSGKKTGPRRLSKKGDTEIRRLAHNAAMAACRSPTWKPFYESYLARGLARTQALVILARKLCRVAFALMKNQSEYQPNLRLQGSPAT

SEQ ID NO: 18726 - protein, 342 aa, unidentified
  source 1..342: note = protein_110ee93
  REGION 6..148: note = RuvC_domain
  SITE 9: note = RuvC_P1
  SITE 52: note = RuvC_P2
  SITE 87: note = RuvC_P3
  SITE 89: note = RuvC_P4
  SITE 92: note = RuvC_P5
  REGION 210..295: note = Tnp_domain
  SITE 218: note = Tnp_P1
  SITE 248: note = Tnp_P2
  SITE 256: note = Tnp_P3
  SITE 257: note = Tnp_P4
  SITE 269: note = Tnp_P5
MKDMMIGVDLAKNVFQVHGALRTGEVQFRKKLSRKQFPAFMAQQGPCLVIFEACGGAHYWAREMEALGHEVKLIAPQYVRPFVKRQKNDAADAEAIVIAARQPEMRFVEPKTVEQQSRAAIFRDRERLVHQRTADVNALRALLYEHGHVFPVGLRHLNRMTALVEDETSDLPALIREECQDLLAQIAEKTARITERATKLKALASQSDRARRLQTMPGVGPLTALAVEAFGPDMALFKTGRDFAAWLGLVPRQHSSGGKERLGRMTKAGQADIRRLLIIGAMSRLNWLGQRTISEGSWLSRMLARKPKMLVAIALANKMARQIWAMLTKNEDYRDPARAVAA

SEQ ID NO: 18727 - protein, 328 aa, unidentified
  source 1..328: note = protein_b53e6b5
  REGION 5..159: note = RuvC_domain
  SITE 8: note = RuvC_P1
  SITE 62: note = RuvC_P2
  SITE 102: note = RuvC_P3
  SITE 104: note = RuvC_P4
  SITE 107: note = RuvC_P5
  REGION 204..289: note = Tnp_domain
  SITE 212: note = Tnp_P1
  SITE 241: note = Tnp_P2
  SITE 249: note = Tnp_P3
  SITE 250: note = Tnp_P4
  SITE 262: note = Tnp_P5
MCEYIGIDVGKENLDLCWLRDSNKDKIKTKTVNNKLELFDSIALWITKNTKTEPQDILITLEATGVYHEGLVYFLHKLGFKILLSNPGKAKKFAQSLGLIHKTDKSDATMLAKYGFSQLGNIQLWQPEAEELCELKSMCRRLSALEKDSRRENNRLEASKISDTSKRVLKSLVDMIDVLEFEIKALRQDIDLHLDRYAELKKNKQLLLSIKGIGPVMARELVYLFAAKHFTSAKQVAAYAGLIPRLNESGSFKGRTTLSKSGPSRIRAKLFLAAVSASSFNPDIKAQYDRLRTAGKTKMQALGAAMRKLIQICFGVIKHQTEYQPQVT

SEQ ID NO: 18728 - protein, 353 aa, unidentified
  source 1..353: note = protein_30b380c
  REGION 1..120: note = RuvC_domain
  SITE 17: note = RuvC_P2
  SITE 57: note = RuvC_P3
  SITE 59: note = RuvC_P4
  SITE 62: note = RuvC_P5
  REGION 226..311: note = Tnp_domain
  SITE 234: note = Tnp_P1
  SITE 264: note = Tnp_P2
  SITE 272: note = Tnp_P3
  SITE 273: note = Tnp_P4
  SITE 285: note = Tnp_P5
MFGKLQAKHGTVPVVVDQPASIGALPLAVARDMGCPVAYLPGLTMRRIADLCPGEAKTDARDAFVIADAARVMPQTLRSVDLEDETTAELEMIVGFDDDLAGEATRISNRLRGLLTQIHPLLERVLGPRVQHLAVLRLLDQFGSPARIRKAGRRLVTLIRPKAPRTAERLVDDILTALDEQTVVVPSTDAAALIVPSLAGSLQAVLDQRKILAARIEELLENHPLSKVLTSMPGIGVRTGARILIDVGDGRSFPSAAHLAAYTGLAPATRSSGSSIRGEQPSRRGNKQLKRAFLLSAFAALADPASMAYYDKKFSQGKHHTQALLCLARRRADVLFAMLRDSTFYEPQPAPST

SEQ ID NO: 18729 - protein, 347 aa, unidentified
  source 1..347: note = protein_4e259a8
  REGION 6..150: note = RuvC_domain
  SITE 9: note = RuvC_P1
  SITE 54: note = RuvC_P2
  SITE 89: note = RuvC_P3
  SITE 91: note = RuvC_P4
  SITE 94: note = RuvC_P5
  REGION 213..301: note = Tnp_domain
  SITE 221: note = Tnp_P1
  SITE 251: note = Tnp_P2
  SITE 259: note = Tnp_P3
  SITE 260: note = Tnp_P4
  SITE 272: note = Tnp_P5
MNLSRAGVDIAKSVFHVHAVDRHGQPKWRAKLKRNEWLDALCQRLAPGAEVGMEACASAHHWARKLQARGFRVKLIGAQFVKPYVKSNKNDQVDAEAICEAMSRPGMRFVAVKSVAQQDTQAAHRIREELVGQRTAKANQIRGLVGEYGIVAPKGIQQLRRALPDWLEDAENALTVDFRSLLADLAEDLRYLDDRIALLDEQIAQRVKEDPVARRLLALRGIGPLTASALAGALGNAQAFNKGRDFAVSLGLTPRQHSTGGKDRLLGISKRGDAYLRKLLVHGARSVLRHAKDRDDALSQWLKALIARKHPNVVVVALANKTARVAWAIVHNATDYDPRLVAGKGTN

SEQ ID NO: 18730 - protein, 373 aa, unidentified
  source 1..373: note = protein_dfa7832
  REGION 8..154: note = RuvC_domain
  SITE 11: note = RuvC_P1
  SITE 58: note = RuvC_P2
  SITE 95: note = RuvC_P3
  SITE 97: note = RuvC_P4
  SITE 100: note = RuvC_P5
  REGION 227..313: note = Tnp_domain
  SITE 235: note = Tnp_P1
  SITE 265: note = Tnp_P2
  SITE 273: note = Tnp_P3
  SITE 274: note = Tnp_P4
  SITE 286: note = Tnp_P5
MPKYSTAFGMDVHLRSTTVCALDADTGEAVTRRFPGNPWGEIAGWMDGFPGPSLAAYESGYLGFAPQRELAGLGVECVVAAVSKIPRSAADSASKNDRNDAARMAKAILAHDISPVWVPSPEVEGIRDLAGAYDGATARLATAKQRLLAFLAKRGFVYGGTTPAGNPRKYWTYDFLRWLDKVRPEDDGGVRTLAALRNEVEAAAEARADLLSEYRAAVDASPIAAEVAALQSIKGCAFALAAAFSAEVGDFTRFRSGRQVTAYFGLAPSQRSSGDSVRLGGISGAGNALVRKLAVEGSWCYAAARHQPKLMPRDTGVPLEIRMHGRKGSERLLRRREEMLARGMPAAKANAATAAELVRWLWALGMMCREGAE

SEQ ID NO: 18731 - protein, 396 aa, unidentified
  source 1..396: note = protein_69511a8
  REGION 6..160: note = RuvC_domain
  SITE 9: note = RuvC_P1
  SITE 58: note = RuvC_P2
  SITE 98: note = RuvC_P3
  SITE 100: note = RuvC_P4
  SITE 103: note = RuvC_P5
  REGION 265..352: note = Tnp_domain
  SITE 273: note = Tnp_P1
  SITE 304: note = Tnp_P2
  SITE 312: note = Tnp_P3
  SITE 313: note = Tnp_P4
  SITE 325: note = Tnp_P5
MTAIWAGIDAGKTHHHCVVVDDTGKRLLPRRVTNAEPELLRLLVDVLALGDEVTWGVDLADGGAALLIDLLLNHGQHTLYIPGMAVNRASEGYRGEGKTDAKDAAIIADQARIRRDLQPLRPGDELVTELKILTVHRRDLTDDRTRAINRLRGRLTGIFPALERALDLTNAGPLVVLTGYQTPAAIRRTGIRRLETWLRNRKVRGAAQLAQAAVEAAESQHTSVTGEKPTAQLVHTLEREVMRLNEQIAETDKLIEARFREHKHAEVIASMPGIGPLMGAEFLAATGGDMTAFATPDRLAGFAGVAPTPRDSGKISGNLHRPKRYSRGLQRVFCTSALISIRCCEESRRFYDRKRAEGKRHTRAVLALARRRVNVLGALLRDGRCYESIPPVTTAA

SEQ ID NO: 18732 - protein, 335 aa, unidentified
  source 1..335: note = protein_8731e47
  REGION 6..149: note = RuvC_domain
  SITE 9: note = RuvC_P1
  SITE 54: note = RuvC_P2
  SITE 89: note = RuvC_P3
  SITE 91: note = RuvC_P4
  SITE 94: note = RuvC_P5
  REGION 213..298: note = Tnp_domain
  SITE 221: note = Tnp_P1
  SITE 251: note = Tnp_P2
  SITE 259: note = Tnp_P3
  SITE 260: note = Tnp_P4
  SITE 272: note = Tnp_P5
MKLTRVGVDLAKQVFQVHGVDRAERPAWCKRLKRSRWIADLERDVEPGCEIGMEACGGAHHWARVLQSKGYRVKLIAPQFVKPYVKTNKTDANDAEAICEAMSRPSMRFVAVKTVEQQDLQAVHRVRSSLIRERTAKANQLRGLVYEYGLVAPREISSLRRAVPQWLEDAENGLTPRFRALLSGLYGDLRLLDDRVRDLDREIAAITREHEPVRRLMQISGVGPLTASALYALVGDARQYRNGRELAVALGLTPRQHSSGGKEKLLGISKRGDKYVRTLLIHGARSALRTAPGRGSDQSLGTGTGGALTYERRGDGARQQDRPGRLGDAAPRNEL

SEQ ID NO: 18733 - protein, 323 aa, unidentified
  source 1..323: note = protein_bcd802d
  REGION 9..154: note = RuvC_domain
  SITE 12: note = RuvC_P1
  SITE 56: note = RuvC_P2
  SITE 96: note = RuvC_P3
  SITE 98: note = RuvC_P4
  SITE 101: note = RuvC_P5
  REGION 191..276: note = Tnp_domain
  SITE 199: note = Tnp_P1
  SITE 228: note = Tnp_P2
  SITE 236: note = Tnp_P3
  SITE 237: note = Tnp_P4
  SITE 248: note = Tnp_P5
MAKRITISAGIDTGKRKLDVALDGRSEQMQVGNTPEGYMVLVEWLRRQKVKRVGIEASGGYEQSVVAELRRKRFVVVVFQPAQVRAYAMFHLQRAKNDKIDAALIAACTAATKKIHPAPDPRLRPFAEYLTMIEQIGEDIAKLKNRLESCHNERIQKLWKEQIALLAKYRRAEFKALVAAIRKHRDLAARLDLIYSVGGSGLPTAVSILIRMPEIGQITREQAAALAGLAPYDDDSGDHVGVRHIEGGRERLRWALYTAALPASFRWNPQLMALYSRLIAAGKGHKRALIACASKLLVIINAVVARGTPWLAQPPKIASAPAV

SEQ ID NO: 18734 - protein, 402 aa, unidentified
  source 1..402: note = protein_a8adc35
  REGION 5..163: note = RuvC_domain
  SITE 8: note = RuvC_P1
  SITE 62: note = RuvC_P2
  SITE 102: note = RuvC_P3
  SITE 104: note = RuvC_P4
  SITE 107: note = RuvC_P5
  REGION 276..365: note = Tnp_domain
  SITE 284: note = Tnp_P1
  SITE 314: note = Tnp_P2
  SITE 322: note = Tnp_P3
  SITE 323: note = Tnp_P4
  SITE 336: note = Tnp_P5
MNPVIGLDISKEESHGQAFLDRGKPYRGVYHFEHTRDGLEILLQVIHDIEHESGHRPTMILEATGHYQSPVVRFLEEHHYLFIVINPLISNRLRKTNLRKVKTDAADAYLLGELYYREEFEPFKKRGVQLLNMRYLTRQHESFSKMCVQTKLQFQAVLDQVFPAYKGVFGAMYSNVSLRFLLEFPTSSSVLQVSEETLKITINALLTSKRGRSEKWINERVQRWMEAAKQNPFQQTMYESHLINLKILISLILQYQEYLSVLEQTIDTLASKIEEYDLIQSIPGIGPKIAATILAKIGEVDRFDHPKKLVAFTGIDPSVFASGKFTTTRNRITKRGSRHLRYALVMAVQCGLIRSRNTRIKEFYERKRAEGKPHKVALVACANKLVHWLYAILKSKKSFRPA

SEQ ID NO: 18735 - protein, 343 aa, unidentified
  source 1..343: note = protein_5cc0bb2
  REGION 9..151: note = RuvC_domain
  SITE 12: note = RuvC_P1
  SITE 55: note = RuvC_P2
  SITE 90: note = RuvC_P3
  SITE 92: note = RuvC_P4
  SITE 95: note = RuvC_P5
  REGION 214..304: note = Tnp_domain
  SITE 222: note = Tnp_P1
  SITE 252: note = Tnp_P2
  SITE 260: note = Tnp_P3
  SITE 261: note = Tnp_P4
  SITE 273: note = Tnp_P5
MNTTTKMCVGVDTAKDVFQLHWVERETGEVRNKALKRDKFLEHFANLSSSIVGMEACGGSHHWARRLMAMGHEVKLLSGRFVKAFAPGNKNDAADARAIWLAMQQPGIRTVAVKTEEQQSVLAMHRMREQLIKFRTAQTNGLRGLMAEYGEVMKRGRAAMNEQMPAVLERLSKRLPGLLIDTLRAQWNRIAVIDGDIKQIEVRLQAWMKVDESCQAIAAIPGVGLLTATAAVATMGNANAFKSGREFAAWIGLVPAQNGTGGRVKLLGISKRGDTYLRTLLIHGARSALLHSKEPSAWTQEMRKRRPLNVVVVALANKMARMIWAILAHGRAYDKQHVSSRPA

SEQ ID NO: 18736 - protein, 345 aa, unidentified
  source 1..345: note = protein_917a823
  REGION 6..148: note = RuvC_domain
  SITE 9: note = RuvC_P1
  SITE 52: note = RuvC_P2
  SITE 87: note = RuvC_P3
  SITE 89: note = RuvC_P4
  SITE 92: note = RuvC_P5
  REGION 211..299: note = Tnp_domain
  SITE 219: note = Tnp_P1
  SITE 249: note = Tnp_P2
  SITE 257: note = Tnp_P3
  SITE 258: note = Tnp_P4
  SITE 270: note = Tnp_P5
MKITTIGIDLAKNVFQVHGVDERGKVVLRKQLKRKDVVKFFANLEPCLIGMEACGSAHYWARKLSEFGHTVRLMAPQFVKPYVKTNKSDRNDAEAICEAVGRPNMCFVPVKTAEAQAVLALHRARQGFVKARTAQANQIRGLLAEFGIVIPKGIGHIAKRLPEILEDGENGLPGMMRQLVRALGEQLKGVDNQVEEMERQIKLWHRDSEPSRTLEAIAGIGPITASAYVASVGDAKSFKNARQVPAWLGMVPRHEGTGGKVKMGRISKRGDVYLRTLLIHGARAVIRQVERKPDQADGWLKKLLARRNKNVAAVALAAKNARIAWALLAHERTYQSDYVAKRTAA

SEQ ID NO: 18737 - protein, 392 aa, unidentified
  source 1..392: note = protein_72a56a5
  REGION 4..163: note = RuvC_domain
  SITE 7: note = RuvC_P1
  SITE 60: note = RuvC_P2
  SITE 101: note = RuvC_P3
  SITE 103: note = RuvC_P4
  SITE 106: note = RuvC_P5
  REGION 267..354: note = Tnp_domain
  SITE 275: note = Tnp_P1
  SITE 305: note = Tnp_P2
  SITE 313: note = Tnp_P3
  SITE 314: note = Tnp_P4
  SITE 327: note = Tnp_P5
MIYVGIDVAKDKHDCFITNSDGEVLFNAFAIPNSREGFNALFQKIQSVTNDLSKVKVGLEATGHYSYNLLGFLFSKGLPTYVINPLHTNLYRKSLSLRKTKTDKVDAHTIASMIMSDVNLKSYSDTSYHNEELKSLTRYRFDKVRERAKLKSSVSRLICILFPELEKLVPTIHMACVYALLSEFPSASAVASAHLTRLSNLLSKSSKGRYAKDAAVIFRQAARSSIGSHMPAKSLELKHTIRLIRELDAEIDEIENDIRRIMDEDIRSPILTIPGISYRMGAMIIAEIGDFKRFDSPDRILAYAGMSPSTYQSGQLDNCYSHMEKRGSKYLRYALFNATKYVCLWDESFAAYLAKKRAEGKHYNVALSHAAKKLVRLIYAMERSGLSYSKAV

SEQ ID NO: 18738 - protein, 308 aa, unidentified
  source 1..308: note = protein_8ce534b
  REGION 35..110: note = RuvC_domain
  SITE 50: note = RuvC_P3
  SITE 52: note = RuvC_P4
  SITE 55: note = RuvC_P5
  REGION 174..261: note = Tnp_domain
  SITE 182: note = Tnp_P1
  SITE 212: note = Tnp_P2
  SITE 220: note = Tnp_P3
  SITE 221: note = Tnp_P4
  SITE 233: note = Tnp_P5
MQLHTIGIDLGKTVFHLVGLNQRGEVVVRKKFSRKQLLHFTANLYVKTNKSDYIDAEAIAEAVERPKMRFVPIKSDDQPDLQSLHRVRERWVMRRTAVINQIRGLLLERGITLRQGRRHVDAALPGILEDACAKLSGAVRVLLMQLKLELDHLQIRIDEADAMINKAAAENDACRRLVAIPGIGPVTATAIIAAIGNGAAFKKGRGFSAWLGIVPGEYTTGGKQKLLGISKRGNSYLRRLLVQGARAVLQQSTKQSSGLSAWLAQLTTRTHSNVAAVALANKLARMTWAVLAKNETYRPPLLVGAVTP

SEQ ID NO: 18739 - protein, 367 aa, unidentified
  source 1..367: note = protein_368056f
  REGION 22..165: note = RuvC_domain
  SITE 25: note = RuvC_P1
  SITE 70: note = RuvC_P2
  SITE 105: note = RuvC_P3
  SITE 107: note = RuvC_P4
  SITE 110: note = RuvC_P5
  REGION 229..315: note = Tnp_domain
  SITE 237: note = Tnp_P1
  SITE 267: note = Tnp_P2
  SITE 275: note = Tnp_P3
  SITE 276: note = Tnp_P4
  SITE 288: note = Tnp_P5
MKKHTTKSNSLSPADVSACSTVAVDLAKNVFQVAGENSLGQVMYEERIKSREAFLIFLRKLPAGMTVLMETGPGAQAWARLLQTQGNPVRILPAQHVANHRSGAKNDRNDVLAILRAGRDINIAAVPIKSTAQLSMQALHRARQGYVKRRTSMGNQMRGLLLEQGIAIAQGALILSQNVPRILEDATQPLPDMLRELIAEMLGEWSHLGERIDVLTRRLEAAAREDETARRLMTVRGIGPIIATALVAKQTEPERFANARMFAAYFGTVPEQSSSGQKVRLGKMCKRGDGYLRSLAIQGAHAVLRQVRPDSQHPDDHRLRRWLSRHGQKGAAVRLANRNLRIVWVLLQNDQTYRRQPAGCQEATMNH

SEQ ID NO: 18740 - protein, 309 aa, unidentified
  source 1..309: note = protein_40a8806
  REGION 5..151: note = RuvC_domain
  SITE 8: note = RuvC_P1
  SITE 52: note = RuvC_P2
  SITE 92: note = RuvC_P3
  SITE 94: note = RuvC_P4
  SITE 97: note = RuvC_P5
  REGION 186..270: note = Tnp_domain
  SITE 194: note = Tnp_P1
  SITE 223: note = Tnp_P2
  SITE 231: note = Tnp_P3
  SITE 232: note = Tnp_P4
  SITE 243: note = Tnp_P5
MLSSVGIDTAKATLEICIKPQKIRFEVANNSAGFEALLERLKDFNISRVLIEATGGYEKDVLISLASAGLETICINPARARKFADAMGKKAKTDKIDAEVLADFAAHLSVPQGQPISPEREELRELVKQRAQFVQSRDDYKRRRLQCRSAMAMAHFDEHIEHLKVLIKRLDEEIDQAMVQLDDTRASQLLAVSGIGRVTAANLLASLPELGQLDRRQIAALVGVAPYNNDSGSHRGHRQIWGGRAHVRRVLYMSSWIIIRHNTEFKARYEALRARGKCAKVALVACMRVLIVRLNAMLRDNTPWREQTA

SEQ ID NO: 18741 - protein, 400 aa, unidentified
  source 1..400: note = protein_eff9974
  REGION 11..166: note = RuvC_domain
  SITE 14: note = RuvC_P1
  SITE 63: note = RuvC_P2
  SITE 103: note = RuvC_P3
  SITE 105: note = RuvC_P4
  SITE 108: note = RuvC_P5
  REGION 273..358: note = Tnp_domain
  SITE 281: note = Tnp_P1
  SITE 311: note = Tnp_P2
  SITE 319: note = Tnp_P3
  SITE 320: note = Tnp_P4
  SITE 332: note = Tnp_P5
MIDVSGTGAFLGLDVGKGEHHATAVTPAGKKAFDKRLPDSEPKLREVFGKLQAKHGTVLVVVDQPASIGALPLAMARDMGCPVAHLPGLTMRRIADLYPGEAKTDARDAFVIADAARVMPHTLRSVDLEDETIAELEMIVRFDNDLTGDATRISNRLRGLLTQIHPSLERVYGPRVQHPAVLKLLDQFGSPAQIRKAGRRRLVTPTRPKAPRMAERLVDDIFTELDKQTVVVPCTDAAALIVPSLASALQAVLDQRKLLAARIEELLENHPPSKVLTSMPGIGVRIGARILIDVGDGRWFPSAAHLAAYAGLASATRSSGSSNRGEQPSRKGNKQLERAFFLSAFAALADSVSRAYYDKKISQGKHHTQALLCLARRRADVLFAVLRDGTFYEPQPAPSA

SEQ ID NO: 18742 - protein, 411 aa, unidentified
  source 1..411: note = protein_1e67120
  REGION 16..170: note = RuvC_domain
  SITE 19: note = RuvC_P1
  SITE 67: note = RuvC_P2
  SITE 107: note = RuvC_P3
  SITE 109: note = RuvC_P4
  SITE 112: note = RuvC_P5
  REGION 277..362: note = Tnp_domain
  SITE 285: note = Tnp_P1
  SITE 315: note = Tnp_P2
  SITE 323: note = Tnp_P3
  SITE 324: note = Tnp_P4
  SITE 336: note = Tnp_P5
MSKSDKIPEHDFTVFCGLDVGKSVHHACALDPTGQRLHDKPLPNDETALAEIFQQLSVHGRVLVVVDQPASIGALAVAVARSLGIEVAYLPGLAMRRIADLHPGQGKTDARDAYVIADAARTMPHTLRRVGTDDEILAELTVLAGYDDDLAAQSTRLINRLRDALLHVHPALERLLGPRMDRGGVLDLLAAAPTPDALRQLGEDGITAAMRPRSPRLAKTLPAQILAALDAQTVVVPGTTAFGRVIVGVATQLREVRAERDTLAAELESRLEAHPLAEVLISMPGLGFRTALKILTIVGDGAAFPTAGHLAAYAGLAPVTRRSGTSIKGETRSQRGNHALKSALFLSAFASLADPTSRAYYDRKRAQGKRHNAALICLARRRTDVIYAMLRDRTPYAPPTSSEPRPAPAAA

SEQ ID NO: 18743 - protein, 340 aa, unidentified
  source 1..340: note = protein_87a1524
  REGION 6..148: note = RuvC_domain
  SITE 9: note = RuvC_P1
  SITE 52: note = RuvC_P2
  SITE 87: note = RuvC_P3
  SITE 89: note = RuvC_P4
  SITE 92: note = RuvC_P5
  REGION 211..298: note = Tnp_domain
  SITE 219: note = Tnp_P1
  SITE 249: note = Tnp_P2
  SITE 257: note = Tnp_P3
  SITE 258: note = Tnp_P4
  SITE 270: note = Tnp_P5
MQVTTIGVDLAKNVFQVHGITASEEVVFNKPLRRAQFLPFFAKLEPCLIGMESCSSAHHWARELTALGHEVRLIPPMYVKPYVKRGKSDAIDAEAICEAVTRPTMRFVATKTVEQQSLLSLHRARDLLVRQRTQLINNLRGLVAEFGIFIPKGLARVIGFAEDITLGEVLDLPDIANEVIRNLSEQLMALHKRVRWYEERLKQVAKEDTRVRLLRTIPGVGAVTASAIIASIGDGHQFKNGREFAAWLGLTPANKSSGGKEKLGRITKMGDQYLRSLLVVGMTSLVRQTRSHPERASKWLTSLLERKPARVATVAMANKTARIVWAVLTRNEPYSPRTIA

SEQ ID NO: 18744 - protein, 316 aa, unidentified
  source 1..316: note = protein_1c6255d
  REGION 10..153: note = RuvC_domain
  SITE 13: note = RuvC_P1
  SITE 57: note = RuvC_P2
  SITE 97: note = RuvC_P3
  SITE 99: note = RuvC_P4
  SITE 102: note = RuvC_P5
  REGION 193..277: note = Tnp_domain
  SITE 201: note = Tnp_P1
  SITE 230: note = Tnp_P2
  SITE 238: note = Tnp_P3
  SITE 239: note = Tnp_P4
  SITE 250: note = Tnp_P5
MSEMTVEQFVGVDVSKATLDICITPSGHALHVSYDEVGVSQIVSTLKEAGPTLIVLEATGGLEVRLASELAAVGLPVAIINPRQARDFAKATGRLAKTDQVDAAMLAEFARAIRPQARPLKDADTRALDDMVNRRRQLIAMRVQEALRLGTAASKPLQKSLNKHITWLDKQIAEVDGDLNKRLRESDVWRTKDDLLRAIPGVGAVTSLTMLAKCPELGTLNRREIAALTGVAPMANDSGTHRGKRFVWGGRADVRAVLYMATISAIRCNETIKAFADRLKQAGKPAKVVIVACMRKLLTIMNAMLKNNAAWNPKNT

SEQ ID NO: 18745 - protein, 409 aa, unidentified
  source 1..409: note = protein_be4fb2b
  REGION 5..164: note = RuvC_domain
  SITE 8: note = RuvC_P1
  SITE 61: note = RuvC_P2
  SITE 101: note = RuvC_P3
  SITE 103: note = RuvC_P4
  SITE 106: note = RuvC_P5
  REGION 273..359: note = Tnp_domain
  SITE 281: note = Tnp_P1
  SITE 312: note = Tnp_P2
  SITE 320: note = Tnp_P3
  SITE 321: note = Tnp_P4
MQVFVGDDWAEDHHDIEVQDETGRVLARRRLPEGIEGITTLHELVGEHSSGLESPPQVVVGIETDRGPWVQALLAAGYQVFAVNPMSVARYRERHAVSGAKSDPGDAHVLADLVRTDRHRHRPIAGDSELAEAIKVLARGHQSLCWMRGQQANQLRSTLREFYPAALVAFEQLTSADALAVLAIAATPDQGRALTRPRIQAALRRAGRQRNLTARAEAIQIALRTEQLAQPPLIAQAFGATVSALVGVLSASVAAVTDLERQLEASFGQHPAAELIRSQPGLGTVLGARVLAEFGDDPDRYADAKARKNYAGTSPITKASGKSHVVLARYKTNKRLRDALRQQAFAALTASPGARAFYDARRAAGDGHDKALRALANRLVGILHGCLRHATLYDEHTAWAHRSDHTQAA

SEQ ID NO: 18746 - protein, 343 aa, unidentified
  source 1..343: note = protein_4154ef2
  REGION 7..149: note = RuvC_domain
  SITE 10: note = RuvC_P1
  SITE 53: note = RuvC_P2
  SITE 88: note = RuvC_P3
  SITE 90: note = RuvC_P4
  SITE 93: note = RuvC_P5
  REGION 211..297: note = Tnp_domain
  SITE 219: note = Tnp_P1
  SITE 249: note = Tnp_P2
  SITE 257: note = Tnp_P3
  SITE 258: note = Tnp_P4
  SITE 270: note = Tnp_P5
MTNDTMIGVDLAKSVFQLHAASATGQLLFRKKLSRSAFAKFMSEHPPATVVIEACGSAHYWARELARYGHEVKLIAAQYVRPFVKRQKNDAADAEAIVIAAQRPEMRFVEPKTAEQQSRAILFRARERLVHQRTELINALRACLYEYGHTVPQGMHQIKRIGEIVDAPNSDLPALMREECAELLAQIAEQTVRINARTAKIKALAAEADTARRLQTIPGVGPLTALAVEAFAPRMENFKCGRDFAAWLGLVPRQFSSGGKERLGRISKAGQADIRRLLIIGAMSRLNRLGRKSIPEASWLARMVARKPRMLVAIALANKMARTIWALITKNEDYRVPTQAAAA

SEQ ID NO: 18747 - protein, 346 aa, unidentified
  source 1..346: note = protein_6d46530
  REGION 7..147: note = RuvC_domain
  SITE 10: note = RuvC_P1
  SITE 53: note = RuvC_P2
  SITE 88: note = RuvC_P3
  SITE 90: note = RuvC_P4
  SITE 93: note = RuvC_P5
  REGION 210..294: note = Tnp_domain
  SITE 218: note = Tnp_P1
  SITE 248: note = Tnp_P2
  SITE 256: note = Tnp_P3
  SITE 257: note = Tnp_P4
  SITE 269: note = Tnp_P5
MSQIIRLGMDTSKHIFQLHGVDSAERPVLRKKLRRGEMLAFFAKCPPTIIGMEACAASHYWGRKLRELGHEVKLIAPQHVKAYVKRNKNDGRDAEGLCEAMSRPTMQFVPVKTEEQQAALMLMGVREHLVKRRTQLGNAIRGYAAEFGLITAKGLDKIEPLLARIAQDQSLPELAREIFAMQGRDYARLQVELKTIEARLRAWHRANADSRRLAEIPGVGPICATALVMKAPDPHAFPSGRHFAAWMGLTPKDHSTAGKTRIGKITRAGDEMLRSVLVAGATAVIQQAKKGRGHPAPWLVALLARKSPKLAAVALANKIARIAWKLLTTGESYNDARMPGASAVAT

SEQ ID NO: 18748 - protein, 310 aa, unidentified
  source 1..310: note = protein_ae03a6f
  REGION 7..148: note = RuvC_domain
  SITE 10: note = RuvC_P1
  SITE 53: note = RuvC_P2
  SITE 93: note = RuvC_P3
  SITE 95: note = RuvC_P4
  SITE 98: note = RuvC_P5
  REGION 189..273: note = Tnp_domain
  SITE 197: note = Tnp_P1
  SITE 226: note = Tnp_P2
  SITE 234: note = Tnp_P3
  SITE 235: note = Tnp_P4
  SITE 246: note = Tnp_P5
MEQISVVGIDVSKDRLDVHVLPAGEAWSVSRDGEGLDELCRRLSGTARLVALEATGGYETIVAATLSSEGVPVVVVNPAQVRAFANALGQRAKTDPIDARVIARFAEATQPEIRPLPDRATRLLADLVARRRQIVEMIVAERQRLHRTEPPRVRKSIEWLLKALEKELASVDHDIDGSVRSSPVWREKEDLMRSVPSVGPIIARTILAELPELGTLDHKRIAALVGLAPFTRQSGVWKGKASIGGGRSAVRTALFMGAQTAKRWNPALKAFYERLIAAGKPKMVATIAVARKLLTILNAILRDKTPWQNA

SEQ ID NO: 18749 - protein, 344 aa, unidentified
  source 1..344: note = protein_9811975
  REGION 6..147: note = RuvC_domain
  SITE 9: note = RuvC_P1
  SITE 52: note = RuvC_P2
  SITE 87: note = RuvC_P3
  SITE 89: note = RuvC_P4
  SITE 92: note = RuvC_P5
  REGION 211..298: note = Tnp_domain
  SITE 219: note = Tnp_P1
  SITE 249: note = Tnp_P2
  SITE 257: note = Tnp_P3
  SITE 258: note = Tnp_P4
  SITE 270: note = Tnp_P5
MNTTTVGIDLAKNVFQVHGIDARGKVVLRKQLRREQVAVYFGNLPPCLIGVEACATAHHWGRRLERLGHTVRLMAPQFVKPYVKTNKNDAADAEAICEAVSRPNMRFVPIKSIEQQAILSVHRARQGFIEARTAQANQIRGLLGEFGLVIPQGICHVAQRVPALLEDAGNELPLALRQLIDRLTCHLKELDQQVRELERQIIAWHRGSELSRKLEKIPGIGPLAATALVASIADASSFDNGRQVSAWLGLVPRQSSSGGKSVLLGMSKRGDVYLRTLLIHGARSAILAARRQKERKNVWLTNLLDRRHANIAAVALANKNVRTVWALLAHGRDFKPDYLPVPAA

SEQ ID NO: 18750 - protein, 330 aa, unidentified
  source 1..330: note = protein_89d58cd
  REGION 1..85: note = RuvC_domain
  SITE 22: note = RuvC_P3
  SITE 24: note = RuvC_P4
  SITE 27: note = RuvC_P5
  REGION 194..280: note = Tnp_domain
  SITE 202: note = Tnp_P1
  SITE 233: note = Tnp_P2
  SITE 241: note = Tnp_P3
  SITE 242: note = Tnp_P4
MIAVNPVQAARYRERYSTSGAKSDAGDAHALADMVRTDRHQLRPVAGDSDLAEAVKVVARSHQTLVWDRTRQVQRLRAALVESFPAALAVFDDLDAADTLELLGKAPTPAEARRLTVAQISAALRRARRRGDLAEKARTIRAAFQASQLPVRPATAAAYGAVVRAQVGLIGTLTAEIDRLGEQVDAHFGQHPDAEILLSQPGLGPVLAARVLAEFGDDPKRYAHAKARKNYAGTSPITRASGKKTVVMARYARNDRLAAALDRQAFCALRASPGARAYYDQIRARGTGHHAALRQLANRLVGILHGCLKTRTPYDEATAWTQNVTLQDAA

SEQ ID NO: 18751 - protein, 343 aa, unidentified
  source 1..343: note = protein_cc72094
  REGION 7..149: note = RuvC_domain
  SITE 10: note = RuvC_P1
  SITE 53: note = RuvC_P2
  SITE 88: note = RuvC_P3
  SITE 90: note = RuvC_P4
  SITE 93: note = RuvC_P5
  REGION 212..297: note = Tnp_domain
  SITE 220: note = Tnp_P1
  SITE 250: note = Tnp_P2
  SITE 258: note = Tnp_P3
  SITE 259: note = Tnp_P4
  SITE 271: note = Tnp_P5
METISVIGLDLAKNVFQVHCADEKGCCLQSKALRRAQLLQFFAMLKPCLVGMEACGSSHYWARQLQMLGHDVRLMAPQYVKAYVKTNKNDAADAEAICEAVTRPGMRFVDIKTEEQQAILLLHRDREGLTRDRTALINRLRATLAEFGVVTPTGPQRLKHWFQEDYSHYGTALSALVQRQVERMRTRLRGLDGEIAALDVEIDLTSRSNEACQRLEAVPSIGRLTASALVATVGKGQSFKSGRQFAAWLGLVPRQHSSGGKSRLLGISKRGDGYLRRMLIHGARAVIRHMNPKRSVTGWLAQLSARTHHNVVIVALANKLARIAWAMQYRERTYSEALVAGQR

SEQ ID NO: 18752 - protein, 394 aa, unidentified
  source 1..394: note = protein_b4a9eba
  REGION 44..187: note = RuvC_domain
  SITE 82: note = RuvC_P2
  SITE 121: note = RuvC_P3
  SITE 123: note = RuvC_P4
  SITE 126: note = RuvC_P5
  REGION 258..358: note = Tnp_domain
  SITE 266: note = Tnp_P1
  SITE 295: note = Tnp_P2
  SITE 303: note = Tnp_P3
  SITE 304: note = Tnp_P4
  SITE 316: note = Tnp_P5
MPQQRKPNDLSRSLIALDMDTTLIAVVELSLSSWLVAGIVPGIERQPLKKLKTDENALLALFNRWRDEAVRSGHKISRIAVAFEAGRDGFWLARWLKARGIEAHVIHASSVAVSREHRRAKTDRLDTELLKRAFVGWLRGERDHCKTAAIPSLCEEDAKRPSRERESLVGEQSRLVNRMKATLIRLGIRAFNPKLRYAEQRLETLRTPEGEPIPANTLAELKRDMQRRRFICGQIRSIEQERLERLERTPDTEPHAMVRLLARVTGIGIETADLLVHEVLLRNMRDRRAVARYGGLTGSPDRSGGTNREKGMARSGNARVRRGMIQLAWRFLLFQKDSALVQWYRRRTEHSPKARKTMIVALARKLLIALWRLAREGVVPEGVAMRPGVMNTSY

SEQ ID NO: 18753 - protein, 400 aa, unidentified
  source 1..400: note = protein_17569f7
  REGION 5..163: note = RuvC_domain
  SITE 8: note = RuvC_P1
  SITE 62: note = RuvC_P2
  SITE 102: note = RuvC_P3
  SITE 104: note = RuvC_P4
  SITE 107: note = RuvC_P5
  REGION 273..362: note = Tnp_domain
  SITE 281: note = Tnp_P1
  SITE 311: note = Tnp_P2
  SITE 319: note = Tnp_P3
  SITE 320: note = Tnp_P4
  SITE 333: note = Tnp_P5
MNPVIGLDVSKGESQIQAFLDKGKPYGKSFSVSHTTEGLDRLLHFLNVVENEAGMKPSVILESTGHYHTPVIQFLEEQNYLYIMVNPLLSHQAKKLSLRKVKTDQIDAFRLCELYYKEELEPYKKRGIQLLNLRHLTRQHEALTGLYVQTKLQFQAILDQVFPEYKGVFGDLYSKVSLHTLLAFKTSESVIQAGENQVTDQIASLCMRRSERWAQEKAKKLYEAAQRNPFKSIVYQSHLISLDMYIQLLLQYQEHLAQLEDQIDALAGEIEEYKMIQSIPGIGEKIAATIISEIGEVERFHHPKKLVAFSGIDPSVHSSGKFIATINRITKRGSSRLRHALYMAVLCGIRASRNKKLKEFYDRKREEGKPFKVAVIACANKLLHWIYALLKRKETFLDLA

SEQ ID NO: 18754 - protein, 311 aa, unidentified
  source 1..311: note = protein_0a0ae4b
  REGION 6..151: note = RuvC_domain
  SITE 9: note = RuvC_P1
  SITE 53: note = RuvC_P2
  SITE 92: note = RuvC_P3
  SITE 94: note = RuvC_P4
  SITE 97: note = RuvC_P5
  REGION 188..272: note = Tnp_domain
  SITE 196: note = Tnp_P1
  SITE 225: note = Tnp_P2
  SITE 233: note = Tnp_P3
  SITE 234: note = Tnp_P4
  SITE 245: note = Tnp_P5
MTEYTIGIGISKSHLDAFRQEDQATRQFENTPKGIRALICWLGKSPVARIVFEPTGPYHRALETALSGKFPLVKVNPLQARRFAEACGTRTKTDAVDARSLARMGAALNLEPDVPISENQLVLRDLQVARTALVKERTRLRNRSHVQVNPVLKRQIKARLTLVERQLAELDAEIARHIDSDQALQRKREILGSIPGLGPIAAALILTFLPEIGTLDRKQAGSLAGLVPHSRESGQWKGKSFISGGRKPLRDALYMPALVAMRFNPDLKSKYTALREAGKPAKVAIVTLMRKLLETANALVKADRTWTPKSA

SEQ ID NO: 18755 - protein, 356 aa, unidentified
  source 1..356: note = protein_3576c6d
  REGION 6..150: note = RuvC_domain
  SITE 9: note = RuvC_P1
  SITE 54: note = RuvC_P2
  SITE 89: note = RuvC_P3
  SITE 91: note = RuvC_P4
  SITE 94: note = RuvC_P5
  REGION 213..310: note = Tnp_domain
  SITE 221: note = Tnp_P1
  SITE 251: note = Tnp_P2
  SITE 259: note = Tnp_P3
  SITE 260: note = Tnp_P4
  SITE 272: note = Tnp_P5
MKLIRVGVDLAKKVFQVHGVDRDEKPVWRRRLTRGNWLQVLLEAVEPSCQIGMEACGGAHYWARKLQERGFTVKLIAPQFVKPYVQSNKNDADDAEAIGEAMSRPKMRFVAVETVEQQDLQAMHRIGSGLIEQRTAKGNQIRGLVSEYGLVAPRELAQLRRALPVWLEDAGNGLSERFRGLLNALWCDLRVLDKRVAELDREIALIAQSDPAARRLQQLRGVGPIIATALVAALGDGGQFANGRQMAAALGLTPKQHSSGGKDKQLGISKRGDAYLRSILIHGARSAIRTAKGKTDRLSLWLMALAGRRHPNVVATALANKTTRIAWAMLRHGTDYQPDSDRGRWLDQIRHPSTVS

SEQ ID NO: 18756 - protein, 344 aa, unidentified
  source 1..344: note = protein_8910bf4
  REGION 7..147: note = RuvC_domain
  SITE 10: note = RuvC_P1
  SITE 53: note = RuvC_P2
  SITE 88: note = RuvC_P3
  SITE 90: note = RuvC_P4
  SITE 93: note = RuvC_P5
  REGION 210..297: note = Tnp_domain
  SITE 218: note = Tnp_P1
  SITE 248: note = Tnp_P2
  SITE 256: note = Tnp_P3
  SITE 257: note = Tnp_P4
  SITE 269: note = Tnp_P5
MEQIIRIGMDTSKSVFQLHGVNAQEQPVLRRKLSRRDMVKFFEKASPTTVGIEACGGSHHWARLLRSLGHEVKLIAPQLAKPYVKRGKNDAADAEALCEAMSRPTMRFVPVKTADQQAALMLVGMRDRLIGYRTQLANIIRGFAMEFGIVAAKGMSQIEPLLERIAADPTLPEMARELFAMHTLEYRDLLAEIAVVDEKLMALHRSNECSRRLAEIPGVGPVGASLLMMKTPDPRIFKSGRDFAAWAGLTPKDHSTAGKTRHGIITRAGDEMLRSVLVVGATALLRHVRTGRSRNASPWIINLLQRKSPKLVAVALANKIARIAWKLMVSGETYRQSEGNPQPV

SEQ ID NO: 18757 - protein, 345 aa, unidentified
  source 1..345: note = protein_817772e
  REGION 6..147: note = RuvC_domain
  SITE 9: note = RuvC_P1
  SITE 51: note = RuvC_P2
  SITE 86: note = RuvC_P3
  SITE 88: note = RuvC_P4
  SITE 91: note = RuvC_P5
  REGION 210..300: note = Tnp_domain
  SITE 218: note = Tnp_P1
  SITE 250: note = Tnp_P2
  SITE 258: note = Tnp_P3
  SITE 259: note = Tnp_P4
  SITE 272: note = Tnp_P5
MKNTIVGVDLAKNIIQICVHTNKKVHSNTEMTPDEFIAWLANSTPITVVFEACGTSNYWKQKAISLGHDARLISTKLVGAIRKNQKTDKNDALAIVQATLLPDVVFISGKSTEQQQLQSIMRFRELSVKQKVASGNQLKALLLEFNIKVSSKLGGLKGVIKSTLEDAENGLTFEFRDALSAAWAQYLSINKAIDLYDECLNKSIETHPDCKKLLKIEGVGPLNAINLYIALGCAELGTFTKGKDASACIGLTPIQHSSGGKAKIGTIGRHVKNSRLRTQLITGAMSVIHRVTTRASITKKDAWLKSLIERRGKKCAAVALANKTVRTAYTMLTKNTEYTAEILPA

SEQ ID NO: 18758 - protein, 254 aa, unidentified
  source 1..254: note = protein_7393610
  REGION 5..151: note = RuvC_domain
  SITE 8: note = RuvC_P1
  SITE 53: note = RuvC_P2
  SITE 91: note = RuvC_P3
  SITE 93: note = RuvC_P4
  SITE 96: note = RuvC_P5
  REGION 211..254: note = Tnp_domain
  SITE 219: note = Tnp_P1
  SITE 249: note = Tnp_P2
MDQYIGLDVSLKDTAVSIRENRKRIWRGKCPSNPKVLSQIIRKHAPHAKLVVFETGPLSTWFYHALTAEGIPAICIEARHAQKVLSETLNKTDANDADGLAQLAEAGFYKVVRVKTFDNMLTRTLVAARSQLVSISKQLSNQIRGLLKTFGLIVPKGEGRVFDANVRELLNGNSGLAVVILPLLEAWRDIRKRAANLDHQLLAASRQSRATKLLMTIPGVGAVTAVSYIAAIEDPENFPTSRSVGAWLGLTTRR

SEQ ID NO: 18759 - protein, 344 aa, unidentified
  source 1..344: note = protein_d468f00
  REGION 7..148: note = RuvC_domain
  SITE 10: note = RuvC_P1
  SITE 53: note = RuvC_P2
  SITE 88: note = RuvC_P3
  SITE 90: note = RuvC_P4
  SITE 93: note = RuvC_P5
  REGION 213..297: note = Tnp_domain
  SITE 221: note = Tnp_P1
  SITE 251: note = Tnp_P2
  SITE 259: note = Tnp_P3
  SITE 260: note = Tnp_P4
  SITE 272: note = Tnp_P5
MSEVTTIGLDIAKSVFHAHGADEHGQTVFSRKIARTKLLGFFAKLPVCLVALEACGGAHHWARELMRLGHDVRLIPPAYVKPFVKRQKNDAADAEAICEAARRPNMRFVAVKSEEQQAAGLAFRTRDLLVRQRTQLANALRGHLTEFGWVAPRGLAHATKLAALLKEEEMASSLPTAARKMLRVMIQMLAKLEDRISYLDREVARRAREDEVVRRLMTIPGIGPITATAIVALAPPAETFRKGRDFAAWLGLTPKQLSSGGKQKLGRISKMGERTIRRLLIIGGSSLVRKATRHGAPAGSWLERMLMRKPRMLVSVALANKTARIAWALMTRQEAYKAPVTATA

SEQ ID NO: 18760 - protein, 436 aa, unidentified
  source 1..436: note = protein_a65a5a9
  REGION 6..159: note = RuvC_domain
  SITE 9: note = RuvC_P1
  SITE 57: note = RuvC_P2
  SITE 98: note = RuvC_P3
  SITE 100: note = RuvC_P4
  SITE 103: note = RuvC_P5
  REGION 221..306: note = Tnp_domain
  SITE 229: note = Tnp_P1
  SITE 259: note = Tnp_P2
  SITE 267: note = Tnp_P3
  SITE 268: note = Tnp_P4
  SITE 279: note = Tnp_P5
MDQVIIGVDPHKLSVTIEARDSREVLRSTGRFGTDTAGYRQLLRAARQWPQRVWAVEGANGIGRPVAQRLLADGERVLDVPAKLAARARVSGTGQGRKTDATDAHAIVMVALRDTGLRELSSDPELMVLRLLCDRRDEISRARAQALNRMHRLFLELVPGGAPVKKSTSQYKSLLARVRPRDLAGKTRRRMAAEELADLARYDAKLKTMKAELKATVQARGSRLMDIHGIGPAGAARILADVGDVARFPDRNHFASWTGTAPIDASSGEHTRHRLSRAGNRRLNHVLYMAGIVQLRNDTPGRAYYRRKVQQSKTSMEAMRCLRRRLSDVACRQLVADAARTAALDQAGPGGHSGTTLKSSATDLTPDIGSSDQPFPGPAPSTLPPPPPARNPARPGTGAIPRRRAGGVNVERPTGRTTLTPTSAGAHSKGLPDPPP

SEQ ID NO: 18761 - protein, 318 aa, unidentified
  source 1..318: note = protein_035f46c
  REGION 9..149: note = RuvC_domain
  SITE 12: note = RuvC_P1
  SITE 53: note = RuvC_P2
  SITE 93: note = RuvC_P3
  SITE 95: note = RuvC_P4
  SITE 98: note = RuvC_P5
  REGION 189..273: note = Tnp_domain
  SITE 197: note = Tnp_P1
  SITE 226: note = Tnp_P2
  SITE 234: note = Tnp_P3
  SITE 235: note = Tnp_P4
  SITE 247: note = Tnp_P5
MMQAAEQYIGVDVSKAELVIAQAGGQLCRVSNDVAGISGWLEQVSQPALIAMESTGRYHGLLAQLAHEAGVTVYVLNARDVYFYAKTLGSRAKTDGVDATVIARYLVEHHARLRPWRPGSALQQRLQGLLARRAQLTGHRAALRQALAGGELQGIDVQPLHSSFAQVIEAIDATVQALIDGDAELGQGCARLRTIIGFGPQAAALLTVLLSRLQLASADALVAYCGLDPRPNDSGARRGRRRLTKKGPPLLRRQIYLVGCAAAGSKALKPLYQSIRAQGFATTEAALILGRKLLRAAFAIWKNSKPFDPARLLPPKSA

SEQ ID NO: 18762 - protein, 401 aa, unidentified
  source 1..401: note = protein_15b288d
  REGION 10..165: note = RuvC_domain
  SITE 13: note = RuvC_P1
  SITE 62: note = RuvC_P2
  SITE 102: note = RuvC_P3
  SITE 104: note = RuvC_P4
  SITE 107: note = RuvC_P5
  REGION 271..357: note = Tnp_domain
  SITE 279: note = Tnp_P1
  SITE 309: note = Tnp_P2
  SITE 317: note = Tnp_P3
  SITE 318: note = Tnp_P4
  SITE 330: note = Tnp_P5
MSTSHERTRVGIDAGKGHHRAVAVDADGETVFSTKVINDEGQILTLIETAREKVGEVRWAVDISGRASTLLLALLIAHGQHVVYVPGRTVNRMSGAYQGEGKTDAKDARVIADQARMRPKGFAQLRTPPELVTTLRVLTDYRADLIADRVRLINRLRDLLVGICPALERAFDYSAARGPVVLLTEYQTPAALRRIGVKRLTTWLERRKVRGADAVAVKAVEAAQSQMAELPGDKRSAKLVGDLAHRLLALDERIKDTDREIRETFPADERAEIIESMPAMGPILRAEFVAIVGDLSDYQAAGRLASHAGLAPVARDSGRRTSNYHRPKRYNRRLRHVFYLAAQTAMMRPGPSRDYYLKKRGEGLLHTQALLALARRRIDVLWAMLRDKRLFTSAPPVTQTA

SEQ ID NO: 18763 - protein, 343 aa, unidentified
  source 1..343: note = protein_b373cea
  REGION 7..149: note = RuvC_domain
  SITE 10: note = RuvC_P1
  SITE 53: note = RuvC_P2
  SITE 88: note = RuvC_P3
  SITE 90: note = RuvC_P4
  SITE 93: note = RuvC_P5
  REGION 212..303: note = Tnp_domain
  SITE 220: note = Tnp_P1
  SITE 250: note = Tnp_P2
  SITE 258: note = Tnp_P3
  SITE 259: note = Tnp_P4
  SITE 271: note = Tnp_P5
MQVITTIGLDIAKSVFQVHGVDAGGQVVMRRQLKRRYVLTFFQKLPPCLVGIEACASSHHWSRELQTLGHKVRLMPPAYVKPYVKRQKNDATDAEAICEAVSRPNMRFVETKTPEQQSCLVLHRTRHLFIRQQTAVINAIRAHLAEFGIIAPVGRNGVEQLLGVVADASDKRLPEVARACVAALGAQLQMLKAQILEFDRMIRAWHRSSEASRRLDDCPGIGPALATALVATVADPKVFRSGRNFSAWIGLVPKQHSSGGKDRLGSISKQGDRYLRGLFVAGALAVIRYAKIHGTKHRPWLTALLARRPTKVAAIALANKMARMAWAMMAKGERYKEPAALAA

SEQ ID NO: 18764 - protein, 360 aa, unidentified
  source 1..360: note = protein_7cef3d1
  REGION 14..161: note = RuvC_domain
  SITE 17: note = RuvC_P1
  SITE 66: note = RuvC_P2
  SITE 102: note = RuvC_P3
  SITE 104: note = RuvC_P4
  SITE 107: note = RuvC_P5
  REGION 234..318: note = Tnp_domain
  SITE 240: note = Tnp_P1
  SITE 271: note = Tnp_P2
  SITE 279: note = Tnp_P3
  SITE 280: note = Tnp_P4
  SITE 291: note = Tnp_P5
MEVGQDVVLHPVVGGVDTHKDLHVAAVVDEHDRVLGTQCFATTRQGYRQMLAWMRSFGQLRCVGIEASGTYGAGLLRSMQNAGVEVLEVTAPDKPDRRKRGKNDDLDAQNAAHAAFAGKRTVTPRSRDGMIESLRVLKACRKTAVVARRIALQMIQNTIVCAPDGLREALRQMTRMQLVRTLAAWRPDLTDYRNVDSAYRISLKSLGRRYVELHDEIADLDVMIGAIVDELAPNLVARNSIGHAGAAQLLLTAGDNPERLHSEAGFAALCGVSPVPASSGKTTRHRLNRGGDRAANSALHIIAIGRLRTDPRTKAYMAKRVAEGHSKLEAIRCLKRYIAREVFTLISQRQKEINQARITA

SEQ ID NO: 18765 - protein, 415 aa, unidentified
  source 1..415: note = protein_e4899e3
  REGION 10..165: note = RuvC_domain
  SITE 13: note = RuvC_P1
  SITE 62: note = RuvC_P2
  SITE 102: note = RuvC_P3
  SITE 104: note = RuvC_P4
  SITE 107: note = RuvC_P5
  REGION 273..359: note = Tnp_domain
  SITE 281: note = Tnp_P1
  SITE 312: note = Tnp_P2
  SITE 320: note = Tnp_P3
  SITE 321: note = Tnp_P4
MEGLHPSYFVGIDWASNKHDVCVVDVAGTIVEAFIIAHTAEGLGELIRRLRRFGSPQHLPIAIERPSGLLVDTLVEAGFSVVPVHPNALKATRPRYAAAPGKSDPGDAYILADILRTDGHRFRPLRAPSDRTKALRAAVRTRDDLVATRVQLANQLRSLLESFWAGAAAIFADVDSPIALDFLDSYPTPESAARLGPKRLERFLKRAAYCGRRPVDHLLDRLRSAPAGHAAELESETKGQLVRSLVAVLRPLVAQIRELDGLIAAHLAQHPDGEIIQSFPRTGTVNAAQILAELGDDRLRFTTEAQLAAEAGVAPVTHSSGKHRGVACRFACNKRLRKALTTWADNSRHAHPWARAVYRNARSRGCAHPHAIRILARAWVRVLWRCWQNESTYNPAKHGRATPFLTTAQPTSAAA

SEQ ID NO: 18766 - protein, 400 aa, unidentified
  source 1..400: note = protein_8983420
  REGION 11..166: note = RuvC_domain
  SITE 14: note = RuvC_P1
  SITE 63: note = RuvC_P2
  SITE 103: note = RuvC_P3
  SITE 105: note = RuvC_P4
  SITE 108: note = RuvC_P5
  REGION 273..358: note = Tnp_domain
  SITE 281: note = Tnp_P1
  SITE 311: note = Tnp_P2
  SITE 319: note = Tnp_P3
  SITE 320: note = Tnp_P4
  SITE 332: note = Tnp_P5
MNHDGEIDIYLGLDVGKGEHHGTALTPAGKKVFDKPMPNSESRLRELFEELQVKHGNVLVVVDQPASMGALPLAVARDTGCRVAYLPGLTMRRIADLYPGESKTDARDAAIIADAARTMPHTLRDLARDDETVAELNMLVGFDDDLAGEVTRIKNRLRGLLTQIHPSLERVLGPRLDHPAVLVLLERHGSPAQLRKAGRRRLVTLLRPKAPRMAERLVADIFDALDEQTVVVPGTEASALIVPSLAASLSAVLDQRKVLATRIEELLEAHPLSQVLTSMPGIGVRTAARILIDVGDGSGFATAGHLAAYAGLAPATRRSGSSIRGEQHSRRGNKQLKRAFYLAAFASLSQPDSRAYYDRKRHEGKHHVAAIVCLARRRIDVLFAMLRDGTFYQPPAPATA

SEQ ID NO: 18767 - protein, 373 aa, unidentified
  source 1..373: note = protein_7e7afd8
  REGION 12..167: note = RuvC_domain
  SITE 15: note = RuvC_P1
  SITE 64: note = RuvC_P2
  SITE 104: note = RuvC_P3
  SITE 106: note = RuvC_P4
  SITE 109: note = RuvC_P5
  REGION 244..323: note = Tnp_domain
  SITE 276: note = Tnp_P2
  SITE 284: note = Tnp_P3
  SITE 285: note = Tnp_P4
MSLLVMGALFYVGIDWAASSHAVCVLDQTGRRVAAFSIEHSAAGFTSLVRGLSRLATVDRIAVAIERPDGRLVDTLLEAGFAVVPVSPNTIKTWRESEAGSGAKSDAGDAYVIADYLRCRAARLDPVEPYSAATVALRTVVRTRDDLVATRVAATNQLAALLDAHWPGAKAIFADVESPIALAFLTRYPTAAHAKGLGAKRLEAFCREHGYSGKRSGEVLLARLRAAPPGTTDPTVRAAVAEAVLTMVATLKVLGETLKGLGQAYDGPDAVAALAGVTAVTKESGKHRAVHSRWACNKRLRVAITTFADNGRHASPWAARVHAEARARGHDHPHAVRVLARAWIRVIWRCWIDQFPYDPGRHGNARRLQPSWG

SEQ ID NO: 18768 - protein, 366 aa, unidentified
  source 1..366: note = protein_1fd8334
  REGION 29..181: note = RuvC_domain
  SITE 32: note = RuvC_P1
  SITE 80: note = RuvC_P2
  SITE 118: note = RuvC_P3
  SITE 120: note = RuvC_P4
  SITE 123: note = RuvC_P5
  REGION 236..313: note = Tnp_domain
  SITE 266: note = Tnp_P2
  SITE 274: note = Tnp_P3
  SITE 275: note = Tnp_P4
MKSASNTPNVASPRTAAVLPDEPPGGVTAGLDWARDDHAVAVVDERGRERVRHRVEHSAAGLRELIETVRGAGCGEVAIERPDGPVVDALFAAGLTVVVISPNQVKNLRGRYGSAGNKDDRFDAYVLADTLRTDRARLRPLVPDTAQTISLRRAVRARKDLVSHRVGVANQLRAHLRNAFPGAVGLFAEIDSPISLAFLTRFDTQDRADWLSPKRLAAWLSSVGYSGRSDPAVLHTGRVRAARLLAEIGDCRAKFPTPESLACLAGAAPSTRQSGKLRTVGFRWSCDKQLRDAVIDFAADSRRTHPWAADLYNRARARGHNHPHAARILARAWLYVIWHCWQNNLAYDPTQHGALQRLLQDQQAAA

SEQ ID NO: 18769 - protein, 398 aa, unidentified
  source 1..398: note = protein_7ebaeef
  REGION 4..160: note = RuvC_domain
  SITE 7: note = RuvC_P1
  SITE 57: note = RuvC_P2
  SITE 97: note = RuvC_P3
  SITE 99: note = RuvC_P4
  SITE 102: note = RuvC_P5
  REGION 274..361: note = Tnp_domain
  SITE 282: note = Tnp_P1
  SITE 312: note = Tnp_P2
  SITE 320: note = Tnp_P3
  SITE 321: note = Tnp_P4
  SITE 334: note = Tnp_P5
MIAVGIDVSKSKSTVAILNGDGSIRAKPFNVRHTADELLALVNYIKGTSEVPTILMEPTSHYHYPLLKAFQDANLPVCLINPYQMKKYGDTALRKAKTDKRDSIRIAQYALEKSYSLIPYTPSDQKYEDLRFLSRQYSQRLSTLTVNKVQLLALLDQTMPGITSLLPLKSRDPDNCVLLRFIKRFKSFDIIRKMGKTRFLESFQILVRKTKGRPASTKGLRIYELALNSVTTRGDNPLTAMTQEQCVALISTSQKAADEINLQMRTIAETLPEYKVLRSMAGVGDRLGPVILAEIGDIRRFHSGKALNAYAGNDAPPYQSGQFESRNRHISKRGNPALRKACFEVMQALKLTKPQDDPVYLFMAKKEQEGKPYNVAKMAAVNKFQWPAIAGLVKVAFI

SEQ ID NO: 18770 - protein, 303 aa, unidentified
  source 1..303: note = protein_647b027
  REGION 2..112: note = RuvC_domain
  SITE 16: note = RuvC_P2
  SITE 51: note = RuvC_P3
  SITE 53: note = RuvC_P4
  SITE 56: note = RuvC_P5
  REGION 175..265: note = Tnp_domain
  SITE 183: note = Tnp_P1
  SITE 213: note = Tnp_P2
  SITE 221: note = Tnp_P3
  SITE 222: note = Tnp_P4
  SITE 234: note = Tnp_P5
MISFFEKLEPCLVGMEACGSSHYWARELSKLGHAVKLIAPIYVKPYVKRGKSDAADAEAICEAVTRPTMRFVEMKSPEQQAILSRHRARDLIVRQRTQTINMMRGLLAEFGIIFAQGVGHAIRFAKGMIEGHSPALPQAACDVVTDLSEQLLALHARVNWYGRRMTTVAKLEPRIALLQTIPGIGPITASAIVATVGSGEQFQSGRDLSAWLGLTPINKSTGGKERLGRISKMGDRYIRRLMVVCMTSRIKQIKSAPERFDPWFADILQRKPAKLAAIAMANKTARIIWAVLSRNEPYQPRTT

SEQ ID NO: 18771 - protein, 288 aa, unidentified
  source 1..288: note = protein_c43d05d
  REGION 4..122: note = RuvC_domain
  SITE 26: note = RuvC_P2
  SITE 61: note = RuvC_P3
  SITE 63: note = RuvC_P4
  SITE 66: note = RuvC_P5
  REGION 185..236: note = Tnp_domain
  SITE 193: note = Tnp_P1
  SITE 223: note = Tnp_P2
MFNRKLRRAEVLRFFERLPPCLIGMEACGGAHYWAREIAKLGHDVRLIPPAYVKPFVKRGKTDAADAEAISEAVIRKTMRFVPIKSAEQQAEAMVLKTRALLVQQRTQSVNALRAHFAELGIIAAGGLPNVAALVAIVRGVEDARLPAAARFALTAIVDQIDALAEQIDLLERTIVTESKRDESMRRLMTVPGVGPITAATIKALVPDPAGFKSGRHFAAWVGLTPRPHSAEARSDWVESLKWVIPNFVFYSFSEQQPFCGLPGRMIGHDLGCKRYSPGVRSRWPLSR

SEQ ID NO: 18772 - protein, 369 aa, unidentified
  source 1..369: note = protein_9bcab93
  REGION 36..177: note = RuvC_domain
  SITE 39: note = RuvC_P1
  SITE 82: note = RuvC_P2
  SITE 117: note = RuvC_P3
  SITE 119: note = RuvC_P4
  SITE 122: note = RuvC_P5
  REGION 240..323: note = Tnp_domain
  SITE 248: note = Tnp_P1
  SITE 278: note = Tnp_P2
  SITE 286: note = Tnp_P3
  SITE 287: note = Tnp_P4
  SITE 299: note = Tnp_P5
MKVDSHGPTASECPRWKIMTILHRQTGGSEMKLTTVGVDIAKNVMQLHYIDAETGEIVNKPVKRAAFLEHFANRSPCLIGMEACGGSQHWARKLIAMGHQVKLMPGKFVKAFVMGNKNDATDARAIWMAAQQAGKSVAVKTETQQAVLGLHRMREQLVKFRTMQINSLRGLLTEYGEVMGKGRAALDKAMPDVLERLVDRLPRILLDTLREQWNGLTELDKQIAEIERRLQAWLREDKACKAIAAIPGVGLLTATAAVATMGDAKTFKSGREFAAWIGLVPRQTGTGGRVQLLGISKRGDMYLRKVLVHGARSVLCLAKEPGPWVEGIKKRRPLNVAVVAQANRMARTIWAILAHDRVYEKDYVSVKPV

SEQ ID NO: 18773 - protein, 343 aa, unidentified
  source 1..343: note = protein_d02b345
  REGION 6..147: note = RuvC_domain
  SITE 9: note = RuvC_P1
  SITE 52: note = RuvC_P2
  SITE 87: note = RuvC_P3
  SITE 89: note = RuvC_P4
  SITE 92: note = RuvC_P5
  REGION 211..300: note = Tnp_domain
  SITE 219: note = Tnp_P1
  SITE 249: note = Tnp_P2
  SITE 257: note = Tnp_P3
  SITE 258: note = Tnp_P4
  SITE 270: note = Tnp_P5
MEITTYGLDLAKSVMQLHWVDMETGEIHRKQLKRRRLLEFFANRQPGVIAMEACGSAHYWARELLKLGHEVRVIAAQFVRPFVKTNKNDAADAAAIWETVQRPDMRFVAVKTEEQQSVLALHRMRSQLIKVRTMQVNQIRGLLYEFGADLPQGRQRGLKEVPDALANLENSISPMMLDTIRQQLKRLEEMDKDIAEIEKRLTLWKKDQEAVTRLMAIPGVGLLTATAIIATVGDMKSFRSGREFAAFLGLVPRQSGTGGKVRLLGISKRGDTYLRSLLTHGARAVVNFQIKNRNPWIDKLLSRRPHNVTVVALANKMARTIWALLVKNTEYVASHTMNAASIS

SEQ ID NO: 18774 - protein, 340 aa, unidentified
  source 1..340: note = protein_0d39aec
  REGION 7..148: note = RuvC_domain
  SITE 10: note = RuvC_P1
  SITE 53: note = RuvC_P2
  SITE 88: note = RuvC_P3
  SITE 90: note = RuvC_P4
  SITE 93: note = RuvC_P5
  REGION 211..298: note = Tnp_domain
  SITE 219: note = Tnp_P1
  SITE 249: note = Tnp_P2
  SITE 257: note = Tnp_P3
  SITE 258: note = Tnp_P4
  SITE 270: note = Tnp_P5
MVNCPAVGVDIAKSIFQVHYVDQETGEIVNKPIRRGKFLEFFANRAACLIGMEACGGAHHWARQLTKMGHQVRLMPAEFVKAFNIRNKNDAADARAIWLAVQQPSKAVAVKTEMQQAMLALHRMRQQLIKFRTMQINGLRGLLTEYGEVMSKSRAKLDKEIPEVLERIAERLPAVFVHTLREQWNGLAKLDEQVAQIEQRMREWKKEDKAVKAISEIPGVGLLTATAAVAMMGDAKVFRSGREFAAWAGLVPKQTGSGGKVNLHGISKRGDTYLRTLLIHGARSVLAHAKEPGEWIEQMQKRRPTNVVVVALANKMARMIWAVLAHGRPYRKDYVSVKPA

SEQ ID NO: 18775 - protein, 404 aa, unidentified
  source 1..404: note = protein_f04740e
  REGION 6..162: note = RuvC_domain
  SITE 9: note = RuvC_P1
  SITE 60: note = RuvC_P2
  SITE 100: note = RuvC_P3
  SITE 102: note = RuvC_P4
  SITE 105: note = RuvC_P5
  REGION 271..358: note = Tnp_domain
  SITE 279: note = Tnp_P1
  SITE 310: note = Tnp_P2
  SITE 318: note = Tnp_P3
  SITE 319: note = Tnp_P4
  SITE 331: note = Tnp_P5
MPELWAGTDAGKAEHHCTVIDTDGNKLLSRRVPNNEPELLELLGDVLELAEDGPVTWAVDLSSGGAALWIAILVSHRQKLLYIPGRTVHHASAAYRGSGKTDAKDAFVIADTARMRRDLQPLTETSEIAVDLRILTARRIDLSADRTRAINRLRAQLLEYFPALERAFDYSTSKTALILLTGYQTPTTLRRIGRTRLATWLKNHGVRTIAIATSAAQAAVTAAEAQHTAVPGEKTAAKMVHTLSREVMALDEEIDQLNTLIEDRFREHPDAEVITSMPGIGDTLGAEFIAATGGDMSAFGSPDRLAGVAGLAPVPRDSGKVSGNLQRPRRYSRRLLRMFYLSAQVAAIHCPESQRFYQRKRTEGKSHKQAVLALARRRLNVLWALIRDHRTFEATTGQPATTAA

SEQ ID NO: 18776 - protein, 407 aa, unidentified
  source 1..407: note = protein_7046113
  REGION 4..160: note = RuvC_domain
  SITE 7: note = RuvC_P1
  SITE 57: note = RuvC_P2
  SITE 97: note = RuvC_P3
  SITE 99: note = RuvC_P4
  SITE 102: note = RuvC_P5
  REGION 269..355: note = Tnp_domain
  SITE 277: note = Tnp_P1
  SITE 308: note = Tnp_P2
  SITE 316: note = Tnp_P3
  SITE 317: note = Tnp_P4
MIFVGVDWAEAHHDVFVEDEDGKRLGAGRLPEGVEGIARFHDLVGAHVEDPAEVVVGIETDRGLFVAALVAAGYLVFAVNPMSTSRYRDRHSTSGAKSDPGDAKVLADMVRTDRHNHRPVASDSDEVQAIKVLARAHQSMIWSRVRQTNLLRSTLREFYPAALVAFSDLASGDALEVLGAAPTPELGRALSRAKIAACLRRGGRSRRIDEQAVEIQAALRSDQLAAPAVISAAMGASVSANVAVIATMAAQIARLAKELDAGFEQHPDAVVVRSLPGLGTILGARVLGEFGDEPNRYVSAKSRKNYAGTSPVTRASGTKRVVLARHARNHRLADAIHQWAFATLTASPGARAFYDAHRAAGDSHHQALRALGNRLVGILHGCLTHHCLYDENTAWGHREEQKLPTAA

SEQ ID NO: 18777 - protein, 344 aa, unidentified
  source 1..344: note = protein_2938f5e
  REGION 7..149: note = RuvC_domain
  SITE 10: note = RuvC_P1
  SITE 53: note = RuvC_P2
  SITE 88: note = RuvC_P3
  SITE 90: note = RuvC_P4
  SITE 93: note = RuvC_P5
  REGION 211..298: note = Tnp_domain
  SITE 219: note = Tnp_P1
  SITE 249: note = Tnp_P2
  SITE 257: note = Tnp_P3
  SITE 258: note = Tnp_P4
  SITE 270: note = Tnp_P5
MTTISLVGIDLGKRTFHIHAQDRHGNEVLRRQLNRMQLVRWLANLPPCTVAFESCCGAHWIGWKLREFGHTPRMIDPRRVRPFVTGNKHDFADAQAICEAARRPMIRSIEPKTPEELALASLHRIRDARVAERTACINQTHAFLLEFGMGMAGSKAMMGALPDIVEDAGNLLPSTSRQMLIALYEHYRYLCDRIKAADILIQARLKDDDLAVRLQEVPGIGPITASAICAEATQARQCASSRDFAASIGLTPRQHSTGGRSSMLGITKRGDGNLRRLLVQCARVLLMRKEQREDAMIQWARRLSSRRHTNVVACALAAKLARILWAILVRGQRYQPHPVAATVG

SEQ ID NO: 18778 - protein, 372 aa, unidentified
  source 1..372: note = protein_ae5c52d
  REGION 4..145: note = RuvC_domain
  SITE 7: note = RuvC_P1
  SITE 50: note = RuvC_P2
  SITE 85: note = RuvC_P3
  SITE 87: note = RuvC_P4
  SITE 90: note = RuvC_P5
  REGION 209..296: note = Tnp_domain
  SITE 217: note = Tnp_P1
  SITE 247: note = Tnp_P2
  SITE 255: note = Tnp_P3
  SITE 256: note = Tnp_P4
  SITE 268: note = Tnp_P5
MNIIGIDLGKTVFHLIAMRPDGAIFTKKRLSRPQLIAFMSNTPPSVVAMEASCGAHYLGRLLVSQGHEVKLIPAQFVRPFVKSQKNDYVDAEAIAEAAQRPTMRFVPIKTEDQLDLQAIHRVRERLVERRTAVINQFRAFLLERGIVVRTGRECLLRRMPEVLATAEAQLAPRMFRLLTSVVAEWRAIETEIAEMDREIGMIASTDEACVRLQTVPGIGPLIATAVVAAVGNGAAFSRGREFAAWLGLVPRQASTGGKTKLLGISKHGNTYLRWLFIHGGRSVQHRVSREPHAFGRWLTELESRTHSNVAGVAMANKLARIAWVVLNRQEPYLRMNQPSSGGGFGLSTLATPVSDAAQGSSMNSLRSALTSA

SEQ ID NO: 18779 - protein, 416 aa, unidentified
  source 1..416: note = protein_056c365
  REGION 12..167: note = RuvC_domain
  SITE 15: note = RuvC_P1
  SITE 64: note = RuvC_P2
  SITE 104: note = RuvC_P3
  SITE 106: note = RuvC_P4
  SITE 109: note = RuvC_P5
  REGION 275..361: note = Tnp_domain
  SITE 283: note = Tnp_P1
  SITE 314: note = Tnp_P2
  SITE 322: note = Tnp_P3
  SITE 323: note = Tnp_P4
MSLALPEALFFAGIDWAAETHAVCVMDAAGKIAAEFTIGHSADGIATLIRRLARYGDPGDLPVAIERPDGRLADLLLEAGHPVVPVRPHAIRTWRDGEVLSGAKSDARDAAVIAGYLRLRAHKLRVAAPCSDETRALRTVVRTRGDLVEMRVAATSQLPALLDAHWPGARAIFAGVESPVSLEFLTRYPAPAAAAHPGEKRMAAFCVKHGYSGCRTAAGLPARLRSAPAGTGREALTEALRDAVLAAAGVLIALNASVKNLDRSIAAHLGEHPDGAIFTSLPRSGQVNAARVLAERGDARQACGHPGSVAALAGCTPVTRESGKHRAVHFRWACSKRFRVAITTFADNSRHASPRAAKICNDARASGKDHPHATRVLARARIRVIYRCWLDGVPCDPAAHGTAAALARQTTERIAA

SEQ ID NO: 18780 - protein, 324 aa, unidentified
  source 1..324: note = protein_92d133c
  REGION 16..159: note = RuvC_domain
  SITE 19: note = RuvC_P1
  SITE 63: note = RuvC_P2
  SITE 103: note = RuvC_P3
  SITE 105: note = RuvC_P4
  SITE 108: note = RuvC_P5
  REGION 198..282: note = Tnp_domain
  SITE 206: note = Tnp_P1
  SITE 235: note = Tnp_P2
  SITE 243: note = Tnp_P3
  SITE 244: note = Tnp_P4
  SITE 255: note = Tnp_P5
MGFTKEEAMQTPSVWVGIDISKAQLDMAVEPGGDSLTVPYDGPGLATLITRLSGLAPSRIVVEATGGLERALLRVLVEAALPVVVVNPRQVRDFAKATGQLAKTDALDAQVLARFAAVIQPPERTLPDRQTQELAALLARRRQVLAMQRAEQNRLDRAAVPVRKRIQAHLRGLSTELVRLEGDLDDMIEQSPAWRTREELLQSVPGIGPVMSRTVLAELPELGLLNRKQVAALVGVAPFNRDSGRLRGQRTIWGGRAPVRTALYMATLVATRWNPVIRQFYQRLRAAGKAPKVALVAAMRKLLTILNAMVHHGTQWHPTVAQGA

SEQ ID NO: 18781 - protein, 357 aa, unidentified
  source 1..357: note = protein_21496fe
  REGION 16..164: note = RuvC_domain
  SITE 19: note = RuvC_P1
  SITE 68: note = RuvC_P2
  SITE 104: note = RuvC_P3
  SITE 106: note = RuvC_P4
  SITE 109: note = RuvC_P5
  REGION 234..320: note = Tnp_domain
  SITE 242: note = Tnp_P1
  SITE 273: note = Tnp_P2
  SITE 281: note = Tnp_P3
  SITE 282: note = Tnp_P4
  SITE 293: note = Tnp_P5
MTTIADPSTAAQPVFGGVDTHADTHTAAVIDAAGRLLAHRQFPATPAGYGQLADWLAAHGRVQRVGVEGTGVYGAGLARSLTAADIELVEVDRPDRKTRRFAGKSDPIDAEAAARAALTGRATGTPKTRTGPVEALRALRVARRSAIAARAEAQTQLRSLVITAPEPLRGQLRTLTTRRLLTTCAALRPDLTAITDPLQATKTALRALAHRHAQLSTEIDELDTLLAPLVAQINPALTAANGVGTDVAGQLLATAGDNPDRLRSEAAFAALCGVSPIPASSGRTHRHRLNRGGDRQANAAIYRVVLCRMRWDPRTQAYVQRRTTEGLSKKDIIRCLKRLIARELYYLLTSPAPARTT

SEQ ID NO: 18782 - protein, 324 aa, unidentified
  source 1..324: note = protein_4571adf
  REGION 9..161: note = RuvC_domain
  SITE 12: note = RuvC_P1
  SITE 56: note = RuvC_P2
  SITE 96: note = RuvC_P3
  SITE 98: note = RuvC_P4
  SITE 101: note = RuvC_P5
  REGION 195..281: note = Tnp_domain
  SITE 205: note = Tnp_P1
  SITE 234: note = Tnp_P2
  SITE 242: note = Tnp_P3
  SITE 243: note = Tnp_P4
  SITE 254: note = Tnp_P5
MSMSNHRCAGIDVSKGTLDIAISNIASKFTVPNGSDGFTQIIGKLVRNETRLILMEATGALELGVACHLQSEGFDVVVINPRQVRDFARAMSYLAKTDRIDARVLLQMSEVINQHPEREKNIRPLPDAHTQILSAMVVRRRQLIIMLTAERNRFHSSHPQSYESIRSIISALKGELARIEGEMAIHIKDHFSELSDLLSAVKGVGVGAATVAVLLAEVPELGSLSRREISTLIGVAPVNRDSGTMRARRTVFGGRASVRSVLYMSALVGTRHNPVIKEFYTRLVATRKPKKVALTACIRKLLTVLNAMLKNNEAWDPMYHQRAS

SEQ ID NO: 18783 - protein, 344 aa, unidentified
  source 1..344: note = protein_7596e0d
  REGION 6..147: note = RuvC_domain
  SITE 9: note = RuvC_P1
  SITE 52: note = RuvC_P2
  SITE 87: note = RuvC_P3
  SITE 89: note = RuvC_P4
  SITE 92: note = RuvC_P5
  REGION 211..295: note = Tnp_domain
  SITE 219: note = Tnp_P1
  SITE 249: note = Tnp_P2
  SITE 257: note = Tnp_P3
  SITE 258: note = Tnp_P4
  SITE 270: note = Tnp_P5
MTIVTLGIDLGKNLNSVVGLDAEGRVVLRRRVRRSTLAELAGSLAPCTVAMEACCGAHHVGRLFAAKGHDVRLMSPEYVRPYVRAQKNDDNDAAGIAEAATRPTMRFVELKSQDRLDLQTLHRSRSRLVAARKSLVNQLRAILLERGHTFRQGRKVLERELDPFLAGPPSELSTRIVTLIADMRAEWRSLDERIDALNDDLAAHVRADDAASRLTSIPGIGVLGATALVAAVGDGEAFGRARDVPAWLGLVPKQMTTGGKPRLLGITKRGNIYLRMLLIHGARAALPSLSKQATPLGDWLRGLLSRAHRNVVIVALAAKLARIAWASLRRGVGFERGWGQAMAV

SEQ ID NO: 18784 - protein, 343 aa, unidentified
  source 1..343: note = protein_67d6c4a
  REGION 6..147: note = RuvC_domain
  SITE 9: note = RuvC_P1
  SITE 52: note = RuvC_P2
  SITE 87: note = RuvC_P3
  SITE 89: note = RuvC_P4
  SITE 92: note = RuvC_P5
  REGION 211..299: note = Tnp_domain
  SITE 219: note = Tnp_P1
  SITE 249: note = Tnp_P2
  SITE 257: note = Tnp_P3
  SITE 258: note = Tnp_P4
  SITE 270: note = Tnp_P5
MQICRIGLDLAKYVFQVHGVDAQDEIVLRKTLRRDGVAQFFAELEPCIVGMEACCGSHYWARVLTDLGHEVRLISPQFVKPYVKSNKNDRNDAEAICEAVGRPSMRFVPRKSPEQLEIQAVHRIRQRVVASRTRLVNQVRGLLGEHGVVVARDITRIRRALGEIADSNASGFGDIFIDMLRDMRDELGELDVRLAGYNRRIKNLFRSNEMCQRIGRIEGVGPITATALVAAIGDKSCFKNGRQFAAWLGLVPKQHSSGGKARLFGISKRGDRYLRTLLIHGARAVLSRAAGKTDARSQWIGRMRERRHPNVVAVALANKNARIIWSLLSKDQEYRPAHEESFS

SEQ ID NO: 18785 - protein, 385 aa, unidentified
  source 1..385: note = protein_53ea5ec
  REGION 11..162: note = RuvC_domain
  SITE 14: note = RuvC_P1
  SITE 59: note = RuvC_P2
  SITE 99: note = RuvC_P3
  SITE 101: note = RuvC_P4
  SITE 104: note = RuvC_P5
  REGION 264..349: note = Tnp_domain
  SITE 272: note = Tnp_P1
  SITE 301: note = Tnp_P2
  SITE 309: note = Tnp_P3
  SITE 310: note = Tnp_P4
  SITE 322: note = Tnp_P5
MAPPRRPEIVIGLDVGKSSHWACVATRDGEVLASKPVANRENALDSLFTEFPGALVVVDQVRNIGALALSRARAAGMPSAYLPGLAAHEAARLFGGDAKTDERDAMVIAKTALGIPDALLPVPHPDPAIAAARALAAQRDFLTRESTRSKNRLRSILLESCPEFESLVDLSDVSELRLMAALGGPWSVADAGRRRAAATARGARRGKVDALVGSVGSSARPDAAAIAAEDRAVRFLARRIAENAAELQAATAEISALLERDETYRCLLTVPGIGPKTASELAISVNIDDFPNHDRLASYCGLAPRNRQSGTSVSSVSASRQGNKRLKNLLIFSCNCLARTDGRWGEYYARCRDRGMPHGKALKAVARKRLKVIYAVMRDKVPYVA

SEQ ID NO: 18786 - protein, 389 aa, unidentified
  source 1..389: note = protein_d27276b
  REGION 8..161: note = RuvC_domain
  SITE 11: note = RuvC_P1
  SITE 59: note = RuvC_P2
  SITE 100: note = RuvC_P3
  SITE 102: note = RuvC_P4
  SITE 105: note = RuvC_P5
  REGION 223..308: note = Tnp_domain
  SITE 231: note = Tnp_P1
  SITE 261: note = Tnp_P2
  SITE 269: note = Tnp_P3
  SITE 270: note = Tnp_P4
  SITE 281: note = Tnp_P5
MDESVVVIGMDPHKRSATIEVMAGDEQVLGRGRFGTDAAGYKAMMRYAKQWPARTWAVEGCQGIGGHIARRLVMAGETVVDVPPKLSARARVFATGQGRKTDATDAHSIALVGVRMAGLRPVANNDQLAILRMLVDRRRAIGEDHTRMTSQLHQLLLDLIPGGAKKDLSAAQAKVLLAGVRPRDEVGKTRRRIAAELISDLERLYQRKKAANKELLALLKATGTTLTQLNGIGPSAAARLLVEVGDITRFPDRNHFASWNGTAPIDASSGDNTRQRLSRAGNRQINRALHIMAIVQLRNPSEGRTYFDRRKAAGKTSMEAMRSLKRRLSDVVYRTMLHDAIAAGASPGGQRGNDSDSSATGPTPHTGTSEKPQPGPATPSLRPALPAAS

SEQ ID NO: 18787 - protein, 343 aa, unidentified
  source 1..343: note = protein_d56c257
  REGION 6..149: note = RuvC_domain
  SITE 9: note = RuvC_P1
  SITE 54: note = RuvC_P2
  SITE 89: note = RuvC_P3
  SITE 91: note = RuvC_P4
  SITE 94: note = RuvC_P5
  REGION 213..300: note = Tnp_domain
  SITE 221: note = Tnp_P1
  SITE 251: note = Tnp_P2
  SITE 259: note = Tnp_P3
  SITE 260: note = Tnp_P4
  SITE 272: note = Tnp_P5
MKIIRVGVDLAKSVFQVHGVDRDEKCVWRRKLSRNNWLEILLENIEPGCEIGMEACGSAHHWARKLEALGYTVKLLAPQFVKPYVKSNKNDANDAEAICEAMSRPNMRFVSVKTVDQQDTQAVHRIRSGLMEQRKAKANQVRGLASEYGVVAPKELLHLRRAIPCWLEDAENGLSGRFRKLLVGMWHDLLRLDDRIAELDREIALIAAADPVAKRLQQLRGVGPMIATALLATVGDAHQFANGRQMAASLGLTPKQNSSGGKERLLGISKRGDAYVRCLLVHGARAMIRTAKAKDDRLSQWVTRIATTRHPNVAAVAMANKTARIAWAMIRNGTDYQPELVAG

SEQ ID NO: 18788 - protein, 342 aa, unidentified
  source 1..342: note = protein_cb7cf19
  REGION 6..147: note = RuvC_domain
  SITE 9: note = RuvC_P1
  SITE 52: note = RuvC_P2
  SITE 87: note = RuvC_P3
  SITE 89: note = RuvC_P4
  SITE 92: note = RuvC_P5
  REGION 212..296: note = Tnp_domain
  SITE 220: note = Tnp_P1
  SITE 250: note = Tnp_P2
  SITE 258: note = Tnp_P3
  SITE 259: note = Tnp_P4
  SITE 271: note = Tnp_P5
MTIAVLGIDLGKNSCSLVGLDAAGRVVLRRRMRREGVIAFGAKLPGCVVAMEACCGAHHMGRALAEQGHTVRLMSPEYVRPYVKAQKNDDRDAEAIAEAATRPTMRFVALKSEAQLDVQTLHRVRDQLVGERTALTNQIRSVLLERGHVVAQGRAKLTACLAALLDTDAGASLTPRMRTLMAEVRERWQDLDQRIAALDAEFAEQARINEDARRLTTIPGIGALNATALVAAIGDVASFARGRDLAAWLGLVPRQVTTGGKPRLVGITKRGSKYLRKTLVQGARAALPSLRQSDTHLGQWLRGLLARSHVNTAVVALAAKMARIVWALLRHGRVYEPAAVAA

SEQ ID NO: 18789 - protein, 404 aa, unidentified
  source 1..404: note = protein_2b72218
  REGION 4..160: note = RuvC_domain
  SITE 7: note = RuvC_P1
  SITE 59: note = RuvC_P2
  SITE 97: note = RuvC_P3
  SITE 99: note = RuvC_P4
  SITE 102: note = RuvC_P5
  REGION 270..356: note = Tnp_domain
  SITE 278: note = Tnp_P1
  SITE 309: note = Tnp_P2
  SITE 317: note = Tnp_P3
  SITE 318: note = Tnp_P4
MIFVGIDWAEAHHDVCMLDHEGGVLIKGRVPDGVEGVSRLHAMVSEHAQEPGEVIVGIEIDRGLLVAALVGAGYHVYAVNPFAVSRYRDRHASSRAKSDPGDAKVLADLVRTDRRNHREISADTDLAEAIKILARTHQSLVWSRQRQLNQLRSTLREFYPGALQAFGRDLASPEACTILAIASTPERGRRLTPARISRSLRVSGRKRRLTQRATEIREALRASQLELPSVLAEAYGEAVRSLVALIDGLRQQIDRLEQELAARFEGHPDAEILRSLPGLGLVLGARVLAEFGDDPTRYADARARRCYAGSAPITRASGTRRVVLARVARNRRLADACYLWAFSALSASPGARAYYDARRARGATHHQALRALANRLVGVLHGCLKNRQLYGEDVAWPTALEAVA

SEQ ID NO: 18790 - protein, 318 aa, unidentified
  source 1..318: note = protein_af03049
  REGION 1..131: note = RuvC_domain
  SITE 29: note = RuvC_P2
  SITE 70: note = RuvC_P3
  SITE 72: note = RuvC_P4
  SITE 75: note = RuvC_P5
  REGION 193..278: note = Tnp_domain
  SITE 201: note = Tnp_P1
  SITE 231: note = Tnp_P2
  SITE 239: note = Tnp_P3
  SITE 240: note = Tnp_P4
  SITE 251: note = Tnp_P5
MRRFVVNAGTAKQLLGWAAQWSERRFAIEGANGLGRRIAQILVAGGESVVDVPSTLAMKVRVLSTGGGRKSDPADAFAVAVTALRQEHLRPVAAENQSTILRLLAERREDLGHERARLLNRLHRLLRELIPGGVEPGLSAEKAAAAMRTIRPATATDAVRRELARELLADLRRIDAGIKNNEAQTRDALAASATTLQEIPGVGVVLAAKLLGHVGDITRFPSASHFASYTGTAPLAASSGQQNRHRLNTGGNRQLNSVLHTMAVCQSRDPGPGREYYLKKTAEGKTPREARRALKRRLSNVLYRRILHDHHQAQKLAA

SEQ ID NO: 18791 - protein, 351 aa, unidentified
  source 1..351: note = protein_26cf299
  REGION 16..171: note = RuvC_domain
  SITE 19: note = RuvC_P1
  SITE 69: note = RuvC_P2
  SITE 110: note = RuvC_P3
  SITE 112: note = RuvC_P4
  SITE 115: note = RuvC_P5
  REGION 233..318: note = Tnp_domain
  SITE 241: note = Tnp_P1
  SITE 271: note = Tnp_P2
  SITE 279: note = Tnp_P3
  SITE 280: note = Tnp_P4
  SITE 291: note = Tnp_P5
MAIRDFDKEVDMVTTIGIDPHKATHTAVAIDGSETVLGEITIPVDRYQTKRLIDWASGLDGDGRCWAVEAAGGLGFLLSQQLVAHGEHVVDVPPVLASRVRLLGSGRSDKNDPNDARSVAIAALRQPGLAVVRPEDHTQVLRMLAKRHLELTGLRTQAACRLHAVILQLRPGGIARRLSAKQASRMLRGLRTLDPVGEQRRTMAKAHLTDIRRYDREIKANKVLISKAVAAANTTLTDVYGVGPIVAALLIGYTGDPTRFVSANHYAAYNGTAPIEYSSGGKKRHRLSMRGNRVLNHAIHMAAVTQIRHDTVGRIYYDKKQAEGKTKKEALRALKRRVSDTVYQQLLTDHG

SEQ ID NO: 18792 - protein, 422 aa, unidentified
  source 1..422: note = protein_20ff04a
  REGION 4..157: note = RuvC_domain
  SITE 7: note = RuvC_P1
  SITE 57: note = RuvC_P2
  SITE 94: note = RuvC_P3
  SITE 96: note = RuvC_P4
  SITE 99: note = RuvC_P5
  REGION 284..371: note = Tnp_domain
  SITE 292: note = Tnp_P1
  SITE 323: note = Tnp_P2
  SITE 331: note = Tnp_P3
  SITE 332: note = Tnp_P4
  SITE 344: note = Tnp_P5
MLGVGLDWAEDYHDVALGVPGKGVIEQFRIDHGPAGVQRLVARCLALEPDPAEVRVVLETRHGLLVEALVDAGFTVLPVNPDLVARRRGPAKKKDDAEDARICCLLALDQYAELRRLVPHGALGAELRAIARDDERAARDERRLSNRLRADLLAVFPAAIDIADGDLGSAVFLRLLERWPSATELAAAGYDDIEALARANRHGWPDRFADRVAAALAEPRLAVRPELARAKAGSIRLAAAQLLLLRAQRRVWQHRMGEILLGGARYGRAKQPKDPQPENAFPGGEIYLSMPGLGDRLAARVAGEIGEHVEQFATPNALQCYAGRAPVTRRSGRSEYIVARRLAYNRYLGNAVQQWAFCSLRQSAWARQFYDAKIATGKSHNAALRALGNRWLEILWHCLRLGVLYDEATHTANRQRHHALAA

SEQ ID NO: 18793 - protein, 339 aa, unidentified
  source 1..339: note = protein_0817244
  REGION 6..147: note = RuvC_domain
  SITE 9: note = RuvC_P1
  SITE 52: note = RuvC_P2
  SITE 87: note = RuvC_P3
  SITE 89: note = RuvC_P4
  SITE 92: note = RuvC_P5
  REGION 211..296: note = Tnp_domain
  SITE 219: note = Tnp_P1
  SITE 249: note = Tnp_P2
  SITE 257: note = Tnp_P3
  SITE 258: note = Tnp_P4
  SITE 270: note = Tnp_P5
MKLKRIGVDLAKQVFQVHGVDSHEQVVCRKQIKRSGLLDFFRQLESCLVVMEACGGSHYWARQFQALGHEVRLIAPQFVKPYVKGGKNDANDAEAICEAGSRPTMRYVPIKSEEQQAALSVHRIRSRAIRARTALVNEVRGLLGEFGLIEVRKGVAATRALLARVLDENSGLPVAMRELMGELQDELQEKDNRIALLDRLIQQQARQDERVQRLMQIEGLGPISATAMVAAVGDARQFKSGRQLAAWLGLVPNQHSSGGKERLGSISKRGDTYLRTLLIHGARAALNASAKKTDPRSVWINEVKCRRNTNIATVALANKNARIIWALLSKGESYKNAAC

SEQ ID NO: 18794 - protein, 253 aa, unidentified
  source 1..253: note = protein_ff5d2e7
  REGION 1..86: note = RuvC_domain
  SITE 29: note = RuvC_P3
  SITE 31: note = RuvC_P4
  SITE 34: note = RuvC_P5
  REGION 127..210: note = Tnp_domain
  SITE 135: note = Tnp_P1
  SITE 163: note = Tnp_P2
  SITE 171: note = Tnp_P3
  SITE 172: note = Tnp_P4
  SITE 183: note = Tnp_P5
MLLELAIPAHRADPAKVKAYIKSFGKRAKNDPIDARWLSRYGRDRAATLPRWQSADPTQQKLELLVARRLDLVAMRVQEQNRLKAPRSRLIADNIRDHLAELERHIEALNAEIGALIGESRDLALRAEQLRSVPGIGPVLALLLAVIPELGTLNRRQVASLAGVAPHPKDSGKASWHRSTTGGRRQIRPALFIAALAACRGNNGLATAYKALLKAAKPKRVALTAIMRKIITIANARVRDAVRHQNEIMQINA

SEQ ID NO: 18795 - protein, 400 aa, unidentified
  source 1..400: note = protein_6b890c0
  REGION 11..166: note = RuvC_domain
  SITE 14: note = RuvC_P1
  SITE 63: note = RuvC_P2
  SITE 103: note = RuvC_P3
  SITE 105: note = RuvC_P4
  SITE 108: note = RuvC_P5
  REGION 273..358: note = Tnp_domain
  SITE 281: note = Tnp_P1
  SITE 311: note = Tnp_P2
  SITE 319: note = Tnp_P3
  SITE 320: note = Tnp_P4
  SITE 332: note = Tnp_P5
MTSTDAIDLYLGLDVGKGEHHAAALTPSGKKVFDKALPNNEPKLRELFTKLQARHGTVLVVVDQPATVGALPLAVARHVGCRVAYLPGLTMRRIADLYPGEAKTDARDAHVIADAARTMPHTLRDLEQADETIAELEMIAGFDDDLAGESTRIKNRLRGLLTQIHPSLERVLGPRLDHPAVLGLLERFGSPTQLRKAGRRRLVTLLRPKAPRMAERLVEDIFTALDEQTVVVPGTEAAALILPSLAASLSSVLEQRKLLATRIEQLLEAHPLSQVLTSMPGIGVRTATRILIDVGDGTAFPTAGHLAAYAGLAPVTRSSGSSIRGEHPSRRGNKQLKRAFYLAAFASLSQPESRAYYDKKRREGKHHLAALVALARRRIDVLFAMLRDGTFYQAPATTAA

SEQ ID NO: 18796 - protein, 315 aa, unidentified
  source 1..315: note = protein_6268ece
  REGION 8..150: note = RuvC_domain
  SITE 11: note = RuvC_P1
  SITE 55: note = RuvC_P2
  SITE 95: note = RuvC_P3
  SITE 97: note = RuvC_P4
  SITE 100: note = RuvC_P5
  REGION 190..274: note = Tnp_domain
  SITE 198: note = Tnp_P1
  SITE 227: note = Tnp_P2
  SITE 235: note = Tnp_P3
  SITE 236: note = Tnp_P4
  SITE 247: note = Tnp_P5
MEAAPVFIGIDVSKAQLDMAERPSGERAVLPPTEESITTLVERLRQRQPTCLVLEATGGLEVPMASALAVAGIPVAVVNPRQVRDFARATGQLAKTDAIDAQILARFAEAVRPAARPLPDEAMQAFSALLTRRRQLIEMLVAEQNRMQRAPHPIQQQIQAHLTWLKQQLAALDEDLTHRIQSTPIWRAQEDLLRSVPGIGPVVSRTLLAELPELGTLTHKQIAALVGVAPLNRDSGTLRGRRTTWGGRAVVRAALYMSTLVATKHNPVIKAFYQRLRAAGKAPKVALVACMRKLITILNAMVKHRTPWRQSAQGT

SEQ ID NO: 18797 - protein, 411 aa, unidentified
  source 1..411: note = protein_3088ac9
  REGION 4..165: note = RuvC_domain
  SITE 7: note = RuvC_P1
  SITE 62: note = RuvC_P2
  SITE 102: note = RuvC_P3
  SITE 104: note = RuvC_P4
  SITE 107: note = RuvC_P5
  REGION 274..360: note = Tnp_domain
  SITE 282: note = Tnp_P1
  SITE 313: note = Tnp_P2
  SITE 321: note = Tnp_P3
  SITE 322: note = Tnp_P4
MLFIGDDWAEAHHDIEIQDETGRRLARRRLREGIAGVATLHELIGQFGGDELAENTAGVIVGIETDRGPWVQALLAAGYSIYAINPLSVARYRERHVTSGAKSDPGDAKVLADLVRTDRQHHRPLAGDSHEAEAIKVLARTHQMLCWMRGRQHNQLRSTLREFYPAALEAFEDLTHGDALAVLDLAPTPAAGRGLSLAKIASALRRSGRQRNIETKAEQVHTALRAPQLEQPPLIADAYGVTVKALVTVLATSTGQVRALESELEASFGRHPAAEIVLSQPGLGTILGARVLAEFGDDPTRYTNPKARKNYAGTSPITRASGKSHVVLTRVATNKRLRDALHLQAFSALSTSPGARAYYDAHRAKGTTHHQALRALSNRLVGILHGCLRHATTYDEATAWPRYTQRDQAAA

SEQ ID NO: 18798 - protein, 404 aa, unidentified
  source 1..404: note = protein_f60cbc0
  REGION 14..171: note = RuvC_domain
  SITE 17: note = RuvC_P1
  SITE 69: note = RuvC_P2
  SITE 109: note = RuvC_P3
  SITE 111: note = RuvC_P4
  SITE 114: note = RuvC_P5
  REGION 277..364: note = Tnp_domain
  SITE 285: note = Tnp_P1
  SITE 316: note = Tnp_P2
  SITE 324: note = Tnp_P3
  SITE 325: note = Tnp_P4
  SITE 337: note = Tnp_P5
MSETRDKGSFSGFLGIDISKGTFDGCCIDREGKVLFHVSLPMNRAGFEKLITQVCAISMPQGSILIGMESTACYHVSLFSFLMALGYSVSVINPLLISNFTKLQLRKTKTDKKDATVIARFLSAHGDSLPQMMAESHIADLRELSRQRESLLHQMTALKCDIKRVLSMTFPELERTMGIFTRTTLRLLGQFPSARSLAQATRKELAPLLHHASRGRSTPVSVDTLLKLARSSVGTANPSREMILRQKASILVHLEEHLREMTNTLIELCQSALERDVEILTSIRGIGDKTAATFLIEMGGEIQNFETHNKLIAMAGLDPSVYQSGQYDGHSRITKRGNRHLRRVIWLMTIRVIQFNDLFKSYYRKRIEDGLPFKKAVLATAHKLIRIIFVLLTRRTMFCHQVTS

SEQ ID NO: 18799 - protein, 341 aa, unidentified
  source 1..341: note = protein_8661dbd
  REGION 7..149: note = RuvC_domain
  SITE 10: note = RuvC_P1
  SITE 53: note = RuvC_P2
  SITE 88: note = RuvC_P3
  SITE 90: note = RuvC_P4
  SITE 93: note = RuvC_P5
  REGION 211..295: note = Tnp_domain
  SITE 219: note = Tnp_P1
  SITE 249: note = Tnp_P2
  SITE 257: note = Tnp_P3
  SITE 258: note = Tnp_P4
  SITE 270: note = Tnp_P5
MDEISTIGLDLAKNVFQVHGADASGQVVIRKQLRRGQVLAFFRSQLLCVVAMEACSGAHFWAREIEKLGHVARLIPPAYVKPFVKRQKNDMADAEAICEAAQRPTMRFVAVKSEETQGAAAVFRVRELLIRQRTQTINALRGHLAEFGEVSPQGAANARRLIALVEDEGAALPATMRSALSALVAVLNHLEEKISELDAEIACRARENDTARRLMTIPGIGPLIATALATLAPPPEMFRRGRDFAAWLGLTPRQHSTGGKQRMGATTKMGERSLRRLLIIGANAVVTWRSRNGAAPGSWLAGIIARKPTMLVRVALANKMARIVWALLAKGGVYRAPAAVA

SEQ ID NO: 18800 - protein, 347 aa, unidentified
  source 1..347: note = protein_8bad61e
  REGION 10..154: note = RuvC_domain
  SITE 13: note = RuvC_P1
  SITE 58: note = RuvC_P2
  SITE 93: note = RuvC_P3
  SITE 95: note = RuvC_P4
  SITE 98: note = RuvC_P5
  REGION 217..303: note = Tnp_domain
  SITE 225: note = Tnp_P1
  SITE 255: note = Tnp_P2
  SITE 263: note = Tnp_P3
  SITE 264: note = Tnp_P4
  SITE 276: note = Tnp_P5
MKIITKIIRVGVDIAKAVFQVHAVDKDGKTVWKRKLQRATWIDELCQKIEPGCEIGMEACGGAHHWARVLQARGFVVTLMAPQFVKPYVKSNKNDANDAEAICEAMSRPNMRFVPVKTVEQQDLQALHRIRSEVVCARTAKANQIRGLVAEYGLVAPKQMAELRQAIPLWLEDASNGLTADFRRLLSELQQDLQGLDERVTGLDVRIETTAESHPLAKRLMQLRGIGPVTATAMIATIGDGSQFKNGRQMAASIGLTPKQHSSGGKDRLLGISKRGDCYLRTLLIHGARAVLRCSKQKTDRLSLWVNGIALRRHPNVAATALANKTARIAWAMLHNATDYQPDYVAG

SEQ ID NO: 18801 - protein, 346 aa, unidentified
  source 1..346: note = protein_1a30312
  REGION 6..150: note = RuvC_domain
  SITE 9: note = RuvC_P1
  SITE 54: note = RuvC_P2
  SITE 89: note = RuvC_P3
  SITE 91: note = RuvC_P4
  SITE 94: note = RuvC_P5
  REGION 213..298: note = Tnp_domain
  SITE 221: note = Tnp_P1
  SITE 251: note = Tnp_P2
  SITE 259: note = Tnp_P3
  SITE 260: note = Tnp_P4
  SITE 272: note = Tnp_P5
MKINRVGVDLSKNVFQVHGVDSKENPVWRRRLSREKWLKSLLTKVEPGCEVGMEACAGAHHWARELQAHGLTVKLVAPQFVKPYIKSNKNDANDAEAICEAMSRPTMRFVTVKSAEQQDIQAVHRVRSELVSQRTAKGNQIRGLVAEYGMVAPQRLSHLRRAIPMWLEDAENGLSGRLRRLLDGLRGDLVELSRRVEELDEEIEAIAKAHPVAQRLQQLRGVGPLTATALIATVGNGEQFAKGRDLAVSLGLTPKQHSTGGKERLLGISKRGDPYLRSLLVHGGRAALYAARNKDDRLSVWVKDLAARSHPNVAAVAWANKTARMAWSMIRHGTDYQPERATGRVA

SEQ ID NO: 18802 - protein, 385 aa, unidentified
  source 1..385: note = protein_399ac73
  REGION 17..176: note = RuvC_domain
  SITE 20: note = RuvC_P1
  SITE 77: note = RuvC_P2
  SITE 117: note = RuvC_P3
  SITE 119: note = RuvC_P4
  SITE 122: note = RuvC_P5
  REGION 219..305: note = Tnp_domain
  SITE 227: note = Tnp_P1
  SITE 257: note = Tnp_P2
  SITE 265: note = Tnp_P3
  SITE 266: note = Tnp_P4
  SITE 278: note = Tnp_P5
MKPNSQMTLGESFRQCVGIDISKDKFTACLYMYDRASDVGCCTKSIDFANTKSGFNQMVKWSRKEAVKEYPLVYLMEPTGIYYERLAYHLHKIGQTLYIVLPNKARTFCEAEGLKTKTDAVDARCLALMGCTSRKLRPWSPPKAIYSELRQLTRFHADLCKVRTSVTNRQEALLHMEDAAKGVLKGCEKLIAEIDKLLEKNEKDINDKLAQDKELKAKIERITTVKCIRIATVTCVVAETQGFHLINNRKQLTSFAGLDVVAKQSGKEDPKHVISKKGNAHIRAALYMPALSATFHNRQMKAVYGRICQKHPNEKKIAVIAVMRRMLLLIYTLWKNGEVYDEERDTTHTLRKKDFVAEYTKEDCMGTIQEPVDWNTVDENGEPPF

SEQ ID NO: 18803 - protein, 389 aa, unidentified
  source 1..389: note = protein_23ce3fb
  REGION 6..162: note = RuvC_domain
  SITE 9: note = RuvC_P1
  SITE 62: note = RuvC_P2
  SITE 102: note = RuvC_P3
  SITE 104: note = RuvC_P4
  SITE 107: note = RuvC_P5
  REGION 264..351: note = Tnp_domain
  SITE 272: note = Tnp_P1
  SITE 302: note = Tnp_P2
  SITE 310: note = Tnp_P3
  SITE 311: note = Tnp_P4
  SITE 324: note = Tnp_P5
MTKLFCGIDVAKFEHVASIYDPSSGEIILDSLHFDNNDKGFQSLLSHLSKLNKDNELFVAFESTSHYHQALFNYLTARKYKCYLINPYMTSKFRSISLRDVKTDDIDSKSIAQFLSFDYCNLVNEEFLINELKDLAVQRHSLMTDSSRMKIKLKSYLDRVFPELESLVDIDVLAVRAILKKYPTARSISSVRIDRLKNLAREASKGKYSPSKVESIKEAAKASIGIHSPSIALNIVQCIETLELKERQIDTVDKEIKKHPTVLNSPLHQLTGINDIEIAYIMSAIISITRFSSPGKLVAFAGLDPKIRQSGTWKASTARMSKRGNKLLRYALIWTAYNMTRKSGPMKDYYDSKKSQGKSHYNALGHCASKLCRYIFWILNHPDKEFKYQ

SEQ ID NO: 18804 - protein, 392 aa, unidentified
  source 1..392: note = protein_5a099ac
  REGION 9..157: note = RuvC_domain
  SITE 60: note = RuvC_P2
  SITE 97: note = RuvC_P3
  SITE 99: note = RuvC_P4
  SITE 102: note = RuvC_P5
  REGION 221..308: note = Tnp_domain
  SITE 229: note = Tnp_P1
  SITE 259: note = Tnp_P2
  SITE 267: note = Tnp_P3
  SITE 268: note = Tnp_P4
  SITE 280: note = Tnp_P5
MEKHSTEFIGLDVHKESTAIGRASAGGAGGRFVGTVGPTLAELLKSLKSLGRPEELSIVYEAGPCGYGLVRELRSRGYACEVIAPSKIPRRSGDRVKTDRRDAVRLAELARAGELVSVIVPDERDEAIRDLSRARVDAVRARLAARHQLKAMLLRHGHRYGRSSWTQAHERYLAKITFAHAAQDATFAEYRQAVSEANERVQRLVEALRDQCTTWRMQPVLEALMRLRGIDFVAAATLVAELGDLKRFAHPRELMSFLGLVPSEYTSGDARHLGKITKTGNGHVRRILIEAAWNYRFAARMSVVLQKRQEGQPKVVRDIAWRAQLRLAQRYRRLSARHLHHNKVCVAIARELAGFIRDIGRHVPIHDMPMKAPKTGSGNPKGCHAIAAAATL

SEQ ID NO: 18805 - protein, 411 aa, unidentified
  source 1..411: note = protein_ffab3e2
  REGION 25..179: note = RuvC_domain
  SITE 28: note = RuvC_P1
  SITE 77: note = RuvC_P2
  SITE 117: note = RuvC_P3
  SITE 119: note = RuvC_P4
  SITE 122: note = RuvC_P5
  REGION 285..371: note = Tnp_domain
  SITE 293: note = Tnp_P1
  SITE 324: note = Tnp_P2
  SITE 332: note = Tnp_P3
  SITE 333: note = Tnp_P4
  SITE 345: note = Tnp_P5
MEDWPEALPVFFILPWEVFVMSFFVGIDVSKEKFDACCIGEQGEKIFSLTCSMDRGGFEKFIVQLPEDKTSFLLGMESTASYHIALFSYLTAQGYRVFIINPLLINNFAKRSLRKTKTDRKDALTIAQFLMHEQETLSTQTSSHLTTELKDLARRREKLADHVTSLKGNMKRILSVTFPELEHLTGVFTKTILRLLAEYPSAHALREASCSAVTDIVMTRSRGPKPQASVKALMAAAASSIGVASRAKELVLKQEASLLLHVQEQMKETTKLLMSLLNERMKQDMEILCSMKGIGENTAMNFLIEMGTDVGMYENDKKLIAASGLDPSTYQSGKYEGRSRISKRGNRHLRRVIWLMATKVIINNNLFRTYFFKRRKEGLPYKKAVLATAHKLIRVMFAMLSRKTCFVEGGN

SEQ ID NO: 18806 - protein, 342 aa, unidentified
  source 1..342: note = protein_323c147
  REGION 7..148: note = RuvC_domain
  SITE 10: note = RuvC_P1
  SITE 53: note = RuvC_P2
  SITE 88: note = RuvC_P3
  SITE 90: note = RuvC_P4
  SITE 93: note = RuvC_P5
  REGION 212..298: note = Tnp_domain
  SITE 220: note = Tnp_P1
  SITE 250: note = Tnp_P2
  SITE 258: note = Tnp_P3
  SITE 259: note = Tnp_P4
  SITE 271: note = Tnp_P5
MGEVATVGLDIAKSVFQVHGVDAEGTVVVQRRLTRGRVLLFFEKLAPCVVGIEACASAHHWARQLRVFGHEVRLMPPAYVKPYVKRQKNDAADAEAICEAITRPNMRFVAVKTPEQQSVLVLHRTRQVLIRQRTQISNAIRGHMSEFGLVAPIGRRGLQILTEIIGHEADQRVPEAARTCLAMLVDQLRLVNGQILETDRRIMASARATEVGRRLMGIPGVGPLLASALVATVPDPHAFRSGRNLAAWIGLVPKQNSSGGKERLGGISKQGDRYLRQMLVVGALAVIRHAERHGSRRSWLVQLMARRTTKVAAVALANKTARMVWAIMTSGQPYREPQLVTA

SEQ ID NO: 18807 - protein, 345 aa, unidentified
  source 1..345: note = protein_a845e93
  REGION 6..150: note = RuvC_domain
  SITE 9: note = RuvC_P1
  SITE 54: note = RuvC_P2
  SITE 89: note = RuvC_P3
  SITE 91: note = RuvC_P4
  SITE 94: note = RuvC_P5
  REGION 213..300: note = Tnp_domain
  SITE 221: note = Tnp_P1
  SITE 251: note = Tnp_P2
  SITE 259: note = Tnp_P3
  SITE 260: note = Tnp_P4
  SITE 272: note = Tnp_P5
MTIIRVGVDIAKSVFHVHGVDRHDQVLWTGKYSRQKWLDALCKRVPAGAEVGIEACASVHHWARELQARGYHVKLIAAQFVKPYVKSNKNDRVDAAAICEAMSRPHMRFVSVKTVAQQDIQAMHRIREELVGQRTAKANQIRGLVGEYGIVAPVGIQELRKALPCWLEGADNGLTDAFRCLLNGLAEDLRHLDDRITSLDERISQSVQQDPIASKLMTLRGVGPMTASALAGALGNGEAFRKGRDFAASLGLTPRQHSTGGRDRLLGISKRGDSYLRKLLVHGARSVLCHVGEKDDNLSQWIKGLRARKHVNVSIVALANKTARMAWALVRHDMEYDPRLAAAAL

SEQ ID NO: 18808 - protein, 399 aa, unidentified
  source 1..399: note = protein_52acc2c
  REGION 4..160: note = RuvC_domain
  SITE 7: note = RuvC_P1
  SITE 57: note = RuvC_P2
  SITE 97: note = RuvC_P3
  SITE 99: note = RuvC_P4
  SITE 102: note = RuvC_P5
  REGION 275..363: note = Tnp_domain
  SITE 283: note = Tnp_P1
  SITE 313: note = Tnp_P2
  SITE 321: note = Tnp_P3
  SITE 322: note = Tnp_P4
  SITE 335: note = Tnp_P5
MISVGIDISKEKSTVCILKPYGEIISMPFEIKHAEKALSELTTMILRFNEEVKVVMEATGIYHLPVLSYLQEKGIFVAVINPFEMKQYRNQGLRSVKTDKKDAITIANYGIDYWFRLRKYEVTAEIYQELKILGRQYSHYMCMRIESVQSLTHLLDYTMPGIKGLLKGWQDANGKDKLSDFVEEYWHFDNITNMSEENFINSYVNWAKEKGYHQSQNKAVKIYSLAKEGIPTLSADMESTKIMLQQAVSVLKQVNTTLTIILARMKELAKRLPEYPIVRAMGGVGDVLAPKLIAEIGDIRRFHSGKALIAYAGIDAPPYQSGQFVGTNRKISKRGSSTLRKIGYETMRVLKTHGVPEDSAVYWYILKKEAEGKAKRVAKIAGLNKFLRIYYARVKEVYQ

SEQ ID NO: 18809 - protein, 302 aa, unidentified
  source 1..302: note = protein_e2ae596
  REGION 1..116: note = RuvC_domain
  SITE 25: note = RuvC_P2
  SITE 63: note = RuvC_P3
  SITE 65: note = RuvC_P4
  SITE 68: note = RuvC_P5
  REGION 180..266: note = Tnp_domain
  SITE 188: note = Tnp_P1
  SITE 218: note = Tnp_P2
  SITE 226: note = Tnp_P3
  SITE 227: note = Tnp_P4
  SITE 239: note = Tnp_P5
MRRYENKKEGYEEILKMKPCVIVLEPTGVYAIKPSQYFKEKGIKVLQVSPNVLSREKEFRGKKTDFYDAEKLENMVDKAKEYDYNPLKELVTLYLFLKDIETKYKNRLKRALFLVSDNDKVSKDRLEKLAKGDFTREELYQLEYTPLVLEEIKILAKNLLETQERLKEVRRMIEGQVPQDHVLLTIPGVGGLAAGIIIGIVGDIRRFPKPESFVAYCGLDPVVERSGRAVVSRGISKRSNKYLCSLLYFLAVRNYSRNPTLLKFYETHKDRLKGRKLYVALARKLARVVWSVWYNNKPYEPK

SEQ ID NO: 18810 - protein, 390 aa, unidentified
  source 1..390: note = protein_9160926
  REGION 4..163: note = RuvC_domain
  SITE 7: note = RuvC_P1
  SITE 60: note = RuvC_P2
  SITE 101: note = RuvC_P3
  SITE 103: note = RuvC_P4
  SITE 106: note = RuvC_P5
  REGION 266..353: note = Tnp_domain
  SITE 274: note = Tnp_P1
  SITE 304: note = Tnp_P2
  SITE 312: note = Tnp_P3
  SITE 313: note = Tnp_P4
  SITE 326: note = Tnp_P5
MICVGIDVAKDKHDCFILSSEGEVLADVFTIQNNAEGFDMLLQTIRRCTRPEDKIKVGLEATGHYSYNILGFLLDNGLDSVVINPLHTNLYRKSLSLRKTKTDRVDARTIAAMLMSDVDLKSYTDTAYHNEELKSLTRYRFDKVRARAKLKQSVARLVNILFPELEKLVPSLHVASVYALLSELPGAYQITTCNLTHLKTILADASKGRYGRDKSIEIRNSARQSVGSRMPAKSLELQHTIRLIQEMDMEINEIEVQIEAMMVEINSPLITIPGIGTRMGAMILAEIGDFSQFDSPDKILAYAGLSPSIYQSGQYISGHAHMEKRGSRYLRFAIYTATKYVCLWDPTFATYLAKKRAEGKHYNVAISHAAKKLVRLIFAMERSGQAYRAA

SEQ ID NO: 18811 - protein, 402 aa, unidentified
  source 1..402: note = protein_5d6a3cf
  REGION 4..161: note = RuvC_domain
  SITE 7: note = RuvC_P1
  SITE 57: note = RuvC_P2
  SITE 98: note = RuvC_P3
  SITE 100: note = RuvC_P4
  SITE 103: note = RuvC_P5
  REGION 276..364: note = Tnp_domain
  SITE 284: note = Tnp_P1
  SITE 314: note = Tnp_P2
  SITE 322: note = Tnp_P3
  SITE 323: note = Tnp_P4
  SITE 336: note = Tnp_P5
MISVGIDVSKEKSTVCILKPYGEVVCKPFELQHSKKSLESLDELLRRLDGEVKIVMEATGIYNLPVLNFLDEKGYFVSVINPCVMKKYARNNNFRNVKTDKMDSITIANYGIEKWFKLKRYEASESTYTELKMLGRRYRHYMEMHIQALQELTHVLDYVMPGIKNLFNSWTESNNRDKLSDFVERFWHYDLITSMSCEEFVKAYNEWAKEKKYHQSESKAIQVYELASNGIPTLSSNLPSTKMLVLEAIKTLRAVDDSLYIILSRMKELAKSLPEYSTVRAMGGVGDVLAPKLIAEIGDVRRLHSAKALIAWAGIDPPPYESGQFVGSNRRISKKGSATLRKTGYEVMRVLKSHQAPEDCTVYNYILKKEAEGKSKKQAKIAGLNKFLRIYYVRVMEVYQSV

SEQ ID NO: 18812 - protein, 412 aa, unidentified
  source 1..412: note = protein_ae97137
  REGION 9..158: note = RuvC_domain
  SITE 12: note = RuvC_P1
  SITE 64: note = RuvC_P2
  SITE 98: note = RuvC_P3
  SITE 100: note = RuvC_P4
  SITE 103: note = RuvC_P5
  REGION 253..340: note = Tnp_domain
  SITE 261: note = Tnp_P1
  SITE 292: note = Tnp_P2
  SITE 300: note = Tnp_P3
  SITE 301: note = Tnp_P4
  SITE 312: note = Tnp_P5
MDIVHDRAVGMDISKRDAKVCLRVPGKRAGTFTTTVTSWGATTSQILALRDFLEAEHVSTVVMEATSDYWKPFFYLLEETLPVVLVNAKAARNIPGRKTDVSDAAWLAQLAAHGLLRASFIPPEPIRELRDLTRTRSIAIRDRTREIQRLEKFLEGSGIKLSSVVSDLTGVSSRAMLEALINGERDPQILAGLARGTLKSKIPELVDALTGRFKEHHAFMARLHLDQIDAQSRSIDALTERIEEAMSPFRAAREFLATIPGVSQRVAEVIIAETGADMTVFETPGRLASWAGVCPGSNESAGRIKSAHILPGNKYLKAALGTAALSASRSKNTYLAAKYRRIAARRGPMKAIVALQHSILTAVWHVLADGECYADPGPDHYTRLDPAKARNKAINKLKSLGYNVTITPGTAA

SEQ ID NO: 18813 - protein, 341 aa, unidentified
  source 1..341: note = protein_a6fad0c
  REGION 7..149: note = RuvC_domain
  SITE 10: note = RuvC_P1
  SITE 53: note = RuvC_P2
  SITE 88: note = RuvC_P3
  SITE 90: note = RuvC_P4
  SITE 93: note = RuvC_P5
  REGION 209..294: note = Tnp_domain
  SITE 217: note = Tnp_P1
  SITE 247: note = Tnp_P2
  SITE 255: note = Tnp_P3
  SITE 256: note = Tnp_P4
  SITE 268: note = Tnp_P5
MNKVAIAAIDLGKHSFHLHAQDDRGHELYRKKFTRAALMQHLMNLEPCTVVMEACGGAHFMAQEVAKLGHTPKLIAPHLVRPYVKSNKNDFADAEAICEAATRPTMRFVHPKTQAQQLLAMLNSTRDSFIKERTATVNRIHAALLEVGVSLATGFKPIKELPARLEASSIPVPIKKLLTRLQEHFTYLDGQIKTLDKEVECQAAEDDLAARLMTMPCVGPITSSVLAAELGDGKQFKCGRGYSASIGLIPKQHSTGGKTVLLGISKRGDRNQRRLLVQCARVYLMQLDRQKGWLADWVRQLLAHHHSNHVVCALANKLARIAWAIAAHHTEFDAGPAAMNA

SEQ ID NO: 18814 - protein, 345 aa, unidentified
  source 1..345: note = protein_e32e67f
  REGION 6..147: note = RuvC_domain
  SITE 9: note = RuvC_P1
  SITE 52: note = RuvC_P2
  SITE 87: note = RuvC_P3
  SITE 89: note = RuvC_P4
  SITE 92: note = RuvC_P5
  REGION 211..298: note = Tnp_domain
  SITE 219: note = Tnp_P1
  SITE 249: note = Tnp_P2
  SITE 257: note = Tnp_P3
  SITE 258: note = Tnp_P4
  SITE 270: note = Tnp_P5
MELHTIGIDLGKTVFHLVGLDLRGEVVVRKKFSRTQLLRFTANVRVGLIGMEACGGSHFLGRALREQRHEVRLIPAQYVKPYVKTNKSDYIGAQAIAEAVARPTMRFVPIKTDDQLDMQSLHRVRERWVMRRTAVINQIRGLLLERGITLRKGRHHVDAALPLILEDADANLSGAVRLLLTQLKLDLDQLSVRIDEADAVIQKTAHENEACRRLVAIPGIGPVTATALIAAIGNGGAFHKGREFAAWMGLVPREHSTGGQQKLLGISKRGNSYLRRLFVQGARAVLQQRTKQSSGLSAWLAQLTSRTHRNVAAVALANKLARIAWAVLAKNEQYRPSVVADVAAA

SEQ ID NO: 18815 - protein, 341 aa, unidentified
  source 1..341: note = protein_3b1e4df
  REGION 6..147: note = RuvC_domain
  SITE 9: note = RuvC_P1
  SITE 51: note = RuvC_P2
  SITE 86: note = RuvC_P3
  SITE 88: note = RuvC_P4
  SITE 91: note = RuvC_P5
  REGION 210..300: note = Tnp_domain
  SITE 218: note = Tnp_P1
  SITE 250: note = Tnp_P2
  SITE 258: note = Tnp_P3
  SITE 259: note = Tnp_P4
  SITE 272: note = Tnp_P5
MYRTKVGVDLAKNIIQVCTLHGKKVTSNVEMSTDEFSLWLAQSKPVTVAFEACSTSNYWYQQAIKSGHDARLISAKLVKAVRQNQKTDKNDALAIVQTLFLPEVSFINGKSIEQQQLQSIQRLRELAIKSQNASQKQIVSLLLELNIRLPNTQGGVLRGLEGVLEDGANNLSDTFRATLSVAKVQLENMISAIGEYDKYLEQSIQSLPDCKKLLKLEGVGPVNAVNLYIALGANQSQPFKSGKNASACIGLTPIQHSSGGKEVMGTIGKYCKNGSLRSQLITGAMSVVIKVIKYGAKTKKELWLQGLMQRRGNRCAAVALANKTVRTAYSMLQNNTEYYAA

SEQ ID NO: 18816 - protein, 346 aa, unidentified
  source 1..346: note = protein_db5a70c
  REGION 13..155: note = RuvC_domain
  SITE 16: note = RuvC_P1
  SITE 59: note = RuvC_P2
  SITE 94: note = RuvC_P3
  SITE 96: note = RuvC_P4
  SITE 99: note = RuvC_P5
  REGION 218..305: note = Tnp_domain
  SITE 226: note = Tnp_P1
  SITE 256: note = Tnp_P2
  SITE 264: note = Tnp_P3
  SITE 265: note = Tnp_P4
  SITE 277: note = Tnp_P5
MSKHSKKGEVKVLGIDLAKQSFQLHGVDEAGQPVLRKKLSRKQLSAFVANLPECLIGLEACGGAHHWVRVFESYGHTVRMMAPQFVKPYVKSNKNDAVDAEAICEAVQRPSMRFVPAKGIEQQDIQSLHRIRSQLVARRTAQSNQIRGLLMEYGVIIPKGISYVRKQLPLILEDAENGLSDLFRELLNELYEEIVHLQERVEVMEQKLHRLCAQNEDCQRLLTIPGVGLLSATALVAAIGDIGAFKSGRELAAWLGLVPRQHSTGGKTTLMGISKRGDSYLRTLLIHGGRTVVRVAHKYEDRKSRWVSELDQRRGKNISAVAVANKNARTAWALLSKKTTYQAVAV

SEQ ID NO: 18817 - protein, 339 aa, unidentified
  source 1..339: note = protein_29c394d
  REGION 7..149: note = RuvC_domain
  SITE 10: note = RuvC_P1
  SITE 53: note = RuvC_P2
  SITE 88: note = RuvC_P3
  SITE 90: note = RuvC_P4
  SITE 93: note = RuvC_P5
  REGION 211..298: note = Tnp_domain
  SITE 219: note = Tnp_P1
  SITE 249: note = Tnp_P2
  SITE 257: note = Tnp_P3
  SITE 258: note = Tnp_P4
  SITE 270: note = Tnp_P5
MTTLVTIGLDLAKNVFQVHGITAEGKVLVRRQLRRGEVLKFFQGVPSCLVGIEACGTAHHWAREITALGHTVKLMPPAYVKPYVKRGKTDAADAEAICEAVTRPTMRFVAIKTIDQQAALMLHKTRDLLVRQRTMLVNGLRGHLAEFGIIAAKGLGGVKTIIEALHEAQDQLPELARLALHGIVEQLRHLGAEIERLEERILAWHRASDVSRRLATIPGIGPITASAIAAAVPDGTLFRSGRQFAAWLGLTPKAHSSGGKERQVGISKQGDGYLRRLLVVGATAVMRLARKDNASRSWATKLLERKPAKLAAVALANKTARIAWAVMTRGKTYEAPVAA

SEQ ID NO: 18818 - protein, 312 aa, unidentified
  source 1..312: note = protein_93660ec
  REGION 3..149: note = RuvC_domain
  SITE 6: note = RuvC_P1
  SITE 50: note = RuvC_P2
  SITE 90: note = RuvC_P3
  SITE 92: note = RuvC_P4
  SITE 95: note = RuvC_P5
  REGION 185..269: note = Tnp_domain
  SITE 193: note = Tnp_P1
  SITE 222: note = Tnp_P2
  SITE 230: note = Tnp_P3
  SITE 231: note = Tnp_P4
  SITE 242: note = Tnp_P5
MFVGIDVCKAELEVAIRPTTQSWSVANDQVGITALIKRFKKLRPELIVLESTGGLERQLITALIGAKIPVVMVNPRQVRDFAKSSGQLAKTDRIDAAILAHYAEVFRPQPRPFPDELTLELRALTARRRQVIDMIVAEKNRLATACRAIQKRITAHIAYLERELGEADRDLDRFIENNPLWKENQQILCSTPSIGPVSSRTLIAELPELGTLGRKQISALVGLAPFPRDSGTLRGRRTIWGGRASVRTALFMATLSATRFNPVIAAFYKRLKAKGKLPKVCLVACMHKLLIILNAMLKNKVPWSENFSLQTS

SEQ ID NO: 18819 - protein, 345 aa, unidentified
  source 1..345: note = protein_a78a7e6
  REGION 6..147: note = RuvC_domain
  SITE 9: note = RuvC_P1
  SITE 51: note = RuvC_P2
  SITE 86: note = RuvC_P3
  SITE 88: note = RuvC_P4
  SITE 91: note = RuvC_P5
  REGION 210..300: note = Tnp_domain
  SITE 218: note = Tnp_P1
  SITE 250: note = Tnp_P2
  SITE 258: note = Tnp_P3
  SITE 259: note = Tnp_P4
  SITE 271: note = Tnp_P5
MKNIIVGVDLAKHVIQVCSFSNKKVQSNIDMTPAKFTEWLTVTNSVTIVFEACGTSNYWKQKAISLGHDARLISPKLVSAVRQNQKTDKNDALAIVQAALLPDVTFISGKSTEQQQLQSIVRLRELCIKQKTAAGNQLIALLSEFNIKTSSRNGSLNGVITATLEDAENGLSFEFREALSAAWQHYLSIAKSISVYDSCLEKAIEKHADCKKLLKLEGVGVLNAINLYIALGCADLGTFSKGKDAAACIGLTPIQHSSGGKAKLGSIGKYVKNGILRSQLITGAMSAVNHAVNRKAKTKKDIWIASLVCRRGKKCAAVALANKTVRTAFAMLTQGTEYKAELVEA

SEQ ID NO: 18820 - protein, 319 aa, unidentified
  source 1..319: note = protein_dafd44e
  REGION 10..154: note = RuvC_domain
  SITE 13: note = RuvC_P1
  SITE 56: note = RuvC_P2
  SITE 96: note = RuvC_P3
  SITE 98: note = RuvC_P4
  SITE 101: note = RuvC_P5
  REGION 196..280: note = Tnp_domain
  SITE 204: note = Tnp_P1
  SITE 233: note = Tnp_P2
  SITE 241: note = Tnp_P3
  SITE 242: note = Tnp_P4
  SITE 253: note = Tnp_P5
MDNLSHGRVIGIDVSRDWLDLHCLPDGHRCRVPNVLAGHSAVATLARGRNAVVCFESTGGQEWQLWARLEAEGVAARQVPPAQVKAFAQSCGTRAKTDRIDAELIARFFAFRPEAGRSLPAENLRLLRALTSKRAQLVEMRKRLLAQVRAHQKLGTAAMFEDVDTELKQRIDSLIKELEDRITRAIASDDHMSEMVTVLRSIPGIGPVASTMLIAEMPEIGTISGEEAAALTGLAPIAHDSGTLRGKRVIAGGRRALRHVMFQAALVAAHHNPSLKSFADRLRDAGKPHKVIITAVARKLVTIANALCKSRQKWTIPGT

SEQ ID NO: 18821 - protein, 337 aa, unidentified
  source 1..337: note = protein_366d4b4
  REGION 17..93: note = RuvC_domain
  SITE 32: note = RuvC_P3
  SITE 34: note = RuvC_P4
  SITE 37: note = RuvC_P5
  REGION 155..240: note = Tnp_domain
  SITE 163: note = Tnp_P1
  SITE 193: note = Tnp_P2
  SITE 201: note = Tnp_P3
  SITE 202: note = Tnp_P4
  SITE 213: note = Tnp_P5
MFQPSSRPASGARHAGRSARRSLLFDTGHNRKTDARDAHSIAIVAVRTKTLRLLQVDGELEALRMLTDRREALTRRRVQTVDRLQALLAELLPGQAKRDITTGQAKAMLASVRPRDIAGRTRRRIAADELAELIAVEAKIKKATAELKAIVLARGSRLMDIHGVGPVVAARILADVGDVARFADRNRFASWTGTAPLDASSGEHDRHRLSRAGNRRMNHMIHIAAVTQLRIDTDGRTYYRHKRAEGKKPLEALRCLKRRLSDVIYRQLVADAELAAGTNSEAGPGGHCGASQESCAADLPPHIDTSDQPLPGPAQPTLRAASTSRKSRRNRVLTAAG

SEQ ID NO: 18822 - protein, 343 aa, unidentified
  source 1..343: note = protein_5195966
  REGION 6..148: note = RuvC_domain
  SITE 9: note = RuvC_P1
  SITE 52: note = RuvC_P2
  SITE 87: note = RuvC_P3
  SITE 89: note = RuvC_P4
  SITE 92: note = RuvC_P5
  REGION 211..297: note = Tnp_domain
  SITE 219: note = Tnp_P1
  SITE 249: note = Tnp_P2
  SITE 257: note = Tnp_P3
  SITE 258: note = Tnp_P4
  SITE 270: note = Tnp_P5
MKITTIGIDLAKNVLQIHGADERGKPVVRKQLKRDKVMAFFANMEPCVIGMEACGSAHHWARQLQSLGHEVKLISPQFVKPFVKTNKHDVADAEAICEAVSRPTMRFVPIKNVEQQAMLSLHRAREGFIVDRTATANRIRGLMAEYGLILPQGIGHVRSKVPELIEDATNELPGMFRRLIDQLLNHLRWLDEQIEMIEKEIHAWHRNNVDSQRLEQVPGIGVIIATAMIAMIGDARNFRNGRELSAWIGLVPRQHSTGGKQTLLGISKRGDAYLRKLLIHGARALAYHAGRKANPDHWLNKLINRRNMNVAVVAQANKTARIVWAMLAHGRDFRPDYASKAPA

SEQ ID NO: 18823 - protein, 322 aa, unidentified
  source 1..322: note = protein_2704a58
  REGION 8..155: note = RuvC_domain
  SITE 11: note = RuvC_P1
  SITE 60: note = RuvC_P2
  SITE 100: note = RuvC_P3
  SITE 102: note = RuvC_P4
  SITE 105: note = RuvC_P5
  REGION 195..281: note = Tnp_domain
  SITE 203: note = Tnp_P1
  SITE 233: note = Tnp_P2
  SITE 241: note = Tnp_P3
  SITE 242: note = Tnp_P4
  SITE 254: note = Tnp_P5
MTQILLYVGIDLAKRKFDVALLNADGKYRSKVFPNTPQGFDLFYDWLIEHGALEAHLCMETTGAYGRDLARFLAYHKLWVSVVNPAQIHAFGKTELIRAKTDKADARLITRYCKTHNPAQWIPPADGVETLQALVQRLHDLLALQNMENNRLENSELPAVPSIRKILTVIDQEIETIRRQIQDHIDDHPNLHSKEELLLSIPGIGEATIATLLAFLSPFERFASPKQMVAYAGLNPRIRQSGQWNGKASIAKTGNSQLRKALYMPAVCAKRFNPVIRVFCERLLARGKCPMQVIVAAMRKLLHIAYGVLKSGRPFSSEIALA

SEQ ID NO: 18824 - protein, 388 aa, unidentified
  source 1..388: note = protein_73b05d3
  REGION 4..160: note = RuvC_domain
  SITE 7: note = RuvC_P1
  SITE 58: note = RuvC_P2
  SITE 98: note = RuvC_P3
  SITE 100: note = RuvC_P4
  SITE 103: note = RuvC_P5
  REGION 264..351: note = Tnp_domain
  SITE 272: note = Tnp_P1
  SITE 302: note = Tnp_P2
  SITE 310: note = Tnp_P3
  SITE 311: note = Tnp_P4
  SITE 324: note = Tnp_P5
MIYVGIDIAKLNHFASAISSEGEVLIEPFKFTNDGDGFQLLVSKLESFDSDSIIIGLESTAHYGDNLVRYLVASSFNVCVLNPIKTSTMRKNNIRKTKTDKVDTYIIAKTLMMQDSFRFMTYYDLDLMDLKTLGRFRQKTVKQRTRLKIQLTTYVDETFPELQYFFKSGLHQKSVYALLREAPTAKAVASMHMTHLSHLLEVSSHGHFSKEDAKALRVLAQKSVGASDSALSIQVTQTVSQIELLDSQLESIEREMTDIMMFHDPIIMTIPGIGYINGGMILGEIGDIHRFSNPNKLLAFAGLDPVVYQSGNFKATRTRMSKRGSRVLRYALINAAHNVVKNNAVFKAYYDAKMAEGRSHYNALGHCAGKLVRIIWKMMTDDVEFNLN

SEQ ID NO: 18825 - protein, 315 aa, unidentified
  source 1..315: note = protein_283194f
  REGION 7..148: note = RuvC_domain
  SITE 10: note = RuvC_P1
  SITE 53: note = RuvC_P2
  SITE 88: note = RuvC_P3
  SITE 90: note = RuvC_P4
  SITE 93: note = RuvC_P5
  REGION 212..300: note = Tnp_domain
  SITE 220: note = Tnp_P1
  SITE 250: note = Tnp_P2
  SITE 258: note = Tnp_P3
  SITE 259: note = Tnp_P4
  SITE 271: note = Tnp_P5
MSNITLIGIDLAKNVFHLHAVDDKGKQMKVTKLSRLKLAEYLYRSEPVIVAMEACASAHYWGRLCTSLGHEARLISPQFVKPFVKSNKNDRNDARAICEAALRPDMNFVPVKTVEQQAVLSLHRVREMLIGQRTATINQFRGLLTEFGLPAPTGRRALFSMIPAMIEDLRKISPAFLITCISQQWEHLRQLEQHINEVTHQIEMHARQSDIARRLQTIPGIGPITASALDAYVGKATQFRTGRQLAAWLGLVPRQHSTGGKSVLLGTSKRGNSYLRQLFVHGARAVVSVVCRSPDASKQDKTITGWLTRKHMNVP

SEQ ID NO: 18826 - protein, 422 aa, unidentified
  source 1..422: note = protein_1e6bdf8
  REGION 7..164: note = RuvC_domain
  SITE 10: note = RuvC_P1
  SITE 63: note = RuvC_P2
  SITE 103: note = RuvC_P3
  SITE 105: note = RuvC_P4
  SITE 108: note = RuvC_P5
  REGION 277..371: note = Tnp_domain
  SITE 285: note = Tnp_P1
  SITE 315: note = Tnp_P2
  SITE 323: note = Tnp_P3
  SITE 324: note = Tnp_P4
  SITE 337: note = Tnp_P5
MSYCPVAGIDVSKKFSDMCILSPDNKIFAQEKIYHDETSINRANALLQKAERLFFSKPVIVMESTSHYHLILFQFFSEHGYDVIVVNPLQSNSMKDFSIRKRKTDRVDAFKLAMMYRTKTLRPSQIPQTATRALRQLCRHRAELLNDVSSYKNRLTALLDQTFPGYDKVFSDVGGVTSCAVLVRFPTPTILLVEEESELVEVIAAASKSGYSFAKKKARLLISAAQKAQTLGIHSCADETLIVCTIQMLRTLSESVLQIETAIDNLLAQIKGMRNNVSLLQSIPGIGSHSAALLLGEIGDISLFKKPKQLAAYFGLDPTERQSGSFRGTKNKLSKRGSSYARAALHMGIVNSICKRGKDSAANPVLLSYYEKKCKNKPAKVAQAASMHKLVFIIFAVLRDQKPFELKTPEQHAVEQGFVKAA

SEQ ID NO: 18827 - protein, 402 aa, unidentified
  source 1..402: note = protein_09475c8
  REGION 4..160: note = RuvC_domain
  SITE 7: note = RuvC_P1
  SITE 57: note = RuvC_P2
  SITE 97: note = RuvC_P3
  SITE 99: note = RuvC_P4
  SITE 102: note = RuvC_P5
  REGION 275..362: note = Tnp_domain
  SITE 283: note = Tnp_P1
  SITE 313: note = Tnp_P2
  SITE 321: note = Tnp_P3
  SITE 322: note = Tnp_P4
  SITE 335: note = Tnp_P5
MISIGIDVSKGKSMVCILKPYGEVISSPFEVEHTETAMHELATMLLKFDDELKVIMEATGIYHLPILTYLADKGIFVSVINPYEMKKYRTQGLRNVKTDKQDSITIANYGIDHWFRLENYRFTDELYCELKLLGRQYMHYMRMRVESLLNLTHLLDYTMPGINELLNGWNETSNKDKLSDFVEKYWHYDNIIKMSEEEFIKEYAEWAKRRGYHTSPKKASKIYQRAIEGIPTLSSNTPSTKILVLEAVRVLREVDNTLYKIITQMQGLAKMLPEYSVVRSMGGVGDILVAKLIAEIGDVKRFHNGKALIAYAGIDAPPYQSGKFVGTQRKISKRGSATLRKIGYEVMRCLKTHKPKDDVAVYDFIVKKEQEGKTKKSAKIAGLNKFLRIYYARVSEVYKNLE

SEQ ID NO: 18828 - protein, 412 aa, unidentified
  source 1..412: note = protein_e28e0a7
  REGION 5..164: note = RuvC_domain
  SITE 8: note = RuvC_P1
  SITE 63: note = RuvC_P2
  SITE 103: note = RuvC_P3
  SITE 105: note = RuvC_P4
  SITE 108: note = RuvC_P5
  REGION 274..374: note = Tnp_domain
  SITE 282: note = Tnp_P1
  SITE 312: note = Tnp_P2
  SITE 320: note = Tnp_P3
  SITE 321: note = Tnp_P4
  SITE 334: note = Tnp_P5
MNPVVGLDVSKGESQVQAFLDKGKPYRRVFSINHNLEGLENLLEFLQEVEKTALGHQPSVVLESTGHYHTPVIQFLEEHKYVYVIVNPLISHRAKSSSLRKVKTDAADAYHLCELFYKEELEPHKKRGIQLLNLRNLTRQQESIAEITAKTKIQLHTLLDQVFPEYRGVFGSLYSKVSLLTLLEFPTTEAVLRASESEITEKITSICNSRSRLWATEKAQKLREAALRNPFQRNLYQSHIFNLEILVKIVLQYQEHLSKLSAEIDALAKEIEEYRLLQSIPGIGEKIAATIISEIGEIDRFTNAKKLVAFAGVDPSVYSSGKFTASVNRITKRGSSRLRHALYMAVQSGIRDARKKKTTDKIIPRNKRLREFYDKKREEGKTFRVAVIACVNKLLHWIFALLKNKTIFQDIV

SEQ ID NO: 18829 - protein, 328 aa, unidentified
  source 1..328: note = protein_20d7f37
  REGION 4..156: note = RuvC_domain
  SITE 7: note = RuvC_P1
  SITE 61: note = RuvC_P2
  SITE 101: note = RuvC_P3
  SITE 103: note = RuvC_P4
  SITE 106: note = RuvC_P5
  REGION 201..287: note = Tnp_domain
  SITE 209: note = Tnp_P1
  SITE 238: note = Tnp_P2
  SITE 246: note = Tnp_P3
  SITE 247: note = Tnp_P4
  SITE 260: note = Tnp_P5
MNIIGIDVSKGKLDCALIDNLTHRKLKFKVVSNSEEGFVTLIDWLAKRTKSSISAYHFIMEATGVYHEKCAYWLFDSGARVSVVNPARVKYYGQSLGVRSKNDKKDSVVLARYGLTQTPMVWQPEALEIRILKALASRLDAIEKDILREKNRHEKSSINPSSQTILNAIETILFTLNKEKLHLEKLIHSHINQYEYLKNNNALLQTIPGVGPVLSRYMLIVLGGRTFQSASQCAAYLGLVPIQNESGSSLRGRSRISKAGSPVIRAKLYMATISALQHNPDIKIQNQRLLKNGKSKMSALCAAMRKLVQICFGVIKHQQPYHVQAKFL

SEQ ID NO: 18830 - protein, 400 aa, unidentified
  source 1..400: note = protein_95a4115
  REGION 5..158: note = RuvC_domain
  SITE 8: note = RuvC_P1
  SITE 57: note = RuvC_P2
  SITE 95: note = RuvC_P3
  SITE 97: note = RuvC_P4
  SITE 100: note = RuvC_P5
  REGION 266..352: note = Tnp_domain
  SITE 274: note = Tnp_P1
  SITE 305: note = Tnp_P2
  SITE 313: note = Tnp_P3
  SITE 314: note = Tnp_P4
MRFFVGIDWASRAHAVCIVDQPGRVRWQGSVPHTTEGLTELVGRLRRFRGRLRVALERPSGLLVDTLVAAGVELVPIHPNALKATRPRYSAAGSKSDPGDAFILADLLRTDGHRFPALRPPSDDTRALRALVRGRDDLVRQRLALANQLRALLERFWPGAAAIFADVDSPIALAFLARYPTPLSAARLGEKRLAQFLGQHAYCGRRPVGELLARLRTAPASQVGEAEAEASGDLVRALVAVLTPLVGQVQHLSAAVTAALAQHPDGPLVQSLPRSGAVNAAQILAELGDDRARFPSDEHFAAEGGLAPVTHASGQHHAVVFRWACNKRLRRALTTFADNSRHASRWAALVYQRARGRGCRHQHAIRILARAGARILWRCRQDRAPSDVTRHRAAQALAAA

SEQ ID NO: 18831 - protein, 341 aa, unidentified
  source 1..341: note = protein_c4bc288
  REGION 6..146: note = RuvC_domain
  SITE 9: note = RuvC_P1
  SITE 52: note = RuvC_P2
  SITE 87: note = RuvC_P3
  SITE 89: note = RuvC_P4
  SITE 92: note = RuvC_P5
  REGION 211..296: note = Tnp_domain
  SITE 219: note = Tnp_P1
  SITE 249: note = Tnp_P2
  SITE 257: note = Tnp_P3
  SITE 258: note = Tnp_P4
  SITE 270: note = Tnp_P5
MDISVLGIDLGKNSCSVVGLDATGKVVVRRRMRRETVITYAASLPACAVAMEACCGAHHIGRALARQGHAVRLMSPEYVRPYVKAQKNDDRDAEGIAEAATRPTMRFVELKTEEQLDMQTLHRIRDQLVGDRTSLMNQIRSILFERGYIVPQGRAKLAARLGEMLDGDEPVLSPRIHRLVCDMRLRWIALDERIADLDAEFTEAAHSDERMRRLLTIPGIGALNATALVAAVGDARSFGRGRDLAAWLGLVPRQATTGGKPRLLGITKRGSRYLRKNLIQGARSSLPTMSKSDTRLGAWLRGLLARSHPNTVVVALAAKMARIVWALLRHERTYEPVALAA

SEQ ID NO: 18832 - protein, 344 aa, unidentified
  source 1..344: note = protein_fa9f145
  REGION 7..149: note = RuvC_domain
  SITE 10: note = RuvC_P1
  SITE 53: note = RuvC_P2
  SITE 88: note = RuvC_P3
  SITE 90: note = RuvC_P4
  SITE 93: note = RuvC_P5
  REGION 212..299: note = Tnp_domain
  SITE 220: note = Tnp_P1
  SITE 250: note = Tnp_P2
  SITE 258: note = Tnp_P3
  SITE 259: note = Tnp_P4
  SITE 271: note = Tnp_P5
MAKVTTIGIDLAKNEFALYALGPKGQCGWKRKVRRKQLLNQLSKLTPCTVAMEACGGSHYWARQIQARGHEVVLLPPQHVKGYLRGQKNDYNDAMAIAEACEHRRIRPVPIKSVEQQDVQMLHKLRRSVSNERTRMSNRLRGLLAEYGVIIPKGITALRQELPLALEDAENGLSARARELLHRQYQRFLDAEEELAWYDREVERLAKEDEVCQRLDELPGVGPMVASVLKSWMGDGHQFHRGRDAAAALGLVPKQNSTGGKELLLGISKRGDPYVRAQLVHGARAVVSRVDRKSDPLSRWVQRVKAQRGFNKATVALANKLVRMAWVIIARGERYRPIEERLAG

SEQ ID NO: 18833 - protein, 342 aa, unidentified
  source 1..342: note = protein_6edde7e
  REGION 4..148: note = RuvC_domain
  SITE 7: note = RuvC_P1
  SITE 51: note = RuvC_P2
  SITE 89: note = RuvC_P3
  SITE 91: note = RuvC_P4
  SITE 94: note = RuvC_P5
  REGION 208..294: note = Tnp_domain
  SITE 216: note = Tnp_P1
  SITE 246: note = Tnp_P2
  SITE 254: note = Tnp_P3
  SITE 255: note = Tnp_P4
  SITE 267: note = Tnp_P5
MDSIGIDLHKRESQLCTITEDGELIEQRIVTSRERFTAVLGSRPAARILVEASTESEWVARHLESLGHTVIVADPGFAAMYATRAKRVKTDKRDARTLCEALQLGAYRAVHRASDAQRHVRAQLAVRDALVRTRTRYIALIKAAVRREGLRLPSGEAEQTISKLAALALPPSVHEELAPLVALWAPLQAELTAADARLTAIARTHPVVTRLATMPSVGPVTALAFVAALDDITRFHSAHQVQASLGLVPSEYSSGDRRARGHITKRGDARMRWLLVETAWRIVRSPNPQRAGLKAWAMQIAQRRGKRIATVALARRVAGILFAMWRDDAPYHAVTSPTRAAA

SEQ ID NO: 18834 - protein, 334 aa, unidentified
  source 1..334: note = protein_d3f1d1f
  REGION 7..148: note = RuvC_domain
  SITE 10: note = RuvC_P1
  SITE 53: note = RuvC_P2
  SITE 88: note = RuvC_P3
  SITE 90: note = RuvC_P4
  SITE 93: note = RuvC_P5
  REGION 209..296: note = Tnp_domain
  SITE 217: note = Tnp_P1
  SITE 247: note = Tnp_P2
  SITE 255: note = Tnp_P3
  SITE 256: note = Tnp_P4
  SITE 268: note = Tnp_P5
MENIALIGIDLGKNSFHIHCQNRHGKAIYRKKFTRQKLYEFLATCPATTIVMEACGGAHFMVRKLSELGHTPKLISPQFVRPFVKTNKNDFIDAEAICEAASRPSMRFVKPRTESQQAMHALHRVRESLVSDRVKTTNQIQAFLLEFGVSARKGPTLIKGLAEIMETNNLPPYMTSLLQKLREHYDYLVAQIKDLEIQLQLSLDEDEAGQHLLSIPCVGPLTASLLSTQLGDGKQYGSSRDFAASTGLVPRQYSTGGRTTLQGISKRGNKRLRALLVQCARVYLRTLEHRTGKLADWVRELLLRKNNFVVTCALANKLARIAWALTARQQSFEA

SEQ ID NO: 18835 - protein, 338 aa, unidentified
  source 1..338: note = protein_7082a06
  REGION 6..148: note = RuvC_domain
  SITE 9: note = RuvC_P1
  SITE 52: note = RuvC_P2
  SITE 87: note = RuvC_P3
  SITE 89: note = RuvC_P4
  SITE 92: note = RuvC_P5
  REGION 211..298: note = Tnp_domain
  SITE 219: note = Tnp_P1
  SITE 249: note = Tnp_P2
  SITE 257: note = Tnp_P3
  SITE 258: note = Tnp_P4
  SITE 270: note = Tnp_P5
MKITTVGLDIAKSVFHFVGVNRAGKLVRKKMIKRTELIHFFSQVEPCLVVMEACGGANYWAREFQKMGHEVKLIAPQYVVPYRQGNKNDYNDAFAIAEAAQRPNMRFVQPKPVEQQDVQMLHRMRERLNKQSTALVNQVRGMLAEYGIVIAKGKASFRSKLPDLLENADNALTVKGRSIFYQLYEEFTDIDTRLKNCDTQVLQETKSNHVCLRLEAVPCIGPVTATAFYAAAGNGKDFTNGRHFSAWCGLVPKQRSSGGKDNLLGISKRGNAYLRTLFIHGARAVLRHSNGKVDRFSRWAVALVERRGFNRACVAVANKLARIAWVIAAREEEYQMVD

SEQ ID NO: 18836 - protein, 427 aa, unidentified
  source 1..427: note = protein_a2a69a7
  REGION 19..179: note = RuvC_domain
  SITE 22: note = RuvC_P1
  SITE 77: note = RuvC_P2
  SITE 118: note = RuvC_P3
  SITE 120: note = RuvC_P4
  SITE 123: note = RuvC_P5
  REGION 286..374: note = Tnp_domain
  SITE 294: note = Tnp_P1
  SITE 324: note = Tnp_P2
  SITE 332: note = Tnp_P3
  SITE 333: note = Tnp_P4
  SITE 345: note = Tnp_P5
MNFTQNEKLKQLSERSIVIGVDIASELHYARAFDWRGVELGKVFKFENNAEGFKDFHAWIERLKRQAQKECIVVGAEPTGHYWFSLASYLKEQSIKLVLVNPFHVKRSKELDDNHPSKTDAKDPKTIAKLVIEGRYNEPYIPEGIYAELRIAMACRMRIQKELNSIKNRIQRWLKIYFPEHETVFGKFDATSSMLVLQVAPLPKDIERLGVEGINRIWRDNKLRAVGMKRAKSLYEAAQKSIGCTEGESCSRMEIQLLLQDYHTKTAQYQAVTETIDGLCCQIPEVAKLLEIKGVGLVTVAGFLSEVGDIKRFNSPKQIQKLAGLALRESSSGKHKGQTTISKRGRARLRAILFQAVMPLVAKNAEFAEIHNYYTTRSKNPLKKKQSLIALSCKLIRVFYAILTKGTDYDPKKLITDIHRPAEYLAA

SEQ ID NO: 18837 - protein, 398 aa, unidentified
  source 1..398: note = protein_df01c77
  REGION 4..160: note = RuvC_domain
  SITE 7: note = RuvC_P1
  SITE 57: note = RuvC_P2
  SITE 97: note = RuvC_P3
  SITE 99: note = RuvC_P4
  SITE 102: note = RuvC_P5
  REGION 275..363: note = Tnp_domain
  SITE 283: note = Tnp_P1
  SITE 313: note = Tnp_P2
  SITE 321: note = Tnp_P3
  SITE 322: note = Tnp_P4
  SITE 335: note = Tnp_P5
MISVGIDVSKGKSTVCFLEPYGKLLKKPFEVEHDKISLSTLVTMLKKLDGEIRIVMEATGVYHLPILLYLKEHDFFVSVINPYEMKTYCTCGLRRAKTDRQDAIKIADFGINNWYRLKNYNVSDDVYSELKLLVRRYNHYMRIHVESILELTHILEYTMPGIKKLLQGWNEATNKDKLSDFVETYWHYDNITKLSEEEFIEDYTKWAKDKGYQCKQSKAVKIYALANTSIPTITSNTSSVKMLVQEAVRVLREVNNTLKKILTQMQKLAKRLPEYSVVRKMGGVGDVLAVKLIAEIGDVKRFHNGKALIAYAGIDAPPYQSGQFIAKERKISQRGSASLRKIGYEVMRCLKSHAMPEDSAVYEFIIKKELEGKSKKAAKIAGLNKFLRIYYARINEIY

SEQ ID NO: 18838 - protein, 402 aa, unidentified
  source 1..402: note = protein_65a4472
  REGION 5..160: note = RuvC_domain
  SITE 8: note = RuvC_P1
  SITE 59: note = RuvC_P2
  SITE 97: note = RuvC_P3
  SITE 99: note = RuvC_P4
  SITE 102: note = RuvC_P5
  REGION 268..354: note = Tnp_domain
  SITE 276: note = Tnp_P1
  SITE 307: note = Tnp_P2
  SITE 315: note = Tnp_P3
  SITE 316: note = Tnp_P4
MRFFVGIDWASQTHAVCVIDQAGRVHWQTSVSHTREGLAELLGHLRRFSRRGPVRIALERPSGLLVDTLVEAGLEVVPIHPNALNASRSRYSAAGGKSDPGDAFILADLLRTDGHRFRLLRPPSDDTRALRALVRGRDDLVAQRVALTNQLHALLERFWPGAASIFADIASPIALAFLARYPTPDSAARLGEKRLAQFLGQHAYCGRRPVAALLARLRTAPAGQVGEAEAEASGDVVRALVAVLAPLVGHLHQLSAVIEAALPQHPDGRLVQSLPRSGAVNAAQILAELGDDRARFPTDAQLAAEGGLAPVTHASGQHRAVVFRWACNKRLRRALTTFADNSRHASRWAALVYQRARARGCRHPHAIRILARAWVRILWRCWQDRTPYDVSRHRAAQALAAA

SEQ ID NO: 18839 - protein, 340 aa, unidentified
  source 1..340: note = protein_0a23330
  REGION 7..148: note = RuvC_domain
  SITE 10: note = RuvC_P1
  SITE 53: note = RuvC_P2
  SITE 88: note = RuvC_P3
  SITE 90: note = RuvC_P4
  SITE 93: note = RuvC_P5
  REGION 212..299: note = Tnp_domain
  SITE 220: note = Tnp_P1
  SITE 250: note = Tnp_P2
  SITE 258: note = Tnp_P3
  SITE 259: note = Tnp_P4
  SITE 271: note = Tnp_P5
MTQITVIGLDLAKRVFQVHGADGDGQPVLRRKLRRAQVRTFFSELPPCLIGMEACASAHHWARELQVLGHEVRLIPPQYVRPFVKTNKNDAADAEAICEAVTRPTMRFAPVKSAEQQSVLMLHRARELLVRQRTMLINALRGHCAEFGLIAAQGISKVVDLIRIIDDPEDTRLPDLAREALGLLVEQLNAVQSRIKALESELLAWHRSNAASRRLETIPGVGIITATALVATIGDGSQFHSGRQLSAWLGLVPRQHSSGGKDRLGRISKRGDGYIRRLLVHGARTVLRWRRAKPDTEAGWAEQLLARRPTNVVLVAMANKTARIAWALLRHQRDYMPATA

SEQ ID NO: 18840 - protein, 312 aa, unidentified
  source 1..312: note = protein_cf084cc
  REGION 7..153: note = RuvC_domain
  SITE 10: note = RuvC_P1
  SITE 54: note = RuvC_P2
  SITE 94: note = RuvC_P3
  SITE 96: note = RuvC_P4
  SITE 99: note = RuvC_P5
  REGION 189..273: note = Tnp_domain
  SITE 197: note = Tnp_P1
  SITE 226: note = Tnp_P2
  SITE 234: note = Tnp_P3
  SITE 235: note = Tnp_P4
  SITE 246: note = Tnp_P5
MTDQCYGGIDVSKDCLDVMVLPERQSFSVDNNAAGCSELVNRLRGLSIVAVGIEPSGGYERSVIRALLAAGLSVRRINPNKLRQFARARGVLAKNDRLDARLIAEYVAIMPTRVVQRDPAAEQLAEVVTMRRQLCDEHVAVANQTAHLEDTMLRRLNKRRLARLEADILLLDRRMAEIVGGNASLARRYELLTSMRGVGPTLAFTLIALLPELGQMGRKQIAALVGLAPYDFDSGRLKGHRCIYGGRLPVRNVLYMAALSACRYNPTLKVFHRRLAGANKKPKVKIVAVMRKMIVILNAMLRDNVAWQPNFA

SEQ ID NO: 18841 - protein, 347 aa, unidentified
  source 1..347: note = protein_fe9e990
  REGION 12..163: note = RuvC_domain
  SITE 15: note = RuvC_P1
  SITE 67: note = RuvC_P2
  SITE 101: note = RuvC_P3
  SITE 103: note = RuvC_P4
  SITE 106: note = RuvC_P5
  REGION 228..313: note = Tnp_domain
  SITE 236: note = Tnp_P1
  SITE 266: note = Tnp_P2
  SITE 274: note = Tnp_P3
  SITE 275: note = Tnp_P4
  SITE 286: note = Tnp_P5
MSIVAHAHPFVIGVDTHARNHVLAVLKDTGEHVDTASFPASAQGLERAVGWAARRTGGDLAALWVVEGAGSYGAGLARAATSAGYQVLEAPRMAQARPCGRSDPLDARRIAAAALVTPHDQLRRPRADDGVRAAVQVLLTARDSMARERTAAVNALTALLRTADLGIDARRPLGAAQVRQAAAWTDRPEPVAAARTEARRLAQRVLDLADHLKENQTTLAEHVQASPAATLLDHTGVGPVSAAVALTAWSHPGRVRDEAAFAALAGTSPLPASSGNTTRHRLNRSGDRRLNRALHTIVLTRARCDPDTQAYITRRTREGLTRREILRCLKRYLARHIYRTLNAAATA

SEQ ID NO: 18842 - protein, 302 aa, unidentified
  source 1..302: note = protein_33506a9
  REGION 2..108: note = RuvC_domain
  SITE 12: note = RuvC_P2
  SITE 47: note = RuvC_P3
  SITE 49: note = RuvC_P4
  SITE 52: note = RuvC_P5
  REGION 170..254: note = Tnp_domain
  SITE 178: note = Tnp_P1
  SITE 208: note = Tnp_P2
  SITE 216: note = Tnp_P3
  SITE 217: note = Tnp_P4
  SITE 229: note = Tnp_P5
MSEQPACIVVLEACGSASYWTREMEALGHDVKLIAPQYVRPFVKRQKNDAADAEAIVIAARQPEMRFVAPKTAEQQAKAVMFRGRERLVHQRTELVNALRAVLYEYGHIFPTGLVHLKRIEGLMDDPNSDLPSLIIAECQDLLAQIAEKTSRIDAKTKRLKALAAETDTARRLQTMPGVGPLTALAVEAFALDMAQFKCGRDFAAWLGLVPRQHSSGGKSRLGRISKAGQNDIRRLLIIGAMSRLNWLGRRSILEGSWLARMLMRKPKMLVAISLANKMARQIWAMLTKNEDYRDPALAAMT

SEQ ID NO: 18843 - protein, 393 aa, unidentified
  source 1..393: note = protein_a8a8dab
  REGION 4..163: note = RuvC_domain
  SITE 7: note = RuvC_P1
  SITE 60: note = RuvC_P2
  SITE 101: note = RuvC_P3
  SITE 103: note = RuvC_P4
  SITE 106: note = RuvC_P5
  REGION 269..353: note = Tnp_domain
  SITE 274: note = Tnp_P1
  SITE 304: note = Tnp_P2
  SITE 312: note = Tnp_P3
  SITE 313: note = Tnp_P4
  SITE 326: note = Tnp_P5
MVYVGIDVTKDKHDCFIANSDGEILYDVFTIQNGMDGFEDLLFKIKTASKDLSKVKVGLEATGHYSCNILGFLHNKGLTTIVINPLYTSLSRKSVSLRKTQTDKVDARTIASMIMSDVSLKPYSDTVYHNEDLKSLSRYRFDKVSDRSKLKQSVSRLVNILFPELEKLVSTLHAKAVYALLSEFPGAHQVASANLKHLTALLSTVSKGHFGREKANEIREAARRSISSYLPAKSLELRHTIKLIHELNAEIAEIETEIKKIMDSIDSPTLSVPGISYALGSVIVSEVGDFSRFDNPDKLLAFAGCSPSTYQSGQIYSTHAKMEKRGSKYLRWALLNAAKYVCKWEPTFAVYLRKKLAEGKHYNVAVSHAAKKLVRLLYHLETTGEKYIPQTLS

SEQ ID NO: 18844 - protein, 315 aa, unidentified
  source 1..315: note = protein_c92bc15
  REGION 8..149: note = RuvC_domain
  SITE 11: note = RuvC_P1
  SITE 54: note = RuvC_P2
  SITE 94: note = RuvC_P3
  SITE 96: note = RuvC_P4
  SITE 99: note = RuvC_P5
  REGION 189..273: note = Tnp_domain
  SITE 197: note = Tnp_P1
  SITE 226: note = Tnp_P2
  SITE 234: note = Tnp_P3
  SITE 235: note = Tnp_P4
  SITE 246: note = Tnp_P5
MTRTPVVVGIDVSNAQLDMALRPEGQFSAPNDEAGCAQILTRLRAVSPTLVVLEATGGLEILLTGILAAAGVPVVVVNPRQVRDFAKATGRLAKTDALDAQTLAHFAEVIRPELRPLPDEQTQALAAILARRRQLVEMLTAEKNRLGSARKPVRTSLRTHIAWLERELTHRDRDLAHAIRESPVWREKEALLQSTPGVGPVVTTTLLANLPELGTLTGKQITALVGVAPLNRDSGSWRGKRTVWGGRAQIRAVLYMAAIVAARFNPVIRAFYERLCAAGKAKTVALTSCMRKLLIMLHAMLKHRTPWRTEGAQHA

SEQ ID NO: 18845 - protein, 345 aa, unidentified
  source 1..345: note = protein_18b4efd
  REGION 8..168: note = RuvC_domain
  SITE 11: note = RuvC_P1
  SITE 67: note = RuvC_P2
  SITE 107: note = RuvC_P3
  SITE 109: note = RuvC_P4
  SITE 112: note = RuvC_P5
  REGION 208..295: note = Tnp_domain
  SITE 216: note = Tnp_P1
  SITE 246: note = Tnp_P2
  SITE 254: note = Tnp_P3
  SITE 255: note = Tnp_P4
  SITE 268: note = Tnp_P5
MKELKQVVGIDVAQKELVVTLGRMFEDLSIELYRYKVFKNTEKGFIGLTNWVKKLTKEEVKVLYVMEATGVYHQKIAYYLDKNNFDVAVVLPNKISNYIRTLDIKTITDKTCSQAITRFGLERKLDLWKRPKSIYKNLQQLTRERDQIVAERVTAKNQLHAELSEAEPYEKSIKRIKARIKLLNTQEKEIKNDIAVIVASDENIRKEIDIICTLPGVGELTAVIVLAETNGFELIRNKRQLASYAGLDVKEKQSGTSIKGKPRISKKGNRSLRKAMHFPALTAVKWDENFKELYARLVSKHGIKMKALVAVQRKLLEMIFTLYKNQTSYDKDYLNKKNSVKTQLV

SEQ ID NO: 18846 - protein, 332 aa, unidentified
  source 1..332: note = protein_d3e0fb0
  REGION 4..155: note = RuvC_domain
  SITE 7: note = RuvC_P1
  SITE 60: note = RuvC_P2
  SITE 100: note = RuvC_P3
  SITE 102: note = RuvC_P4
  SITE 105: note = RuvC_P5
  REGION 200..286: note = Tnp_domain
  SITE 208: note = Tnp_P1
  SITE 237: note = Tnp_P2
  SITE 245: note = Tnp_P3
  SITE 246: note = Tnp_P4
  SITE 259: note = Tnp_P5
MFQLGIDVSKNTLDLCLLRDGVKGRVKTRKLKNDISATSALINWLHKQHCEPVEVHIIMEATGVYHESLAYGLHKAGARVSLANPHRSREFARGMGMLTKNDQVDAYMLACYGALREPMPWTPPPENVRYLSSLLRRRDALVADSTREKNRLEKSRATDCPSVVSESIESMLQSLSSEIGHLDKLIQEHLEQHPELKKDFDLLTSIKSVGFQLGLNMLVILRSHRFDTAEQAAAFLGVVPVEKTSGTSVSGKPRLSKIGPPEIRAKLYLASLCGLRFNPVMKAMYERLCQRGKPKMCAIGALMRKLVHWCYGVLNTQQPFSAEYLLSTCKAA

SEQ ID NO: 18847 - protein, 297 aa, unidentified
  source 1..297: note = protein_61b1f75
  REGION 1..122: note = RuvC_domain
  SITE 26: note = RuvC_P2
  SITE 64: note = RuvC_P3
  SITE 66: note = RuvC_P4
  SITE 69: note = RuvC_P5
  REGION 169..256: note = Tnp_domain
  SITE 177: note = Tnp_P1
  SITE 207: note = Tnp_P2
  SITE 215: note = Tnp_P3
  SITE 216: note = Tnp_P4
  SITE 229: note = Tnp_P5
MIKNEEAAIRKFFNVYKLECLLIGIENTGRYNWALYEVLKNLHHQVYVVSPLHLKKSMGLVRGKTDKIDAIRIAAFISKNHADLPRWKPSSPAIQKLKILLTERNARIKSKRQLLKQQYDYAKMKHVGLDKSLQRLNREQLHLIDRQIVQIEKEIELLIKTDERMDQQAKLIRSVPGVGKVLSWMILAKTENFTTITDPRKMACYSGVVPFAYQSGTSIRGKNRISSYADKVIKSILHLAAMSAIRLKNDLREYYQRKVAEGKNKMSALNAVRNKIIHRIFAVIKNQTIYKNDLVLS

SEQ ID NO: 18848 - protein, 326 aa, unidentified
  source 1..326: note = protein_2493997
  REGION 8..156: note = RuvC_domain
  SITE 11: note = RuvC_P1
  SITE 64: note = RuvC_P2
  SITE 102: note = RuvC_P3
  SITE 104: note = RuvC_P4
  SITE 107: note = RuvC_P5
  REGION 194..281: note = Tnp_domain
  SITE 202: note = Tnp_P1
  SITE 232: note = Tnp_P2
  SITE 240: note = Tnp_P3
  SITE 241: note = Tnp_P4
  SITE 254: note = Tnp_P5
MEQFSFFTGIDVSKLWLDIAVFSPTNGLVYQTKINNNIKDIRCFFKALKKYLSVDVSEHLFCMEHTGKYGHTFLNASILEKAKVWVELPIQIKRSQGLVRGKTDKWDAIRIAQYAHRFADKAVFWKPADKSLQDIKDLQVKRSLLVKAHSQLIQEDKDDPLFKKPLLALKQAIQTIELKMEKLLEQNEITCHQYNLLKTVPGIGKQTAMALIIVTNGFTRLTESRKLSCYAGLAPFPYSSGSSIKGRTKVSKMGDMKLKVLLNLSAWNAIRSITAFKDYFKRKVSEGKHKMSVINAVRNKLLALALAVIKRNSPYEKNYTLSLIMP

SEQ ID NO: 18849 - protein, 400 aa, unidentified
  source 1..400: note = protein_d72386d
  REGION 10..170: note = RuvC_domain
  SITE 13: note = RuvC_P1
  SITE 65: note = RuvC_P2
  SITE 105: note = RuvC_P3
  SITE 107: note = RuvC_P4
  SITE 110: note = RuvC_P5
  REGION 273..360: note = Tnp_domain
  SITE 281: note = Tnp_P1
  SITE 311: note = Tnp_P2
  SITE 319: note = Tnp_P3
  SITE 320: note = Tnp_P4
  SITE 333: note = Tnp_P5
MKGRVFMILVGIDIGKNSHYFCVINREDGEVLVDPTSFKNDQKGFGLFIQALQPYDKTSILIGIEDTGHYHFALLRYLLSKEFNVALINPVATDMTRKMQGGISKNDKLDTLTICDVLSSSNRKKSYRITKIHKFDYYEQRQLTRHHHNLKEELNVYTNRLQKCIDLVFPEFNSLFKSKYGIVYMTLLKTFGSADKIAHADIRSIRKCFEIQGRGNRISLSAEQLKAAAKESVGIASSADEIQIRHLIGQIELIHAQLDEIDKKIEEFSVEVNSPILSIPGISHFSGTSILAEIGDIGNYPKASKLAKLAGVAPYEHESSQYRAEQTAITKKGSKYLRKTLYQIIVPIIQHNEVFKRYYQLKRRQGKSHRCAQGHCVRKLLRVIYHLLTTNQQFDPALLR

SEQ ID NO: 18850 - protein, 307 aa, unidentified
  source 1..307: note = protein_639892f
  REGION 6..146: note = RuvC_domain
  SITE 9: note = RuvC_P1
  SITE 51: note = RuvC_P2
  SITE 91: note = RuvC_P3
  SITE 93: note = RuvC_P4
  SITE 96: note = RuvC_P5
  REGION 187..272: note = Tnp_domain
  SITE 195: note = Tnp_P1
  SITE 224: note = Tnp_P2
  SITE 232: note = Tnp_P3
  SITE 233: note = Tnp_P4
  SITE 244: note = Tnp_P5
MPQIIVGCDLSRAFLDICIDAGKTTSRIENTTAGIAKWADTLATGALVVFEATSGCDGILMDVLAERHIPYSRVNPRQAREFARALGVLAKTDRVDARVLAQMGQRLPLPVTQPQEPMRKRLADFLRRRKQLVEARKAEKLRRHSAGQPELLRDIDTMIVILNRRIDKLDGQIKAIIKQSRELTEQANLLTAVPGIGPTVLATLLGELPELGTLDRRQIASLAGLAPHARESGTWKGARRIWGGRRKVREVLYIAALTATRRVPALVKMRQRLIAAGKAPKTALIAVARQLLVIINAMIRDKQPIRL

SEQ ID NO: 18851 - protein, 344 aa, unidentified
  source 1..344: note = protein_69eb91f
  REGION 6..147: note = RuvC_domain
  SITE 9: note = RuvC_P1
  SITE 52: note = RuvC_P2
  SITE 87: note = RuvC_P3
  SITE 89: note = RuvC_P4
  SITE 92: note = RuvC_P5
  REGION 211..298: note = Tnp_domain
  SITE 219: note = Tnp_P1
  SITE 249: note = Tnp_P2
  SITE 257: note = Tnp_P3
  SITE 258: note = Tnp_P4
  SITE 270: note = Tnp_P5
MHIASIGIDLGKTNFHLVALGERNKVLARKKFSRAQLLAYTTNLPPTLIGLEACSGAHFLGAALRKQGHEVRLIPAQFVKPYRKSNKNDFIDAEAIAEAVTKLNMRFVPIKTQEQLDVQALHRVRDRLIQGRTALINEIRGFLLERGITFPAQPIHLRKNLPIVVEDAQQNLTPRLRWLLDRLWQEWKQMEIDVQTVTDQIERISKEDARCQRLCQIPGFGPLVSTATVAAIGNGAAFRRGRDFAAWVGVVPRQYSTGGKQKLLGISKRGNRYLRRMLIHGARAVLFRAKYDTRGFGQWFQRLAQRAPRNKVIVAIANKLARMAWAVLSSGKDFQYQPLQTTAA

SEQ ID NO: 18852 - protein, 394 aa, unidentified
  source 1..394: note = protein_46afaed
  REGION 11..164: note = RuvC_domain
  SITE 14: note = RuvC_P1
  SITE 62: note = RuvC_P2
  SITE 103: note = RuvC_P3
  SITE 105: note = RuvC_P4
  SITE 108: note = RuvC_P5
  REGION 226..312: note = Tnp_domain
  SITE 234: note = Tnp_P1
  SITE 264: note = Tnp_P2
  SITE 272: note = Tnp_P3
  SITE 273: note = Tnp_P4
  SITE 284: note = Tnp_P5
MNEQEPLRVVIGMDPHKRSVTIEVMTADESILGGGRFSTDADGYARLLAYARAWPHRVWAVEGCAGIGKHVADRLVADGEDVVDVPAKMSARVRIFTTGQGRKTDATDAHSIALVGVRMSGLRPVINDDQLEVLRMCVDRRRSLGEEHTRKVCQLHKLLLELIPGGAKTSLSAAQAKELLKKVRPTTAAGKVRKAHAVELAEDLAKIYARTKAADKELKALVEATGTTLMSLHGIGPSGAARLLVEVGDVTRFPDRNHFASWTGTAPIDASSGEHTRHRLSRGGNRQINRVLHIMAVVQLRTRTTEGRAYYDRKKAGGKTSMEALRCLKRRLSDLVYKAMLDDLAGHTKTGPGGHKGDDSDSSATGSQPAAGSSDKPLPGPATTKPTTTLPAAS

SEQ ID NO: 18853 - protein, 396 aa, unidentified
  source 1..396: note = protein_d3b2771
  REGION 6..160: note = RuvC_domain
  SITE 9: note = RuvC_P1
  SITE 58: note = RuvC_P2
  SITE 98: note = RuvC_P3
  SITE 100: note = RuvC_P4
  SITE 103: note = RuvC_P5
  REGION 266..352: note = Tnp_domain
  SITE 273: note = Tnp_P1
  SITE 304: note = Tnp_P2
  SITE 312: note = Tnp_P3
  SITE 313: note = Tnp_P4
  SITE 325: note = Tnp_P5
MAAIWAGIDAGKAHHHCVAIDESGRRLLSRRVANDEPELLQLLADVLALGDEVTWGIDQADGGAALVITILLNHVQPVHYISGRAIHRASESYRGEGKTDAKDAAVIADQVRVRRDLHPIRVTDDTVTDLKLLTGRRTDLVADRTRTVNRLRAQLTGIFPGPERALDLTNTGPLTLLTGYQTPAAVRRIGAKRLETWLRNRHVVRPDRLAEIAVKAAERQRSSLPGEKLTAQLVHTLAREVMGLNQQVAELDKAIEARFRDHHTFDVITSMPGLGVILGAEFLAATGGDMTAFGTADRLAGFGGVAPVPRDSGKISGNVRRPQRYNRRLQRVFYTSALFSIRHSEDSRRFYDRKRSEGKRHTQAVLALARRRVNVLWALLRDERYYEPTPPKALAA

SEQ ID NO: 18854 - protein, 411 aa, unidentified
  source 1..411: note = protein_0e607d4
  REGION 5..164: note = RuvC_domain
  SITE 8: note = RuvC_P1
  SITE 61: note = RuvC_P2
  SITE 101: note = RuvC_P3
  SITE 103: note = RuvC_P4
  SITE 106: note = RuvC_P5
  REGION 272..358: note = Tnp_domain
  SITE 280: note = Tnp_P1
  SITE 311: note = Tnp_P2
  SITE 319: note = Tnp_P3
  SITE 320: note = Tnp_P4
MRLFVGDDWAEDHHDIEVMDQAGKVLAKRRLPEGVAGMTQLHELTGRFLPGDAADAEVVIGIETDRGPWVAALVAAGYVVYPVNPLQASRYRERHGVSGAKSDQGDSHMLADMVRTDSHQLRPAAGDSPEAGAIKVVARTHKTLIWERTRAVQRLRHQLREYFPAALEAFADLDAPDVLELLARAPDPGRAAKLTRAQVAAALKRARRRNIKDKTDAILAALRGGHLGQPAALTAAYAATARSLIAVITTLDEQVKILEEQVRDHFGRHPDAEIYQSQPGLAAILGARVLGEFGDDPHRYADGKARKNYGGTSPITRASGKKKAVTARWIHNDRLLDALMSWAFASLNASPGARAFYDELRARGLEHNDALRRLANRLVGILHGCLKTRTLYDETIAWGHRENLPQSSVAA

SEQ ID NO: 18855 - protein, 416 aa, unidentified
  source 1..416: note = protein_b35f187
  REGION 12..167: note = RuvC_domain
  SITE 15: note = RuvC_P1
  SITE 64: note = RuvC_P2
  SITE 104: note = RuvC_P3
  SITE 106: note = RuvC_P4
  SITE 109: note = RuvC_P5
  REGION 275..361: note = Tnp_domain
  SITE 283: note = Tnp_P1
  SITE 314: note = Tnp_P2
  SITE 322: note = Tnp_P3
  SITE 323: note = Tnp_P4
MSFALPDALFFTGIDRAAETYAVCVMDAGGKITAGFTIEHSADGIATLIRRLARYGEPAGMPVAIERPNGRLVDLLLEAGHPVVPVKPNAIKTWRDGEVLSGAKSGAGDAAVIAGYLRLRAHKLKAAAPYSDETKALRTVVRTRGDLVEMRVAATSQLAALLDAHWPGAKAIFADVESPVSLEFLTRYPTPAAAAHLGEKRMAAFCVKHGYCGRRTPAQLLARLRHVPAGATGEALSEALRDAVLAAAGVLTALNASVKNLDRSVAAHLGEHPDGAIFTSLPRSGQVNAAQVLAEWGDARQAYEHPDAVAALAGVTPVTKESGKHRAVHFRWACNKRFRVAVTTFADNSRHASPWAAKIYNDARASGKDHPHAIRVLARAWIRVIWRCWLDGTPYDPARHGAAAALAEQPAKQIAA

SEQ ID NO: 18856 - protein, 434 aa, unidentified
  source 1..434: note = protein_c0965b9
  REGION 22..175: note = RuvC_domain
  SITE 25: note = RuvC_P1
  SITE 73: note = RuvC_P2
  SITE 114: note = RuvC_P3
  SITE 116: note = RuvC_P4
  SITE 119: note = RuvC_P5
  REGION 237..323: note = Tnp_domain
  SITE 245: note = Tnp_P1
  SITE 275: note = Tnp_P2
  SITE 283: note = Tnp_P3
  SITE 284: note = Tnp_P4
  SITE 295: note = Tnp_P5
MPAADLGSVTTVWSALMAEVMIGIDPHKSSHTAVAIGSGEEPLGELQVHACPSQAGTLLAWAAAWPERTWAVEGAAGLGHLLAQQLVAAGEQVLDVPPKLAARVRLLQAGDTNKNDPNDAFSVAVAALRSPAKRPVLAEDHAAVLKVWAKRHRDLARARNQAACRLHAVLCDLVPGGHGREISAGQAARILERVTPAGAVARARCELAAEFLTDIRRLDAQLRDTNKKLAAAVKASGTSLTGIFGVGPVIAGTVIGDVRQVFRFPSRDHFAACNGTAPVEVSSGGRKACRLSLRGNRRLNHAIHMAAVTQIRHKHSQGRAYYERKLAGGKTHKEALRALKRRISDAIYAALAAGARQAAATCSKGPGGQPGNHSVSRAASSHPVRRLFGQATPGPATTIRPVTTAGPAPIQPNRAPQRRAAYSAAASKKPRPAT

SEQ ID NO: 18857 - protein, 347 aa, unidentified
  source 1..347: note = protein_78373ae
  REGION 9..150: note = RuvC_domain
  SITE 12: note = RuvC_P1
  SITE 55: note = RuvC_P2
  SITE 90: note = RuvC_P3
  SITE 92: note = RuvC_P4
  SITE 95: note = RuvC_P5
  REGION 214..301: note = Tnp_domain
  SITE 222: note = Tnp_P1
  SITE 252: note = Tnp_P2
  SITE 260: note = Tnp_P3
  SITE 261: note = Tnp_P4
  SITE 273: note = Tnp_P5
MSTQAVRVIGIDLGKNWFHLVGMDDRGHPLFRKKLNRTQLAEFAATSSACIVAMESCPGSQYWGRRFQNAGHTVRVIPAQFVKPYLKSNKNDFNDAEAIAEAASRGTMRTVPLKSVDQLEMQAMHRVRQRFIVERTAAVNQMRALLLERGIVVPIGRALFARSLPRILEDAENGLSIRMRQLLQRLRERWQGLDKEIDSVSTEIHEIAKDSELCRRAITVPGIGPIIASAMVAAVGSGQAFGKGRDLAAWLGLVPKQYSTGGKSNLGGISKRGNSYLRMLLIQGARALMIHMKRERSRMGQWFQEIEKRSHPHVALIALANKIARICWKVLVSGESYRPFPNAPMTA

SEQ ID NO: 18858 - protein, 322 aa, unidentified
  source 1..322: note = protein_2a87a92
  REGION 8..152: note = RuvC_domain
  SITE 11: note = RuvC_P1
  SITE 57: note = RuvC_P2
  SITE 97: note = RuvC_P3
  SITE 99: note = RuvC_P4
  SITE 102: note = RuvC_P5
  REGION 197..283: note = Tnp_domain
  SITE 204: note = Tnp_P1
  SITE 234: note = Tnp_P2
  SITE 242: note = Tnp_P3
  SITE 243: note = Tnp_P4
  SITE 256: note = Tnp_P5
MKKSKNYVGIDISKLTFDVAICNSESKYKYFKFANNHEGFILFSELLNASESICIMEASGPYYLKLATFLSESGIGVCVVNPLIVRRFSQMRMSRAKTDRKDAMLIAEYGKTERPNLWQPEADYVLELKQMQAYLEQLNKNRTGYIVQREAFNQNPIKSKTLEKSINSVLETIEQEIKQIEKRMELIIKTHHQEMFNQLKSIPGMGAKTSLFLIVISGGFSKFKNHKQLASYVGISPRIFESGTSVKGRSKICKMGMSKIRAMLYVCAWSAKKCNKTCKELYDRLVEKGKSKKLALIAVVNKLLKQAFAIATKKEYYSVKIN

SEQ ID NO: 18859 - protein, 393 aa, unidentified
  source 1..393: note = protein_fa6f830
  REGION 4..162: note = RuvC_domain
  SITE 7: note = RuvC_P1
  SITE 60: note = RuvC_P2
  SITE 101: note = RuvC_P3
  SITE 103: note = RuvC_P4
  SITE 106: note = RuvC_P5
  REGION 268..354: note = Tnp_domain
  SITE 275: note = Tnp_P1
  SITE 305: note = Tnp_P2
  SITE 313: note = Tnp_P3
  SITE 314: note = Tnp_P4
  SITE 327: note = Tnp_P5
MLYLGIDISKRNHIASLLDEKGKTVFKAFSFSNTTEGGTSLLEKLKRCGATPYNMEVGMEATGHYWLSIYSFLVEHKFIVHVINPIQTDGWRKGTEIRKRKTDTIDSVLIAELIRYGDFLETSLVDENTMSLRNLSRFRNYLVSSISDLKRKVICVLDQVFPEYASAFSNVFGQTSKQLLLHFQTAEDFEVITAEQLEQALEQVTHKKTARKKVEQLSGLAADSFGLKFCRDSFSLQLNLLIQQIAFIEGQVTDVEAEINVILNKLHSPIFTIPGIGPINGACILGEIGDISRFSNAAKLAAYAGIDATVNQSGAFQSANNHMSKRGSPYLRKALFQAALVAAFHDPVFSAFYQKKRTEGKHHLTAIGAVARKLCNVMFAVLKNNDPYRPQIL

SEQ ID NO: 18860 - protein, 391 aa, unidentified
  source 1..391: note = protein_049e3bf
  REGION 6..159: note = RuvC_domain
  SITE 9: note = RuvC_P1
  SITE 57: note = RuvC_P2
  SITE 98: note = RuvC_P3
  SITE 100: note = RuvC_P4
  SITE 103: note = RuvC_P5
  REGION 222..307: note = Tnp_domain
  SITE 230: note = Tnp_P1
  SITE 260: note = Tnp_P2
  SITE 268: note = Tnp_P3
  SITE 269: note = Tnp_P4
  SITE 280: note = Tnp_P5
MGRVVIGMDPHKRSATIEAIDQRERVLTTGRFGTDTAGYQAMLAAGRQFPDRVWAVEGCAGIGRHIAQRLVADGETVLDVPAKLSARVRVFGTGQGRKTDPVDAHSVAVAGLRSRDLRTVAVDDATVALRLLVDRRDELGRARTETISRIHQLLLELIPGGAKKFLTRGQASYLLRTAPTPVSIVARTRHDLARELIDELTVIDAKIRTADKQLRQLVAAAGSSLTDLNGIGPSGAARLIGDITDIGRFRTAAHFASWNGTAPIEASSGDQRRHRLSRLGTWHINRILHIMAVVQLRHHTPGRTYYRRRLAQGKTTTEAMRALKRHLSDVLYKQMVRDAKPGRTGGTGPGGHSGATLQSSADSPIPTAASSDKSQPGPAARKLRTNLAVTP

SEQ ID NO: 18861 - protein, 443 aa, unidentified
  source 1..443: note = protein_00db659
  REGION 4..159: note = RuvC_domain
  SITE 7: note = RuvC_P1
  SITE 58: note = RuvC_P2
  SITE 96: note = RuvC_P3
  SITE 98: note = RuvC_P4
  SITE 101: note = RuvC_P5
  REGION 266..352: note = Tnp_domain
  SITE 274: note = Tnp_P1
  SITE 305: note = Tnp_P2
  SITE 313: note = Tnp_P3
  SITE 314: note = Tnp_P4
  SITE 325: note = Tnp_P5
MKYVGFDWASQAHDVTVLDEAGQVLDRWAFPHSEAGWLMTVERLRRQGLPDDLPVIVERTSGLVVDRLLSAGHPVVPVHPTAFFAARPRWGASGAKSDPGDSYKLADYLRTDGHRLRRLSPLDTGLQELRALVRLRDDHVRARTAASNQLAALLDAHWPGPRQLFASLMSPIALSFLTDYPTPIAAAHLGEARMASFLRRHHYRGGKKAADLVARLRAAPVAPAGLPTATLAAMITAQVQLLRTLQQLISDTERLIAARVVAHPRTGLLAGLPGVGVINLAQLLAEVGPILDRVDSAEQAATECGAAPVTRASGKTTGTYFRWAVNTRARKAITSFAHNARLRDPWAAKLYADARARGKRHPHATRILARAWLRVIWACWASQQPYDPARHRHARSSHPPVPPPPANPAGAQARSRWSTPRLNDLDRAEHRHTIEGGGTLPQT

SEQ ID NO: 18862 - protein, 240 aa, unidentified
  source 1..240: note = protein_25c3f8f
  REGION 1..81: note = RuvC_domain
  SITE 21: note = RuvC_P3
  SITE 23: note = RuvC_P4
  SITE 26: note = RuvC_P5
  REGION 117..201: note = Tnp_domain
  SITE 125: note = Tnp_P1
  SITE 154: note = Tnp_P2
  SITE 162: note = Tnp_P3
  SITE 163: note = Tnp_P4
  SITE 174: note = Tnp_P5
MSIVDPLRARLFAKACGFLAKTDRLDARFLAIMGEALKPAQTPPPDQALEALQELVNARSAANGERTALSNRMKTAVTAFLRKELTRRLAALDTHIARLDAEIERSICADPEMRRRLDILISIPGIGAVTAASLIAGLCELGACSGKQAAMLTGLAPIACESGERAGHRSIRGGRPAPRNAIYMAALSASRHNPDLARFAARLKKVGKPNKVVLVAVMRKLIVLANTLITKNRIWTPNPP

SEQ ID NO: 18863 - protein, 403 aa, unidentified
  source 1..403: note = protein_93308a7
  REGION 6..158: note = RuvC_domain
  SITE 9: note = RuvC_P1
  SITE 57: note = RuvC_P2
  SITE 95: note = RuvC_P3
  SITE 97: note = RuvC_P4
  SITE 100: note = RuvC_P5
  REGION 266..352: note = Tnp_domain
  SITE 274: note = Tnp_P1
  SITE 305: note = Tnp_P2
  SITE 313: note = Tnp_P3
  SITE 314: note = Tnp_P4
  SITE 325: note = Tnp_P5
MTKYFAGLDWASRTHAVCVVDERGTVRCEFEVSHDAAGLAELCRRLKAARVTAVAIERPSGLVVDALLEAGLQVVPIHPNVVKATRPRYRSHGGKSDATDAYLLADLLRTDGHRFKPLAPQSDEIRTLRALVRGRDDLVATRVQLANQLRELLQSFWPGAAEVFADVDSPIALAFIQRYPTPESASRLGPKRMAAFCAQHAYSGRRAPEELLQRLHQAAAVALGELEIEAKGELACSLARVLERLVEQIRLLTSRIEHAVASSEDGQIIMSFPRAGRICAAQILAEIGSVRERFDNVERLTAEAGVTPITYESGKSKAVAFRWACNHRLRAAITCLADNSRHASAWAAQVYQKARARGCDHPHAIRILARAWLRVIWRAWQNHQPYDVQRHTAAMLHLAATGG

SEQ ID NO: 18864 - protein, 341 aa, unidentified
  source 1..341: note = protein_ee18e8a
  REGION 7..148: note = RuvC_domain
  SITE 10: note = RuvC_P1
  SITE 53: note = RuvC_P2
  SITE 88: note = RuvC_P3
  SITE 90: note = RuvC_P4
  SITE 93: note = RuvC_P5
  REGION 209..273: note = Tnp_domain
  SITE 217: note = Tnp_P1
  SITE 247: note = Tnp_P2
  SITE 255: note = Tnp_P3
  SITE 256: note = Tnp_P4
  SITE 269: note = Tnp_P5
MQDVTLVGIDLGKHAFHLHGQDAAGKAVFRRKVSRKQLIEFFATLHPCTVVMEACAGAHCMARKIAELGHEAKLISPQFVRPFVKSNKNDFVDAEAICEAASRPSMRFVTPKTVSRQTLSALHRVRDSLVRDKVCTTNQMHGFLLEFGVTLPVGNAVVRRLPALLAEHSLPPRLVAILERLHAHFKYLSEQIGEIEKGLNRQLADDAIAQRLLTIPGVGTITASLLTSELGDGKQYRCGRDFAAAVGLVPRQYSTGGRGEPVGNFQAGGQEHSPVARPVCPCLHAASEQAHRQDGRLGALNARTTTLKRVACALANKFARIAWAIASRDAVFDPCTRTAPR

SEQ ID NO: 18865 - protein, 403 aa, unidentified
  source 1..403: note = protein_c413ec8
  REGION 5..160: note = RuvC_domain
  SITE 8: note = RuvC_P1
  SITE 57: note = RuvC_P2
  SITE 97: note = RuvC_P3
  SITE 99: note = RuvC_P4
  SITE 102: note = RuvC_P5
  REGION 274..361: note = Tnp_domain
  SITE 282: note = Tnp_P1
  SITE 312: note = Tnp_P2
  SITE 320: note = Tnp_P3
  SITE 321: note = Tnp_P4
  SITE 334: note = Tnp_P5
MMNAVGIDVSKGRSMVAVARPGEVVARPFIVSHTQSGIHELIDQLSSLDGETRIVMEHTGRYYEPMAQRLSDAGFFVSAVNPKLIKDYGHNSLRKVKTDKADAKKIACYTLDNWLDLRQYTGMDTLRKQLKTMNTQLDFFTKQKTAAKNNLIALLDQTYPGVNAFFNSPVRSDGSQKWVDFAKSFWHVDCVRTLSAASFMQRYQKWCHRHGYNHQPDKAKAIFDTSTELIAMLPKNAMNKMLVMQGIDQLNAVSAIIEQLKAEMNTLASDLPEYSVVMAMPGVGPSLGPQIMAEIGDISRFPHKSALTAFAGVDPGANQSGDFEAKSNHASKRGSPRLRKALFMVMDCLIKTSPPNDPVYCFMDKKRSEGKPYLVYMTAGANKFLRIYYGRVKAYLASLSPAE

SEQ ID NO: 18866 - protein, 403 aa, unidentified
  source 1..403: note = protein_ddf8e83
  REGION 4..160: note = RuvC_domain
  SITE 7: note = RuvC_P1
  SITE 57: note = RuvC_P2
  SITE 97: note = RuvC_P3
  SITE 99: note = RuvC_P4
  SITE 102: note = RuvC_P5
  REGION 274..359: note = Tnp_domain
  SITE 282: note = Tnp_P1
  SITE 312: note = Tnp_P2
  SITE 320: note = Tnp_P3
  SITE 321: note = Tnp_P4
  SITE 334: note = Tnp_P5
MNAVGIDVSKGKSMIAVVRPFGEVVVKPYEVPHTTSELRKLAGYLKSLDGETRAILEHTGRYYEPVAQILHNSGIFVCAVNPKLIKDYGNNSLRRVKTDKADSMKIARYGLDNWIELRQHTPMDTIRYQLKTMNRQYGLYNKSKIAMKNNLIALLDQTYPGANALFSSPTREDGSQKWVDFAASFWHVDCVRCMGQTAFIKRYHTWCQRHGYNFNSVKASEIHTQAKNLIAMLPKDSLTKLLLRQAIDQLNVTARTVELLRTEMKRLAQQLPEYPVVMSLYGVGESLGPQLMAEIGDVMRFERRNSLTAFAGVDPGANQSGRYEAKSSSVSKHGSPELRKTLFLVMDVLIKKAPSDDPVFCFMDKKRAEGKPYFVYMTAGANKFLRIYYGKVKEYLASLTTTE

SEQ ID NO: 18867 - protein, 344 aa, unidentified
  source 1..344: note = protein_abafa88
  REGION 6..149: note = RuvC_domain
  SITE 9: note = RuvC_P1
  SITE 53: note = RuvC_P2
  SITE 88: note = RuvC_P3
  SITE 90: note = RuvC_P4
  SITE 93: note = RuvC_P5
  REGION 212..297: note = Tnp_domain
  SITE 220: note = Tnp_P1
  SITE 250: note = Tnp_P2
  SITE 258: note = Tnp_P3
  SITE 259: note = Tnp_P4
  SITE 271: note = Tnp_P5
MSIKVVGIDIAKNLFQVCMLSSDGQILSNRKVKRDKLLDTVRQLPEKTDIAMESCATSHHWGRVFQELGHSVALIPAQHVKPFVGRQKNDANDARAICEAFSRPDIHFVPVKSVEQQDLKAMRSVRKRLVENRTALSNQIRGLAAEYGVVFPVSIKALRSHLPIALEDAENALSPVMRNLLQTLYCDFVSLSEEIDEMTQRVTMLSQQDPRYEALRNIPGFGPILTAALISEVGAGHQFQNGRQFSAWCGLVPKQNSTGGKSCLGSLSKNGNRELRALLIHGARAVVRCGANKADPMGTWLRGLIARRSKAKAIVALANKLGRVAWHILVKNSEYDINQAFKPV

SEQ ID NO: 18868 - protein, 404 aa, unidentified
  source 1..404: note = protein_fbdf61c
  REGION 11..166: note = RuvC_domain
  SITE 14: note = RuvC_P1
  SITE 63: note = RuvC_P2
  SITE 103: note = RuvC_P3
  SITE 105: note = RuvC_P4
  SITE 108: note = RuvC_P5
  REGION 273..358: note = Tnp_domain
  SITE 281: note = Tnp_P1
  SITE 311: note = Tnp_P2
  SITE 319: note = Tnp_P3
  SITE 320: note = Tnp_P4
  SITE 332: note = Tnp_P5
MIDTGDIDVFLGLDVGKSEHHATAVTPASKKAFDKRLPNTEPKLRELFTKLQAKHGTVLVVVDQPASIGALPPAVARDMGCPVAYLPGLTMRRIADLYPGEAKTDARDAFIIADAARAMPHTLRAIDGEDETIAELEMIVGFDDDLAGEATRVANRLHGLLTQIHPSLERVLGPRLQHPAVLTLLERFGSPAQIRKAGRRRLVTLLRPKAPRMAERLVEDIFTALDEQTVVVPGTDAAALIVPSLAGSLAAILDQRKLLAGRIEELLEAHPLSKVLTSMPGIGVRTGARILIEVGDGSTFPTAGHLAAYAGLAPATRSSGSSIRGEQPSRRGNKQLKRAFFLSAFAALGDLASRAYYDKKIAQGKHHTQALLCLARRRADVLFAMLRDGTFYEPQPVRAVAPQT

SEQ ID NO: 18869 - protein, 315 aa, unidentified
  source 1..315: note = protein_d487a0d
  REGION 12..162: note = RuvC_domain
  SITE 15: note = RuvC_P1
  SITE 57: note = RuvC_P2
  SITE 97: note = RuvC_P3
  SITE 99: note = RuvC_P4
  SITE 102: note = RuvC_P5
  REGION 193..276: note = Tnp_domain
  SITE 200: note = Tnp_P1
  SITE 229: note = Tnp_P2
  SITE 237: note = Tnp_P3
  SITE 238: note = Tnp_P4
  SITE 250: note = Tnp_P5
MAMPVSVSKPIVGVDVAKNELVIYHAELDRLEEIPNNKAAIKQWLKGLPGTVAIAIESTNIYHLEFADLAYEAGCVIYMVGGYELSHYRKGVNVRAKTDALDARLLARYLKNEGDDLHPWTPPSPLYRQLLSLFRRRAALVQARVGLVQSWANEPLLKTAFAEQVKSMQQLEALVEKTIKDHLKEAGLLGQLKRCLKVEGIGFLTGARLIAAFQRGDFRNADAFIAFLGMDLRVAKSGQKDGRRSLTKRGDPEARRLLHNAAMSASRTPAWKGFYEAQRARGFSTTQALVILARKLARVVFALLKGQSEYQPKVG

SEQ ID NO: 18870 - protein, 353 aa, unidentified
  source 1..353: note = protein_95cbc68
  REGION 11..166: note = RuvC_domain
  SITE 14: note = RuvC_P1
  SITE 63: note = RuvC_P2
  SITE 103: note = RuvC_P3
  SITE 105: note = RuvC_P4
  SITE 108: note = RuvC_P5
  REGION 270..353: note = Tnp_domain
  SITE 278: note = Tnp_P1
  SITE 308: note = Tnp_P2
  SITE 316: note = Tnp_P3
  SITE 317: note = Tnp_P4
  SITE 329: note = Tnp_P5
MIDIDETGVFLGLDVGKSNHHGHGLTPAGKKVFDKALPNGEPQLRAVFDKLMAKFGTVLVVVDQPASIGALPLTVARDAGCKVAYLPGLVMSRIADLYPGEAKTDARDAAVIADAARTMPHTLRSLELADEITAELTMLVGFDQDLAEEANRTSNRIRGLLTQFHPSLERVLGPRLDHPAITWLLERYGSPAALRKAGRRKLVEVVRPKAPRMAQRLIDDIFDEQTVVVPGTNTLDVIMPSLAKSLAAVHEQRRALEAQIEALLEAHPLSQVLTSMPGIGVRTAAVLLATVGDGNSFPSAAHLASYAGLAPTTRQSGTSIHGEHAPRGGNRQLKRAMFLSAFAALHDPASRSY

SEQ ID NO: 18871 - protein, 345 aa, unidentified
  source 1..345: note = protein_4af6c38
  REGION 6..148: note = RuvC_domain
  SITE 9: note = RuvC_P1
  SITE 52: note = RuvC_P2
  SITE 87: note = RuvC_P3
  SITE 89: note = RuvC_P4
  SITE 92: note = RuvC_P5
  REGION 211..297: note = Tnp_domain
  SITE 219: note = Tnp_P1
  SITE 249: note = Tnp_P2
  SITE 257: note = Tnp_P3
  SITE 258: note = Tnp_P4
  SITE 270: note = Tnp_P5
MKIMTIGIDLAKNVFQLHGVDEHGKTILKKQLRREQMTVYFANLPQCLIGMEACGGAHHWARLLQSFGHTVKLMAPQFVKPYVKTNKNDAADAAAICEAVTRPDMRFVPIKTVEQQAILSVHRARAGFVKARTATANEIRGLLAEFGIIIPQGIHAIGRRIPEIQEDGENELPSTFKQLLQTLSDHLKALDQQIEALEQDIQCWHRNAAVSVRLAKIPGIGPLTASALVATVGDARNFSNGRQLAAWLGLVPRQHSSGGKPTLLGISKRGDSYLRTLMIHGARAVLRFATNKTDCTSTWLNGVMARRHVNVAAVALANKNARIVWALLAHEREFRSDHTLAFAGA

SEQ ID NO: 18872 - protein, 341 aa, unidentified
  source 1..341: note = protein_19f4962
  REGION 5..151: note = RuvC_domain
  SITE 8: note = RuvC_P1
  SITE 53: note = RuvC_P2
  SITE 91: note = RuvC_P3
  SITE 93: note = RuvC_P4
  SITE 96: note = RuvC_P5
  REGION 211..297: note = Tnp_domain
  SITE 219: note = Tnp_P1
  SITE 249: note = Tnp_P2
  SITE 257: note = Tnp_P3
  SITE 258: note = Tnp_P4
  SITE 270: note = Tnp_P5
MEEYIGLDISLKETAISVRRDGKRIWRGKCPSDPSLVAEVVRKRAPAAKRVVFETGPLSVWFYHALSAEELPAICIDARHAKAALDMAPNKTDANDADGLAHLAEAGFYREVRVKGYNSMLVRTLVAARTKLVRITTELSNQIRGLMKTFGLVIPQSKGGKFDDAVRRLLAGQEELARIILPVLEAWRSVRIRAAELGRRLVASARQSEACQLLMSIPGVGAITATSFTTAIEDPANFKKSRSVGAWLGLTTRRYQSGEIDYDGHISRRGDAHLRGLLYEAATVILTRTRADSDLRAWGLKLREKIGFKRAAVAVARKLAVIMHAMLKSGELFSRVISATA

SEQ ID NO: 18873 - protein, 341 aa, unidentified
  source 1..341: note = protein_108bbe8
  REGION 6..147: note = RuvC_domain
  SITE 9: note = RuvC_P1
  SITE 52: note = RuvC_P2
  SITE 87: note = RuvC_P3
  SITE 89: note = RuvC_P4
  SITE 92: note = RuvC_P5
  REGION 211..296: note = Tnp_domain
  SITE 219: note = Tnp_P1
  SITE 249: note = Tnp_P2
  SITE 257: note = Tnp_P3
  SITE 258: note = Tnp_P4
  SITE 270: note = Tnp_P5
MDIVVLGIDLGKNSCSLVGFDATGGVILRRRMRRDAVPTFVEALPSCIVAMEACCGAHHLGRLFSACGHEIRLMSPEYVRPYVKANKNDDRDAEAIAEAATRPTMRFVPVKSEAQSDIQALHRGRSRLVAERTALINHLRALLLERGIVAPKGRKQLEAQLTVFADEDDPRLSPRMRLLIEDLRAEWRSLDERIAAFDAEFVAMAREDEAARRLATIPGIGVINATALVAAVGDARSFGCGRDLAAWLGLTPRQATTGGKPRLLGISKRGNRYLRANLIHGARAVLPRLVTQDSPLGRWIRSLLERTHKNVVVVALAAKLARIVWAVLRKERGFDPLIAAA

SEQ ID NO: 18874 - protein, 340 aa, unidentified
  source 1..340: note = protein_69273e4
  REGION 7..148: note = RuvC_domain
  SITE 10: note = RuvC_P1
  SITE 53: note = RuvC_P2
  SITE 88: note = RuvC_P3
  SITE 90: note = RuvC_P4
  SITE 93: note = RuvC_P5
  REGION 211..297: note = Tnp_domain
  SITE 219: note = Tnp_P1
  SITE 249: note = Tnp_P2
  SITE 257: note = Tnp_P3
  SITE 258: note = Tnp_P4
  SITE 270: note = Tnp_P5
MKEVTTIGLDIAKQIFHAHGAGSSGAPVFSRRITRQKLIQFFASQPRCVVAMEACAGAHHWGRELMRLGHEVRLIPPAYVKPFVKRQKNDAADAEAICEAAQRPAMRFVPVKSEAQQASAAVFRARDLLVRQRTQLLNALRGLLAEHGWVAPKGLFHASAIMAKIEGPSCELPASARDVFLVMIASVRALDERIHLLDREITKRAREDETARRLMTIPGIGPITATALLALAPAPESFRKGRDFAAWVGLTPLQRSTGGKAKLGSITRMGELTLRRLLILGSAAVVLHASKRGAAKGSWLEQMMARKPRMLVTVAFANKTARIVWALPAKGGVYRAPAVA

SEQ ID NO: 18875 - protein, 342 aa, unidentified
  source 1..342: note = protein_5b15f06
  REGION 7..149: note = RuvC_domain
  SITE 10: note = RuvC_P1
  SITE 53: note = RuvC_P2
  SITE 88: note = RuvC_P3
  SITE 90: note = RuvC_P4
  SITE 93: note = RuvC_P5
  REGION 212..299: note = Tnp_domain
  SITE 220: note = Tnp_P1
  SITE 250: note = Tnp_P2
  SITE 258: note = Tnp_P3
  SITE 259: note = Tnp_P4
  SITE 271: note = Tnp_P5
MGQVTTIGLDIAKSVFQVHGVDADGQVVLRQRLTRARVLPFFRKQPACRVGIEACATAHHWARELLTLGHEVRLMPPAYVKPYVKRQKNDAADAEAICEAVGRPTMRFVTPKTVEQQSVMMLHRVRLMLTRQRTQVGNAIRAHLAELGIVAPVGRKGLASLLAIIADETDARLPAAMRCCLAMLAEQLQLLSVQIQENDRAIRETIRTSEVARRLMAIPGVGPLLASALVASIADPATFKSGRNLAAWIGLVPKQNSSGGKERLGSISKQGNRYLRQLLVVGALAVIRQAQRYGSKRAWLIGLMGRRATRVAAVALANKTARMAWAIMTSGESYREPKAATA

SEQ ID NO: 18876 - protein, 309 aa, unidentified
  source 1..309: note = protein_23a8e03
  REGION 5..153: note = RuvC_domain
  SITE 8: note = RuvC_P1
  SITE 52: note = RuvC_P2
  SITE 92: note = RuvC_P3
  SITE 94: note = RuvC_P4
  SITE 97: note = RuvC_P5
  REGION 186..270: note = Tnp_domain
  SITE 194: note = Tnp_P1
  SITE 223: note = Tnp_P2
  SITE 231: note = Tnp_P3
  SITE 232: note = Tnp_P4
  SITE 243: note = Tnp_P5
MLTCAGIDVSKDVLQIELDPQGMGAVFPNDINDFSKMVDWLKCHQVSRALLEATGGYERRAMKALQAAGFEVLRVNPCRAKSFSKAMGLHAKTDPIDARLLAQFAAVIQSPESRITNAEQDNLRALVQQRENFVQQRDDDKRRLKTTVSEIVKPALQSHIDYLRKAIKSIEKLMGQSAEQLDGEKVARLCSVKGIGLVTAASLMSYLPELGEVGRHEIAALAGVAPYNDDSGKHKGKRHISGGRFAVRRSLYMASWIVIRYQPEFNARYKALRDKGKCAKVALIACMRVLLIRLNAMIRDGSEWKEHIA

SEQ ID NO: 18877 - protein, 403 aa, unidentified
  source 1..403: note = protein_dbfacbf
  REGION 4..160: note = RuvC_domain
  SITE 7: note = RuvC_P1
  SITE 57: note = RuvC_P2
  SITE 97: note = RuvC_P3
  SITE 99: note = RuvC_P4
  SITE 102: note = RuvC_P5
  REGION 269..355: note = Tnp_domain
  SITE 277: note = Tnp_P1
  SITE 308: note = Tnp_P2
  SITE 316: note = Tnp_P3
  SITE 317: note = Tnp_P4
MVFVGIDWAEAHHDVCLVDDAGQVLTKRRVAEGLEGVTKLHALIAEHAEEPGSVVVGIETDRGLLVGSLLAAGYQVFAINPLAASRYRDRHATSGAKSDPGDARVLADLVRTDRHQHRTVAGDSELAEAVKVLARAHQSLVWTRQRQVNQLRNALREFYPAALAAFDDLDSGDAIAVLELAPTPRRGRGLSRAKITSALRRGGRERNLEAKASQIQNLLRLPQLEAPALVAQAYGHSVAASVAVIKQLSQQIAALEQELAVSFERHPDAEIYLSLPGLGRILGARALAEFGDDRTRFAHPKARKNYAGTAPITKASGTRKVVLARVTRNRRLADACYQWAFAALTRSEGARRRYDSLRARGQTHHQALRALGNRLVGILHGCLTNKQTYREDVAWRAAALIAA

SEQ ID NO: 18878 - protein, 400 aa, unidentified
  source 1..400: note = protein_15e84ad
  REGION 11..165: note = RuvC_domain
  SITE 14: note = RuvC_P1
  SITE 62: note = RuvC_P2
  SITE 102: note = RuvC_P3
  SITE 104: note = RuvC_P4
  SITE 107: note = RuvC_P5
  REGION 272..358: note = Tnp_domain
  SITE 280: note = Tnp_P1
  SITE 310: note = Tnp_P2
  SITE 318: note = Tnp_P3
  SITE 319: note = Tnp_P4
  SITE 331: note = Tnp_P5
MDADEPITIWCGLDVGKSAHHACALDRQGHRVFDAELPQDQERLERLFTELAARGRVLVVVDQPNTIGALPVAVARAMDIEVAYLPGLAMRRIADLHPGSAKTDARDAYVIADSARTMPHTLRRVDVGEDVLAELKVLIGFDDDLAAEATRLSNRIRGLLTQIFPALERILGPRLHTKAVLALIMKYGGPRGMAAAGRARMITTATAANRRGAAELVDQIVSALAEQTVTVPGAAAAERVLPRLAKSLTEALDQRAHLAAEVEQVLDAHPLAEVLTSMPGVGVRTAARILVEVGDASTFRTSGHLAAYAGLAPVTRRSGTSIRGEFPARSGNRHLKRAFFLSAFAALRADPASRAYYDRKRAEGKKHNAALICLARRRCDVLHAMIRTRTVYRPKLPATS

SEQ ID NO: 18879 - protein, 340 aa, unidentified
  source 1..340: note = protein_9b2e5ac
  REGION 5..151: note = RuvC_domain
  SITE 8: note = RuvC_P1
  SITE 54: note = RuvC_P2
  SITE 91: note = RuvC_P3
  SITE 93: note = RuvC_P4
  SITE 96: note = RuvC_P5
  REGION 211..297: note = Tnp_domain
  SITE 219: note = Tnp_P1
  SITE 249: note = Tnp_P2
  SITE 257: note = Tnp_P3
  SITE 258: note = Tnp_P4
  SITE 270: note = Tnp_P5
MDEYIGLDVSLKETAVSIRRDGKRVWRGKCLSVPQAIAALIRERAPRAKRVVFETGPLSVWFYHALTAEGVPAICIDARHAKAALDMAANKTDANDADGLAHLAEVGFYKVVRVKSFDSMLARTLVAARTRLVRIGTELSNQIRGLMKTFGLVVPLVTGGKFERQVEALLADNTGLGRIIRPLMEAWRAVCLRTAELSRTLLADARRSDACQLLMSIPGVGVVTATSFIAAIEEPGTFKRSRSVGAWVGLTTRRYQSGEVDHDGHISRRGDTHLRGLLYEAATSLLTRSRAQSDLRTWGLKLRERLGFKRAAVAVARKLAVIMHTMLTTGEPFRRSPATA

SEQ ID NO: 18880 - protein, 343 aa, unidentified
  source 1..343: note = protein_ef8c15a
  REGION 7..149: note = RuvC_domain
  SITE 10: note = RuvC_P1
  SITE 53: note = RuvC_P2
  SITE 88: note = RuvC_P3
  SITE 90: note = RuvC_P4
  SITE 93: note = RuvC_P5
  REGION 212..301: note = Tnp_domain
  SITE 220: note = Tnp_P1
  SITE 250: note = Tnp_P2
  SITE 258: note = Tnp_P3
  SITE 259: note = Tnp_P4
  SITE 271: note = Tnp_P5
MQPISTIGLDIAKSVFQVHGVDAAGQVIIRRQLKRRQVLTFFQKLPPCLVGIEACASSHHWSRELQALGHAVRLMPPAYVKPYVKRQKNDSADAEAICEAVTRPNMGFVPTKTVEQQSCLMLHRARHLFIRQQTAVINSIRAYLAESGIVAPVGRGGVEQLLEVVADTAEDRVPEGARMCLAALGGQLRALKAQILEFDRRIIAWHRSSATSKRLDAIPGVGPALATALVASIADPRAFRSGRDFSAWVGLVPKQSSSGGKDKLGSISKQGDRYLRSLFTAGALAVIRYAKIHGTDHRPWLTRLLARRPTKVAAIALANKLARMAWAMMARNERYQEPAALAA

SEQ ID NO: 18881 - protein, 341 aa, unidentified
  source 1..341: note = protein_6e114cd
  REGION 6..148: note = RuvC_domain
  SITE 9: note = RuvC_P1
  SITE 52: note = RuvC_P2
  SITE 87: note = RuvC_P3
  SITE 89: note = RuvC_P4
  SITE 92: note = RuvC_P5
  REGION 211..297: note = Tnp_domain
  SITE 219: note = Tnp_P1
  SITE 249: note = Tnp_P2
  SITE 257: note = Tnp_P3
  SITE 258: note = Tnp_P4
  SITE 270: note = Tnp_P5
MNVKAIGIDLAKEVFLVHGIDEHGKRLFNKQLKRVKILSFFANIPPCLIGMKACASAHFWAGKLMSMGHNVKLMAPQFVKPYVKTNKHDAADAKAICEAVTRPNMRFVLVKSPEQQAVLALHRSRQSFIKQRTAQANQIRGLLAEFGIVVPRGIQQLQLQLPEILEDTDNSLPSLFRVQLSLLQYHMAYLFDVIATLDKQIEQCYRQNVLCQRISKIPGIGSITATALIATIGNASNFENSRQLSAWLGLVPRQHSSGGKQVLLRISKRGDIYLRTLLIHGARAVLQSVKRKQDAASGWASRLLARRNNNIVSVALANKNARIVWALLAKEQEYCAPVMKV

SEQ ID NO: 18882 - protein, 340 aa, unidentified
  source 1..340: note = protein_f50dc3b
  REGION 4..157: note = RuvC_domain
  SITE 7: note = RuvC_P1
  SITE 55: note = RuvC_P2
  SITE 96: note = RuvC_P3
  SITE 98: note = RuvC_P4
  SITE 101: note = RuvC_P5
  REGION 219..304: note = Tnp_domain
  SITE 227: note = Tnp_P1
  SITE 257: note = Tnp_P2
  SITE 265: note = Tnp_P3
  SITE 266: note = Tnp_P4
  SITE 277: note = Tnp_P5
MVLIGIDPHKATHTAVVIDEAEHELARIKVRADRSQVAALLEFADEFRPRRWAIESAGGLGFLLAQQLVRAGEDVVDVPATLAARVRLLGSGRGSKNDPNDALSTAIAALRDPHLRTVMVEDHAMVLRLLADRHQDLTSLRTQAVCRLHAPIAALTPGGVQRRISADGAASRLRAIHPSNTVEVARKEMALELVADVRRLDKNIAEVKKRTTAAVAASGTSLTEVYGVGPIVAALLIGHTGDITRFPTKGHYASYNGTAPIEASSGKVVRHRLNQRGNRQLNHALHMAAVTQLRRDTPGRVYYLTKIDEGKSPKEARRALKRKISDAVYRQLHDDARPQT

SEQ ID NO: 18883 - protein, 339 aa, unidentified
  source 1..339: note = protein_b40cec8
  REGION 6..148: note = RuvC_domain
  SITE 9: note = RuvC_P1
  SITE 52: note = RuvC_P2
  SITE 87: note = RuvC_P3
  SITE 89: note = RuvC_P4
  SITE 92: note = RuvC_P5
  REGION 209..294: note = Tnp_domain
  SITE 217: note = Tnp_P1
  SITE 247: note = Tnp_P2
  SITE 255: note = Tnp_P3
  SITE 256: note = Tnp_P4
  SITE 268: note = Tnp_P5
MHIQTIGLDLAKSVFQAHGVDDACNTVLAKKLHRKQMIPFFSKLAPCLIGVEACGAAHYWARTLIAMGHEILIMPPSYVKGYVKRGKSDALDAEAICEAVQRPTMRFVPVKTVEQQGILMAHRTRALLVRQRTMAANALRAHLAEFGFVANPGVANLVKLADQAFTDEVLPAYAHRALEILIRRMAELTEEIGELDQELRTWHEGSDVSRRLATIPGIGVITASAIAATVTDPDQFQSGRQFAAWLGLTPQQQSTGGKTRLGGISKQGDRYSRRLLVVGATAVMRHAKRKPTPLTDWVSRLLEKKPFRLVSVALANKLARIAWTLLKRGQIYRPYGLSA

SEQ ID NO: 18884 - protein, 387 aa, unidentified
  source 1..387: note = protein_bb02d3c
  REGION 5..158: note = RuvC_domain
  SITE 8: note = RuvC_P1
  SITE 56: note = RuvC_P2
  SITE 97: note = RuvC_P3
  SITE 99: note = RuvC_P4
  SITE 102: note = RuvC_P5
  REGION 220..305: note = Tnp_domain
  SITE 228: note = Tnp_P1
  SITE 258: note = Tnp_P2
  SITE 266: note = Tnp_P3
  SITE 267: note = Tnp_P4
  SITE 278: note = Tnp_P5
MAVIIGMDPHKRSATIEVVDKRAQILAVGRYGTDKAGYGEMLVAGREHPDRTWAVEGCNGIGKHIAHRLVHDGETVVDVPPKLSAQVRVFATGNGRKTDPVDAHSVAMVALRTPGLVRVNVDDDLVVMGMLADRRDELGRARTQTINRLHRLLLELFPGGAKQFLSSQQARALIATIKPRDLVGKTRRRLAVELIVELEGIDKKIKAIKKELTELVTERGSTLLELHGIGPSGAARLLADVGDIHRFADRDRFASWNGTAPLDASSGNQQRHRLSRAGNRRINRALHIMAIVQLRHATEGRAYYDGRKAGGMPSMMAMRALKRRLSNVVFARMLADQNRREAAGPGGQSGTTLLSSATDLTPDIGSSDKPLPGPATTQPRTAIPSAS

SEQ ID NO: 18885 - protein, 349 aa, unidentified
  source 1..349: note = protein_3b7d65c
  REGION 7..148: note = RuvC_domain
  SITE 10: note = RuvC_P1
  SITE 53: note = RuvC_P2
  SITE 88: note = RuvC_P3
  SITE 90: note = RuvC_P4
  SITE 93: note = RuvC_P5
  REGION 212..298: note = Tnp_domain
  SITE 220: note = Tnp_P1
  SITE 250: note = Tnp_P2
  SITE 258: note = Tnp_P3
  SITE 259: note = Tnp_P4
  SITE 271: note = Tnp_P5
MGEVSTIGVDIAKSVFQIHGVDADGTVVIRKRVGRAKVLDFFAELPPCLVGMEACATAHQWARELKKLGHDTRLMPPTYVKAYVKRGKNDAADAAAICEGVTRPSMRFVPIKSVEQQSALMLHRTRDLLIRQRTQLINALRAHLAELGLVAAKGHEGLHQLVTAVAESSDEQLPSNARFACQAIAAQLSAVQTQINGLDKRITQAHRANADSKRLEAIPGFGVILSTAVVATMTDPMAFKTGREFAAWIGLVPRQNSTGGKERLGSISKQGDRYLRRLFVLGAISIVGTARTRPDKYPWVTELLGRRPAKVVAVALANKMARTAWAVLAKGETYRAPTRSSSAAIAAAA

SEQ ID NO: 18886 - protein, 320 aa, unidentified
  source 1..320: note = protein_7c5dfd3
  REGION 10..157: note = RuvC_domain
  SITE 13: note = RuvC_P1
  SITE 55: note = RuvC_P2
  SITE 95: note = RuvC_P3
  SITE 97: note = RuvC_P4
  SITE 100: note = RuvC_P5
  REGION 190..274: note = Tnp_domain
  SITE 198: note = Tnp_P1
  SITE 227: note = Tnp_P2
  SITE 235: note = Tnp_P3
  SITE 236: note = Tnp_P4
  SITE 248: note = Tnp_P5
MAMRVEPIQIGIDVSQDELVICRGDRDGLTTIENTPQAIASWLKTLHGVVRIAVEATNVFHVELVERAHRRGHTVFVLDGYRLNRYRESVGGRAKTDATDARLLLRYLDREWRDLRPWTPPSKGYQALQRLIHRRATLIRAKVALEQSLRTLSEIRPSVQALLRQMDRVDQQIRKQMLKVVSKQGWQADTARLMGIEGIAEITSAALVMAFRRGEFTSSDAFIAFLGLDVRVRESGKSKGCGKLTKKGNPELRRLLYLAAMTARRSPAWKDFYQHHLSRGRSRIQALVILARKLARVAFALLKNQTEYQPKIRQEACIAT

SEQ ID NO: 18887 - protein, 397 aa, unidentified
  source 1..397: note = protein_610e6f0
  REGION 4..159: note = RuvC_domain
  SITE 7: note = RuvC_P1
  SITE 59: note = RuvC_P2
  SITE 99: note = RuvC_P3
  SITE 101: note = RuvC_P4
  SITE 104: note = RuvC_P5
  REGION 265..355: note = Tnp_domain
  SITE 273: note = Tnp_P1
  SITE 303: note = Tnp_P2
  SITE 311: note = Tnp_P3
  SITE 312: note = Tnp_P4
  SITE 328: note = Tnp_P5
MVTVGIDIGGRSHAVARCRDGNLNADREIVRVTQDRLGFDLLDTWLDRQGEPVDLVVMESSGHYWMPLASHLRRRGVPVAVVNPLAAKYFARSRLARTKSDPADARSLAEMAMRDAPDATRDPLAGVELRQAARFAMTLVEEQARVSQRLLRLIDLGFPELGEVFDDPTCRTAREVLRIAPTARSATRRRTATLANANSAPGHRRLGTAKAERIQAAAAGSIAVPELDAEAAFEIGLLLDQHDLLERQIEAADRHMASLLDSELARRLQTIPGVGPSTAAVLISEIGDITRFDDFDQLLAYAGVHPAERSSGRKGASPETAWHMSKAGNTHLRAAAYRMALVGTQHNPVIAAHYARKRAAGKSKMNALGHCMRKALAIVWGVWRNGTDFDPGHGVEA

SEQ ID NO: 18888 - protein, 341 aa, unidentified
  source 1..341: note = protein_57728b8
  REGION 7..149: note = RuvC_domain
  SITE 10: note = RuvC_P1
  SITE 53: note = RuvC_P2
  SITE 88: note = RuvC_P3
  SITE 90: note = RuvC_P4
  SITE 93: note = RuvC_P5
  REGION 209..293: note = Tnp_domain
  SITE 217: note = Tnp_P1
  SITE 247: note = Tnp_P2
  SITE 255: note = Tnp_P3
  SITE 256: note = Tnp_P4
  SITE 268: note = Tnp_P5
MQEVTLIGIDLGKHSFHIHGQDAAGKGIFRKKCTRKQLITFLATFHPCTVVMEACAGAHHMARFLMSFGHAVKLINPQFVRPFVKGNKNDFIDAEAICEAASRPTMRFVTPKTEAQQLVSALHRVRESLVCDRVKTSNQIHGILLEFGISLPIGRTIIRHLPSALAETALPARLIAILERLHAHYKYLDEQIAEVEKELVQQLNVDDLGQRLLKVPGVGPITASLLSAELGDGKQYGCGRDFAASVGLVPRQYSTGGHANLLGISKRGDKNLRRLLVQCARAFMQRLDKHKGILADWVRSMLTRRHSNVVACALANKLARIVWALAARHTEYHAAPVPVGT

SEQ ID NO: 18889 - protein, 339 aa, unidentified
  source 1..339: note = protein_28ee23c
  REGION 6..152: note = RuvC_domain
  SITE 9: note = RuvC_P1
  SITE 53: note = RuvC_P2
  SITE 91: note = RuvC_P3
  SITE 93: note = RuvC_P4
  SITE 96: note = RuvC_P5
  REGION 211..298: note = Tnp_domain
  SITE 219: note = Tnp_P1
  SITE 249: note = Tnp_P2
  SITE 257: note = Tnp_P3
  SITE 258: note = Tnp_P4
  SITE 270: note = Tnp_P5
MAILYVGIDLAKNVFAVHGVDEHGKPALVRPSVARAKLHELIATLPACTIGMEACSGAHHWARMFKQHGHAVRLIAPKFVAPYRMSGKRGKNDAADAMAICEAVQRPNMRFVPVKSQDEQARLCVHRVRQGLVEQRTATVNRIRGLLCEFGIVLSQKAATVRREAAAHLEDLPGWANTAIGDSLSELHRLDERIAEYDRHVVLMAREDERSRALMRLSGIGSTTASALVSTIGNARDFKNGRQLAAWLGLVPGQYSSGGKTRLGSITKAGDGYLRTLLVLGAKAVLAAAKSKDDRLSRWALALEERRGYWKAVVAIAAKNARMAWAVLAKGENFKPLEG

SEQ ID NO: 18890 - protein, 391 aa, unidentified
  source 1..391: note = protein_37cb857
  REGION 6..163: note = RuvC_domain
  SITE 9: note = RuvC_P1
  SITE 61: note = RuvC_P2
  SITE 102: note = RuvC_P3
  SITE 104: note = RuvC_P4
  SITE 107: note = RuvC_P5
  REGION 265..351: note = Tnp_domain
  SITE 273: note = Tnp_P1
  SITE 303: note = Tnp_P2
  SITE 311: note = Tnp_P3
  SITE 312: note = Tnp_P4
  SITE 324: note = Tnp_P5
MSTYFVGIDISKYKHDCCIIYAADQSIVSKFTIHNDMDGFEQLLTALQALSTPKDIRIGFESTSHYALNLELFLEKAHHSFMEVNPVLISEYKKSTSLRRTKTDSIDCEFIARWLMTVEYKPHSIGFYHSYSLKSLTRLRDRLVRQRSFYLVKLTNVLDHTFPEFKPFFKERFSKTAIYLLETYGSAEKIARMNSASYENLRSISRGKFSPQQFIELKELAANTVGVNNSIFDTELNCLLSLYRDVAKQVSILEEQIITLIEDIHPHFMSIPGIGPLSAAVIYAEYGDISNFSSPSQMLAFAGLEPGINDSGTESHKGRMVKRGSSQLRYTLLNCILPLIRFDVTFATYYAKKRAEGKPHRVAVSHVAKKLVRVIFALERQNTDFVSQALR

SEQ ID NO: 18891 - protein, 284 aa, unidentified
  source 1..284: note = protein_5993b5b
  REGION 4..148: note = RuvC_domain
  SITE 7: note = RuvC_P1
  SITE 50: note = RuvC_P2
  SITE 89: note = RuvC_P3
  SITE 91: note = RuvC_P4
  SITE 94: note = RuvC_P5
  REGION 185..269: note = Tnp_domain
  SITE 193: note = Tnp_P1
  SITE 222: note = Tnp_P2
  SITE 230: note = Tnp_P3
  SITE 231: note = Tnp_P4
  SITE 242: note = Tnp_P5
MSGIGIDVCKKSLDAAVFQGEARQFSNTASGHCKLVHWLRTLPVRQVVLEATGGYELAALDALHQAGIPVARANASRARHLANGLGLAKTDRLDAGMLACMAEKMELHPYVPLPPWQRHLGEHVRARRQLIDLLKTAKQQLLQVADKPLRKLLQANVNQLVRSVARLDELIAGQLKTLLIEQPHLAALKTLKGVGPVLLAVLACRLPELGTLNGKQISRLVGVAPLSRDSGKMRGKRGIGGGRADIRQALYMAAMSSARHEPRLRDFYRALRTRGKKARSRSWR

SEQ ID NO: 18892 - protein, 344 aa, unidentified
  source 1..344: note = protein_8488c71
  REGION 7..149: note = RuvC_domain
  SITE 10: note = RuvC_P1
  SITE 53: note = RuvC_P2
  SITE 88: note = RuvC_P3
  SITE 90: note = RuvC_P4
  SITE 93: note = RuvC_P5
  REGION 212..303: note = Tnp_domain
  SITE 220: note = Tnp_P1
  SITE 250: note = Tnp_P2
  SITE 258: note = Tnp_P3
  SITE 259: note = Tnp_P4
  SITE 271: note = Tnp_P5
MGEVNTIGMDIAKSVFQVHGVDAAGSITIRKRIGRAKVLEYFGELPPCLVGIEACPSAHHWGRELQSLGHTVRFIPPSYVKAYLKRSKNDANDAAAICEAVARPSMRFVPIKTTEQQSALMLHRTRQLLVRQRTMLSNALRGHLAELGIVSAKGRNGTAELLEIIADGADSRVSPAVRGILEVLARQYGVIGTEMASIDKSIMALHRTCEASRRLAEIPGIGPVGATALVAEIGDWNAFSSGRSLAAWIGLVPKQNSTGGKDRLGSITKQGNRYLRWLLVVGAMAVIRYARKHGTQRRPWLARLMERRPTKVAAVALANKIARMAWAIMVGGEKYREPQLPLAA

SEQ ID NO: 18893 - protein, 313 aa, unidentified
  source 1..313: note = protein_9d559db
  REGION 9..159: note = RuvC_domain
  SITE 12: note = RuvC_P1
  SITE 56: note = RuvC_P2
  SITE 94: note = RuvC_P3
  SITE 96: note = RuvC_P4
  SITE 99: note = RuvC_P5
  REGION 190..274: note = Tnp_domain
  SITE 198: note = Tnp_P1
  SITE 227: note = Tnp_P2
  SITE 235: note = Tnp_P3
  SITE 236: note = Tnp_P4
  SITE 247: note = Tnp_P5
MSEPLPQTIGIDISKATLDCHAHPAGIDRQFANSAKGYKSLIAWPRQWEIERIAYEATGTYHRALEQALAHMPCVKLNPERARRFAQATGTLAKTDRIDAALLARMAATLQPPIRPARSAQQALLAELVNARDGLVRDRTALKNREKNLTVALLKRHCKQRLEQIARHLEALDAEIAAIIAADADLARRHQILTSIDGVGTLTANQLVATMPELGTLENKEAASLAGLAPVARQSGQWKGKSFIRGGRANVRQALYMPALVAARFNPDLKDKYQQLIAAGKPAKVAITAVMRKLVVTANALLKADRLWVKSLA

SEQ ID NO: 18894 - protein, 341 aa, unidentified
  source 1..341: note = protein_0e6f476
  REGION 7..149: note = RuvC_domain
  SITE 10: note = RuvC_P1
  SITE 53: note = RuvC_P2
  SITE 88: note = RuvC_P3
  SITE 90: note = RuvC_P4
  SITE 93: note = RuvC_P5
  REGION 209..297: note = Tnp_domain
  SITE 217: note = Tnp_P1
  SITE 247: note = Tnp_P2
  SITE 255: note = Tnp_P3
  SITE 256: note = Tnp_P4
  SITE 268: note = Tnp_P5
MNNVAIAAIDLGKHSFHVHAQDDRGHELYRKKFNRVSLIQHLANVPPCTVVMEACGGAHFMAQEVAKLGHTPKLIAPHLVRPYVKSNKNDFADAEAICEAATRPTMRFVPVKTQSQQALAMSNSIRDSFIKDRTATANRIHAALLEVGISLAPGFKSINTLPALLEANSISQSFKKSLATLYRYFKYLDEEVKSQDKDVERQAAEDDLAARLMTMPCVGPITSTALAAELGDGRQFKCGRNYSASIGLVPKQHGTGDKTVLLGISKRGDRNQRRLLIQCARVYVRYLDRQKGWLADWVRQLLAHHHSNHVVCALANKLARIAWAIAAHHTEFDAGPSTMNA

SEQ ID NO: 18895 - protein, 342 aa, unidentified
  source 1..342: note = protein_40f5bd7
  REGION 6..147: note = RuvC_domain
  SITE 9: note = RuvC_P1
  SITE 52: note = RuvC_P2
  SITE 87: note = RuvC_P3
  SITE 89: note = RuvC_P4
  SITE 92: note = RuvC_P5
  REGION 211..295: note = Tnp_domain
  SITE 219: note = Tnp_P1
  SITE 249: note = Tnp_P2
  SITE 257: note = Tnp_P3
  SITE 258: note = Tnp_P4
  SITE 270: note = Tnp_P5
MTIVMIGIDLGKNSCSEAALDEQGSVVLRRRMRPTSIVEFAAKYVPCTVAMEACCGAHYLGRRLVAQGHTVKLMPPEYVRPYVKAQKNDDRDAEAIAEAATRPTMRFVELKSQEQLDVQSLHRVRSRLVGARTTLINQMRAVLLERGITVAQGRRKFEKALDGMLTDGALLAPGRLLDLLLDMRAEWSGLDRRIDALDQEFAQLARTDEVARRLTSIPGVGALNATALVAAVGRAEAFAQARDLGAWLGLVPRQHTTGGKPRLLGISKRGNTYLRTLLIRGARAALPSLAKADTALGAWLRGLQARCHPNTVVVALANKLARIAWVLMRRQTLFSAQRAATA

SEQ ID NO: 18896 - protein, 412 aa, unidentified
  source 1..412: note = protein_ac4bf21
  REGION 4..170: note = RuvC_domain
  SITE 7: note = RuvC_P1
  SITE 67: note = RuvC_P2
  SITE 107: note = RuvC_P3
  SITE 109: note = RuvC_P4
  SITE 112: note = RuvC_P5
  REGION 278..364: note = Tnp_domain
  SITE 286: note = Tnp_P1
  SITE 317: note = Tnp_P2
  SITE 325: note = Tnp_P3
  SITE 326: note = Tnp_P4
MLFVGDDWAEDHHDVEVEDAEGRRLARARLPEGIAGLTRLHELIAEHLTDDDVDPETGFVAQSVAIGIETDRGVWVSALVAAGYQVFPINPMSVARYRERHATGGAKSDRGDAHVLAEIVRLDRAHHRPIAGDSAEVEGLKLVARSHQAFIWDRTRHLLRLRGALREFFPAALEAFPELTSPEALELLERAPDPARAARLSRSKISAALTRAHRRDPEVKAAEIQTVLRAPALRQAPPIEAAYAVIVASAARLIAQLNTQIAELQAVVAEGFGRHPDAEILTSQPGLGPVLGARVLAEFGDDPDRYVDAKARKNYAGTSPITRASGTRRVVLARYARNKHLADATHQWAFCALTASPGARRYYDDIRARGVSHHAALRQLANRLVGILHGCLKTRALYREDTAWPDRTALAA

SEQ ID NO: 18897 - protein, 425 aa, unidentified
  source 1..425: note = protein_ec485bc
  REGION 26..178: note = RuvC_domain
  SITE 29: note = RuvC_P1
  SITE 77: note = RuvC_P2
  SITE 115: note = RuvC_P3
  SITE 117: note = RuvC_P4
  SITE 120: note = RuvC_P5
  REGION 285..371: note = Tnp_domain
  SITE 293: note = Tnp_P1
  SITE 324: note = Tnp_P2
  SITE 332: note = Tnp_P3
  SITE 333: note = Tnp_P4
  SITE 344: note = Tnp_P5
MKSASNTIDSESSGSLPEVAVNDVTGGIDWARDDHAVSIVDARGRELARTMVEHTAAGLRELTGFLGRHGVGEVAIERPDGPVVDTLLDAGLTVVVISPNQVKNLRGRYGSAGNKDDRFDAYVLADTLRTDRARLRPLIPDTDATIALRRACRARKDLVGHRVAAANQLRMHLRNVFPGAVGLFADIDSEITLAFLTRFDTQDRADWLTLQRLGAWLSRQGYSGRTDPAVLHQRLLHATRGATGEHATSQAHITHALVELLKTLVEQIKTLSTQIDRQLDEHADAHIFTSLPRAGRVRAARLLAEIGDCRAKFPTPESLTCLAGAAPSTRQSGKSRVAGFRWACDKQLRDAVCDFAADSRRANPWAAQLYNDAITRGKDHPHAVRILARAWLYVIWHCWQDHAAYDPTRHQALQRLLNQDQPEPA

SEQ ID NO: 18898 - protein, 399 aa, unidentified
  source 1..399: note = protein_ca9ec14
  REGION 9..163: note = RuvC_domain
  SITE 12: note = RuvC_P1
  SITE 60: note = RuvC_P2
  SITE 100: note = RuvC_P3
  SITE 102: note = RuvC_P4
  SITE 105: note = RuvC_P5
  REGION 271..357: note = Tnp_domain
  SITE 279: note = Tnp_P1
  SITE 309: note = Tnp_P2
  SITE 317: note = Tnp_P3
  SITE 318: note = Tnp_P4
  SITE 330: note = Tnp_P5
MDQGFDVYCGLDVGKSEHHATALNRAGERLFDKPLPQDEARLRELFTTLQQHGKVLMVVDQPNTIGALPVAVARDCGCEVAYLPGLAMRKAADLHPGKSKTDARDAFIIAETARAMPHTLRAVDRDSEVLSALKVLAGFDADLTHECTRAINRLRSLLLQIFPALERAFPGTVLTRPLVLELLIKYAGPTGLRAAGRSNVLRWARNHSRKDPVQLVDAIFTALGEQTVTVAGTEAVELVIPRVAAQIQELKHQRTIVAAEVEKLLDDFPLSTVLMSMPGVGIKTAATILLTIGDASSFRTSGHLAAYAGIAPVTRRSGTSIRGEFPARAGNKQLKNALFRSAWIASCHDPLSKAYYDRKRADGKKHNAAVICLARRRCDVLYAMLKNGTLYQAKTPQAA

SEQ ID NO: 18899 - protein, 341 aa, unidentified
  source 1..341: note = protein_5e26f4f
  REGION 7..149: note = RuvC_domain
  SITE 10: note = RuvC_P1
  SITE 53: note = RuvC_P2
  SITE 88: note = RuvC_P3
  SITE 90: note = RuvC_P4
  SITE 93: note = RuvC_P5
  REGION 210..294: note = Tnp_domain
  SITE 218: note = Tnp_P1
  SITE 248: note = Tnp_P2
  SITE 256: note = Tnp_P3
  SITE 257: note = Tnp_P4
  SITE 269: note = Tnp_P5
MKQFIRIGVDLAKKYFQIHALVSEGGPAVTRKLTRLKMREFFSQIEPCLVGMEACGSAHYWARELKAMGHEVLLMPPAYTKPYVKRGKNDAVDADACCEAMSRPGMRFVPVKSAEQQATLMLHKTRELLVKQRTMSVNALRGHLSEFGIIAAKGIGRVDELLELAGSDTTLPDAARAAVKVLALHLEELDKSIDDLDDTIASAHAQSETSRLLDEVPGVGKIIASVIAASVPDPSVFKSGRDFAAWLGITPRQNSTGGKQTLGAITKQGNRYIRKLLVLAATSLLRGVGKRKGALRDWIVAMLAKKPARLVTVALANKLARILWAMMKTGESFRTDMFAKA

SEQ ID NO: 18900 - protein, 341 aa, unidentified
  source 1..341: note = protein_297a0f5
  REGION 7..149: note = RuvC_domain
  SITE 10: note = RuvC_P1
  SITE 53: note = RuvC_P2
  SITE 88: note = RuvC_P3
  SITE 90: note = RuvC_P4
  SITE 93: note = RuvC_P5
  REGION 209..302: note = Tnp_domain
  SITE 217: note = Tnp_P1
  SITE 247: note = Tnp_P2
  SITE 255: note = Tnp_P3
  SITE 256: note = Tnp_P4
  SITE 268: note = Tnp_P5
MQDVTLIGIDLGKHGFHLHGQDKHGKSQLRRKFDRKHLITYLANLQPCTIVMEACAGAHWMARQLSALGHEAKLISPQFVRPFVKGNKNDFIDAEAICEAASRPSMRFVTPKTEAQQCLSALHRMRESLMRDRVKAINQVHGFLLEFGIGLPKGPAIIKRLPSVLAEHALPARLVSLIERLRAHIKYLDEQLDDIEKELGTQLQEDDLGQRLMAIPGVGPITASVLSTEMGDGKQYGCGRDFAASLGLVPQQHSTGGRANLLGISKRGDKNIRRLLVQCARSYMQHLDRHTDRLAQWVRSMLIRRHSNVVACALANKLARTAWAMAAHHTEYKMQEAATSL

SEQ ID NO: 18901 - protein, 425 aa, unidentified
  source 1..425: note = protein_7eec9c3
  REGION 14..170: note = RuvC_domain
  SITE 17: note = RuvC_P1
  SITE 66: note = RuvC_P2
  SITE 107: note = RuvC_P3
  SITE 109: note = RuvC_P4
  SITE 112: note = RuvC_P5
  REGION 279..366: note = Tnp_domain
  SITE 287: note = Tnp_P1
  SITE 317: note = Tnp_P2
  SITE 325: note = Tnp_P3
  SITE 326: note = Tnp_P4
  SITE 338: note = Tnp_P5
MTRPQLTPPAGVLVAIDIAKARNEVLIEVPGSGRRRRLSVLNTRAEHDRLIALLSNLGQPVTCGFEATGNYHRPIAWRLLQAGFAVRLISSVALARTREALHNGWDKNDPKDAQVMLHMIRIGASQVYHDPLAAGINDVQELSKTHDAVSRAKTEVLHRILTHYLPLYFPEVDRFRHNSRSDWFFAFLDRFPTPACITALSKEAFIASAWDVVGRKVAKAQLLGDIYETARSSIGLPVPPDAPAVSMFRLVIGEARGLIQQRDAIEATADALLTDCSDYKLLRCIPGIGPINALTILAEAGDLRRFGHHRQFLKFCGLDLATQQSGTFRGQTKLSKYGNARLRRTLWLAGQVAIRQRENGFRDKFERYIARDRHNADLRRKALTAITAKMARVVHAVIKTGADYRPFVEGPVPGGRTPLSRAVRA

SEQ ID NO: 18902 - protein, 326 aa, unidentified
  source 1..326: note = protein_81be08d
  REGION 1..98: note = RuvC_domain
  SITE 37: note = RuvC_P3
  SITE 39: note = RuvC_P4
  SITE 42: note = RuvC_P5
  REGION 161..246: note = Tnp_domain
  SITE 169: note = Tnp_P1
  SITE 199: note = Tnp_P2
  SITE 207: note = Tnp_P3
  SITE 208: note = Tnp_P4
  SITE 220: note = Tnp_P5
MESCGGTNYRARAFQRSGHTVKLISPQVVKPFVKTNKNDANDAQAIVEAASRPSMHFVPIKQVEQQDIQSIHRVRTRVVRNRTALINEIRGLCLEYGIVLTHGVGRVKSSLSAVIASSDNELTPSSRECMQDLYDELLDVDYRLKKLDPRIRSLCRQDERCKRILKISGIGELTATAIVAAVPDPREFRNGRHMSAWLGLVPRQSSSGDKQVLMGISKRGDRYLRTLLIHGARAVLSQSRNLDNDDSRWVGRKKPRWVITKRPSLWPTKMRGSFGRCWLQGMSLTMDHTQLLPDTQCQAVSINERKTIASLLQLILMMVNRSYRLF

SEQ ID NO: 18903 - protein, 340 aa, unidentified
  source 1..340: note = protein_c2f8e7d
  REGION 7..149: note = RuvC_domain
  SITE 10: note = RuvC_P1
  SITE 53: note = RuvC_P2
  SITE 88: note = RuvC_P3
  SITE 90: note = RuvC_P4
  SITE 93: note = RuvC_P5
  REGION 212..298: note = Tnp_domain
  SITE 220: note = Tnp_P1
  SITE 250: note = Tnp_P2
  SITE 258: note = Tnp_P3
  SITE 259: note = Tnp_P4
  SITE 271: note = Tnp_P5
MSKITTIGLDLAKNVFQVHATDETDGLVMRRALRRGQVLRFFAGLPSCLVGLEACATAHYWARELRALGHEVRLMPPQYVKAYVKRNKNDAADAEAICEAVKRRSMHFVPVKTVEQQSALLMHRGRELLVRQRTMLANALRGHLAEYGLIAAQGLHKVAGLIAIVRDERDARVPNMARQVLRVMAEQLGDLETRIAAIEAQIMAWHKSNPVSRRLATIPGIGPIIATAIAATVADPSVFRSGREFAAWLGLVPRQNSTGGKARLGGISKRGDSYLRRLLVNGAHAVLLRSRAARADPWLLALRGRRPRLVVAVALANKTARIAWAIMSKQDTYRRTIAAA

SEQ ID NO: 18904 - protein, 350 aa, unidentified
  source 1..350: note = protein_05308da
  REGION 13..155: note = RuvC_domain
  SITE 16: note = RuvC_P1
  SITE 59: note = RuvC_P2
  SITE 94: note = RuvC_P3
  SITE 96: note = RuvC_P4
  SITE 99: note = RuvC_P5
  REGION 218..303: note = Tnp_domain
  SITE 226: note = Tnp_P1
  SITE 256: note = Tnp_P2
  SITE 264: note = Tnp_P3
  SITE 265: note = Tnp_P4
  SITE 277: note = Tnp_P5
MAHRNLPRPAAVYGIDIGKNIFHVVGLSRDGTPVQRVRFRRDTLLQFFARADPSIVGMESCAGSQWLARKIQALGHKVRLIPAHFVKPYVKSNKNDIIDAEAIAEATTRPTMRFVTAKATDQVDLQALHRIRDQMVGSRTRLINQMRAFCLEYGVPLRQGAGLFKVDLPTALNDPENDLSPAMRRLLGDLHADLLRLEERIRQVTKEIEAIADREDVARRLMTIPGIGALGATALLAAIGDGQQFRKARDLAAWLGLVPRQYSTGGKQTLLGISKRGNRYVRKLLVHGARSCFRHLDPTRDRLGSWLDGLEARMHPNKAVVALAAKMARIVWAVLTKPGALYERRDPAFA

SEQ ID NO: 18905 - protein, 368 aa, unidentified
  source 1..368: note = protein_bec521b
  REGION 13..161: note = RuvC_domain
  SITE 16: note = RuvC_P1
  SITE 65: note = RuvC_P2
  SITE 101: note = RuvC_P3
  SITE 103: note = RuvC_P4
  SITE 106: note = RuvC_P5
  REGION 234..316: note = Tnp_domain
  SITE 238: note = Tnp_P1
  SITE 269: note = Tnp_P2
  SITE 277: note = Tnp_P3
  SITE 278: note = Tnp_P4
  SITE 289: note = Tnp_P5
MPRIAEQALPVTGGVDTHADVHVAAAVDQVGRVLGTQSFPADAAGYQAALAWMSAHGALARVGVEGTGSYGAGLARYLAACGVEVAEVIRPNRQARRQRGKSDSADAVAAALAALSGEASGVPKSRDGAAESIRAVRVARAGAVKARTQAGNQLRDLILTAPEQVRQQLAGLPRNRQVDVAARFRPHDLAGPAAGVRAAMASVARRHQALAAEIARLDAALEELVTHAAPAGFLAKRGVATVVAATLLATVGDNPGRVRREASFAALCGASPVDASSGKQLRHRLNRGGDRQANSALWTIAMTRLAHDPRTQAYAARRTTEGKTRKEIIRCLKRYIAREIYKTLCRPKQPGRDSAPQVKQDLSAKVLT

SEQ ID NO: 18906 - protein, 324 aa, unidentified
  source 1..324: note = protein_d97f2dd
  REGION 5..160: note = RuvC_domain
  SITE 8: note = RuvC_P1
  SITE 58: note = RuvC_P2
  SITE 98: note = RuvC_P3
  SITE 100: note = RuvC_P4
  SITE 103: note = RuvC_P5
  REGION 196..282: note = Tnp_domain
  SITE 204: note = Tnp_P1
  SITE 234: note = Tnp_P2
  SITE 242: note = Tnp_P3
  SITE 243: note = Tnp_P4
  SITE 255: note = Tnp_P5
MSTVVGIDVAKHTFDIATLQANGKHRTKAKLANDPKGFEVLLQWLNKHAEAQAWIVMEATGIYHEALAEWLYERGYQVCVLNPAQIAFYARSQLQRVKTDKVDAKLIADYGHRHQKELRAWKPEQPSIKRLKALTHRLKDLQELEQMEQNRLDVTSDAKVAASIQSVLGHIRQQIADTLKAIKQHFDDNDDLRGQRDLLKSIDGIADRTAALLLAELGDIQRFDDSRAVTAFAGLNPRLQESGKHKGHVRISRMGSALLRGGLYLPAVTSLTYNSAIRAMAERLRAKGKTGKQIVCAAMRKLLCIAYGVLKSGQPFNPQLAIAR

SEQ ID NO: 18907 - protein, 352 aa, unidentified
  source 1..352: note = protein_6741a40
  REGION 14..154: note = RuvC_domain
  SITE 17: note = RuvC_P1
  SITE 60: note = RuvC_P2
  SITE 95: note = RuvC_P3
  SITE 97: note = RuvC_P4
  SITE 100: note = RuvC_P5
  REGION 219..306: note = Tnp_domain
  SITE 227: note = Tnp_P1
  SITE 257: note = Tnp_P2
  SITE 265: note = Tnp_P3
  SITE 266: note = Tnp_P4
  SITE 278: note = Tnp_P5
MRTSQKTAGIITTIGIDLGKNTFHLIGFDRRGAIILQQKVSRGQLERRLANIPRCLIGMEACSGSHHIGRQLQAAGHDVRLIPAQYVKPFLKGHKNDYRDAEAIAEAVLRPTMHFVAIKTPEQMDLLALHRVRSRLVSQRTGVINQIRGFLIERGIIVRQGVVPLRKALPEILSSQTGPLSPRMIGLIADLTQDWRRLDERIAAVSAEIEALAEQDESCQRLMTVPGVGPIISSAVVAAIGNGAGFRQGRDFGAWLGLVPKQESTGDRTILGKISKRGNKYLRTLFVQAAHVVLVRRPRAAMRGLWPWIEQASKRLHRNMLAIALANKLARIAWAVLARGRAYQPRITADAA

SEQ ID NO: 18908 - protein, 358 aa, unidentified
  source 1..358: note = protein_de99482
  REGION 14..156: note = RuvC_domain
  SITE 17: note = RuvC_P1
  SITE 60: note = RuvC_P2
  SITE 95: note = RuvC_P3
  SITE 97: note = RuvC_P4
  SITE 100: note = RuvC_P5
  REGION 223..311: note = Tnp_domain
  SITE 231: note = Tnp_P1
  SITE 261: note = Tnp_P2
  SITE 269: note = Tnp_P3
  SITE 270: note = Tnp_P4
  SITE 282: note = Tnp_P5
MGKSREDFSKVTRVGLDLAKTVFQVHAVDAVGGVVATRKLRRGGVAEFFGRLAPCLVAMEACASAHHWGREIAALGHEVRLIPPAHVKPYVRRNKTDAADAAAICEAAMRPGQRFVPLRGMENQAELMRHRVRELLSSQRTALLNALRGHLSEIGIVAPQGAQHAYRLKRLLADGADENGEIVVPASVRGALAPLGAEIEALDAAIGEIDDELAAKAKADERARRLMTIPGIGPVIATAIVATVRDVESFAGGREFSAFLGLTPRQRSSGGKARSGRISKMGDRYLRKLLVVGATAALCHAGGHDDALRRWAKDTLKRKAGLKYAFKLTAVALANKLARIAFALLRSGAVYDDRPVAA

SEQ ID NO: 18909 - protein, 392 aa, unidentified
  source 1..392: note = protein_fcf2e4f
  REGION 5..164: note = RuvC_domain
  SITE 8: note = RuvC_P1
  SITE 61: note = RuvC_P2
  SITE 102: note = RuvC_P3
  SITE 104: note = RuvC_P4
  SITE 107: note = RuvC_P5
  REGION 267..354: note = Tnp_domain
  SITE 275: note = Tnp_P1
  SITE 305: note = Tnp_P2
  SITE 313: note = Tnp_P3
  SITE 314: note = Tnp_P4
  SITE 327: note = Tnp_P5
MMISVGIDVSKDKHDCFIVSSEGEVLADAFMIPNNIDGFHCLLQRIQDCATPQDKIKVGLEATGHYSYNLLGFLLDNGLTTYVLNPLRTNLYRKSLSLRKTKTDRVDARTIASMLLSDAGLKPYTNTAYHNEELKSLTRYRFDKVQERAKLKSSVSRLACILFPELEKLVPSVHIASVYALLEEFPGAKQVASAHLTRLKALLETASKGRYKRDMALAIRNAARNSIGSRMPAKSLELQHTIRLIRELDTEITEIEEQIQSIMDELHSPITTIPGLGFRMAAMILAEVGDFSRFDSPDKLLAYAGMSPSTYQSGQLKNCYPHMEKRGSRYLRYALFNATKYVCHWDTNFAAYLAKKRAEGKHYNVAISHAAKKLVRLIFAMEKSGIPYHLTV

SEQ ID NO: 18910 - protein, 392 aa, unidentified
  source 1..392: note = protein_e221db1
  REGION 4..162: note = RuvC_domain
  SITE 7: note = RuvC_P1
  SITE 60: note = RuvC_P2
  SITE 101: note = RuvC_P3
  SITE 103: note = RuvC_P4
  SITE 106: note = RuvC_P5
  REGION 265..352: note = Tnp_domain
  SITE 273: note = Tnp_P1
  SITE 303: note = Tnp_P2
  SITE 311: note = Tnp_P3
  SITE 312: note = Tnp_P4
  SITE 325: note = Tnp_P5
MIYVGIDVAKDKHDCFAMNSDGEILIEKMTIQNNFDGFNYLFNSISQFNESFENIKVGLEATGHYSNNILNFLTSKGFNVYVINPLQTNLYRKGQSLRKTKTDKLDARFIATMLITGNLKPYSNLSYHISELKSLVRHRFRLVQERSKFKTSLSRLVTLAFPELEKIVWSISQNSVLYLLNELPSVKDISKCNLKHLTCILEKYSNGKYSRDKAIEIRELARKSIGTNSRSLSFELKQVIQTVLFLQSQIDDIDKELKNLVVKLNSPIMSIPGISYVSAAFILAEIGDINNFDSPAKLQAFAGLDPSTYQSGKYTATHSVMVKRGSKYLRWALLNATRLVCMRDKTFNDYKNSKLAEGKHYFVALSHTSKKLIRVIYYLLKTNKSYQLPKVA

SEQ ID NO: 18911 - protein, 389 aa, unidentified
  source 1..389: note = protein_b484606
  REGION 12..164: note = RuvC_domain
  SITE 15: note = RuvC_P1
  SITE 61: note = RuvC_P2
  SITE 101: note = RuvC_P3
  SITE 103: note = RuvC_P4
  SITE 106: note = RuvC_P5
  REGION 268..353: note = Tnp_domain
  SITE 276: note = Tnp_P1
  SITE 305: note = Tnp_P2
  SITE 313: note = Tnp_P3
  SITE 314: note = Tnp_P4
  SITE 326: note = Tnp_P5
MAEAIRATVAYLGIDVGKRSHSACALDEDGGVVFRAGLENRPGDIDRLLERAGAGALVVVDQKRNIGALVLARALAHGNPCAYLPGYAEKQARGMFPGVAKTDAIDAEVIARTARGMPGALRPVAEEPEGAASLRILSSQREFAASARTRAKNRLRATLLEADPALERAVDPSRGWQVALLAEFGSAAGCSAAGWRRFSAAARRAGAPAAGARALWEALLTSARSGRALPAGEDVAVRMLAREIAALDADVAELEALVADSLAGNEVYECLLTVPGIGPKTAAALVTSIDVAMFRGHDELASYCGLAPADSRSGTSVRSASPQRGGNKQLKNLLIFSCNSLIGTDNRFGRYYDGCRARGMRHNKALKAVARKRLKVIYAIMRDAAPYSA

SEQ ID NO: 18912 - protein, 316 aa, unidentified
  source 1..316: note = protein_5a0401b
  REGION 10..153: note = RuvC_domain
  SITE 13: note = RuvC_P1
  SITE 57: note = RuvC_P2
  SITE 97: note = RuvC_P3
  SITE 99: note = RuvC_P4
  SITE 102: note = RuvC_P5
  REGION 193..277: note = Tnp_domain
  SITE 201: note = Tnp_P1
  SITE 230: note = Tnp_P2
  SITE 238: note = Tnp_P3
  SITE 239: note = Tnp_P4
  SITE 250: note = Tnp_P5
MNKMIVEKFVGIDVSKSTLDVCIEPAVQTLHVAYDEAGVRQVVSRLKEVKPILIVIEATGGLEVRIATELASLGLPVAVINPRQARDFAKATGQLAKTDQVDAAALAAFAKAIRPQARPLKDADTRALDDMVSRRRQLIDIRVQETLRLGTAASKPMQKSLNKHIAWLDKQITELDNDLAKRLRESDMWRAKDDLLRGIPGVGAVTTLTMLAKCPELGTLNRREIAALTGVAPLAKDSGKHRGKRFVWGGRADVRAVLYMATVSAIRCNDPIKAFAERLKKAGKPPKVVIVACMRKLLTIMNSMLKNNTPWNPKTT

SEQ ID NO: 18913 - protein, 341 aa, unidentified
  source 1..341: note = protein_dbcf0b3
  REGION 7..149: note = RuvC_domain
  SITE 10: note = RuvC_P1
  SITE 53: note = RuvC_P2
  SITE 88: note = RuvC_P3
  SITE 90: note = RuvC_P4
  SITE 93: note = RuvC_P5
  REGION 209..295: note = Tnp_domain
  SITE 217: note = Tnp_P1
  SITE 247: note = Tnp_P2
  SITE 255: note = Tnp_P3
  SITE 256: note = Tnp_P4
  SITE 268: note = Tnp_P5
MDDVTLVGIDLGKHSFHLHGQDARGNAVFRKKMSRKQLVEFFATFHACTVVMEACAGSHHMARKLAEFGHTVRLISPQFVRPFVKSNKNDFVDAEAICEAASRPAMRFVSPRTESQQTLSVLHRVRESMVRERTRTVNQMHGFLLEFGISLPIGKTAVTRLAAVLATNELPPRLVAILERLHQHFKYLEEQIGEIDQELARQLAEDEVGQRLMSIPGVGPVTASALAAKMGDAKQYGCSRDFAASVGLVPRQYSTGGKTNLLGISRRGDKNVRRLLVLCARAYMRGLEKRTGRLADWVRAMLAQRHSNVVACALANKLARTAWAIVARQTTFDAGFTSHPL

SEQ ID NO: 18914 - protein, 345 aa, unidentified
  source 1..345: note = protein_935cabf
  REGION 5..152: note = RuvC_domain
  SITE 8: note = RuvC_P1
  SITE 55: note = RuvC_P2
  SITE 92: note = RuvC_P3
  SITE 94: note = RuvC_P4
  SITE 97: note = RuvC_P5
  REGION 212..300: note = Tnp_domain
  SITE 220: note = Tnp_P1
  SITE 250: note = Tnp_P2
  SITE 258: note = Tnp_P3
  SITE 259: note = Tnp_P4
  SITE 271: note = Tnp_P5
MKHYAGLDVSVKETSLCILDETGRVCRELKVTSHPDDLVQVLRDPAWRLERVGLEAGPLSQWLYSGLAMAGLPVICIETRHTKAFLKAPVNKTDRNDARGIAQMMRVNLFRPVHVKTLTSQNRRALLTARTLLQEKAIAIENDIRGLLRNFGLKVGIIGKVKFEDRIRELVADLPELADIMACLLEARQSLRERLATLFRKVLAMVREDDVCRRLMTIPGVGPVVSLAFSATIDIPARFKNSKAVGPALGLTPVLNQSGESSRIGRVSLCGDAMMRALLYEAAQVLLTRVQKWSWLKAWAMTVARRRGLQKAIVALARRLAVIMHRLWSDGTEFRWTKESAVATA

SEQ ID NO: 18915 - protein, 407 aa, unidentified
  source 1..407: note = protein_2326bdf
  REGION 6..159: note = RuvC_domain
  SITE 9: note = RuvC_P1
  SITE 57: note = RuvC_P2
  SITE 98: note = RuvC_P3
  SITE 100: note = RuvC_P4
  SITE 103: note = RuvC_P5
  REGION 221..307: note = Tnp_domain
  SITE 229: note = Tnp_P1
  SITE 259: note = Tnp_P2
  SITE 267: note = Tnp_P3
  SITE 268: note = Tnp_P4
  SITE 279: note = Tnp_P5
MTAVMIGVDPHKATHTAVVIGAAEEPLGELRVRASAGQAEKLVAWAADWPERTWAVEGAAGLGRLLAQQLVAAGERVLDVQPKLASRVRLLQAGDTNKNDPNDALSVAVAALRSKAARPVMAEDYPAVLKVWSKRHRDLARLRNQAACRLHAVLCDLVPGGHPKEISAAQAARILEQASPSGAVDQARAELAAEFLEDMRHLDAQLRGTRKKLAAAVRASGTTLTEVFGVGPVIAGTIIGDIADVSRFPGRDHFAAYNGTAPVEVSSGNRKTHRLSLRGNRRINHAIHMAAITQIRHKHSDGRAYYDKKVAEGKTHKEALRSLKRQISNAIYACLLADARRAGQQPAQRAREGNRGTTLTPARPAHTPNAGSSDKPLPDPGTTIRPGTRAATPSLPKPTSKKTPATT

SEQ ID NO: 18916 - protein, 285 aa, unidentified
  source 1..285: note = protein_dec66c9
  REGION 1..50: note = RuvC_domain
  REGION 155..242: note = Tnp_domain
  SITE 163: note = Tnp_P1
  SITE 193: note = Tnp_P2
  SITE 201: note = Tnp_P3
  SITE 202: note = Tnp_P4
  SITE 215: note = Tnp_P5
MIRFGRFTETPLANETMLALKQLSRFRNSLVHSVSDLKRKAIVVLDQTFPEYHTVFSDIFGKTSAEVLMEYTTPSDFEHVSVDQLTEMMEKASRKKIGENKAKHLLQIASQSFGVTFCKDAFSFQLKMLLEQIKFIEEQIKHCEQQMGEYLVELNTPITTIPGIGSILGATILSEIGDIHRFDKPAKLVAYAGIDASISQSGQYEASKSSMSKRGSSHLRRALFQAAISGYRSDPVLKAFYEKKRAQGKHYYVCIGAVARKLCYIIYAVLKNNKPYEIHHHTPKK

SEQ ID NO: 18917 - protein, 367 aa, unidentified
  source 1..367: note = protein_1999177
  REGION 8..157: note = RuvC_domain
  SITE 11: note = RuvC_P1
  SITE 61: note = RuvC_P2
  SITE 97: note = RuvC_P3
  SITE 99: note = RuvC_P4
  SITE 102: note = RuvC_P5
  REGION 222..310: note = Tnp_domain
  SITE 230: note = Tnp_P1
  SITE 259: note = Tnp_P2
  SITE 267: note = Tnp_P3
  SITE 268: note = Tnp_P4
  SITE 280: note = Tnp_P5
MFTERTSIGMDVHARSVRAAALDTVTGEVIEATVGPAVPLVVDWVRQLVEAGHGPVAVTYEAGPTGYGLARALASAGIRCEVAAPSKLIRPSGDKVKTDKRDALLLARLLRMEEIISVRVPTLTEEAARDLVRARADVRGDLMSARHRLGKLLLRHGHVYNGGEAWTGKHDAWLRQLRFDLAGTAAAFDLYYARTTDLVTARKRLDGQIAVLAADSEFTPVTRRLACLRGISTLTAFSLAVELGDWHRFTGSTIAAYLGLVPSEHSSGQSKNRGAITKAGNPHARRLLIEAAWHHKAQYKPGKTMQDRWALAPAAAAERGDAGNRRLHRRWQALTEHKKKHTVANTAIARELAGWCWSLAVLETTTT

SEQ ID NO: 18918 - protein, 309 aa, unidentified
  source 1..309: note = protein_32f7be5
  REGION 8..154: note = RuvC_domain
  SITE 11: note = RuvC_P1
  SITE 54: note = RuvC_P2
  SITE 94: note = RuvC_P3
  SITE 96: note = RuvC_P4
  SITE 99: note = RuvC_P5
  REGION 190..274: note = Tnp_domain
  SITE 198: note = Tnp_P1
  SITE 227: note = Tnp_P2
  SITE 235: note = Tnp_P3
  SITE 236: note = Tnp_P4
  SITE 247: note = Tnp_P5
MKEPSVYVGVDVAKEWLDVAWGTEHQRVTNCRRGWKQLGDWLGESEVPVHVICEASGGYERGLVKALQGYGIKVSIAQATRVRQFARAVGIAAKTDEIDAQVLCAYGYALRPCVSATLGPEQEKLRELERQRRHLTRLLVAEQTRGLQLCEAVTRTSNRSLIRQLTKQIDSIDLLIEKVIDQSEELTAKAKKLTAISGVGRRTAALLLAQMPELGLLNRGQAAALAGLAPLNRDSGKWRGKRTIFGGRRAVRSGLYMAALVATRHNPILAAFYQRLRAAGKPPKLALTATMRKLLLILNSSLKPQSMYA

SEQ ID NO: 18919 - protein, 349 aa, unidentified
  source 1..349: note = protein_cd9f274
  REGION 15..157: note = RuvC_domain
  SITE 18: note = RuvC_P1
  SITE 61: note = RuvC_P2
  SITE 96: note = RuvC_P3
  SITE 98: note = RuvC_P4
  SITE 101: note = RuvC_P5
  REGION 220..306: note = Tnp_domain
  SITE 228: note = Tnp_P1
  SITE 258: note = Tnp_P2
  SITE 266: note = Tnp_P3
  SITE 267: note = Tnp_P4
  SITE 279: note = Tnp_P5
MKASTGGFSHEGPRCGVDIGKTVFHLVGLSKEGHIVTKKRFSRKQLVTFTVNLPTCLIGIEACPGAHFLARVLLKQGHNVKLMPAEYVRPFVKSNKNDYVDAEAIAEAVQRPTMRFVPVKNEAQLDLQALHRVRDRWIGRRTAVINQLRGFLLEHGITVAVGPAHLRRQIPSILEDADNLLSPRMRTLLSELREEWEKLEEQIDTTTRELAQFAKQEEGCRRLLTIPGIGPLTATALTAAIGNGAAFRKGRDLAAWLGLVPREHSTGGKARLLGISKRGDPYLRRLFVHGGRAVLGQVKRERHQFGGWLDRLEARSPRNVAIVAMANKIARMAWAVLTSGQSYNAALTS

SEQ ID NO: 18920 - protein, 326 aa, unidentified
  source 1..326: note = protein_fdc226a
  REGION 6..164: note = RuvC_domain
  SITE 9: note = RuvC_P1
  SITE 63: note = RuvC_P2
  SITE 103: note = RuvC_P3
  SITE 105: note = RuvC_P4
  SITE 108: note = RuvC_P5
  REGION 274..325: note = Tnp_domain
  SITE 282: note = Tnp_P1
  SITE 312: note = Tnp_P2
  SITE 320: note = Tnp_P3
MMNPVIGLDVAKGESQVQAFLDKKQPYKKSFKVAHTLEGLTILLEFIREIEVASGERPPIVLESTGHYHTPVVQFFEDRGYLIIMVNPLVSYRAKSSSLRKVKTDIIDARHLCEMFYKEDLEPYKQRGIQLLNLRHLTRQHENITGMYVQTKLQFQSVLDQVFPEYCGVFGDLYSDVSLLTLQAFPTSEEVIATREETVAKKIKEFCKSRSQKWANSQSEKLKAAADRNPFQKTLYNSLILSINMYIKMLLEYKKHLSDLEREIDALAKSMEEYKILQSIPGIGEKIAATIISEIGEIDRFNHPKKLVAFAGIDPSVFESDYQKRF

SEQ ID NO: 18921 - protein, 334 aa, unidentified
  source 1..334: note = protein_d6c5b66
  REGION 4..148: note = RuvC_domain
  SITE 7: note = RuvC_P1
  SITE 53: note = RuvC_P2
  SITE 88: note = RuvC_P3
  SITE 90: note = RuvC_P4
  SITE 93: note = RuvC_P5
  REGION 209..295: note = Tnp_domain
  SITE 217: note = Tnp_P1
  SITE 247: note = Tnp_P2
  SITE 255: note = Tnp_P3
  SITE 256: note = Tnp_P4
  SITE 268: note = Tnp_P5
MIHVGVDLHQRFCYMTALDSRGRQLNAQAVPNEAAALQAYFRQFRKPVQVAVEACSFWPAFRAAVGQQVEVRLVHSLRVKAIAAAKLKNDRVDSATLAHLLRCDLLPQAWMADEETRGLRQQVRLRATLVRQRTRLKNQVHAILHQQGLRHRFTDLFGRAGRQWLQQAPLPAVAQKAVSTYVELIDHFNLQIEQQDRAVQQFTRSEERAKWLMTIPGIGAYSAMMLLAEIGTIKRFANKRALSNYAGLVPWVRESADKRRSGGITRVGSPWLRWIMVEAAQTAVRTSPAVAGYFQRLSRRKHRNVAIVAVAHKLLVAVWALLQHGECFEEGNFK

SEQ ID NO: 18922 - protein, 338 aa, unidentified
  source 1..338: note = protein_ad3a1b8
  REGION 7..152: note = RuvC_domain
  SITE 10: note = RuvC_P1
  SITE 53: note = RuvC_P2
  SITE 88: note = RuvC_P3
  SITE 90: note = RuvC_P4
  SITE 93: note = RuvC_P5
  REGION 211..296: note = Tnp_domain
  SITE 219: note = Tnp_P1
  SITE 249: note = Tnp_P2
  SITE 257: note = Tnp_P3
  SITE 258: note = Tnp_P4
  SITE 270: note = Tnp_P5
MSIIKVIGIDLGKSSFHLVGHDHTGREQFRKHLTRLKLIQFLSQTPKTMIAMESCGGSQWLARKCQALGHEVKLIPPQYVKPYVKTNKNDYIDADAIAEACTRPSMRFVGVKTETSQVISVIQRVRSSYIKERTACMSRIGAILLEFGMSFPRGHAKMKVLFQWLADNGEPLPTMLMQELIEHHEYYLLLNERIAGQDKKLKQLVEQDVRAQLLKTIPGVGDLTAAQCLADISDVTHFKNGRQMAAWIGLVPHQYSTGGKSTLLGISKRGNKALRTLFIHGARAMLSRPEKAVAVFGEWILELRARKPFNVAVVALANKLVRIAWSVLSTKQAFEIRV

SEQ ID NO: 18923 - protein, 356 aa, unidentified
  source 1..356: note = protein_02835f5
  REGION 8..161: note = RuvC_domain
  SITE 11: note = RuvC_P1
  SITE 67: note = RuvC_P2
  SITE 107: note = RuvC_P3
  SITE 109: note = RuvC_P4
  SITE 112: note = RuvC_P5
  REGION 208..295: note = Tnp_domain
  SITE 216: note = Tnp_P1
  SITE 246: note = Tnp_P2
  SITE 254: note = Tnp_P3
  SITE 255: note = Tnp_P4
  SITE 268: note = Tnp_P5
MSVQKQSIGIDISKDSFTACFCLLHQDGHLQFSDVKKFKNNKSGFNQLVRWTRKVKQATLPIGFLMEATGVYYENLANHLYDIKQQVHVVLPNTSKHYFSSLNIKTKTDELDAKVLSQFGVERMHKKWIKPNETYLHLRNLCRYYVQLQEQKTALGNIKHSKESAHEVQKLILKSNTKLIKEIDKQIVDIKKEIEKLIKQDELLSKKVDKLLTIKGVGILTIATIIAETLGFQFVKNVKQLSSYAGYDVVQRESGTSIKGKTRISKKGNRYIRNALYFPAMVACRYNENLKKSYIRIIEKKPSKMIGQVAIQRKLLILIYTLWKKDEEYDSNFAKKNSSTESCEATQDRMIETILP

SEQ ID NO: 18924 - protein, 343 aa, unidentified
  source 1..343: note = protein_2a475bb
  REGION 5..152: note = RuvC_domain
  SITE 8: note = RuvC_P1
  SITE 55: note = RuvC_P2
  SITE 92: note = RuvC_P3
  SITE 94: note = RuvC_P4
  SITE 97: note = RuvC_P5
  REGION 212..300: note = Tnp_domain
  SITE 220: note = Tnp_P1
  SITE 250: note = Tnp_P2
  SITE 258: note = Tnp_P3
  SITE 259: note = Tnp_P4
  SITE 271: note = Tnp_P5
MDHFAGLDVSVKDTSVCVVDEAGKIIREVKVASEPDALLTVLNNPAYHFKRIGLEAGPLSQWLLSALAEASLPMICVETRHMRAVLKARINKTDRNDARGIAQMMRVGLYRPVHVKTLRSQKLRTLLTHRKLLQSKALAIENDLRATLRNFGLKVGMVGTAKFEARIKELIESLPDLTLLVEPLLVVRRALREQIGILHRRLLAIVRDDEVCRRLMTVPGVGPVVALTYRATVDVPGRFRKSKSVGAVFGLTCSRDQSGERDRPGAISRCGDEMMRAMLYEAAQNMLVRSTRWSWLKAWAMQIVKRRGMKRAIVALARRLAVIMHRIWIDGTKFCWTREAAAA

SEQ ID NO: 18925 - protein, 408 aa, unidentified
  source 1..408: note = protein_13db70e
  REGION 4..165: note = RuvC_domain
  SITE 7: note = RuvC_P1
  SITE 62: note = RuvC_P2
  SITE 102: note = RuvC_P3
  SITE 104: note = RuvC_P4
  SITE 107: note = RuvC_P5
  REGION 273..359: note = Tnp_domain
  SITE 281: note = Tnp_P1
  SITE 312: note = Tnp_P2
  SITE 320: note = Tnp_P3
  SITE 321: note = Tnp_P4
MLFVGDDWAEDHHDVELMDTSGRTLVKARLPEGVAGIARLHAMIGAELGEDVPDAAGQVTIGIETDRGPWVRALIAAGYTVFAVNPLQAARYRERLGVSGAKSDAADAHMLADMVRTDAHQLRPVAGDSVQAEAVKVVSRMHKTLIWERTRATQRLRHALREYFPAALTAFADLDAVDTLELLGRAPDPASAARLSISQISAALKQARRRDVAAKAATIQAVLRGEQLGQPAVVTAAYAATVRALVAVLGTLNEQVKAMQGQVEAHFGQHPDAEIILSQPGLGAILGARVLAEFGDARTRYVSAKARKNYAGTSPITRASGKKRTVAARFVHNDRLIDALITQAFASLHASPGARAYYDRQRARGATYNAALRQLANRLVGILHGCLKTGTPYNETTAWSHHLGGAVA

SEQ ID NO: 18926 - protein, 344 aa, unidentified
  source 1..344: note = protein_20e54c3
  REGION 6..147: note = RuvC_domain
  SITE 9: note = RuvC_P1
  SITE 52: note = RuvC_P2
  SITE 87: note = RuvC_P3
  SITE 89: note = RuvC_P4
  SITE 92: note = RuvC_P5
  REGION 211..297: note = Tnp_domain
  SITE 219: note = Tnp_P1
  SITE 249: note = Tnp_P2
  SITE 257: note = Tnp_P3
  SITE 258: note = Tnp_P4
  SITE 270: note = Tnp_P5
MKLTTVGIDLAKNVFQVHGIDEHGKVLVKKQLRRDQMATFFVNLPPCLLGMEACGSAHHWARKLQAMGHTVRLMAPQFVKPYVKTNKNDAADAEAICEAVGRPNMRFVPIKNVEQQAVLALHRVRQGFVKARTAQANQIRGLLGEFGLVVPQGIGYIASRVPELIEDADNELPGSFRVLVQRLLDHLKELERQVEELEAQIQAWHRSSDLSSRLAQVPGIGPITASALVASIGDAKNFDGGRQLAAWLGLVPRQHSSGGKSNLLGMSKRGDSYLRTLLIHGARSVIYRAGQKADPCSWVNAVVQRRNKNVAAVALANKNARIVWALLAHDRRYETGYRKAAKVA

SEQ ID NO: 18927 - protein, 343 aa, unidentified
  source 1..343: note = protein_ffc5e95
  REGION 7..149: note = RuvC_domain
  SITE 10: note = RuvC_P1
  SITE 53: note = RuvC_P2
  SITE 88: note = RuvC_P3
  SITE 90: note = RuvC_P4
  SITE 93: note = RuvC_P5
  REGION 212..303: note = Tnp_domain
  SITE 220: note = Tnp_P1
  SITE 250: note = Tnp_P2
  SITE 258: note = Tnp_P3
  SITE 259: note = Tnp_P4
  SITE 271: note = Tnp_P5
MQTVTTIGLDIAKSVFQVHGVDAAGQVVVRRQLKRRYVLTFFQKLPSCLVGIEACASSHYWSRELQALGHTVRLMPPAYVKPYIKRQKNDAADAEAICEAVTRANMRFVETKTPEQQSCLMLHRTRHLFIRQQTAVINAIRAHLAEFGIVAPVGRNGVEELLGVVADPSDKRVPEIARTCLAALGAQLRMLKAQILEFDRMINAWHRSNETSKRLDEIPGVGPALATALVASITDPKAFRSGRDFSAWIGLVPKQHSSGGREKLGSISKQGDRYLRSLFTAGALAVIRYAKIHGTKHRPWLTALLARRPTKIAAIALANKIARMAWAMMAKGERYKEPVALAA

SEQ ID NO: 18928 - protein, 331 aa, unidentified
  source 1..331: note = protein_bfd4991
  REGION 7..158: note = RuvC_domain
  SITE 10: note = RuvC_P1
  SITE 59: note = RuvC_P2
  SITE 97: note = RuvC_P3
  SITE 99: note = RuvC_P4
  SITE 102: note = RuvC_P5
  REGION 202..289: note = Tnp_domain
  SITE 210: note = Tnp_P1
  SITE 240: note = Tnp_P2
  SITE 248: note = Tnp_P3
  SITE 249: note = Tnp_P4
  SITE 262: note = Tnp_P5
MKFEEVIGIDVSKLTLDAFIHSHQIFTQVPNTKKGYSKLLTWATKSTGCSMDNVLFCFEHTGMYSYALACHMTEKQMNYIMVPGLEIKRSLGIQRGKNDRVDAMRIAQYAYRRREEVTTYQLPEKAINKIRQLLSLREKLVKQCAGYEASLKDLPDFIESSESKVLVGVQRNMIKALAREIEKVEKEIDSVLESSPDIMNNYRLITSITGVGRQTALYLIIVTNNFLSFDDHRKLASYAGVAPFANTSGTSIKGRTKVSPLANRKLKSLLSACAVSAIRHDPEMKLYFNRRTEMGKHKMNSINAVRNKLLARVFAVVRRGSPYVPLCQYAA

SEQ ID NO: 18929 - protein, 389 aa, unidentified
  source 1..389: note = protein_29b6354
  REGION 1..142: note = RuvC_domain
  SITE 41: note = RuvC_P2
  SITE 79: note = RuvC_P3
  SITE 81: note = RuvC_P4
  SITE 84: note = RuvC_P5
  REGION 250..336: note = Tnp_domain
  SITE 258: note = Tnp_P1
  SITE 289: note = Tnp_P2
  SITE 297: note = Tnp_P3
  SITE 298: note = Tnp_P4
MVLDEAGRQVDSRRFAHSHDGLNELKQCVLRIAASPEQLACIVETSHGLLIAFLLEAGFPVYPVNPKTANQLRKAAGAKTDRIDAYLLAKTGRFDLAELRRLEPDSATVHELKTLTRDQDALIQTQTRLVNQLTACLKEYYPAALHLFAKVQQRSTLVFLQAYPTPQAALSASVEEITATLRTGKHTNPGRVAPKIVAELHRPQLVASPVIVRAKSRLMLSLVKQLLVVIQEIASYDKAIRPLFLCHPDQELWRSLPRAGKRLAPRLLAEWGDDRSRYADGNAVQTLAGTAPVPYESGKYAKAHTRFACVKPLRNALHQFAWQSTRQEAWALDYYRRKRAQGKTHSMAVRALANVWVRIIYRMWLTKTCYHTATFEAARLAHAPRQHAA

SEQ ID NO: 18930 - protein, 330 aa, unidentified
  source 1..330: note = protein_6b61184
  REGION 8..155: note = RuvC_domain
  SITE 11: note = RuvC_P1
  SITE 59: note = RuvC_P2
  SITE 97: note = RuvC_P3
  SITE 99: note = RuvC_P4
  SITE 102: note = RuvC_P5
  REGION 202..289: note = Tnp_domain
  SITE 210: note = Tnp_P1
  SITE 240: note = Tnp_P2
  SITE 248: note = Tnp_P3
  SITE 249: note = Tnp_P4
  SITE 262: note = Tnp_P5
MKKWNYTLGIDVSKNTLDIHCSEINQHIQIQNGSEGFKHWLKWCKDHKIALEQSFIVMEHTGGYEYKLIQFCESKNLQYARIPGLAIKRSMGITRGKNDKVDAARIAQYGEEKHKILEPAKPLNKTTIALKELLGFRKRIVRELAGYKTTLKERKQMYPDLKSDVICKMLENRIKENTKLIAKLDTELMAITEANEAIKINFELLTSIRGIGMVNALMTIAYTENFVCFNNPRSYAVYVGVVPFDYSSGTSIRGRKKVSPIANKELKQELTQAARSAVQWDPELREYATRKMNNKCYNIVLNNVKFKLILRMFAVVKRKEKYVDNYTKAA

SEQ ID NO: 18931 - protein, 341 aa, unidentified
  source 1..341: note = protein_320e7c2
  REGION 6..146: note = RuvC_domain
  SITE 9: note = RuvC_P1
  SITE 52: note = RuvC_P2
  SITE 87: note = RuvC_P3
  SITE 89: note = RuvC_P4
  SITE 92: note = RuvC_P5
  REGION 211..296: note = Tnp_domain
  SITE 219: note = Tnp_P1
  SITE 249: note = Tnp_P2
  SITE 257: note = Tnp_P3
  SITE 258: note = Tnp_P4
  SITE 270: note = Tnp_P5
MEIDVLGIDLAKQIFQLHGADRRGRVVHRSKVSRSSFFESVRTLNPRVIIMEAFSTAHHWARSFQSIGIEVRLISPQYVTPFVKTNKNDRNDAEAIVEAASRPTMRFVTIKSVEQQDMQAAHRMRAILLRHRTALINQMRGLLGERGLTIARSPEAFKRAIPELLRTSADELTSFCQTLLTELLQHLGAIEERVRLIEASIQSFMKRSTLCRKIAEIPGIGPITATAIVAAVGDARQFRNGRHLSAWLGLVPRQYSSGGKPRLHGISRRGDAYLRTLLIHGARAVLRYAPTKTDPQSIWLQELMARRGHNCAAVALANRNARIIQALLSSDAPYMTQSAAA

SEQ ID NO: 18932 - protein, 339 aa, unidentified
  source 1..339: note = protein_6bb4e2f
  REGION 6..147: note = RuvC_domain
  SITE 9: note = RuvC_P1
  SITE 52: note = RuvC_P2
  SITE 87: note = RuvC_P3
  SITE 89: note = RuvC_P4
  SITE 92: note = RuvC_P5
  REGION 210..295: note = Tnp_domain
  SITE 218: note = Tnp_P1
  SITE 248: note = Tnp_P2
  SITE 256: note = Tnp_P3
  SITE 257: note = Tnp_P4
  SITE 269: note = Tnp_P5
MNSMAVGVDIAKQVFQVHYVDPATGEIVNKAIKRATFLEHFANRAPCLIGMEACGGAHHWARQFIQMGHEVRLMPAEFVKAFNIRNKNDAADARAIWLAVQQPGKPVAVKTEMQQAMLALHRMREQLVKFRTMQINGLRGLLTEYGEVMSRGRGKLDAEIPAALGRLAERLPAVLIDTLREQWNGLAKLDGQVAGIERRMREWKKEDRAVKAISEIPGVGPLTATAAVAMMGDPKAFRSGREFAAWAGLVPKQTGSGGKVNLHGISKRGDTYLRTLLIHGARSVLWHAKEPGLWIEQMKKRRPTNVVVVALANKIARTIWAVLAHDRPYQKDYVSAKPA

SEQ ID NO: 18933 - protein, 324 aa, unidentified
  source 1..324: note = protein_f3a3c46
  REGION 4..150: note = RuvC_domain
  SITE 7: note = RuvC_P1
  SITE 52: note = RuvC_P2
  SITE 92: note = RuvC_P3
  SITE 94: note = RuvC_P4
  SITE 97: note = RuvC_P5
  REGION 191..279: note = Tnp_domain
  SITE 199: note = Tnp_P1
  SITE 229: note = Tnp_P2
  SITE 237: note = Tnp_P3
  SITE 238: note = Tnp_P4
  SITE 252: note = Tnp_P5
MTYIGIDISKDSFVAAFPKVSGYQTQTYPNTVKGIRKFIGSLSVTEHHCVMEATGNYGSLLLYLLDRQGIAASMVNPKQIKHFSRMMMTVTKTDPKDACMIAMYGEKMNPPVYKMPSETVMLLKQKKTIIRQLKKQLTASKNLKSSLVVLPLQDKNGMKALDKTISFLASQIESLESELADLASSEFDRQVKLLTSIKGIGITLATALIVATGGFSYFNNAKASFPFYRDMPELPTVRNIRTYQKGGINRNGDASLRSLLYVASWSALRGNTTCKECYTRLKANGKPSKVALIAVANKLVRQAFAVIKSDSPYVDGFVSTRQTK

SEQ ID NO: 18934 - protein, 388 aa, unidentified
  source 1..388: note = protein_be89640
  REGION 4..159: note = RuvC_domain
  SITE 7: note = RuvC_P1
  SITE 57: note = RuvC_P2
  SITE 98: note = RuvC_P3
  SITE 100: note = RuvC_P4
  SITE 103: note = RuvC_P5
  REGION 264..351: note = Tnp_domain
  SITE 272: note = Tnp_P1
  SITE 302: note = Tnp_P2
  SITE 310: note = Tnp_P3
  SITE 311: note = Tnp_P4
  SITE 324: note = Tnp_P5
MFFLGIDIGKNSHVASLIDDKKKVIFKAFSFSNSTEGANSLIKKLEPFCDSLDIAMEATGHYWINLFSFLLQKNFSVHLINPIQTDGWRNSTEIRKRKNDTIDSILIADLLRYGDFVESTLSNEDYLSLKNLTRFRSYLISSTGDLKRKTIALLDQVFPEYEKCFSDVFGKTSKEILLSFTTPQEFENISSSKLTKALENITLKKFAKKKIEELSEKAKTTIGIKFCLDSFSLQIKMLIEQIIFIETQVESIEEEISTIMSKLDSPITTIPGIGSVIGATILGELGDISRFSNASKVVAYAGLDSVVSQSGNYEAKSMSISKRGSSYLRKVLFQAALRAEFCDPVFSDYYQKKIAQGKHHLVATNAVARKLCYTIFAVLTKNEAYKIQ

SEQ ID NO: 18935 - protein, 391 aa, unidentified
  source 1..391: note = protein_7db1e68
  REGION 4..163: note = RuvC_domain
  SITE 7: note = RuvC_P1
  SITE 60: note = RuvC_P2
  SITE 101: note = RuvC_P3
  SITE 103: note = RuvC_P4
  SITE 106: note = RuvC_P5
  REGION 266..353: note = Tnp_domain
  SITE 274: note = Tnp_P1
  SITE 304: note = Tnp_P2
  SITE 312: note = Tnp_P3
  SITE 313: note = Tnp_P4
  SITE 326: note = Tnp_P5
MICVGIDVAKDKHDCFILSSEGEVLADVFTIQNNAEGFNFLLQTIRCCTRPTDKIKVGLEATGHYSYNILGFLLDCGLPTYVINPLHTNLYRKSLSLRKTKTDRVDARTIATMLMSDVDLKSYTDTSYHNEELKSLTRYRFEKVRERAKLKTSVSRLVTILFPELEKLVPTIHLASVYTLLSEFPGAHQIAVAHLTHLKAILSGASKGHYDRDKAVEIRDAARNSIGSQMPAKSLELKHTIQLIQVLDAEIEEIEEEINSIMDEVHSPITTIPGIGTRMGAMILAEVGDFSNFDSADKILAYAGLSPSTYQSGQLTNCYSHMEKRGSKYLRFAIFNATKYVCLWDPTFAAYLAKKRAEGKHYNVAISHAAKKLVRLIYAMEKSGRPYRPAL

SEQ ID NO: 18936 - protein, 340 aa, unidentified
  source 1..340: note = protein_6b4651c
  REGION 10..155: note = RuvC_domain
  SITE 13: note = RuvC_P1
  SITE 55: note = RuvC_P2
  SITE 95: note = RuvC_P3
  SITE 97: note = RuvC_P4
  SITE 100: note = RuvC_P5
  REGION 190..249: note = Tnp_domain
  SITE 198: note = Tnp_P1
  SITE 227: note = Tnp_P2
  SITE 235: note = Tnp_P3
  SITE 236: note = Tnp_P4
  SITE 248: note = Tnp_P5
MAMRVSKSVIGVDVAKIELVTYQADSDLLALIPNEKPAIKRWLKTLPRPAALAVEATNIYHVDLVELAYQAGFDVYIIDGFQLSNYRKGVGGRSKTDASDARLLARFLKNEGECLRPWTPPPAVYGKLQSLLRRRASLIQAKTSLTQSWANDASLKASFAAFLKSIERLDLLVKKKLKDALREAGLLEQVARCQAVEGIGFLTATALVMAYSRGDFNSSDSYIAFLGMDLRVTDSGQKNGRRSLTKRGFLGMDLRVTDSGQKNGRRSLTKRGCSEIRRLLHNAAMSASRTSAWKEFYNHHRSRGKATTEVLVMLARKLARVAFALMKNQSEYQPRGSVMA

SEQ ID NO: 18937 - protein, 268 aa, unidentified
  source 1..268: note = protein_db94466
  REGION 2..70: note = RuvC_domain
  SITE 9: note = RuvC_P3
  SITE 11: note = RuvC_P4
  SITE 14: note = RuvC_P5
  REGION 132..217: note = Tnp_domain
  SITE 140: note = Tnp_P1
  SITE 170: note = Tnp_P2
  SITE 178: note = Tnp_P3
  SITE 179: note = Tnp_P4
  SITE 190: note = Tnp_P5
MFATGQGRKTDATDAHSVALVGTRMAGLRPFVDDEQLAVLQTLVDRRRSLGDDHIRMISQLHQVLLLLIPGGAKRFLSAAQAKSLLATVRPRDAAGKARRRVAAELIADLERVYRRSKAADKELEALVRETGTSLMDLKGIGPSGAARLLVEVGDITRFPSKAHFGSWTGTAPIDASSGDHVRHRLSRGGNRQINRVLHTMAVVQLRRPTPGRVYCDRRKSEAKTSMEAMRALKRRLSDVVYRTMLHDAIKGVGTWPDGPGRTPGDDY

SEQ ID NO: 18938 - protein, 401 aa, unidentified
  source 1..401: note = protein_8a42c5f
  REGION 9..163: note = RuvC_domain
  SITE 12: note = RuvC_P1
  SITE 60: note = RuvC_P2
  SITE 100: note = RuvC_P3
  SITE 102: note = RuvC_P4
  SITE 105: note = RuvC_P5
  REGION 270..355: note = Tnp_domain
  SITE 278: note = Tnp_P1
  SITE 308: note = Tnp_P2
  SITE 316: note = Tnp_P3
  SITE 317: note = Tnp_P4
  SITE 329: note = Tnp_P5
MTSGYQVFLGVDVGKGEHHAVALDPGGKRLHDAPLPNTEPKLRAVFDKLARHGTVLVVVDQPATIGALPVAVARAVGHRVAYLPGLAMRRIADLYPGNAKTDARDAHVIADAARTLPHTLRAVDTGDDTLAEPGVLVGFDDDLAAEATRISNRIRGLLTGIHPALERALGPRIAHPAVLEILSRCGGPTGIRKAGRRKVAAIATAHAPRMGDRLVEQIWTALDEQTVTVPGTTAADTVLPRLADSLKAVLLQRKSVADEVEGMLDAHPLAPVLISMPGIGVRTAARILLEVGDASGFASSAHLAAYAGIAPVTRRSGSSIKGEHPARTGNRKLKRAFFLAAFAALSDPTSRAYYQRKRDEGKKHNAALICLARRRCDVLFAMLRNKTHYRHPETTPAPAAA

SEQ ID NO: 18939 - protein, 387 aa, unidentified
  source 1..387: note = protein_6d5a0bb
  REGION 6..159: note = RuvC_domain
  SITE 9: note = RuvC_P1
  SITE 57: note = RuvC_P2
  SITE 98: note = RuvC_P3
  SITE 100: note = RuvC_P4
  SITE 103: note = RuvC_P5
  REGION 221..306: note = Tnp_domain
  SITE 229: note = Tnp_P1
  SITE 259: note = Tnp_P2
  SITE 267: note = Tnp_P3
  SITE 268: note = Tnp_P4
  SITE 279: note = Tnp_P5
MGQVIIGMDPHKRSATIEIINDREKILAQGRFGTDRDGYQTMLKLGRQHKDRVWAVEGCNGIGKHLAQRLVADGETVLDVPAKLSARARVFDTGQGRKTDPADAHHIAVAALRSKGLRQVAADDATVALRLLVDRRDELGRAHTDLLNRIHKLLLELLPGGAKKYLSATQARELLATIRPRDLVGRTRRRLASELISELVQVDKKTKAADKELRELVEATGSSLQDLHGIGPSGAARLIGDVADINRFASRGHFASWNGTAPIDASSGDQTRHRLSRAGNRRINRTLHIMAVVQLRNDTEGRAYYRRKLAAGKTPMEAMRALKRRLSDVVYQQMVNDAKTVETGPGGHAGATLKSSAADPIPMIDTSDKSLPGPAEPQPRTPLPTTS

SEQ ID NO: 18940 - protein, 339 aa, unidentified
  source 1..339: note = protein_fea0879
  REGION 6..147: note = RuvC_domain
  SITE 9: note = RuvC_P1
  SITE 52: note = RuvC_P2
  SITE 87: note = RuvC_P3
  SITE 89: note = RuvC_P4
  SITE 92: note = RuvC_P5
  REGION 210..298: note = Tnp_domain
  SITE 218: note = Tnp_P1
  SITE 248: note = Tnp_P2
  SITE 256: note = Tnp_P3
  SITE 257: note = Tnp_P4
  SITE 269: note = Tnp_P5
MNSMAVGVDIAKTVFQVHYIDQETGEIVNKQIKRAKFLEFFANRAPCLVGMEACGGAHHWARQLTKMGHQVKLMPAEFVKAFNIRNKNDAADAQAIWRAVQQPSKPVAVKTEMQQAVLALHRMREQLVKFRTMQINALRGLLTEYGEVMGKGRTALDKAIPEVLARVAERLPAVLIDTMREQWNGLTALDEQIAGIERRMREWKKDDPAVKAISEIPGVGLLTATAAVAMMGDPKAFRSGREFAAWAGLVPRQTGSGGKINLHGISKMGDTYLRKLLIHGARSVLTHAKEPGPWIDQISKRRPPNVVTVALANKMARTIWALLAHNRPYQKDHLSVKPA

SEQ ID NO: 18941 - protein, 348 aa, unidentified
  source 1..348: note = protein_bb0d414
  REGION 10..152: note = RuvC_domain
  SITE 13: note = RuvC_P1
  SITE 56: note = RuvC_P2
  SITE 91: note = RuvC_P3
  SITE 93: note = RuvC_P4
  SITE 96: note = RuvC_P5
  REGION 217..306: note = Tnp_domain
  SITE 225: note = Tnp_P1
  SITE 255: note = Tnp_P2
  SITE 263: note = Tnp_P3
  SITE 264: note = Tnp_P4
  SITE 276: note = Tnp_P5
MQSTAQLPVIGMDIAKNVFQLHIVDAETGEIQRRQLKRAKVAEFFSNRQPSLVAIEACGGAHHWARTLQGMGHQVKLLPAKHVRAFVLRDKTDALDAQAIWVAAQQPHIREVPVKSEQQQACLSLHRIRAQLMKMRIMQTNALRGLLYEFGMVLPEGHKKLLQSIQGELAKAQQDNRLCDVVVLSVQEQLKRIDAMQDDIDRLDKRLAAMVRQNQHMLAVQAIPGIGPLTATALIATVADVSTFKSGRQFAAWLGLTPRQVGTGGKTQQLGISKRGDTYLRSLLVNGARAVVGRSAHNSWLERLLQRRHFNVVVAALANKMARTAWAVLAKGKAFDSLKWNPTEAAAT

SEQ ID NO: 18942 - protein, 341 aa, unidentified
  source 1..341: note = protein_f151ea7
  REGION 7..148: note = RuvC_domain
  SITE 10: note = RuvC_P1
  SITE 53: note = RuvC_P2
  SITE 88: note = RuvC_P3
  SITE 90: note = RuvC_P4
  SITE 93: note = RuvC_P5
  REGION 209..296: note = Tnp_domain
  SITE 217: note = Tnp_P1
  SITE 247: note = Tnp_P2
  SITE 255: note = Tnp_P3
  SITE 256: note = Tnp_P4
  SITE 268: note = Tnp_P5
MQNVTLVGIDLGKHAFHLHGQDKAGTAVFRRKVSRKQLIEFFATFHPCTVVMEACAGAHCMARKLAELGHEVKLISPQFVRPFVKSNKNDFVDAEAICEAASRPSMRFVTPKTVSQQTLSALHRVRDSLVRDKVRTTNQMHGFLLEFGVTLPVGNAVVRRLPTLLAEHSLPPRLVAILERLHAHFKYLSEQIGEIEKELGRQLADDTIAQRRLSIPGVGAITASLLTSELGDGKLYRCGRDFAAAVGLVPRQYSTGGRSNLLGISKRGDKNIRRLLVQCARAFMLHLNKHSGKMADWVRSMLARRHSNVVACALANKFARIAWAIASRDTVFDACMRSAAR

SEQ ID NO: 18943 - protein, 350 aa, unidentified
  source 1..350: note = protein_f5ed673
  REGION 7..149: note = RuvC_domain
  SITE 10: note = RuvC_P1
  SITE 53: note = RuvC_P2
  SITE 88: note = RuvC_P3
  SITE 90: note = RuvC_P4
  SITE 93: note = RuvC_P5
  REGION 212..304: note = Tnp_domain
  SITE 220: note = Tnp_P1
  SITE 250: note = Tnp_P2
  SITE 258: note = Tnp_P3
  SITE 259: note = Tnp_P4
  SITE 271: note = Tnp_P5
MEKLIRIGVDTSKAVFQLHGVDEAEQPVLRRKLRRRQFMIYFSTLPPALVAMEACGASYHWARQLQALGHEVVLIPPQYVKPYVQRGKSDAADAEAICEAASRPKLRKNFVPIKSPEQQGAQMLTKLRAQFISRRTQISNSIRGYAAEFGITAPKGLAHLSEVLADIRAEASIPALVVDLMEMLSRDFARIDAEVGLLDKKLMALHRGNEMSRRLAGVPGIGPIGATLLSVKVVDAKGFKSGRDFAAWLGLTPKNHSTAGKNRLGVITRAGDEMLRSVLVAGATAVIADMRRGGSRSWPWLKALIARKPPKLVAIALANKLARIAWKLMVSGERYQPIIAAPSIDVAMPA

SEQ ID NO: 18944 - protein, 342 aa, unidentified
  source 1..342: note = protein_9e1e3a3
  REGION 6..147: note = RuvC_domain
  SITE 9: note = RuvC_P1
  SITE 52: note = RuvC_P2
  SITE 87: note = RuvC_P3
  SITE 89: note = RuvC_P4
  SITE 92: note = RuvC_P5
  REGION 210..294: note = Tnp_domain
  SITE 218: note = Tnp_P1
  SITE 248: note = Tnp_P2
  SITE 256: note = Tnp_P3
  SITE 257: note = Tnp_P4
  SITE 269: note = Tnp_P5
MKDTMIGVDLAKNVFQIHAASRVGEVLFRKKVRRPQFLEFMASQPRALVVMEACGSAHHWARELTNLGHEVKLIAPQYVRPFVKRQKNDAADAEAIVIAARQPEMRFVVPKTEAQQARAVLFRSRDRLVHQRTELVNALRATLYEFGLVVPKGLGHLSSIEEFLEDNSVSLPEVVREECRDLLTQIDEQSVRITEKTRAMVELSNESGVAQRLESLPGVGPLTALAIEAFAPSMKNFRCGRDFAAWLGLVPRQFSSGGKERLGRISKAGQADIRRLLIIGAMTRVNWASRKPPVPGTWLARMLERKPRMLVAIALANKMARTVWAMLTKQENYRDPVLSAAA

SEQ ID NO: 18945 - protein, 417 aa, unidentified
  source 1..417: note = protein_cdc9a6c
  REGION 12..167: note = RuvC_domain
  SITE 15: note = RuvC_P1
  SITE 64: note = RuvC_P2
  SITE 104: note = RuvC_P3
  SITE 106: note = RuvC_P4
  SITE 109: note = RuvC_P5
  REGION 275..361: note = Tnp_domain
  SITE 283: note = Tnp_P1
  SITE 314: note = Tnp_P2
  SITE 322: note = Tnp_P3
  SITE 323: note = Tnp_P4
MSPNAMGALFFVGIDWAAATHAVCVLDATGQKIAAFTVEHSADGLAGLVRRLARLGEPDTMPVAIERPDGRLVDILLEAGHPVVPVKPHAIKTWRESEAGSGAKSDPGDAEVIADYLRCRQRKLTVAVPYSAETKALRTVVRTRGDLVDMRVAATNQLAALLDAHWPGAKAIFADIESPIALEFLTRYPTARHAVGLGAKRLAAFCAKHGYSGRRSADQLLTRLRAAPTGTTDQTLCEALRDAVIALVTVLKALGAALKDIGRSVTATLGEHPDAEIFTSLPRSGQINAAQMLAEWGDARPAYAGPESVAALAGATPVTKESGKHRAVHFRWACNKRFRQAITTFADNSRHESAWAAQVYTNARARGLDHPHAVRVLARAWIRVIWRCWIDRIPYDPGRHGNAVRLAESGQPTQVAA

SEQ ID NO: 18946 - protein, 354 aa, unidentified
  source 1..354: note = protein_d4c3533
  REGION 4..158: note = RuvC_domain
  SITE 7: note = RuvC_P1
  SITE 59: note = RuvC_P2
  SITE 100: note = RuvC_P3
  SITE 102: note = RuvC_P4
  SITE 105: note = RuvC_P5
  REGION 222..307: note = Tnp_domain
  SITE 230: note = Tnp_P1
  SITE 260: note = Tnp_P2
  SITE 268: note = Tnp_P3
  SITE 269: note = Tnp_P4
  SITE 280: note = Tnp_P5
MVTVGIDPHKRVHVAVAVDAGGRRIGKPLTVKNDGQLIITLLKWIRSMIDTTAVTWAIEDGRGFARRLADELLLAGQEVVWVPSRLTVAHRKLHAATGAKSDVIDAIAAAHAAIATPSLSRHQIDERVRELRVLSDYRSDLVKRRTTLINQIKTHAHLWLDYTPGDLARAKTISLLSARLDAASMSAHVRHVFTEMVTELVDVNRRIHDLDEMIKNLVSPLAPNLLQITGISHISAAVLVTEIGDITRFSSSAKLARYTGCAPIPVYSSDHERHRLHRGGNRRLNSVLYTAAIVQNRFNSAAQQLTARHLPTKGARGARRILKRHLVDVIHRAMQLDQANWQHHIARYEPAALT

SEQ ID NO: 18947 - protein, 309 aa, unidentified
  source 1..309: note = protein_9800c86
  REGION 8..149: note = RuvC_domain
  SITE 11: note = RuvC_P1
  SITE 54: note = RuvC_P2
  SITE 94: note = RuvC_P3
  SITE 96: note = RuvC_P4
  SITE 99: note = RuvC_P5
  REGION 190..274: note = Tnp_domain
  SITE 198: note = Tnp_P1
  SITE 227: note = Tnp_P2
  SITE 235: note = Tnp_P3
  SITE 236: note = Tnp_P4
  SITE 247: note = Tnp_P5
MKEEVVYCGIDVAKEQLDVALGQERCRVPNTKEGIAQLLKRFKGQRLKLHVICEASGGYEKAIVTALQKSALAVSLVQANRVRQFARAAGVLAKTDQIDAGILLSFGMAMRPPPSAAQSEQIARLREVDAQRRHLSRLLRAEQNRLAPVSCAELRSLSRSLISKVKKQISTIDVRIATLIAQDQNLCAKAQKLTSIAGVGPRTAALLLAQMPELGSLNRGQAAALAGLAPFNRDSGSMRGKRTIFGGRRAVRTGLYMAAVAAARYNHILAPFYQRLRAAGKPPKVALTAVMRKLLLALNSALTPTLNPA

SEQ ID NO: 18948 - protein, 343 aa, unidentified
  source 1..343: note = protein_037ddbc
  REGION 7..149: note = RuvC_domain
  SITE 10: note = RuvC_P1
  SITE 53: note = RuvC_P2
  SITE 88: note = RuvC_P3
  SITE 90: note = RuvC_P4
  SITE 93: note = RuvC_P5
  REGION 212..298: note = Tnp_domain
  SITE 220: note = Tnp_P1
  SITE 250: note = Tnp_P2
  SITE 258: note = Tnp_P3
  SITE 259: note = Tnp_P4
  SITE 271: note = Tnp_P5
MDKITTIGLDLAKSVFQVHGVTEDGGVAVRRRLRRSQLLEFFRTVEPCLVGLEACASAHYWASEIRKFGHTVRLMPPVYVKPYVKRNKTDAADAEAICEAVTRPTMRFVPVKSREEQAAGIVLKTRELLVRQRSQTANALRAHMAEFGIIAASGMASIARLTAILRDNQDDCLPNAARAALLEMAEQIEKLTDRINALDTKIVAGVKADEAARRLTTIPGVGPIIAATVRAVIQDPAAFRTGRDLAAWIGLTPNANSSGGKERLGRISKRGNKQLRTLLIVGATAVLKQARGAQKRPEWVLSLLARRPYKVAAVALANKMVRIIWALLVKGGTYQAPTAMAKI

SEQ ID NO: 18949 - protein, 329 aa, unidentified
  source 1..329: note = protein_652a29e
  REGION 6..155: note = RuvC_domain
  SITE 9: note = RuvC_P1
  SITE 60: note = RuvC_P2
  SITE 98: note = RuvC_P3
  SITE 100: note = RuvC_P4
  SITE 103: note = RuvC_P5
  REGION 203..290: note = Tnp_domain
  SITE 211: note = Tnp_P1
  SITE 241: note = Tnp_P2
  SITE 249: note = Tnp_P3
  SITE 250: note = Tnp_P4
  SITE 263: note = Tnp_P5
MKNLFIGIDISKEVFDYCAIDEQNQIIINKQVAPNSKDGIEKFCQKLDQLKEYSIWIAMEHTGHYGSLLCYEFSIRQLCYSLINPLEMKHATGISRGKTDAVDAWRIASYALANKHKLKPYILPAKELRKLKILMSSRERLVKVHVQMKNGLKSLEIEAKIISLKSHTQEMERIILQIEKSILSTEKQMREIIKQNDELKNNFQKITSVIGVGEITAIKCILETDNFTKFNNPRKFSCHCGLAPFKYQSGSSIRGKTKTSSLCDKSLKSILFKAACSAIQHDPQLKNYYLRKTSEGKHKLSVINAVASKIVLRIFAVSKRKQNFVKLFN

SEQ ID NO: 18950 - protein, 347 aa, unidentified
  source 1..347: note = protein_dfae9c2
  REGION 8..149: note = RuvC_domain
  SITE 11: note = RuvC_P1
  SITE 53: note = RuvC_P2
  SITE 88: note = RuvC_P3
  SITE 90: note = RuvC_P4
  SITE 93: note = RuvC_P5
  REGION 212..302: note = Tnp_domain
  SITE 220: note = Tnp_P1
  SITE 252: note = Tnp_P2
  SITE 260: note = Tnp_P3
  SITE 261: note = Tnp_P4
  SITE 273: note = Tnp_P5
MKNTDLIVGVDLAKNKIQVCVFKCRKVLSNSEMTPDEFANWLVNSSPSLIVFEACGTSNYWKQKASSLGHEARIISAKLVSAVRQNQKTDKNDALAIIQSAMLPDVNFISGKSVEQQQLQSMMRLRELCIKQKTALSNQLTALLGEFNIRVSSRNGGLRGAMELTLEDGENDLSFEFRDALTAAWQQYLTLSQTISAYDTSLEKAIQSHPDCQKLLKIEGVGMINAINLYIALGCAELGVFNKGKDAAACIGLTPIQHSTGGKAKLGSIGRYVKNGLLRSQLITGSLSAINQMLKREAKTKKEMWIKGLVDRRGKKCAAVALANKTVRTAFTMLTKGTEYKAEPLNT

SEQ ID NO: 18951 - protein, 345 aa, unidentified
  source 1..345: note = protein_64292a8
  REGION 18..164: note = RuvC_domain
  SITE 21: note = RuvC_P1
  SITE 68: note = RuvC_P2
  SITE 108: note = RuvC_P3
  SITE 110: note = RuvC_P4
  SITE 113: note = RuvC_P5
  REGION 209..296: note = Tnp_domain
  SITE 217: note = Tnp_P1
  SITE 247: note = Tnp_P2
  SITE 255: note = Tnp_P3
  SITE 256: note = Tnp_P4
  SITE 269: note = Tnp_P5
MTNRPLNTTAESVHRLFAGVDVGADELVLVIRKNGKPFDPQKYANTRSDRTRLVNKLIKLPGIKVCLEATGIYHFDLAIALHDTGIPVMVVNPKASHNFAKVLMKNSKTDAVDANTLAEYVERMNFVAWTRPSNQSLALRYYARRIDALTGQKAAAKNHLHALSATEETPKALLRDAKLAISQLEKRINTLASEALALIDKHPELQRIFELLTGIKGIAQTSAIALMGELLLLPPNLSHREWGKFAGLDPKAFESGKSIHKKMRLSKAGNRHIRSALYMPALSAKQHDPHVRAYFQHLIDNGKKPLQAVCAVMRKLLHAIHGMLKHDQPFDNTRFYAIPESIIAE

SEQ ID NO: 18952 - protein, 403 aa, unidentified
  source 1..403: note = protein_a44a8f9
  REGION 9..163: note = RuvC_domain
  SITE 12: note = RuvC_P1
  SITE 60: note = RuvC_P2
  SITE 100: note = RuvC_P3
  SITE 102: note = RuvC_P4
  SITE 105: note = RuvC_P5
  REGION 270..355: note = Tnp_domain
  SITE 278: note = Tnp_P1
  SITE 308: note = Tnp_P2
  SITE 316: note = Tnp_P3
  SITE 317: note = Tnp_P4
  SITE 329: note = Tnp_P5
MSVDYAVFVGLDVGKGEQHACALDPGGKKLHDKPLPNDEQRLRALFGKLNTHGPVLVVVDQPASIGALPVAVARAEGCQVAYLPGLTMRRLADLHPGNAKTDARDAFIIADAARTLPHTLRRVDAGDEALAELEVLVGFDDDLAAEATRVTNRIRGLLVTIHPALERALGPRLHHPAALELLARFGGPNGLRDAGREQLLTVARPLAPRMAGRMVDDVWAALEAQTVLVPGTSAAETVLPRLSQSLRSVLDQRKQVAAEVEAMLDAHPLAKVLITMPGLGIRTTARLLLEIGDISAFATPGHLAAYAGLAPVTRRSGSSIKGEHPPKGGNKALKRAMFLAAFASLSDPESREYYDKKRAEGKKHNAALICLARRRSDVIYAMLRDRKPYQPRRKNRTRKPSAA

SEQ ID NO: 18953 - protein, 341 aa, unidentified
  source 1..341: note = protein_50bbb0b
  REGION 7..149: note = RuvC_domain
  SITE 10: note = RuvC_P1
  SITE 53: note = RuvC_P2
  SITE 88: note = RuvC_P3
  SITE 90: note = RuvC_P4
  SITE 93: note = RuvC_P5
  REGION 212..298: note = Tnp_domain
  SITE 220: note = Tnp_P1
  SITE 250: note = Tnp_P2
  SITE 258: note = Tnp_P3
  SITE 259: note = Tnp_P4
  SITE 271: note = Tnp_P5
MEQVSVIGLDLAKNVFQVHGADERGRCVIRKSLRRSQVYAFFAKLSKCTVGMEACSSSHYWGRVITDCGHEVKLIPPQYVKLYVKTNKNDAADAEAICEAVSRPHMRFVELKTPDQQSILLIHRERDGLMRDRTALINRLRATLGEFGIAVPSGPARLKQWFRDSYGINEDQLPVLMQRHIERMSARWVELERCIDELDREIDQHVQHNSVCQRLLEVPGIGRLTASALVATVGNALAFKNGRQLSAWLGLVPRQHSSGGKTVLRGISKRGDAYLRRMLVHGARAVLRHSATKKNAVSNWLHALSVRANKNVVIVAMANKLARIAWALLNKGQRYIEPAAE

SEQ ID NO: 18954 - protein, 406 aa, unidentified
  source 1..406: note = protein_74299f2
  REGION 4..162: note = RuvC_domain
  SITE 7: note = RuvC_P1
  SITE 57: note = RuvC_P2
  SITE 99: note = RuvC_P3
  SITE 101: note = RuvC_P4
  SITE 104: note = RuvC_P5
  REGION 277..364: note = Tnp_domain
  SITE 285: note = Tnp_P1
  SITE 315: note = Tnp_P2
  SITE 323: note = Tnp_P3
  SITE 324: note = Tnp_P4
  SITE 337: note = Tnp_P5
MNAVGIDVSKGKSTVAILRPFGEIIISPFDVSHNPKELSELVTLLKTLDGDTKVVMEYTGNYYLPIALFLRNNGLFVSVVNPILVKDYSTKSLTVRKVKTDKKDSVKLASFALDRWKELSPFSAQSEARLLLKSYNRQYNQYNKLKVSLKNNLISILDQTFPSANNLFTTPTRKSDGHEKWVDFVLKYPHAECISKKSFPAFAKSYLSWCRRFGYNFSESKAKSVYDFACNCSPSLSFTESAVLLVSNAISQLNCINETLASLASEMNKISATLPEYDTVMSMFGVGSVLGSQLIAEIGDVSRFTNKKALVGFAGLDASPFQSGNFNPQSRAISKRGSSALRKTLFQIMSVILQNSPAENSVFQFMDKKRAEGKHFYVYMTAAANKFLRIYYARVTELLNSLNPVA

SEQ ID NO: 18955 - protein, 419 aa, unidentified
  source 1..419: note = protein_0f2101d
  REGION 30..185: note = RuvC_domain
  SITE 33: note = RuvC_P1
  SITE 82: note = RuvC_P2
  SITE 122: note = RuvC_P3
  SITE 124: note = RuvC_P4
  SITE 127: note = RuvC_P5
  REGION 292..377: note = Tnp_domain
  SITE 300: note = Tnp_P1
  SITE 330: note = Tnp_P2
  SITE 338: note = Tnp_P3
  SITE 339: note = Tnp_P4
  SITE 351: note = Tnp_P5
MDVAIGAVGRPGGNDQRTRVIDVSEIGAFLGLDVGKGEHHATAVTPAGKKAFDKRLPNSEPKLREVFGKLQAKHGTVLVVVDQPASIGALPLAVARDTGCQVAYLPGLTMRRIADLYPGEAKTDARDAFVIADAARSMPHTLRAIELADEAVAELGMIVGFDDDLAGEATRISNRLRGLLTQIHPSLERVLGPRVQHPAVLKLLDQFGSPAQIRKAGRRRLVSLMRPKAPRMAERLVEDIFTALDEQTVIVPGTDAAALIVPSLTNSLQAVLGQRKLLAARIEKLLEAHPLSKVLTSMPGIGVRTGARILIDVGDGSSFPSAAHLAAYAGLAPATRSSGSSIRGEQPSRRGNKQLKRAFFLSAFAALADPASRAYYDKKITQGKHHTQALLCLARRRADVLFAMLRDGTFYQPQPTPTG

SEQ ID NO: 18956 - protein, 345 aa, unidentified
  source 1..345: note = protein_ea25000
  REGION 7..149: note = RuvC_domain
  SITE 10: note = RuvC_P1
  SITE 53: note = RuvC_P2
  SITE 88: note = RuvC_P3
  SITE 90: note = RuvC_P4
  SITE 93: note = RuvC_P5
  REGION 212..309: note = Tnp_domain
  SITE 220: note = Tnp_P1
  SITE 250: note = Tnp_P2
  SITE 258: note = Tnp_P3
  SITE 259: note = Tnp_P4
  SITE 272: note = Tnp_P5
MQNYTVLAIDLAKHVFQVVKTTGYGKAVFNKKMNRTELKKLLCNEPKATVVMEACGGSHYWCRLAESFGHQVKALPARQVKPFRQGQKTDANDAVAIATAARQPHLKPARVLSEEEQGLQCIEKMRELQVAHKTALSNQLRGLLFEFGIVMSKSDAALKKALPEILEDAENGLPGGFRTALAQIWALYLTIISELEKLSQFQHQLTLQDEQGRALSALEGVGPVGALGLKLAIGNGAHFKNGRQAAACIGVTPVQHSSGGKENIGSISKLSGHKKLRSVLIQGAMAVLRHLAQREARNTKEQWLKALVQRRGTRIAAVALANKTVRTAWAMLSRQQEYQAPGLLA

SEQ ID NO: 18957 - protein, 343 aa, unidentified
  source 1..343: note = protein_0f070a8
  REGION 6..148: note = RuvC_domain
  SITE 9: note = RuvC_P1
  SITE 52: note = RuvC_P2
  SITE 87: note = RuvC_P3
  SITE 89: note = RuvC_P4
  SITE 92: note = RuvC_P5
  REGION 210..298: note = Tnp_domain
  SITE 218: note = Tnp_P1
  SITE 248: note = Tnp_P2
  SITE 256: note = Tnp_P3
  SITE 257: note = Tnp_P4
  SITE 269: note = Tnp_P5
MQITTIGLDLAKHWFQVHGVDANGHIVVRKRLWRSAVIPYFRSLEPCLVGMEACATAHHWARELIALGHTVKLMPPAYVKAYVKRNKNDAADAEAICEAVARPSMRFVPVKDAEQQSVLMLHRARSLLVRQRTMLVNALRAHLAEFGIIAPQGLRHVEILTKIVAHQQERLPELARSILQTIVDQLNGTMARIREIEGRVARWHRHSRVSRLLATVPGVGIMGASAIAATVADPSLFRSGREFAAWLGMTPRQNSSGGKERLGRTSKRGDKYIRSLLTAGAVAVLRHARNRPTRDGEWVRALLARKPTKLAAVALANKTARIVWAVMMRGDGYQPKEVFGQPA

SEQ ID NO: 18958 - protein, 344 aa, unidentified
  source 1..344: note = protein_7fd4b3c
  REGION 7..149: note = RuvC_domain
  SITE 10: note = RuvC_P1
  SITE 54: note = RuvC_P2
  SITE 89: note = RuvC_P3
  SITE 91: note = RuvC_P4
  SITE 94: note = RuvC_P5
  REGION 213..303: note = Tnp_domain
  SITE 221: note = Tnp_P1
  SITE 250: note = Tnp_P2
  SITE 258: note = Tnp_P3
  SITE 259: note = Tnp_P4
  SITE 271: note = Tnp_P5
MNAIKVIGIDLAKNVFQVCVWMEDGSVASNRKISRQKLLDTVRTFSPGTLIAMEACATSHYWGRTLQAMGFIIRLVPTQHVKAFSHHQKNDANDALAICETACRPGIHFVPVKTVEQQDIKALRSARQLMVEQRTALANQIRAFLAEEGVIVPAGIQKLQQYLPEILEEESHELSSVLRRLLHTLGEDLRNLNIRIHEMDNEIAALSRQQSGYHHLLTIPGVGPLIAAAFVSEVSAPQFANGRQLSAWCGLVPRQHSSGGKNRLSSLSKNGNRHLRTLIIHGARAVMRCVQNRDDCLGEWLRKLIARCGFMKATIALANKLTRIIWRVLRDEVDFNMQKAFTIN

SEQ ID NO: 18959 - protein, 394 aa, unidentified
  source 1..394: note = protein_e6af5db
  REGION 5..160: note = RuvC_domain
  SITE 8: note = RuvC_P1
  SITE 57: note = RuvC_P2
  SITE 98: note = RuvC_P3
  SITE 100: note = RuvC_P4
  SITE 103: note = RuvC_P5
  REGION 266..352: note = Tnp_domain
  SITE 274: note = Tnp_P1
  SITE 304: note = Tnp_P2
  SITE 312: note = Tnp_P3
  SITE 313: note = Tnp_P4
  SITE 324: note = Tnp_P5
MRYFAGIDVAKTVHWICVIDANAEVLLDRAVTNAQEDMDRLVGELRPFAPDLTICLDVMGSIATFVEAALIEAGFRVVHVPGIAVNRARDGFANREAKSDPKDARVIADYARTRPTLRPVEHDDETTIAIRLMIGRRRNLVEEQTRRIARLRRYLGSIHPELEIALDINGLGSAHLLTRYVTPTEIRRAGPKRILAHLQRLPHLHKREEMAHKVFEVAQRQHTIVPGEATFASLVRELAEEIILTREKLARLDKGLETLLARHPDAALIRTLPGMGAILTASFIAAAGSIARFKSAGAIAATAGLAPVMRQSGYSRVFRRTYGGDKDLKRVFFQSAFCAYAKGDPVCRAFYNRKRREGKRHTQAIIALARRRVNVLWTMLKSRQPCDPERAITS

SEQ ID NO: 18960 - protein, 394 aa, unidentified
  source 1..394: note = protein_2225cc1
  REGION 4..164: note = RuvC_domain
  SITE 7: note = RuvC_P1
  SITE 59: note = RuvC_P2
  SITE 99: note = RuvC_P3
  SITE 101: note = RuvC_P4
  SITE 104: note = RuvC_P5
  REGION 267..354: note = Tnp_domain
  SITE 275: note = Tnp_P1
  SITE 305: note = Tnp_P2
  SITE 313: note = Tnp_P3
  SITE 314: note = Tnp_P4
  SITE 327: note = Tnp_P5
MIHIGIDIGKHSHFFCIINQNDGEVLIEPTSFKNNQDGFSLLLDYLKPYSLSSILIGMEDTGHYHFALLKFLLDKHFSVALINPTTTDLTRRLYGGITKNDKLDSLTICDVLSSHGRNKLYRISKINSFQLYEQKQLTRHHHNLKEELNIYKNRLQKCIDIVFPEFNSLFKSKYGSIYMNILKSFGSADAIAHSDIRNIRKCFNIRGKGNRISLTPELLKETAKDSIGINSVADVMQIKHLVSQIELLEAQISEVDKKIEEFSTKTNSPILSIPGISHFSGTSILAELGDINNYPNARKIIKAAGVAPYHYESSQFNAQHTAITKKGSKYLRKTLYQIIVPIIRFNPVFQDYYNLKRSQGKSHRCAQGHRVRKLLRVIFHLLKTNHQFDPSLLR

SEQ ID NO: 18961 - protein, 404 aa, unidentified
  source 1..404: note = protein_55c9131
  REGION 4..159: note = RuvC_domain
  SITE 7: note = RuvC_P1
  SITE 59: note = RuvC_P2
  SITE 96: note = RuvC_P3
  SITE 98: note = RuvC_P4
  SITE 101: note = RuvC_P5
  REGION 267..353: note = Tnp_domain
  SITE 275: note = Tnp_P1
  SITE 306: note = Tnp_P2
  SITE 314: note = Tnp_P3
  SITE 315: note = Tnp_P4
MWYTGIDWANAHHDALVIDEWGHQLGSLRVSHTAQGLAKLNTFLEQIIGTASKEQMACIIETTHGLLIAQLLEAGWPVYPVNPRTVDRKRGASGAKTDLIDAYLLAKTGRADFADLHRLTPDSEQVAELKLLTRDQDSLIQMQTRLVNQLTACLKAYYPVALDLFGKLHQKSTLLFLQTYPTPQEAAAASVEQIQQVLRQTRHPQARKVALSIIEQLQQPQLQADAVTTRSKSRLMLALVRQLLPLSEQIAEYDKEISALFLTHPDHEIFASLPRAGKHLAPRLLAEIGDDRSRYLDASSLQALGGTSPVLFQSGAYAKAHRRLGCIKPLRNALHQFAWQSTQSEPWARAYYQRKRAEGKSHTVAVRALANIWVRIIFAMWTHYCCYQAATFELAQQLHARRAA

SEQ ID NO: 18962 - protein, 328 aa, unidentified
  source 1..328: note = protein_ffcf629
  REGION 4..155: note = RuvC_domain
  SITE 7: note = RuvC_P1
  SITE 60: note = RuvC_P2
  SITE 100: note = RuvC_P3
  SITE 102: note = RuvC_P4
  SITE 105: note = RuvC_P5
  REGION 200..286: note = Tnp_domain
  SITE 208: note = Tnp_P1
  SITE 237: note = Tnp_P2
  SITE 245: note = Tnp_P3
  SITE 246: note = Tnp_P4
  SITE 259: note = Tnp_P5
MFYLGMDVAKSKLDCCLLLDESSGKRKTKVVNNTKPGIVDLLAWVAKQNISQDELHIVMEATGIYHEQAAMALADAGVTVSIVNPAQIKDFGRGLAVRTKTDGVDSFVLARYGALLKPAAWQPPPPEARVLQALLARREAIAQDLQRERNRQEKADATDTPERIRQSLADSIEFLVKQLADLQQDIDRHIDKHSNLKDDMALLQSIPAVGPQVSGNLLSVIHSHDFGSAEQLAAYLGLVPVERQSGSSVLGRAKLSKVGPARIRAVLYMAAIVATRYNPHVKAVYDRLLARGKSKMSALGAAMRKLVHLCFGVLKTRQPYQANYAKIA

SEQ ID NO: 18963 - protein, 401 aa, unidentified
  source 1..401: note = protein_8d58da8
  REGION 9..163: note = RuvC_domain
  SITE 12: note = RuvC_P1
  SITE 60: note = RuvC_P2
  SITE 100: note = RuvC_P3
  SITE 102: note = RuvC_P4
  SITE 105: note = RuvC_P5
  REGION 270..355: note = Tnp_domain
  SITE 278: note = Tnp_P1
  SITE 308: note = Tnp_P2
  SITE 316: note = Tnp_P3
  SITE 317: note = Tnp_P4
  SITE 329: note = Tnp_P5
MTSSFGVFLGLDVGKGSHHAVGLDPVGKRLHDGPLPNSEPKLRALFDKLAQLGPLLVVVDQPATIGALPVAVARAAGHQVAYLPGLAMRRIADLYPGKAKTDARDAFIIADAARSLPHTLRPVDVGDDTLAELEVLVGFDDDLAGEATRIANRIRGLLTGVHPALERAIGPKISHPAVLEILSRCGGPTGIRKAGRRKLTAIAKAHAPRMGDTLVTAILAALDEQTVTVPGTTAADTVLPRLADSLKTVLEQRTQLATEVEEILDAHPLAGVLTSMPGIGVRTAARILLEIGDASNFASSAHLAAYAGIAPVTRTSGTSIKGEHPARTGNRKLKRAFFLAAFAALHDPTSRAYYDRKRAEGKKHNAALICLARRRCDVLYAMLRNGTHYRHPEPAHAATAA

SEQ ID NO: 18964 - protein, 321 aa, unidentified
  source 1..321: note = protein_fcc868f
  REGION 8..147: note = RuvC_domain
  SITE 11: note = RuvC_P1
  SITE 52: note = RuvC_P2
  SITE 92: note = RuvC_P3
  SITE 94: note = RuvC_P4
  SITE 97: note = RuvC_P5
  REGION 191..278: note = Tnp_domain
  SITE 199: note = Tnp_P1
  SITE 229: note = Tnp_P2
  SITE 237: note = Tnp_P3
  SITE 238: note = Tnp_P4
  SITE 251: note = Tnp_P5
MSKYSETYGVDISKDVFDVANTTGFYRQYPNTVAGFKKFIKELEKSAIVVMEATGYYHYCLAQFLFESGQPVSVVNPLSVKRFIQMRLSKVKTDKSDAKAICDYALINPVPLYTGKDQNQAESLQLLRLLELYLKQRTQLKNKIHGEQALGIPSKAVFRSLNRSKRTLDKEIKSLETRLLSLVKEEHQQQLTNLKSIPGLGDKTAALLIVLTDGFTKFETASQLCSFAGTTPTIRQSGSSVRGKSRISKMGNQKLRNLLFLCAFSASKYNTACRKIYERIIAKGKSKKLALIAVINKLIKQAFAIAKSGLPYDPNYATKLN

SEQ ID NO: 18965 - protein, 345 aa, unidentified
  source 1..345: note = protein_b176dc2
  REGION 5..152: note = RuvC_domain
  SITE 8: note = RuvC_P1
  SITE 55: note = RuvC_P2
  SITE 92: note = RuvC_P3
  SITE 94: note = RuvC_P4
  SITE 97: note = RuvC_P5
  REGION 212..300: note = Tnp_domain
  SITE 220: note = Tnp_P1
  SITE 250: note = Tnp_P2
  SITE 258: note = Tnp_P3
  SITE 259: note = Tnp_P4
  SITE 271: note = Tnp_P5
MKYFAALDVSVKETSICIVDEAGKICSECKAPSYPEDLVGALKNPKWRLERIGLEAGPLSQWLFSGLAGAGLPAICIETRHTKAFLQAQVNKSDRNDARGIAQMMRVNLFRHVHVKTLTSQKRRALLTARKLLQENAVAFENEIRGLLGNFGFKVGVVAVGKFEERIRELVADTPELIEIMEPLLTARQKLRDSFNTLHRKLLAIVRDDAVCRRLMTIPGVGPVVSLAFSATIDIPARFKNSKAVGPSLGLTPRLHQSGESCRIGGVSLCGDAMMRSLLYEAAQVMMTRVKKWSWLKAWAMNVAKRRGRQKAMVALARRLAVIMHRMWADGSVYRWTNKVPSAAV

SEQ ID NO: 18966 - protein, 273 aa, unidentified
  source 1..273: note = protein_be129d2
  REGION 2..75: note = RuvC_domain
  SITE 17: note = RuvC_P3
  SITE 19: note = RuvC_P4
  SITE 22: note = RuvC_P5
  REGION 141..226: note = Tnp_domain
  SITE 149: note = Tnp_P1
  SITE 179: note = Tnp_P2
  SITE 187: note = Tnp_P3
  SITE 188: note = Tnp_P4
  SITE 200: note = Tnp_P5
MKLIPAQFVKPFVKSNKNDFIDAEAIAEAVDRENMRFVPIKTDDQLDLQALHRVRDRLMARRTALINQIRAFLLVRGTVFAKSPIRLREALPEVLENVNENLTPRMRNLVAMLWSEWKDLELQIVQMNDEVERIASSDAACRRLRQIPGIGPLVATAIVASIGNGAAFRKGREFAAWMGLLPKQHSTGGKARLYGISKRGNSYLRKILIHGARAVVLRSKRDRIAMGAWMTSLETRAPRNVLIVATAHKLARIAWAVLSTGQDYRAVPKAVTV

SEQ ID NO: 18967 - protein, 399 aa, unidentified
  source 1..399: note = protein_0dd9b36
  REGION 4..160: note = RuvC_domain
  SITE 7: note = RuvC_P1
  SITE 57: note = RuvC_P2
  SITE 97: note = RuvC_P3
  SITE 99: note = RuvC_P4
  SITE 102: note = RuvC_P5
  REGION 276..364: note = Tnp_domain
  SITE 284: note = Tnp_P1
  SITE 314: note = Tnp_P2
  SITE 322: note = Tnp_P3
  SITE 323: note = Tnp_P4
  SITE 336: note = Tnp_P5
MISVGIDVSKEKSMVCILKPYGEVLLSPTEIVHTEEAVSKLADTILKLGSEVRVVLEATGAYHLPLLSIFTEKKIFVSIINPLVMKKYASTAIRKGKTDKIDSVRIANYGLDNWFHLRKHEPSEEVYEELKFLGRQYSHYIRMKIDSKLSLNGILDRTMPGIKKLLSGKRSDYPTKDKLSDFVEHYWHYDNITKLSEEDFIKSYQEWAKKRKYHASESKARKIYAMASSGIPTLSSSTPSTKMLVLEAVRVLGEINKTLQNILTQLQATASTLKEYETVRAMSGVGDVLAPRLIAEIGDVRKFHSGSALVAYAGLDSPPFESGNFVGTRRKISKRGSSLLRKTGYEVMKCLKAIQPVNDAAVYQYMLKKEAEGKAKKVAKIAALNKFLRIYYARVMELQ

SEQ ID NO: 18968 - protein, 393 aa, unidentified
  source 1..393: note = protein_702afc3
  REGION 4..163: note = RuvC_domain
  SITE 7: note = RuvC_P1
  SITE 61: note = RuvC_P2
  SITE 102: note = RuvC_P3
  SITE 104: note = RuvC_P4
  SITE 107: note = RuvC_P5
  REGION 267..353: note = Tnp_domain
  SITE 275: note = Tnp_P1
  SITE 305: note = Tnp_P2
  SITE 313: note = Tnp_P3
  SITE 314: note = Tnp_P4
  SITE 326: note = Tnp_P5
MLFVGIDVAKSHHDVAVLDDNGLVVLRHLRILNSRQGFATLHQSLIQLSADTNDDIRIAMEATGHYHLNLLLFLQANAYPTFAYNPFLIKEFARTLTLRKTKTDKADALTIAKKLATDLSSDRFKPDFNMQELKFLTHHRNRLTDSRSKLKTQYIRLLDILFPELAGFIGKTNLHYQYVYDLLTKYPSPAKLSRAHTNALVKLLHNHGNRLDMAQQLKVLAKQSIGLSSPANALELVQTISVIRLYDEQINAIDQEIAQIMNSLDEAAIVTSITGISNRLGSVILAEINHINNFQSPDQLLAFAGLEPSVYQSGQMNATGKIVKRGSTSLRWALCQAAEYASHWSPTLRQYRQKKLDEGKHYYVVMTHVAKKLVRIIYYLLKHHQYYDESKLI

SEQ ID NO: 18969 - protein, 403 aa, unidentified
  source 1..403: note = protein_186ebc5
  REGION 4..160: note = RuvC_domain
  SITE 7: note = RuvC_P1
  SITE 57: note = RuvC_P2
  SITE 97: note = RuvC_P3
  SITE 99: note = RuvC_P4
  SITE 102: note = RuvC_P5
  REGION 274..361: note = Tnp_domain
  SITE 282: note = Tnp_P1
  SITE 312: note = Tnp_P2
  SITE 320: note = Tnp_P3
  SITE 321: note = Tnp_P4
  SITE 334: note = Tnp_P5
MNAVGIDVSKGKSVVAIMRPGGEMVYKPFPVKHDSDGINALIKCIKSVDGESRIVMEHTGRYYEVLARKLSEADLFVSAVNPKLIKDFDNSSLRKVKSDKADSIKIARYTLDKWKELKQYGVMDELREQLKTMNRQFNFYTKQKSAMKNNLIAILDQTYLGANKFFDCPARPDGSQKWVDFATTYWHADCVKKMSLNAFIDHYKKWCKRKGYGFSKVTATEIYEVTKNIVSVLPKDETTKLIVKQAIDELNSTSRTVENLRTLMNDTAAKLPEYPVVMAMKGVGPTLGPQLMSEIGDVTRFHSKGALTAFAGVDPGVNESGSFEQKSVPTTKRGSSELRKTLFQVMDVLVKTKPSGDAVYQFLDKKRSQGKEYYVYMTAGANKFLRIYYGRVKEYLNSLDSQE

SEQ ID NO: 18970 - protein, 319 aa, unidentified
  source 1..319: note = protein_cf9dcc2
  REGION 10..157: note = RuvC_domain
  SITE 13: note = RuvC_P1
  SITE 56: note = RuvC_P2
  SITE 96: note = RuvC_P3
  SITE 98: note = RuvC_P4
  SITE 101: note = RuvC_P5
  REGION 196..280: note = Tnp_domain
  SITE 204: note = Tnp_P1
  SITE 233: note = Tnp_P2
  SITE 241: note = Tnp_P3
  SITE 242: note = Tnp_P4
  SITE 253: note = Tnp_P5
MNTITPERIIGIDVSRDWLDIHCLPCGHRQRLPNTHRGHSDVVDLAMSRGALVCFEATGGQEWRLWAALDAADVTTRQLPPAQIKAFAASQGTRAKTDRIDAELIARFMAFRPDAGRCLPHQKLRLLRALVSKRGQLVETRKRLLAQIKAHLKLGSAEIFADTDAELKSLLDRQITALEVQIETAIATNEDLHEAAEILRSVPGIGPVASSMLIAEMPELGQLPGGQAAALAGLAPIAHDSGAMRGKRAIAGGRRLLRHVMFQAALVASHHNPVLKTFAERLRSAGKPHKVIITAVARKLVAIANALVKARQKWSPQVT

SEQ ID NO: 18971 - protein, 341 aa, unidentified
  source 1..341: note = protein_1d78830
  REGION 6..147: note = RuvC_domain
  SITE 9: note = RuvC_P1
  SITE 51: note = RuvC_P2
  SITE 86: note = RuvC_P3
  SITE 88: note = RuvC_P4
  SITE 91: note = RuvC_P5
  REGION 212..301: note = Tnp_domain
  SITE 218: note = Tnp_P1
  SITE 250: note = Tnp_P2
  SITE 258: note = Tnp_P3
  SITE 259: note = Tnp_P4
  SITE 272: note = Tnp_P5
MHNTRVGVDLAKDVIQVCIFKNNKVQSNTEMTTAEFAIWLACFKPAFIIFEACGTSNYWLRIAREAGHDARLVSAKLVSLVRQNQKTDANDALAIVQTTFLPDVKYISGKSMEQQQLQSLNRLKHLAEKHETASLNQITALLAEFNIKTSSRTGGLGAVIKRTLEDAENGLTFEFREALNAAWQQCLALKQSIDAYSRCLLKTVNPHTECKKRLKLEGVGAINAINLYVALGCCELGVFKKGKEASACLGVTPIQRSSGGKVKLGTIGKKCKNSKLRSQLILGAMSAVRQMGKRPAVTKKEAWVQELVNRRGQRCAAVALANKTFAMLTKGTQYKAELLTA

SEQ ID NO: 18972 - protein, 344 aa, unidentified
  source 1..344: note = protein_170d925
  REGION 6..148: note = RuvC_domain
  SITE 9: note = RuvC_P1
  SITE 52: note = RuvC_P2
  SITE 87: note = RuvC_P3
  SITE 89: note = RuvC_P4
  SITE 92: note = RuvC_P5
  REGION 212..298: note = Tnp_domain
  SITE 220: note = Tnp_P1
  SITE 250: note = Tnp_P2
  SITE 258: note = Tnp_P3
  SITE 259: note = Tnp_P4
  SITE 271: note = Tnp_P5
MQIARIGLDLAKYVFEVHGVDAHGKTVVRKTLRRHAVSAFFANLPPCLVGMEASNGAHFWAKAISELGHDVRLISPQFVTPYVKSNKNDRNDAEAICEAVGRPNMRFVPIKSAEQLAVQALHRIRSRLVADRVRLVNQVRGILAEHGIVVPKDIGNLRRALARIVGDNEDRALDPLVRALMGELREELIELDARVTGYDRKIRELYRSSEICQRLGKVEGIGPVTATALVAAVGDRSSFKNGRQFAAWLGLVPKQRSSGGRARLFGISKRGDRYLRTLLIHGARAALGRVREKQDPRSLWLGKMRQRRHPNIVAVALANKNARIAWSLLTSDSVYDASLSVRGA

SEQ ID NO: 18973 - protein, 345 aa, unidentified
  source 1..345: note = protein_41c010f
  REGION 6..150: note = RuvC_domain
  SITE 9: note = RuvC_P1
  SITE 54: note = RuvC_P2
  SITE 89: note = RuvC_P3
  SITE 91: note = RuvC_P4
  SITE 94: note = RuvC_P5
  REGION 213..302: note = Tnp_domain
  SITE 221: note = Tnp_P1
  SITE 251: note = Tnp_P2
  SITE 259: note = Tnp_P3
  SITE 260: note = Tnp_P4
  SITE 272: note = Tnp_P5
MSISRVGVDIAKSIFHIHGVDRHDQVAWCGKYKRDKWLEAIAKRVPVGAEIGMEACSSSHHWARALQARGYRVKLIAAQFVKPYVKSNKNDRADAEAICEAMARPHMRFVTIKTVAQQDVQAAHRIRSELVQQRTAKANQIRGLVSEYGLVAPTGIGQLRAALPYWLEDAENGLTDDFRILLAGLADDLRYLNERIAAMTDRIEQHALTDPVAKRLMTLRGVGTITASALAGALGDAKAFKCGRDFAASLGLTPRQHSTGGRDRLLGISKRGDSYLRTLLVHGARAVVRYTGTKDDNLSSWLRQLTERKHVNVAIVALANKTARLAWAITHHDMPYDPDMAAQAA

SEQ ID NO: 18974 - protein, 281 aa, unidentified
  source 1..281: note = protein_39e691e
  REGION 1..98: note = RuvC_domain
  SITE 2: note = RuvC_P2
  SITE 37: note = RuvC_P3
  SITE 39: note = RuvC_P4
  SITE 42: note = RuvC_P5
  REGION 161..253: note = Tnp_domain
  SITE 169: note = Tnp_P1
  SITE 199: note = Tnp_P2
  SITE 207: note = Tnp_P3
  SITE 208: note = Tnp_P4
  SITE 221: note = Tnp_P5
MESCGGAHYWVRFAKSLGHKVMPIPPKQVKPFRTGQKTDANDAIAIADASRAPNIKPERVLTVEEQGIQSVSKMRDLLDKQKLQLSNQVRGLLLEFGIIISKSIKSFKARIPEILEDGENQLPMPMRHCIDKMWQLYSRLEDDFQALNEQLIRLTGQDDDCKKLMKLEGVGPITSMRLKIQLGSGDHFNNSRQVSACIGLTPKQHSSGGKVQLGSVGKISCDKPLRSSLFLGARAVVSKLKNRPTKTEKERWLKALIERRGVTCASMALANKNVKLLQRRS

SEQ ID NO: 18975 - protein, 341 aa, unidentified
  source 1..341: note = protein_4d8f74d
  REGION 5..147: note = RuvC_domain
  SITE 8: note = RuvC_P1
  SITE 51: note = RuvC_P2
  SITE 86: note = RuvC_P3
  SITE 88: note = RuvC_P4
  SITE 91: note = RuvC_P5
  REGION 209..290: note = Tnp_domain
  SITE 217: note = Tnp_P1
  SITE 247: note = Tnp_P2
  SITE 255: note = Tnp_P3
  SITE 256: note = Tnp_P4
  SITE 268: note = Tnp_P5
MDTMIGVDLAKSVYQIHGASMTGEVKFRKKLTRPQFLRFMSELAPAVVVMEACGGAHYWSRVMEELAHEVKLIAPQYVRPFVKRQKNDAADAEAIVIAAQRPEMRFVEPKSEEQQARAALFRSRDRLVRQRTELINALRGVLYEHGHSFPTGARNLGRIQTLLCGAESGLHPLVLEDCRDLFEQITEKTTRIEARTKKATALSAQADTTRRLQTIPGVGPLTALAVETFAPPMESFKSGRDFAAWLGIVPRQHSSGGRQRLGKISKAGQGDIRRLLIMGAMTRLTPRGRLGITPGSWLARILERKPKMLVAIALANKMARMIWAMLTKNEDYREPAQMAAA

SEQ ID NO: 18976 - protein, 407 aa, unidentified
  source 1..407: note = protein_4ee6b8d
  REGION 4..163: note = RuvC_domain
  SITE 7: note = RuvC_P1
  SITE 59: note = RuvC_P2
  SITE 100: note = RuvC_P3
  SITE 102: note = RuvC_P4
  SITE 105: note = RuvC_P5
  REGION 277..364: note = Tnp_domain
  SITE 285: note = Tnp_P1
  SITE 315: note = Tnp_P2
  SITE 323: note = Tnp_P3
  SITE 324: note = Tnp_P4
  SITE 337: note = Tnp_P5
MIGVGIDVSKLKSTICIMNEYGEVLQKPYEIMHTETDLKELTGRIKDYGGKNDVRVVMEATGAYSRPILYYLLDEDIFVSEINPLAMKKYRSDINFRGVKNDSIDAIAIAQYAVEKWNRLKEYKKADEEYAAMKALSRQYLSYMKPHVALTQNLDHLIDQVMPGIKTEFEGYDPVTGKDKLADFLEEFRHYDYITSLGPKKFEEKFNKWAKKKGYRPRQGKSGKIYLLAKEGIPTLTYDSTSRLLVQQAAEAVRGMNQVLYRILAQIRELAEKRPEYSAVRSMSGVGDVLAPLLVAEVGDPRRYHSGDALIACIGIDVPPYESGKFKASERRITRKGSKQLRKLGYLLVKNLRKIKPTQDTAVYDYYLKKKAEGKKDKQAIVAGMNKFFRIYYARAMEAYRDQAEKE

SEQ ID NO: 18977 - protein, 320 aa, unidentified
  source 1..320: note = protein_2be70bf
  REGION 14..162: note = RuvC_domain
  SITE 17: note = RuvC_P1
  SITE 61: note = RuvC_P2
  SITE 101: note = RuvC_P3
  SITE 103: note = RuvC_P4
  SITE 106: note = RuvC_P5
  REGION 197..281: note = Tnp_domain
  SITE 205: note = Tnp_P1
  SITE 234: note = Tnp_P2
  SITE 242: note = Tnp_P3
  SITE 243: note = Tnp_P4
  SITE 254: note = Tnp_P5
MTSRGTEKMKNDTIGVDVSKDHLDVHRLADGASQRFANDKRGHKVLIKWLAQTPVERVVFEPTGPYHRALERALGAADIPFAKVNPRQARRFAEATGKLAKTDRLDAAMLARMGAVLELETRPARSEVLLELKELRLAREALVKDRTAARNRAKALTMSLLKRHNTQRLEQIERQIVAIEAAITQIIKADADLAERFAIVTSIPGISKITAFALLIEMPELGSLEPGQAASLAGLAPIARQSGRWTGRAFIRGGRANLRQALYMPALVAIRFNPDLKAKYDQFLAAGKPAKIAITAIMRKLIVLANALLGEGRKWQLKSP

SEQ ID NO: 18978 - protein, 363 aa, unidentified
  source 1..363: note = protein_53dd6db
  REGION 13..161: note = RuvC_domain
  SITE 16: note = RuvC_P1
  SITE 65: note = RuvC_P2
  SITE 101: note = RuvC_P3
  SITE 103: note = RuvC_P4
  SITE 106: note = RuvC_P5
  REGION 230..316: note = Tnp_domain
  SITE 238: note = Tnp_P1
  SITE 269: note = Tnp_P2
  SITE 277: note = Tnp_P3
  SITE 278: note = Tnp_P4
  SITE 289: note = Tnp_P5
MTSMSVMTPGVTGGIDTHSQTHHAAVLDHVGRQLGDREFPTTPAGYRQLLAWLRGHGPLERVGVEGTGTYGAALARHLGSHSVPVVEVDRPDRKARRAKGKSDPLDAYAAARAALSGTAAGTPKAQDGPVEAIRALRVVRCGAVKARTQAMNQLKALLVTAPAELREQLRPLTTTALIATCARLRPTSELTDPEQATKTALRRLAQRHQHLSEEIVEADTELRTLVTAAAPRLLALPGVGIEVAGQILTTAGDNPHRLRSEAAFAHLCGVAPIPASSGRTHRHRLNHGGDRAANNALYIVVLGRLRYDPRKRRYVDRRTTEGLSKPEIIRCLKRYVAREIYNLLATHAADDRPTTPPSMSRAA

SEQ ID NO: 18979 - protein, 402 aa, unidentified
  source 1..402: note = protein_1eaf80d
  REGION 6..160: note = RuvC_domain
  SITE 9: note = RuvC_P1
  SITE 58: note = RuvC_P2
  SITE 98: note = RuvC_P3
  SITE 100: note = RuvC_P4
  SITE 103: note = RuvC_P5
  REGION 269..356: note = Tnp_domain
  SITE 277: note = Tnp_P1
  SITE 308: note = Tnp_P2
  SITE 316: note = Tnp_P3
  SITE 317: note = Tnp_P4
  SITE 329: note = Tnp_P5
MPELWAGTDAGKGEHHCTVIDADATVVLSRRVPNSETELLELIADVLDISGEVTWAIDLNAGGAALLIALLVNHGQRLVYIPGRTVHHASGSYRGSGKTDAKDAFVIADTARMRRDLQPLVAGDEVAVDLKTLTARRYDLAADRTRAVNRLRAQIVEYFPALERAFDYSKSKAALILLTKYQTPAALRRVGKSRLAAWLKNHGVRTINVATSTADAAIAAAEAQITAIPGETMAAAMAARLAQEVIALEEEIAETDALIEGRFREHRHAESILSMPGIGTLLGAEFVALTGGDMNVFGSVDRLAGVAGLAPVPRDSGKVSGNMRRPRRYSRRLLRVCYLAAQVAAVHCPVSKTFYERKRGEGKTHKQAVLALARRRLNVLWALIRDNRIFNATPPAGASAPA

SEQ ID NO: 18980 - protein, 387 aa, unidentified
  source 1..387: note = protein_110b84e
  REGION 4..159: note = RuvC_domain
  SITE 7: note = RuvC_P1
  SITE 57: note = RuvC_P2
  SITE 98: note = RuvC_P3
  SITE 100: note = RuvC_P4
  SITE 103: note = RuvC_P5
  REGION 263..347: note = Tnp_domain
  SITE 269: note = Tnp_P1
  SITE 299: note = Tnp_P2
  SITE 307: note = Tnp_P3
  SITE 308: note = Tnp_P4
  SITE 320: note = Tnp_P5
MYYIGIDISKFKHDCAVIDDVGEVITPSWSFANDHEGFSQLKVLLDSLGTETRIGLESTGHYGTNLKLFLESIGFSFMEFNPLLINRFVKSKSLRKTKSDSIDCMMIARYLMTVEYKPYPSLLYHTEKLKSLTRFRDSLVRQRSRHLVELTNILDKVFPEFKPFFGGRFSVTALHILSNYSSPEKISNMNSKSYEALRKLSRGRFSTVDFAKLKQLAKNTVGSTEDYLLQEMQIVLELYSKLDSMIDETERSIKECVSVMNPPMLTVPGIGIESAAVMLAEFGDFSKFDNPSQMLSFAGIEPGYFQSGTSETTGKMVKHGSSYLRYTLMNCAQTVVNYEPTFAMFYAKKRAEGKPHRVALSHVVKKLLRVIYTLQTKNLAYDAEAMR

SEQ ID NO: 18981 - protein, 314 aa, unidentified
  source 1..314: note = protein_4b2e6fd
  REGION 7..148: note = RuvC_domain
  SITE 10: note = RuvC_P1
  SITE 53: note = RuvC_P2
  SITE 93: note = RuvC_P3
  SITE 95: note = RuvC_P4
  SITE 98: note = RuvC_P5
  REGION 188..272: note = Tnp_domain
  SITE 196: note = Tnp_P1
  SITE 225: note = Tnp_P2
  SITE 233: note = Tnp_P3
  SITE 234: note = Tnp_P4
  SITE 245: note = Tnp_P5
MSSLVFVGIDVSQARLDIAVRPGVPFSIAHTESAFATLVEQFRALSPTLIVLEATGGMEIPLTSALATAGLPVVVVNPRQVRDFAKASGRLAKTDALDAQVLAQFAEVMRPQPRPLPDAEARALAALLTRRRQLVEMLTAEKNRLLSASSPIRKRVRTHIVWLERELEHTNTDLAEAIRQSPVWREQDELLQSVPGVGPVVTSTRLASLPELGMLTNKQIAAFVGGAPLNRDSGTLRGRRTIWSGRAQVRAVLYMGALVAARFNPVIRAFYQRLCRAGKAKKVALTACMRKLLVILNAMIKHRTPWHQAEVPLA

SEQ ID NO: 18982 - protein, 345 aa, unidentified
  source 1..345: note = protein_d015127
  REGION 6..147: note = RuvC_domain
  SITE 9: note = RuvC_P1
  SITE 52: note = RuvC_P2
  SITE 87: note = RuvC_P3
  SITE 89: note = RuvC_P4
  SITE 92: note = RuvC_P5
  REGION 211..297: note = Tnp_domain
  SITE 219: note = Tnp_P1
  SITE 249: note = Tnp_P2
  SITE 257: note = Tnp_P3
  SITE 258: note = Tnp_P4
  SITE 270: note = Tnp_P5
MNVTTIGIDLAKDIFQVHGVNEHGKPILRKQLKRHQIVAFFANLPGCLIGMEACASAHFWARKLQTLGHTVRLMAPQFVKPYVKTNKNDVADAEAICEAVARPNMRFVPIKNVDQQAVLALHRARQGFVRARTAQANQIRGLLGEFGLVMPRGITSIAQHVPQLIEDASNELPGSFRLLIQRLTDHLKELDRQVAEIETQIKAWHHASDASRRLAEIPGIGPITASALVASIGDGKCFSNARQLAAWLGLVPRQHSSGGKPTLLGISKHGDTYLRTLMVHGARAVVRYCANKDDAFSGWLHRLLTRRHKNVAVVAVANRNARIAWALLTQGTAFRSDYAPSAAAA

SEQ ID NO: 18983 - protein, 309 aa, unidentified
  source 1..309: note = protein_b28ee7b
  REGION 8..152: note = RuvC_domain
  SITE 11: note = RuvC_P1
  SITE 54: note = RuvC_P2
  SITE 94: note = RuvC_P3
  SITE 96: note = RuvC_P4
  SITE 99: note = RuvC_P5
  REGION 190..274: note = Tnp_domain
  SITE 198: note = Tnp_P1
  SITE 227: note = Tnp_P2
  SITE 235: note = Tnp_P3
  SITE 236: note = Tnp_P4
  SITE 247: note = Tnp_P5
MKQSVVYIGIDVAKAHLDVAWAGTFRRLPNERSGHAALVRWIKQSTTPVQLICEASGGYEQALLESLEKSEVKVTLVQAVRVRQYARAAGILAKTDRIDAKVLAAFGSAMQPQPTSPLSAEQKRLRQYEAQRRQLSRILVAEENRLAQLSCTELRTLSRSLISKIKTQIKTLDRGISDLIAQDQTLCVKAQKLTAISGVGVRTAALLLAQMPELGQLNRRQAAALAGLAPFNHDSGSVRGKRAIFGGRPALRSGLYMAALSAARFNPILSSFYQPLRTKGKPHKLALTAVMRKLLLALNQTLKPLPCST

SEQ ID NO: 18984 - protein, 343 aa, unidentified; identical to SEQ ID NO: 10340
  source 1..343: note = protein_ad6a5ef
  REGION 7..149: note = RuvC_domain
  SITE 10: note = RuvC_P1
  SITE 53: note = RuvC_P2
  SITE 88: note = RuvC_P3
  SITE 90: note = RuvC_P4
  SITE 93: note = RuvC_P5
  REGION 212..297: note = Tnp_domain
  SITE 220: note = Tnp_P1
  SITE 250: note = Tnp_P2
  SITE 258: note = Tnp_P3
  SITE 259: note = Tnp_P4
  SITE 271: note = Tnp_P5

SEQ ID NO: 18985 - protein, 347 aa, unidentified
  source 1..347: note = protein_32be715
  REGION 10..150: note = RuvC_domain
  SITE 13: note = RuvC_P1
  SITE 56: note = RuvC_P2
  SITE 91: note = RuvC_P3
  SITE 93: note = RuvC_P4
  SITE 96: note = RuvC_P5
  REGION 215..303: note = Tnp_domain
  SITE 223: note = Tnp_P1
  SITE 253: note = Tnp_P2
  SITE 261: note = Tnp_P3
  SITE 262: note = Tnp_P4
  SITE 274: note = Tnp_P5
MRCAHLRSTIGIDIGKNTFHLVGFDQRGAIILQQKVSRSQLERRVANIPRCLIGMEACSGSHHIGRQLAEIGHDVRLIPAQYVKPFLKGHKNDYRDAEAIAEAVQRPTMHFVTIKTPEQMDLLALHRVRSRLVGRRTGVINQIRGFLIERGITVRQGPMPLRKALSEILSSDTGALSPRMVGLIADLAQDWRRLDERIAAVSTEIEALAEQDHSCQRLMTVPGVGPIISSAVVAAIGNGTGFKQGRDFGAWLGLVPKQESTGDRTILGKISKRGNKYLRTLFVQAAHVVLERRPSAAMRGLWPWAEQASKRLHRNMLAIALANKLARIAWAVLARGGTYQPRITHAA

SEQ ID NO: 18986 - protein, 273 aa, unidentified
  source 1..273: note = protein_01d39a7
  REGION 6..147: note = RuvC_domain
  SITE 9: note = RuvC_P1
  SITE 52: note = RuvC_P2
  SITE 87: note = RuvC_P3
  SITE 89: note = RuvC_P4
  SITE 92: note = RuvC_P5
  REGION 211..273: note = Tnp_domain
  SITE 219: note = Tnp_P1
  SITE 249: note = Tnp_P2
  SITE 257: note = Tnp_P3
  SITE 258: note = Tnp_P4
  SITE 270: note = Tnp_P5
MEIARIGLDLAKNIFEVHGVDAQDKAVLKKTLRREAVTPFFANLSPCIVGMEASSGSHYWAKVFTDLGHEVRLISPQFATPYVKSNKNDRNDAEAICEAISRPSMRFVPPKSSEQLEIQAVHRIRQRLVANRTRLVNQIRGLLAEHGLVVARDISRIRRALVQIADGVDHNLGEMFVELVRDVREELRELDERVVAYTKRIRDLFRSNEMCRRIGKIEGIGPITATALVAAVGDRTCFKNGRQFAAWLGLVPKQRSSGGNSRLFGISKRGDRY

SEQ ID NO: 18987 - protein, 337 aa, unidentified
  source 1..337: note = protein_e1619de
  REGION 14..165: note = RuvC_domain
  SITE 17: note = RuvC_P1
  SITE 65: note = RuvC_P2
  SITE 103: note = RuvC_P3
  SITE 105: note = RuvC_P4
  SITE 108: note = RuvC_P5
  REGION 208..295: note = Tnp_domain
  SITE 216: note = Tnp_P1
  SITE 246: note = Tnp_P2
  SITE 254: note = Tnp_P3
  SITE 255: note = Tnp_P4
  SITE 268: note = Tnp_P5
MKKNQEIRLFSESVGIDVSKLTIDVFLYNKKSHRQFGNTAKGFILMQKWIKSEVNDFNDLIYCFEHTGWYCILLSHFLHEESLFYCCINPLELKRSMGFKRGKTDKTDSYEIARFAWLRKEELNASVPMPLKLIELQRLMSIREQFVKQSTALKNLEKGLLVTIEKLTNDIGLKVIRQSILQLEQQVTKVEKAMEELIKLEPEMTTNYKLSKSVKGVGKILAIQMLLHTHNFTRFNEWRQFSAYCGLVPYPFQSGTSINGRKKIHSISDVKMKSLLSMSAISAIQHDSELKMYYHKRVEEGKPQMVALNIIRNKIVSRIFATVKRGTPYVELNKFAS

SEQ ID NO: 18988 - protein, 400 aa, unidentified
  source 1..400: note = protein_b49f581
  REGION 4..160: note = RuvC_domain
  SITE 7: note = RuvC_P1
  SITE 57: note = RuvC_P2
  SITE 97: note = RuvC_P3
  SITE 99: note = RuvC_P4
  SITE 102: note = RuvC_P5
  REGION 275..363: note = Tnp_domain
  SITE 283: note = Tnp_P1
  SITE 313: note = Tnp_P2
  SITE 321: note = Tnp_P3
  SITE 322: note = Tnp_P4
  SITE 335: note = Tnp_P5
MISVGIDVSKEKSTVCILKPYGEIVSRPFEVCHVEKELSELATMLLRLDDEIRVIMEATGIYHLPVLSYLKEKGFFVAVINPFEMKEYRCQGLRRVKTDKQDAITISNYGIDHWYRLKDYEAEESVYAELKLLGRQYRHYMRMRVESVLELTHLLDYTMPGIKKLLKGWNETNGKDKLSDFAEEYWHYDNITRQSEEEFVESYVEWAERKGYHRRQDKAEKIYALAKEGIPTVSSSTPSTKMLVQEAVRVLREVDNTLMTILTQMQTLAKSLPEYPVVRAMGGVGNVLAPKLIAEIGDVRRFHSGKALIAHAGIDAPPYQSGQFTGTERKISKRGSSSLRKIGYEVMRCLKTHKAPKDALVYEFILKKEKEGKSKRAAKIAGLNKFLRIYYARVMEVYQE

SEQ ID NO: 18989 - protein, 388 aa, unidentified
  source 1..388: note = protein_f57ed4a
  REGION 4..160: note = RuvC_domain
  SITE 7: note = RuvC_P1
  SITE 58: note = RuvC_P2
  SITE 99: note = RuvC_P3
  SITE 101: note = RuvC_P4
  SITE 104: note = RuvC_P5
  REGION 265..348: note = Tnp_domain
  SITE 270: note = Tnp_P1
  SITE 300: note = Tnp_P2
  SITE 308: note = Tnp_P3
  SITE 309: note = Tnp_P4
  SITE 321: note = Tnp_P5
MNYAGIDISKYKHDICVLNSFGEVTCDALSFTNDATGFADLLNILSQSNQDEIRIGFEATAHYSLNLKLFLEKNGYSFMELNPLLVNKFVKGQTLRRTTTDKLCANAIARYMLQVEYKPYPASFYHNYSLKSLTRLRDRLVRQRSGYLVRLTNVLDHVFPEFKPFFGNRFSSTALHILSNYGSPEAIANMNSRSFDILRRKSHGNFTMDKFVKLKSLAKNTVGGWNDIFKIELETLFDIYTQIDGKINVLEAEITGIISEINPPTLSIKGIGPISAAIIVSELGDIRRFSSPDKVLSFAGLEPGYFQSGTSEFSGRMVKRGSSILRYTIINCCRSMRLHNEVFSTYYYKKIAEGKPHRVVLSHMAKKLVRLIYRLETTGALFNSAIQR

SEQ ID NO: 18990 - protein, 346 aa, unidentified
  source 1..346: note = protein_3f7ed55
  REGION 7..149: note = RuvC_domain
  SITE 10: note = RuvC_P1
  SITE 53: note = RuvC_P2
  SITE 88: note = RuvC_P3
  SITE 90: note = RuvC_P4
  SITE 93: note = RuvC_P5
  REGION 211..297: note = Tnp_domain
  SITE 219: note = Tnp_P1
  SITE 249: note = Tnp_P2
  SITE 257: note = Tnp_P3
  SITE 258: note = Tnp_P4
  SITE 270: note = Tnp_P5
MEELKVVGLDLAKAVFQVHGINSQGRKLCAKRLKRSEVMDFFANLPPVLVGMEACGGAHEWARRISSLGHHVKMMAPQHVKPFVQGNKTDARDAAAIAEAAGRESVPSVAIRNIEGQQMQALHRVRELWMKQRVAVSNQIRGLLAEFGEVMPLGIKKLKEDVALWQARATPELAVLKEVIEQLVSALRQLEERISVLELKIRVLHKGNAASRLIESIPGVGLLSATAAVASFGQCESFESARKFASCLGLTPREHSSGGKQMLLGITKRGNKYVRKLLIHGARAVLKARMNKEAYAEDWAVKLAKRRGHNIAAVALAAKNARRIWAMLRTGEVFRVDYAQADGAYA

SEQ ID NO: 18991 - protein, 292 aa, unidentified
  source 1..292: note = protein_ae48313
  REGION 8..165: note = RuvC_domain
  SITE 11: note = RuvC_P1
  SITE 67: note = RuvC_P2
  SITE 107: note = RuvC_P3
  SITE 109: note = RuvC_P4
  SITE 112: note = RuvC_P5
  REGION 208..272: note = Tnp_domain
  SITE 216: note = Tnp_P1
  SITE 246: note = Tnp_P2
  SITE 254: note = Tnp_P3
  SITE 255: note = Tnp_P4
MRALKQVLGVDVAQKELVVTLGRLLEDLSIELYGHKVFRNTEKGFSSLLAWTKKFTDSDSEVRFVMEATGVYHQKFAYFLDDNRCALSIILPNKISNYIRTLEVKTITDKSCSEAIARFGLERKLDNWTRPKKTYRSLQQLTRERDQVVLERSAVKNQLHAESQEAEPHERSLERLNERIRFLNKQEKEIKGDIEQIVNKHAELKKEVEIISSIPGVGELTAVIILAETNGFDLIRNKKQLTSYAGFDVKEKHGGARAIRNFGKKQAEDIKKRKPKFKKGNVFAFNGSRKMG

SEQ ID NO: 18992 - protein, 345 aa, unidentified
  source 1..345: note = protein_71b3644
  REGION 11..155: note = RuvC_domain
  SITE 14: note = RuvC_P1
  SITE 59: note = RuvC_P2
  SITE 94: note = RuvC_P3
  SITE 96: note = RuvC_P4
  SITE 99: note = RuvC_P5
  REGION 218..306: note = Tnp_domain
  SITE 226: note = Tnp_P1
  SITE 256: note = Tnp_P2
  SITE 264: note = Tnp_P3
  SITE 265: note = Tnp_P4
  SITE 277: note = Tnp_P5
MNKLTPTYVRLAVDLAKQVFQVAGEDASGRVVYEERVKSRAAFTKLLEGLDPKVEVLLETGPGAQAWARLIQGVGAKVRILPAQRVAEHRSGAKNDRNDCLAILRAGRDEMLHDVPVKSIEALGMQAQHRIRTGYIRRQTFISNQLRGLLMEHGIAVSKSNAALSLWVGRIQTDTSYPIPPMLRELIADLWAEWGHLAQRRERIDKQLEQTAKSDELARRLMTIRGFGPIMVTALIAKQSQPERFPNARQFAAYFGLVPDQHSSGSRVRLGRMTRRGDAYIRSLAVTGAQSVLHHVKADATETDDKRLQRWCRQHGKKGAAIRLANRNLRIAWVVMTTQSEYRRQ

SEQ ID NO: 18993 - protein, 342 aa, unidentified
  source 1..342: note = protein_bd74f66
  REGION 6..148: note = RuvC_domain
  SITE 9: note = RuvC_P1
  SITE 52: note = RuvC_P2
  SITE 87: note = RuvC_P3
  SITE 89: note = RuvC_P4
  SITE 92: note = RuvC_P5
  REGION 210..295: note = Tnp_domain
  SITE 218: note = Tnp_P1
  SITE 248: note = Tnp_P2
  SITE 256: note = Tnp_P3
  SITE 257: note = Tnp_P4
  SITE 269: note = Tnp_P5
MTEVMIGVDLAKSVIQIHGASMSGRLLFRKKLSRGQFLRFMESQSGAVVVMEACSSAHYWARELATLGHEVKLIAPQYVRPFVKRQKNDAADAEAIVVAAQRPEMRFVEPKSEDQQAKAVLFRARKRIVRQRTELVNALRAVLYEYGHVVPLGLGHIKRMEALVDDADSALPKLVREECSDLLAQISEKTARIEDKTKKIAGLAQQSNVARRLKTMPGVGPMVALAVEAFAPAMDSFKCGRDFAAWLGLVPRQFSSGGKERLGRVSKAGQADIRRLLIIGAMARVSWVSRRSPVQGSWLSRMLARKPRMLVAIALANKMARRMWAMLTKQEDFCDPMLAVAA

SEQ ID NO: 18994 - protein, 338 aa, unidentified
  source 1..338: note = protein_4068e28
  REGION 6..152: note = RuvC_domain
  SITE 9: note = RuvC_P1
  SITE 53: note = RuvC_P2
  SITE 91: note = RuvC_P3
  SITE 93: note = RuvC_P4
  SITE 96: note = RuvC_P5
  REGION 211..298: note = Tnp_domain
  SITE 219: note = Tnp_P1
  SITE 249: note = Tnp_P2
  SITE 257: note = Tnp_P3
  SITE 258: note = Tnp_P4
  SITE 270: note = Tnp_P5
MAIVTIGIDLAKNVFAVHGINEAGKPVLVKPTVARGKLLELIASLPPCTIGMEACSGAHHWARLFMTHGHTVRLMAPKFVAPYRLSGKQGKNDAADAAAICEAVQRPHMRFVPIKTVEQQGQLCIHRVRQGFIEQRTATINRIRGLLSEFGIVLPLKAATIRREAMAHLEDLPGWANTVIGDLLSEVSHLDERVEQYDQHIEQIAKEDSRTQQLMRLPGVGPTTATAILAMIGNGHEFKCGRQFAAWLGLVPGQYSSGGKARLGHITKAGDSYMRSLLVLGARAVLNSAKNKSDSTSRWAVALAERRGYWRAIVAIAAKNARMAWASLALGERFAMPA

SEQ ID NO: 18995 - protein, 360 aa, unidentified
  source 1..360: note = protein_bcce9f1
  REGION 14..161: note = RuvC_domain
  SITE 17: note = RuvC_P1
  SITE 66: note = RuvC_P2
  SITE 102: note = RuvC_P3
  SITE 104: note = RuvC_P4
  SITE 107: note = RuvC_P5
  REGION 234..318: note = Tnp_domain
  SITE 240: note = Tnp_P1
  SITE 271: note = Tnp_P2
  SITE 279: note = Tnp_P3
  SITE 280: note = Tnp_P4
  SITE 291: note = Tnp_P5
MAIKDDANVCAIVGGVDTHKDLHVAAVVDERDRVLETRSFATTRQGYRQMLAWMRSFGDLQRIGVESTGSYGAGLLRFMQQAGVTVLEVTAPDRQDRRKRGKNDDLDAQNAAHAAFAGNRTVTPRSRDGMIEALRVLVACRKTAVMARRIALQMIQNTIVAAPDGLRDLLRDMTRMQLVRTLAAWRPDLTSYREIEAAYRIALKSLARRYLELHDEIADLDTMIAAIVDELAPNLVKRNSIGRTGAAQLLLTAGGNPDRMRSEASFAALCGVSPVPASSGKTVRHRLNRGGDRAANSALHIIAIGRLRTDQKTKDYVARRVAEGHSKLDAIRALKRYMAREVFALIMQRQKEINATRIAA

SEQ ID NO: 18996 - protein, 319 aa, unidentified
  source 1..319: note = protein_00f8b27
  REGION 2..141: note = RuvC_domain
  SITE 42: note = RuvC_P2
  SITE 80: note = RuvC_P3
  SITE 82: note = RuvC_P4
  SITE 85: note = RuvC_P5
  REGION 185..273: note = Tnp_domain
  SITE 193: note = Tnp_P1
  SITE 223: note = Tnp_P2
  SITE 231: note = Tnp_P3
  SITE 232: note = Tnp_P4
  SITE 245: note = Tnp_P5
MQKSKALKEEVVSNHLQAIASAIDCIKEELGMDNDSFIICAEHTGQYTYPLMCASKSVGCKLWLENPSQIKYCSGVTRGKNDRVDARRIAEYAMRFIDKARPYERPSEELTRLKQLEAERSLYLTDLAKYKAQLTDQRDYMEPEIFKRKSKRLKDMIKALEKTLKAINDEMSKVLASSTTLTRQMQLLQSIEGVGPVVAMNMIIATEAFTRFDNPRQFCCYVGVAPFAYTSGSSQHSKNRVSQRAVKYIKCLLHMSAVAITHKKTGELKTYFERKVAEGKNKMTVLNAMRAKLVARMFAVIRKNQIYQPIFFGLGLQKS

SEQ ID NO: 18997 - protein, 270 aa, unidentified
  source 1..270: note = protein_89d2c30
  REGION 1..73: note = RuvC_domain
  SITE 15: note = RuvC_P3
  SITE 17: note = RuvC_P4
  SITE 20: note = RuvC_P5
  REGION 136..209: note = Tnp_domain
  SITE 144: note = Tnp_P1
  SITE 174: note = Tnp_P2
  SITE 182: note = Tnp_P3
  SITE 183: note = Tnp_P4
  SITE 195: note = Tnp_P5
MHPQRVKAIAAAKLKNDRIDSATLAHLLRCDLLPEAWMADEVTRELRQQVRMRATLVRQRTRLKNQVHAILHPQGLRYEGSDLFGRGGRAWLKQVSLPVAGGSAIQVYLKLIDAFSAQIQEQEQQLRKRWEKDARVTWLRTIPGIGWYSAILLIAEIGDLQRFADKRALTNYAGLGPWLRESADKRRTGSITRVGPALGQAAAAQEAQEHGCGGHRAQTAGRGLGHAARRRRLRRKAFYRRLSKAAVQKWKANPASHFRTATTAAAVIKV

SEQ ID NO: 18998 - protein, 364 aa, unidentified
  source 1..364: note = protein_a6aa1f3
  REGION 7..156: note = RuvC_domain
  SITE 10: note = RuvC_P1
  SITE 60: note = RuvC_P2
  SITE 96: note = RuvC_P3
  SITE 98: note = RuvC_P4
  SITE 101: note = RuvC_P5
  REGION 221..298: note = Tnp_domain
  SITE 229: note = Tnp_P1
  SITE 259: note = Tnp_P2
  SITE 267: note = Tnp_P3
  SITE 268: note = Tnp_P4
  SITE 280: note = Tnp_P5
MKRKVYVGMDVHKETIQIAILPSNTKALVKEQQIKHEEGQIKKFIQKLKSEGTEIHCCYEAGVTGYPLYRYLKTLGVNCIIAAPGKIPRQSSDKIKTDKRDAIKLARLLRSGELESIHVPSEEDEAVRDYLRSRDSLRLDLGRNRQRLMKFLLRKGITYSTTKYWTASHYKWLNNLHFENEILQATFNDYYSRVRVQEENLKAMDQKIREIAESEPYREKVGILRCFRGVDYLTAMFLLSEVNDFKRFKTAGSFMSFLGLVPGEYSSGSKRKQTGITKTGSPRLRRILVEAAWQHRFPGTGSKVVVARRVGQSALVVSLAEKASLRLHKKFKSMQLRGKTPQVMITAVSRELSGFLWAAMNLVA

SEQ ID NO: 18999 - protein, 382 aa, unidentified
  source 1..382: note = protein_4cd0b5e
  REGION 11..166: note = RuvC_domain
  SITE 14: note = RuvC_P1
  SITE 62: note = RuvC_P2
  SITE 102: note = RuvC_P3
  SITE 104: note = RuvC_P4
  SITE 107: note = RuvC_P5
  REGION 254..340: note = Tnp_domain
  SITE 262: note = Tnp_P1
  SITE 292: note = Tnp_P2
  SITE 300: note = Tnp_P3
  SITE 301: note = Tnp_P4
  SITE 313: note = Tnp_P5
MNWSGGYMIYVGIDMAKKKFDYCIIDSELSVIKRGILINNIYGFSEFLRIIKKYKNIKLGIESTGIYHVNLYTYLINNNCNIILLNPMETKLLKSSRIRKNKTDKIDAEAIAKYIIIRKNNIITMEKDTENTYTNLREYVYTYVRINRKIAMAKNQLIRDLDLLYPGLTEIVNTDSKYFIEIINNIEKIIENNYKIKYISESKYSEIRNILINSNTNNNAVKYDIDINIETLELLNKQLMKTKSIIEDEYNSIDSKIKTIPGIGTITGSIILSSIGDINKFDSVLKLRAYSGMDPVVKQSGDYNITSKISKRGNPLIRYALYLSTIPAIKFNPVIKRYYTRKKNDGMKGNKLLIACSNKLLNIIYSVLKNNKDFEEPLDNIN

SEQ ID NO: 19000 - protein, 433 aa, unidentified
  source 1..433: note = protein_a31eeef
  REGION 42..200: note = RuvC_domain
  SITE 45: note = RuvC_P1
  SITE 98: note = RuvC_P2
  SITE 139: note = RuvC_P3
  SITE 141: note = RuvC_P4
  SITE 144: note = RuvC_P5
  REGION 305..392: note = Tnp_domain
  SITE 313: note = Tnp_P1
  SITE 343: note = Tnp_P2
  SITE 351: note = Tnp_P3
  SITE 352: note = Tnp_P4
  SITE 365: note = Tnp_P5
MDVDGFLSILRISYEVVALISSEEHKYYLILIKIGVYTMLYLGIDIAKHKHYASIMDSNGNPVEKPFPVYNHKKGGQALLTKIYQHIDAPTEIKIGMEATGHYWLALYSFLLDHGFSVIVLNPIQTNAWRKGTEIRKRKTDAIDATMIADIIRFGNFLETPLVDEKMFALKQLSRFRNSLVSSMGDLKRKSLVVLDQTFPEYQKMFSDVFGKTSTQLLLEYASPSDYEQVSIDDLTQIIEQASRNRLGKEKAHQIIESASHSFGITFGKEAFSFQLKMLMEQIHFIEIQLKQCEEQMDQLLIELDTPITTVPGIGPILGATILGEIGDIKRFDKPSKLVAYAGIDASVSQSGQYNSTSMSISKRGSSHLRRALFQAAVTGYKYDPILKAFYEKKKQQGKHYYVCICAVARKLCHIIYAILKNNKPYQVPIHTS

SEQ ID NO: 19001 - protein, 339 aa, unidentified
  source 1..339: note = protein_717a9cf
  REGION 6..148: note = RuvC_domain
  SITE 9: note = RuvC_P1
  SITE 52: note = RuvC_P2
  SITE 87: note = RuvC_P3
  SITE 89: note = RuvC_P4
  SITE 92: note = RuvC_P5
  REGION 211..295: note = Tnp_domain
  SITE 219: note = Tnp_P1
  SITE 249: note = Tnp_P2
  SITE 257: note = Tnp_P3
  SITE 258: note = Tnp_P4
  SITE 270: note = Tnp_P5
MNITTIGIDLAKTSFSLVGTDKHSKIVLRKTVNRGKLLSVIAQCPPCLIGLEACSGAHYWAREFEKLGHQVRIIAAKFIEPYRKGGKNDNNDAEAICEAVRRPNIWYVPVKSADQQAALCVHRVRQGVVRERTAWINRLRGLLTEFGIVIPKGRYAAQSAVPVILANLENGLPELARQMIHDLWLSIQQANDQILSYDQALARLAREDETAKRLLTIPGVGEQIATGVVASVPDPRLFKNSRQFAAWLGLVPRQYTTGNKIRLGRITKRGDKYLRMCLVHGARAVVANLGDKQDHVSCWVRDLIERRGYLRAVVALAARNARLIWTLMMKREDYRAIDA

SEQ ID NO: 19002 - protein, 338 aa, unidentified
  source 1..338: note = protein_353c23f
  REGION 6..148: note = RuvC_domain
  SITE 9: note = RuvC_P1
  SITE 52: note = RuvC_P2
  SITE 87: note = RuvC_P3
  SITE 89: note = RuvC_P4
  SITE 92: note = RuvC_P5
  REGION 211..300: note = Tnp_domain
  SITE 219: note = Tnp_P1
  SITE 249: note = Tnp_P2
  SITE 257: note = Tnp_P3
  SITE 258: note = Tnp_P4
  SITE 270: note = Tnp_P5
MKITTIGLDIAKSVFHFVAVNQAGKLVKKKMLKRKDVIHFVAKIEPCLIVMEACGSANYWAREFQQFGHQVKLIAPQFVIPYRQGNKNDYNDALAIAEAAQRPNMRFVQPKPVEQQDVQMLHRMRERLNKQSTALVNQVRGMLAEYGIVIARSKAAFRKEFPEILSDESNELTVKGRYIFNQLHEEFTDIEIRLKSCDKQIIEERNTNPVCQRVETSPGIGPITSTAFYAAVGEGKDFTNGRHFSAWCGLVPKQHSSGGIDNLLGISKRGNAYLRTLFIHGARAVLQHCGGKQDRLSRWAYALAERKGFNKACVAVANKLARMTWAIAAREDEYRTFA

SEQ ID NO: 19003 - protein, 389 aa, unidentified
  source 1..389: note = protein_611b1a0
  REGION 5..161: note = RuvC_domain
  SITE 8: note = RuvC_P1
  SITE 59: note = RuvC_P2
  SITE 99: note = RuvC_P3
  SITE 101: note = RuvC_P4
  SITE 104: note = RuvC_P5
  REGION 265..352: note = Tnp_domain
  SITE 273: note = Tnp_P1
  SITE 303: note = Tnp_P2
  SITE 311: note = Tnp_P3
  SITE 312: note = Tnp_P4
  SITE 325: note = Tnp_P5
MMFYAGIDIAKLNHFASVISDEGEVLIEPFQFSNDSDGFQLLISILDSFEKDSLIIGLESTAHYGDNLVRYLVASDYKVCVLNPIRTSTLRKTNIRKTKTDKVDTYIICKALMIQDHLRFVSFYDLDLSDLKTLGRFRQKTIKQRTRLKIQLTSYVDEAFPELQYFFKSGLHQKSVYALLKEAPTPEAIASMHMTHLAHLLTVTSHGHFDKRTAQQLRALAQKSVGVSDSAISIQITQTISQIELLDSQLKNVDSEMTEIVKFHDSVIMTIPGIGYINGGMILGEIGDVHRFSSPGKLLAYAGLDPSVYQSGNFQAKRTRMSKRGSKVLRYALMNAAHNVVKNNATFEAYYEAKKSEGRSHYNALGHCAGKLVRIIWKMLTDEVEFNLD

SEQ ID NO: 19004 - protein, 337 aa, unidentified
  source 1..337: note = protein_55cc45c
  REGION 1..107: note = RuvC_domain
  SITE 2: note = RuvC_P2
  SITE 42: note = RuvC_P3
  SITE 44: note = RuvC_P4
  SITE 47: note = RuvC_P5
  REGION 211..297: note = Tnp_domain
  SITE 218: note = Tnp_P1
  SITE 248: note = Tnp_P2
  SITE 256: note = Tnp_P3
  SITE 257: note = Tnp_P4
  SITE 270: note = Tnp_P5
MEDTGHYHFNLLHHLLKEGYSTYLINPSKTDAERKLTGNITKNDQQDSMQIADILAYPARKKLYRKVDMTFFSMDEQKSLTRLHADLTEQLCPIGNKIQKSLDILFPEYNSLFGGHYGKTYMKILMTFKSATNIAEADISDIKEAMKHNGRGRGVSFTAEDLQALARNSVAQANKGEEYALEARLNQYTVVAEQLEKVDKKIEELSKETNSPMLTIPGISHLSCTTILAEIRCIGNFNSAAKLTKFAGVAPKHYESSQFDAKHCSISKKGNKYLRKILYQIITPVINNNKVFKDYYDKKISEGKSHRCAQGHCVRKLLRIIFHILATGEGFDPNKLK

SEQ ID NO: 19005 - protein, 404 aa, unidentified
  source 1..404: note = protein_e8f3121
  REGION 4..161: note = RuvC_domain
  SITE 7: note = RuvC_P1
  SITE 60: note = RuvC_P2
  SITE 100: note = RuvC_P3
  SITE 102: note = RuvC_P4
  SITE 105: note = RuvC_P5
  REGION 274..361: note = Tnp_domain
  SITE 282: note = Tnp_P1
  SITE 313: note = Tnp_P2
  SITE 321: note = Tnp_P3
  SITE 322: note = Tnp_P4
  SITE 334: note = Tnp_P5
MNYLGIDVSKATSRFVFLDNDGEKLTKSFTLNNGHDDFNKLLDRLKELNLLPDNILIGIEATGIWWENLYSLLTEHKFKVIVLNPHQTNKFREALRIKAKTDDIDAYVIAGLLRSQEYASSYIPEESIQSLREITKLRFQLVKDRQNYERQVNALLGLLFPEHAQTAIKNPFAVSSMAILKAYPTAKHLAEAKPKNIEKIVRSIQGNNFNIKEIQFLIECAQKSIYSGRAKHDRGLNLIILLTQVESLQNAIVQLDERTNNILSPSDDTMNFPGSNLLTIPGVGPKTLAAILSAVGSNGQAFPDGKHLIGHIGFFPKIYESGETRHDNTISKRGPKYLRAALYMAAVACLKHNPEFKALYNRKVSQGKTAKQSLVYVAKKLAHLCLSMLKSGEAYNPSRVFMPV

SEQ ID NO: 19006 - protein, 393 aa, unidentified
  source 1..393: note = protein_bb7bcc4
  REGION 5..159: note = RuvC_domain
  SITE 8: note = RuvC_P1
  SITE 59: note = RuvC_P2
  SITE 98: note = RuvC_P3
  SITE 100: note = RuvC_P4
  SITE 103: note = RuvC_P5
  REGION 268..355: note = Tnp_domain
  SITE 275: note = Tnp_P1
  SITE 305: note = Tnp_P2
  SITE 313: note = Tnp_P3
  SITE 314: note = Tnp_P4
  SITE 327: note = Tnp_P5
MHSCLAIDVAKGKSMVSLISSCGEVLIDPYEINHSINDFTNLLNRIKNLKLDNISVIMESTGIYHRPIERFFLENNFKVYTINALYSKMYKRNLRKTKTDKLDCISLAELFFTTDFKQYIKPDDLYLNMNALSRQYFALCDLCTNIKNRYKNLIYLCFPEYEFIFKGETIYSNIALAFIEKYPHTDIISNTRIDALQNFFKKNNFRYWKGKANIIKEYALISYPSVNMNDESVSNLSQLARLINDYQKEIETIKYKLVFLAKKSKYFESINSIFGIGEFTTSILIAELGDINRFNNIKELTAYCGLDPSIKQSGRSIDIHGPISKSGNKYLRKILFVCCLNIVRLSAKCHVQNDIEIYYRKKRNEGKHHYAATIACTTKLLRKILALCKQLDK

SEQ ID NO: 19007 - protein, 434 aa, unidentified
  source 1..434: note = protein_9d9b469
  REGION 6..159: note = RuvC_domain
  SITE 9: note = RuvC_P1
  SITE 57: note = RuvC_P2
  SITE 98: note = RuvC_P3
  SITE 100: note = RuvC_P4
  SITE 103: note = RuvC_P5
  REGION 221..306: note = Tnp_domain
  SITE 229: note = Tnp_P1
  SITE 259: note = Tnp_P2
  SITE 267: note = Tnp_P3
  SITE 268: note = Tnp_P4
  SITE 279: note = Tnp_P5
MARVIIGMDPHKRSATIEIIDGREKVLAQGRFGTDSDGYRAMLAAGRRYPQRVWAVEGCNGIGRHLAQRLVADSEAVVDVPAKLSARARVFATGQGRKTDPVDAHSVAVVALGTNGLRQVTVDDATAALRLQVDRRDGLGRARTDTVSRLHALLLDLVPGGAKKHLSAPQARTILATVRPRELVGRTRRQLASDLITELAIIDKKIKQANAVLTELIAATGSRLQQLNGIGPSNAARLIGDIGDITRLASRHHFASWNGTAPLEASSGEQQRHRLSRAGNRRINRALHIMAVVQLRHDTEGRAYFRRKLAAGKTPMEAMRCLKRRLSDVVYRQMADDASKASPGGQPGATLSSSAADPTPTVDTSDKPLPGLNHEPTPPGVQLQAAAEPPPTAVSSRPPTRTAKPRRPATRTTTPTSASTAASAQPTKRSSSKA

SEQ ID NO: 19008 - protein, 349 aa, unidentified
  source 1..349: note = protein_4a1e190
  REGION 7..147: note = RuvC_domain
  SITE 10: note = RuvC_P1
  SITE 53: note = RuvC_P2
  SITE 88: note = RuvC_P3
  SITE 90: note = RuvC_P4
  SITE 93: note = RuvC_P5
  REGION 210..298: note = Tnp_domain
  SITE 218: note = Tnp_P1
  SITE 248: note = Tnp_P2
  SITE 256: note = Tnp_P3
  SITE 257: note = Tnp_P4
  SITE 269: note = Tnp_P5
MNEITRIGMDTSKHIFQLHGVDGDEQPVLRRKLRRREMIAFFEKLAPTRVAIEACGASHHWARLLSGFGHKVQLIAPQLVKPYVKRGKNDAADAEALCEAMSRPTMRFVPVKTAEQQAALMLVGLRDRLVRNRTQLANAIRGYAAEFGLAGASGITHVPALLARIEADVALPSLARELFAMQAAEYAQVQAKLAVVEAKLLAWHRADERSRRLAGIPGIGPIGATLLTMKTPAPEAFRSGRQFAAWIGLTPKDHSTAGKARPGVITRAGDEALRSVLVVGATALIRRVREGRSRDGHRFAAWVQDLLRRKPPKLVAVALANKLARIAWKLMITGESFAGRPAPAAAGAV

SEQ ID NO: 19009 - protein, 344 aa, unidentified
  source 1..344: note = protein_7ab7847
  REGION 7..147: note = RuvC_domain
  SITE 10: note = RuvC_P1
  SITE 53: note = RuvC_P2
  SITE 88: note = RuvC_P3
  SITE 90: note = RuvC_P4
  SITE 93: note = RuvC_P5
  REGION 210..297: note = Tnp_domain
  SITE 218: note = Tnp_P1
  SITE 248: note = Tnp_P2
  SITE 256: note = Tnp_P3
  SITE 257: note = Tnp_P4
  SITE 269: note = Tnp_P5
MKQIIRIGMDTSKSVFQLHGVNAAEQPILRKKLSRREMVKFFEKSPPTAISLEACGGSHHWARLLSSFGHEVKLIAPQLAKPYVKRGKNDAADAEALCEAMSRPTMRFVPVKTADQQAALMLVGMRERLIRNRTQLANAIRGFAMEFGIVAAKGMRRIEPLLERIAADQSLPELARALFAMHGAEYRDLLAETNAVEEKLIALHRSDECSRRLAEIPGVGPDGASLLMMKTPDPRMFKSGRDFAAWIGLTPRDHSTAGKVRLGVITRAGDEMLRSVLVVGATALFQHVRIGRSKHTSRWLIALPQRKKPKLVAVALANKIARIAWKLMVSGETYRRPEGQTQAV

SEQ ID NO: 19010 - protein, 339 aa, unidentified
  source 1..339: note = protein_2515e0e
  REGION 5..158: note = RuvC_domain
  SITE 8: note = RuvC_P1
  SITE 56: note = RuvC_P2
  SITE 97: note = RuvC_P3
  SITE 99: note = RuvC_P4
  SITE 102: note = RuvC_P5
  REGION 220..306: note = Tnp_domain
  SITE 228: note = Tnp_P1
  SITE 258: note = Tnp_P2
  SITE 266: note = Tnp_P3
  SITE 267: note = Tnp_P4
  SITE 278: note = Tnp_P5
MSVIIGVDPHKASHTAVAIGGDEREVAKVTVRATCQQTPKLLAWAEPFAERTWAIESAGGLGYLLAQQLVDAGEVVLDVPPTLASRVRVLSTGRSEKNDPNDAFSVAIAALRSKNLRWVERADHTEIMRLLAKRNHDLGRLRAKLICRLHNALAELSPGGIAKELYVSDANRLLGSFEPATPIEHMRHQLALELVDDVARLDEQIKESHRRIRTAVRASKTSLTDLFGVGPVLACSVIGYSGDVGRFANRDSFAAYAGTAPVEHSSGGRVFHRLSLRGHRRLNNAIHMVAICQIRQPHSEGRAYFERKVAEGKTKREALRSLKRHVSNALYRQLVLDVR

SEQ ID NO: 19011 - protein, 354 aa, unidentified
  source 1..354: note = protein_b4bfad0
  REGION 12..159: note = RuvC_domain
  SITE 15: note = RuvC_P1
  SITE 65: note = RuvC_P2
  SITE 101: note = RuvC_P3
  SITE 103: note = RuvC_P4
  SITE 106: note = RuvC_P5
  REGION 231..315: note = Tnp_domain
  SITE 238: note = Tnp_P1
  SITE 268: note = Tnp_P2
  SITE 276: note = Tnp_P3
  SITE 277: note = Tnp_P4
  SITE 288: note = Tnp_P5
MSMLADLVEVVIGVDTHSQTHTAAVVEAGTGGVLARVTVTADPDGYAELVALAEQYSGLRAWAMEGTGGYGAGLARHLAARQEMVVELDRPKRPARRAGAKSDPIDAERAARDALARTRLAQPKSGAERAALQMRLTARRAAVEAAGTAQRQLLAMVITAPEPVRARFRGQSTRGMIATAATLRPRASSADVEALTALSVLRDLARRVRFLQAEALEHEKAIRTIVRTWRPDLLELTGVGPIVAATVLAAWSHPSRCRNEAAFAMLAGVAPIPASSGKTVRHRLNRSGDRQLNRALHTVVLTRLQRDERTRAYAERRRSHGKTDREIKRCLKRYIARELYRHLESPPQRRLDAS

SEQ ID NO: 19012 - protein, 358 aa, unidentified
  source 1..358: note = protein_5500a10
  REGION 20..161: note = RuvC_domain
  SITE 23: note = RuvC_P1
  SITE 66: note = RuvC_P2
  SITE 101: note = RuvC_P3
  SITE 103: note = RuvC_P4
  SITE 106: note = RuvC_P5
  REGION 227..312: note = Tnp_domain
  SITE 235: note = Tnp_P1
  SITE 265: note = Tnp_P2
  SITE 273: note = Tnp_P3
  SITE 274: note = Tnp_P4
  SITE 286: note = Tnp_P5
MVEVLITTIKEASMSEVSTIGLDIGKTVFHAHGADASGRMIFSRRLTRARLLAFFADQPRCLVALEACGGAHHWARELASLGHDVRLIPPAYVKPFVKRSKNDAADAEAICEAAQRPSMRYAAIKTEAQQAAGMVFRTRDLLVRQRTQLINAIRGHLTEFGWVAPKGPSHISVLAGLLDESEELGASLPEAARTMFVVMTEQLEQLNKQIALLDKEIARRAREDASARQLMTIPGIGPITAIAILALAPPPESFAKGRDFAAWLGLTPRQHSSGGKEKLGSISKMGERTLRRLLIIGSSAVVLHASKRGAPAGSWLEQMMARKPRMLVTVALANKTARIVWAVLTKNEEYKAPVAAAA

SEQ ID NO: 19013 - protein, 391 aa, unidentified
  source 1..391: note = protein_2aa29e6
  REGION 4..163: note = RuvC_domain
  SITE 7: note = RuvC_P1
  SITE 60: note = RuvC_P2
  SITE 101: note = RuvC_P3
  SITE 103: note = RuvC_P4
  SITE 106: note = RuvC_P5
  REGION 266..353: note = Tnp_domain
  SITE 274: note = Tnp_P1
  SITE 304: note = Tnp_P2
  SITE 312: note = Tnp_P3
  SITE 313: note = Tnp_P4
  SITE 326: note = Tnp_P5
MISVGIDVAKDKHDCFIINSEGEVLADVFTIPNSLEGFQSLLQKIRSCSSTQDKIKVGLEATGHYSYNILGFLLDNGLPTYVLNPLHTNLYRKSLSLRKTKTDRVDARTIAAMLMSDLGLKPYTNTAYHNEELKSLTRYRFDKVKERGQLKQSISRLVCILFPELEKLVPTLHIVSVYTLLEKFPGAKQIAEAHLTRLKTLLHDASRGRYGRDMAVKIRDAARNSVGSVMPAKSLELQHTIRLIRELDTEIGEIESAIQHIMDKIHSPITTVPGIGTQMGAMILAEVGDFSQFDSPDKILAYAGLSPSTYQSGQLKNCYAHMEKRGSRYLRYAIFNATKYVCLWVPTFSSYFAKKRAEGKHYNVAISHAAKKLVRLIYALEKSGESYHLAA

SEQ ID NO: 19014 - protein, 343 aa, unidentified
  source 1..343: note = protein_0e9c20d
  REGION 6..147: note = RuvC_domain
  SITE 9: note = RuvC_P1
  SITE 52: note = RuvC_P2
  SITE 87: note = RuvC_P3
  SITE 89: note = RuvC_P4
  SITE 92: note = RuvC_P5
  REGION 211..298: note = Tnp_domain
  SITE 219: note = Tnp_P1
  SITE 249: note = Tnp_P2
  SITE 257: note = Tnp_P3
  SITE 258: note = Tnp_P4
  SITE 270: note = Tnp_P5
MHIASIGIDLGKTTFHLVAVGEQSKVVVKKKFSRKQLLAYTANLQSSLIGIEACSGAHFIGATLRRQGHDVRLIPAQFVKPYLKSNKNDFLDAEAIAEAVARQNMRFVPIKTEDQLDLQALHRVRDRLVHHRTAIINQIRGFLLERGITFAKGPANLRSQMPAMLEDAELKISPRMRTLLARVWQEWKQLEIDIADASDEIERISSEDAGCKRLRQIPGIGPLVSTATVAAIGNGAAFRKGRDFAAWLGLVPRQHSTGGKAKLYGISKRGNIYLRRMFIHGARAVLLRVKYDTGGFGQWVHQLEARAPRNKVVVAIANKLARIAWAVLFREEDYRHMAVCAQA

SEQ ID NO: 19015 - protein, 321 aa, unidentified
  source 1..321: note = protein_abd6fde
  REGION 4..147: note = RuvC_domain
  SITE 7: note = RuvC_P1
  SITE 52: note = RuvC_P2
  SITE 92: note = RuvC_P3
  SITE 94: note = RuvC_P4
  SITE 97: note = RuvC_P5
  REGION 191..278: note = Tnp_domain
  SITE 199: note = Tnp_P1
  SITE 229: note = Tnp_P2
  SITE 237: note = Tnp_P3
  SITE 238: note = Tnp_P4
  SITE 251: note = Tnp_P5
MTYIGIDVSKDSFVVAYSPDKNSKTKTFKNTTKGIHEFIRTISKEEHHCVMEATGNYSALLVYLLSEAGITTSLENPLKVKNFARAMLSTVKTDEIDARLIALYGEKMQPAPYKLRSDAILTLKQKRTVIRQLKKQLIATRNLKGSMEVLPFFDAKCKKSIDKTIAFLEKQIKDLEEDLTSLAKSEYKKQMDLLTSVKGIGITLAAALIMATGGFTYFDNAKQLTRHLGLSPTYQQSGTSVNFKGHINRNGDSSLRSQLYVAAFASLRCNTECRACYDRLRSNGKPGKVAVIAVANKLIRQAFAIVTQEKPYVDGYISSKK

SEQ ID NO: 19016 - protein, 409 aa, unidentified
  source 1..409: note = protein_337d9f6
  REGION 6..162: note = RuvC_domain
  SITE 9: note = RuvC_P1
  SITE 59: note = RuvC_P2
  SITE 99: note = RuvC_P3
  SITE 101: note = RuvC_P4
  SITE 104: note = RuvC_P5
  REGION 271..356: note = Tnp_domain
  SITE 309: note = Tnp_P2
  SITE 317: note = Tnp_P3
  SITE 318: note = Tnp_P4
MKRYYIGVDWGDRLHQVYVGDEEGRKVRDIKVPESVEGLAEMGRWLDEQRAEGVELWAAIEKPAGRIVDFLLDHGVEVYPVNPKAVDRVRDRYRMSGSKSDAFDAYVLAEFLRTDQAHLKALQPSSEKAQELKMLCRDQRRVGRHKARLLNQLTITLKEYYARPLDAFGDLDTELALDFLTRYPTPAHLSALKRKEFNRFATQEHHLSKQRCEELWEKLSPAQLKVPEHVVRAKAQLVEVLIDQLRAAIKAVKSYNHKVESFFASSPAALIAKTLPGGNSGTLVAAIWAELGDGAGRWESFRHLQAEAGVVPVTKASGKSRVVHFRFACNKHLRYLLYWFSFVSLNHSEWAKIYYRQQRAQGHNHPQALRALGAKWLKIIFVMWRDHKAYDEKLHLANIALQKMRQAAA

SEQ ID NO: 19017 - protein, 391 aa, unidentified
  source 1..391: note = protein_14c1328
  REGION 4..163: note = RuvC_domain
  SITE 7: note = RuvC_P1
  SITE 60: note = RuvC_P2
  SITE 101: note = RuvC_P3
  SITE 103: note = RuvC_P4
  SITE 106: note = RuvC_P5
  REGION 266..353: note = Tnp_domain
  SITE 274: note = Tnp_P1
  SITE 304: note = Tnp_P2
  SITE 312: note = Tnp_P3
  SITE 313: note = Tnp_P4
  SITE 326: note = Tnp_P5
MILVGIDVAKDKHDCYISNSDGEVLFDVFTIPNTMDGFSELYEKISSVAEDLSKVKVGLEATGHYSYNILGFVLNKGLTTYVINPLHTNLFRKGQSLRKTKTDRIDARSIALMLLTDSSIEPYSLTSYHNEELKSLTRYRFTKVQERAKYKTSVARLVSILFPELEKLVPTLHMKSVYAMLSEFPGASHIASAHLTRLTHLLYVESKGHYGKDKAIEIREAARASIGSVMPAKSLELSHTISLINILSNEIDEIEAEIKRIMDEINSPILSVPGISYRMGAMILAEIGDFDRFSSPDQILAYAGMSPSTYQSGQLTSSYAHMEKRGSKYLRYALFNATIYVCKWNPTFSAYLAKKRAEGKHYYVAITHAAKKLVRLIYALETSGERYRIAA

SEQ ID NO: 19018 - protein, 410 aa, unidentified
  source 1..410: note = protein_c32c544
  REGION 7..170: note = RuvC_domain
  SITE 10: note = RuvC_P1
  SITE 64: note = RuvC_P2
  SITE 110: note = RuvC_P3
  SITE 112: note = RuvC_P4
  SITE 115: note = RuvC_P5
  REGION 282..368: note = Tnp_domain
  SITE 289: note = Tnp_P1
  SITE 319: note = Tnp_P2
  SITE 327: note = Tnp_P3
  SITE 328: note = Tnp_P4
  SITE 341: note = Tnp_P5
MSNSLLVGIDVSLNDNKVRILHPDGTSISKFVVSNSVPGAKVLSQKVTEVMNRYSFDSLVIGLESTSVYGDPLVYFLKQDASLNRFNTKIHVLNATQVNKFKMFYPDLPKTDDIDAWIIDEHLRFGRINKEVYMDDRYKALQKLTRARFHTAQNLAREKNWFLNNLFLKFSSLAQENIFADRFGATCSSLIEEFFSVDEIAYMPIEELVEFINKKGKGHFENPDEIAATVQKAARSSYRLPKTVTDSVNQVLAVSFAAMKAYKEQLKIFDKAIEEQLKLIPNTLTSIKGIGPVYAAGIVAEIGDIHRFKDHAALAKFAGIAWTKYQSGNFTAANTHLIKFGNRYLRYYIMEATNKVKMHDYELKRFYDLKYSQTPKTPHKRALALTARKFVRLVYALLHSNRLYTPPKGE

SEQ ID NO: 19019 - protein, 323 aa, unidentified
  source 1..323: note = protein_c8017c5
  REGION 4..152: note = RuvC_domain
  SITE 7: note = RuvC_P1
  SITE 57: note = RuvC_P2
  SITE 97: note = RuvC_P3
  SITE 99: note = RuvC_P4
  SITE 102: note = RuvC_P5
  REGION 197..283: note = Tnp_domain
  SITE 205: note = Tnp_P1
  SITE 234: note = Tnp_P2
  SITE 242: note = Tnp_P3
  SITE 243: note = Tnp_P4
  SITE 256: note = Tnp_P5
MFYLGVDVSKKTLDCMLLNTSTSKSKSKSIPNTNAGFQQLLEWLSKQGAPNAHVVLEPTGVYHEPAALALADAGLTLSLVNPAQLRQFALALGFKTKTDKADSMVLARYGATQQPEAWQPPSKSARRLKALLARRDAVADDIQREQNRLEAIEFGDSPSEVRASINKSIEFLDGELKTLEAMIHAHIDDDPDLRSNKKLLESIPGVGERVSIHMTALFAAKTFTSAEQLAAYLGLVPVQWESGSSVRGRPRMSKAGPKHLRKLLYMPAVTARRWNPHIKAMSDRLLAKGKTLMTVIGACMRKLAHLCFGVINSRKPYNENYAM

SEQ ID NO: 19020 - protein, 397 aa, unidentified
  source 1..397: note = protein_85d5ea1
  REGION 19..166: note = RuvC_domain
  SITE 22: note = RuvC_P1
  SITE 69: note = RuvC_P2
  SITE 106: note = RuvC_P3
  SITE 108: note = RuvC_P4
  SITE 111: note = RuvC_P5
  REGION 233..319: note = Tnp_domain
  SITE 241: note = Tnp_P1
  SITE 271: note = Tnp_P2
  SITE 279: note = Tnp_P3
  SITE 280: note = Tnp_P4
  SITE 292: note = Tnp_P5
MPRTNLQKQNDFSGQDFYVGLDVHKRSWSVTIRSLGIQVGHFTQPPGAEGLYDYLQRNFPGGHYHSAYEAGFCGTYAHEELCKLGINNILLHAADIPVTDKQKKNKTDLHDSRAIAEHLERGNLHGIHVLSRDQQELRGLFRLRQSKVADIVRSNNKLKSFLMYHSIVIPETVSTTGFLSVKVLDWLAIELSSMAGTLTLQQYIADLKYQREQLYRITKSLRTEILILHKQTYESLLSVPGIGSITAMGLIAELADFSRFDDADKYSSYLGLCPWEDSSGDTVKTKGMQPRCNSHLRPLLIEASWKAISKSRSMFAYYSKHAGKDSKKAIVKVARKLAMIAKGVAISGKPYQEDYLKQKQQEYQKMKALKAERFSSGIAEQHINKQPGTELYVPMPG

SEQ ID NO: 19021 - protein, 343 aa, unidentified
  source 1..343: note = protein_8f8476b
  REGION 7..149: note = RuvC_domain
  SITE 10: note = RuvC_P1
  SITE 53: note = RuvC_P2
  SITE 88: note = RuvC_P3
  SITE 90: note = RuvC_P4
  SITE 93: note = RuvC_P5
  REGION 212..301: note = Tnp_domain
  SITE 220: note = Tnp_P1
  SITE 250: note = Tnp_P2
  SITE 258: note = Tnp_P3
  SITE 259: note = Tnp_P4
  SITE 271: note = Tnp_P5
MQTMTTIGLDIAKSVFQVHGVDAGGQVIVRRQLKRRYVLTFFQKLSPCLVGIEACGSAHHWSRELQALGHTVRLMPPAYVKPYVKRQKNDATDAEAICEAVTRVNMRFVPTKTAEQQSGLVLHRARHLFVRQQTSVINAIRAHLAEFGIVAPVGRHGVEELLDVVTDPNDKRVPDIARACLSALGDQLQSIKKHVLEFDRLIRAWHRSNEMSMRLEAAPGVGPVLATALVAAVADPKSFRSGRNFSAWIGMVPKQHSSGGKNRLGNISKQGDRYLRGLFVAGALSVIRYAKVHGTKHRPWLTALLTRRPTKVAAIALANKIARMVWAMMATGERYKEPVALAR

SEQ ID NO: 19022 - protein, 323 aa, unidentified
  source 1..323: note = protein_0c2a7c8
  REGION 8..150: note = RuvC_domain
  SITE 11: note = RuvC_P1
  SITE 52: note = RuvC_P2
  SITE 92: note = RuvC_P3
  SITE 94: note = RuvC_P4
  SITE 97: note = RuvC_P5
  REGION 191..278: note = Tnp_domain
  SITE 199: note = Tnp_P1
  SITE 229: note = Tnp_P2
  SITE 237: note = Tnp_P3
  SITE 238: note = Tnp_P4
  SITE 251: note = Tnp_P5
MNKDIKYFGIDISHLVFDVTDSDGNYYQFKNNELGFKKFTKLLNNKSHCVMEATGYYHYQLAYHLLESGIKVSVENPLSVKRFIQMGLSKVKTDKSDSKLICAYSEQVELKLWKGNSKEEIECLQIVRTLSVYTKQSTMLKNKLHGEAVLGNPSKLVVTSLKRSLRQLTKEMKTLEDKLLILVKQSHQDLFTRLKTIPGIGPKIAIMLVVLTGGFDRFTSASELCSYAGLTPMIRQSGSSVKGRPRISKMGNQKLRNLLFMCSFNACKYNKACRDLYERIVAKGKSKKLALIAVCNKLLKQAFALAKSGLIYDGNYKSTLVKN

SEQ ID NO: 19023 - protein, 321 aa, unidentified
  source 1..321: note = protein_40cd737
  REGION 4..148: note = RuvC_domain
  SITE 7: note = RuvC_P1
  SITE 52: note = RuvC_P2
  SITE 92: note = RuvC_P3
  SITE 94: note = RuvC_P4
  SITE 97: note = RuvC_P5
  REGION 191..278: note = Tnp_domain
  SITE 199: note = Tnp_P1
  SITE 229: note = Tnp_P2
  SITE 237: note = Tnp_P3
  SITE 238: note = Tnp_P4
  SITE 251: note = Tnp_P5
MTYVGIDVSKVTFVVAYSSVKTNKTRTFKNTVNGVHEFVQTISASEHNCVLEATGNYSALLVYLLSEAGITISLENPLKIKNFARVMLTVTKTDEIDARLIALYGEKMQPAPYKLRSDAILVLKQKRTVLRQLKKQLVATRNLKGSMEVLPFFDPKCKKTIEKTITFLEKQIKEMEEELASLAQGEYKKQMDLLTSIKSIGVTLAAPLIVATGRFSYFDNAKQLTRYLGLSPTYQQSGTSVNVKGHINRNGDSSLRSQLYVAAFSSLRCNTECKACFDRLRSNGKPGKVVVIAVANKLVRQAFAVVTQGKPYVDGFKSEKP

SEQ ID NO: 19024 - protein, 371 aa, unidentified
  source 1..371: note = protein_73bc40b
  REGION 7..160: note = RuvC_domain
  SITE 10: note = RuvC_P1
  SITE 61: note = RuvC_P2
  SITE 100: note = RuvC_P3
  SITE 102: note = RuvC_P4
  SITE 105: note = RuvC_P5
  REGION 224..309: note = Tnp_domain
  SITE 232: note = Tnp_P1
  SITE 262: note = Tnp_P2
  SITE 270: note = Tnp_P3
  SITE 271: note = Tnp_P4
  SITE 283: note = Tnp_P5
MKSILSVGMDVHKNSFSLCAYDGYTGEIVSESTFASDVKLVIKFIETLKSRHENDVEIKCGYEAGCLGYSLYKSLTARGVDCVILAPTTMQVSAKNKMVKNDRMDALNIAKNLASGSYKAVYVPDEEVVEIKEYIRMIHDFKKELKRVKQEICAFVLRHGYQYDGKSKWTIRYMNWIRELEMSEIQRETLNEYIAEMENLNDKIDRFMNRIDEMYQSDRYNEKVSKLRCFKGIDTFAAMTIQVETADFERFPSAKAYASYTGLTTGEHSSGDKNNQIGITKQGNTVIRKTLVECAQSLVKGNVYAKKSQGLKSRQKGMDVNIIAYADKATERLKKKYQKLIERNVPRNKAIVAVARELACFIWGMETGNIH

SEQ ID NO: 19025 - protein, 256 aa, unidentified
  source 1..256: note = protein_6560b99
  REGION 4..149: note = RuvC_domain
  SITE 7: note = RuvC_P1
  SITE 52: note = RuvC_P2
  SITE 92: note = RuvC_P3
  SITE 94: note = RuvC_P4
  SITE 97: note = RuvC_P5
  REGION 191..255: note = Tnp_domain
  SITE 199: note = Tnp_P1
  SITE 229: note = Tnp_P2
  SITE 237: note = Tnp_P3
  SITE 238: note = Tnp_P4
  SITE 251: note = Tnp_P5
MTYVGIDVSKVTFVVAYSSVKTNKTRTFKNTVNGVHEFVQTISASEHNCVLEATGNYSALLVYLLSEAGITISLENPLKIKNFARVMLTVTKTDEIDARLIALYGEKMQPAPYKLRSDAILVLKQKRTVLRQLKKQLVATRNLKGSMEVLPFFDPKCKKTIEKTITFLEKQIKEMEEELASLAQGEYKKQMDLLTSIKGIGVTLAAPLIVATGRFSYFDNAKQLTRYLGLSPTYQQSGTSVNVKGHINRNGDSSFM

SEQ ID NO: 19026 - protein, 342 aa, unidentified
  source 1..342: note = protein_7595a44
  REGION 7..148: note = RuvC_domain
  SITE 10: note = RuvC_P1
  SITE 53: note = RuvC_P2
  SITE 88: note = RuvC_P3
  SITE 90: note = RuvC_P4
  SITE 93: note = RuvC_P5
  REGION 211..295: note = Tnp_domain
  SITE 219: note = Tnp_P1
  SITE 249: note = Tnp_P2
  SITE 257: note = Tnp_P3
  SITE 258: note = Tnp_P4
  SITE 270: note = Tnp_P5
MENVSIIGIDLAKRSFQAHGARADGSVAFHKKLSREKVLAFLGEQSRCVVAMEACGSAHHWGRAISALGHEVRLLPPAYVKPFVKRQKNDSADAEAICEAAIRPTMRFVAVKTEEQQGRAMLFRTRDLLVRQRTQLINALRGHLAEHGVVAPQGPANVKILADAVEETTTSLPLLVVELSRIFLGQIEALANKIADLEKATALEAARGAITRRLQTMPGVGPITAMAIETFAPSMDHFKCGRDFSAWLGIVPRQHSTGGKQLLGRTSKMGQRDIRRLLIVGAMAVVRGACRKGAPEGTLLHRMLGRKPRMLVAIALANKMARSIWAMLTKNEDYRIPVAATI

SEQ ID NO: 19027 - protein, 411 aa, unidentified
  source 1..411: note = protein_8e35cc5
  REGION 5..163: note = RuvC_domain
  SITE 8: note = RuvC_P1
  SITE 62: note = RuvC_P2
  SITE 102: note = RuvC_P3
  SITE 104: note = RuvC_P4
  SITE 107: note = RuvC_P5
  REGION 273..373: note = Tnp_domain
  SITE 281: note = Tnp_P1
  SITE 311: note = Tnp_P2
  SITE 319: note = Tnp_P3
  SITE 320: note = Tnp_P4
  SITE 333: note = Tnp_P5
MNPVIGLDVSKGESQVQAFLDKGKPYSKSFKVSHTIEGLDLLVEFLEVVKRETGKRPPIVLEATGHYHSSVVQYLEDRGYLMIIINPLISYKAKSSSLRKVKTDAIDAYHLCELFYKEDLEPYKKRGVQLLNLRNLTRQHENITGVLIQTKLQFQAILDQVFPEYRGVFGDLYSVVSLLTLSEFPSSEDILEASEETIADKIAELCKSRSHRWAKEKATQLKAAANRNPFEKTVYQSHILSLGMYINIILQYKEHLSKLESEIDALAKGVEEYNIIKSIPGIGEKIAATIISEIGEIDRFTDPKKLVAFAGVDPSVFESGKFTATKNRITKRGSSRLRHALYMAVRCAIRDCRKKKKTDEIIPRNKRMREFYDKKRDEGKPFKVAVIACVNKLSHWIFALLKNKTTFQDIA

SEQ ID NO: 19028 - protein, 344 aa, unidentified
  source 1..344: note = protein_efca7b4
  REGION 6..159: note = RuvC_domain
  SITE 9: note = RuvC_P1
  SITE 57: note = RuvC_P2
  SITE 98: note = RuvC_P3
  SITE 100: note = RuvC_P4
  SITE 103: note = RuvC_P5
  REGION 221..304: note = Tnp_domain
  SITE 229: note = Tnp_P1
  SITE 259: note = Tnp_P2
  SITE 267: note = Tnp_P3
  SITE 268: note = Tnp_P4
  SITE 279: note = Tnp_P5
MGRVVIGMDPHKRSATIEVLDEREKVISTGRFGTDRDGYRNLLAAGRRWPERVWAVEGCQGVGRHLAQRLVADNEPVLDVPAKLSARVRVFSTGQGRKTDATDAHSIAVVALRTPGLRAVQVDDATVALRLLVDRRDELGAARTLTVNRLHRLLAELIPGAAKTFLSAMQAKALLATVRPRDVVGKTRRKLAAELIVELEGIDRKIKVATKELRELVAATGSTLLELNGIGPSGAARLLGDIGDVSRFPTRGHFASWNGTAPIDASSGEQNRHRLSRAGNRRINRLLHIMAIVQLRKTPKAVPTIGASSPPARPRWKLSAPSNAGCPTSSTASSSPTRSGCGRK

SEQ ID NO: 19029 - protein, 391 aa, unidentified
  source 1..391: note = protein_f3988b0
  REGION 6..163: note = RuvC_domain
  SITE 9: note = RuvC_P1
  SITE 61: note = RuvC_P2
  SITE 102: note = RuvC_P3
  SITE 104: note = RuvC_P4
  SITE 107: note = RuvC_P5
  REGION 267..351: note = Tnp_domain
  SITE 273: note = Tnp_P1
  SITE 303: note = Tnp_P2
  SITE 311: note = Tnp_P3
  SITE 312: note = Tnp_P4
  SITE 324: note = Tnp_P5
MSIYFIGIDISKYKHDCCIISAADQKVVSKLTIKNNKSGFDELFTIINSLSSPEDIRIGFESTAHYALNLELFLENSLLTFMEVNPVLISEYKKSRTLRRTKTDSVDCESIARWLMTVEYKPHPKGFYHAYSLKSLTRLRDKLIRQRSFYLVKITNVLDHTFPEFKPFFKERISKTALYLLENYGSAEKMARMNSASYEKLRSLSRGKFTPQQFLQLKELAANTVGVNNSIFDVELNSLLSLYKALAKEIDTLESEINKLINEVHPHYMSIPGIGSLSAAVIYSEYGDISNFSNPGQMLAFAGIEPGINESGTESHGGRMVKRGSSQLRYTLINCCLPLIRFDMIFATYYAKKRGEGKPHRVAITHVAKKLIRVIYALERQDIDYNIQKLH

SEQ ID NO: 19030 - protein, 406 aa, unidentified
  source 1..406: note = protein_f28dbab
  REGION 5..163: note = RuvC_domain
  SITE 8: note = RuvC_P1
  SITE 58: note = RuvC_P2
  SITE 100: note = RuvC_P3
  SITE 102: note = RuvC_P4
  SITE 105: note = RuvC_P5
  REGION 277..363: note = Tnp_domain
  SITE 285: note = Tnp_P1
  SITE 315: note = Tnp_P2
  SITE 323: note = Tnp_P3
  SITE 324: note = Tnp_P4
  SITE 337: note = Tnp_P5
MLNAVGIDVSKGKSTVAILRPAGDVVRKPFNVSHSVKGLSDLISCVKDLDGETRVVMETTGHYHEPVLKAFLDAGIFVSAVNPSLIKYHDSDKNPLRKVKSDPADARKIAKYTLDKWEHLRQHSAMDTSRAQLKTLNTQFHFFMQQKVSLKNNLIFLLDLTYPGVNKLFDSPVRSDGSEKWVDYARSFWHVDCVRKIGLKAFTSRYQNFCKHHGYNFQPGKPEELFNASKGLVAVVPKDPIYKQLILSSIEQLNTVSRQIELFRHTMNELASTLPEYTTVMSMYGVGPSYGPQLMAEIGDISRFDHRSAITAFAGVDPGVNQSGLVNHESNSASKHGSPRLRKTLFQIMTTLLQLAPADDPVYLFMMKKKTEGKPYQVYMTAGANKFLRIYYGKVKECLAVQSISE

SEQ ID NO: 19031 - protein, 391 aa, unidentified
  source 1..391: note = protein_8e8a943
  REGION 4..163: note = RuvC_domain
  SITE 7: note = RuvC_P1
  SITE 60: note = RuvC_P2
  SITE 101: note = RuvC_P3
  SITE 103: note = RuvC_P4
  SITE 106: note = RuvC_P5
  REGION 266..353: note = Tnp_domain
  SITE 274: note = Tnp_P1
  SITE 304: note = Tnp_P2
  SITE 312: note = Tnp_P3
  SITE 313: note = Tnp_P4
  SITE 326: note = Tnp_P5
MVYIGIDVSKDKHDCFITNSNGEILYKSFTIPNNREGFETLFQRIESVSDDFTKVKVGLEATGHYSYNLLGFLLDKGLTTFIINPLHTNFYRKSLSLRKTKTDKVDSRTIATMIMSDMNLKPYSDTSYHNEELKSLTRYRFDKVRERAKLKSSVSRLVNILFPELETLVPKLHLTSVYSLLSEFPGASHVAYAHLTKLTNLLSQTSNGRYGKDTAILFREAARNSIGSVMPAKSLELRHTLRLIGELDSEISEIESEIKRIMDQISSPILTIPGISYRMGAMILAEIGDFSRFSSADKLLAYAGMSPSTYQSGQLDNCYAHMEKRGSRYLRYALYNATKYVCHWDETFKTYFEKKRSEGKHYNVALSHATKKLIRLIFAMEKSGRTYIPAS

SEQ ID NO: 19032 - protein, 319 aa, unidentified
  source 1..319: note = protein_efdb680
  REGION 11..160: note = RuvC_domain
  SITE 14: note = RuvC_P1
  SITE 58: note = RuvC_P2
  SITE 98: note = RuvC_P3
  SITE 100: note = RuvC_P4
  SITE 103: note = RuvC_P5
  REGION 187..278: note = Tnp_domain
  SITE 202: note = Tnp_P1
  SITE 231: note = Tnp_P2
  SITE 239: note = Tnp_P3
  SITE 240: note = Tnp_P4
  SITE 251: note = Tnp_P5
MTIAVPLAVAAGVDAGQRFLDVALAPSGQTFRMPNLAEGIAEIIARLERSGVRRVVLEAIGPCAEPLVKALSVAGFEVGIVNPRRIKAFREAEGSRAKTDRLDARLIARFALTMPETLRPLPTDTQLELKALSLRRRQLTEMIAMEKTRMKQVRGTLLLDSHRAAIAALSAQCQAIEAELAKRIGDDAELRRVLHILKSIPGIGERVATLLITDLPELGQRDRKAIASLAGLAPHVSQSGAAPPRAAIAGGRPCVRAALYMAALVAARHHPKLRDDYNALRLQGKPGKVALIAIARKLLVTANALVKADTPYQGKTLDT

SEQ ID NO: 19033 - protein, 341 aa, unidentified
  source 1..341: note = protein_be5821e
  REGION 6..147: note = RuvC_domain
  SITE 9: note = RuvC_P1
  SITE 52: note = RuvC_P2
  SITE 87: note = RuvC_P3
  SITE 89: note = RuvC_P4
  SITE 92: note = RuvC_P5
  REGION 210..297: note = Tnp_domain
  SITE 218: note = Tnp_P1
  SITE 248: note = Tnp_P2
  SITE 256: note = Tnp_P3
  SITE 257: note = Tnp_P4
  SITE 269: note = Tnp_P5
MQVSTIGIDLAKSVFQVHGIDAVGKVTITKQLRRSQVLPLFAKLPRCLIGMEACSTSHHWARELKALGHDVRLMPASYVKAYVKRNKNDAADAAAICEAVTRPSMRFVPIKSPEQQSILMLHRTRDLLVRQRTQLVNAMRAHLAELGLVAPRGGEGLQALIIVVRDGTDELPDLARKALQALLGQLDALARQISEIERDIQAQHRLSEASRRLETIPGIGIIGATAIAATITDPTIFKSGREFAAWIGLVPRQNSTGGKERLGSISKQGDRYLRRLLIVGATAVIRQARTHPDKHPWLIQLLARRPAKVVAVALANKTARIAWAVLARGGTYRAPVLAARA

SEQ ID NO: 19034 - protein, 346 aa, unidentified
  source 1..346: note = protein_9f0cf3e
  REGION 5..152: note = RuvC_domain
  SITE 8: note = RuvC_P1
  SITE 55: note = RuvC_P2
  SITE 92: note = RuvC_P3
  SITE 94: note = RuvC_P4
  SITE 97: note = RuvC_P5
  REGION 212..300: note = Tnp_domain
  SITE 220: note = Tnp_P1
  SITE 250: note = Tnp_P2
  SITE 258: note = Tnp_P3
  SITE 259: note = Tnp_P4
  SITE 271: note = Tnp_P5
MKYYAGLDVSVKETSVCIVDDSGRIMRERKVVSHPEDLVTYLNDAQLHFERVGLEAGPLSQWLYEGLAKAGLPVICIETRHTNAFLKAHPNKTDRNDARGIAQMMRVNLFRPVHVKTLTSQKRRALLTARKLLQEKSIAIENDIRGLLRNFGLKVGLIGTVKYEERIRELVSGFEDLIDIVEPLLVARRKLREEYSKLDRKVQLEAKADPVCQRLMTVPGVGPIVSLAYAATIDIPARFRTSRSVGAVLGLTPTLIQSGESNRIGRISLCGDGMLRSLLFEAAQTLLTRVAKWSWLKAWAMSIAKRRGARKAMVALARRLAVILHRMWSDGTEFRWTRETSTVAAA

SEQ ID NO: 19035 - protein, 318 aa, unidentified
  source 1..318: note = protein_8ab4afc
  REGION 8..149: note = RuvC_domain
  SITE 11: note = RuvC_P1
  SITE 52: note = RuvC_P2
  SITE 92: note = RuvC_P3
  SITE 94: note = RuvC_P4
  SITE 97: note = RuvC_P5
  REGION 191..278: note = Tnp_domain
  SITE 199: note = Tnp_P1
  SITE 229: note = Tnp_P2
  SITE 237: note = Tnp_P3
  SITE 238: note = Tnp_P4
  SITE 251: note = Tnp_P5
MNKSNEIYGIDISKDVFDVVNTKGIHEQFENTIKGFKKFSKEVSSGDLVVMEATGYYHYCLAQYLYKQGYLVSVVNPLSVKRYIQMKLSKVKTDKSDAKAICEYACLNEVPLYTAKDDNQAESLQLVSLIDIYLKQSTAIKNKLHGEKALGFPSKAVYHSINRALKSLQREIKTLEQRLTQLIKEHQQQQLTHLKSIPGMGNKTAIMLIILTDGFSRFENAKQLCCYAGIRPTIRQSGSSVRGKSRISKVGNKKLRNLLFLCSFSACKYNKACREIYERLVAKGKSKKLALIAVSNKLLKQAFAIAKSGRPYDENFVS

SEQ ID NO: 19036 - protein, 311 aa, unidentified
  source 1..311: note = protein_7d14c73
  REGION 6..148: note = RuvC_domain
  SITE 9: note = RuvC_P1
  SITE 52: note = RuvC_P2
  SITE 87: note = RuvC_P3
  SITE 89: note = RuvC_P4
  SITE 92: note = RuvC_P5
  REGION 211..300: note = Tnp_domain
  SITE 219: note = Tnp_P1
  SITE 249: note = Tnp_P2
  SITE 257: note = Tnp_P3
  SITE 258: note = Tnp_P4
  SITE 270: note = Tnp_P5
MKVSTLGIDLAKNVFQLHGVDHEGHTILRKKLTRAKFVQFVIQLEPCLIGMEACSSSHHFARLFTRYGHEVKLIPPQYVKPYVKTNKTDAADAEAICEAVTRPNMRFVQIKTEEQQAVLALHTERGILIRERIACSNSLRATLAEFGITIGAGQSHLTRELPAILEDGENGLSPFVRTSIYRQAKHIRELEEQVKQVEEALASWYRTQEACQRIAKIPGIGMLTATYVVAAVGNARQFSTAKQFASWLGLTPKEHSSGGKQQLGGISKRGDGYFRYLLVHGARALTAWVNRNGAIEENAWLRGYLSGSTTM

SEQ ID NO: 19037 - protein, 345 aa, unidentified
  source 1..345: note = protein_c5f7328
  REGION 6..148: note = RuvC_domain
  SITE 9: note = RuvC_P1
  SITE 52: note = RuvC_P2
  SITE 87: note = RuvC_P3
  SITE 89: note = RuvC_P4
  SITE 92: note = RuvC_P5
  REGION 211..297: note = Tnp_domain
  SITE 219: note = Tnp_P1
  SITE 249: note = Tnp_P2
  SITE 257: note = Tnp_P3
  SITE 258: note = Tnp_P4
  SITE 270: note = Tnp_P5
MQVTTIGLDLAKNVFQVHGIDDAGTVIVRRSLRRRQVMPFFSKLEPCLIGMEACGTSHFWARELRTMGHEAKLMPPIYVKPYVKRGKTDAADAAAICEAVGRPTMRFVPIKSAEQQSVLALHRTRDLLIGQRAQLVNMIRAQLAEFGIVLAKGIEHALRLVDQLVEGVAPDIPSLACTVLIALAEPVGALQIRIARLEDEIKARLQDDEAARRLATIPGVGAITASALAASVTDPKRFASARQFAASLGLTPRADCSGGRERMGRISKMGDRYLRRLLINGMTSQLQAARRKPEVYPWVAGLLANGKPNKLVAVAMANKAARIAWVVMTRGEIYRSNGPAAEGTA

SEQ ID NO: 19038 - protein, 386 aa, unidentified
  source 1..386: note = protein_2784a00
  REGION 44..185: note = RuvC_domain
  SITE 81: note = RuvC_P2
  SITE 118: note = RuvC_P3
  SITE 120: note = RuvC_P4
  SITE 123: note = RuvC_P5
  REGION 255..343: note = Tnp_domain
  SITE 263: note = Tnp_P1
  SITE 292: note = Tnp_P2
  SITE 300: note = Tnp_P3
  SITE 301: note = Tnp_P4
  SITE 313: note = Tnp_P5
MRKPNDMSRSLTALKGDNTLIAVIEMSLSSWLVAGIVPGVERQPLKKLETDEGTLLKLLCRWRAEAEKAGQRIDRIAVAFEAGRDGFWLARWLGAHDIEAHVIHASSIAVSREHRRAKTDRLDTEMLKRAFLGWLRGERDHCKMVAIPTIKDEDAKRPNRERESLVGEQNRIINRMRATLVRLGIRGFNPKLKKAAERLDGLRTPESEPIPANTLAELRRDMERRRLISAQIRQIEEARLERLEQASGDGQHAMVRLLARVIGVGVETADMLVQEVLSRTLRDRRAVARYAGLTGSPDESGKKRREKGLARSGNARVRRGMIQLAWRFLMFQKDSALAQWFRARTENARGTRKTMIVALARKLLIALWRLVREGLVPEGVVLRPAQ

SEQ ID NO: 19039 - protein, 339 aa, unidentified
  source 1..339: note = protein_2674b42
  REGION 7..148: note = RuvC_domain
  SITE 10: note = RuvC_P1
  SITE 53: note = RuvC_P2
  SITE 88: note = RuvC_P3
  SITE 90: note = RuvC_P4
  SITE 93: note = RuvC_P5
  REGION 212..299: note = Tnp_domain
  SITE 220: note = Tnp_P1
  SITE 250: note = Tnp_P2
  SITE 258: note = Tnp_P3
  SITE 259: note = Tnp_P4
  SITE 271: note = Tnp_P5
MDTVCFLAIDLAKNVFQLHGVDAAGKPVLRRRVGRVQLTELVLRLAPCTIGMEACSGAHHWARQFQHQGHTVKLISPQFVKPFVKGNKTDGNDAEAICEALQRPSMRFVPIKSVEQQDVQSLHRARSRLVSNRTGLVSQMRGILTERGIVFAQSITRARREIPAVVADTSNALTPLAREMLADLMDQLRELDKRVAGFDRRIDAVFKASETCQRIAQIEGVGPKTATAIVAAVSDPKDFRNGRHFAAWLGLVPRQSSSGDRTHLLGISKRGDRHLRTLLIHGARAVLRTAPTKHDKKHAWALALQARRGANRAIVAIANKMARVIWSMLATGQSYQKAV

SEQ ID NO: 19040 - protein, 354 aa, unidentified
  source 1..354: note = protein_9383313
  REGION 12..152: note = RuvC_domain
  SITE 15: note = RuvC_P1
  SITE 58: note = RuvC_P2
  SITE 93: note = RuvC_P3
  SITE 95: note = RuvC_P4
  SITE 98: note = RuvC_P5
  REGION 217..303: note = Tnp_domain
  SITE 225: note = Tnp_P1
  SITE 255: note = Tnp_P2
  SITE 263: note = Tnp_P3
  SITE 264: note = Tnp_P4
  SITE 276: note = Tnp_P5
MSCLASSQIAVIGIDIGKNSFHIVGLDKRGAIVLRQKWSRGQVEARLANMPPCLIGMEACVGAHHLSRKLNSLGHDARLMPAKCVRPYSKGQKNDFRDAEAIAEAVQRPTMKFVATKTAEQLDLPALHRVRERLVSQRTAVINQIRAFLLGRGVAVRQGQRLLRAALPSILAAPSEPLSPRMARTIEELAGDWRRLDERIDDLSSQVEMLARQDAGCERLMSVPGVGPIISSAMVAAIGAGEVFTKGRDFAAWLGLVPNQISTGDRTILGKISKRGNRYLRALFVQAAWVVLIRPKSWERHGLKPWIEAAKKGLHHNVLAIAVANKLARIAWSVLARGRNFEARTIAAINAQPA

SEQ ID NO: 19041 - protein, 366 aa, unidentified
  source 1..366: note = protein_ef2052b
  REGION 5..152: note = RuvC_domain
  SITE 8: note = RuvC_P1
  SITE 55: note = RuvC_P2
  SITE 92: note = RuvC_P3
  SITE 94: note = RuvC_P4
  SITE 97: note = RuvC_P5
  REGION 212..298: note = Tnp_domain
  SITE 220: note = Tnp_P1
  SITE 250: note = Tnp_P2
  SITE 258: note = Tnp_P3
  SITE 259: note = Tnp_P4
  SITE 271: note = Tnp_P5
MDHYAGIDVSLECSSVCVVDTNGKIVSEDKIASEPEALIAWFASLGHELARIGLEAGPLSQWLYATMKQAGLAVELLETRRVRDAFSAMPAKSDRNDARGIAQLIRLGWFRPVHCKSIGAQEVRAMLTARKLVQSKLQDVENSLRGILRGFGLKVGKTTPRSFAGRIRELVAGHANLHSIAQALLSVRAVLLRELGAFEKRVRYMARADAKSKLLMSTPAVGPIVALTYASAIDDPARFKSSKQAGAHFGLTPKRYQSGTIDRTGRISKIGDASVRTALYQAAHVMLTKPIKDCSELKSWAMRIARRGGHNKAKVALARKLAVVMHRMLADATTFNPTAKFPKRSPFAGTMDQVRPPSGMWHRPRH

SEQ ID NO: 19042 - protein, 339 aa, unidentified
  source 1..339: note = protein_74dd3aa
  REGION 6..148: note = RuvC_domain
  SITE 9: note = RuvC_P1
  SITE 52: note = RuvC_P2
  SITE 87: note = RuvC_P3
  SITE 89: note = RuvC_P4
  SITE 92: note = RuvC_P5
  REGION 208..294: note = Tnp_domain
  SITE 216: note = Tnp_P1
  SITE 246: note = Tnp_P2
  SITE 254: note = Tnp_P3
  SITE 255: note = Tnp_P4
  SITE 267: note = Tnp_P5
MQISVVGLDIAKQVFQVHAADVEGRPVAQLKLRRAQVLDYFRALPPCLIGMEACATAHHWARELSALGHAVRLMPPAYVKPYVKRNKTDAADAEAIAEAVTRPTMRFVPVKSAAQQAALMLHRVRELLVRQRTMLATAIRAHLAEFGIIAPQGIHRVEKLANEVNNPAVPPLARDALMLLVDELASVWQRIDELEVRLVALHRADEVSRRLASIPGVGPITAMAIANTVPDPSMFRSGREFAAWLGLTPKSHSSSGKDRLGRISKRGDRYIRHLLYVGAGNAIRFAKARAATGEAWIRGLQERRPPKVVIIALANKMARIAWALMIRGQCFRSPAVVAA

SEQ ID NO: 19043 - protein, 406 aa, unidentified
  source 1..406: note = protein_e9ea0f8
  REGION 5..162: note = RuvC_domain
  SITE 8: note = RuvC_P1
  SITE 60: note = RuvC_P2
  SITE 99: note = RuvC_P3
  SITE 101: note = RuvC_P4
  SITE 104: note = RuvC_P5
  REGION 269..355: note = Tnp_domain
  SITE 277: note = Tnp_P1
  SITE 308: note = Tnp_P2
  SITE 316: note = Tnp_P3
  SITE 317: note = Tnp_P4
  SITE 328: note = Tnp_P5
MQVYIGIDWSEAKHDVIMMNAAGAALARFEIPHSSEGFLQLDETRWRMKLAPEDCVVGLETAHNLLIDFLWSRGYSKVYVVPPTTVKSNRKRFGSSAARSDPNDAFVIADSLRTDHGRLQPWRPDSLLTRQIQAKVSLINHLTSSTVRLSNRLRAVLLRYYPAVLNMFSTWPTKVALEFVCAFPTPGEAENLSLNEFQRFARQHRYPNPKRLPACFARLQAPQPQAAQETVEVYQGEAVLLATMLLTAMRAKKAALCELKTLFREHPGHAIFDSLPGAGDFLAPALLAKFGDDRKRFPSPASVQALAGTCPVTDQSGKRRIIKFRRACDREFRAIAQQWAIASLQRSAWANAYFQQARPRCRYSSQAFRRLANRWLAIAWKLWQTGQVYDEAYHLKQRALRSKRNR

SEQ ID NO: 19044 - protein, 405 aa, unidentified
  source 1..405: note = protein_9865669
  REGION 5..158: note = RuvC_domain
  SITE 8: note = RuvC_P1
  SITE 57: note = RuvC_P2
  SITE 95: note = RuvC_P3
  SITE 97: note = RuvC_P4
  SITE 100: note = RuvC_P5
  REGION 266..352: note = Tnp_domain
  SITE 274: note = Tnp_P1
  SITE 305: note = Tnp_P2
  SITE 313: note = Tnp_P3
  SITE 314: note = Tnp_P4
MSYFAGIDWGGAQHAVCVLDDHGKIILSTQVSHDARGLSGLCQRLQRIDPAVPVAIERPSGLLVDTLLQAGLAVVPIHPNVVKACRPRYRAATGKYDAGDAYVLADVLRTDGHRFRTLAPLSDAMQALRALVRSRDDLVAERIALANQLRALLESFWPAPAGLFAEIDSPIALAFIERYPTPASAARLGEKRLAGFLAAEGYCGRTSPARLLQRLREAPPGQAGSAEQQAKGAVVSALARVLSVLVTQLSRITSRIEHDIGELPDGSILMSLPRTGRLNAAQILAELGDVRERFATDDQLAAEAGLAPVTCQSGKSKAVIFRWACNHRLRRALTIWADNSRHGCAWAKSIYDKARARGCRHPHAVRILARAWVRVLWRIWSNRSTYQPQLHNGARAFLLTAPAEC

SEQ ID NO: 19045 - protein, 398 aa, unidentified
  source 1..398: note = protein_a97a587
  REGION 11..169: note = RuvC_domain
  SITE 14: note = RuvC_P1
  SITE 68: note = RuvC_P2
  SITE 108: note = RuvC_P3
  SITE 110: note = RuvC_P4
  SITE 113: note = RuvC_P5
  REGION 273..362: note = Tnp_domain
  SITE 281: note = Tnp_P1
  SITE 311: note = Tnp_P2
  SITE 319: note = Tnp_P3
  SITE 320: note = Tnp_P4
  SITE 333: note = Tnp_P5
MAREVVMEPVVGLDVSKGNSVVQAFLARNEVFGKMEMIPHDEWGYLQLDRLLTELRKETEMEPVIILEATGHYHRGLVLHLNRRGWRHIIINPLQSKRARGTQLRKVKTDAADAWHLAEMYYRGDVKPHRTWEEAYRELQHVTRQHEFITGMFVQAKLNARALLDQVFPMYTQLFRDIFSATSLLVLQRCLRGETQNMDKVFGGATGRARSKQWVGEKLNQLEHLLEDWMTHPKSDSQTKVLEGMIVLLLAFLEQLNDLEERMQQLASELPEVELVKSIPGVGDKLAATIIAEIGDAKQFKDPKQLVAYAGLDPGIFSSGKFTAMSSRITKRGSKRLRRALYLAVQCGLRRSANVKIKAYYDKKRKEGKPYKVVVIACANKLLHHVYAILIKGEPFKT

SEQ ID NO: 19046 - protein, 318 aa, unidentified
  source 1..318: note = protein_2bd6cf7
  REGION 8..161: note = RuvC_domain
  SITE 11: note = RuvC_P1
  SITE 56: note = RuvC_P2
  SITE 96: note = RuvC_P3
  SITE 98: note = RuvC_P4
  SITE 101: note = RuvC_P5
  REGION 195..279: note = Tnp_domain
  SITE 203: note = Tnp_P1
  SITE 232: note = Tnp_P2
  SITE 240: note = Tnp_P3
  SITE 241: note = Tnp_P4
  SITE 252: note = Tnp_P5
MSDYSVVIGIDVAKAHVDVAAIGAVLAGKRFANDTEGQTALVAALAPLRPAVVLMEATGGYEAELACALQAAGLPVAIINPRQGREFARSMGQLAKTDRIDAQVLAELAAVLARRDDLESYLRPLPDAQQQDLAALVARRRQLVTMLGAERQRLAHARAAIRPSIEAIIRAIRQQLDLVEGEMAEHVTRHHAGIDQLLRSAGGIGPIASATLIADLPELGHLNRRQISALVGVAPFARDSGAMRGRRTVIGGRADVRRTLYMATLTATRYNPAIRDFYQRLLAAGKLPKVALVACMRKLLTILNAMVRNQQHFVSVHG

SEQ ID NO: 19047 - protein, 345 aa, unidentified
  source 1..345: note = protein_4ae3461
  REGION 6..147: note = RuvC_domain
  SITE 9: note = RuvC_P1
  SITE 52: note = RuvC_P2
  SITE 87: note = RuvC_P3
  SITE 89: note = RuvC_P4
  SITE 92: note = RuvC_P5
  REGION 211..297: note = Tnp_domain
  SITE 219: note = Tnp_P1
  SITE 249: note = Tnp_P2
  SITE 257: note = Tnp_P3
  SITE 258: note = Tnp_P4
  SITE 270: note = Tnp_P5
MQIKSIGIDLGKTTFHLIALGTRAQVVIRKKFSRSQLLEYTANLPSSLIGMEAGVGSHFLGRALREQGHQVRLIPAQFVRPFVKSNKNDYRDAEAIAEVVERENMRFVPIKTEDQLDLQALHRVRDRLVARRTSVINQIRAFLLERGISFRKGPASLRRQMPEILENADAKLSTAMRRLLDFLWQEWKGLQLQIESLNVELEQVASSNPSCVRLRQIPGVGPLISTAVVSAIGNGAAFKRGREFAAWLGLVPRQWSTGGKAKLLGISKRGNPYLRKMFIHGARAAVLRVQREGSSLGKWMSGLETRTARNVVIVATANKLARISWAVLSSGNDHQPLHRAALPSN

SEQ ID NO: 19048 - protein, 433 aa, unidentified
  source 1..433: note = protein_ff917c1
  REGION 14..173: note = RuvC_domain
  SITE 17: note = RuvC_P1
  SITE 69: note = RuvC_P2
  SITE 109: note = RuvC_P3
  SITE 111: note = RuvC_P4
  SITE 114: note = RuvC_P5
  REGION 287..374: note = Tnp_domain
  SITE 295: note = Tnp_P1
  SITE 325: note = Tnp_P2
  SITE 333: note = Tnp_P3
  SITE 334: note = Tnp_P4
  SITE 347: note = Tnp_P5
MELSKCNETVKVSVGIDVSKGHSTVSFFREGDKSPSKPFTIDHDLPGLKFLERKLDHYKTNGTLRIYMECTGRYHLGLASSLQKDGYTVYTVNPKLLADFHDDSLRKPKTDSIDAQKIASYGIQYWNKERRPFSQMDSKRECLKECERQYKLYTDECVTFTNNLLSLTDLTCPGVNKLFSSNPNQNGHLKWVDFVNTWWHVDCIRKMSMNAFSNRYCKWCQKHGYEFSEDKAEDIMNWAKKALAAMPKSIDIKKTIQIAVNAINELLETIQDTKEHMNQLASQLPEYPVVMKMDGVGEVTGPIIMGELGDVTRFTKRSQITAFAGVDPQKHESGDDKPKSSRATKIGSPELRRALYLIMTSKLARKPQGDRVYDFIVKKRSEGKKYLVYMTAGANKFLRIYYGTVRDYMQNKQNSLFIQDKTSAGQMNVSKTA

SEQ ID NO: 19049 - protein, 342 aa, unidentified
  source 1..342: note = protein_cee5c10
  REGION 6..146: note = RuvC_domain
  SITE 9: note = RuvC_P1
  SITE 52: note = RuvC_P2
  SITE 87: note = RuvC_P3
  SITE 89: note = RuvC_P4
  SITE 92: note = RuvC_P5
  REGION 211..302: note = Tnp_domain
  SITE 219: note = Tnp_P1
  SITE 249: note = Tnp_P2
  SITE 257: note = Tnp_P3
  SITE 258: note = Tnp_P4
  SITE 270: note = Tnp_P5
MDVDILGIDLAKRVFQLHGADRSGHALHRSKVTRDGFVEAVRSLRPRIVAMEACSSAHHWARSFQAMGMEVRLISPQYVSPFVKTNKNDRNDAQAIVEAASRPTMNFVAVKSVEQQDMQAVHRVRDLLTRQRTALINQARGLLGERGVTMAKSPEAFKRAVPQVLSSCDGEVTGICQAMVLELTEQIKVLEDGIDRAETLIKSFMKRSPLCKRIAVIGGVGPITATAVVAAIGDAKEFRNGRHLSAWMGLVPRQYSSGGKSQLKGISKRGDTYLRTLLIHGARTVLRYVVGKTDVQSRWLQDLIARRGYNRAAVALANKNARVIQALLSSDTPYRPGAAAVH

SEQ ID NO: 19050 - protein, 325 aa, unidentified
  source 1..325: note = protein_aa15bc8
  REGION 8..156: note = RuvC_domain
  SITE 11: note = RuvC_P1
  SITE 55: note = RuvC_P2
  SITE 95: note = RuvC_P3
  SITE 97: note = RuvC_P4
  SITE 100: note = RuvC_P5
  REGION 194..281: note = Tnp_domain
  SITE 202: note = Tnp_P1
  SITE 232: note = Tnp_P2
  SITE 240: note = Tnp_P3
  SITE 241: note = Tnp_P4
  SITE 254: note = Tnp_P5
MQTQSNYTGIDISKAFFDVAVMESGSIRYHHFNNDQAGFSALFAILPESSHVVMEASGPYYLRLACYLHAKGIAVSVVNPLVIRRFCQMRMSRAKTDKKDAGMIAQYAKMEKPALWQPPQEHVIALQQMEALVAGLQKEYTAISNQLESFLSTGMMDKKVKTLMENELIHKQNLIDRLTGEMEELAKKHYSRMLTDLESIPGIGRKTAMLLIVVSGGFSRFDDYRKLSSYIGICPRIFESGSSVKGKARICKMGMSRIRALLYVCAWSARRCNKACRELYERLLAKGKAKKLALIAVANKLLKQAFAIATKQNTYNENYCKNICF

SEQ ID NO: 19051 - protein, 343 aa, unidentified
  source 1..343: note = protein_3a1c284
  REGION 7..149: note = RuvC_domain
  SITE 10: note = RuvC_P1
  SITE 53: note = RuvC_P2
  SITE 88: note = RuvC_P3
  SITE 90: note = RuvC_P4
  SITE 93: note = RuvC_P5
  REGION 211..294: note = Tnp_domain
  SITE 219: note = Tnp_P1
  SITE 249: note = Tnp_P2
  SITE 257: note = Tnp_P3
  SITE 258: note = Tnp_P4
  SITE 270: note = Tnp_P5
MTIDTMIGVDLAKTVFQVHGASMTGQPKFRKKLSRQNFPKFMADQPPAVVVMEACGSAHHWAREMIRLGHEVRLIAPHYVKPFIKRQKNDEADAEGIVIAAQRPEMRFVEPKSASQQSTAILYRSRQRLVRQRTEIVNALRACLYEYGHIVPLGIQNIGRIREILEEKSSDLPLSMREECLEMLDQIAEQTTRIAARTTKIKELAATQETSRRLQTVPGVGPLTAMAVQAFAPPMESFRNGRDFAAWLGLVPRQFSSGGKERLGRITKAGQADIRQMLIIGAMSRLNWMGRKSIPDGSWLAGMLMRKPRMLVAIALANKMARQIWAMLTSNEDFRNPTLAVAA

SEQ ID NO: 19052 - protein, 353 aa, unidentified
  source 1..353: note = protein_0a6196c
  REGION 6..148: note = RuvC_domain
  SITE 9: note = RuvC_P1
  SITE 52: note = RuvC_P2
  SITE 87: note = RuvC_P3
  SITE 89: note = RuvC_P4
  SITE 92: note = RuvC_P5
  REGION 211..303: note = Tnp_domain
  SITE 219: note = Tnp_P1
  SITE 249: note = Tnp_P2
  SITE 257: note = Tnp_P3
  SITE 258: note = Tnp_P4
  SITE 270: note = Tnp_P5
MEVTTIGLDLAKNVFQVHGVDGEGTVVIRRQLRRARVLPFFEKLPPCLIGIEACATAHHWARQLIGLGHRVKLMPPHYVKAYVKRNKNDAADAAAICEAVTRPTMRFVAVKTMEQQSVLMVHRTRELLVRQRTMLVNAIRAHMAEYGIVAPVGIPRVKELFAVIADGDDERLPAIARACLEGLARQFMSLHEEIAVAERRIHAWHRSNQASQRLETIPGIGPIIASALTASISDPEVFKNGRELAAWIGLVPRQNSTGGKQRMGRISKQGDQYLRWLLVAGAMSVIRHGRKTDFEKNPWLGNLVRQKPTKVAAVALANKIARTAWAVLVTGEPYRQPAPAEAQSAAKATLLAG

SEQ ID NO: 19053 - protein, 344 aa, unidentified
  source 1..344: note = protein_302278a
  REGION 7..148: note = RuvC_domain
  SITE 10: note = RuvC_P1
  SITE 53: note = RuvC_P2
  SITE 88: note = RuvC_P3
  SITE 90: note = RuvC_P4
  SITE 93: note = RuvC_P5
  REGION 213..298: note = Tnp_domain
  SITE 221: note = Tnp_P1
  SITE 251: note = Tnp_P2
  SITE 259: note = Tnp_P3
  SITE 260: note = Tnp_P4
  SITE 272: note = Tnp_P5
MSEVTTIGLDIAKNVFHAHGADERGGVVFSKRISREKLLDFFAAQPSCTVALEACGGAHHWARQLIHLGHQVRLIPPAYVKPFVKRHKNDAVDAEAICEAAQRPSMRFVAVKGEEQQAAGLVFRTRDLLVRQRTQLINAIRGHLSEYGWVAPKGPSHVAMLADLLEEEEMASTLPKAARSMLRVMLDLLGNLDDRIKELDKEITRRAREDEVSRRLMTIPGIGPIGATAIAALAPPAETFTKGRDFAAWLGLTPLQKSTGGKQKLGATSKMGERTLRRLLIIGSSAVVLQASRRGAPRGSWLERMLARKPRMLVTVALANKTARIVWALLVKQEDYKAPVAALA

SEQ ID NO: 19054 - protein, 344 aa, unidentified
  source 1..344: note = protein_3b92c8c
  REGION 4..157: note = RuvC_domain
  SITE 7: note = RuvC_P1
  SITE 55: note = RuvC_P2
  SITE 96: note = RuvC_P3
  SITE 98: note = RuvC_P4
  SITE 101: note = RuvC_P5
  REGION 219..304: note = Tnp_domain
  SITE 227: note = Tnp_P1
  SITE 257: note = Tnp_P2
  SITE 265: note = Tnp_P3
  SITE 266: note = Tnp_P4
  SITE 277: note = Tnp_P5
MILIGIDPHKSTHTAVAIDSSGNKIAQPRFPVNAGTFGQLMAWSQRWPESRFAVEGARGLGRGIAQQLAADGEHVVDVPSTLSARARMLATGGDRKTDAADALHVAQVALFRPDLRQVCSEDQATILRLLTERRDDLVNERTRLLKRLHVLLRDLIPGGAPIDLSADKAAELLRRTRPVTATDCCRRDLARDLLADLRRLDRTTKDNEHQMRHAVDASRTTLTNLPGVGIVLAAKILGHVGNIDRFPTEHHFASYTGSAPLEASSGNKTRHRLNTGGNRSLNCVLHIIATCQIRDTGLGQDYYRRKVSEGKTPAEARRALKRRLSNVIYRTMKRDQRNLLPDAA

SEQ ID NO: 19055 - protein, 316 aa, unidentified
  source 1..316: note = protein_6b27458
  REGION 10..153: note = RuvC_domain
  SITE 13: note = RuvC_P1
  SITE 55: note = RuvC_P2
  SITE 95: note = RuvC_P3
  SITE 97: note = RuvC_P4
  SITE 100: note = RuvC_P5
  REGION 190..274: note = Tnp_domain
  SITE 198: note = Tnp_P1
  SITE 227: note = Tnp_P2
  SITE 235: note = Tnp_P3
  SITE 236: note = Tnp_P4
  SITE 248: note = Tnp_P5
MAMRVSKSIVGVDVAKVELVTYQADPNLLTSIANEKPAIKRWLKTLPRTTAIAVEATNVYHVDLVELAYESGFDVYIIDGFQLSNYRKGVGGRSKTDASDARLLARFLKNEGENLRPWTPPPAVYGKLQSLLRRRASLIQAKTSLTQSWANDTSLKASFAAFLKSIERLDLLVKAKLKDALREAGLLEQVARCQAVEGIGFLTATALVMAYNRGDFKSGDSYIAFLGMDLRVTDSGQKNGRRFLTKRGCSEIRRLLHNAAMSASRSSAWKEFYDHHRSRGKATTQVLVMLARKLARVAFALMKNQSEYQPKGWVMA

SEQ ID NO: 19056 - protein, 345 aa, unidentified
  source 1..345: note = protein_2fb0cac
  REGION 7..148: note = RuvC_domain
  SITE 10: note = RuvC_P1
  SITE 53: note = RuvC_P2
  SITE 88: note = RuvC_P3
  SITE 90: note = RuvC_P4
  SITE 93: note = RuvC_P5
  REGION 210..296: note = Tnp_domain
  SITE 218: note = Tnp_P1
  SITE 247: note = Tnp_P2
  SITE 255: note = Tnp_P3
  SITE 256: note = Tnp_P4
  SITE 268: note = Tnp_P5
MTQYKRVAIDTSKAVFTLHGIDQNDRPVLRINLRRAQMIPFFTKLLPTEIAMEACGGAHHWARELSELGHEVHLIPPQYVKPYVKRSKNDRNDAEAICEAAGRPGMHFVPVKSVTQQAQGMVLKVRESLVGQRTLLINTLRGHAAEFGVIAGKGIAKIGPLLAVFDQEASIPPEAKDMAVLLGQQIAEIDAKVKELDVKLSAAHKANAVSQNLATIPGVGPVTALTLATEIDPAAFESGRHLAVWAGLTPKERSTGGKQKMGGISRAGNERLRSLLVTGATSVIKAAMKPGSQLMTDWLRALLLRKPRKVVAVALANKMVRVAWVLMARGEVYRRPTSPAAAAAA

SEQ ID NO: 19057 - protein, 396 aa, unidentified
  source 1..396: note = protein_d09fb57
  REGION 6..160: note = RuvC_domain
  SITE 9: note = RuvC_P1
  SITE 58: note = RuvC_P2
  SITE 98: note = RuvC_P3
  SITE 100: note = RuvC_P4
  SITE 103: note = RuvC_P5
  REGION 265..352: note = Tnp_domain
  SITE 273: note = Tnp_P1
  SITE 304: note = Tnp_P2
  SITE 312: note = Tnp_P3
  SITE 313: note = Tnp_P4
  SITE 325: note = Tnp_P5
MPQIWAGADIGKEHHHCVVIDAQGKRLLSRRVLNDETVLLELIGDVLALSEDVLWAVDINHGGAALLIGLLLSHGQPMTYLTGLAVHQASAGYRGQGKTDAKDAFVIADQARMRNDLGLLRPGDEIAVDLRTLTGRRTDLVCDRTRQINRLRAQLLDFFPALERTLALTNRGPVLLLTGYQTPAAFRRSGAKRVETWLRNRKVKNAAAIAASAIEAAVGQQTSLPGEKLAAAMVARLAKGVIALDEEIAELDALIEARFREHPHAEVIRSLPRMGALLGAEFIAATGGDMDAFSTPDRLAGFAGLAPVPRDSGRVSGNMRRPRRYHRGLLRAFYLSSMASLRTCAASRTYYQRKRDEGKGHKQAVLSLARRRANVLWAMLRDGACYQPAPSVTLAA

SEQ ID NO: 19058 - protein, 385 aa, unidentified; identical to SEQ ID NO: 10333
  source 1..385: note = protein_86e4f09
  REGION 8..164: note = RuvC_domain
  SITE 11: note = RuvC_P1
  SITE 60: note = RuvC_P2
  SITE 101: note = RuvC_P3
  SITE 103: note = RuvC_P4
  SITE 106: note = RuvC_P5
  REGION 270..329: note = Tnp_domain
  SITE 278: note = Tnp_P1
  SITE 308: note = Tnp_P2
  SITE 316: note = Tnp_P3
  SITE 317: note = Tnp_P4

SEQ ID NO: 19059 - protein, 338 aa, unidentified
  source 1..338: note = protein_acb963d
  REGION 7..149: note = RuvC_domain
  SITE 10: note = RuvC_P1
  SITE 53: note = RuvC_P2
  SITE 88: note = RuvC_P3
  SITE 90: note = RuvC_P4
  SITE 93: note = RuvC_P5
  REGION 211..297: note = Tnp_domain
  SITE 219: note = Tnp_P1
  SITE 249: note = Tnp_P2
  SITE 257: note = Tnp_P3
  SITE 258: note = Tnp_P4
  SITE 270: note = Tnp_P5
MNSTHIIGIDLAKHVFHLVGHDCCGRETFRKKLTRQKTLQLLSVHEPVIIAMEACGGSHWFDRKCQEYGHQVKLIPAQYVKPYVKTHKNDFIDADAIAEAAIRPKMRFVSPKSEQAQLSIVVRKIRSGYIKERTACMNRIGSMLLEFGISFPRGHHQMKNLFQWLADSKEVVPPLLILELRSQLDYYNLLNKWIKEQEGKLEALNKDNELMTILQSVPGIGPMTASCCLSVVADPKDFKNGRNFAAWLGLVPYQYSTGGKPRMLGISKRGNKELRELFIHAARAVMWRDTSAEKYFGTWLIELKQRKPFNVALVALVNKLARISWSVMVTGKVFEIRT

SEQ ID NO: 19060 - protein, 313 aa, unidentified
  source 1..313: note = protein_d543779
  REGION 8..148: note = RuvC_domain
  SITE 11: note = RuvC_P1
  SITE 53: note = RuvC_P2
  SITE 93: note = RuvC_P3
  SITE 95: note = RuvC_P4
  SITE 98: note = RuvC_P5
  REGION 189..273: note = Tnp_domain
  SITE 197: note = Tnp_P1
  SITE 226: note = Tnp_P2
  SITE 234: note = Tnp_P3
  SITE 235: note = Tnp_P4
  SITE 246: note = Tnp_P5
MIIALRYVGIDISKKHLDIFDEADGVPRRIANATQAITQQVARWQCASLVVFEATGIYDLALREALRQAGIQFARINPARARDFARASGLLAKTDPIDARMLAAFARAMQPAPEQVADPARGALARLAKRRDQLVLMRAQEKNRRSEADDRAMAERIGRLIEVLDSEIAEIEADISALIKAEAQIADDAKLMRSLPGVGPVACMQLIAQMPELGRVGPKQLAALAGLAPFNVDSGTFRGKRKIAGGRKRVRDALYMAALNAVRRADPFKAFYARLRQAGKPAKLALIAVARKLLTVLNAMMRDRKPYLQTKPT

SEQ ID NO: 19061 - protein, 402 aa, unidentified
  source 1..402: note = protein_23630c4
  REGION 15..169: note = RuvC_domain
  SITE 18: note = RuvC_P1
  SITE 66: note = RuvC_P2
  SITE 106: note = RuvC_P3
  SITE 108: note = RuvC_P4
  SITE 111: note = RuvC_P5
  REGION 276..360: note = Tnp_domain
  SITE 284: note = Tnp_P1
  SITE 313: note = Tnp_P2
  SITE 321: note = Tnp_P3
  SITE 322: note = Tnp_P4
  SITE 334: note = Tnp_P5
MGASIVGHGDVDVFIGVDVGKGEHHAVAVDRAGKRLFDKALPNDEGRLRELIGGLKSRGRVLFVVDQPATIGALPLAVAQAEDVMIGYLPGLAMRRIADLHAGEAKTDARDAAIIAEAARSLPHALRSLELADEQVAELSMLCGFDDDLAQQITATSNRVRGLLTQIHPALERVIGPRLDHPAVLDLLQRYPSPASLKAAGEKRIGDRLAKLAPRIGRRIAAEITQALTEQTVVVVGTNAATLVLPKLAKQLEGLRQQRAEIAVEVERLVEAHPLHPVLTSMPGVGVRTAARLLTEVSGKHFATAGHLASYAGLAPVTRRSGSSIRGEHASRRGNKILKRALFLSAFAALRDPVSRAYYDRKIAQGKQHNQALIALARRRCDVLHAMLRDGTLHQAPTPIAA

SEQ ID NO: 19062 - protein, 343 aa, unidentified
  source 1..343: note = protein_cb9e798
  REGION 7..149: note = RuvC_domain
  SITE 10: note = RuvC_P1
  SITE 53: note = RuvC_P2
  SITE 88: note = RuvC_P3
  SITE 90: note = RuvC_P4
  SITE 93: note = RuvC_P5
  REGION 212..298: note = Tnp_domain
  SITE 220: note = Tnp_P1
  SITE 250: note = Tnp_P2
  SITE 258: note = Tnp_P3
  SITE 259: note = Tnp_P4
  SITE 271: note = Tnp_P5
MQTITTIGLDIAKSVFQVHGVDAAGQVVIRRQLRRRYVLAFFQKLPPCLIGIEACASSHHWSRALHGLGHTVRLMPPAYVKPYVKRQKNDTTDAEAICEAVARANMRFVPTKTSEQQSGLVLHRTRHLFVRQQTSVINAIRAHLAEFGIVAPIGRKGIEELLHVVADPADNRVPAIARACLAAFGTQLRRLKEQILEFDRMITAWHRSNEMSRRLDDCPGVGPALATALVATVADPKVFRSGRNFSAWIGLVPKQHSSGGKDRLGSICKQGDRYLRGLFVAGALAVIRYAKIHGTKYRPWLTALLARRPTKVAAIALANKLARMVWAMMAKGERYKEPVALAA

SEQ ID NO: 19063 - protein, 342 aa, unidentified
  source 1..342: note = protein_92d5a20
  REGION 5..152: note = RuvC_domain
  SITE 8: note = RuvC_P1
  SITE 55: note = RuvC_P2
  SITE 92: note = RuvC_P3
  SITE 94: note = RuvC_P4
  SITE 97: note = RuvC_P5
  REGION 212..299: note = Tnp_domain
  SITE 220: note = Tnp_P1
  SITE 250: note = Tnp_P2
  SITE 258: note = Tnp_P3
  SITE 259: note = Tnp_P4
  SITE 271: note = Tnp_P5
MDYYAGIDVSLECSSVCVVDGTGKIIREGKVASEPEALIAWFGSLGLGLTRIGLEAGPLSQWLYAAMKQAGLAVELLETRHVRDAFKAMPVKSDRNDARGIAQLMRLGWFRPVHCKSMDAQEVRAVLTARKLVQTKLLDVENSLRGILRGFGLKVGKTTARSFAGRIQELVKGHPQLEAVSEALLSVRIVLLREFNAFEKRVRAMSRLNARARLLMSTPAVGPIVALTYASAIDDPARFKSSKQAGSHFGLTPKKYQSGETDYSGRISKIGDASVREALYQAAHVMLTKPVKGCSQLKSWAMRIARRAGMSKAKVALARKLAVILHRMLANATPFNSAAAAA

SEQ ID NO: 19064 - protein, 342 aa, unidentified
  source 1..342: note = protein_d09e1bf
  REGION 6..147: note = RuvC_domain
  SITE 9: note = RuvC_P1
  SITE 52: note = RuvC_P2
  SITE 87: note = RuvC_P3
  SITE 89: note = RuvC_P4
  SITE 92: note = RuvC_P5
  REGION 212..297: note = Tnp_domain
  SITE 220: note = Tnp_P1
  SITE 250: note = Tnp_P2
  SITE 258: note = Tnp_P3
  SITE 259: note = Tnp_P4
  SITE 271: note = Tnp_P5
MPITVLGIDLGKNSCSLVGLDATGRVVLRRRMRRESVIAFGAQLPSCVVAMEACCGAHHMGRTLAAQGHTVRLMSPEYVRPYVKAQKNDDRDAEAIAEAATRPTMRFVALKSEAQLDMQTLHRVRDQLVGERTALMNQIRAILLERGHVVPQGRARLAARLASLLDDEAATDLTPRMRTLVTDVRERWQFLDQRIAALDAEFSEQARSDESARRLTTIPGIGALNATALVAAIGDVTTFARGRDLAAWLGLVPRQVTTGGRPKLVGITKRGSKYLRKMLIQGARAAMPTLRQSETRLGQWLRGLLARAHANTAVVALAAKMARTVWALLRHERVYEAAVIAA

SEQ ID NO: 19065 - protein, 335 aa, unidentified
  source 1..335: note = protein_f52d3f6
  REGION 6..148: note = RuvC_domain
  SITE 9: note = RuvC_P1
  SITE 52: note = RuvC_P2
  SITE 87: note = RuvC_P3
  SITE 89: note = RuvC_P4
  SITE 92: note = RuvC_P5
  REGION 211..299: note = Tnp_domain
  SITE 219: note = Tnp_P1
  SITE 249: note = Tnp_P2
  SITE 257: note = Tnp_P3
  SITE 258: note = Tnp_P4
  SITE 270: note = Tnp_P5
MKTPVIGMDIAKHVFQLHAVDVASGKVERVKLKRSEVVDFFAKRERSIVAIEACGGAHHWARQLGKFGHDVRLIAAHSVRPFVLRNKSDAADARGIWTAAQQPEARFVAVKSETQQSILALHRMRAQLMKFRIMQTNALRGILYEFGEILSEGFQPFTKEIVPAFARISDRLPAMLVESLREQWARVQAISEDIASLERRLSNELRLSTECRRVGEIPGVGLLTATATVAAIGDPATFRSGREFAAWLGLVPRQTGTGGRIRQLGLSKRGNTYLRTLLMHGTRSVILRGTRTPWLNDLLARRPFNVVVAAVANKLARTIWAILSRQTRYEAPVDA

SEQ ID NO: 19066 - protein, 335 aa, unidentified
  source 1..335: note = protein_d0e9219
  REGION 4..150: note = RuvC_domain
  SITE 7: note = RuvC_P1
  SITE 54: note = RuvC_P2
  SITE 93: note = RuvC_P3
  SITE 95: note = RuvC_P4
  SITE 98: note = RuvC_P5
  REGION 211..294: note = Tnp_domain
  SITE 219: note = Tnp_P1
  SITE 249: note = Tnp_P2
  SITE 257: note = Tnp_P3
  SITE 258: note = Tnp_P4
  SITE 270: note = Tnp_P5
MIHVGVDLHQRFCCMTALEARGKILQAGPVTNEKLALRRYFRQFRGQEVEVAVEACGFWPAFREVVEPEVKRLVLVHPQRVKAIASAKLKNEPGGFGDAGAFAALRFVAGVVEGGPETQARGQQVRLRATLVRQRTRLKNQVHAVLHQKGLHSPVTDLFGKGGRRWLAGLQLPAAAREAVNVCLRLLDGYSEEVQKQNLQLSERAKQDKWAEWLMTIPGIGECSAMMLLAEIGDIGRFRDPEALCSYAGLVPRVRESAGKAARGGITRQGSPWMMVEAAQVATRSSPGARRSYERLRRKKHKHVARVALARKLRIAVYALLHDGVVFEEAKFAAV

SEQ ID NO: 19067 - protein, 318 aa, unidentified
  source 1..318: note = protein_62c0cb1
  REGION 7..155: note = RuvC_domain
  SITE 10: note = RuvC_P1
  SITE 54: note = RuvC_P2
  SITE 94: note = RuvC_P3
  SITE 96: note = RuvC_P4
  SITE 99: note = RuvC_P5
  REGION 193..277: note = Tnp_domain
  SITE 201: note = Tnp_P1
  SITE 230: note = Tnp_P2
  SITE 238: note = Tnp_P3
  SITE 239: note = Tnp_P4
  SITE 250: note = Tnp_P5
MSDPIFVGIDVSSQVLEVASTVESKTAQVTNDSAGIEQLVEQLVGLKPALVVLEATGGYEFEAACALQAAGLSVAVVNPRAARDFARAMGALAKTDALDARMLAAFARVLDQHPDRQRFIKPLADDELQRLQALVLRRRQLVQMLTSERQRLRISHPAAKPSVERVIDVLRRELDDSDTQVAAHVRRHHAALAEALASVPGIGAVTVAVLLAELPELGSLDRRRIAALVGVAPMNRDSGQMRGQRTIWGGRADVRRTLYMATLTAVRHNPILNAFYQRLLAAGKRKKVALVAAMRKLLTILNAIAKHRSTWIPSLPLP

SEQ ID NO: 19068 - protein, 391 aa, unidentified
  source 1..391: note = protein_8d010c3
  REGION 4..163: note = RuvC_domain
  SITE 7: note = RuvC_P1
  SITE 60: note = RuvC_P2
  SITE 101: note = RuvC_P3
  SITE 103: note = RuvC_P4
  SITE 106: note = RuvC_P5
  REGION 266..353: note = Tnp_domain
  SITE 274: note = Tnp_P1
  SITE 304: note = Tnp_P2
  SITE 312: note = Tnp_P3
  SITE 313: note = Tnp_P4
  SITE 326: note = Tnp_P5
MIYVGIDVAKDKHDCFITNSDGEILFPVFSIQNNRDGFDDLFSKIRSISTDLSNIKVGLEATGHYSYNLLGYLIDKGLPTFVINPLHTNLYRKSLSLRKTKTDKVDARTIAMMLMSDVNLKSYSDTSYHNEELKSLTRYRFDKVQERAQLKQSVSRLVAILFPELEKLVATLHIASVYALLSELPSAGKIASCHLTHLTKLLGNASKGRYSREKAIEIREAARVSIGSNMPAKSLELRHTLKLIGELDSEISEIESEIKRIMDQISSPILTIPGISYRMDAMILAEIGDFSRFDSPDKILAYAGASPSTYQSGQLESSYSHMEKRGSRYLRFALINATKYVCHWDKTFGTYLQKKISEGKHYNVAITHATKKLVRLIYAMERSGKPYKKMA

SEQ ID NO: 19069 - protein, 387 aa, unidentified
  source 1..387: note = protein_e0f1304
  REGION 4..159: note = RuvC_domain
  SITE 7: note = RuvC_P1
  SITE 58: note = RuvC_P2
  SITE 98: note = RuvC_P3
  SITE 100: note = RuvC_P4
  SITE 103: note = RuvC_P5
  REGION 263..350: note = Tnp_domain
  SITE 271: note = Tnp_P1
  SITE 301: note = Tnp_P2
  SITE 309: note = Tnp_P3
  SITE 310: note = Tnp_P4
  SITE 323: note = Tnp_P5
MIYVGIDIAKNTHWASAMNSDGEILLEPFSFQNNNEGFQKFISKLSNFDKQKMLIGLESTAHYGENIISYLFNLDYKIGIINPIQTSNLRKSNIRKTKNDKVDTFIIIKSLTLNNYNLVTTRDINNIKLKGLSRSRHNLIVMRSRSKIQLASFIDQLFPELNMFFKGNLHLNVSYQLLKEYSSPKDISSLHLTKLSNILHDNSHGRYNKEDAIRLRELAKNSVGIDNPTLSLQIKQAILQIELYTVQIEEVEKLSKQILDEMESKLLTIPGMSYNQATVIHGFIGDINRFNKSCQLLAYSGLDPSVYQSGNFEARSTRMSKRGNSLLRYHLVYAAHNLVLHNKTFKEYYDLKRSQGKTHYCALGHCAHKLVRIIFKMLKSNVNFDLD

SEQ ID NO: 19070 - protein, 399 aa, unidentified
  source 1..399: note = protein_aa0916d
  REGION 6..163: note = RuvC_domain
  SITE 9: note = RuvC_P1
  SITE 58: note = RuvC_P2
  SITE 98: note = RuvC_P3
  SITE 100: note = RuvC_P4
  SITE 106: note = RuvC_P5
  REGION 268..355: note = Tnp_domain
  SITE 276: note = Tnp_P1
  SITE 307: note = Tnp_P2
  SITE 315: note = Tnp_P3
  SITE 316: note = Tnp_P4
  SITE 328: note = Tnp_P5
MATIWAGIDAGKTHHHCVAIDEGGRRLLSRRVTNDEPELLELLAAVLALGDEVTWGIDLADGGAALAIAILINHGQSVRYISGRAIHRASEGYRGEGKTDAKDAKDAAVIADQVRIRRDPHSLRASDETVTDLRILTNRRTDLVADRTRTVNRLRAQLTSIFPGLERALDFANTGPLTLLTGYQTPAAPRRIGVKRLETWLRNRKGIRADRLAETAVQAAERQHTSLPGEKLTAQLVHTLAKEVVVLNQRIAEIDKLIEARFRDHHTFEVITSMPGLGVIPGAEFLAATGGDMAAFGTPDHLAGFGGVAPVPRDSGKISGNLRRPQRYNRRLQRVFYTSALFSIRYCEDSRRFYDRKRAEGKRHTQAVLALARRRVNVLWALLRDGRCSQPTHPIVLAA

SEQ ID NO: 19071 - protein, 337 aa, unidentified
  source 1..337: note = protein_f9adc42
  REGION 7..149: note = RuvC_domain
  SITE 10: note = RuvC_P1
  SITE 53: note = RuvC_P2
  SITE 88: note = RuvC_P3
  SITE 90: note = RuvC_P4
  SITE 93: note = RuvC_P5
  REGION 211..297: note = Tnp_domain
  SITE 219: note = Tnp_P1
  SITE 249: note = Tnp_P2
  SITE 257: note = Tnp_P3
  SITE 258: note = Tnp_P4
  SITE 270: note = Tnp_P5
MQTIAVVGLDLAKTVFQVHGVAADGTVVLRRQLRRGQVLGFFQSIGPCLVGIEACGSAHHWARELMAIGHEVRLMPPAYVKAYVKRGKTDAADAEAIAEAVTRPTMRFVAVKSKAQQAVLMLHKTRDLLVRQRTMLINALRGHLGEYGITAPQGPAGVQAALKALREEDQDLPDLARTALGGLAEQLEQLGAEIGRLERRILEWHRQDETSRRLATIPGIGPITASAMAASAPDPKLFRSGRQFAAWLGLTPRANSSGGKERQSGISKMGDSYLRRLLVVGATAVLRMARQRARAGWVGNLLERKKPKVAAVALANKTARIAWTLMVRQEDYRPIAA

SEQ ID NO: 19072 - protein, 341 aa, unidentified
  source 1..341: note = protein_ead24f4
  REGION 6..147: note = RuvC_domain
  SITE 9: note = RuvC_P1
  SITE 52: note = RuvC_P2
  SITE 87: note = RuvC_P3
  SITE 89: note = RuvC_P4
  SITE 92: note = RuvC_P5
  REGION 211..298: note = Tnp_domain
  SITE 219: note = Tnp_P1
  SITE 249: note = Tnp_P2
  SITE 257: note = Tnp_P3
  SITE 258: note = Tnp_P4
  SITE 270: note = Tnp_P5
MKQNVIGMDIAKKVFQLHTVDRNSGKIERIKLRRDEVLPFFAQRQSCLVAIEACGSAHWWARQLRQQGHEVHLLAPRSVRPFVLRNKTDAADAQAIWTAVQQPGACLVAIKQADQQAILSLHRIRAQLLKFRIMQSNGLRGLFYEFGIVLPEGHAQLAKAMPEAFAEAENQVPPVLLESLREQWARVLGLEEEIRVIELRLKHYLRENLDCRKIAEIPGIGLLTATAAVASLGDATTFRSGRQFSAWLGLVPRQTGTGGRVRQLGLSKRGDSYLRMLLMHGARSILARSQKSGWLERLLARRPYNVAVAAVANKLARTLWAMLAKGSPYRAERFTACPAGH

SEQ ID NO: 19073 - protein, 337 aa, unidentified
  source 1..337: note = protein_9e733d7
  REGION 6..147: note = RuvC_domain
  SITE 9: note = RuvC_P1
  SITE 52: note = RuvC_P2
  SITE 87: note = RuvC_P3
  SITE 89: note = RuvC_P4
  SITE 92: note = RuvC_P5
  REGION 211..301: note = Tnp_domain
  SITE 219: note = Tnp_P1
  SITE 249: note = Tnp_P2
  SITE 257: note = Tnp_P3
  SITE 258: note = Tnp_P4
  SITE 270: note = Tnp_P5
MKLKRIGVDLAKQVFQIHGVDSHEQAVCRKQLKRSQMLDFFRRLEPCTVAMEACGSAHYWARELRTLGHEARLIAPQFVKPYVKSGKNDANDAEAICEAASRPSMRYVEVKSAEQQASQALHRIRSRLIRARTALVNEIRGLLGEFGRVEARHGVAATRRLTQTALDAQNGLPGQMRELLAELGGELDEHDAWLSRLDDMIQRQAREDERVGRLMQVEGIGPITATALVSAVGDARQFSSARQFAAWLGLVPRQHSSGGKERLGAINKRGDSYLRTLLIHGARAVLRHCQDKADRRSQWLRQLVCRRNPNIATVALANKNARIVWAILSRGEGYRPG

SEQ ID NO: 19074 - protein, 341 aa, unidentified
  source 1..341: note = protein_8ded9ef
  REGION 5..151: note = RuvC_domain
  SITE 8: note = RuvC_P1
  SITE 53: note = RuvC_P2
  SITE 91: note = RuvC_P3
  SITE 93: note = RuvC_P4
  SITE 96: note = RuvC_P5
  REGION 211..297: note = Tnp_domain
  SITE 219: note = Tnp_P1
  SITE 249: note = Tnp_P2
  SITE 257: note = Tnp_P3
  SITE 258: note = Tnp_P4
  SITE 270: note = Tnp_P5
MGEYIGLDVSMKDTAISVRCDGKRVWRGKCASDPETIARTIRKRAREPERVIFETGPLSVWFYHALRAEGLPVICVDARHAKAALDMAANKTDANDADGLAHLAEVGFYREVRVKGFDSMLTRTLVAARTKLVRIQTELSNQIRGLMKTFGLVVPAGKGSTFEANVRSRLDENPELATIIRPLLEAWCSIRLRAAELTKRLINDARQSEACQLLMSIPGVGVVTASAFATAVEDPANFRSSRSVGAWLGLTTRRYQSGQVDYNGHISRRGDHQVRSLLYEAACVILTRSTADSALREWGLKLRERIGFKRAAVAVARKLAVIMHAMLKSGELFDRKVVASA

SEQ ID NO: 19075 - protein, 408 aa, unidentified
  source 1..408: note = protein_00809fb
  REGION 6..170: note = RuvC_domain
  SITE 9: note = RuvC_P1
  SITE 63: note = RuvC_P2
  SITE 109: note = RuvC_P3
  SITE 111: note = RuvC_P4
  SITE 114: note = RuvC_P5
  REGION 282..368: note = Tnp_domain
  SITE 289: note = Tnp_P1
  SITE 319: note = Tnp_P2
  SITE 327: note = Tnp_P3
  SITE 328: note = Tnp_P4
  SITE 341: note = Tnp_P5
MNTLYVGINVSSKSNVVYLMLPNGDRHSNFSVANSHEGSIRLVKRIHSALTSHSLDTVLIGLESTSVYGDNLVYFLREDATLTPFNRKIHVLNPKQVKKFHDIYNDLPKNDYVDSFVIADCLRFGRINKEVYLGDYRYKALQNLTRARFFAVQNLTKEKQRFINVLFKKYSTITQEKVFSNTFSTTALAVYDEFESVEALANMDLHELTEFIIEKGKNRFPDPDAVAKAIQKAARSSYRLPKTVNDSVNQVLSISITSMKALESQIKEFDKAIKSQMELLPNVLISTPGIGPVLSAGIVAEIGDINRFENQAGLAKYAGFAWRQHQSGNFEAENARLIHSGNRFLKYYLCEAAFSLVRCDKEYSDFYHLKYKEVNRYQHKRALALTARKFVRLVFRLLKDNRLYTSAR

SEQ ID NO: 19076 - protein, 375 aa, unidentified
  source 1..375: note = protein_383c7ec
  REGION 18..166: note = RuvC_domain
  SITE 21: note = RuvC_P1
  SITE 70: note = RuvC_P2
  SITE 106: note = RuvC_P3
  SITE 108: note = RuvC_P4
  SITE 111: note = RuvC_P5
  REGION 251..337: note = Tnp_domain
  SITE 259: note = Tnp_P1
  SITE 290: note = Tnp_P2
  SITE 298: note = Tnp_P3
  SITE 299: note = Tnp_P4
  SITE 310: note = Tnp_P5
MTMVTDLAAVQQVPAVTGGVDTHADVHVAAAIDAVGRELGHREFPTTPAGYAALLAWLEGFGPLELVGVEGTGMYGAGLTRVLQAAGVAVVEVDRPDRKARRFQGKSDPIDAYAAARAALSRRASGTPKARTGTVEMIRTLRVARSGAVKAKAVAWNQLKALIKTAPEELRERLRHLDGAALLDVCAGLRAARGPVPEHGPHAKRHRPGVLVDPTAACKRSLAVLARRIRVLEAEIADLDDDLEPLIVATAPTLLAMYGVGLDVAGQLLATAGDNPDRLRNEAAFAHLCGVAPIPASSGKTTRHRLNQGGDRHANHALWRIAMTRLRYDPRTREYRDRRAKDQKTNKDIIRCLKRYIAREVHRALMTDLTAPSPA

SEQ ID NO: 19077 - protein, 351 aa, unidentified
  source 1..351: note = protein_5b06b90
  REGION 5..152: note = RuvC_domain
  SITE 8: note = RuvC_P1
  SITE 55: note = RuvC_P2
  SITE 92: note = RuvC_P3
  SITE 94: note = RuvC_P4
  SITE 97: note = RuvC_P5
  REGION 212..300: note = Tnp_domain
  SITE 220: note = Tnp_P1
  SITE 250: note = Tnp_P2
  SITE 258: note = Tnp_P3
  SITE 259: note = Tnp_P4
  SITE 271: note = Tnp_P5
MEHHVGIDVSLELSSLCVLDATGKVIREAKVASEPEALVKFLRGLDLTIVRVGLEAGPLSQWLYDGLHEAGFEAVLLETRHVKAALSAMAVKTDRRDARGIAQLLRMGWYRPVHRKSVPSQEIRALLGARKQLQIKVIDLEQTVRGLLRGFGLKVGDVSRGKLGARIRELAAGHAMLEKIVEPLLAAREAMWREFAKLHREVLVIVKEDQVCRRLMTVPGVGALVSLTYRAGVDDPGRFTKSKSVGAFFGLTPKRYQSGETDVTGGITRVGDAGVRTALHDAANALLTRATRFSTLKRWALDVAKRRGMRRAKVALARKLATVLHRIWANGTEFVWGKDPVAAAAAAAPAA

SEQ ID NO: 19078 - protein, 346 aa, unidentified
  source 1..346: note = protein_d2e3bbc
  REGION 17..176: note = RuvC_domain
  SITE 20: note = RuvC_P1
  SITE 76: note = RuvC_P2
  SITE 116: note = RuvC_P3
  SITE 118: note = RuvC_P4
  SITE 121: note = RuvC_P5
  REGION 218..304: note = Tnp_domain
  SITE 226: note = Tnp_P1
  SITE 256: note = Tnp_P2
  SITE 264: note = Tnp_P3
  SITE 265: note = Tnp_P4
  SITE 277: note = Tnp_P5
MRPNLFMEIDYVVSQCVGIDVSKEKLVATMCMFSLAEQAVYSRATEFENSKTGFNQLVKWSRKEAMKDLPLRFVMEATGVYHKHLANHLVKIGCTTIVMMPKKAREFAYWEGMISKNDTIDSRVLALVGCVKRSMRPWQPTSPIYRELRMMTRFSQDAKVLRTELNNHLEALSHSHEPEKSVIKHYEAMVDALDKRIEKNLENMKKKVASDAVLAKKVENIMTIPSVGFLSAVTVIAETNGFALIQSRNQLTSYAGFDIKDNQSGTVEGKSRISKRGNTRIRAILYMPAVQCQRRSKHLKDAYERIVAKHPDKKMIAVTAMQRRLLLLIYAIWKSNKAYSEDYNKE

SEQ ID NO: 19079 - protein, 377 aa, unidentified
  source 1..377: note = protein_5617723
  REGION 7..147: note = RuvC_domain
  SITE 10: note = RuvC_P1
  SITE 53: note = RuvC_P2
  SITE 88: note = RuvC_P3
  SITE 90: note = RuvC_P4
  SITE 93: note = RuvC_P5
  REGION 210..295: note = Tnp_domain
  SITE 218: note = Tnp_P1
  SITE 248: note = Tnp_P2
  SITE 256: note = Tnp_P3
  SITE 257: note = Tnp_P4
  SITE 269: note = Tnp_P5
MNDLIRIGIDTSKSVFVLHGVNAAEQPILRKRLRRRQVVDYLGKLPPMRIGIEACGAAHYWGRELTALGHKVCLLAPQHVKPYVRRNKNDEADAEAICEAMSRPRTRFVPIKTAEQQAALMLAGVRDQLVRRRTQLSNSIRGYAAEFGLVAARGLDKIEPLLARIAADETLPALARELFAEQAEDYAELTRKLRRIDAKLLAWHRQNALSRRLAEIPAIGPIGASLLAMKVPDPAAFKTGRDFAAWLGLTPKDHSTAGKTRLGTITRAGDESLRRVLVVGATALIQQVRKGRGHPSPWLIALLKRKPPKLAAVALANKTARIAWKLMVSGGHYDRNRAAASRAERCAPLVGGFAARPALEAHTMPRRKVAPAAMPKA

SEQ ID NO: 19080 - protein, 292 aa, unidentified
  source 1..292: note = protein_716cd09
  REGION 1..98: note = RuvC_domain
  SITE 37: note = RuvC_P3
  SITE 39: note = RuvC_P4
  SITE 42: note = RuvC_P5
  REGION 161..252: note = Tnp_domain
  SITE 169: note = Tnp_P1
  SITE 199: note = Tnp_P2
  SITE 207: note = Tnp_P3
  SITE 208: note = Tnp_P4
  SITE 220: note = Tnp_P5
MEACASSHHWSRELQALGHTVRLIPPAYVKPYVKRQKNDAADAEAICEAVTRANMRFVPTKTLEQQSGLVLHRARHLFIRQQTVVINAIRAHLAEFGIVATVGRHGVEELLNVVADPNDKRIPEIARACLSALGAQLRGIKEQILEFDRLIRAWHRSNEISMRLDEAPGVGPVLATAVVAAVADPKSFRSGRNFSAWIGIVPRQHSSGGKNRLGNISKQGDRYLRGLFVAGALSVIRYAKIHGTKHRPWLTALLARRPTKVAAIALANKIARMVWAMMARGERYKEPVAIAR

SEQ ID NO: 19081 - protein, 379 aa, unidentified
  source 1..379: note = protein_5de61bb
  REGION 8..150: note = RuvC_domain
  SITE 11: note = RuvC_P1
  SITE 55: note = RuvC_P2
  SITE 95: note = RuvC_P3
  SITE 97: note = RuvC_P4
  SITE 100: note = RuvC_P5
  REGION 195..282: note = Tnp_domain
  SITE 203: note = Tnp_P1
  SITE 233: note = Tnp_P2
  SITE 241: note = Tnp_P3
  SITE 242: note = Tnp_P4
  SITE 255: note = Tnp_P5
MQSIKTWAGVDVSAKMLAAHRLRDGKQEAREFSNDAVGHRDLLKWLGKRARVCMEATGVYHLQLALMLQAAGVELMVVNPRVAKDFARALSNRSKTDQVDAWTLLEYVQRMEFIAWQAPKAAVLAVRELGRRLSELVHAAVDEKNRFHAKNVAAISSIVVNDVKAHVAQIERRITQIEKSAVTVIDDDDDLREQFQILMAITGIGRRSAILLLSELAVLDPTMTVKQLVAHAGLDPRVYESGTSVEKPARISKVGNARLRAILYMNALSAVRHDRGARLFFAQLVARGKKRMQALVAVMRKLLHGIWIVLQRRVSFDSSVLFAASLAKAESSDSAVAANQLEPSQDHPKGRSAAEELRKQLDPDSAEATRSRKRRSKAA

SEQ ID NO: 19082 - protein, 344 aa, unidentified
  source 1..344: note = protein_da84bf5
  REGION 6..148: note = RuvC_domain
  SITE 9: note = RuvC_P1
  SITE 52: note = RuvC_P2
  SITE 87: note = RuvC_P3
  SITE 89: note = RuvC_P4
  SITE 92: note = RuvC_P5
  REGION 211..300: note = Tnp_domain
  SITE 219: note = Tnp_P1
  SITE 249: note = Tnp_P2
  SITE 257: note = Tnp_P3
  SITE 258: note = Tnp_P4
  SITE 270: note = Tnp_P5
MSVVRIGLDLAKYVFEVHGVDIHGKIVLRRRLRRDAVSTFFANLPKCLIGMEASNGAHYWARTLKALGHEVRLISPQFVKPYVKSNKNDQNDAEAICEAISRPSMRFVPPKSADQLTMQAVHRIRQRLIGDRVRLVNQIRGLLSEHGIVVARDIAQLRRRLAEIVGDSAEELCDLLRSLMRELYAELTELDARIKSFDLRLREIFRGSEQCQRLAKIEGIGPVTATALIAAVGDRSSFKNGRQFAAWLGLVPRQQSSGGRQRLFGISKRGDRYLRTLLIHGARAALARAGGKQDPRSVWLGKLRLRRHPNVAAVALANKNARIVWAMLSGNEDYEMQRSVGSAA

SEQ ID NO: 19083 - protein, 342 aa, unidentified
  source 1..342: note = protein_4da1e50
  REGION 7..148: note = RuvC_domain
  SITE 10: note = RuvC_P1
  SITE 53: note = RuvC_P2
  SITE 88: note = RuvC_P3
  SITE 90: note = RuvC_P4
  SITE 93: note = RuvC_P5
  REGION 211..296: note = Tnp_domain
  SITE 219: note = Tnp_P1
  SITE 249: note = Tnp_P2
  SITE 257: note = Tnp_P3
  SITE 258: note = Tnp_P4
  SITE 270: note = Tnp_P5
MEKVTIIGVDLAKNVFQLHGAAADGSVVFRKKLTRLQFCKFMAGQPACVVAMEACAGSHYWAREMVRLGHQPKLIAPRYVKAFIKRQKNDAADAEAIVEAAQRPTMRFVEPKTEEQQSRSIMFRTREQLVNQRTELVNALRAHLYEFGYIAPQGIRYLSRLECFVEDENAKLPDLAREICRDLLDQIYQLTGRIDALRKKIDALSREAEASRRLQTMPGVGPIAALAIETFAPPMETFKCGRDFAAWLGLVPLQKSTGGKQRLGRTSKMGQCDIRRLLIIGAMAVVRWASRKGAPEGSWLARMMPKKPRMLVAIALANKMARGIWAMLTKKEDYRNPATVSV

SEQ ID NO: 19084 - protein, 352 aa, unidentified
  source 1..352: note = protein_a7f9314
  REGION 12..153: note = RuvC_domain
  SITE 15: note = RuvC_P1
  SITE 58: note = RuvC_P2
  SITE 93: note = RuvC_P3
  SITE 95: note = RuvC_P4
  SITE 98: note = RuvC_P5
  REGION 217..302: note = Tnp_domain
  SITE 225: note = Tnp_P1
  SITE 255: note = Tnp_P2
  SITE 263: note = Tnp_P3
  SITE 264: note = Tnp_P4
  SITE 276: note = Tnp_P5
MAEKLNSVIAVIGIDIGKNSFHVVGLDERGAILLRQKWSRGQVDSRLSNMPPCLIGMEACVGAHHLSRRLRALGHDARLMPAKYVRPYSKGQKNDFRDAEAIAEAVQRPTMKFVATKSADQLDLQALHRVRERLVSQRTGIINQIRAFLLERGIAVRRGQRFLRAELPGILATPSDVLSPHMVRIVEDLAGDWRRLDDRIEALSAEIEDLAHKDSGCERLMTVPGIGPIISSAMVAAIGTGDAFSKGRDFAAWLGLVPKQISTGDRTILGKISKRGNRYLRVLFVQAAWVVLIKPKSWERHGLKPWIEAAKKRLHHNVLAIALANKLARIAWSVLARGRGFEVRSIATAQPV

SEQ ID NO: 19085 - protein, 346 aa, unidentified
  source 1..346: note = protein_82cde11
  REGION 7..147: note = RuvC_domain
  SITE 10: note = RuvC_P1
  SITE 53: note = RuvC_P2
  SITE 88: note = RuvC_P3
  SITE 90: note = RuvC_P4
  SITE 93: note = RuvC_P5
  REGION 210..301: note = Tnp_domain
  SITE 218: note = Tnp_P1
  SITE 248: note = Tnp_P2
  SITE 256: note = Tnp_P3
  SITE 257: note = Tnp_P4
  SITE 269: note = Tnp_P5
MDKLIRIGMDTSKSVFQLHGVNEAEQPVLRKKLRRNQVLAFFAGLSPLRVGMEACGAAHYWARELRALGHHVLLMPAQHVKPYVQRSKSDAADADAICEAMIRPRMRFVAAKSAEQQAAQMLAKLRAQFIGRRTQLANSIRGFAAEFGLTAPKGLSRLGDLLADIRADATIPDTARDMFETLARDYAHISAEVAVLDKKLFALHRHNEVSRRLAVIPAVGPVGATLLAIKVTDAHGFKSGRDFAAWLGLTPKNHSTAGKNRLGVITRAGDDMLRSVLVAGATALIQHMRRGSKRVWPWLAALTARKPAKLAAVALANKLARIAWKLMVTGEHYRPLGATNPVSVQP

SEQ ID NO: 19086 - protein, 341 aa, unidentified
  source 1..341: note = protein_e67e225
  REGION 6..147: note = RuvC_domain
  SITE 9: note = RuvC_P1
  SITE 52: note = RuvC_P2
  SITE 87: note = RuvC_P3
  SITE 89: note = RuvC_P4
  SITE 92: note = RuvC_P5
  REGION 211..299: note = Tnp_domain
  SITE 219: note = Tnp_P1
  SITE 249: note = Tnp_P2
  SITE 257: note = Tnp_P3
  SITE 258: note = Tnp_P4
  SITE 270: note = Tnp_P5
MKITTVGIDLAKSVFQVHGIDERGKAVLRKQLKRAQFLLFFANLPPCLIGMEACGSAHHWARKLQGFGHTVKLIAPQYVKPYVKTNKSDAADAEGICEAVGRPNMRFVAIKTVEQQAVLSEHRVRQGLVQARTAQANQIRGLLAEFGLAIPKGIANVPQQVPLILNDPAYELPGTFRELMGGLLAHFHALDRQVDELGARIAAWHRQSAASRKLAQIPGIGPLGASALVSTIGDVKTFKNGRQLAAWLGLVPRHCGTGGKQTLLGISKRGDVYLRTLLIHGARSAILAAQRRPDSDSWLAKLVQRRNPNVAAVALANKNARTVWALLAHDREFQPGYATMA

SEQ ID NO: 19087 - protein, 348 aa, unidentified
  source 1..348: note = protein_2349268
  REGION 9..151: note = RuvC_domain
  SITE 12: note = RuvC_P1
  SITE 55: note = RuvC_P2
  SITE 90: note = RuvC_P3
  SITE 92: note = RuvC_P4
  SITE 95: note = RuvC_P5
  REGION 214..304: note = Tnp_domain
  SITE 222: note = Tnp_P1
  SITE 252: note = Tnp_P2
  SITE 260: note = Tnp_P3
  SITE 261: note = Tnp_P4
  SITE 273: note = Tnp_P5
MNATPNSVVGVDTAKSVFQLYTVDKETGEVINQQIKRAQFLQWFANRAPCLIGMEACGGSQHWARKLQAMGHEVKLMSGKMVKAFVCGNKNDAADARAIYMAAQQPEVKTVAVKSEGQQAVLAMHRIRQQLVKVRTAQMNELRGLLGEYGEVFGRGRKAFDAGMKASLERLAERLPAPLIDTLRDQWNELGRLDERIARIEASLLAWLRQDGAAKAISAIPGVGLLTATAAVATMGQPKAFRSGREFAAWIGLVPAQTGSGGKVRLLGMSKRGDTYLRTLLIHGARAVLQHAKAPSPWLQQISQRRPPNVVIVALANKIARTIWAVLAHDRAYDKGHVSQRPLAAPAA

SEQ ID NO: 19088 - protein, 363 aa, unidentified
  source 1..363: note = protein_45e635b
  REGION 4..95: note = RuvC_domain
  SITE 7: note = RuvC_P1
  SITE 60: note = RuvC_P2
  REGION 234..321: note = Tnp_domain
  SITE 242: note = Tnp_P1
  SITE 272: note = Tnp_P2
  SITE 280: note = Tnp_P3
  SITE 281: note = Tnp_P4
  SITE 294: note = Tnp_P5
MFIVGIDIAKRSHEAIIIAEDGQVVRKAFSFRNNCTGYNLLLEQVRRLTLVKSQIVFAMESTAHYWLALYARLLKDGYTVLVLNPIQSSNVPQDKILALRELCRSRAYLVDMAADLKRKLIALLDRIFPEYESLFESVFSKASIAVLSKYSTPQKVKNAHLGKLTDILMESSNGHFGEWKAHQLKEAACSSFGIDDSGGVYSTLLGMFLEQILSLTAQADSLEKQISVFFQEFNNPLTSIPGVGTVLAATILSEIGDITRFSSADKLLAYAGLDPSVKQSGEFKSNQNRMSKRGSPYLRRAIWLASTVAVHRDPMFQTYYEKKISEGLHYMNVIGHVSRKMTAVIFAVLRDGQPYQPILQSAG

SEQ ID NO: 19089 - protein, 400 aa, unidentified
  source 1..400: note = protein_4d200fa
  REGION 11..166: note = RuvC_domain
  SITE 14: note = RuvC_P1
  SITE 63: note = RuvC_P2
  SITE 103: note = RuvC_P3
  SITE 105: note = RuvC_P4
  SITE 108: note = RuvC_P5
  REGION 273..358: note = Tnp_domain
  SITE 281: note = Tnp_P1
  SITE 311: note = Tnp_P2
  SITE 319: note = Tnp_P3
  SITE 320: note = Tnp_P4
  SITE 332: note = Tnp_P5
MVDETGVGIYLGLDVGKGEHHATAVNVAGKKVFDKPLPNSESKLREIFDKLRAKHGTVLVAVDQPASIGALPLAVARDAGCQVAYLPGLTMRRIADLYPGEAKTDARDAFIIADAARTMPHTLRTIDPNDETVAELAMIAGFDDDLAGESTRTANRLRGLLTQIHPALERVLGPRIQHPAVLKLLDQFGSPAQIRKAGKRRLITLMRPKAPRMAERLVEDIFTALDEQTVVVPGTDAAALIVPNLASSLQSVLDQRKLLATRIEELLEAHPLSQVLISMPGIGVRTAARIVIGVGDGSGFATAGHLAAYAGLAPVTRSSGSSIRGEHPSKRGNKQLKRAFYLAAFASLSQPESRAYYDRKRREGKHHIAALIALARRRIDVLFAMLRDGTFYQPPTPATA

SEQ ID NO: 19090 - protein, 394 aa, unidentified
  source 1..394: note = protein_991004a
  REGION 4..157: note = RuvC_domain
  SITE 7: note = RuvC_P1
  SITE 56: note = RuvC_P2
  SITE 96: note = RuvC_P3
  SITE 98: note = RuvC_P4
  SITE 101: note = RuvC_P5
  REGION 263..349: note = Tnp_domain
  SITE 270: note = Tnp_P1
  SITE 300: note = Tnp_P2
  SITE 308: note = Tnp_P3
  SITE 309: note = Tnp_P4
  SITE 322: note = Tnp_P5
MRFVGIDVAAERHVVAAVDETSAVQLKPTPLTEDREGYQKLLGLLGDPGDTLVAMEATGHYRKNLFAALVAQGFAVALLNPLRTRRSAGEELQRTRTDAIDALGLARFAAQKRPTVTHLPDPATEELREPVRYRDRLVRDFGDRVRQLHRLVDLGFPEFLRSVRDLGSELATAILRDYPPAAAFRGVALRRPAGLRYDGRHRVGDELATALLDAATRSVGRRHGEAYRLQVRDACEDLELLRRRLRSLERDIERLLERHEVGTLPTTIDGIGPQTAARLVATFGDFTAFPSGATLAAYVGVIPALRQSGKRTSPRAALTPPGAAGLRAKLWMPVLTAVRKTPWLRAYSEGLIARGKLPKVALVAAMRKLLPAVYSVATDRRPFVPNLVAVETPR

SEQ ID NO: 19091 - protein, 327 aa, unidentified
  source 1..327: note = protein_0b9adb8
  REGION 4..160: note = RuvC_domain
  SITE 7: note = RuvC_P1
  SITE 59: note = RuvC_P2
  SITE 99: note = RuvC_P3
  SITE 101: note = RuvC_P4
  SITE 104: note = RuvC_P5
  REGION 199..285: note = Tnp_domain
  SITE 207: note = Tnp_P1
  SITE 236: note = Tnp_P2
  SITE 244: note = Tnp_P3
  SITE 245: note = Tnp_P4
  SITE 258: note = Tnp_P5
MISLGIDVSKAKLHLCLLREADGKQKTKVIENTRAGIATLLDWLARQDVERPQAQVILEATGVYHEAVTEALHAAGIRVCMVNPKQIKDFARGLAVRTKTDGIDAFTLARFGHLVNPPAWEPPPPAVRELRALLLRQQSLAEDLRRERNRRDTVAMTTTPALVLTSLDDTIAFLEQELAKLQGEIDAHPDRHPDLKADLQLLTSIPAVGHKVGAQLLVVLREHDFQCAEQAAAYLGVVPIERQSGTSVHGRPRLSKAGPSRVRAILYMAAIVAIRYNPQVKALYERLLARGKSKMADLGAAMRKLVHLCFGVLKNRTPYQADYTKAA

SEQ ID NO: 19092 - protein, 350 aa, unidentified
  source 1..350: note = protein_ae497d6
  REGION 1..107: note = RuvC_domain
  SITE 4: note = RuvC_P2
  SITE 44: note = RuvC_P3
  SITE 46: note = RuvC_P4
  SITE 49: note = RuvC_P5
  REGION 221..304: note = Tnp_domain
  SITE 229: note = Tnp_P1
  SITE 259: note = Tnp_P2
  SITE 267: note = Tnp_P3
  SITE 268: note = Tnp_P4
  SITE 281: note = Tnp_P5
MVMEHTGRYYEPVARFLHDQGIFVSAVNPKLIKDYGNNTLRKVKTDKADARKIARYGLDNWVELRQHTPMDTIRMQLKTLNRQQGLYSKTKTMMKNNLIALLDQTYPGVNALFDSPVREDGSQKWVDFATAFWHVDCVRNMSLTAFTERYRKWCKRHGYNFSQSRAVEIHAGAQDLIAMLPKDALTKTMIRQAIDALNAVSASLERLKAEMRTLAAQLPEYPVVMAMHGVGDSLGPQLMAELGDVTRFTHRNAITAFAGVDPGADQSGTHEARSTRASKSGPPELRKALFLVMDCLLKTMPADDPVNCSMDKKRAEGKPYLVYMTAGANKFLRIYYGRVKEYLALRENAD

SEQ ID NO: 19093 - protein, 328 aa, unidentified
  source 1..328: note = protein_737732d
  REGION 4..159: note = RuvC_domain
  SITE 7: note = RuvC_P1
  SITE 57: note = RuvC_P2
  SITE 98: note = RuvC_P3
  SITE 100: note = RuvC_P4
  SITE 103: note = RuvC_P5
  REGION 255..318: note = Tnp_domain
  SITE 263: note = Tnp_P1
  SITE 293: note = Tnp_P2
  SITE 301: note = Tnp_P3
  SITE 302: note = Tnp_P4
  SITE 314: note = Tnp_P5
MLYVGIDVAKNKHDVTVIDNTGKMVLKPITITNRKQGFELLHNTLKQLNQNCLIAMEDTGHYALNLLTFLHQNNYQIYTYNPLLIKEFTKSISLRKTKTDKKDARTIALKLLSDPNRALFMHDNKQEELKIMTRHMNRLKKHQSDWKVQYTKCLDIIFPELHQVVTKHSDYVYELLKRFPSPEKMVTAGFDKLIEIKRLTAKHALDILELAPNSIGTTSLAREFELIEIIKNIQHYEKLIKQTEKKIDELMAELNSVITTVPGISNRLGSVILAEIRNINTFNHSAQLQAFAGLEPAIYQSGQLDAQGKWSNEAHHTYVGHSYKLPLK

SEQ ID NO: 19094 - protein, 400 aa, unidentified
  source 1..400: note = protein_a95573e
  REGION 4..161: note = RuvC_domain
  SITE 7: note = RuvC_P1
  SITE 57: note = RuvC_P2
  SITE 98: note = RuvC_P3
  SITE 100: note = RuvC_P4
  SITE 103: note = RuvC_P5
  REGION 276..364: note = Tnp_domain
  SITE 284: note = Tnp_P1
  SITE 314: note = Tnp_P2
  SITE 322: note = Tnp_P3
  SITE 323: note = Tnp_P4
  SITE 336: note = Tnp_P5
MISVGIDVSKEKSTVCILKPYGEVVCKPFELQHNKKSLESLDELLRRLDGEVKIVMEATGIYNLPVLTFLDEKGYFVSVINPCVMKKYARNNNFRNVKTDKMDSITIANYGIEKWFKLKRYEASESTYTELKLLGRRYRHYMEMHIQALQELTHVLDYVMPGIKGLFNSWTESNNRDKLSDFVEKFWHYDLITSMSCEEFVKAYNDWAKEKEYHQSNSKAVQVYELASNGIPTLPSSLPSTKMLVLEAINTLRTIDGSLHTILSRMKELAKSLPEYSTVRSMGGVGDTLAPKLIAEIGDVRRMHSAKALIAYAGIDPPPHESGQFVGAKRQITKKGSSTLRKVGYEVMRVLKSHKAPKDSAVYEYIVKKENEGKSKKQAKIAGLNKFLRIYYARVTAVYQ

SEQ ID NO: 19095 - protein, 345 aa, unidentified
  source 1..345: note = protein_a457d27
  REGION 6..148: note = RuvC_domain
  SITE 9: note = RuvC_P1
  SITE 52: note = RuvC_P2
  SITE 87: note = RuvC_P3
  SITE 89: note = RuvC_P4
  SITE 92: note = RuvC_P5
  REGION 211..296: note = Tnp_domain
  SITE 219: note = Tnp_P1
  SITE 249: note = Tnp_P2
  SITE 257: note = Tnp_P3
  SITE 258: note = Tnp_P4
  SITE 270: note = Tnp_P5
MQIATIGLDLAKNIFQVHGADADGAPVFNRKLRRAEVLRFFEKQPPCLVGLEACGGSHYWAREIAALGHEVRLIPPAYVKPFVKRGKTDAADAEAISEAVTRKTMRFVPVKTAEQQAAAMVLKTRGLLVRQRTQLINALRAHLSELGIIAGISSAKVAGLIDIVRDENDHRLPGAARLAMSLVADQIEALATQIGEIEREIVQEAKRDEDMRRLATIPGVGAITAASIKALVPDPAAFKSCRHFAAWLGLTPKSHSSGGKERLGAISKMGNRELRTLLVLGATSVLRRIRGNDKAPGWLGALLSRRPYKIVAIALANKIARIIWVLLTRGGIYRGLEAAKSAVSA

SEQ ID NO: 19096 - protein, 385 aa, unidentified
  source 1..385: note = protein_f5bd5cb
  REGION 6..159: note = RuvC_domain
  SITE 9: note = RuvC_P1
  SITE 57: note = RuvC_P2
  SITE 98: note = RuvC_P3
  SITE 100: note = RuvC_P4
  SITE 103: note = RuvC_P5
  REGION 222..307: note = Tnp_domain
  SITE 229: note = Tnp_P1
  SITE 259: note = Tnp_P2
  SITE 267: note = Tnp_P3
  SITE 268: note = Tnp_P4
  SITE 279: note = Tnp_P5
MAKVVIGVDPHKRLNAVVVLNHRGKVLARRQFPNTSDGFGELATFSHRWRPRTWAIEGCNGVGKHVAQRLVAAGERVLDVSTRRAALVRVFAGGNGRKNDDVDAHSIALVGLHTPDLPEVRADDRRVALRLVSNRRKELIGLRTQCVNRLHRDLVALLPGGAPRALTATKAKALLAAVRPRDEIGRLRRQLAADQLADLVALDRKLSAIEAQLKELVKTTPTSLPELYGVGPVITGIILGEVGDVARFKNRHHFASYNGTAPDDKGSAGHPAYCVNIKGNRKLNHAIHMVAITQIRNPRSPGRAHYDRKLTETKTTKEALRALKRRISDVIYRQLCLDAEHEAGPGGQTGTTLQSSVTGPTPTTGSSDKPQPGPEPEPRPLAPTG

SEQ ID NO: 19097 - protein, 341 aa, unidentified
  source 1..341: note = protein_618be0b
  REGION 7..150: note = RuvC_domain
  SITE 10: note = RuvC_P1
  SITE 53: note = RuvC_P2
  SITE 89: note = RuvC_P3
  SITE 91: note = RuvC_P4
  SITE 94: note = RuvC_P5
  REGION 213..299: note = Tnp_domain
  SITE 221: note = Tnp_P1
  SITE 251: note = Tnp_P2
  SITE 259: note = Tnp_P3
  SITE 260: note = Tnp_P4
  SITE 272: note = Tnp_P5
MSEIITVGLDLAKRVFQVHGVDSAGAVTLRRQLRRSEVVKFFSSLSRCVVGMEACASAHYWGRTLVKLGHEVRLIAASQVKPYVKRGRKNDATDAAAIAEAVTRPHMQFVPIKTEEAQAALMLHRTRRLLMTQRTMLANALRSHFAEYGIVEPEGQAGLARLVVLALDAPDAALPEAAREALAMVAAHWRDTDAKIDALDHEILRWHRGNADSQRIATIPGIGPLIASAIVATMGDPGRFKTGRDFAAWLGLVPSQNSTGGKTVLGPITKAGDRYLRSLLVVGATSALWRRRKEKGTWLAALMARKTVRQVSIALANKMARMAWAILAKGGVYREPTALAA

SEQ ID NO: 19098 - protein, 392 aa, unidentified
  source 1..392: note = protein_c863837
  REGION 10..163: note = RuvC_domain
  SITE 13: note = RuvC_P1
  SITE 61: note = RuvC_P2
  SITE 102: note = RuvC_P3
  SITE 104: note = RuvC_P4
  SITE 107: note = RuvC_P5
  REGION 225..310: note = Tnp_domain
  SITE 233: note = Tnp_P1
  SITE 263: note = Tnp_P2
  SITE 271: note = Tnp_P3
  SITE 272: note = Tnp_P4
  SITE 283: note = Tnp_P5
MAETTTRVVIGMDPHKRSVTIEVMDADETVLDGGRFGTDEAGFTAMTDYVSRFGDRVWAIEGCNGIGRHVAVRLLALGEEVVDVPPKLSARARVFSTGQGRKTDATDAHSVALVGTRMAGLRPVVADEELEVLRTLVDRRGWLGEEHTRKVAQLHHLLLELIPGGAKKDLSAAQAKKLLAKVRPRDVAGKARRRVAAELIADLERIYTRKKAADKELAELIRATGSTLLDLNGIGPTGAARLLVDVGDITRFPTRGHFSSWNGTAPIDASSGDHVRHRLSRKGNRQINRTLHIMATVQLRRPSIGRDYFDRKTAAGKSNMEAMRCLKRRLSDLVYKTMLDDLITAKGTGPGGQRDNDSDSSATGSQPHTGSSDKPLPGPARPHPRTPLPTAS

SEQ ID NO: 19099 - protein, 345 aa, unidentified
  source 1..345: note = protein_e3e76a8
  REGION 5..152: note = RuvC_domain
  SITE 8: note = RuvC_P1
  SITE 55: note = RuvC_P2
  SITE 92: note = RuvC_P3
  SITE 94: note = RuvC_P4
  SITE 97: note = RuvC_P5
  REGION 212..296: note = Tnp_domain
  SITE 220: note = Tnp_P1
  SITE 250: note = Tnp_P2
  SITE 258: note = Tnp_P3
  SITE 259: note = Tnp_P4
  SITE 271: note = Tnp_P5
MYYYAGIDVSLEYSSVCVVDGTGKIMRERKVASEPGALIDWFRSQGLALERIGLEAGPLSQWLYAALREAGFAVELLETRHVRDAFKAMPVKSDRNDARGIAHLMRLGWFRPVHCKSIEAQETRAVLTARKLLQSKLRDIENSLRGMLRGFGLKVGKTTERTFADRIRELVAGHPGLELVAQALLEAHAVLRREFNGLDKQVQKLARSHPSAKLLMTAPAVGPIVALTYASAIDDPKRFSSSKATGAHFGLTPKKYQSGQTDYTGRISKIGDASVREALYQAAHVMMTKPVRNCSALKSWAMRIAKRAGMRKAKVALARKLAVILHRMLADAKPFIPMAKTAAAT

SEQ ID NO: 19100 - protein, 419 aa, unidentified
  source 1..419: note = protein_0e46636
  REGION 30..184: note = RuvC_domain
  SITE 33: note = RuvC_P1
  SITE 82: note = RuvC_P2
  SITE 122: note = RuvC_P3
  SITE 124: note = RuvC_P4
  SITE 127: note = RuvC_P5
  REGION 290..377: note = Tnp_domain
  SITE 298: note = Tnp_P1
  SITE 329: note = Tnp_P2
  SITE 337: note = Tnp_P3
  SITE 338: note = Tnp_P4
  SITE 350: note = Tnp_P5
MSPCHYGGLAGGIPVFLIIPREVFVMNCFVGIDVSKEKFDACCIDEQGEKIFSFMCSMDRGGFEKFIVRLPMDKTSFLLGMESTASYHIALFSYLTAQGYNVVIINPLLISNFAKRSLRKTKTDKKDAHTIARFLMHEKGSFTVQAIDYLMAELKDLARRRERLVDHVTSLKTDMKRILSVTFPELERITGVFTQSSLRLLVEYPSAHAMREADRSRIADIFITGSRGRKSHASVKKLIATAEISVGAVSRAKELILKQEASLLLYMQDQMKETTKLIMGLLNEKMKQDMEILCSMKGVGEKTAMNFLIEMGGDVEMYENDKKLIAASGLDPSTYQSGKYEGKSRISKRGNRHLRRVIWLMATRVIISNNIFRTYFYKRRKEGLPYKKAVLATAHKLIRIIFVMLSRKTYFVEGGIKYS

SEQ ID NO: 19101 - protein, 260 aa, unidentified
  source 1..260: note = protein_a3506ff
  REGION 1..104: note = RuvC_domain
  SITE 4: note = RuvC_P2
  SITE 44: note = RuvC_P3
  SITE 46: note = RuvC_P4
  SITE 49: note = RuvC_P5
  REGION 140..224: note = Tnp_domain
  SITE 148: note = Tnp_P1
  SITE 177: note = Tnp_P2
  SITE 185: note = Tnp_P3
  SITE 186: note = Tnp_P4
  SITE 197: note = Tnp_P5
MVLEASGVYDKSLRAGLALAGIGHVRVNPQRARDFARASGRLAKTDALDAAMLAEMGRALRLVADPLPEAGRERLGLLSRRRDQLVAMRTQEKQRRIEITDSFIGADLDRHMAGLNQAIAAIEVEIQNQIGSDAALAQDQALIRSVPGIGPVTASVLAALMPELGRRSGKQIATLAGLAPLNNDSGLRRGQRSIRGGRRRVRQALYMAAVASLRTQSPLNAFYHRLRQAGKPPKPALVALARKLLVTINAIMKTRTSFAT

SEQ ID NO: 19102 - protein, 357 aa, unidentified
  source 1..357: note = protein_abe8330
  REGION 14..156: note = RuvC_domain
  SITE 17: note = RuvC_P1
  SITE 60: note = RuvC_P2
  SITE 95: note = RuvC_P3
  SITE 97: note = RuvC_P4
  SITE 100: note = RuvC_P5
  REGION 223..313: note = Tnp_domain
  SITE 231: note = Tnp_P1
  SITE 261: note = Tnp_P2
  SITE 269: note = Tnp_P3
  SITE 270: note = Tnp_P4
  SITE 282: note = Tnp_P5
MGKATENLARVTRIGLDLAKTVFQVHGVGAEGEVVIARKLRRATILEFFGRLAPCVVAMEACGSAHHWGRQLVALGHEVKLIPPAHVKPYVRRNKTDAADAAAICEAAMRPGQRFVALRSIDNQAAVMRHRVREQLVGQRTALLNALRGHLSEIGVVAAQGAQHAYRLKRMLTDGADENGEIVVPERVRVALAPLAAQIDALDQAIAAIDDKLIETVKADEKARRLMTIPGVGPVIATAVVATVGEVASFASAREFAAFLGLTPCQHSSGGKERLGRITKMGDRYLRKLLVVAATTVLHHATGHNDSLRRWARQMLERKGGRASFKLVAVALGNKLARIVFAILRSGEVYDDRPVVA

SEQ ID NO: 19103 - protein, 317 aa, unidentified
  source 1..317: note = protein_a5d4899
  REGION 10..160: note = RuvC_domain
  SITE 13: note = RuvC_P1
  SITE 55: note = RuvC_P2
  SITE 95: note = RuvC_P3
  SITE 97: note = RuvC_P4
  SITE 100: note = RuvC_P5
  REGION 191..277: note = Tnp_domain
  SITE 198: note = Tnp_P1
  SITE 227: note = Tnp_P2
  SITE 235: note = Tnp_P3
  SITE 236: note = Tnp_P4
  SITE 248: note = Tnp_P5
MAMQTGRLIVGADVAKAELVIHHDSSDEVIKLKNSKADIKRWLKQQPLNTAIAVEATNVYHLDLVELAHGLGFSVYVVDGFQLSNYRKSVGGRVKTDPSDARLLSRFLRNEGEDLRPWSPPPAVYGKLQSLLRRRAALVSARTAMTQSWANETLLKAAFEAFVTSIDRLDLLMQKKMKEVLRETGLHEQVARCQAVEGIGFLTATALVMAFVRGEFKSSDSYIAFLGMDLRVSDSGQKAGRRRLTKRGCSEIRPLLHNAAMAASKSTAWKGIYEQHRNSGKATTQALVILARKLARVAFALMKNQDEYVTKASKPAC

SEQ ID NO: 19104 - protein, 390 aa, unidentified
  source 1..390: note = protein_e42ce26
  REGION 4..163: note = RuvC_domain
  SITE 7: note = RuvC_P1
  SITE 60: note = RuvC_P2
  SITE 101: note = RuvC_P3
  SITE 103: note = RuvC_P4
  SITE 106: note = RuvC_P5
  REGION 266..353: note = Tnp_domain
  SITE 274: note = Tnp_P1
  SITE 304: note = Tnp_P2
  SITE 312: note = Tnp_P3
  SITE 313: note = Tnp_P4
  SITE 326: note = Tnp_P5
MVFIGIDIAKDKHDCFIINSEGEVLKDVFTIENSRQGFELLFQTINTCTGVGEKTKVGLEATGHYSYNLLGFLLENGLTTYVINPLHTNLYRKSLSLRKTKTDRVDARTIASMLMSDMSLKPYTNIAYHNSELKSLTRYRFDKVKERAKLKSSVSRLVNILFPELEKMVCTLHMVSIYALLTEFPSAKHIAEAHLVKLTNLLCSASKGRYNSEKAHLIRNAAKNSIGVFMPAKALELKHTICLIQELTKEIDEIEFAIKNIMDVINSPISTIRGIGQDTSAMILAEIGDFNNFDSPDKILAFAGLSPSTYQSGQLNNCYAHMEKRGSRYLRYALFTATKSVCMWNPVFAHYLAKKRSEGKHYNVAISHAAKKLVRLIFAMQKSGQPYRLN

SEQ ID NO: 19105 - protein, 340 aa, unidentified
  source 1..340: note = protein_b3b80b6
  REGION 6..148: note = RuvC_domain
  SITE 9: note = RuvC_P1
  SITE 52: note = RuvC_P2
  SITE 87: note = RuvC_P3
  SITE 89: note = RuvC_P4
  SITE 92: note = RuvC_P5
  REGION 211..297: note = Tnp_domain
  SITE 219: note = Tnp_P1
  SITE 249: note = Tnp_P2
  SITE 257: note = Tnp_P3
  SITE 258: note = Tnp_P4
  SITE 270: note = Tnp_P5
MKHTVYGVDIAKNVFQLHCVDPETGEVFSRQVKRAKFLEYFANRDTCLIGMEACGGSQHWARRLTEMGHRVKLMPGKAVKAFVSGNKNDVADARAIWLAVQQAGIKSVAVKSEEQQAILALHRMRQQLVKFRTMQINGLRGLLTEYGEVMAVGRAALNRAMSDVLARLNERLPAVLINTLREQWEMLSKLDQQIAEIEQRLQTWMRQDKACKTIAEIPGVGLLTATAAVATMGDAKAFKSGREFAAWLGLVPRQIGTGGKVKLLGISKRGDTYLRTLLIHGARAVLTHAKEPGAWVQEISKRRPPNVVTVALANKIARTIWALLAHDRKYEKAYVGAKPT

SEQ ID NO: 19106 - protein, 341 aa, unidentified
  source 1..341: note = protein_dc8f0b6
  REGION 13..155: note = RuvC_domain
  SITE 16: note = RuvC_P1
  SITE 59: note = RuvC_P2
  SITE 94: note = RuvC_P3
  SITE 96: note = RuvC_P4
  SITE 99: note = RuvC_P5
  REGION 218..305: note = Tnp_domain
  SITE 226: note = Tnp_P1
  SITE 256: note = Tnp_P2
  SITE 264: note = Tnp_P3
  SITE 265: note = Tnp_P4
  SITE 277: note = Tnp_P5
MKHNNAKKAAVVLGIDLAKSSFHLHGVDEHENVVLTKKLTRTKLYAFIAQMPVCLIGIEACGGANYWKRVFERYGHTVKMMSPQFVKPYVKSNKNDAIDAEAICEAVQRPNMRFAPSKTVEQQDIQSLHRIRSQLVARRTAQANQIRGLLMEYGIIIPKGISYVRKEIPGILENAENELTLLFRALLKDLYDEMVHLDERVERLEDELKITCRNNADCQRLLTIPGIGLLSATALIAAIGDIRVFKNGRELAAWLGLVPRQHSTGGKPTLLGISKRGDAYLRTLLIHGGRAIVRVADKYQDKRSEWIGKLEQRRGHNITAVAVAARIAWALLTRQSHYQVV

SEQ ID NO: 19107 - protein, 312 aa, unidentified
  source 1..312: note = protein_8d1bf09
  REGION 7..154: note = RuvC_domain
  SITE 10: note = RuvC_P1
  SITE 54: note = RuvC_P2
  SITE 93: note = RuvC_P3
  SITE 95: note = RuvC_P4
  SITE 98: note = RuvC_P5
  REGION 189..273: note = Tnp_domain
  SITE 197: note = Tnp_P1
  SITE 226: note = Tnp_P2
  SITE 234: note = Tnp_P3
  SITE 235: note = Tnp_P4
  SITE 246: note = Tnp_P5
MMTNDSIGIDISKDFLDAHRLSNGASARFPMTTAGFCSLSKWLGEEVLARVVFEATGPYHKNFERTFSGKFPLVKVNPLQARRFAQACGTRVKTDAVDARMLANFGNALRLEPDQPLDDKQHELKELFSSRGALIKDRTRLINRLQTQTLALVKRQTKARIDQITRQLKALQQDINAKVQGCPSRARANTILRSIPGIGEVAAATILIEMPEIGTLHKKGAASLTGLAPMTRQSGKWRGKATIQGGRKQLRNALYMPALVAARHNPDMCSKYKAMIEQGKPQKVALTAIMRKLIELANALVKADREWVQNGT

SEQ ID NO: 19108 - protein, 345 aa, unidentified
  source 1..345: note = protein_5efcd0a
  REGION 31..172: note = RuvC_domain
  SITE 34: note = RuvC_P1
  SITE 75: note = RuvC_P2
  SITE 115: note = RuvC_P3
  SITE 117: note = RuvC_P4
  SITE 120: note = RuvC_P5
  REGION 214..301: note = Tnp_domain
  SITE 222: note = Tnp_P1
  SITE 252: note = Tnp_P2
  SITE 260: note = Tnp_P3
  SITE 261: note = Tnp_P4
  SITE 274: note = Tnp_P5
MSIKTRFQVVETSVARSFQNTVLMNKYSEIYGIDISKNVFDVYGSKTGHNQFKNDEQGFKSFLKSLPQGALLVMEATGYYHYRLAQFLYHEGVFVPVVNPLSVKRFIQMKLAKVKTDKSDAKAICEYGQMNDVPLYNALTDIQSECLQLFRLLDSYLKHRTATKNKLKGEEVLGVPSKFVYRSLKRNLKHLNKEVEVLEARLLELVKQDQQYQLTLLKSIPGMGVKTALFLIVVTDGFYKFETASQLCSYVGITPTIRESGSSVKGRSRISKVGNKKLRNLLFLCAFSACKHNKACRELCERIVTKGKSKKLALIAVANKLLKQAFAIAKSGRPYDENFVSKLAQ

SEQ ID NO: 19109 - protein, 368 aa, unidentified
  source 1..368: note = protein_eff7310
  REGION 7..122: note = RuvC_domain
  SITE 10: note = RuvC_P1
  SITE 59: note = RuvC_P2
  SITE 99: note = RuvC_P3
  SITE 101: note = RuvC_P4
  SITE 104: note = RuvC_P5
  REGION 236..322: note = Tnp_domain
  SITE 244: note = Tnp_P1
  SITE 274: note = Tnp_P2
  SITE 282: note = Tnp_P3
  SITE 283: note = Tnp_P4
  SITE 295: note = Tnp_P5
MAYDCVIGMDVGKYFHHACVLDPQGRQVLSQRINQHEGSLRKLFGTYLADNASVLVVVDQPNNIGRLTVTVAQAIGADVHYLPGLAMRQLSRIHVGNSKTDVRDAYVITHAYTRLINQMRSALVETHPAFEHVLHGQMIHRKWILHLLAKYGGPTKIRRVGKARLAAFARSHRARNPEPVIDAMLAAIHSQTVTIAGAEYAELGVAMSAKDALAKLEHRKEIEAQVLELIQDIPQTEILLSMPGIGPRSAAQILMTVGDMSDFPDAAHLASYAGLSPRTNQSGTSIMSNSPNRAGNKKLKNALWQSSCASIRFHERSRQFYERKRKEGKRHNAAVVALARRRLNVLFAMMRSGELYRDISTVQEAAAA

SEQ ID NO: 19110 - protein, 341 aa, unidentified
  source 1..341: note = protein_216e140
  REGION 6..147: note = RuvC_domain
  SITE 9: note = RuvC_P1
  SITE 52: note = RuvC_P2
  SITE 87: note = RuvC_P3
  SITE 89: note = RuvC_P4
  SITE 92: note = RuvC_P5
  REGION 211..296: note = Tnp_domain
  SITE 219: note = Tnp_P1
  SITE 249: note = Tnp_P2
  SITE 257: note = Tnp_P3
  SITE 258: note = Tnp_P4
  SITE 270: note = Tnp_P5
MDVSVLGIDLGKNSCSVVGLDATGKVVVRRRLRRETVIAYAGALSPCIVAMEACCGAHHMGRALERQGHTIRLMSPEYVRPYVKAQKNDDRDAEAIAEAATRPTMRFVELKSEEQLDMQTLHRIRDQLVGDRTSLMNQIRSLLLERGHIVPQGRAKLAVRLAELLDGDEPVLGCRIHRFVSDMRQRWTALDQRIANLDAEFTQAAQADERTRRLLTIPGIGALNATALVAAVGDARTFGRGRDLAAWLGLVPRQATTGGKPRLLGITKRGSRYLRKILIQGARSSLPTMSKSDTRLGAWLRGLLARSHANTVVVALAAKMARIVWALLRHERTYAPVAQAA

SEQ ID NO: 19111 - protein, 442 aa, unidentified
  source 1..442: note = protein_220b174
  REGION 18..163: note = RuvC_domain
  SITE 21: note = RuvC_P1
  SITE 67: note = RuvC_P2
  SITE 102: note = RuvC_P3
  SITE 104: note = RuvC_P4
  SITE 107: note = RuvC_P5
  REGION 291..368: note = Tnp_domain
  SITE 297: note = Tnp_P1
  SITE 328: note = Tnp_P2
  SITE 336: note = Tnp_P3
  SITE 337: note = Tnp_P4
  SITE 349: note = Tnp_P5
MARKPSKQRFTVVHPDCAAIDIGGREHFVAVDPRHDDAVRAFTSFTDDLYKLADWLESLSIKVVAMESTGVYWIPVYEVLSERGFDVYLVNARATRQITGRKSDVLDCQWIWQLMTHGLLRGAFRPDDLTCCVRSLVRQRSSKVKDQAQTLNRMQKAMSQMNIQLANVISDISGVTGMKILRAITKGERDPAQLAELTDPRIKASKETVARSLHGNWRREHLHALTQELAAYDFLEQQIADCDAAIGAALEQMPVLVSKPGLSKKAIRSPHRTGAQQAVLHQALWKVLGVDLTAIPTIGVDTALVLAGEIGSDLSRFPSSQHFCSWLGLAPPTRISGGHRLGGGGPKIINRAAQALKQAASNARNDKGFIGASHRARLTRMDTSCAIKATAHQLARLVYNLLTKRQAYVEQGLEEFEARSQDRQVRALLRKARKLGYQVVAA

SEQ ID NO: 19112 - protein, 405 aa, unidentified
  source 1..405: note = protein_b2444e1
  REGION 4..160: note = RuvC_domain
  SITE 7: note = RuvC_P1
  SITE 57: note = RuvC_P2
  SITE 97: note = RuvC_P3
  SITE 99: note = RuvC_P4
  SITE 102: note = RuvC_P5
  REGION 274..361: note = Tnp_domain
  SITE 282: note = Tnp_P1
  SITE 312: note = Tnp_P2
  SITE 320: note = Tnp_P3
  SITE 321: note = Tnp_P4
  SITE 334: note = Tnp_P5
MNAVGIDVSKGKSTVTIRRPGDVVLMPPCDIPHTQSSINNLIRQLHSLDGETKACMEHTGRYYEPVATWLSDAGIFVSAVNPVLIRDFGDDSLRAPKTDKADSQKIARYTLDRWAKLPQYGSMDKTRSQLKTMNRQFGFYMAHKTAMKNNLIALLDQAYPGANDFFDSPARSDGSQKWVDFIHTYWHVDCVRSKPLHAFTEHYQNWCKRKGYHFSAGKAAEIYHLSSDLIAVFPKDGNTKMLLWQAIAMLDTASATVEALRRKMDELAATLPEYPVVMAMNGVGPTLGPQLMAEIGDVTRFTHREALTAFAGVDPGKNDSGQRLRKSVRTSKKGSPILRKTLFQVMDSLVKRSPVDDPVYAFMDKKRAQGKPYYVYMTAGANKFLRIYYGRVKEYLSTLTGNGEM

SEQ ID NO: 19113 - protein, 343 aa, unidentified
  source 1..343: note = protein_fb747e6
  REGION 7..149: note = RuvC_domain
  SITE 10: note = RuvC_P1
  SITE 53: note = RuvC_P2
  SITE 88: note = RuvC_P3
  SITE 90: note = RuvC_P4
  SITE 93: note = RuvC_P5
  REGION 211..296: note = Tnp_domain
  SITE 219: note = Tnp_P1
  SITE 249: note = Tnp_P2
  SITE 257: note = Tnp_P3
  SITE 258: note = Tnp_P4
  SITE 270: note = Tnp_P5
MQKNTMIGVDLAKAVFQVHGPSMTGQEKFRKKLSRQSFPRFMAEQPPAVVVMEACGSAHYWAREMIRLGHEAKLIAPHYVKPFVKRQKNDAADAQAIVIAAQRPEMRFVEPKCAEQQSRAILFCARERLVRQRTELINALRAGLYEYGHAVPQGIHQIKQIEEILDAPNSDLPDLVREECRDLLEQIAEQSVHINARTAKIKVLAAEADTARRLQTIPGVGPLTALAVEAFAPPIDSFSCGRDFAAWLGLVPRQFSSGGKERLGRTSKAGQADIRRLLIIGAMSRLNWLGRKSILADSWLARIAARKPRMLVAIALANKMARTIWALMAKNEDYRVPALVAAA

SEQ ID NO: 19114 - protein, 344 aa, unidentified
  source 1..344: note = protein_30f7e88
  REGION 7..149: note = RuvC_domain
  SITE 10: note = RuvC_P1
  SITE 53: note = RuvC_P2
  SITE 88: note = RuvC_P3
  SITE 90: note = RuvC_P4
  SITE 93: note = RuvC_P5
  REGION 213..298: note = Tnp_domain
  SITE 221: note = Tnp_P1
  SITE 251: note = Tnp_P2
  SITE 259: note = Tnp_P3
  SITE 260: note = Tnp_P4
  SITE 272: note = Tnp_P5
MSEVSIIGLDIAKHVFHAHGADARGGAIFSKRISRGKLLDFFAAQPSCTVALEACGGAHHWARQLTQLGHKVRLIPPAYVKPFVKRQKNDAIDAEAICEAAQRPSMRFVAVKSEQQQAAGLVFRTRDLLVRQRTQLINAIRGHLTEYGWIAPKGPSHVAMLADLIEEDEMATSLPEAAHAMFRLMLDLLAGLNGKISDLDKEIARRAREDEVSRRLMTVPGIGPISATAIAALAPPIETFAKGRDFAAWLGLTPLQRSTGGKRKLGATSKMGERTLRRLLIIGSSAVVQQASKRGAPKGSWLEQMLARKPRMLVTVALANKMARIVWALLVKQENYRAPVAAKA

SEQ ID NO: 19115 - protein, 329 aa, unidentified
  source 1..329: note = protein_6528fd8
  REGION 9..154: note = RuvC_domain
  SITE 12: note = RuvC_P1
  SITE 58: note = RuvC_P2
  SITE 98: note = RuvC_P3
  SITE 100: note = RuvC_P4
  SITE 103: note = RuvC_P5
  REGION 197..283: note = Tnp_domain
  SITE 205: note = Tnp_P1
  SITE 235: note = Tnp_P2
  SITE 243: note = Tnp_P3
  SITE 244: note = Tnp_P4
  SITE 256: note = Tnp_P5
MTKLSKKVIGVDVGAKFLTVSFNDNNNQDQVQNIENSQRSILSFLNKFSTDDYCCVIEATGNYSSRVLHLSLGKGFETSLINCMSVKHFARMKNIITKTDSEDARLIRHYGEMFSPECYQPKNIEIEHLDQELKLLNDLEEEKRRYSVKLKALRFHPHLNPNTEKHYEKRLKQLEKEIREVELRLPKLQDDEFKEVKDLIQSVSGIGEKTTLQLMAATSGFKNFDSAKSLVKYFGLAPRIYQSGRKSYSPGKCRTSKTHIRSLLYVCSWTAIKHNVPCKELYLRLLGKGKPKKLALIAVCNKLLRICFGVVKNKMAYQADYQKNLKILT

SEQ ID NO: 19116 - protein, 338 aa, unidentified
  source 1..338: note = protein_9bb44ca
  REGION 6..152: note = RuvC_domain
  SITE 9: note = RuvC_P1
  SITE 53: note = RuvC_P2
  SITE 91: note = RuvC_P3
  SITE 93: note = RuvC_P4
  SITE 96: note = RuvC_P5
  REGION 211..298: note = Tnp_domain
  SITE 219: note = Tnp_P1
  SITE 249: note = Tnp_P2
  SITE 257: note = Tnp_P3
  SITE 258: note = Tnp_P4
  SITE 270: note = Tnp_P5
MNIVFLGIDLAKNLFALHGVDASGHACLVRPSVRRDQLLEMVAKLPPCTIGMEACSGAHHWARQFVRFGHVAKLMAPKFVAPYRMGGRRGKNDAADAAAICEALQRPKMRFVPVKSELAQSRLAVHTLRQSWIVARTAAINRLRGLLSEFGIVLPLKAATVRANAAQHLEALPDWMKTVCLDLLQELRHLDERVNEYDAHVRAIARADERARRLMEVPGIGATTASALLASIGYGHDFKNGRQLAAWLGLVPGQHSSGGKHRLGHITKAGDSYLRSLFILGGRAVMAAAANKRDRLSRWATSLAERRGYWIAVVAIASKNARMAWAMLAKDEAFKPVG

SEQ ID NO: 19117 - protein, 298 aa, unidentified
  source 1..298: note = protein_9739288
  REGION 1..68: note = RuvC_domain
  SITE 7: note = RuvC_P3
  SITE 9: note = RuvC_P4
  SITE 12: note = RuvC_P5
  REGION 173..260: note = Tnp_domain
  SITE 181: note = Tnp_P1
  SITE 211: note = Tnp_P2
  SITE 219: note = Tnp_P3
  SITE 220: note = Tnp_P4
  SITE 233: note = Tnp_P5
MYIRKTKNDSKDSYIIAQIMRFGEYSSSNISDENIFALRQLSRYRTSLVDECSSWKRKIISILDQVFPEYSNLFSDTFGVTSKELLSKYPLPENMLELSTEELTNLLTKASKGRFGNEKAQEIKESAKNSFGVSFAKQTFSFQIKQIINQISFIESQLKELDNEISNMLKELNSEITTITGIGDILGACILSEIGDISRFEKASQLVAFAGLDVAVKQSGEFTGTEMKITKRGSPYLRRAIWLAATVASFKDPALSIYYKSLIARGKKHLTAIGAVSRKMCNIIFSVLKNKKAYTPNI

SEQ ID NO: 19118 - protein, 323 aa, unidentified
  source 1..323: note = protein_86fbe0a
  REGION 9..151: note = RuvC_domain
  SITE 12: note = RuvC_P1
  SITE 56: note = RuvC_P2
  SITE 96: note = RuvC_P3
  SITE 98: note = RuvC_P4
  SITE 101: note = RuvC_P5
  REGION 191..276: note = Tnp_domain
  SITE 199: note = Tnp_P1
  SITE 228: note = Tnp_P2
  SITE 236: note = Tnp_P3
  SITE 237: note = Tnp_P4
  SITE 248: note = Tnp_P5
MAKRITICAGIDTGKRKLDVALDGSLERLQADNTPDGYKVLVEWLQRHKVKRVGIEASGGYEQAVVAELRRQRFVVVVFQPAQVRAYAVFQLQRAKNDKIDAAPIAACTAAVKKIHAAPDPRLLPFAEHLTMIDQITEDIARLKNRIESCRNMRLQKLWKEDIARLAKREKVELKALAAAIREHRDLAERLDLINSIDGIGLKTAMVILVRMPEIGQITREQAAALAGIAPYDDDSGDRTGVRHIAGGRERLRRALFTAALPASFRWNPQLITLYGRLMGAGKEHKRALIACARKLLIFANTVVARGTPWQTKPPEIARAPAT

SEQ ID NO: 19119 - protein, 353 aa, unidentified
  source 1..353: note = protein_6f656a5
  REGION 28..175: note = RuvC_domain
  SITE 31: note = RuvC_P1
  SITE 79: note = RuvC_P2
  SITE 119: note = RuvC_P3
  SITE 121: note = RuvC_P4
  SITE 124: note = RuvC_P5
  REGION 220..307: note = Tnp_domain
  SITE 228: note = Tnp_P1
  SITE 258: note = Tnp_P2
  SITE 266: note = Tnp_P3
  SITE 267: note = Tnp_P4
  SITE 280: note = Tnp_P5
MSKQIVSTGSPVVSFDNLSNPQQASVFCGIDVSAETLAVAIIEPGRSLEQGEFANSTGGHKALVGWLHKMNALVRVSLEATGIYSLDLALALDEADRVEVAVLNPKLVNRFAQTLRRSKTDAADAQVLSEFSMRMPFEPWQRPSLNALALRAISRHIEALGVERTRAANRLHAAQGSMVAPRCVVEDLKRSLTGMERRILKLRLEAREVIDGDERLRDKFRLLTGVPGIAEISALQLLGELVLLAPDMKVRQWVASSGLDPVHQDSGTSVHKPAHISRAGSRHLRRALYMPALAAVRWDPHLKAFYEALLARHKSKLQALIAVARKLLHAIYGILKSRTPYDGRKLFPHLKTA

SEQ ID NO: 19120 - protein, 267 aa, unidentified
  source 1..267: note = protein_a72b364
  REGION 1..74: note = RuvC_domain
  SITE 15: note = RuvC_P3
  SITE 17: note = RuvC_P4
  SITE 20: note = RuvC_P5
  REGION 139..226: note = Tnp_domain
  SITE 147: note = Tnp_P1
  SITE 177: note = Tnp_P2
  SITE 185: note = Tnp_P3
  SITE 186: note = Tnp_P4
  SITE 198: note = Tnp_P5
MISPQYVKPFVRGQKNDGNDAQAIAIALMQPTMQFVPPKSPEQQDIQALHRARQRIVNHRTATVCQIRGLLLDRGITIGAAVSRVRRAVPLILEDAENGLSVRMRRTIAELYDLFNDLGRRISFFDKEIDAVFRQSEACQCIAKVKGIGPKTATAVVAAIGKGTEFKNGRHFAAWLGLVPRQHSSGDRQVLMNMTKKGDKHLRTLFIHGARAVVRVAANNNEGYLNQWVNQLKERRGFNKTTVAVANKNARIIWSILHNETEYRPAV

SEQ ID NO: 19121 - protein, 391 aa, unidentified
  source 1..391: note = protein_fa19c46
  REGION 4..163: note = RuvC_domain
  SITE 7: note = RuvC_P1
  SITE 60: note = RuvC_P2
  SITE 101: note = RuvC_P3
  SITE 103: note = RuvC_P4
  SITE 106: note = RuvC_P5
  REGION 266..353: note = Tnp_domain
  SITE 274: note = Tnp_P1
  SITE 304: note = Tnp_P2
  SITE 312: note = Tnp_P3
  SITE 313: note = Tnp_P4
  SITE 326: note = Tnp_P5
MICVGIDVAKDKHDCFILSSEGEVLADVFTIPNNAEGFDILLQTIRRCARPSDKIKVGLEATGHYSYNILGFLLDKGLTTFVINPLHTNLYRKSLSLRKTKTDRVDARTIATMLMSDVDLKSYTDTSYHNEELKSLTRYRFDKVQERAKLRTSVSRLVCILFPELEKLVPTLHMASVYALLSEFPGAKQIATAHLTRLTNLLHETSKGRYGRERAIKIRDAARNSIGSAMPAKSLELKHTIRLIGELDAEIEEIEKEINSIMDKVHSPITTIPGIGNRMAAMILAEVGDFSNFDSPDKILAYAGLSPSTYQSGQLTNCYSHMEKRGSRYLRYAIFNATKYVCIHDPTFAAYLARKRAEGKHYNVAVSHAAKKLVRLIYAMEKSQQPYRSAA

SEQ ID NO: 19122 - protein, 406 aa, unidentified
  source 1..406: note = protein_2a06c57
  REGION 9..162: note = RuvC_domain
  SITE 12: note = RuvC_P1
  SITE 60: note = RuvC_P2
  SITE 101: note = RuvC_P3
  SITE 103: note = RuvC_P4
  SITE 106: note = RuvC_P5
  REGION 224..309: note = Tnp_domain
  SITE 232: note = Tnp_P1
  SITE 262: note = Tnp_P2
  SITE 270: note = Tnp_P3
  SITE 271: note = Tnp_P4
  SITE 282: note = Tnp_P5
MPNTDHVIIGVDPHKLSATIEVVDRHEKFLGSGRFTTDRAGYAAMRKYVAGWPDRVWAVEGSNGAGRPLAQRLLEDGEHVVDVPAKLAARVRLFDTGHNRKTDARDAHSIAVVAVRTTTLRVLQLDGELEALRMLVDRREALTRRRVQTVDRLQALLAELLPGQAKKDITTGQAKAMLASVRPRDIAGKTRRRIAAEELAELIAVDAKIKKATSELKAIVLARGSHLMDLHGVGPVVAARTLADVGDISRFVDRNRFASWTGTAPLDASSGEQNRHRLSRAGNRRMNHMIHIAAISQIRLDTDGRAYYRRKRAEGKKPLEAIRCLKRRISDAIFRQLLQDAQIDAAQRVCAGPGGHCGASKESSAVDLPPHIDTSDQPLPGPANPTLQPPRSARKSSRPRTVSATG

SEQ ID NO: 19123 - protein, 376 aa, unidentified
  source 1..376: note = protein_f3e1ac4
  REGION 8..155: note = RuvC_domain
  SITE 11: note = RuvC_P1
  SITE 59: note = RuvC_P2
  SITE 95: note = RuvC_P3
  SITE 97: note = RuvC_P4
  SITE 100: note = RuvC_P5
  REGION 224..313: note = Tnp_domain
  SITE 231: note = Tnp_P1
  SITE 262: note = Tnp_P2
  SITE 270: note = Tnp_P3
  SITE 271: note = Tnp_P4
  SITE 283: note = Tnp_P5
MREKLRFLGMDVHAETIAVAIAEPDGEVRSLGTIAKREDSIRKFIRKLGTPEQLRACYEAGPTGFVLYWQLTQLGVDCAVIAPTLVPKKPGDRVKTDRRDALKLARSHRSGDLTAVWVPDEDSEALRDLVRQREAAKQDQLRARHRLTKFLLRTGQRPPLGLKAWTERYMRWLAQVRYTQPAQEVTRLDCMNEVEHMSARVKRLEEAILEVVKLAPQPMQDVIRGLQALRGVAHISAVTIASELGNISSRFQSARKLMGYCGVFPSEDSSGNRVRRGGITKAGNAHLRRIVVESAWCYRHLPRVGEKLRKRHEGVPPAIIEIAWKAQNRLHKRYMRLSMAGKDQRKIMTAVARELLGFIWAIAIKAEASCRQPIAA

SEQ ID NO: 19124 - protein, 341 aa, unidentified
  source 1..341: note = protein_74a7496
  REGION 7..149: note = RuvC_domain
  SITE 10: note = RuvC_P1
  SITE 53: note = RuvC_P2
  SITE 88: note = RuvC_P3
  SITE 90: note = RuvC_P4
  SITE 93: note = RuvC_P5
  REGION 211..297: note = Tnp_domain
  SITE 219: note = Tnp_P1
  SITE 249: note = Tnp_P2
  SITE 257: note = Tnp_P3
  SITE 258: note = Tnp_P4
  SITE 270: note = Tnp_P5
MADAKLIGIDLGKYSFFVHAQDARGQQLWRRKFTRHQLIMMLAQHPPCTVAMEACAGAHWLARKLQSFGHQPRLITPQFVKPFVKGNKTDFGDAQAICETASRPSMRFVAIKTPEQQTLLALHRVREALVSERTATSNQIHAFLLEFGISLPTGARAIARLPALLDEPAHELPPRLIATLLRLHRRYGQLGNEIAEIETDLKAQLAEDEAAQRLLTIPGIGPITASSLIAVIGDAHAFRHARDFAASLGLVPRQHSTGGRATLLGISKRGNAQLRSLLVQGARAVMRYIERRHDALGTWVQSLLRRRHSNVVACALANKMARIAWAILARGGEYRAQPSPA

SEQ ID NO: 19125 - protein, 347 aa, unidentified
  source 1..347: note = protein_4e00acc
  REGION 7..148: note = RuvC_domain
  SITE 10: note = RuvC_P1
  SITE 53: note = RuvC_P2
  SITE 88: note = RuvC_P3
  SITE 90: note = RuvC_P4
  SITE 93: note = RuvC_P5
  REGION 212..304: note = Tnp_domain
  SITE 220: note = Tnp_P1
  SITE 250: note = Tnp_P2
  SITE 258: note = Tnp_P3
  SITE 259: note = Tnp_P4
  SITE 271: note = Tnp_P5
MSTITVLGIDLGKSTFHLIGRDSHEQTILKKKLTRKKLIEFIVQLPACTIAFEACGGAHWLARLCQRHGHTTKLIPPQYVKPYVKGNKNDFIDANAIAEASGRPSMRFVPVKSEEAQSLAVCHRLREGFVADRTAYMSRIGAILLEFGLALPVGHSTMKRLFAWLATQHTVTLPIMLFQELQIAHDHYLYLNEKITEQDRKIIAQVKADKRCQLLKTIPGVGDMTASQVVMEVGNAQQFRNGRDMAAWLGLVPRQYSTGGKPTLLGISKRGNKRLRCLFVHGARAIMSKLSCSDGPLHQWVRKLRLSKSFNVACVALANKLARIAWSVLRNSRAFNVNALQPSLQAL

SEQ ID NO: 19126 - protein, 272 aa, unidentified
  source 1..272: note = protein_aeebf04
  REGION 1..102: note = RuvC_domain
  SITE 4: note = RuvC_P2
  SITE 44: note = RuvC_P3
  SITE 46: note = RuvC_P4
  SITE 49: note = RuvC_P5
  REGION 144..230: note = Tnp_domain
  SITE 152: note = Tnp_P1
  SITE 181: note = Tnp_P2
  SITE 189: note = Tnp_P3
  SITE 190: note = Tnp_P4
  SITE 203: note = Tnp_P5
MILEATGPYHEQAATWLFDSGMMVSVVNPANVHNFGKALAVRSKTDALDSLVLARYGAAVKPGKWQAAPMHVRELRALLGRLEALTKDRARELNRQEKLQAGAAPTLVESSIEKSLEFYAAEIERLEKAIQDHIDRHPDLKEDSKLLESIPGVGIKVSRTMLAVMHSHQFKSAESLAAYLGLVPVQRQSGSSLHGRSRLSKAGNAGVRAMLYMAGVVAAQHNPHIKALYQRLLAAGKAKMSAIGACMRKLVHLCFGVIKTREPYRFDFPVTA

SEQ ID NO: 19127 - protein, 353 aa, unidentified
  source 1..353: note = protein_42ad79f
  REGION 25..166: note = RuvC_domain
  SITE 28: note = RuvC_P1
  SITE 71: note = RuvC_P2
  SITE 106: note = RuvC_P3
  SITE 108: note = RuvC_P4
  SITE 111: note = RuvC_P5
  REGION 230..316: note = Tnp_domain
  SITE 238: note = Tnp_P1
  SITE 268: note = Tnp_P2
  SITE 276: note = Tnp_P3
  SITE 277: note = Tnp_P4
  SITE 289: note = Tnp_P5
MGAVERAMHTHRQNEGRAVMHITTLGIDVAKNVFQLHGMDARGRAVLSRRVKRDQLLDTVASLPPCVIGMEACGSAQHWGRAFEQLGHTVKLMHPKYVKPYVKTNKNDRRDAEAICEAVSRPTMRGVAIKTVEQADLQAVHRTRSLFVKHRTAVINQIRGLLAEQGFVIGQSPEKVRPALVRFLDDAASGLTAFARETFGELYAQLTELDARIERVTHRVERVARAHPVCQQLAAVPGIGPMTATALVATVGQPQAFHNGRHLAAWLGLVPRQYSSGGKERLGGISKRGSRYVRTLLIHGARAVVQRAERRTDTQGRWLCALKHRKGTNVAAVALANKNARVIWALLAHDEVY

SEQ ID NO: 19128 - protein, 311 aa, unidentified
  source 1..311: note = protein_771e82e
  REGION 5..147: note = RuvC_domain
  SITE 8: note = RuvC_P1
  SITE 52: note = RuvC_P2
  SITE 92: note = RuvC_P3
  SITE 94: note = RuvC_P4
  SITE 97: note = RuvC_P5
  REGION 188..272: note = Tnp_domain
  SITE 196: note = Tnp_P1
  SITE 225: note = Tnp_P2
  SITE 233: note = Tnp_P3
  SITE 234: note = Tnp_P4
  SITE 245: note = Tnp_P5
MNDTIGIDISKDTLDTFWLSKRKHKQFANTKTGLRALTSWIREAEVSLVIFEATGVYHRLLETSLAMHDFPFARVNPRQARRFAEGTGTLAKTDRVDAAMLARMGSLLKLKADKPKSETLHNLKELETARQALIKDRTAAKARRSTATYPLLKKQIGHRQQQIARDLARVDAAIEAIITADRTLSQKADILISIPGIAKITAYAMLIEMPELGSLSGKQAASLAGLAPISRQSGKWQGKERIQGGRAVLRKVIYLPAVVATRFNPDMKVKYQELIAKGKCKKLAITAVMRKLVVMANALLRDGRKWTETRA

SEQ ID NO: 19129 - protein, 328 aa, unidentified
  source 1..328: note = protein_527e598
  REGION 5..158: note = RuvC_domain
  SITE 8: note = RuvC_P1
  SITE 62: note = RuvC_P2
  SITE 102: note = RuvC_P3
  SITE 104: note = RuvC_P4
  SITE 107: note = RuvC_P5
  REGION 204..289: note = Tnp_domain
  SITE 212: note = Tnp_P1
  SITE 241: note = Tnp_P2
  SITE 249: note = Tnp_P3
  SITE 250: note = Tnp_P4
  SITE 262: note = Tnp_P5
MNAVIGIDVSKDKFDTCWLRDASTGKKKSKSLRNNSKGYQEIHQWLLKNVECEAPDILIVVEPTNVYHEALIHFLYEKGFKIFLANSGKAKKFAESLCMTHKTDKSDAAMLAYYGHAQAAQATLWEPEPKEIRQLKAMMRRLDALEKDLQREKNRRETSEISDVSERVLQSLDNMIKALEDEIEQLENDIDNHIDHDSHLKKNRELLKSISGIGPVLSRELTYLFAAKRFKNAKQVAAYLGLIPKQHESGKLKGRTTISKVGPSRLRAKLYMAAVVASMCNPDIKAQKDRLMNAGKCKMEALGAAMRKLVQICFGVIKHQAKYQPQIA

SEQ ID NO: 19130 - protein, 346 aa, unidentified
  source 1..346: note = protein_99e2ba2
  REGION 6..149: note = RuvC_domain
  SITE 9: note = RuvC_P1
  SITE 54: note = RuvC_P2
  SITE 89: note = RuvC_P3
  SITE 91: note = RuvC_P4
  SITE 94: note = RuvC_P5
  REGION 213..300: note = Tnp_domain
  SITE 221: note = Tnp_P1
  SITE 251: note = Tnp_P2
  SITE 259: note = Tnp_P3
  SITE 260: note = Tnp_P4
  SITE 272: note = Tnp_P5
MKISRVGVDLAKNIFQLHGVDHKGKTVWKRRLSRDKWLNALFTTVEPGAVIGMEACAGAHHWSRVLRDKGYAVKIIPPQFVKPFVKSNKNDANDAQAICEAMVRPNMHPVKVKTVEQQDIQAIHRVRNEIKSHRTAKANQIRGLVAEYGLVAPKEMSSLRNAIPGWLEDASNGLTSCFRQLLQGLWEDLRSMDKRMTELDKQIAVIAQQNPIANRLQQLRGVGPLIATALVATLGDAKQYRKGRDMAAAIGLTPRQHSSGGKDKLLGISKRGDAYLRCLLVHGARAAIRTAKDKDDRLSRWISNLQARRHTNIVAVAMANKMARMAWAMMSKGVDYDPSFCSVSAT

SEQ ID NO: 19131 - protein, 346 aa, unidentified
  source 1..346: note = protein_cbf0447
  REGION 7..148: note = RuvC_domain
  SITE 10: note = RuvC_P1
  SITE 53: note = RuvC_P2
  SITE 88: note = RuvC_P3
  SITE 90: note = RuvC_P4
  SITE 93: note = RuvC_P5
  REGION 210..296: note = Tnp_domain
  SITE 218: note = Tnp_P1
  SITE 248: note = Tnp_P2
  SITE 256: note = Tnp_P3
  SITE 257: note = Tnp_P4
  SITE 269: note = Tnp_P5
MEQITRIGMDTSKNVFQLHGVDAAEKPVLRKKLTRREMIRFFEKLPPTDVAIEACGSAHHWARLLGSFGHEVKLIAPQLAKPYVKRGKNDAADAEALCEAMSRPTMRFVPVKSTDQQAALMLVGMRTRLIKKRTQLANAIRGFAAEFGIAAARGMCRIEPLLERIATDETIPELARELFAFHGQEYAQLLREINLVEAKVMEWHRADECSQRLAKIPGIGPIGASLLMMKAPDPRMFKSGRDFAAWIGLTPRDHSTAGKVRLGGITRAGDELLRSTLVVGATAVVQHVRRTGGRNASTWLLGLLERKKPKLVAVALANKVARIAWKLMVSGEQYRRADLPAAAAVA

SEQ ID NO: 19132 - protein, 339 aa, unidentified
  source 1..339: note = protein_c97eda3
  REGION 6..148: note = RuvC_domain
  SITE 9: note = RuvC_P1
  SITE 52: note = RuvC_P2
  SITE 87: note = RuvC_P3
  SITE 89: note = RuvC_P4
  SITE 92: note = RuvC_P5
  REGION 211..297: note = Tnp_domain
  SITE 219: note = Tnp_P1
  SITE 249: note = Tnp_P2
  SITE 257: note = Tnp_P3
  SITE 258: note = Tnp_P4
  SITE 270: note = Tnp_P5
MNSVTVGLDTAKSIFHAVEKSQHGRVLKKTKLTRKKLIEYFSNKEPSTIAIEACGACHYWHRLFTKLGHTVMIITPQYIAQHRIGNKNDFNDASALADVAQREDVRTVPVKSIEQQDVQLLHRVRERLVKERTALGNQIRGFLAEYGIVIPKGIASLQRELPFVLEDPNNELTELGREIIRDLKGTLSQLDKKVKQIDKKFIQQSVDNAQCKQLQTMTGIGPLISSILWVALGDGKSFKNGRHFAAWCGLVPKQHSTGDKSRLLGISKRGNAYLRTKLIHGARSALRHAKNKDDRLSLWVANLEARVGFNKACVALANKMARISWAMVSKNEEYKVQAQ

SEQ ID NO: 19133 - protein, 287 aa, unidentified
  source 1..287: note = protein_a35e535
  REGION 13..94: note = RuvC_domain
  SITE 34: note = RuvC_P3
  SITE 36: note = RuvC_P4
  SITE 39: note = RuvC_P5
  REGION 157..242: note = Tnp_domain
  SITE 165: note = Tnp_P1
  SITE 195: note = Tnp_P2
  SITE 203: note = Tnp_P3
  SITE 204: note = Tnp_P4
  SITE 216: note = Tnp_P5
MRVPDDWGRAIGGLGHDVRLIPPTYVKPYVKRQKNDTADAEAIAEAASRPTMRFVTVKTEEQQARSAVFRTRDLLVRQRTQLINALRGHLAEHGVVAPQGPAHLKTLAAAIADASQSLPILVRDIGNLYLEQIEQLSRKITDLEKVLRSEAQRGVETRRLQTMPGVGPITAMAIEAFAPPMKTFKRGRDFAAWLGLVPVQHSTGGKQRLGRTSKMGQRDIRRLLIIGAMAVIQWASRRGAQTGSWLHRMIERKPIMLVAMALANKMARSIWAMLTKNEDYRNPVVAV

SEQ ID NO: 19134 - protein, 328 aa, unidentified
  source 1..328: note = protein_77d9ea5
  REGION 4..155: note = RuvC_domain
  SITE 7: note = RuvC_P1
  SITE 60: note = RuvC_P2
  SITE 100: note = RuvC_P3
  SITE 102: note = RuvC_P4
  SITE 105: note = RuvC_P5
  REGION 200..286: note = Tnp_domain
  SITE 208: note = Tnp_P1
  SITE 237: note = Tnp_P2
  SITE 245: note = Tnp_P3
  SITE 246: note = Tnp_P4
  SITE 259: note = Tnp_P5
MFYLGMDVAKAKLDCCLLLDEARGKRKAKVVSNTKSGFVDLLAWVAKQNVSPEELHIVMEATGVYHEQAAMALADAGVRVSIVNPAQVKDFGRGLAVRTKTDGVDSFVLARYGALLKPAAWTPPAPEARMLQALLARREAVAQDLQRERNRQEKANGTDTPERIRQSLADSIEFLVKQLARLQQEIDEHIGRYPGLKDDLDLLQSIPAVGPQVSSNILSVMHSHDFGSAEQLAAYLGLVPVERQSGSSVLGRARLSKAGPARIRAVLYMAAIVATRYNPHVKAVYGRLLARGKSKMSALGAAMRKLVHLCFGVIKTRKPYQSDYAKIA

SEQ ID NO: 19135 - protein, 341 aa, unidentified
  source 1..341: note = protein_d662f1f
  REGION 6..149: note = RuvC_domain
  SITE 9: note = RuvC_P1
  SITE 54: note = RuvC_P2
  SITE 89: note = RuvC_P3
  SITE 91: note = RuvC_P4
  SITE 94: note = RuvC_P5
  REGION 213..298: note = Tnp_domain
  SITE 221: note = Tnp_P1
  SITE 251: note = Tnp_P2
  SITE 259: note = Tnp_P3
  SITE 260: note = Tnp_P4
  SITE 272: note = Tnp_P5
MKIIRVGVDLAKNVFQLHGVDRSEKEVWRRKLDRGNWIKVLLDKVEPGCEIGMEACSGAHHWARLLQAKGFVVKLIAPQFVKPYVKSNKNDANDAEAICEAMSRPSMRFVSVKTVEQQDIQAVHRVRASLVDQRKATANQIRGLTSEYGLIAPRELVHLRTAIPRWLEDLDNGLSERFRHLLRGLWQDMLTLDQRITELEREIEQIARQDPVAVRLQQLRGIGPITATALVATVGDASQFANGRQMAASFGLTPKQNSSGGKDRLLGISKRGDTYLRCLLIHGARAVLRTAQAKTDRLSIWVTRIATTRHHNVAAVALANKTARIAWAMMCRGTDYHAELA

SEQ ID NO: 19136 - protein, 322 aa, unidentified
  source 1..322: note = protein_4f88d95
  REGION 1..82: note = RuvC_domain
  SITE 19: note = RuvC_P3
  SITE 21: note = RuvC_P4
  SITE 24: note = RuvC_P5
  REGION 197..285: note = Tnp_domain
  SITE 205: note = Tnp_P1
  SITE 235: note = Tnp_P2
  SITE 243: note = Tnp_P3
  SITE 244: note = Tnp_P4
  SITE 257: note = Tnp_P5
MINPFEMKEYRCQGLRRVKTDKQDAIAISHYGIDHWYRLKEYEAQENIYTELKLLGRQYCHYMRMRVESVLELTHLLDYTMPGIKTLLQGWNEKNGKDKLGDFAEEYWHYDNITKKSEKQFIDSYLKWAKKKGYHQNQDKAIKIYALAKEGIPTVSSNTPSTKMLVQEAVRVLREVDHTLMTILTQMRSLAKSLPEYPIVRAMGGVGDVLAPKLIAEIGDVRRFHSGKALIAYAGIDAPPYQSGRLVGTERKISKRGSSNLRKIGYEVMRSLKTHKAPEDAAVYEFILKKEREGKSKRAAKIAGLNKFLRIYYARVMEVYRK

SEQ ID NO: 19137 - protein, 391 aa, unidentified
  source 1..391: note = protein_a9269e8
  REGION 4..163: note = RuvC_domain
  SITE 7: note = RuvC_P1
  SITE 60: note = RuvC_P2
  SITE 101: note = RuvC_P3
  SITE 103: note = RuvC_P4
  SITE 106: note = RuvC_P5
  REGION 266..353: note = Tnp_domain
  SITE 274: note = Tnp_P1
  SITE 304: note = Tnp_P2
  SITE 312: note = Tnp_P3
  SITE 313: note = Tnp_P4
  SITE 326: note = Tnp_P5
MICVGIDVAKDKHDCFILSSEGEVLADVFTIPNNAEGFSALLQTIRNCTRPADKIKVGLEATGHYSYNILGFLLDCGLPTYVINPLHTNLYRKSLTLRKTKTDRVDARTIATMLMSDVDLKSYTDTSYHNEELKSLTRYRFDKVHERAKLKTSISRLVNILFPELEKLVSTLHMASVYALLSEFPGAHQIAAAHLTHLKSVLSDASKGRYDRDKAIEIRDAARNSIGSRMPAKSLELKHTIQLIRELDAEIEEIEIEINSIMDEIHSPITTIPGIGTRMGAMILAEIGDFSNFASADKILAYAGLSPSTYQSGQLANCYAHMEKRGSRYLRYAIFNAAKYVCNWDPTFAAYLARKRAEGKHYNVAVSHAAKKLVRLIYAMEISGQPYRSRV

SEQ ID NO: 19138 - protein, 341 aa, unidentified
  source 1..341: note = protein_33e3765
  REGION 7..149: note = RuvC_domain
  SITE 10: note = RuvC_P1
  SITE 53: note = RuvC_P2
  SITE 88: note = RuvC_P3
  SITE 90: note = RuvC_P4
  SITE 93: note = RuvC_P5
  REGION 209..295: note = Tnp_domain
  SITE 217: note = Tnp_P1
  SITE 247: note = Tnp_P2
  SITE 255: note = Tnp_P3
  SITE 256: note = Tnp_P4
  SITE 268: note = Tnp_P5
MNEVTLIGIDLGKHVFHLHAQDAKGHEVFRKKLSRTQLLPFFSNLKAVTVVMEACAGSHWLARKLNELGHVARLVSPQYVRPFVKSNKNDYIDAEAICEAASRPAMRFVEPRTEAQQLLVALHRAREGLVTERTATINRIHGILLEFGIVVPLSRATLRRLPDALALHDLPPRLVQLIDRLHSHYRYLDQQVDDIERDLTSQLREDENAARLLSIPGIGAITASLLASEVGNVAQFDGGRNFAASIGLVPRQHSTGGRSVLCGISKRGDKHLRHLLVQGARAVIQRAEQRTDRLGAWIRSMLTRRHANVVACAVANKLARIAWAVLTKHAAYDAARLEPAN

SEQ ID NO: 19139 - protein, 282 aa, unidentified
  source 1..282: note = protein_2b8a6e4
  REGION 8..161: note = RuvC_domain
  SITE 11: note = RuvC_P1
  SITE 59: note = RuvC_P2
  SITE 97: note = RuvC_P3
  SITE 99: note = RuvC_P4
  SITE 102: note = RuvC_P5
  REGION 202..282: note = Tnp_domain
  SITE 210: note = Tnp_P1
  SITE 240: note = Tnp_P2
  SITE 248: note = Tnp_P3
  SITE 249: note = Tnp_P4
  SITE 262: note = Tnp_P5
MKNWNIILGVDVSKLTLDVCWAERKLHIRIDNNSKGFGVFKKWCKTNQIKLEETLVVMEYTGGYEYRFVQFCESGNIAYCRVPGLEIKQSMGMTRGKSDQADAYRIGQYGEEKRRRLEPSKPLNNKVLKLRQLLSFRKRLIRETAGLECTIKERQHMYGVVQTDTIILVARAKIKENKKHIARVEDEVTDLIKNDESMLQNYRIISSIKGIGPVNAWMTIAYTENFTSFTNARKYAVYVGVIPFEHTSGSSIKGRKRVSHIAHKELKNELNQAAKAAMTHDS

SEQ ID NO: 19140 - protein, 391 aa, unidentified
  source 1..391: note = protein_9bac376
  REGION 5..163: note = RuvC_domain
  SITE 8: note = RuvC_P1
  SITE 60: note = RuvC_P2
  SITE 101: note = RuvC_P3
  SITE 103: note = RuvC_P4
  SITE 106: note = RuvC_P5
  REGION 266..353: note = Tnp_domain
  SITE 274: note = Tnp_P1
  SITE 304: note = Tnp_P2
  SITE 312: note = Tnp_P3
  SITE 313: note = Tnp_P4
  SITE 326: note = Tnp_P5
MTILVGIDVAKDKHDCFFMNSEGEVLAKPFTIFNNKEGFDFLYEKIQSVSSSDNIKVGLEATGHYSYNIIGFLLNKGLATFILNPLHTNLYRKSLSLRKTKTDKIDSKTIAMMLLSDVSLKSYSDISYHNEDLKSLTRYRFSKVEERAKLKTSLSRLAQILFPELEKLVPTLHMTSIYQLLEEFPSASAIASVHLTRLTNLLSKASKGHYDRETAIKIRDAAKNSIGSNMPAKSLELKHTIKLIRALTIDIGEIEAEISKMMDKIASPITTIPGIGRNMGAMIISEIGDFSRFSSPDKILAYAGFSPSIYQSGKLDNCYAHMEKRGSRYLRYALFHATKLVCHWDKTFADYLAKKRAEGKHYYVAISHAVKKLVRVIFHIEKTKQAFLKAS

SEQ ID NO: 19141 - protein, 302 aa, unidentified
  source 1..302: note = protein_9237566
  REGION 6..146: note = RuvC_domain
  SITE 9: note = RuvC_P1
  SITE 52: note = RuvC_P2
  SITE 87: note = RuvC_P3
  SITE 89: note = RuvC_P4
  SITE 92: note = RuvC_P5
  REGION 211..267: note = Tnp_domain
  SITE 219: note = Tnp_P1
  SITE 249: note = Tnp_P2
MEIDVLGIDLAKQIFQLHGADRRGRVVHRSKVSRSSFFESVRTLNPKVVVMEACSTAHHWARCFQSIGIEVRLISPQYVAPFVKTNKNDRNDAEAIVEAASRPTMRFVTIKSVEQQDILAAHRMRAILLRHRTALINQIRGLLGERGLAISRSPEAFKRAMPELLRTSADELTSFCQTLLTELLQHLRAIEERVHLIEASIQSFMKTSALCRKIAEIPGIGPITATAVVAAVGDARQFRNAGHLSAWLGLVPRQYSMAANPACKASADAATHTCGPCSLTALELFCAMHRQKVIRKVSGFKS

SEQ ID NO: 19142 - protein, 388 aa, unidentified
  source 1..388: note = protein_d9f2213
  REGION 5..163: note = RuvC_domain
  SITE 8: note = RuvC_P1
  SITE 62: note = RuvC_P2
  SITE 102: note = RuvC_P3
  SITE 104: note = RuvC_P4
  SITE 107: note = RuvC_P5
  REGION 263..352: note = Tnp_domain
  SITE 271: note = Tnp_P1
  SITE 301: note = Tnp_P2
  SITE 309: note = Tnp_P3
  SITE 310: note = Tnp_P4
  SITE 323: note = Tnp_P5
MEPVIGLDVAKGVSVFQAFMKRNEACGKPEAIRHTEDGFERLGDVIRLLEQQTGKQPVVILEATGHYHRIVVAHLERTGVTYFIVNPLLSKRAKSAQLRKVKTDAADAWHLAEMYYRGDVQPHRRWEDNITEIQHLTRQHEFMTSQFVQSKLNARALLDQVCPEYEAVFSDLFSKTALQVLRLMLRGNVVTEELIRETAGTSHGRAWIQEKVGRIHALPEFNKSSAAQKVALLCIVEIMLVQQEQLSQLEMKIEEEATGIPEVGLLKTIPGIGDKLAATLIAEIGNASQFRDPKQLVAYAGLDPGVHSSGQFVATSTRITKRGSKRLRRALYLAVQCGIRRCTNERLKAYYDKKRQEGKPYKVTVIACANKLLHHIYAILKKGQPFQV

SEQ ID NO: 19143 - protein, 322 aa, unidentified
  source 1..322: note = protein_7c493b0
  REGION 9..160: note = RuvC_domain
  SITE 12: note = RuvC_P1
  SITE 56: note = RuvC_P2
  SITE 96: note = RuvC_P3
  SITE 98: note = RuvC_P4
  SITE 101: note = RuvC_P5
  REGION 195..279: note = Tnp_domain
  SITE 203: note = Tnp_P1
  SITE 232: note = Tnp_P2
  SITE 240: note = Tnp_P3
  SITE 241: note = Tnp_P4
  SITE 252: note = Tnp_P5
MSLPNPLCVGIDVSKETLDISVGTYQTPFTVSNDTEGFDAVVENFRKHSVSLVLMEATGGLESAVAYHLQSEGFEIAIINPRQARDFCRAMGYLAKTDKIDAKALSQMAEVINNHPDRERFILSLPDTERQTLVAIVVRRRQLVSMLVAERNRLYSAHPQSAISIKTIIEVLENELSNIDNSMNKHVKTHFVELSELLGSVKGIGSMTIASLLAEVPELGKLSRREISALIGVAPINRDSGKMRGRKTIFGGRASVRAILYMAALSAARFNSAIKAFYTRLVIAGKPKKVALVACMRKLLTILNAMVRKGQVWDETFHYEPH

SEQ ID NO: 19144 - protein, 338 aa, unidentified
  source 1..338: note = protein_cb8ecf2
  REGION 6..148: note = RuvC_domain
  SITE 9: note = RuvC_P1
  SITE 52: note = RuvC_P2
  SITE 87: note = RuvC_P3
  SITE 89: note = RuvC_P4
  SITE 92: note = RuvC_P5
  REGION 210..297: note = Tnp_domain
  SITE 218: note = Tnp_P1
  SITE 248: note = Tnp_P2
  SITE 256: note = Tnp_P3
  SITE 257: note = Tnp_P4
  SITE 269: note = Tnp_P5
MNVSIIGLDIAKNVFQVHGEDAEGKVVVQKRLGRKRMIEFFSKLPPCLVALEACGTSHYWGRTLRALGHDLRLIPAAYVRPFVKRNKTDARDAAAICIAARRPDMREVAIKSEEQQASRALERSRELLVKQRTQAMNSLRAMLAEFGVVAAQGARGFAELRERLTSDDPGLPQTLIGALRLVLAQLDSLTPAIAALEDTIKAIVKADPDMRRLARIPSVGFLTAHAVVAAIGDGRRFKSGRDFTAWGGMTPRETSSAGKRRIRGVSRQGESRLRKLFALGAVTLLRNARSRDERATQWQRGILARRPMKVAVMAQAAKTARIVWAVLTSGKEYAPAAA

SEQ ID NO: 19145 - protein, 388 aa, unidentified
  source 1..388: note = protein_733f1e6
  REGION 4..160: note = RuvC_domain
  SITE 7: note = RuvC_P1
  SITE 58: note = RuvC_P2
  SITE 98: note = RuvC_P3
  SITE 100: note = RuvC_P4
  SITE 103: note = RuvC_P5
  REGION 264..351: note = Tnp_domain
  SITE 272: note = Tnp_P1
  SITE 302: note = Tnp_P2
  SITE 310: note = Tnp_P3
  SITE 311: note = Tnp_P4
  SITE 324: note = Tnp_P5
MIYVGIDIAKLNHFASAISSDGEILIEPFQFCNDSDGFHLLLSKPDSFDKSSLIIGLESTAHYGDNLVRYLVAENYKVCVFNPIKTSIMRKNNVRKTKTDKVDTYIICKTLKMQDSLRFVSYYDLDLRDLKSLSRFRQKTIKQRSRLKIQLTAYVDEVFPVLQYFFKSGLHQNSVYALLKEAPTPQAIASMHMTHLAHLLKVTSHGHFDKEKAQQIRVLAQKSVGTSDSALSIQITHTIAQIELLNDQLDQLETEMTEIMKYNDSVIMTIPGIGYINGGVILGEIGDIHHFSSPNKLLAYAGLDPSVYQSGNFQATKTRMSKRGSKVLRYALVNAAHNVVKNNATFKAYYDAKMAEGRTHYNALGHCAGKLVRVIWKMLTDDVKFNLD

SEQ ID NO: 19146 - protein, 402 aa, unidentified
  source 1..402: note = protein_7d8f69d
  REGION 4..160: note = RuvC_domain
  SITE 7: note = RuvC_P1
  SITE 57: note = RuvC_P2
  SITE 97: note = RuvC_P3
  SITE 99: note = RuvC_P4
  SITE 102: note = RuvC_P5
  REGION 274..361: note = Tnp_domain
  SITE 282: note = Tnp_P1
  SITE 312: note = Tnp_P2
  SITE 320: note = Tnp_P3
  SITE 321: note = Tnp_P4
  SITE 334: note = Tnp_P5
MNCVGIDVSKGKSMIAVMRPFGEVVLTPFEVQHTASELSELVKALKSLVGETRVVMEATGNYHAPIALALQSAGFYISIVNAILVHDYGNNSLRRAKTDKKDAIKLANYGLDHWLTLPRYVPDEDTRMMLKTCYRQYQQYSKVQTTIKNNLISLLDTTFPGINRLFSSPIRADGREKWLDFVETFWHCECVSKVSENMFSVKYQKWCQRNGYNFSQTKAHELHSFARSCITSLPKSETTKLLVKQAIVQLQATSSALAALKQEMNVLAEQLPEYPVVMGMFGVGPALGPQLIAEIGDVRRFHSKKALVAFAGIDAPPYQSGQMDVRSRSISKRGSSALRRTLFLVMCVYLQQSPDQEPIYKFMDKKRAEGKPYRVYMMASANKFLRVYYATVKAHLDALNKT

SEQ ID NO: 19147 - protein, 309 aa, unidentified
  source 1..309: note = protein_09eff79
  REGION 4..159: note = RuvC_domain
  SITE 7: note = RuvC_P1
  SITE 58: note = RuvC_P2
  SITE 98: note = RuvC_P3
  SITE 100: note = RuvC_P4
  SITE 103: note = RuvC_P5
  REGION 263..309: note = Tnp_domain
  SITE 270: note = Tnp_P1
  SITE 300: note = Tnp_P2
  SITE 308: note = Tnp_P3
  SITE 309: note = Tnp_P4
MFYIGIDVGKFNHCACVVSSEGEVLIEPFFFPNNLEGFQSFIKTVKKYKSPRHIVGLEATGHYGDNLVSFLVSHDYEVALINPLTTDAKRKSKIRKTKNDKKDTFLICSVLFDRDYTKVTQRKLDMKQARELTRYHASITEGINQKKNQLQKCIDIVIPEFNSWFKTKYSKAYMAVLKEFGSSYNLASANLAHLKKVLKPKSSGSRVDIDASTLRDNAKKSIGENNEVITLEIKMLIENIELLASQLKTVDKKIEELAIKLDSPIFSIPGIGIYSGMSILSEIGNIHNFSSAVKVMGFAGVDPGTYQSG

SEQ ID NO: 19148 - protein, 392 aa, unidentified
  source 1..392: note = protein_9a12e94
  REGION 4..163: note = RuvC_domain
  SITE 7: note = RuvC_P1
  SITE 60: note = RuvC_P2
  SITE 101: note = RuvC_P3
  SITE 103: note = RuvC_P4
  SITE 106: note = RuvC_P5
  REGION 267..354: note = Tnp_domain
  SITE 275: note = Tnp_P1
  SITE 305: note = Tnp_P2
  SITE 313: note = Tnp_P3
  SITE 314: note = Tnp_P4
  SITE 327: note = Tnp_P5
MIYVGIDVAKDKHDCFITNSDGEVLFKSFTIPNNREGFETLFHRIESVSDDLAKVKVGLEATGHYSYNLLGFLLDKGLTTYVINPLHTNLYRKSLSLRKTKTDKVDAHTIASMIMSDVNLKSYSDTSYHNEELKSLTRYRFDKVKERAKLKSSVARLINILFPELEKLVPALHMASVYALLSEFPSACAVASAHLTRLSNLLFESSKGRYGKDTAILFRETARSSIGSHMPAKSLELKHTINLIQELTAEIDEIETAIRQIMDEEIQSPILTIPGISYRMGAMIIAEIGDFSRFDSADKILAYAGMSPSTYQSGQLDNCYAHMEKRGSRYLRYALYNATKYVCHWDESFGAYLEKKRSEGKHYNVALSHATKKLVRLIFAMEKSGRAYISAS

SEQ ID NO: 19149 - protein, 354 aa, unidentified
  source 1..354: note = protein_d561c05
  REGION 8..161: note = RuvC_domain
  SITE 11: note = RuvC_P1
  SITE 67: note = RuvC_P2
  SITE 107: note = RuvC_P3
  SITE 109: note = RuvC_P4
  SITE 112: note = RuvC_P5
  REGION 208..295: note = Tnp_domain
  SITE 216: note = Tnp_P1
  SITE 246: note = Tnp_P2
  SITE 254: note = Tnp_P3
  SITE 255: note = Tnp_P4
  SITE 268: note = Tnp_P5
MGISKQCIGIDISKGTFTACLCQRSDDGGLAFSKAIDFSNDSKGFNQFLRWTKGVIARDAALVFLMEATGVYYENLAHHLHKIKKRVHVVLPNMSKHYFSSLNIKTKTDAVDSRILSQFGVERIHKAWTPPPAILLQLRNLTRYYVQLQEQKTGLGNIKHSKDCSHDIQTFILKSNKKLITEIDKEIVRCLREINRLVKSDVGLHKKIEKLATIKGIGMITIVTILAETMGFEEFGSAKQLVSYAGYDVVQRESGTSVKGKTRISKKGNRYIRNALYFPAMVACRYNSVLKDAYTRIILKKPSKMVGQVAVQRKLLILMYTLWKNDTVFIENYKVSSPDPKTETTLDSSEPELL

SEQ ID NO: 19150 - protein, 391 aa, unidentified
  source 1..391: note = protein_cdc606d
  REGION 4..163: note = RuvC_domain
  SITE 7: note = RuvC_P1
  SITE 60: note = RuvC_P2
  SITE 101: note = RuvC_P3
  SITE 103: note = RuvC_P4
  SITE 106: note = RuvC_P5
  REGION 266..353: note = Tnp_domain
  SITE 274: note = Tnp_P1
  SITE 304: note = Tnp_P2
  SITE 312: note = Tnp_P3
  SITE 313: note = Tnp_P4
  SITE 326: note = Tnp_P5
MIYVGIDVAKDKHDCFITNSDGEVLFKVFTITNNLDGFNDLYQRIESVMDDVTKVKVGLEATGHYSYNLLGYLIDKGLPAYVINPLHTNLYRKSLSLRQTKTDKVDARTIASMLMSDVNLKSYSDTSYHNEELKSLTRYRFDKVKERAKLKSSISRLVCILFPELEKLVPTLHMASVYAMLSEFPGAKHVANAHLTRLTNLLSESSKGRYGKETAITFRDAARNSIGSNMPAKSLELKHTIKLIQEISSEIDEIENEIKIIMDEINSPILSIPGINYRMGAMIIAEIGDFNRFDSPDKILAYAGFSPSTYQSGQLDGAYAHMEKRGSRYLRYALYHAAKYVCHWDPTFAEYLAKKRSEGKHYNVALSHAAKKLVRVIYHLEKTNQKYIKAA

SEQ ID NO: 19151 - protein, 378 aa, unidentified
  source 1..378: note = protein_66f90ef
  REGION 90..147: note = RuvC_domain
  SITE 92: note = RuvC_P5
  REGION 211..296: note = Tnp_domain
  SITE 219: note = Tnp_P1
  SITE 249: note = Tnp_P2
  SITE 257: note = Tnp_P3
  SITE 258: note = Tnp_P4
  SITE 270: note = Tnp_P5
MSEVTTIGLDIAKNVFHAHGADASGSPVFSRKISRAKLLEFFANSRVAWWRWRHAEEHTTGLANSQCGSRGETDPSGLCEALREAEQERCVDAEAICEAAQRPNMRFVAIKREEQQASALVFRTRDLMVRQRTQLINAIRGHLTGYGWVAPKGPSHIAVLSNQLDGEIGSSLPNAATPMFRTMLDLLEILNGRISELDKEITRRAREDVIAKRLMTIPGVGPITATAIAALAPPVETFTKGRDFAAWLGLAPRQLSSGGKQKLGSITKMGERTLRRLIIIGYSAVVLHASKRGAPAGSWLEQMMARKPRMLVTVALAQQDGAHHLGGPDEARGIQSSGCSCGVRQGGPEVVGDGVGRRKVWHNSRRDGLGKPAQTTVP

SEQ ID NO: 19152 - protein, 345 aa, unidentified
  source 1..345: note = protein_1e23987
  REGION 5..163: note = RuvC_domain
  SITE 8: note = RuvC_P1
  SITE 62: note = RuvC_P2
  SITE 102: note = RuvC_P3
  SITE 104: note = RuvC_P4
  SITE 107: note = RuvC_P5
  REGION 276..345: note = Tnp_domain
  SITE 284: note = Tnp_P1
  SITE 314: note = Tnp_P2
  SITE 322: note = Tnp_P3
  SITE 323: note = Tnp_P4
  SITE 336: note = Tnp_P5
MNPVIGLDISKEESHGQAFLDRGKPYRGTFQFEHTREGLAKLLQTVQDVEHASKQRPLLILEATGHYQSPVVQFLEEHHYLYIVINPLISNRLRKSNLRKVKTDAADAYLLGELYYKEEFEPFKKRGVQLLNLRYLTRQYESLSKMCVQTKLQFQAVLDQVFPAYKGVFGAMYSGVSLRFLKSFPTSYSILRTDEETLHAKIKELLSSRRGRSDEWINERVKRLLEAAKQNPFEQTMYASHLINLNILITLILQYQEHLAELEQNIDALAEEIEEYDLIQSIPGIGHKIAATILSEIGEIDRFDHPKKLVAFAGIDPSVFTSGKFTATRNRITKRGSRQLRYALV

SEQ ID NO: 19153 - protein, 388 aa, unidentified
  source 1..388: note = protein_6ebbfbe
  REGION 5..163: note = RuvC_domain
  SITE 8: note = RuvC_P1
  SITE 62: note = RuvC_P2
  SITE 102: note = RuvC_P3
  SITE 104: note = RuvC_P4
  SITE 107: note = RuvC_P5
  REGION 263..352: note = Tnp_domain
  SITE 271: note = Tnp_P1
  SITE 301: note = Tnp_P2
  SITE 309: note = Tnp_P3
  SITE 310: note = Tnp_P4
  SITE 323: note = Tnp_P5
MGPVVGLDVSKGTSMLQAFTERNKPYGKTKSIAHTPEGFEQLGDLLVELKETTELEPTVVLEATGHYHRNLVAYLEREGYRHFIVNPLQAKRAKGTHLRKVKTDATDAWHLAEMFYRGDLQPHRTWAEELTQLQHLARQHEFMTSLLVQTKLNARSLLDQVCPAYETVFDNLYCTTSLQVLLQMLSGIPITAATIREAAGSSHGKAWIQERLDRIQALPPLSQSSKAQQMALLSVVNMVLTGQEQLRQLEKAMEELAMMLPEVELLKTIPGVGDKLAAVLAAEIGDASQFETPKQLVAYAGLDPGVYSSGKFTASSNRISKRGSKRLRRALYLAVQCGLRNGVNKRLKAYFEKKRKEGKPYKVVVIACANKLLHHIHAILVKGEPYEV

SEQ ID NO: 19154 - protein, 334 aa, unidentified
  source 1..334: note = protein_ac84f5c
  REGION 7..149: note = RuvC_domain
  SITE 10: note = RuvC_P1
  SITE 53: note = RuvC_P2
  SITE 88: note = RuvC_P3
  SITE 90: note = RuvC_P4
  SITE 93: note = RuvC_P5
  REGION 208..294: note = Tnp_domain
  SITE 216: note = Tnp_P1
  SITE 246: note = Tnp_P2
  SITE 254: note = Tnp_P3
  SITE 255: note = Tnp_P4
  SITE 267: note = Tnp_P5
MDQVTTLGIDLAKRVFALHGVNSAGKVVIRRTVRREELVEAVSNLPACLIGMEAGSGAHEWARQFQRFGHTVRLMAAKFVTPYRRKGKNDGNDAEAICEAVGRPGMRFVPIKSAEQQALLTLHRVRQGFIEERTATINRIRGLLAEFGVVLPLRSVTVRRHALKAAESLPHIARCAIEDLCRHHRELDERVEEYDRQLQRQAKQSEPARRLMAIRGVGPLSALAIVATIGDARDFHSGRQFAAWLGLTPKQHSSGGKSRLGSITKRGDAYLRTLLILGARSVLNTTMRHKDQMSRWIEAVRQRRGHHRTLVAIANKNARIAWALLSKGVEYKPA

SEQ ID NO: 19155 - protein, 348 aa, unidentified
  source 1..348: note = protein_8960463
  REGION 6..147: note = RuvC_domain
  SITE 9: note = RuvC_P1
  SITE 52: note = RuvC_P2
  SITE 87: note = RuvC_P3
  SITE 89: note = RuvC_P4
  SITE 92: note = RuvC_P5
  REGION 211..297: note = Tnp_domain
  SITE 219: note = Tnp_P1
  SITE 249: note = Tnp_P2
  SITE 257: note = Tnp_P3
  SITE 258: note = Tnp_P4
  SITE 270: note = Tnp_P5
MNITTVGLDLAKLHFQVHGVDARGKVTLRKQLKRSQGITFFAQLTPCLVGMEACGGAHYWARKLSGVGHTVKLIAPQFVKPYVKTNKNDAADAEAICEAVGRPNMRFVPIKNTEQQALLGLHRARQGFVAMRTAQANQVRGLLIEFGLVIPLGIRYIEQKMPEFIEDAENGLSGASRSLFGRLLGNFRQLDRQVKELEREINAWHREDAASRRIEAIPGIGPLTASALVASVGDAKLFHNGRQFAAWLGLVPRQDSSGGKTTLLGISKRGDTYLRTLLIHGARSVLLNLKRHPDRASGWLGRIADRRNPNIAAVALANKNARVVWALLAHGRDYQANFSSAMPLATGA

SEQ ID NO: 19156 - protein, 338 aa, unidentified
  source 1..338: note = protein_f06254c
  REGION 7..149: note = RuvC_domain
  SITE 10: note = RuvC_P1
  SITE 53: note = RuvC_P2
  SITE 88: note = RuvC_P3
  SITE 90: note = RuvC_P4
  SITE 93: note = RuvC_P5
  REGION 212..299: note = Tnp_domain
  SITE 220: note = Tnp_P1
  SITE 250: note = Tnp_P2
  SITE 258: note = Tnp_P3
  SITE 259: note = Tnp_P4
  SITE 271: note = Tnp_P5
MNKITTIGLDLAKNIFHLIGFDARGKEVKKKMLRRSQMLEFFAQLPPCLIGMEACASAHYWGRELTRLGHTVRLIPAQHVKPFVQGNKNDYNDARAIAEAIDRPKIHYVAIKTVDQQDAQALERLRQGALDDRTALCNRLRGLLGEYGLVVPKGVNVLRRRIPELLEDAKNGLSEFFRRLLAQDYQRLQELDVHIVRYTQELKAHSQRSDACQRLQTIPGYGPILASRFHGVVGDGKAYRRGRDVSAALGVVPRQHSSGGKNVLLGISKRGDGHLRALLIHGARSVVRHAAKKDDRLSRWINKIQAERGYNKATVALANKMARIGWAVLRNNTLYQAT

SEQ ID NO: 19157 - protein, 311 aa, unidentified
  source 1..311: note = protein_e47e7fc
  REGION 8..154: note = RuvC_domain
  SITE 11: note = RuvC_P1
  SITE 55: note = RuvC_P2
  SITE 94: note = RuvC_P3
  SITE 96: note = RuvC_P4
  SITE 99: note = RuvC_P5
  REGION 189..273: note = Tnp_domain
  SITE 197: note = Tnp_P1
  SITE 226: note = Tnp_P2
  SITE 234: note = Tnp_P3
  SITE 235: note = Tnp_P4
  SITE 246: note = Tnp_P5
MTSEAIWVGIDVCQDMLDVYLLPQEESLQLPNTKAGVQVLVAKLQPLAPSLVVAESTGGLERLLVSGLQEASLPVAIANPRKVKGFAIALGKAKTDKLDAQVIARFAQSVKPEPLPLVKPEAQQLAALRRRRQQLVAMQVAEKNRLSRAAEIVKADIEEHLEQIEQRLKSLNQQIQTLTQQQSDWKRKDTILQSVTGIGKVTSALCLAELPELGTLSEKQIARLVGVAPINHDSGKHQGKRMIQGGRTSVRCGLYMATLVATRHNPVIRDFYERLLAKGKLKKVALVACMRKLLVILNAMLRDNKLWQAPA

SEQ ID NO: 19158 - protein, 344 aa, unidentified
  source 1..344: note = protein_3d0bec0
  REGION 6..148: note = RuvC_domain
  SITE 9: note = RuvC_P1
  SITE 52: note = RuvC_P2
  SITE 87: note = RuvC_P3
  SITE 89: note = RuvC_P4
  SITE 92: note = RuvC_P5
  REGION 211..297: note = Tnp_domain
  SITE 219: note = Tnp_P1
  SITE 249: note = Tnp_P2
  SITE 257: note = Tnp_P3
  SITE 258: note = Tnp_P4
  SITE 270: note = Tnp_P5
MKITTIGIDLAKNVFQVHGVDGRGKGVLRKQLKRKDVLSFFANLESCLIGMEACGGAHHWARKLQVMGHTVKLMAPQFIKPYVKSNKNDAADAEAICEAVCRPTMRFVPIKNIEQQSVLALHRVRQGFVKARTAQANQIRGLLGEYGLIVPQGIGYIASRVPELIEDARIELPGTFRLLIARLLEHLKELQRQVEEIEAQIKAWHRTSEASQRLEKVPGIGPLTATALAATVGDAKNFDNGRQLAAWLGLVPRQHSSGGKPTLLGMSKRGDAYLRTLLIHGARSVIYRAGQRADAESWLLKLIARRNANIAAVALANKTARIVWALLAREREFRSDYSAVRAVA

SEQ ID NO: 19159 - protein, 317 aa, unidentified
  source 1..317: note = protein_d99b599
  REGION 1..80: note = RuvC_domain
  SITE 19: note = RuvC_P3
  SITE 21: note = RuvC_P4
  SITE 24: note = RuvC_P5
  REGION 191..279: note = Tnp_domain
  SITE 198: note = Tnp_P1
  SITE 228: note = Tnp_P2
  SITE 236: note = Tnp_P3
  SITE 237: note = Tnp_P4
  SITE 250: note = Tnp_P5
MVNPLISYQAKKSSLRKVKTDAVDAYQLCQLYYKEEFETHKQRGIQLLNLRHLTRQHESITHMYVQAKLHFQAVLDQVFPEYRGVFGDLYSRVSLLLLKEFPTSKFIMKSGEAKLADRIACLCPRRSDNWAKDKARLIMNAAANNPFQETNYNSHLISIELYIDLLLQYQEHLAHLENKIDALAKEVDEFMIIQSIPGIGDRIAATVLSEIGEIHRFNHAKKLVAFAGIDPSVYSSGKFTATTNRITKRGSKQLRHALYLAVLCGLRNSRNKKLRTFYDKKREEGKPYRVAIVACINKLLHWVYAMLIRKESFLDLA

SEQ ID NO: 19160 - protein, 342 aa, unidentified
  source 1..342: note = protein_d209fe7
  REGION 6..148: note = RuvC_domain
  SITE 9: note = RuvC_P1
  SITE 52: note = RuvC_P2
  SITE 87: note = RuvC_P3
  SITE 89: note = RuvC_P4
  SITE 92: note = RuvC_P5
  REGION 210..295: note = Tnp_domain
  SITE 218: note = Tnp_P1
  SITE 248: note = Tnp_P2
  SITE 256: note = Tnp_P3
  SITE 257: note = Tnp_P4
  SITE 269: note = Tnp_P5
MDDMMIGVDLAKNVFQLHGTLRTGEVQFRKKLTRQQFAIFMAQQAPCLVIFEACGGAHYWTREMESLGHKVKLIAPQYVRPFVKRQKNDAADAEAIVIAARQAEMRFVEPKTIDQQSHAAVFRGRERLVHQRTADVNALRALLHEHGHVFPVGMRYLDRMTVLVEDKAADLPALVREECQDMLAQIAEKTARITERTAKLKALASQSDTARRLQTMPGVGPMTAVAVEAFGPDMAQFKTGRDFAAWLGLVPRQHSSGGKERLGRMTKAGQADIRRLLIMGAMSRLGWLGRPKIAQGSWLSRMLARKPTMLVAIALANKMARQIWAMLRKNEDYKDPALAVAA

SEQ ID NO: 19161 - protein, 427 aa, unidentified
  source 1..427: note = protein_a081272
  REGION 19..179: note = RuvC_domain
  SITE 22: note = RuvC_P1
  SITE 77: note = RuvC_P2
  SITE 118: note = RuvC_P3
  SITE 120: note = RuvC_P4
  SITE 123: note = RuvC_P5
  REGION 286..372: note = Tnp_domain
  SITE 294: note = Tnp_P1
  SITE 324: note = Tnp_P2
  SITE 332: note = Tnp_P3
  SITE 333: note = Tnp_P4
  SITE 345: note = Tnp_P5
MNYTQNQKISQITPSTLIIGIDIAKDKHVARAQDDRGLDFGKRLIFENRIFGFEALVEWVKQHQEKHKKNHVIFGVEPTGHYWKSLAYYLTAKGYDFVVVNPMHVKKSKELDDNSPTKNDTKDAKVIAQLIKDGRYSVPNLLDGIYAELRECVKIRDQLTEQLMITEGRIQNVIQRYFPEFFDVFGDWEGKAALCTLKLFPFPSDIHKKTPERVLQEWKPYVQRGVGIKRATKLVETAKKSIGIEVGLKFAKCELKNLIEQYELFKRQLEELDQELEAIVETLPGAQQMMKIPGLGAVTVGLFFAEVGDISKYSHPQQLVNLAGLSLREHSSGKFKGQTRITKRGRKRLRRALYLAIRPLVAHNSTFKALHHYYTKRPERPLKKQQSLIALCCKLLRVLFVIGQKQCEFDGSRLIKDIPQMDGLQAV

SEQ ID NO: 19162 - protein, 399 aa, unidentified
  source 1..399: note = protein_022611f
  REGION 12..166: note = RuvC_domain
  SITE 15: note = RuvC_P1
  SITE 63: note = RuvC_P2
  SITE 103: note = RuvC_P3
  SITE 105: note = RuvC_P4
  SITE 108: note = RuvC_P5
  REGION 273..357: note = Tnp_domain
  SITE 281: note = Tnp_P1
  SITE 310: note = Tnp_P2
  SITE 318: note = Tnp_P3
  SITE 319: note = Tnp_P4
  SITE 331: note = Tnp_P5
MIPEHETVDVFIGVDVGKSNHHAVALDRSGKKLLDKALPQDEAKLKAIITSLSRHGRALLVVDQPATIGALPVAVAQAAGIMVGYLPGLAMRRIADLHPGEAKTDARDAYIIAEAARTMPHTLRSIQVADEEVAELAMLCGFDDDLAKQATATSNRIRGLLTQIHPALERVIGVHLDHQAMPELLAKYPNPAALRKAGKTRVEALLRKHAPRAGKRWAAEVFAALDEQTVVVSGTNAAGIVLPQLARSLVQTRTARTEVLAQVELLVEAHPLHILLTSLPAVGVRTEARILTEVVGKDFQTAGHLASYAGLAPVTWRSGTSIRGDHPSRKGNKVLKRALFLSAFASLHDPISRTYYDRKRAEGKKHNQALIALARRRCNVLFAMLRDGTIYQKHVALAA

SEQ ID NO: 19163 - protein, 319 aa, unidentified
  source 1..319: note = protein_90c9690
  REGION 6..158: note = RuvC_domain
  SITE 9: note = RuvC_P1
  SITE 57: note = RuvC_P2
  SITE 97: note = RuvC_P3
  SITE 99: note = RuvC_P4
  SITE 102: note = RuvC_P5
  REGION 192..278: note = Tnp_domain
  SITE 200: note = Tnp_P1
  SITE 230: note = Tnp_P2
  SITE 238: note = Tnp_P3
  SITE 239: note = Tnp_P4
  SITE 251: note = Tnp_P5
MPQIIIGIDIAKLKFDVARLCEGKYKHAKFANNAEGFADFILWLNRFGDTDVRLCMEATGTYSLALAESLTGQGYFVSVINPAQIHAFGRSELSRTKTDKADAKLVARYGLQAQLDRWTPLPANIRCLQAMTRRLEHLLEMHRMEQNRLETADTAIIPSINAVLATLNTELKATRQAIRDHIDNDPGLKQRSDLLESIPGIGHATIPYLLVAMSPHHGYANAKQIVAHAGLAQAIRQSGQWTGKTRLAKNGDPRLRKALYMPALVDWKYNPAIRASCQQLKTNGKNGKLIVCAAMRKLIHLAFAILKSGKPFDPDFSLA

SEQ ID NO: 19164 - protein, 346 aa, unidentified
  source 1..346: note = protein_4abf7dd
  REGION 7..149: note = RuvC_domain
  SITE 10: note = RuvC_P1
  SITE 53: note = RuvC_P2
  SITE 88: note = RuvC_P3
  SITE 90: note = RuvC_P4
  SITE 93: note = RuvC_P5
  REGION 212..299: note = Tnp_domain
  SITE 220: note = Tnp_P1
  SITE 250: note = Tnp_P2
  SITE 258: note = Tnp_P3
  SITE 259: note = Tnp_P4
  SITE 271: note = Tnp_P5
MKQITTVGIDLAKRVFQVHAIDAHGAVIVSKAVRRAGLLQLLAKFPPCLIGMEACASSHHWARELIKLGHQVKLIPPAYVKAYVRRQKNDAADAAAICEAVGRPSMRFTPVKTCDQQAVLMLHRTRALLVSQRTALICALRAHMAEFGIVAPVGPRNVAPLLEILADSADTRLPALARQALRPLARRMAMLRLEIERLDRRLLDWHRSNAVSQRLATIPGIGPITATALAATIVDPSMFRSGREFAAFLGLVPRQSSSGGKERLGRISKMGDRYLRTLLVVGATAVLRHAKSGGSSSRVWAEALLIKKPFKLVAVALANKSARIAWAVMARGEAFREGVEARALAA

SEQ ID NO: 19165 - protein, 294 aa, unidentified
  source 1..294: note = protein_a5e343e
  REGION 1..98: note = RuvC_domain
  SITE 37: note = RuvC_P3
  SITE 39: note = RuvC_P4
  SITE 42: note = RuvC_P5
  REGION 161..249: note = Tnp_domain
  SITE 169: note = Tnp_P1
  SITE 199: note = Tnp_P2
  SITE 207: note = Tnp_P3
  SITE 208: note = Tnp_P4
  SITE 221: note = Tnp_P5
MESCSGTHYWARFAKQAGHYAKGINARQVKAFRQGQKTDANDALAISVAARQPHIKESRLLSAQEQCLQGMECMRDLLVKQKVSLSNQLRALLLELGHAIAQGDARLIQAIPEILEDAENELTHTFRFSIQVIFRRFIDTIEEVKLIEEKLREIVKQDQICTRLQALEGVGPVCAILIKIALGNTAHFKNGREAAACFGLTPVQHSSGGKEKIGSISKVVGNKKLRSALYKGALAVVCQLEKRESRSQKDIWLKELTARRGKKIAAIALANKTVRTAFALLKHDAEYQPQLLVA

SEQ ID NO: 19166 - protein, 341 aa, unidentified
  source 1..341: note = protein_51eb8a2
  REGION 7..149: note = RuvC_domain
  SITE 10: note = RuvC_P1
  SITE 53: note = RuvC_P2
  SITE 88: note = RuvC_P3
  SITE 90: note = RuvC_P4
  SITE 93: note = RuvC_P5
  REGION 209..295: note = Tnp_domain
  SITE 217: note = Tnp_P1
  SITE 247: note = Tnp_P2
  SITE 255: note = Tnp_P3
  SITE 256: note = Tnp_P4
  SITE 268: note = Tnp_P5
MSELALVGIDLGKHTFHLHGQDGSGREIFRKKLSRVQMMRFFGNCPTCTVVMEACAGSHFVARELGTMGHVTKLISPQFVRPFVKSNKNDFVDAEAICEAASRPSMRFVSPKTEAQQTLSVLHRMRESLVRDRTKTINQLHGFLLEFGISLPLGRTVIKRLPSVLAEHELPTRLSTLLQRLHAHFGYLDEQITQLDKEMAGQLADDDLGSRLLSMPGVGPITASLLAVEMGDGKQFGCGRDFAASIGLVPRQYSTGGRSNLKGISKRGDKSLRCLLVQCARVYMQRLATQKGTLADWVRSLLQRRHSNVVACALANKLARIAWALSAHHTAFEAGPDTVVA

SEQ ID NO: 19167 - protein, 258 aa, unidentified
  source 1..258: note = protein_b2960aa
  REGION 1..66: note = RuvC_domain
  SITE 5: note = RuvC_P3
  SITE 7: note = RuvC_P4
  SITE 10: note = RuvC_P5
  REGION 128..213: note = Tnp_domain
  SITE 136: note = Tnp_P1
  SITE 166: note = Tnp_P2
  SITE 174: note = Tnp_P3
  SITE 175: note = Tnp_P4
  SITE 187: note = Tnp_P5
MKRQKNDAADAEAICEAAQRPTMRFVAPKSEQAQAAAVVFRARDFLVKQRTQIINALRGHLAEFGIVVAKGPARVPQLVRAVEDATEPVPELARPILQMLIETLRGLDEQVVCLDREIAQWAKEDETARRLMTIPGIGPVTAVALAALAPPADTFKRGRDFAAWVGLTPLQRSTGGKQKLGATSKMGERTLRRLLIIGANTILIRAARHGAPAGSWLARMMARKPPMLVRVALANKMARIVWVLMARGEVYRAPAAAA

SEQ ID NO: 19168 - protein, 348 aa, unidentified
  source 1..348: note = protein_81e30c8
  REGION 8..161: note = RuvC_domain
  SITE 11: note = RuvC_P1
  SITE 67: note = RuvC_P2
  SITE 107: note = RuvC_P3
  SITE 109: note = RuvC_P4
  SITE 112: note = RuvC_P5
  REGION 208..295: note = Tnp_domain
  SITE 216: note = Tnp_P1
  SITE 246: note = Tnp_P2
  SITE 254: note = Tnp_P3
  SITE 255: note = Tnp_P4
  SITE 268: note = Tnp_P5
MTIQKQSIGIDISKDTFTACGCSVNHDGKLTFTEVKNFNNAQQGFNQLLRWAKTFADPNSELIFLMEATGVYYESLAHHLFKVKKKVVVVLPNMSKHYFSSLNIKSKTDELDAKILSRFGVERIHRLWTPPLEILLHLRNLTRNYVQLQEQKTKLGNIKHSKESSNNIQKFILTSNQKLIKQIDVQIEQCKIEIKKLVMSDEELNERIEKLMTIKGVGFMTVVAVIAETFGFEHFKSAKQVVSFAGYDVVQRESGTSIKGKTRISKKGNRFIRNALYFPAMVATRYNPDLKANYMRIISNNPSKMVGQVAIQRKLLVLIYTLWKNNSTYVSNYNKIAPMEIIEATLDS

SEQ ID NO: 19169 - protein, 311 aa, unidentified
  source 1..311: note = protein_9faecf0
  REGION 6..154: note = RuvC_domain
  SITE 9: note = RuvC_P1
  SITE 52: note = RuvC_P2
  SITE 92: note = RuvC_P3
  SITE 94: note = RuvC_P4
  SITE 97: note = RuvC_P5
  REGION 188..272: note = Tnp_domain
  SITE 196: note = Tnp_P1
  SITE 225: note = Tnp_P2
  SITE 233: note = Tnp_P3
  SITE 234: note = Tnp_P4
  SITE 245: note = Tnp_P5
MTEITIGVDVSKEALDAYRFPDGESRHFDNNAKGHKALMRWIGSEVTRIVYEPTGAYHRGFECRLAEAGLPLVKVNPRQARRFAEATGKLAKTDRCDAAMLARMGAVLALTARPLRGALLNELKDLHMARAALIKDRTAARNRAKTLTLALLKRQNGERLKQIQRHLGDLDQTILALIKTDPDLAQRLDILTSIPSVSHATACALIIDMPELGALQPSEAASLAGLAPVARQSGTWTGRAFIRGGRANVRQALYMPALVAMRFNPDLKAKYQALKAAGKPPKVAITALMRKLIILANALIKAQRKWAPKTP

SEQ ID NO: 19170 - protein, 340 aa, unidentified
  source 1..340: note = protein_d090a52
  REGION 5..151: note = RuvC_domain
  SITE 8: note = RuvC_P1
  SITE 54: note = RuvC_P2
  SITE 91: note = RuvC_P3
  SITE 93: note = RuvC_P4
  SITE 96: note = RuvC_P5
  REGION 211..297: note = Tnp_domain
  SITE 219: note = Tnp_P1
  SITE 249: note = Tnp_P2
  SITE 257: note = Tnp_P3
  SITE 258: note = Tnp_P4
  SITE 270: note = Tnp_P5
MEEYIGLDVSMKETAVSVRRGGKRIWRGKCLSDPKIIADLIRKRAPSAGRIVFETGPLAVWFYHALSAEGLPAICIDARHAKAALDMAANKTDANDADGLAHLAEVGFFREVRVKGFDSMLARTLVAARTRLVHIATELSNQIRGLMKTFGLLVPAGKGSKFEENVRSLLLDQRELAAIILPVLEAWRSIRIRAAELGRQLVTGARESEACQILMSVPGVGAITATSFATAIEDPNNFKKSSSVGAWLGLTTRRYQSGEVDYGGHISRRGDHHLRGLLYEAATVILTRSSAESDLRTWGLKLRERVGFKRAAVAVARKLAVLMHAMLKSGEMFNRSAVTA

SEQ ID NO: 19171 - protein, 340 aa, unidentified
  source 1..340: note = protein_dbaf7b6
  REGION 6..148: note = RuvC_domain
  SITE 9: note = RuvC_P1
  SITE 52: note = RuvC_P2
  SITE 87: note = RuvC_P3
  SITE 89: note = RuvC_P4
  SITE 92: note = RuvC_P5
  REGION 211..299: note = Tnp_domain
  SITE 219: note = Tnp_P1
  SITE 249: note = Tnp_P2
  SITE 257: note = Tnp_P3
  SITE 258: note = Tnp_P4
  SITE 270: note = Tnp_P5
MKYSVIGMDIAKRVFQLHTVHPETAEVERIKLQRDDVLPYFVRRAPSLVAMEACGSAHWWARKLAALGHEVRLLHPKSVRPFVLRNKTDVADARAIWTAAQQPDARFVAVKTEAQQAILALHRLRAQLLKFRIMQTNALRGLLYEFGEVLPESHAALAKALPTALASLDTHVPAMLLDSLREQWSRVVSVDKEIATIEHRLAIVLRDSPPCQAVAEIPGVGLLTSTAAVASIGDAHTFKSGREFAAWVGLVPRQRGTGGRVRQLGISKRGDVYLRTLLMHGARAVILRYRHVPWLAALLLRRPYNVVVAAVANKLARTLWAVLAKGKPYNPDAFSAVAST

SEQ ID NO: 19172 - protein, 344 aa, unidentified
  source 1..344: note = protein_8a91b9e
  REGION 7..149: note = RuvC_domain
  SITE 10: note = RuvC_P1
  SITE 53: note = RuvC_P2
  SITE 88: note = RuvC_P3
  SITE 90: note = RuvC_P4
  SITE 93: note = RuvC_P5
  REGION 213..298: note = Tnp_domain
  SITE 221: note = Tnp_P1
  SITE 251: note = Tnp_P2
  SITE 259: note = Tnp_P3
  SITE 260: note = Tnp_P4
  SITE 272: note = Tnp_P5
MSKVTTIGLDIAKHVFHAHGVDGRGLALFSKRLSRGKVLDFFAAQPSCTVALEACGGAHHWARQLAQLGHQVRLIPPAYVKPFVKRQKNDAIDAEAICEAAQRPSMRFVAVKSEEQQAAGLVFRTRDLLVRQRTQLINAVRGHLTEYGWIAPKGPSHMARLADLIEKEEMISSLPDAARAMFRLMLDLLTGLNDRIGDLDKEIARRARENEVTRRLMTIPGIGPISATAIAALAPPAETFAKGRDFAAWLGLTPLQRSTGGKQKLGGTSKMGERTLRRLLIIGSSAVVQQASKRGAPRGSWLEQMLARKPRMVVTVALANKIARIVWALLVKQEDYMAPVTAKA

SEQ ID NO: 19173 - protein, 348 aa, unidentified
  source 1..348: note = protein_0dc6e32
  REGION 13..155: note = RuvC_domain
  SITE 16: note = RuvC_P1
  SITE 59: note = RuvC_P2
  SITE 94: note = RuvC_P3
  SITE 96: note = RuvC_P4
  SITE 99: note = RuvC_P5
  REGION 218..306: note = Tnp_domain
  SITE 226: note = Tnp_P1
  SITE 256: note = Tnp_P2
  SITE 264: note = Tnp_P3
  SITE 265: note = Tnp_P4
  SITE 277: note = Tnp_P5
MKKDNKKTQVAVLGIDLAKKSFQLHGVDQAGNTVLRKKLNRNQLSAFVARLPPCLIGMEACGGAHHWVRAFKPFGHRVRIMAPQFVKPYVKSNKNDAVDAEAICEAVQRPNMRFVPEKSIAQQDMQSVHRIRSQLVARRTAQSNQIRGLLMEYGIIIPKGICYVRKQLPEILENAENGLSDLFRELLNELYEELVHLDERVEVLEKKLHRLSAQNEDCQRLLTIPGIGLLSATALVAAIGDITVFKNGRELAAWLGLVPRQHSTGGTTTLLGISKRGDRYLRTLLIHGGRTVVRVAHKHQDRRNRWICEIEQRRGKNICAVAVANKNARIVWAVLSNKTTYQVHANAV

SEQ ID NO: 19174 - protein, 344 aa, unidentified
  source 1..344: note = protein_18cc6b9
  REGION 6..147: note = RuvC_domain
  SITE 9: note = RuvC_P1
  SITE 52: note = RuvC_P2
  SITE 87: note = RuvC_P3
  SITE 89: note = RuvC_P4
  SITE 92: note = RuvC_P5
  REGION 211..297: note = Tnp_domain
  SITE 219: note = Tnp_P1
  SITE 249: note = Tnp_P2
  SITE 257: note = Tnp_P3
  SITE 258: note = Tnp_P4
  SITE 270: note = Tnp_P5
MKITTVGLDLAKNVFQVHGVDERGAVVLRKQIKRDQVAAFFARLEPCLIGIEACGGAHYWAAKLSALGHRVKIMAPQFVKPYVKTNKNDSLDAEGICEAVARPNMRFVPAKSPEQQSVLSLHTARESFVRARTAQANQIRGLLLEFGLVAPQGIRHVYQRVPELIEDASNELPGRFRILIDRLLQHLKALDVQVRELEREIERWHRSSEVSRRLETIPGIGPMTASALVASAGDPANFKNARQFAAWIGLVPHQNSSGGKTQLLGISKRGNVYLRTLLIHGGRTMVQLAKTRADQAGSWLGKLVSRRHHNIAAVAMANKNARLAWALLSSGKAYEATHNAIQTV

SEQ ID NO: 19175 - protein, 348 aa, unidentified
  source 1..348: note = protein_edc3d97
  REGION 11..154: note = RuvC_domain
  SITE 14: note = RuvC_P1
  SITE 57: note = RuvC_P2
  SITE 92: note = RuvC_P3
  SITE 94: note = RuvC_P4
  SITE 97: note = RuvC_P5
  REGION 216..301: note = Tnp_domain
  SITE 224: note = Tnp_P1
  SITE 254: note = Tnp_P2
  SITE 262: note = Tnp_P3
  SITE 263: note = Tnp_P4
  SITE 275: note = Tnp_P5
MIRNKPQAAVYGVDLGKNLFHVVGTDATGNIVQRVKFRRETLMAFFERAEPSLVGMEACPGSQWLARKLQALGHTVRIIPAQFVKPYVKSHKNDTIDAEAIAEAVTRPTMRFVEVKRVDQVDLQALHRIRDQMVGHRTKLICQMRAFCLEFGIPIRQGVGAFKITLPTILADSSNDLSATMRRLLTELFNDLKGLEARIAEIGRDIEAAAADSELAKRLMTIPGIGPLGATALLAAAGNGQQFKRARDLAAWLGLVPQQHSTGGKSLLLGISKRGNRYVRRLLVHGARSCAMHLDRSKDRLGLWINQLQSRMHINKVVVALAAKIARIAWVVMNRPGALYQQRGHAVS

SEQ ID NO: 19176 - protein, 338 aa, unidentified
  source 1..338: note = protein_41479a5
  REGION 6..152: note = RuvC_domain
  SITE 9: note = RuvC_P1
  SITE 53: note = RuvC_P2
  SITE 91: note = RuvC_P3
  SITE 93: note = RuvC_P4
  SITE 96: note = RuvC_P5
  REGION 211..298: note = Tnp_domain
  SITE 219: note = Tnp_P1
  SITE 249: note = Tnp_P2
  SITE 257: note = Tnp_P3
  SITE 258: note = Tnp_P4
  SITE 270: note = Tnp_P5
MAIVCVGIDLAKNVFALHGVDEAGKPALVRPTVPRAKLLEAIAALPPCLVAMEACSGAHHWAREFQALGHTVKLIAPKFVIPYRLSGKRGKNDAADAAAICEAAQRPSMRFVPAKSLEQQGQLCLHRVRQGFIEQRTALINRIRGLLSEFGIVLPLKAATVRREALLHLEDLPGWANLAVGDCLSEVGRLDERVHEYDRHLAHLARENEAAKRLMRLSGIGETTATALTAAIGNGHDFQCGRQFAAWLGLTPGQYSSGGKTRLGRITKAGDAYLRSLLVLGARAVLAAAKNKADPISRWVRNVEERRGYWKAVVAMAAKNARLAWAVLAKGDAFKLAV

SEQ ID NO: 19177 - protein, 309 aa, unidentified
  source 1..309: note = protein_02cc050
  REGION 8..152: note = RuvC_domain
  SITE 11: note = RuvC_P1
  SITE 54: note = RuvC_P2
  SITE 94: note = RuvC_P3
  SITE 96: note = RuvC_P4
  SITE 99: note = RuvC_P5
  REGION 190..274: note = Tnp_domain
  SITE 198: note = Tnp_P1
  SITE 227: note = Tnp_P2
  SITE 235: note = Tnp_P3
  SITE 236: note = Tnp_P4
  SITE 247: note = Tnp_P5
MKQEVVYCGIDVAKEQLDVALGPKRWQVPNTKQGVGQLVKQLKAERSKVHAICEASGGYEKAIVIALQKSALAVSLVQANRVRQFARAAGVLAKTDQIDAAVLVHFGRAMHPPPSAAQSEQIARLRELDAQRRHLSRLLSAEQNRLAQLSCAELRSLSRSLISKVKKQIATIDARIAILIAQDQNLCVKAQKLTSIAGVGPRTAALLLAQMPELGSLNRAQAAALAGLAPFNRDSGSMRGKRTIFGGRRTVRTGLYMAAVTAARCNHILAPFYQRLCAAGKPPKVALTAVMRKLLLALNSALAPKLNPA

SEQ ID NO: 19178 - protein, 339 aa, unidentified
  source 1..339: note = protein_f6b0fc8
  REGION 14..163: note = RuvC_domain
  SITE 17: note = RuvC_P1
  SITE 65: note = RuvC_P2
  SITE 105: note = RuvC_P3
  SITE 107: note = RuvC_P4
  SITE 110: note = RuvC_P5
  REGION 206..293: note = Tnp_domain
  SITE 214: note = Tnp_P1
  SITE 244: note = Tnp_P2
  SITE 252: note = Tnp_P3
  SITE 253: note = Tnp_P4
  SITE 266: note = Tnp_P5
MSKPIQPIQAMVFCGIDVSAASLAVAVQQEDQRFEERVFDNSGGGHKALIGWLHKLKARVRVSLEATGIYSLDLALALDGADGIEVAVLNPKLIHRFAQTLRRSKTDSADAQVLAEYSARMPFTPWCAPELSGLELRAISRHIQSLVVEHTRQNNRLHAAEKSTSTPACVVNDLKRSMASLKLRIARLRGEALELVRSDEAMRERFELLIGIPGIAAISALQLLGELAPLSPEMSVRQWVAHSGLDPAHRESGTSVHKPSRISRAGNRHLRRALYMPALVAARRDPHLKAFYETLLSRHKAKLQALIAVARKLLHAIYGIFKNQMPYDGSKLFPQLQIA

SEQ ID NO: 19179 - protein, 343 aa, unidentified
  source 1..343: note = protein_145b206
  REGION 7..147: note = RuvC_domain
  SITE 10: note = RuvC_P1
  SITE 53: note = RuvC_P2
  SITE 88: note = RuvC_P3
  SITE 90: note = RuvC_P4
  SITE 93: note = RuvC_P5
  REGION 212..301: note = Tnp_domain
  SITE 220: note = Tnp_P1
  SITE 250: note = Tnp_P2
  SITE 258: note = Tnp_P3
  SITE 259: note = Tnp_P4
  SITE 271: note = Tnp_P5
MTEITTIGLDLAKTIFQVHGADQDGRPVMRKKLRRGQVRGFFAGLSPCLIGLEACASAHFWARELQALGHAVRLIPPQYVKPFVKTNKNDASDAEAICEALMRPTMRFAPLKSAEQQSVLMLHRARELLVRQRTMLINALRGHCGEFGIVVAQGASKVAALIAMIEDRQDERLPALARQALGSLVGQLRMVQAQVLDLEKKLMAWHRANEASRRLATIPGVGVITATALVATIGDASQFHSGRQLAAWLGLVPRQHSSGGKDRLGRISKRGDGYLRKLLVHGARTVLLWSRRKKEGRTAWQEALLARRPTNVVVVAMANKTARVVWAMLSRGETFRAETRATA

SEQ ID NO: 19180 - protein, 344 aa, unidentified
  source 1..344: note = protein_fd6bc44
  REGION 2..116: note = RuvC_domain
  SITE 14: note = RuvC_P2
  SITE 55: note = RuvC_P3
  SITE 57: note = RuvC_P4
  SITE 60: note = RuvC_P5
  REGION 221..304: note = Tnp_domain
  SITE 226: note = Tnp_P1
  SITE 256: note = Tnp_P2
  SITE 264: note = Tnp_P3
  SITE 265: note = Tnp_P4
  SITE 277: note = Tnp_P5
MLDGLEREKKIGLESTGHYGQNLKLFLESNGLTFMEFNPLLVSRFVRRKSLRNTKTDSIDARSIAHYVMTVEYKPYPPSFYHLDKLKSLTRFRDSLVRQRSRQLVDLTNVLDKLFPEFKPFFKGRFSATALYILVHYQTPERIANMNARSYESLRKLSRGRFTMRHFVQLKALAKNTVGVPNDYLLDQMNILLELYSQLDSKVDELDSQIKECVRGIDPPCLSLLGIGEFSVAVIISEFGDFSKFQSPSKMLSFAGLEPGYFQSGQSEFTGHMVKHGSSQLRYALMNCCLPLITNEPVFAEYYAKKRAEGKPYRVALTHVAKKLLWVIYTMQTKNIRYDPTMIR

SEQ ID NO: 19181 - protein, 338 aa, unidentified
  source 1..338: note = protein_bf32694
  REGION 7..149: note = RuvC_domain
  SITE 10: note = RuvC_P1
  SITE 53: note = RuvC_P2
  SITE 88: note = RuvC_P3
  SITE 90: note = RuvC_P4
  SITE 93: note = RuvC_P5
  REGION 211..297: note = Tnp_domain
  SITE 219: note = Tnp_P1
  SITE 249: note = Tnp_P2
  SITE 257: note = Tnp_P3
  SITE 258: note = Tnp_P4
  SITE 270: note = Tnp_P5
MKTIAVVGLDLAKSVFQIHAIDADGKVVVRRQLRRGEVLKFFGILSPCLVGMEACASAHHWARELVARGHEVRLMPPAYVKPYVKRGKTDAADAEAIAEAATRPTMRFVAIKTVDQQAVLMLHKTRDLLVRQRTMLINALRGHLAEYGIIAAKGPGGVSSLIAMLHEAQGSLPPLARSALHGIAAQLHALGSEIKRIETQILDWHRADATSRRLATIPGIGPITASAIAATVPDASLFRSGRQFAAWLGLTPRAHSSGGRERQAGISKQGDGYIRRLLVVGATAVMRMARKNAADRGWATQLLEHKPPKIVAVALANKTARIAWAVMARDEVYVARAA

SEQ ID NO: 19182 - protein, 356 aa, unidentified
  source 1..356: note = protein_17d9073
  REGION 21..163: note = RuvC_domain
  SITE 24: note = RuvC_P1
  SITE 67: note = RuvC_P2
  SITE 102: note = RuvC_P3
  SITE 104: note = RuvC_P4
  SITE 107: note = RuvC_P5
  REGION 226..311: note = Tnp_domain
  SITE 234: note = Tnp_P1
  SITE 264: note = Tnp_P2
  SITE 272: note = Tnp_P3
  SITE 273: note = Tnp_P4
  SITE 285: note = Tnp_P5
MMDKIQPKSTEGGIMSALKIIGIDLAKTNFYLFIINEFGKPAERVKLTRARLLNWLAQKPQMIVAMEACGASHHWAREIHALGHQAVLLPAQHVRAYQRRQKNDYNDAQAIAEACQHGTIRPVPVKTLEQQDLQTFLKMRQLISLERTQLINHVRGLLAEYGIVLNKGATELRQRLPSLLEDAKNGLTDVMRALLHRQLIRLTALDDELEWYNSEQKKYVRHDTVCQRLLEIPGFGPLVSQAIKSWMGDGKQFNRGRDASAALGLVPRQFSTGGKQVLLGITKRGNSYVRSMLIHGARAVLFRSGGKTDPLSVWINRIRDKRGFNRAVVALANKLLRVAWVIIARHEVYSPVMSKS

SEQ ID NO: 19183 - protein, 391 aa, unidentified
  source 1..391: note = protein_2fa49d1
  REGION 4..163: note = RuvC_domain
  SITE 7: note = RuvC_P1
  SITE 60: note = RuvC_P2
  SITE 101: note = RuvC_P3
  SITE 103: note = RuvC_P4
  SITE 106: note = RuvC_P5
  REGION 266..353: note = Tnp_domain
  SITE 274: note = Tnp_P1
  SITE 304: note = Tnp_P2
  SITE 312: note = Tnp_P3
  SITE 313: note = Tnp_P4
  SITE 326: note = Tnp_P5
MVSIGIDVSKDKHDCFILSSEGEVLADAFTVPNNMEGFTTLLERIQDCTTPQDKIRVGLEATGHYSYNLLGFLLDNGLPTYVLNPLRTNLYRKSLSLRKTKTDRVDARTIATMLLSDVGLKPYTDTAYHNEELKSLTRYRFDKVKERAKLKSSVSRLVCILFPELEKLVPTLHMVSVYALLEEFPGARQIAKAHLTRLKSLVESASKGHYKQDMAIVIRDAARNSIGSRMSAKSLELQHTIRLIRELDAEINDIEAAIQNIMDELHSPITTIPGIGCRMGSMILAEVGDFSRFDSPDKLLAYAGMSPSTNQSGKMHNCYAHMEKRGSRYLRFALYNATKYVCLWEPSFAAYLAKKRAEGKHYNVAISHAAKKLVRLIFALEKSRQPYHQAA

SEQ ID NO: 19184 - protein, 342 aa, unidentified
  source 1..342: note = protein_5261417
  REGION 6..152: note = RuvC_domain
  SITE 9: note = RuvC_P1
  SITE 53: note = RuvC_P2
  SITE 91: note = RuvC_P3
  SITE 93: note = RuvC_P4
  SITE 96: note = RuvC_P5
  REGION 211..297: note = Tnp_domain
  SITE 219: note = Tnp_P1
  SITE 249: note = Tnp_P2
  SITE 257: note = Tnp_P3
  SITE 258: note = Tnp_P4
  SITE 270: note = Tnp_P5
MAIVFVGIDLAKSVFAVHGVDEAGRAALVRPSVARAKLLELVASLPPCTIGMEACSGAHHWARLFAGHGHTVRLIAPKFVTPYRMSGRRGKNDAADAAATCEALQRPNMRFVPVKSQEQQSQLMVHRARQGFVQQRTATINRIRGLLSEFGIVLPLKAAVVRRQAAAHLEDLPGWGNTVIGDLLSEVHRLDERIAQYDVHLRAIAQRSTPAQRLMRLMGIGQTSATAIVAMVGNAHEFSSGRQFAAWLGLVPGQYSSGGKARLGRITKAGDAYLRSLLVLGARSVLNAAPGKNDSISRWALRLRQRRGYWKAVVAIAAKNARLAGGADQGRSLQTAGLRRWP

SEQ ID NO: 19185 - protein, 344 aa, unidentified
  source 1..344: note = protein_df2b3ae
  REGION 6..148: note = RuvC_domain
  SITE 9: note = RuvC_P1
  SITE 52: note = RuvC_P2
  SITE 87: note = RuvC_P3
  SITE 89: note = RuvC_P4
  SITE 92: note = RuvC_P5
  REGION 211..302: note = Tnp_domain
  SITE 219: note = Tnp_P1
  SITE 249: note = Tnp_P2
  SITE 257: note = Tnp_P3
  SITE 258: note = Tnp_P4
  SITE 270: note = Tnp_P5
MKICTVGLDLAKNVFQVHAIGEAGEVIVCKALRRRQVIPFFSKLEPCLIGVEACGTSHFWARELSSLGHSVKLMPPMYVKAYVKRGKTDAADAEAICEAVRRPTIRFVAIKSPEQQAVLALHRTRNLLIRQRTQLVNMIRAQLAEFGISLVKGIQHALKFVEQLLEGKVLTVPPLAIKVLIVLAEQIQALQGRVGAIDKDLMVWFKGSEVARRLATIPGIGLITASALAVTVTDPHQFTSGRQFAAWLGLTPKANSSGGKERQGRISKMGDQYLRRLLVNGMTARLRWIRLKPGTQPWITNLLQTKPAKLVAVAMANKVARIAWVIMTRREVYRIPQPAEESSV

SEQ ID NO: 19186 - protein, 271 aa, unidentified
  source 1..271: note = protein_b883505
  REGION 7..141: note = RuvC_domain
  SITE 10: note = RuvC_P1
  SITE 53: note = RuvC_P2
  SITE 88: note = RuvC_P3
  SITE 90: note = RuvC_P4
  SITE 93: note = RuvC_P5
  REGION 137..226: note = Tnp_domain
  SITE 145: note = Tnp_P1
  SITE 175: note = Tnp_P2
  SITE 183: note = Tnp_P3
  SITE 184: note = Tnp_P4
  SITE 197: note = Tnp_P5
MHHSTTVGVDLAKNVIQVSVVSHRGKELLNRSFSRRKFAEFLGKQKPSLVAFESCASAHYWARAAKRHGHEVRIIPAKAVAPFRQGHKTDSNDALAVAEAERRPTLHRMQQRLLELRQDIESMTKEVDGLVKQHPVCKRLTAIEGIGPIGALSLYAVMGCGKAFTKSREFSAYLGLTPRQYSSGGKTNIVGISKKVGNRRLRSILIQGARAYVYRMKEPRSLKDRWLKDLIERAGPNRAAVALANKNVRTAWAMVTQGTEYQRRLQLEMAA

SEQ ID NO: 19187 - protein, 345 aa, unidentified
  source 1..345: note = protein_caa5d28
  REGION 7..151: note = RuvC_domain
  SITE 10: note = RuvC_P1
  SITE 55: note = RuvC_P2
  SITE 90: note = RuvC_P3
  SITE 92: note = RuvC_P4
  SITE 95: note = RuvC_P5
  REGION 214..301: note = Tnp_domain
  SITE 222: note = Tnp_P1
  SITE 252: note = Tnp_P2
  SITE 260: note = Tnp_P3
  SITE 261: note = Tnp_P4
  SITE 273: note = Tnp_P5
MSQITRVGVDIAKSVFHVHAVDRFGERQWKGKYSRTKWLNAITDKVPQGAEVAMEACGSSHYWGRELQKRGYKVKIIHAQFVKPYVKSNKNDAIDAEAICEAMSRPNMRFVCVKSNRQQDIQSMHRIRDKLMVQKSSKANQIRGLVSEYGLVAPVGINKLREAIPLWLEDVENGLSALFRSLLLDLFDDLRRLQERVDKLDNLIQQEVKNDPVARSLLELRGVGVLCASALSCAIGDAKGYRKGRDFAASIGLTPRQHSTGGKPRLLGISKRGDGYLRKLLVHGARSVIRHAHRHDDNLSKWIAKLCAYKHVNIVIVALANKTARAAWAMVNKSEGYHPELIASA

SEQ ID NO: 19188 - protein, 338 aa, unidentified
  source 1..338: note = protein_441d2e1
  REGION 20..165: note = RuvC_domain
  SITE 23: note = RuvC_P1
  SITE 67: note = RuvC_P2
  SITE 105: note = RuvC_P3
  SITE 107: note = RuvC_P4
  SITE 110: note = RuvC_P5
  REGION 210..297: note = Tnp_domain
  SITE 218: note = Tnp_P1
  SITE 248: note = Tnp_P2
  SITE 256: note = Tnp_P3
  SITE 257: note = Tnp_P4
  SITE 270: note = Tnp_P5
MLVISIILNHYKIMQNQTIVGIDVSAATLDICVTGKTQKSVVIKNESAAIRKFFNTYQSDQLLIGMENTGRYNWALYEVLKDLHHQVYVISPLHLKKSMGLVRGKTDKVDAIRIAAFIAKNHTDISQWKPSSPAVQKLKIFLTERNSRIKTKRQLLKQQHDYVKMKHLGLDKTLMKLNSKQLTLIDSQITEIERQIELVIKADQNMDQQAKLIRSVPGAGKVLCWMMIAKTEGFTTITEPRKMACYSGVVPFANQSGTSIKGKQRVSHYADKAIKAVLHLAAMSAIRLKNELRDYYLRKVAEGKSKMSALNAVRNKIVHRIFAVVKNQIPYQSNLLLS

SEQ ID NO: 19189 - protein, 311 aa, unidentified
  source 1..311: note = protein_5f27fe7
  REGION 8..149: note = RuvC_domain
  SITE 54: note = RuvC_P2
  SITE 94: note = RuvC_P3
  SITE 96: note = RuvC_P4
  SITE 99: note = RuvC_P5
  REGION 190..274: note = Tnp_domain
  SITE 198: note = Tnp_P1
  SITE 227: note = Tnp_P2
  SITE 235: note = Tnp_P3
  SITE 236: note = Tnp_P4
  SITE 247: note = Tnp_P5
MTIFDRYVGCDVSKEWLDLFDPAEGRVRRIDNTAAAVQKWAGHLARTNCLVVFEATGSYDRILREHLHRAGVASARLNPTLVRRYAQARGRKAKTDALDAVVLADLGERLRPEPDAPPCPHRLRLAELSARRDQIVAMRVMEKNRLSQPEDPFVREDLEAAVTRLGEAIARVEAEIQRHVQAQRELRDQARLLASAPGIGPVSAQVLLALMPELGRTGPKRLAALAGLAPFNHDSGKLKGQRCIAGGRSRVRKALYMAALIAARTCPDLKAFADRITQTAKARKIALIATARKLLIRLNAMLRDNVPYRIA

SEQ ID NO: 19190 - protein, 342 aa, unidentified
  source 1..342: note = protein_7a8d61e
  REGION 7..148: note = RuvC_domain
  SITE 10: note = RuvC_P1
  SITE 53: note = RuvC_P2
  SITE 88: note = RuvC_P3
  SITE 90: note = RuvC_P4
  SITE 93: note = RuvC_P5
  REGION 211..295: note = Tnp_domain
  SITE 219: note = Tnp_P1
  SITE 249: note = Tnp_P2
  SITE 257: note = Tnp_P3
  SITE 258: note = Tnp_P4
  SITE 270: note = Tnp_P5
MEQVTIIGLDLAKRVFQVHGATADGRVAFRKKLSRGQVLAFFASLPPCIVAMEACATAHYWAREIGALGHDIRLVPPAYVKPFVKRQKNDAADAEAIAEAASRPTMRFVEPKSPRQQARAMAFRSRDLFVRQRTQTINALRAHLAEHGLIAPLGLSNLAGLQRLVEDSASDLDPLVVETARIYIDQISDLSDRVAKMEATLKQEAARSDASSRMMTMPGLGPITAMAIEAFAPTLSVFKRSRDFAAWLGLVPRQHSTGGKQVLGRTSKMGQRDIRRLLIIGAMSVIRWATRKGTIPGTWLHAMLARKPRKVVAIALANKMARALWAMETRNEDYRDPRLAAA

SEQ ID NO: 19191 - protein, 328 aa, unidentified
  source 1..328: note = protein_68fcd0a
  REGION 4..155: note = RuvC_domain
  SITE 7: note = RuvC_P1
  SITE 60: note = RuvC_P2
  SITE 100: note = RuvC_P3
  SITE 102: note = RuvC_P4
  SITE 105: note = RuvC_P5
  REGION 200..286: note = Tnp_domain
  SITE 208: note = Tnp_P1
  SITE 237: note = Tnp_P2
  SITE 245: note = Tnp_P3
  SITE 246: note = Tnp_P4
  SITE 259: note = Tnp_P5
MFYLGMDVAKAKLDCCLLLDEANGKRKTKVVCNTKSGIVDLLAWVAKQNVSPEALHVVMEGTGVYHEQAALALADAGVTVSIVNPAQVKDFGRGLAVRTKTDGVDSFVLARYGALLKPKAWVPPAPEARILQALLARRVAIAQDLQRERNRQEKADATDTPDRIQQSLADSIEFLVKQLDQLQQVIDEHIDKHPSLKNDLALLQSIPAVGPQVGGNMLSVMHSHNFNSAEQLAAYLGLVPVERQSGSSVLGRARLSKAGPARIRAVLYMAAIVATRCNPHVKAVYERLLARGKSKMSALGAAMRKLVHLCFGVLKTQQPYEHDRAKTA

SEQ ID NO: 19192 - protein, 410 aa, unidentified
  source 1..410: note = protein_d3868d5
  REGION 6..168: note = RuvC_domain
  SITE 9: note = RuvC_P1
  SITE 63: note = RuvC_P2
  SITE 109: note = RuvC_P3
  SITE 111: note = RuvC_P4
  SITE 114: note = RuvC_P5
  REGION 282..368: note = Tnp_domain
  SITE 289: note = Tnp_P1
  SITE 319: note = Tnp_P2
  SITE 327: note = Tnp_P3
  SITE 328: note = Tnp_P4
  SITE 341: note = Tnp_P5
MNPLYVGIDVSSKNNVAYLMKPDGAKHSSFSVQNNRGGAKLMSERIVSALTAMQLSDVVIGLEATSIYGDSLVYALREDGGLGQFQRKIHILNPKQVRKFKDAYSDLPKNDFVDAFVIADHLRFGRIASEVYMDDYRYKALQTLTRARFYAVQNLTREKQHFANYLFMKCSGLAQEKVLPHNTSATTIALMEQFETVDDLAYIDLNELTAFIAKSGRGKFADPAATAKAVQAAARGSYRLPKTVSDSVNQAMSVSIAAMRALESQIKTLDKAIEQQFEIIPNTLTSVPGIGKVYSAGIIAEVGDIHRFQSQASLAKFAGLVWSQHQSGDYEAEDTHLIKSGNRFLRYYLLEAANSMRRCDSEFRRYYNLKFKEVNKFQHKRALALTARKLVRLVFRLLKDNRLYIPPEEY

SEQ ID NO: 19193 - protein, 343 aa, unidentified
  source 1..343: note = protein_854387c
  REGION 6..149: note = RuvC_domain
  SITE 9: note = RuvC_P1
  SITE 54: note = RuvC_P2
  SITE 89: note = RuvC_P3
  SITE 91: note = RuvC_P4
  SITE 94: note = RuvC_P5
  REGION 213..299: note = Tnp_domain
  SITE 221: note = Tnp_P1
  SITE 251: note = Tnp_P2
  SITE 259: note = Tnp_P3
  SITE 260: note = Tnp_P4
  SITE 272: note = Tnp_P5
MKLIRVGVDLAKNVFQIHGVDRFEKAVWRKKLSRSDWLKTVLAAVPTSCEIGMEACGSAHHWARLLQKHGYQVKLIAPQFVKPYVKSNKNDANDAEAICEAMSRPSMRFVAIKTVHQQDIQATHRIRAELSSQRIAKANQIRGLTSEYGLVAPREIAQLRIAIPHWLEDDENGLSPRFRRLLAGLWHDLLGLDERIKELDREIALIAASDPVAKRLQQLRGVGPIIATAMVANVGDAKQFKNGRQMAASLGLTPRQNSSGGKERLLGISKRGDAYLRTLLIHGARSMIRTAKAKDDSLSRWVLKIAATRHQNIAAVALANKTARIAWAMITKGSAYRPELVAA

SEQ ID NO: 19194 - protein, 341 aa, unidentified
  source 1..341: note = protein_2049118
  REGION 7..149: note = RuvC_domain
  SITE 10: note = RuvC_P1
  SITE 53: note = RuvC_P2
  SITE 88: note = RuvC_P3
  SITE 90: note = RuvC_P4
  SITE 93: note = RuvC_P5
  REGION 209..293: note = Tnp_domain
  SITE 217: note = Tnp_P1
  SITE 247: note = Tnp_P2
  SITE 255: note = Tnp_P3
  SITE 256: note = Tnp_P4
  SITE 268: note = Tnp_P5
MSELAMVGIDLGKHSFHLHGQDKTGRGVFRKKLSRQQMMQFFSNLPVCTVVMEACAGAHFVARQLMVMGHEAKLISPQFVRPYVKGNKNDFVDAEAICEAASRPSMRFVSPKTEAQQTLSVLHRLRESLVRDRTKTVNQMHGFLLEFGISLPRGLAIMKRLPVILTQHELPTRLMTLLDRLREHFNYLDGQIRDLDKELARQLADDDLGSRLLSIPCVGPITASLLAVEMGDGKQYACSRDFAASIGLVPRQYSTGGKATLLGISKRGDKNLRRLLVQCARVYLQQLKIQHGALADWVRSLLIRRHSNVVACALANKLARIAWAISAGHGVFNAGPDAVAI

SEQ ID NO: 19195 - protein, 320 aa, unidentified
  source 1..320: note = protein_48209b4
  REGION 10..158: note = RuvC_domain
  SITE 13: note = RuvC_P1
  SITE 55: note = RuvC_P2
  SITE 95: note = RuvC_P3
  SITE 97: note = RuvC_P4
  SITE 100: note = RuvC_P5
  REGION 192..274: note = Tnp_domain
  SITE 198: note = Tnp_P1
  SITE 227: note = Tnp_P2
  SITE 235: note = Tnp_P3
  SITE 236: note = Tnp_P4
  SITE 248: note = Tnp_P5
MTILTSQTVVGIDVAKAEIAVYRSDLQTIDTVKNDRTTLKRWLKTLPAQSAIAIEATNIYHLDTVDLAHAMGHQVYVVDAYRVSNYRRGIGQRAKNDPCDARLLARYLTNEQHELRLWCPPPKAYTTLKSLLHRRATLVRNHTALMLSWIDEPLLKEALATQQTAFEQAIKAIQKLLRKVSKDSGIAENIVRCKAIEGVGELVATGLATSYMRGNFANSNAFIAFLGMDLRVDDSGKKNGPRYLTKKGDPEIRRLAHIAAMTASRSPRWKPFYESYLARGFSKTQALVVLARKLCRVAFALMKNQSEYQPKPMLQGCPAT

SEQ ID NO: 19196 - protein, 341 aa, unidentified
  source 1..341: note = protein_8c1c231
  REGION 7..149: note = RuvC_domain
  SITE 10: note = RuvC_P1
  SITE 53: note = RuvC_P2
  SITE 88: note = RuvC_P3
  SITE 90: note = RuvC_P4
  SITE 93: note = RuvC_P5
  REGION 210..294: note = Tnp_domain
  SITE 218: note = Tnp_P1
  SITE 248: note = Tnp_P2
  SITE 256: note = Tnp_P3
  SITE 257: note = Tnp_P4
  SITE 269: note = Tnp_P5
MNEVSIVGVDLAKQVFQVHGAAADGRVLFRKKLSRPQFAKFMTALPRCVVAMEACGTAHYWGRELARHGHDVRLIPPIYVKPFVKRQKNDAADAEAVAEAALRPTMRSVAVKTAGQQAQAMLFRTRDLLVGQRTQLVNALRGHLAEHGIILGKGIGNIDRLAARFEEDEDIPDLVRNLGRLYLDRIAGLSAEIGELDGRIAAAAKESDVARKLQTMPGIGPVCAMAIGTFAPDMREFRRARDFSAWLGLVPRQHSSGGKQKLGRTSKMGQRDIRRLLIVGAMSVVHWRGREGGKPGSWLSRMLARKPRMLVAIALANKMARMIWAMLSRDEDYRDPTGAVC

SEQ ID NO: 19197 - protein, 316 aa, unidentified
  source 1..316: note = protein_e43b727
  REGION 3..148: note = RuvC_domain
  SITE 6: note = RuvC_P1
  SITE 50: note = RuvC_P2
  SITE 90: note = RuvC_P3
  SITE 92: note = RuvC_P4
  SITE 95: note = RuvC_P5
  REGION 189..273: note = Tnp_domain
  SITE 197: note = Tnp_P1
  SITE 226: note = Tnp_P2
  SITE 234: note = Tnp_P3
  SITE 235: note = Tnp_P4
  SITE 246: note = Tnp_P5
MFLGIDVAKAELVVAARPSGERWTVANDERGVQALVERLRGGAPTLIVLEATGGYELLCVSALAAAALPVVVVNPRQVRDFARATGQLAKTDQIDAGILALFAERVRPPVRALPAADAQALEALLARRRQLLEMLQAERNRLGQVFGGDKPLVKKSLTTHITFLQRALDAADRELRDQIQQSPAWRAQDEQLQRVTGVGPVLSLTLLAELPELGRVSRREIAKLAGVAPLSRDSGTLRGRRVVQGGRASVRAVLYMGTLVATRHNAVIRDFYQRLLAAGKPKKLALVACMRKLLTILNAMVRTHEPWRAEMAPVPA

SEQ ID NO: 19198 - protein, 305 aa, unidentified
  source 1..305: note = protein_10c031d
  REGION 8..151: note = RuvC_domain
  SITE 11: note = RuvC_P1
  SITE 50: note = RuvC_P2
  SITE 90: note = RuvC_P3
  SITE 92: note = RuvC_P4
  SITE 95: note = RuvC_P5
  REGION 185..269: note = Tnp_domain
  SITE 193: note = Tnp_P1
  SITE 222: note = Tnp_P2
  SITE 230: note = Tnp_P3
  SITE 231: note = Tnp_P4
  SITE 242: note = Tnp_P5
MIIAPGFIGIDVSKNHLDIFDGSTHRIANEREAIAAWLAELTAPRLVLFEATGTYDRQLKQQLHAAGIDLVRVNPLHARAFARATGQLAKTDAIDARLLAAMAQAFNPAPQPPDDPERMELAELHRRRAQLVSCRQQERTRLHTAIPSIAPSIVSHLDWLDAVIKQLEQQIEMLIRRSTALTLAASLLRSIPGIGPVNAAALIALMPELGQRSGKTIAALGGLAPINRDSGQFRGQRSIAGGRAEVRKLLYMAAVTASRSSSRFAETYKGLTAKGKAAKLALIAVARKLLVTANAILKTGQPFKA

SEQ ID NO: 19199 - protein, 330 aa, unidentified
  source 1..330: note = protein_e525180
  REGION 5..159: note = RuvC_domain
  SITE 8: note = RuvC_P1
  SITE 62: note = RuvC_P2
  SITE 102: note = RuvC_P3
  SITE 104: note = RuvC_P4
  SITE 107: note = RuvC_P5
  REGION 204..289: note = Tnp_domain
  SITE 212: note = Tnp_P1
  SITE 241: note = Tnp_P2
  SITE 249: note = Tnp_P3
  SITE 250: note = Tnp_P4
  SITE 262: note = Tnp_P5
MSVSVGIDVGKEYLDICLLHDQTKSGRKHRKFKNTKGTHSEISRWLIKVSKCKPEDTLITMESTGVYHESIALYLHAVGFRVFISNPGKAHKFSQSLGLVHKTDKSDSYMLALYGDAQRERAQIWTPDNINTRNIRSLVRRLSALEKDRLRESNRLEASEISDANERVKSSIMRIVSVIDEEIASIEQEIELAINSDADMERNHQLLQSVVGIGKVMSRELVYLFSSKKFATAKQAAAFIGLIPQLNESGKLKGRTTMSKNGPSRVRAKLFLAAISASTHNPDIREQKRRLLAAGKTKMQALGAAMRKLIQICFGVLKTQTKYQPQVTLN

SEQ ID NO: 19200 - protein, 342 aa, unidentified
  source 1..342: note = protein_9c4d79d
  REGION 7..149: note = RuvC_domain
  SITE 10: note = RuvC_P1
  SITE 53: note = RuvC_P2
  SITE 88: note = RuvC_P3
  SITE 90: note = RuvC_P4
  SITE 93: note = RuvC_P5
  REGION 212..296: note = Tnp_domain
  SITE 220: note = Tnp_P1
  SITE 250: note = Tnp_P2
  SITE 258: note = Tnp_P3
  SITE 259: note = Tnp_P4
  SITE 271: note = Tnp_P5
MLEIAIVGLDLAKNVFQVHGADTEGAPVLRKKLRRTEVLPFFAKLPPCLVGMEACGGAHHWAREVSALGHQVRLIPPAYVKPFVKRGKTDAADAEAICEAVSRKTMRFVPVKSAEQQADAMVLKARELLVRQQTQAINALRAHLHELGIIAGAGVAKVSQLIDIARDPDDPRIPATARVALAAIVGQIDALGQELRRLERTIVAMGKRDPDTQRLTTIPGVGAITAASIKALVPDIGGFRSARHFAAWLGLTPKPHSSGGKERLGHISKMGNPTLRKLLVLGALAMLRRAKNAEPGLEWVARLLARRPGKVVAVALANKTARIVFALLSKGEVYRKPALATA

SEQ ID NO: 19201 - protein, 258 aa, unidentified
  source 1..258: note = protein_f4d0634
  REGION 1..66: note = RuvC_domain
  SITE 5: note = RuvC_P3
  SITE 7: note = RuvC_P4
  SITE 10: note = RuvC_P5
  REGION 126..213: note = Tnp_domain
  SITE 134: note = Tnp_P1
  SITE 164: note = Tnp_P2
  SITE 172: note = Tnp_P3
  SITE 173: note = Tnp_P4
  SITE 185: note = Tnp_P5
MKSNKNDYIDAEAICEAASRPAMRFVEPRTEAQQLLAALHRAREGLVTERTATINRIHGVLLEFGIVVPLSRATLRRLPDVLAVHDLPPRLIQLIHRLHAHYRYLDQQIDDVERDLTSQLHEDENAARLLSIPGIGTITASLLASEVGNVAQFAGGRNFAASIGLVPRQHSTGGRSVLCGISKRGDKHLRHLLVQGARAVIQRAEKRTDRLGEWIRSMLRRRHSNVVACAVANKLARIAWAVLTRHTTYDAARLKLAD

SEQ ID NO: 19202 - protein, 311 aa, unidentified
  source 1..311: note = protein_e131050
  REGION 75..162: note = RuvC_domain
  SITE 99: note = RuvC_P3
  SITE 101: note = RuvC_P4
  SITE 104: note = RuvC_P5
  REGION 269..301: note = Tnp_domain
  SITE 277: note = Tnp_P1
MSSEYAVFLGLDVGKGEHHATALDPAGRRRYDKPLPNDETRLRASPGSPSTARCWSSLISPPPSARCRSRWRVPVVVRWPTCPVSRCAGWPTCTPGEGKTDARDAYVIADAARTLPHTLRRVDAGDEALAELEVLVGFDDDLAGEATRITNRIRGLLTQIHPALERVLGPRLHHPAVLELLSRHGGPQGLRAAGRRRLLAIARKNAPRMGERLIAEVFAALDTQTVTVPGTHAAQTVLPRLAEALRSVLDQRTQIAAEVERILDAHPLAQVLTSMPGIGVRTAARILLEVGDGSGFSDRRSPGRPPPAWPR

SEQ ID NO: 19203 - protein, 326 aa, unidentified
  source 1..326: note = protein_c26affb
  REGION 5..157: note = RuvC_domain
  SITE 8: note = RuvC_P1
  SITE 62: note = RuvC_P2
  SITE 102: note = RuvC_P3
  SITE 104: note = RuvC_P4
  SITE 107: note = RuvC_P5
  REGION 202..287: note = Tnp_domain
  SITE 210: note = Tnp_P1
  SITE 239: note = Tnp_P2
  SITE 247: note = Tnp_P3
  SITE 248: note = Tnp_P4
  SITE 260: note = Tnp_P5
MTYFIGIDVAKDKLDCLWLRDIESLKIKTKVLPNSAKGFNDLKLWFEKNVSSDLSLIHVCLEATGVYHEALAYALFEMGVKVSVVNPAFIRDFAKGLGVRSKTDKKDSMVLARYCALTSPRLWEPESVDIRKLKALLARLAGLNKDLQRESNRLEKASISQASTAVIESHKLIIEQLQKEIERMKKQIEDDVDQNPDIKNNRELLKTIPGIGEVLSLEMLAVLKSRCFVKASQAAAFIGVVPKLWESGKMKGRTTLCKNGSARLRSILYMAAIVATKYNPDINAQYERLLAAGKTKMQALGAAMRKLVQICFGVLKHQSEYRPQIC

SEQ ID NO: 19204 - protein, 386 aa, unidentified
  source 1..386: note = protein_3b2f41b
  REGION 43..184: note = RuvC_domain
  SITE 79: note = RuvC_P2
  SITE 118: note = RuvC_P3
  SITE 120: note = RuvC_P4
  SITE 123: note = RuvC_P5
  REGION 255..344: note = Tnp_domain
  SITE 263: note = Tnp_P1
  SITE 292: note = Tnp_P2
  SITE 300: note = Tnp_P3
  SITE 301: note = Tnp_P4
  SITE 313: note = Tnp_P5
MPRLNDLSRSLVTLEQDATLIAVIEMSLTSWLVAGIVPGVERQPLKKLGVDERALLKLLHRWREEAEKAGHRIKRIAVAFEAGRDGFWLARWLRAYGIEARVIHASSVAVSREHRRAKTDRLDTELLKRAFLGWLRGERDHCRMVAIPTIKDEDAKRPNRERESLVGEQSRIVNRMKAALIRLGIRGFNPKLKKAAERLDGLRTPEGDPIPPNTLAELRRDMVRRRLVSDQIRQIENARLERLEHASGDGPHAMVRLLARVIGVGTETADMLVQEVLSRNMRDRRAVARYAGLTGSPDESGKKRHEKGLARSGNARVRRGMIQLAWRFLMFQKDSALARWFRARTEKARGTRKTMIVALARKLLIALWWLVREGVVPDGVVLRPAQ

SEQ ID NO: 19205 - protein, 394 aa, unidentified
  source 1..394: note = protein_bd23faa
  REGION 5..161: note = RuvC_domain
  SITE 8: note = RuvC_P1
  SITE 58: note = RuvC_P2
  SITE 99: note = RuvC_P3
  SITE 101: note = RuvC_P4
  SITE 104: note = RuvC_P5
  REGION 268..352: note = Tnp_domain
  SITE 276: note = Tnp_P1
  SITE 306: note = Tnp_P2
  SITE 314: note = Tnp_P3
  SITE 315: note = Tnp_P4
  SITE 326: note = Tnp_P5
MDVFIGIDVAKEVHWACAMDRNARVLFSQAVGNDPAAIVSLIGKIEALEAENTRTAIDMLGGAASLLCAMFAEAGLPLVHTPGLAVNRARQGIRGGERKSDPKDAVVIAELARTRPDLRAVEPPDPLDAEIRLLVSRRRELVTEQTRRAARLRDLLSGLFPALERRIDPTTRTGLVFLSHYAAPEDIRAAGAKRITRRLTKAATGLRGLEALAEDAVQAAQAQTVTIPGAQLRAEIIADIAREALAARDRLKATDHAIRERLANHPDTALILSMPGMGATLTAEFIALVGRIDRFDSADALAAAAGLAPVLRQSGKTSFLRRAAGGDKALKRVFYQAAFTSLGRPDSRAFYDRKRAEGKRHHQAVIALARRRVNVLWAILHKRQPFRENFKMAA

SEQ ID NO: 19206 - protein, 339 aa, unidentified
  source 1..339: note = protein_b00da19
  REGION 6..147: note = RuvC_domain
  SITE 9: note = RuvC_P1
  SITE 52: note = RuvC_P2
  SITE 87: note = RuvC_P3
  SITE 89: note = RuvC_P4
  SITE 92: note = RuvC_P5
  REGION 211..297: note = Tnp_domain
  SITE 219: note = Tnp_P1
  SITE 249: note = Tnp_P2
  SITE 257: note = Tnp_P3
  SITE 258: note = Tnp_P4
  SITE 270: note = Tnp_P5
MELNVVAIDIAKKVFQLHWVEPDTGCIEKLKLKRAQVLEWFVNRPPSLVLIEACGGAHEWGRQMMKLGHDVRLLPPKMVRPFVQRNKTDAADAQAIWTAGQQPGTKFVPVKTEAQQVVLALHRLRAQLMKMRIMQTNEIRGLLYEFGVVMPEGHRALLKELPAVLSDAQSRLPAMFIDCLNEQVRRVDDLQRDIAAIERRLAEHLRETVSCKTLADIPGVGLMTATAVVASMGSPAAFKDGREFAAWLGLVPKQTGTGGRIRQLGISKRGDVYVRTLLMHGARSIVRSDRSTTWPWLMELLKRRPYSVVVAAVANKLARTIWAVLARGQTWRPEAWQAT

SEQ ID NO: 19207 - protein, 320 aa, unidentified
  source 1..320: note = protein_acf3b35
  REGION 10..158: note = RuvC_domain
  SITE 13: note = RuvC_P1
  SITE 57: note = RuvC_P2
  SITE 97: note = RuvC_P3
  SITE 99: note = RuvC_P4
  SITE 102: note = RuvC_P5
  REGION 193..278: note = Tnp_domain
  SITE 201: note = Tnp_P1
  SITE 230: note = Tnp_P2
  SITE 238: note = Tnp_P3
  SITE 239: note = Tnp_P4
  SITE 250: note = Tnp_P5
MMAQNDRVVVGIDVAKDKVDACIRTLSQLRTFESTAEGRRQLVAWLRRHKVGKAAMEASGGYERDWAKALREAGLEVRIVDPKRVRSFARSAGRLAKNDAIDAEMIAWFAETFGEAPAQAYDAARDKLVQIVNARQALLDVQTELQNRGEHAAPEVVQKMQARLLKKIALEVAKLEAAIAAMIKTTAHFTELSEIIESVPGLGRGTSAGLIAAMPELGQVSNKAAAALLGVAPYDDDSGKRRGERQIKGGRRKVRNLFYMACLGAATQHNPVLKAFYRRLIAKGKEKKVALVACMRKLIVILNIMIARGEKWDPSRYAVS

SEQ ID NO: 19208 - protein, 350 aa, unidentified
  source 1..350: note = protein_5e292e4
  REGION 9..169: note = RuvC_domain
  SITE 12: note = RuvC_P1
  SITE 68: note = RuvC_P2
  SITE 108: note = RuvC_P3
  SITE 110: note = RuvC_P4
  SITE 113: note = RuvC_P5
  REGION 209..296: note = Tnp_domain
  SITE 217: note = Tnp_P1
  SITE 247: note = Tnp_P2
  SITE 255: note = Tnp_P3
  SITE 256: note = Tnp_P4
  SITE 269: note = Tnp_P5
MKNILKQVAGIDVAKKELVVCLSFLDENLSVGIISHQVFSNNKKGFEAMVRWVTKQTGKETKVRYVMEATGVYHEALAYFLTDKELEVSIVLPNKISNFFRTLEINTITDKTASQAIARFGLERKLEVWKKPKDTFRQLKQLTRERDQMVADRTVLKNQLHAERSEAFPNQSSIKRINKRIALINKQEEEIKLEVAVMVKKDRELCDKIEKIATIPGVGKLTAVIVLAETNGFELIKNTKQLVSYSGLDVKVKDSGTSVKGKPKISKKGNRHIRKAMHMPALSAIRYNEKHKALFTRLISKHGIRMKAVVAVQRKILELIYIIYKTDLPFDQEYAKGENKTQKQILEQPL

SEQ ID NO: 19209 - protein, 338 aa, unidentified
  source 1..338: note = protein_2f1658c
  REGION 5..151: note = RuvC_domain
  SITE 8: note = RuvC_P1
  SITE 54: note = RuvC_P2
  SITE 90: note = RuvC_P3
  SITE 92: note = RuvC_P4
  SITE 95: note = RuvC_P5
  REGION 211..297: note = Tnp_domain
  SITE 219: note = Tnp_P1
  SITE 249: note = Tnp_P2
  SITE 257: note = Tnp_P3
  SITE 258: note = Tnp_P4
  SITE 270: note = Tnp_P5
MKTHVGVDLHQRFCYLTAVNASGKVFKQSQVANDGAALRAWLRPLPVPRQVVVEASGFWPAFARGVAPEFERLVMVHPLRVKAIASAKLKNDRVDSETLAHLSRCDLLPEAWMADVPTQQLRLLVRLRMALGRQRARAKNQLQAVLHQEGFKKPVTDVFGKRGRAWLKGLELSAAGRLVVDTWLREVDHLDVELAEQTRELERLATVDARARFLQTVPGIGPYAAMVILAEMGDVERFGNKRALASYAGLTPVVRESAGKRKRGGITHQGSNTLRWIMLQVAQVAARCSPGARSYYAGLRARKPAQVAKIALARKLLTVVWALLHHGVCYDEELFIRG

SEQ ID NO: 19210 - protein, 408 aa, unidentified
  source 1..408: note = protein_dd9090a
  REGION 9..162: note = RuvC_domain
  SITE 12: note = RuvC_P1
  SITE 60: note = RuvC_P2
  SITE 101: note = RuvC_P3
  SITE 103: note = RuvC_P4
  SITE 106: note = RuvC_P5
  REGION 224..309: note = Tnp_domain
  SITE 232: note = Tnp_P1
  SITE 262: note = Tnp_P2
  SITE 270: note = Tnp_P3
  SITE 271: note = Tnp_P4
  SITE 282: note = Tnp_P5
MNETKSVIIGVDPHKLSATIEVVDTAEQLLGGGRFPTDKAGYAAMWRYAKQWPDRLWAVEGANGAGRPLAQRLVENGEHVVDVPAKLAARVRLFDTGHNRKTDALDAHSIAIVAVRTAGLRVVAADGELEALRMLADRRDELAGQRIQTVNRLQRLLSELIPGQRKKDLSALQAKAMLATVRPRDIAGKTRRRIAAEEIADLVAVDAKLKKMKAELKAAVIARGSTLMDIHGVGPVVAARILADVGDVTRFADRNRFASWTGTAPIDASSGEQIRHRLSRAGNRRMNHMLHVAAIVQLRNDTEGRAYYRRKQATKTNMEALRCLKRRLSDVVYRQLVADDTTITAPPYDQPGADPGGHCGATQESSAADLPPHIDTSDKPLPGPAHPTLRPPVHRRKPQRSRVPIPAP

SEQ ID NO: 19211 - protein, 399 aa, unidentified
  source 1..399: note = protein_428e0da
  REGION 10..164: note = RuvC_domain
  SITE 13: note = RuvC_P1
  SITE 61: note = RuvC_P2
  SITE 101: note = RuvC_P3
  SITE 103: note = RuvC_P4
  SITE 106: note = RuvC_P5
  REGION 271..358: note = Tnp_domain
  SITE 279: note = Tnp_P1
  SITE 310: note = Tnp_P2
  SITE 318: note = Tnp_P3
  SITE 319: note = Tnp_P4
  SITE 331: note = Tnp_P5
MTPDDIDVWIGLDVGKSAHHAHALDRDGATVYDKPVRQDEKAIRTMLERLSERGRPLLVVDQPNTIGSLPLTVARSMGIAVAYLPGGAMRKAAQLLPGSAKTDRRDARVIAWAALKLPETLKDAGSDDETLAALRMLAGHDEDLAHEATRHINRARGLLLQVHPAFERALKGERIARDSTLALLEHYGGPAGMNKAGVQNVRAWAKANGLRAGTIIDDMFRAIGEQTVTVPGALMAESIIPALARDIKAIKDRRREIGRQVETLLEDHPLLTVLTSMPGIGVRTASGILLGIGGDIANFKSAAHLAAYAGIAPVTSQSGTSIKGERPARGGNKRLKNALWQTAFVASTKHPPSIAYYKRKREQGKHHNAAIICLARRRCDVIYSMLKNGTLYQDPILAA

SEQ ID NO: 19212 - protein, 316 aa, unidentified
  source 1..316: note = protein_7eba924
  REGION 8..164: note = RuvC_domain
  SITE 11: note = RuvC_P1
  SITE 55: note = RuvC_P2
  SITE 95: note = RuvC_P3
  SITE 97: note = RuvC_P4
  SITE 100: note = RuvC_P5
  REGION 190..274: note = Tnp_domain
  SITE 198: note = Tnp_P1
  SITE 227: note = Tnp_P2
  SITE 235: note = Tnp_P3
  SITE 236: note = Tnp_P4
  SITE 247: note = Tnp_P5
MQPSSVCVGIDISKAQLDLVVEPGGESFTVPYDDQGLATLILRLSPMVPRRIVVEATGGLERRLLRALVEAALPVIAVNPRQVRDFAKATGQLAKTDALDAAVLARFAVVIQPPERALPDPQTQELAAVLARRRQVLAMQRAEQNRLDRASTRVQNRIEAHLQWLNTELARLDEDLDDMIAQSPVWRDRDNLLQSVPGIGPVMSRTVLAELPELGLLNRKQVAALVGVAPFNRDSGRLRGHRTIWGGRAPVRTALYMATLVATRWNPVIRAFYQRLRTAGKPPKVALVAAMRKLLTILNAMVHHGTPWRSAVVQGA

SEQ ID NO: 19213 - protein, 385 aa, unidentified
  source 1..385: note = protein_68d311b
  REGION 44..185: note = RuvC_domain
  SITE 81: note = RuvC_P2
  SITE 118: note = RuvC_P3
  SITE 120: note = RuvC_P4
  SITE 123: note = RuvC_P5
  REGION 255..342: note = Tnp_domain
  SITE 263: note = Tnp_P1
  SITE 292: note = Tnp_P2
  SITE 300: note = Tnp_P3
  SITE 301: note = Tnp_P4
  SITE 313: note = Tnp_P5
MQTLNDLSQSRIVLKQDSTLIAVIEMSLSSWLVAGLVPGVERQPLKKLAVDESVLLKLLHRWGEEAEKTGRRIERIAVAFEAGRDGFWLARWLRARGIEAHVIHASSAAVSREHRRPKTDRLDTELLKRVFLGWLRGERDHCKMVTVPTIRDEDAKRPNRERESLVGEQTRIVNRMKAALSRLGIRGFNPKLKKAAARLEDLRTPEDEPIPPNTLAELRRDMERRRLISDQIRQIEDARLERLERMPNDGSHAMVRLLARVIGVGIETADMLVQEVLSRTMRDRRAVARYAGLTGAPDESGAKRREKGLARSGNARVRRGMIQLAWRFLMYQKDSTLAQWFRARTENARGTRKTMIVALARKLLIALWRLVTTGEVPAGVVLRAA

SEQ ID NO: 19214 - protein, 344 aa, unidentified
  source 1..344: note = protein_d7ebceb
  REGION 7..148: note = RuvC_domain
  SITE 10: note = RuvC_P1
  SITE 53: note = RuvC_P2
  SITE 88: note = RuvC_P3
  SITE 90: note = RuvC_P4
  SITE 93: note = RuvC_P5
  REGION 210..295: note = Tnp_domain
  SITE 218: note = Tnp_P1
  SITE 247: note = Tnp_P2
  SITE 255: note = Tnp_P3
  SITE 256: note = Tnp_P4
  SITE 268: note = Tnp_P5
MIQYKRIAIDTSKAVFTLHGVDESGRAVLRTNLRRAQIAPFFKKLPPTGIAMEACGGAHHWGRELTALGHEVRLIPPQYVKPFVRRGKNGRNDAEAICEAAGRPGIHCVPVKSAVQQAQGMVLKIRATLVDQRTVLVNTLRGHAAEFGVIAAKGISQVGPLLPAIEQETAIPSEARDMLDLPGEEIAHLDIRLKTLDARLAAAHKANPVSQRLAAIPGIGPVTALTLAAEAGPAAFASGRHLAAWAGLTPKEHSTGGKQRLGGISRAGNERLRQLLVLGATTVIKVATRPGNTLATAWLLALLQRKPRKLAAVALANKMARTVWAMMTSGAVYRRQPASAAVSA

SEQ ID NO: 19215 - protein, 334 aa, unidentified
  source 1..334: note = protein_1dc07da
  REGION 7..149: note = RuvC_domain
  SITE 10: note = RuvC_P1
  SITE 53: note = RuvC_P2
  SITE 88: note = RuvC_P3
  SITE 90: note = RuvC_P4
  SITE 93: note = RuvC_P5
  REGION 209..296: note = Tnp_domain
  SITE 217: note = Tnp_P1
  SITE 247: note = Tnp_P2
  SITE 255: note = Tnp_P3
  SITE 256: note = Tnp_P4
  SITE 268: note = Tnp_P5
MENITLIGIDLGKNSFHIHCQDRHGKAVFRKKFTRQKMFEFLATCPATTIVMEACGGAHFMVRKLSELGHTPKLISPQFVRPFVKTNKNDFVDAEAICEAASRPSMRFVQPRTESQQAMHALHRVRESLVRDKVKTSNQMHAFLREFGVSAPKGPALITNFAEILETNKFPPYLARLLQKLREHYGYLLEQIKDLETQLKVSLDADSTGQRLLTIPCVGPLTASLLSTQLGDGKQYGSSRDFAASTGLVPRQYSTGGRTTLLGISKRGNKKLRALLVQCARVFLRTLEHRSGKLADWVRELLLRKNNFIVTCALANKLARISWALTARQQSFEA

SEQ ID NO: 19216 - protein, 395 aa, unidentified
  source 1..395: note = protein_6adda01
  REGION 6..160: note = RuvC_domain
  SITE 9: note = RuvC_P1
  SITE 58: note = RuvC_P2
  SITE 98: note = RuvC_P3
  SITE 100: note = RuvC_P4
  SITE 103: note = RuvC_P5
  REGION 265..352: note = Tnp_domain
  SITE 273: note = Tnp_P1
  SITE 304: note = Tnp_P2
  SITE 312: note = Tnp_P3
  SITE 313: note = Tnp_P4
  SITE 325: note = Tnp_P5
MPEIWAGVDIGKTHHHCVVINAEGKRLLSRRVQNDETELLALIGDVLEMSGDVLWAVDLNHGGAALLIGLLVSHGQPVAYLTGLAVHRASATYRGEGKTDAKDAFVIADQARVRRDIGLLRPGDEIAVDLRTLTTRRLDLVFDRTRQINRLRAQLLEIFPALERSLDLTRKGHVLLLTAHQTPAAIRRAGARRIETWLKNRSVRGAASIAKTVVEAAQAQHTALPGEKLAAAMVARLAKGVMALDEEIAELDALIEARFREHPHAEVILSLPGMGAKLGAEFIAATGGDMDAFGSSDRLAGFAGLAPRPRDSGRVSGNLRRPRRYHRGLLRTMYLSAMVSLQCCPASKAYYDRKRSEGKGHKQALLALARRLNVLWAMIRDGECFHTSPPVTLAA

SEQ ID NO: 19217 - protein, 416 aa, unidentified
  source 1..416: note = protein_5e92b71
  REGION 4..170: note = RuvC_domain
  SITE 7: note = RuvC_P1
  SITE 67: note = RuvC_P2
  SITE 107: note = RuvC_P3
  SITE 109: note = RuvC_P4
  SITE 112: note = RuvC_P5
  REGION 278..364: note = Tnp_domain
  SITE 286: note = Tnp_P1
  SITE 317: note = Tnp_P2
  SITE 325: note = Tnp_P3
  SITE 326: note = Tnp_P4
MLFIGDDWAEDHHDVEVVDEDGRRLVQARLPEGLEGITRLHALVAEHAPAAWAELPPEQVTGQVVVGIETDRGPWVTALRAAGYLVFAINPLSAARYRQRHSTSGAKSGAGDAHVLAEIVRLDRDHHRPIAGDSELADAVKLLARAHQTAIWERTRHVLRLRSTLREFFPAALEAFEDLAASDSLILLERAPSPALAAKLTRSQLTAALRTARRHHVETKAVALQEILRAPALRQPPVLDSAYATIVVSQVRLIAALNAQITGLGEVMGEHFDRHPAAEIYLSQPGLGVVLASRVMGEFGDDKTRFTDARARKNYSGQSPITRASGRKKVVLARYATNRRLGAALHMQAYAALTGSPGARAYYDTLRDRGIGHHAALRQLANRLVGVLHGCLKTGALYDEDTAWQHHRADTANIAA

SEQ ID NO: 19218 - protein, 341 aa, unidentified
  source 1..341: note = protein_5957028
  REGION 6..148: note = RuvC_domain
  SITE 9: note = RuvC_P1
  SITE 52: note = RuvC_P2
  SITE 87: note = RuvC_P3
  SITE 89: note = RuvC_P4
  SITE 92: note = RuvC_P5
  REGION 211..296: note = Tnp_domain
  SITE 219: note = Tnp_P1
  SITE 249: note = Tnp_P2
  SITE 257: note = Tnp_P3
  SITE 258: note = Tnp_P4
  SITE 270: note = Tnp_P5
MKIITIGIDLAKNVFQVHGVDERGQVALQKQLKRAQFALFFSNLPPCLIGMEACGGAHHWARKLQAFGHTVKLISPQFVKPFVKTNKNDRADAEAICEAVSRPSMRFVAVKTIEQQAVLSLHRARQGFVKARTAQANQIRGLLAEYGLVIPKGISQVTRQVPLILEDAENELPGVFRQLIAGLLVHFRELHRLVSELETEIKDWHRNNDASRKLAEIPGIGPLGATALVASIGDARTFKNGRQLAAWLGLVPRHHSTGGKPTLLGISKRGDVYLRTLLIHGARSAILAAQRREENTGWLAKLLERRHPNVAAAALANKNARVVWALLAYDRDYQPAYARAA

SEQ ID NO: 19219 - protein, 410 aa, unidentified
  source 1..410: note = protein_3390638
  REGION 4..163: note = RuvC_domain
  SITE 7: note = RuvC_P1
  SITE 60: note = RuvC_P2
  SITE 100: note = RuvC_P3
  SITE 102: note = RuvC_P4
  SITE 105: note = RuvC_P5
  REGION 272..358: note = Tnp_domain
  SITE 280: note = Tnp_P1
  SITE 311: note = Tnp_P2
  SITE 319: note = Tnp_P3
  SITE 320: note = Tnp_P4
MLFVGDDWAEDHHDIEIQNEAGQRLARARLPEGVAGLARFHALIADHLGGDEDPSQVVVGIETDRGPWVGALVATGYQVYAINPLSAARYRERHVTSRAKSDPGDARVLADLVRTDRHHHRTVAADSDLAEAVKVLARTHQNLAWARQRHANLLRSTLREFHPAALVAFDDLASRDALAVLAAAPTPAAGRALTTTRIAALLRRAGRQRRADTRAEEIRSALRGEQLTAPTEIAQAFGHTVIAVVAVLTTLVAQIDRVEAEMTTRLHQHPHARIYLSLPGFGPVLAARALGEFGDDPNRYETARARRNYAGTSPITRASGKRRVVLARVAVNSRLRDALATQAFAALKASPGARAYYDSHRARGMTHHQALRALANRHVAILHGCLRHQTAYDEATAWPALTDTTQTAAA

SEQ ID NO: 19220 - protein, 411 aa, unidentified
  source 1..411: note = protein_7bc6939
  REGION 5..163: note = RuvC_domain
  SITE 8: note = RuvC_P1
  SITE 62: note = RuvC_P2
  SITE 102: note = RuvC_P3
  SITE 104: note = RuvC_P4
  SITE 107: note = RuvC_P5
  REGION 273..373: note = Tnp_domain
  SITE 281: note = Tnp_P1
  SITE 311: note = Tnp_P2
  SITE 319: note = Tnp_P3
  SITE 320: note = Tnp_P4
  SITE 333: note = Tnp_P5
MNPVVGLDISKGESQVQAFLDKKKPYRKSFKVEHTNDRLALLHEFLKHIKETTGQNPAIILESTGHYHASVVQFLEDRNYLLIIVNPLVSHRAKSSSLRKVKTDAVDAYHLCELYYKEDLEPYKKRGVQLLNLRNLTRQHENITGNFINTKLQFQAVLEQVFPEYRGVFGELYSYVSLRILKEFKASEDILKTSEDKLANRIADLCKSRSEKWAYEKAQKLKEAASRNPFKKTLYQSHLLSMDMYIDMLLQFKEHLSKLEAEIDTLAKEIEEYNIIKSIPGIGEKIAATIISEIGEIDRFNHPKKLVAFAGVDPSVFESGRFTASMNRITKRGSSRLRHALFLAVRCAIRDKRKKKTRNEILPRNKRMREFYDKKRSEGKPFRVAVIACVNKLLHWIYALLKNKTTFQDID

SEQ ID NO: 19221 - protein, 340 aa, unidentified
  source 1..340: note = protein_fc41b1b
  REGION 1..103: note = RuvC_domain
  SITE 2: note = RuvC_P2
  SITE 42: note = RuvC_P3
  SITE 44: note = RuvC_P4
  SITE 47: note = RuvC_P5
  REGION 213..302: note = Tnp_domain
  SITE 221: note = Tnp_P1
  SITE 251: note = Tnp_P2
  SITE 259: note = Tnp_P3
  SITE 260: note = Tnp_P4
  SITE 273: note = Tnp_P5
MESTGHYHTPVIQCLEENDVLYILLNPIISHQAKKSSLRKVKTDAFDAYQLCVLYYKEDFEPYKLRGIQLMNLRNLSRQQEIVTNMYVEAKLQFHTILDQTFPEYRKVFGDLFSKVSLSILREYPTSEKILEADEEDLAERIKGYCPTRSIQWAREKARKLIHSATQNPFQKVMYQSHLINLNMYIDILFHYQGHLSELENQMISLANEIEEYKIIQSIPGIGEKIAATIISEIGEIDRFNHPKKLVAYAGIDPSVHSSGKFTATTNHITKRGSSRLRHSLYLAVLCGIRSSRNKKLKEFYDKKRSEGKPLKVAIVACINKLLHWIYALLKGKEHFLDIA

SEQ ID NO: 19222 - protein, 266 aa, unidentified
  source 1..266: note = protein_5f4e001
  REGION 7..148: note = RuvC_domain
  SITE 10: note = RuvC_P1
  SITE 53: note = RuvC_P2
  SITE 88: note = RuvC_P3
  SITE 90: note = RuvC_P4
  SITE 93: note = RuvC_P5
  REGION 213..257: note = Tnp_domain
  SITE 221: note = Tnp_P1
  SITE 251: note = Tnp_P2
MSQVTTIGLDIAKNVFHAHGADERGAMVFSRRLTRGKLLEFFAGQPACVVALEACGGAHHWARQLQTMGHDVRLIPPSYVKPFVKRNKNDAIDAEAIAEAAQRPGMRFVAVKSEEQQAAGLVFRTRDLAVRQRTQLINAIRGHLAEYGWVAPRGTAHMTMLADLLEDEEMTSSLPAAARPMFKLMVDMLADLDKQVAVLDREIARRAKEDEAARRLMTIPGIGPIAATAIIALAPPVETFRKGRDFAAWLGLAPPSALDRRQTAAR

SEQ ID NO: 19223 - protein, 253 aa, unidentified
  source 1..253: note = protein_891bbc4
  REGION 6..147: note = RuvC_domain
  SITE 9: note = RuvC_P1
  SITE 52: note = RuvC_P2
  SITE 87: note = RuvC_P3
  SITE 89: note = RuvC_P4
  SITE 92: note = RuvC_P5
  REGION 211..253: note = Tnp_domain
  SITE 219: note = Tnp_P1
  SITE 249: note = Tnp_P2
MELHTIGIDLGKTVFHLVGLNLRGEVVVHKKFSRKQLLHFTANLQVKLIGMEACGGSHFLGRALREQGHEVRLMPAQYVKPYVKTNKSDYIDAEAIAEAVGRPKMRFVPIKTDEQLDLQSLHRVRERWVMRRTAVINQIRGLLLERGITLRQGRGHVDAALPGILEDANAMLSGALRMLLAQLKLELDHLQMRIDEADAIIKKVAGENEACRRLVAIPGIGPVTATAIIAAIGNGAAFKKGRGFSAWLGIVPG

SEQ ID NO: 19224 - protein, 343 aa, unidentified
  source 1..343: note = protein_189a07a
  REGION 6..149: note = RuvC_domain
  SITE 9: note = RuvC_P1
  SITE 54: note = RuvC_P2
  SITE 89: note = RuvC_P3
  SITE 91: note = RuvC_P4
  SITE 94: note = RuvC_P5
  REGION 213..300: note = Tnp_domain
  SITE 221: note = Tnp_P1
  SITE 251: note = Tnp_P2
  SITE 259: note = Tnp_P3
  SITE 260: note = Tnp_P4
  SITE 272: note = Tnp_P5
MKLIRVGVDLAKNVFQVHGVDRSEDVIWRKKLGRDEWLQTLLAKIEPGCEIGMEACGGAHHWARQLQRHGYRVKLIAPQFVKPYVKSNKNDANDAEAICEAMSRPNMRFVTVKTIEQQDVQAVHRIRAELSSQRVAKANQIRGLAAEYGLTAARELLQLRAAIPYWLEDASNGLTDRFRRLLAGLWQDLLGLDERIKELDREIICIAQTDPVARRLQQLRGVGPIIATAIVANVGDATQFANGRQMAASFGLTPRQNSSGGKERLLGISKRGDAYLRTLLIHGARSMIRTAKAKDDHLSQWVMRIAGTRHHNIAAVALANKTARIAWAMITKGTDYRAELSAA

SEQ ID NO: 19225 - protein, 336 aa, unidentified
  source 1..336: note = protein_adba730
  REGION 6..147: note = RuvC_domain
  SITE 9: note = RuvC_P1
  SITE 52: note = RuvC_P2
  SITE 87: note = RuvC_P3
  SITE 89: note = RuvC_P4
  SITE 92: note = RuvC_P5
  REGION 209..295: note = Tnp_domain
  SITE 217: note = Tnp_P1
  SITE 247: note = Tnp_P2
  SITE 255: note = Tnp_P3
  SITE 256: note = Tnp_P4
  SITE 268: note = Tnp_P5
MTMIRVGVDTSKHVFQIHGVDENEQPVLRRQIRRSEVVKFFAKLAPTRIGIEACGASHYWARLLRGLGHEVVLIPPQYIKPYVKRGKNDKIDAEAICEAMSRPGMRFVPIKTAEQQAGLTMLGARDLLVKQRTMLINAIRGHAAEFGVTVAKGPKQVGQLLQHLASDEGVPALAREMIGVLASQLDGLEIKLKTIEKRLMAWHRQDQISQCLATIPGIGPISGVSFALKVADPKAFRSGRHFASWIGITPRENSTAGRQKLGRISRAGDEDLRRLLVIGATAVIHAAKPGRTAPWLLALLARKSKKLAAVALANKTARIVWAMMVSGETYRQPAQA

SEQ ID NO: 19226 - protein, 342 aa, unidentified
  source 1..342: note = protein_3d0e819
  REGION 6..148: note = RuvC_domain
  SITE 9: note = RuvC_P1
  SITE 52: note = RuvC_P2
  SITE 87: note = RuvC_P3
  SITE 89: note = RuvC_P4
  SITE 92: note = RuvC_P5
  REGION 210..296: note = Tnp_domain
  SITE 218: note = Tnp_P1
  SITE 248: note = Tnp_P2
  SITE 256: note = Tnp_P3
  SITE 257: note = Tnp_P4
  SITE 269: note = Tnp_P5
MQVTTIGLDIAKRVFQVHGVDAAGAVVFRKKLRRSELSAFFAGLSPCLIGIEACATAHHWAREFIALGHQVRLVPPSYVKAYLKRGKNDAADAEAICEAVTRPNMRFVPVKSTEQQGVLVLHRGRELLVRQRTMLVNGLRAHMAEFGIIVAQGIQRLPELVALLEDEKTSIPQIAREVLAAMVVQINNLTTSIRRMDKCIVAWCRANAAARRLATIPGVGPITASALAATITDPTLFRSGRHLAAWLGLVPRQHSTGGKAKLGRITKMGDQYVRKLLIVGMTAVIRSARRTKAPSFAWVNALLERRPARLVSVALANKAVRIAWVIMIRGETYRPPTMAAAA

SEQ ID NO: 19227 - protein, 438 aa, unidentified
  source 1..438: note = protein_d31b8c6
  REGION 11..160: note = RuvC_domain
  SITE 57: note = RuvC_P2
  SITE 100: note = RuvC_P3
  SITE 102: note = RuvC_P4
  SITE 105: note = RuvC_P5
  REGION 223..308: note = Tnp_domain
  SITE 231: note = Tnp_P1
  SITE 261: note = Tnp_P2
  SITE 269: note = Tnp_P3
  SITE 270: note = Tnp_P4
  SITE 281: note = Tnp_P5
MDRVIIGVVSCKLSVTIEARDNREILRAAGRFGTDTRSYHQLLKVARQWPERTWAVEGGANGIGRPPLAQRLLADGERVLDVPAKLAARARVFDTGQGRKTDAADAHAIVMVALRDKGLRELSADPELMVLRMLCDRRDELSRARAQAAGRLHRLFLELLAGGAPVKKSTAQYKALLATVHPRDPAGKIRRRMAAEELADLARCDAKLKAMKAELKAAVQASGSHLMDICGIGPAGAARILADVGDIARFPDRNHFASWTGTAPIDASSGEHTRHRLSRAGNRRHGHVLYMAGIVQLRNDTPGRAYHRRKLTAGKTAMEAMRCLRRRLSDVVYRQLAADAAACAPAPRQAGPGGHSGATLSSSAAGLPPGTGTSDQPLPGPAPQTLPPPPALETTPAAPAAATQRRRAGGVNVERPTGRTTLTPTSAGAHSTASGPHT

SEQ ID NO: 19228 - protein, 274 aa, unidentified
  source 1..274: note = protein_220d90b
  REGION 1..80: note = RuvC_domain
  SITE 21: note = RuvC_P3
  SITE 23: note = RuvC_P4
  SITE 26: note = RuvC_P5
  REGION 145..231: note = Tnp_domain
  SITE 153: note = Tnp_P1
  SITE 182: note = Tnp_P2
  SITE 190: note = Tnp_P3
  SITE 191: note = Tnp_P4
  SITE 203: note = Tnp_P5
MGYEIKLIPTQHVKAFCKNQKNDANDALVICETACRPGIHFVPVKTVEQQDIKALRSARQLIVEQRTASVNQMRVLLAEQGLVLPAGIQQLRQALPDILEDGNNALSFVLRRLLHSLQDDMRRFDARLHEMDKEIQAVSSQQSGYAHLLTIPGVGPLIAAAFVSDVNVDQFAQGRQLSAWCGLVPRQYSSGGKIHLSGMTKQGNRHLRTLIIHGARAVMRCCQKRDDALGEWLRKLLARCSFMKATVALANKLVRIIWRILKDDVDFMVKKAVN

SEQ ID NO: 19229 - protein, 273 aa, unidentified
  source 1..273: note = protein_da1c28d
  REGION 1..43: note = RuvC_domain
  REGION 148..235: note = Tnp_domain
  SITE 156: note = Tnp_P1
  SITE 186: note = Tnp_P2
  SITE 194: note = Tnp_P3
  SITE 195: note = Tnp_P4
  SITE 208: note = Tnp_P5
METRLADEDLFSLRTLTRFRTYLVESISDLKRKVVCVLDQVFPEYQSIFSNIFGKTSKEILLQFSSPIDFEAVSSETLAELLAQLSRQKVGIAKAQQIKAAASSSFGVTFAKNSFTFQLKTLIEQISFIEKQVKETEAEISGIMGKLESPITTITGIGSVTGAAIISEIGDISKFDSPRKLVAFTGLDATVTQSGEFEAVHNVMSKRGSPYLRKAIFQAALIASFKDPVLSAYYQKKRAEGKHHLTCVGAVARKMCNIIYAVLKNNQPYVPKA

SEQ ID NO: 19230 - protein, 280 aa, unidentified
  source 1..280: note = protein_54d1cf5
  REGION 7..151: note = RuvC_domain
  SITE 10: note = RuvC_P1
  SITE 55: note = RuvC_P2
  SITE 90: note = RuvC_P3
  SITE 92: note = RuvC_P4
  SITE 95: note = RuvC_P5
  REGION 214..272: note = Tnp_domain
  SITE 222: note = Tnp_P1
  SITE 252: note = Tnp_P2
  SITE 260: note = Tnp_P3
  SITE 261: note = Tnp_P4
MNKLSRVGIDLAKNVFQLHGADRHGKVLWKRRLSRNKWLKALLEVAAPDCEIGMEACGGAHHWARILQSYGYTVKLIPPQFVKPYVKSNKNDAKDAEAICEAMSRPGMRFVSVKTVEQQDIQAVHRVRSGLMTERTALANRIRGLVAEYGLVTPQALSALKRAVPDWLEDADNGLSDRFRSMLHGLWEDLQRLSQRIGELDKEIILIAQSNSVTQRLQQLRGVGPLVATALVATVGTGQQYAKGKQMAASIGLTPRQHSSGNKDRYWALANGVMPICGPS

SEQ ID NO: 19231 - protein, 332 aa, unidentified
  source 1..332: note = protein_4a6bffd
  REGION 4..147: note = RuvC_domain
  SITE 7: note = RuvC_P1
  SITE 52: note = RuvC_P2
  SITE 92: note = RuvC_P3
  SITE 94: note = RuvC_P4
  SITE 97: note = RuvC_P5
  REGION 191..278: note = Tnp_domain
  SITE 199: note = Tnp_P1
  SITE 229: note = Tnp_P2
  SITE 237: note = Tnp_P3
  SITE 238: note = Tnp_P4
  SITE 251: note = Tnp_P5
MTYIGIDVSKDTFVVAYSPEKASKTRTFKNTTKGIHEFIQTVSKDKHHCVMEGTGNYSALLVYLLSEAGITTSLENPLKVKNFARVMLSTVKTDEVDARLIALYGEKMNPAPYKLRSEAILTLKQKRTVIRQLKKQLIATKNLKGSMEVLPFFDSKCRKSIEQAIAFLEKQVKHLEEDLSDLANSEYKKQMDLLTSIKGIGVTLAAALIMATGGFTYFDNAKQLTRYLGLSPSYQQSGTSVNFKGHINRNGDSSLRSQLYVAAFSSLRCNAECRACYDRLRSNGKSGKLAVIAVANKLVRQAFAVVTQQRPYVDGYVSTLRSAPASSETGEG

SEQ ID NO: 19232 - protein, 340 aa, unidentified
  source 1..340: note = protein_e6514a5
  REGION 6..147: note = RuvC_domain
  SITE 9: note = RuvC_P1
  SITE 52: note = RuvC_P2
  SITE 87: note = RuvC_P3
  SITE 89: note = RuvC_P4
  SITE 92: note = RuvC_P5
  REGION 211..297: note = Tnp_domain
  SITE 219: note = Tnp_P1
  SITE 249: note = Tnp_P2
  SITE 257: note = Tnp_P3
  SITE 258: note = Tnp_P4
  SITE 270: note = Tnp_P5
MNVTTIGIDLAKSVFQVHGVDAAGQVTVTKKLRRAEVIKIFQAIPACLVGMEACATAHFSAREISALGQQVRLMPPSYAKAYLRRQKNDAADAEAICEAVTRPTMRFVPIKSAERQGVLVLHRTRELLVRQRTMLINAIRGHCAEFGIIAPQGARRADELVKHIRQAEPAELPELARSALLRLAEQLDTLAAEIHGLERRLLVWHRQDQASQRLATIPGIGIITATALSAAVTDPGLFRSGREFAAFLGLVPRQNSSGGKDRLGRISKMGDAFLRKLLVVGATSVIRRARTGASASASWVNALLERRPTRVVTVAMANKNARIAWAVLKRGEVYRPPVTV

SEQ ID NO: 19233 - protein, 346 aa, unidentified
  source 1..346: note = protein_b4cf279
  REGION 7..148: note = RuvC_domain
  SITE 10: note = RuvC_P1
  SITE 53: note = RuvC_P2
  SITE 88: note = RuvC_P3
  SITE 90: note = RuvC_P4
  SITE 93: note = RuvC_P5
  REGION 212..300: note = Tnp_domain
  SITE 220: note = Tnp_P1
  SITE 250: note = Tnp_P2
  SITE 258: note = Tnp_P3
  SITE 259: note = Tnp_P4
  SITE 272: note = Tnp_P5
MKKLNVIAIDLAKNVFQVCKTDYLGTVFFNKTMSRNALKELLVKEKVSVVAMESCSGAHYFARHAKENGHTVKSISARSVKAFRQGQKTDANDALAIAVAARQPHIKLSRVVTLEEQCLQSMECMRDLLVKQKVSLSNQLRSILLDLGYAIPQGDSQLKQSIPGILEDAENDLSIPFRSVLSCLWQRFLKTIEEIADVEKTLFREVRQDETCQRLQALEGVGPVGAIALRIVLSNPEHFKNGREASACVGVTPVQHSSGGKEKIGSISRLSGHNKLRSHLFKGALAVIRSLEKRPCRTPKEVWLKDLVARRGKKVAAIALANKNVRTAYALIKQNKEYKPQLLIAA

SEQ ID NO: 19234 - protein, 348 aa, unidentified
  source 1..348: note = protein_1ab2f0c
  REGION 10..152: note = RuvC_domain
  SITE 13: note = RuvC_P1
  SITE 56: note = RuvC_P2
  SITE 91: note = RuvC_P3
  SITE 93: note = RuvC_P4
  SITE 96: note = RuvC_P5
  REGION 217..304: note = Tnp_domain
  SITE 225: note = Tnp_P1
  SITE 255: note = Tnp_P2
  SITE 263: note = Tnp_P3
  SITE 264: note = Tnp_P4
  SITE 276: note = Tnp_P5
MQSTANLPVIGLDLAKSVFQLHIVDIQTGEIQRRQIKRAKLTEFFAKCQRSLVAMEACGTAHHWARVISSLGHQVKLLPAQHIKAFLLRDKTDAMDAQAIWVAAQQPHLKPVPVKTERQQTCMALHGMRRQLMKMRVMQTNALRGMLAEFGIALPVGHSQLLKAIQGELAKAQQADQLTADLVLSVQEQLKRIDALQEDIDHLGQRLRAMIREDRQMQAIQQIPGVGDLTASALVAAVGDFSTFKSGHQFASWAGLTPRQVGTGGKTQQLGISKRGDTYLRTLLIAGARAVIARADKSSWITRLLARRHYNVVVVALANKMARTVWAVLAKGTAFEQVKWNPVDPVAV

SEQ ID NO: 19235 - protein, 432 aa, unidentified
  source 1..432: note = protein_ec6b16d
  REGION 29..187: note = RuvC_domain
  SITE 32: note = RuvC_P1
  SITE 84: note = RuvC_P2
  SITE 124: note = RuvC_P3
  SITE 126: note = RuvC_P4
  SITE 129: note = RuvC_P5
  REGION 295..381: note = Tnp_domain
  SITE 303: note = Tnp_P1
  SITE 334: note = Tnp_P2
  SITE 342: note = Tnp_P3
  SITE 343: note = Tnp_P4
MFIRSLVVLPQASQAILSTMDWSTGLLFVGDDWAEEHHDVELQNETGRVLARAKLPEGIAGIARLHAMIGEHLGDEDGMTVVVGIETERGPWVQALIAAGYQIYAINPLQVARYRERHGVSGAKSDTRDAHALADMVRTDRHQLRPVAGDSTEAEAVKVLTRAHKTLIWERTRHLLRLRHALREFFPAALAAFDDLAAVDTLELLGAAPDPASAAALTTQQITAALKRARRHGRAAKAEAITVALRAEHLGQPAVVTAAYAATVRAQVAILGTLNSEIKTLEEQVGANFGQHPDAEVYLSQPGLGVVLGARVLAEFGDDKDRYADARARKNYAGTSPITRQSGKKKIVLARYVHNDRLVDSLGLQAFAALRASPGARAYYDQLRAKGTGHRAALRQLGNRLVGILHGCLKTGTHYDENKAWTPIQQDLQLAT

SEQ ID NO: 19236 - protein, 354 aa, unidentified
  source 1..354: note = protein_37d2d78
  REGION 7..149: note = RuvC_domain
  SITE 10: note = RuvC_P1
  SITE 53: note = RuvC_P2
  SITE 88: note = RuvC_P3
  SITE 90: note = RuvC_P4
  SITE 93: note = RuvC_P5
  REGION 211..296: note = Tnp_domain
  SITE 219: note = Tnp_P1
  SITE 249: note = Tnp_P2
  SITE 257: note = Tnp_P3
  SITE 258: note = Tnp_P4
  SITE 270: note = Tnp_P5
MSEITTVGLDLAKNVFQVHGADASGLGVLRKKPRRDQVLAFFSQLPPCLVAMEACGGAHVWGREVGKLGHEVRLIPPANVKPFVKRQKNDAADAEAICEAAMRLTMRFVPVKSEETQGAAMVFRIRELLIRQRTQAINALRGHLGEFGQIVPQGAANAARLIAIVEDPDSGLPADAIATLQVLVGALTHLETEIGELDAEITRRAKENDVARCLMTVPGIGPLIATVIAVLAPPPETFRKARDFAAWQGFTPRQHSTGGKQRLGATTKMGERSLRRLLIIGANSVIIKRHVHAAARPGTWLGGMLMRKPPILVRVALANKMARIVWAFAIVLEPMAPNGSLARGGVYPSPAAAA

SEQ ID NO: 19237 - protein, 403 aa, unidentified
  source 1..403: note = protein_2dfdce6
  REGION 6..162: note = RuvC_domain
  SITE 9: note = RuvC_P1
  SITE 59: note = RuvC_P2
  SITE 99: note = RuvC_P3
  SITE 101: note = RuvC_P4
  SITE 104: note = RuvC_P5
  REGION 276..363: note = Tnp_domain
  SITE 284: note = Tnp_P1
  SITE 314: note = Tnp_P2
  SITE 322: note = Tnp_P3
  SITE 323: note = Tnp_P4
  SITE 336: note = Tnp_P5
MNRNAVGIDVSKGKSMAAILRPYGEIVSSPFEIKHTSGNIQSLIQQIKSIEGESRIVMEHTGHYYEPLARELSLAGLFVTAINPKLIKDFGDNSLRKVKSDKADAVKIARYTLDSWTELKQYSLMDEIRNQLKTMNRQFGFYMKHKTAMKNNLIGILDQTYPGVNTYFDSPAREDGSQKWVDFAAAYWHVDCIRKMSLNAFVDHYQKWCKRKKYNFSRDKAEEIYGAARELVPVLPKDDLTKLIVKQAIEQLNTASKTVEELRTLMNETAAKLPEYPVVMGMKGVGPSLGPQLMAEIGDVTRFSHKGAITAFAGVDPDVNESGTYEQKSVPTSKRGSSSLRKTLFQVMDCLIKTKPQDDPVYAFIDKKRAQGKPYYVYMTAGANKFLRIYYGRVKEYLMSLPE

SEQ ID NO: 19238 - protein, 347 aa, unidentified
  source 1..347: note = protein_ab38190
  REGION 7..149: note = RuvC_domain
  SITE 10: note = RuvC_P1
  SITE 53: note = RuvC_P2
  SITE 88: note = RuvC_P3
  SITE 90: note = RuvC_P4
  SITE 93: note = RuvC_P5
  REGION 212..297: note = Tnp_domain
  SITE 220: note = Tnp_P1
  SITE 250: note = Tnp_P2
  SITE 258: note = Tnp_P3
  SITE 259: note = Tnp_P4
  SITE 271: note = Tnp_P5
MQEAVTVGLDLAKQVFQAHGADADGAPLFSRKLRRAEVLRFFEKLPRCLVGMEACSGAHYWAREIGALGHHVRMIPPAYVAPFVKRGKTDAGDAEAISEAVTRKTMRFVPIKTAEQQAAAMVLKTRSLLVRQRTQAVNALRCHLTELGIIAGAGIAKIDSLIAIVRDESDTRLPPAARFAMTAIADQIEALKQQASKLEDAIVREAKVDEDMRRLVTIPGVGAITAATIKALVPDPGGFKSARHFAAWIGLTPKPRSSGGKERLGRISQMGNPDLRSLLVVGATSVLRYTEKNAKAMPWLTGIVARRPYKVAAVALANKMARIVWAVLTRGGVYQRGNSLVAATVTA

SEQ ID NO: 19239 - protein, 418 aa, unidentified
  source 1..418: note = protein_ab8cf9e
  REGION 19..171: note = RuvC_domain
  SITE 22: note = RuvC_P1
  SITE 70: note = RuvC_P2
  SITE 108: note = RuvC_P3
  SITE 110: note = RuvC_P4
  SITE 113: note = RuvC_P5
  REGION 278..364: note = Tnp_domain
  SITE 286: note = Tnp_P1
  SITE 317: note = Tnp_P2
  SITE 325: note = Tnp_P3
  SITE 326: note = Tnp_P4
  SITE 337: note = Tnp_P5
MQYAPATSLPANAPNGVTAGVDWASADHVACVVDAAGKVTTRFTVAHTDAGLNDLTRGLIQAGAAEVAIERGDGPVVEALLAAGLTVVVISPNQVKNLRSRYGAAGNKDDRFDAFVLADTLRTDRARLRRLTPDDPATATLRATVRARRDLVAHRVALGNQLRAHLQKALPGAVGLFASLDSPISLAFLARFDCQDRADWLSQRRLAAWLGSVGYCGRQSPAALLAHLKSAPRGASGDDGAARAHTTRALLAVLAALVEQIKALEAQIAEQLAVHADAHIFTSLPRSGTVRAARLLAEIGDCRARFPDPAALACLAGVAPSTRQSGKHKSVGFRWAVNKQLRDAVCDFAADSRRANVWAAKLYADAVARGKDHPHATRILARAWLYVIWHCWQDGVAYDPAEHGALQTLLRQDQSAAA

SEQ ID NO: 19240 - protein, 375 aa, unidentified
  source 1..375: note = protein_b598958
  REGION 9..159: note = RuvC_domain
  SITE 12: note = RuvC_P1
  SITE 63: note = RuvC_P2
  SITE 99: note = RuvC_P3
  SITE 101: note = RuvC_P4
  SITE 104: note = RuvC_P5
  REGION 226..308: note = Tnp_domain
  SITE 233: note = Tnp_P1
  SITE 263: note = Tnp_P2
  SITE 271: note = Tnp_P3
  SITE 272: note = Tnp_P4
  SITE 284: note = Tnp_P5
MGNCSEAFVAFDTSKLRNAVAIADGSRAGEVRFLGEIESTAAATAKLVGKLAAKYGRLTFCYEAGPTGYGLQRQIGSLGHACIVVAPSLIPKRPGDKVKTNRRDAVSLAKLLRAGELTPVWVPDRAHEAMRDLTRARETAMMDLRAKRQQISAFLLRQGRHYAASKKTWMKAHMSWLLSQKFDHPEQRLVFEEMMLAARQAQERLLRLEQAIAAAVPDWSLAEVVVALMAMRGMDLIAAATFLAEIGDLTRFQSAHELMAYLGLVPSEASTGDTIKRGPITKAGNRRARRMLVECAWSYQHPPRVGAGKQPKVDAAPPAVRDIAWKAQCRLNRRYRALIRRGKLKTVAITAVARELAGFIWAVSREVTTTPGVAK

SEQ ID NO: 19241 - protein, 257 aa, unidentified
  source 1..257: note = protein_d1e85fd
  REGION 1..134: note = RuvC_domain
  SITE 32: note = RuvC_P2
  SITE 73: note = RuvC_P3
  SITE 75: note = RuvC_P4
  SITE 78: note = RuvC_P5
  REGION 196..254: note = Tnp_domain
  SITE 204: note = Tnp_P1
  SITE 234: note = Tnp_P2
  SITE 242: note = Tnp_P3
  SITE 243: note = Tnp_P4
MLGSGPFTTDQAGYKAMRAYAKTWPDRVWAVEGANGVGRPLAQRLLEAGERVVDVPAKLAARIRLFDTGHNRKTDALDAHSIAIVAVRTQTLRVLQVDGELEALRMLTDRREALTRRRVQTVDRLQALLAELLPGQAKRDLTTGQAKAMLATVRPRDIAGKTRRRIAADELAELIAVETKIKKATAELKAIVLARGSTLMDLHGVGPVVAARILADVGDVTRFADRNRFASWTGTAPLDASSGEQNRHGSQGLGTGG

SEQ ID NO: 19242 - protein, 330 aa, unidentified
  source 1..330: note = protein_f1f882d
  REGION 4..147: note = RuvC_domain
  SITE 7: note = RuvC_P1
  SITE 52: note = RuvC_P2
  SITE 92: note = RuvC_P3
  SITE 94: note = RuvC_P4
  SITE 97: note = RuvC_P5
  REGION 191..278: note = Tnp_domain
  SITE 199: note = Tnp_P1
  SITE 229: note = Tnp_P2
  SITE 237: note = Tnp_P3
  SITE 238: note = Tnp_P4
  SITE 251: note = Tnp_P5
MTYVGIDVSKDTFTVAYSSNKNSKTKTFKNTVKGIHEFIQTISKEETHCVLEATGNYSALLVYLFSEAGITTSLENPLKIKNFARVMLSVTKTDDVDARLIAMYGEKMNPSPYKLKDESILVLKQKRTVLRQLKKQLVATRNLKGSMEVLPFVDSTCKRTIDKTIIFLEKQIKNMEENITSLATQEYKKQMDLLTSIKGIGVTLAAALIIATGGFTYFDNAKQFTRYLGLSPTYQQSGTSVNVKGHINRNGDSALRSQLYVAAFASLRCNSECKECYDRLRSNGKPGKVAVVAVANKLVRQAFAVVTKEKEYVDGFISEKPQKLQKHISA

SEQ ID NO: 19243 - protein, 320 aa, unidentified
  source 1..320: note = protein_c170742
  REGION 10..159: note = RuvC_domain
  SITE 13: note = RuvC_P1
  SITE 55: note = RuvC_P2
  SITE 95: note = RuvC_P3
  SITE 97: note = RuvC_P4
  SITE 100: note = RuvC_P5
  REGION 190..277: note = Tnp_domain
  SITE 198: note = Tnp_P1
  SITE 227: note = Tnp_P2
  SITE 235: note = Tnp_P3
  SITE 236: note = Tnp_P4
  SITE 248: note = Tnp_P5
MAMSVSRSVVGVDVAKVEVVVYQSDTDRLLPVSNDKPSLTKWLKTLPANSAIAIEATNIYHLDTVELAHAMGHIVYVIDGFRLSNYRKGVGGRAKTDASDARLLARYLKNEEEELRPWSPPPKVYTKLQSLLRRRATLVQARVSLTQSWNDEPLLKAAFKQQIAAMGRLDLLIQKKLLDVVKEAGLLEQVKRCQAVEGVGFLTATALTMAFQRGDFASGDAYIAFLGMDLRVSDSGQMNGRRKLTKKGDSEIRRLLHNAAMAASRSKTWKPFYERYLERGLKTTQVLVILARKLARVAFALMKNQSKYQPNPVFGASPQT

SEQ ID NO: 19244 - protein, 368 aa, unidentified
  source 1..368: note = protein_0329289
  REGION 13..161: note = RuvC_domain
  SITE 16: note = RuvC_P1
  SITE 65: note = RuvC_P2
  SITE 101: note = RuvC_P3
  SITE 103: note = RuvC_P4
  SITE 106: note = RuvC_P5
  REGION 233..316: note = Tnp_domain
  SITE 238: note = Tnp_P1
  SITE 269: note = Tnp_P2
  SITE 277: note = Tnp_P3
  SITE 278: note = Tnp_P4
  SITE 289: note = Tnp_P5
MSRIAEQAGPITGGVDTHADVHVAAVVDQVGRVLGTQAFPATAAGYRAALVWMRAHGELAKAGVEGTGSYGAGLARYLAGCGIEVAEVIRPNRQARRQRGKSDAADAVAAALAALSGEASGMPKSRDGAAESIRALKVARAGAVKGRTQAGNQLRDLVLTAPEPLRRQLAGQPSGRQVEVAARFRPGGPACPAEGTKAAMASVARRHQQLTAEITRLDTMLDELVRHAAPEGFLAKRGVATQVAAALLVTAGDNPGRVRKEASFAALCGASPVDASSGKQLRHRLNRGGDRQANTALWTIAMTRLACDPRTKAYAARRTAEGKTKKEITRCLKRYIAREIYKALCRPNGQKMPSTPQLKQDLSVRVLT

SEQ ID NO: 19245 - protein, 414 aa, unidentified
  source 1..414: note = protein_504a1ca
  REGION 15..171: note = RuvC_domain
  SITE 18: note = RuvC_P1
  SITE 67: note = RuvC_P2
  SITE 108: note = RuvC_P3
  SITE 110: note = RuvC_P4
  SITE 113: note = RuvC_P5
  REGION 280..366: note = Tnp_domain
  SITE 288: note = Tnp_P1
  SITE 319: note = Tnp_P2
  SITE 327: note = Tnp_P3
  SITE 328: note = Tnp_P4
MLSARKELKLGQVFVGHDWAEDHHDVELIDGAGRRLAKARLPEGAKGVSQFHELVARHAEEPSEVVIATETDRALFVGALIAAGYRVYAVNPMSVARYRERHSTSGAKSDPGDAHVLADLARTDSHNHRQVAGDSELAEAIKVLARAHQGMVWSRQRQLNQLRSALREFYPAALAAFDDLGHPDALAVLAIAPTPELGRGLSRSKIAAALRRGGRQRRVDERAVEVQAALRSEQLAAPALISKAMGASAKACIAVIAELTTQVAALEVELSEHFELHPDAKVVLSLPGLGTVLGARVLAEFGDAPGRYADGKSRRNYAGTSPVTKASGKSKVVLARFARNRRLADACYRWAFCAITASPGAKAFYDQRRAAGDTHNRALRALSNRLVGILHGCLRYGELYDEKRAWGHRSQLVA

SEQ ID NO: 19246 - protein, 309 aa, unidentified
  source 1..309: note = protein_9a8baf3
  REGION 1..71: note = RuvC_domain
  SITE 8: note = RuvC_P3
  SITE 10: note = RuvC_P4
  SITE 13: note = RuvC_P5
  REGION 177..263: note = Tnp_domain
  SITE 185: note = Tnp_P1
  SITE 215: note = Tnp_P2
  SITE 223: note = Tnp_P3
  SITE 224: note = Tnp_P4
  SITE 236: note = Tnp_P5
MYRGGEGKTDAKDARVIADQSRMRGTDLPVLHPDDVLITELQMLTAHRADLVADRTRTINRLRQQLIAVCPALERAAQLTQDRGWVVLLTRYQRPKAIRQSGVSRLTKMLGDAGVRNAATIAAAAVAAAKSQTVRLPGEDVAAGLVAELAGEVVALDDRIKSTDADIEDRFRRHPAAAVITSMPGMGFRLGAELLAAVGDPALIGSADQLAAWAGLAPVSKDSGKRTGRLHTPKRYSRRLRRVMYMSALTAIRCDPGSKAYYQRKRDEGKRPIPATICLARRRTNVLYALIRDNRTWQPDSPPITKSAA

SEQ ID NO: 19247 - protein, 363 aa, unidentified
  source 1..363: note = protein_b1c899a
  REGION 21..162: note = RuvC_domain
  SITE 24: note = RuvC_P1
  SITE 67: note = RuvC_P2
  SITE 102: note = RuvC_P3
  SITE 104: note = RuvC_P4
  SITE 107: note = RuvC_P5
  REGION 224..319: note = Tnp_domain
  SITE 232: note = Tnp_P1
  SITE 262: note = Tnp_P2
  SITE 270: note = Tnp_P3
  SITE 271: note = Tnp_P4
  SITE 283: note = Tnp_P5
MMLPPRRRNKGKAVMQKYTRIGIDLGKNYFQIHALPVGGGAAINRKLKRSKFLEFFKQIEPCEIGMEACGSAHYWARELERLGHKVSLMPPIYTKPYVKRGKNDAVDAAACCEAMSRPDMRFVPIKTAEQQATLTLHKTREVLMKQRNMSINALRGHLAEFGLIAPKGAGHVRELIARAENDATLPKAIQQVVRIMARHIDALGKEIESLEQKIGQAAKRNALCALLDKIPGIGPLIASAIVAFLPDARQFETGRDFSAWLGLTPRQKSTGGKQKLGSITKQGNRYLRKLLVLAGTSLLRRIGDRTGALAEWAQRLRSRKSARLTTVALANKLARIIWAMLSTGESFRQESFLRVKRTPPAAA

SEQ ID NO: 19248 - protein, 357 aa, unidentified
  source 1..357: note = protein_d77ad87
  REGION 6..147: note = RuvC_domain
  SITE 9: note = RuvC_P1
  SITE 52: note = RuvC_P2
  SITE 87: note = RuvC_P3
  SITE 89: note = RuvC_P4
  SITE 92: note = RuvC_P5
  REGION 211..297: note = Tnp_domain
  SITE 219: note = Tnp_P1
  SITE 249: note = Tnp_P2
  SITE 257: note = Tnp_P3
  SITE 258: note = Tnp_P4
  SITE 270: note = Tnp_P5
MNVHTIGIDLGKTVFHLVGLDQPGNVVVKRRPSRSQLLRQLANTPTCLIGMEACCGAHHLGAALVAQGHEVRLIPPQFVRPFVKANKNDYKDAEAIAEAVQRPTMRFVPIKTQDQLDLQALHRVRDRLVSRRTAVINQIRAFLLERGITFRRGRKYLQQRMPLILEDAEQNLSPLLRQLLDQLWQEWKVLASQIEAISGQIERIAQQDAVCQRLQQIPGVGPLVATATVAAIGNGSAFVRGRDFAAWLGLVPRQHSTGGKAKLLGISKRGNPYLRRLFIHGARSIFTQAHRDRLALNAWMNELEHRMHRNCAIVAVANKLARIAWAVLAKGANYHWPGTDPWEPREALDVPYGAGTQ

SEQ ID NO: 19249 - protein, 422 aa, unidentified
  source 1..422: note = protein_a2edc06
  REGION 4..157: note = RuvC_domain
  SITE 7: note = RuvC_P1
  SITE 57: note = RuvC_P2
  SITE 94: note = RuvC_P3
  SITE 96: note = RuvC_P4
  SITE 99: note = RuvC_P5
  REGION 285..371: note = Tnp_domain
  SITE 292: note = Tnp_P1
  SITE 323: note = Tnp_P2
  SITE 331: note = Tnp_P3
  SITE 332: note = Tnp_P4
  SITE 344: note = Tnp_P5
MLGIGIDWAEEFHDVAFGTVEKGVIEQFRIEHGPSGVATLIERALRLEPDPAEIRVVLETRHGLLVEALIDAGFAVVPVNPDLVARRRGPARKKDDAEDARICCLLALDRHAMLKTLIPHGDIGGELRAIGRDDERAARDQRRLLNRLRADLQTTYPAALTLAGSDLGAPTVLRLLERWPSQPELAEASREDLVAFARAGRHGWPDRFADQVEHALAVPGLPTRDYLVRAKAAGIRLAAVQLLALHDARRGWEKRMAELLLGGPRSGRDHTVKEPDPGKAFPGGDIYLSFPGLGDRLAARVAGEIGEHIAQFDTPNAQQCYAGRAPVTRRSGKNDFVVARRLAHNRYLGDAVHQWAFCSLTRSGWAREFYDTKITTGKSHHAAIRALGNRWLEILWHCLTKGVAYDENIHVTNRNRALGRAA

SEQ ID NO: 19250 - protein, 313 aa, unidentified
  source 1..313: note = protein_6afb6ea
  REGION 9..151: note = RuvC_domain
  SITE 12: note = RuvC_P1
  SITE 56: note = RuvC_P2
  SITE 94: note = RuvC_P3
  SITE 96: note = RuvC_P4
  SITE 99: note = RuvC_P5
  REGION 190..274: note = Tnp_domain
  SITE 198: note = Tnp_P1
  SITE 227: note = Tnp_P2
  SITE 235: note = Tnp_P3
  SITE 236: note = Tnp_P4
  SITE 247: note = Tnp_P5
MSNDLPQTLGIDISKATLDCHAHPASAARQFPNTTKGHKALIAWLEQWTVAQIAYEATGTYHRAIEQALAHIPCVRLNPERARRFAQATGTLAKTDRIDAALLARMAATVQPPIRPAPCANQVLLAELINARDGLVRDRTALKNRDQKLTIPFLKRQCRQRLDQIARHIEALDAEIAQIIAADPALVRRHNILTSIDGLGTLTANQLIAIMPELGSLDNKQAASLAGLAPVARQSGQWKGKSFIRGGRANVRKALYMPALVAARFNPNLKAKYRQLIAGGKPPKLAITAVMRKLIVTANALLKADRIWRKSLA

SEQ ID NO: 19251 - protein, 388 aa, unidentified
  source 1..388: note = protein_3eadc2c
  REGION 4..160: note = RuvC_domain
  SITE 7: note = RuvC_P1
  SITE 58: note = RuvC_P2
  SITE 98: note = RuvC_P3
  SITE 100: note = RuvC_P4
  SITE 103: note = RuvC_P5
  REGION 264..351: note = Tnp_domain
  SITE 272: note = Tnp_P1
  SITE 302: note = Tnp_P2
  SITE 310: note = Tnp_P3
  SITE 311: note = Tnp_P4
  SITE 324: note = Tnp_P5
MIYVGIDIAKLNHFDAASSSNGEILIEPFKFTNDYDGFYLLLSNLAPLDQNSSIIGLESTAHYGDNLVRFLISKGFKVCALNPIQTSSMRINNVRKTKTNKVDTFVIAKTLIMQDSLRFMPLKDLDYIDLKELSRFRQKLVKQCTRLKIQLTSYVDQVFPELQYFFKSGLHQNSVYALLKEAPTPAVIASMHMTHLAHLLEVASHGHFGKEKARELRVLAQKSVGVNDSSLSIQITHTIEQIELLDSQLFHSELEMANLVTCLHSVIMTIPGIGFINGGMILGKIGDIHRFSEPKKLLAFARLDPSVHQSGNFQAQRTKMSKRGSRVLRYALMNAAHNVVKNNATFKAYYDAKRAEGRTHYTALGHCAGKLVRVIWKMITDEVEFNLE

SEQ ID NO: 19252 - protein, 406 aa, unidentified
  source 1..406: note = protein_47ecc3a
  REGION 5..164: note = RuvC_domain
  SITE 8: note = RuvC_P1
  SITE 61: note = RuvC_P2
  SITE 101: note = RuvC_P3
  SITE 103: note = RuvC_P4
  SITE 106: note = RuvC_P5
  REGION 272..358: note = Tnp_domain
  SITE 280: note = Tnp_P1
  SITE 311: note = Tnp_P2
  SITE 319: note = Tnp_P3
  SITE 320: note = Tnp_P4
MRLFIGDDWAEDHHDVEVMDAGGRVLAKKRLPEGAAGMARLHELIGIQLGEDAQDAEVLVGIETDRGPWVAALVAAGYVVFPVNPLQASRYRERRGVSGAKSDGADAHMLADMVRTDWHQLRPAAGDSAEAGAIKALARMHKTLIWDRTRQLQRLRHQLREYFPAALEAFDDLAAPDALELLAKAPDPARAARLTRAQVSAALKRARRRNIADKTVAIISALRSAQLGQPPAVTSAYAATVRSLIAVITALEEQVTVLQVQVEAHFGQHPDAEIYLSQPGLGSLLGARVLAEFGDDPHRYASSKARKNYAGTSPITRASGKKKTVMARYIRNDRLIDALMAQAFTALNVSPGARAFYDQQRAGGAGHNDALRRLANRLVGILHGCLKTQTLYNEATAWSHRRKLAA

SEQ ID NO: 19253 - protein, 408 aa, unidentified
  source 1..408: note = protein_3b31563
  REGION 6..162: note = RuvC_domain
  SITE 9: note = RuvC_P1
  SITE 59: note = RuvC_P2
  SITE 99: note = RuvC_P3
  SITE 101: note = RuvC_P4
  SITE 104: note = RuvC_P5
  REGION 269..356: note = Tnp_domain
  SITE 277: note = Tnp_P1
  SITE 309: note = Tnp_P2
  SITE 317: note = Tnp_P3
  SITE 318: note = Tnp_P4
MKRYYMGVDWGDRLHQVYVGDEEGKKVREIKVQESPEGLAEIGRWLDERRAEGIELWAAIEKPAGRIVDFLLDHGVEVYPVNPKSLDRVRDRYRMSDSKSDAFDAYVLAEFLRTDQAHLRALRPNSEKAQELKMLSRDQRRVVRHKTRLLHQLTTTLKEYYPRPLEVFEDLETEIALDFLKQYPTPAHLSALKRKEFNRFATKQHHLSKQRCEQLWEKLQKPQLAVPEHVVRAKAQWVEVLIEQLRASIKAMKIYNHKVESFFASSPAAQVAKTLPGAKSGTLVAAIWAELGDAQGRWQSSRHLQAEAGAVPVTQASGKSRVVHFRFACNKHLRHTMYWFSFVSLNHSQWAKLYYRGQRDKGHSHHQALRALGAKWLKIIFVMWRDHKPYDENYHLANIALQKMRQAA

SEQ ID NO: 19254 - protein, 346 aa, unidentified
  source 1..346: note = protein_1a6aca5
  REGION 7..147: note = RuvC_domain
  SITE 10: note = RuvC_P1
  SITE 53: note = RuvC_P2
  SITE 88: note = RuvC_P3
  SITE 90: note = RuvC_P4
  SITE 93: note = RuvC_P5
  REGION 210..295: note = Tnp_domain
  SITE 218: note = Tnp_P1
  SITE 248: note = Tnp_P2
  SITE 256: note = Tnp_P3
  SITE 257: note = Tnp_P4
  SITE 269: note = Tnp_P5
MEHVIRIGMDTSKHIFQLHGVDAMERPVLRKRLRRQDVVGFFAKLAPTVVAIEACGGAHYWARVLAGLGHEPRLIAAQLVRPYVKRGKNDAVDADALCEAMSRPTMRFVPVKTAEQQAALMLAGTRERLIARRTQLSNVIRGYAAEFGLVMAQGLDKIEPLLARIAADQTMPALARELFAIHGKEYVHLQAELTMIETRLMAWHRNDACSRRLAQIPGVGPIGATLLVMKTPNPRAFRSGRQFAAWLGLTPKDHSTAGKTRLGAISRAGDQALRSLLVVGATAVIQQVRRGRGHPSPWLLALLARKPPKLAAVALANKIARTAWKLMVTGENYQSGRTPTALARIA

SEQ ID NO: 19255 - protein, 343 aa, unidentified
  source 1..343: note = protein_5bf0662
  REGION 4..157: note = RuvC_domain
  SITE 7: note = RuvC_P1
  SITE 55: note = RuvC_P2
  SITE 96: note = RuvC_P3
  SITE 98: note = RuvC_P4
  SITE 101: note = RuvC_P5
  REGION 219..304: note = Tnp_domain
  SITE 227: note = Tnp_P1
  SITE 257: note = Tnp_P2
  SITE 265: note = Tnp_P3
  SITE 266: note = Tnp_P4
  SITE 277: note = Tnp_P5
MITIGIDPHKRSLTAAALDSHSQLLGQRRLPVSAQAGRQLLAWAAAWPQRRWAVEGASGLGRPIAQLLIAAGEPVVDVPAKLAARARLLSTSSARKTDLADAGSVAAAALHHPQLRPVAPEDQTVVLRLLSDRRQDLVAERTRTLSRLHVLLAELHPGGAPRQLTAARAAAVLRRTRTITPVDLARKRIARELLADVRRLDRHIKTASQAIGTAVRDHGTTLTQVYGVGPILAAKLVGHSGDITRFPDRDHFASYTGTAPIEASSGDVRRHRLNRGGNRQLNTALHLIAVCQIRDPSPGQAYYRRKLAQAKTPEEARRSLKRHLSNVVHAHLVADHQRRTPPS

SEQ ID NO: 19256 - protein, 326 aa, unidentified
  source 1..326: note = protein_9ae8896
  REGION 4..160: note = RuvC_domain
  SITE 7: note = RuvC_P1
  SITE 61: note = RuvC_P2
  SITE 101: note = RuvC_P3
  SITE 103: note = RuvC_P4
  SITE 106: note = RuvC_P5
  REGION 201..287: note = Tnp_domain
  SITE 209: note = Tnp_P1
  SITE 238: note = Tnp_P2
  SITE 246: note = Tnp_P3
  SITE 247: note = Tnp_P4
  SITE 260: note = Tnp_P5
MNVIGIDVSKDKLDCLWLRDLATGKAKSKVVPNQPCGYQALLAWAEKSVGCPVAELWFVMEATGVYHEALAAALTRAGAQVAVVNPARIRDYAKALGQRSKNDQRDSYVITHYGLTQPLVRWQPEPPEVRELKALLARLEAVAKDAQREANRLEKATISQASKVVIDSIRGMLVALTAEKARLEKLIDEHIEGHPILKRDSALLKSIPGVGAVLSRYLMMTYHSREFQSAAQMAAYLGVVPVEYESGSSVRKRPRLSKAGSGVIRAKLYMPAVVAARCNPQARALYQRLLQKGKTKMAALGAVMRKLVHMCFGVLKHQQTYSPLVA

SEQ ID NO: 19257 - protein, 321 aa, unidentified
  source 1..321: note = protein_6bf0894
  REGION 5..149: note = RuvC_domain
  SITE 8: note = RuvC_P1
  SITE 49: note = RuvC_P2
  SITE 89: note = RuvC_P3
  SITE 91: note = RuvC_P4
  SITE 94: note = RuvC_P5
  REGION 190..277: note = Tnp_domain
  SITE 198: note = Tnp_P1
  SITE 228: note = Tnp_P2
  SITE 236: note = Tnp_P3
  SITE 237: note = Tnp_P4
  SITE 250: note = Tnp_P5
MDKFIGIDISKQTFDVSFSKKDQQVFKNTRKGFERFLKQVNDNTGLVMEASGPYYLSLANFMYDKGFKVYVVNPLKIKRFSQMNFNRAKTDKKDAEVIRGYALKMQEDLKGWKPESRQIKEMKQLHTALELLNKQLTQVRNQLGAFKDSGSICKELKTSYQSILKKLEKEKDKLESKMLKIGKEEYQQTLKSLTSIPGIGNKTAIMLIAMTSDFDKFEHYKELIAYVGFSPRIYQSGTSINGKGHICKMGKAQIRKLLYMCSWTAKKYNKGCVEMYERLKKKGKPERVIKIALANKLLKQAFAIAKNKTMFNESYQSKVCF

SEQ ID NO: 19258 - protein, 284 aa, unidentified
  source 1..284: note = protein_bfbf5df
  REGION 1..91: note = RuvC_domain
  SITE 37: note = RuvC_P3
  SITE 39: note = RuvC_P4
  SITE 42: note = RuvC_P5
  REGION 138..225: note = Tnp_domain
  SITE 146: note = Tnp_P1
  SITE 176: note = Tnp_P2
  SITE 184: note = Tnp_P3
  SITE 185: note = Tnp_P4
  SITE 198: note = Tnp_P5
MYYENLAHHLHKIKKRVHVVLPNTSKHYFSSLNIKTKTDAIDARILSQFGVERAHKAWSPPPAVLLQLRNLTRYHVQLQEQKTALGNIKHSKDCSHDIQNFILKSNKKLISDIDKEIARCIKEINRLVKSDVDLHRKTEKLATIKGIGMITMVTILAETMGFEQFRSAKQLVSYAGYDVVQRESGTSVKGKTRISKKGNRYIRNALYFPAMVACRHNSVLKEAYTRIIQKKPSKMVGQVAVQRKLLILMYTLWKNDTVFIENYKVSSPDPKTETTLDSSEAELL

SEQ ID NO: 19259 - protein, 406 aa, unidentified
  source 1..406: note = protein_f120d18
  REGION 4..163: note = RuvC_domain
  SITE 7: note = RuvC_P1
  SITE 60: note = RuvC_P2
  SITE 100: note = RuvC_P3
  SITE 102: note = RuvC_P4
  SITE 105: note = RuvC_P5
  REGION 271..357: note = Tnp_domain
  SITE 279: note = Tnp_P1
  SITE 310: note = Tnp_P2
  SITE 318: note = Tnp_P3
  SITE 319: note = Tnp_P4
MLFVGDDWAEDHHDVEVQDREGRVLKRARLPEGMAGMARFHDLVGRFVAADAEASEVGVCIETDRGPWVRALVAAGYRVFAVDPKQAARHREILGSSGAKSDKGDAHALADMLRTRHRQLREIAGDSQTAEAVKVVTRAHQSMVWERTRHMLRLRSALREYFPAALEAYKPLGLTSGAVLRLLNRAPTPQAAAKLTRSQIAAALKGRRDIDGRTAAIQQVLRGEHLGQGEIVTSAYAATVRSLVAVITTLNAEITALEGQVEAHFGRHPDAEVILSQPGLGVVLGARVLAEFGDAEGRYASAKARKNYAATSPITRQSGKMRTVHARFVHNDRLVDALHLQASCALLHDPHVRAYYDRLRARDIAHNAALRQVGNRLVGILHGCLKTRTLYDRATAWSHHNHDLAA

SEQ ID NO: 19260 - protein, 339 aa, unidentified
  source 1..339: note = protein_37463b1
  REGION 4..157: note = RuvC_domain
  SITE 7: note = RuvC_P1
  SITE 55: note = RuvC_P2
  SITE 96: note = RuvC_P3
  SITE 98: note = RuvC_P4
  SITE 101: note = RuvC_P5
  REGION 220..304: note = Tnp_domain
  SITE 228: note = Tnp_P1
  SITE 258: note = Tnp_P2
  SITE 266: note = Tnp_P3
  SITE 267: note = Tnp_P4
  SITE 278: note = Tnp_P5
MFMIGIDPHKGSHTAAAVDRSEAVIATVRVEADRDQRAHLLDWAASFTPRTWAVEGATGMGALLAQQLVAAGERVLDVPPKLSARVRLLDNGRIDKTDPNDARSAAIVAWRTPTLNEVFGVDEHRVVLRLLADRDHQITAQRTRTICWVHALLCLLIEGGATRSLKVDRAEKMLATVVAENPVTRARIVAAGEFLDEITALDTARTDARRRTIAAVKASASTVTDVYGIGPMMAAIIIGHTGDVRRFPTAGHFARHNGTAPIEASSGPNKRHRLNPRGDRQLNHAMHMAAVTQVGHDTPGRVYFLRKRAEGKSRKEAMRALKRQISDAVYNRLLADTNR

SEQ ID NO: 19261 - protein, 407 aa, unidentified
  source 1..407: note = protein_e25778b
  REGION 4..161: note = RuvC_domain
  SITE 7: note = RuvC_P1
  SITE 57: note = RuvC_P2
  SITE 98: note = RuvC_P3
  SITE 100: note = RuvC_P4
  SITE 103: note = RuvC_P5
  REGION 276..363: note = Tnp_domain
  SITE 284: note = Tnp_P1
  SITE 314: note = Tnp_P2
  SITE 322: note = Tnp_P3
  SITE 323: note = Tnp_P4
  SITE 336: note = Tnp_P5
MISVGIDISKEKFTVCALEQGSKIIWKPFDVSLNKTKVEEFLAKLEKIKEEVKITMEATGKYHLPILYELKDRGYFVTVINPLKMKQFCRALNFRKAKNDNIDARQIAEYGIMYWKELEDYKVDEENYRVLKELNRNYQHYMDLRINQMNFVDQTVHQTFPGIKKLIPHGSGDFSKDKLLDFLEKWWHKDLILEKTEEEFVEEYKTWAKEKRYHPTVNKAKAIYKLAEDSISTQPSHNSKIETNIREGINLIKQINQILNNILSQMIEISEPLEEYQEAKKFSGISDKLAVQIVAEFGNLSKFKNKKSLISFMGIDSPPYESGNFKADQRKISKRGNAILRKVGYQAMKCMMSAKNPENEIYNYMIKKEKEGKAKKVCKFAGLNKFLRIYYARVMKSKACKTELKVA

SEQ ID NO: 19262 - protein, 408 aa, unidentified
  source 1..408: note = protein_7d67056
  REGION 6..162: note = RuvC_domain
  SITE 9: note = RuvC_P1
  SITE 60: note = RuvC_P2
  SITE 99: note = RuvC_P3
  SITE 101: note = RuvC_P4
  SITE 104: note = RuvC_P5
  REGION 269..356: note = Tnp_domain
  SITE 277: note = Tnp_P1
  SITE 309: note = Tnp_P2
  SITE 317: note = Tnp_P3
  SITE 318: note = Tnp_P4
MKRYYVGVDWADRVHQFYVGDENGEKVAEMKVEETPEGMAELGRWLDERRAEGSELWAGIEKPHGWIVDFLLDHGVVVYPINPKAVDRARDRFRMSQSKSDSFDARVLSEFVRTDHAHLRPLQPNSEQAQELKMLSRDQQRMVRQKTRLLHQLKVTLKEYYPRPLEVFADLESRLAVDFLKHYPTPAALSELSHKQWNRFAKLKHHLGEARSRKLWEELKKPQLMVPQHVVRAKAQLVEVLLDQLEASLRAAEKYNEKVECFFASMPAAELVKKLPGAKSGTIVPMIWAELGDAPGRWESFRHLQAEAGVVPVTKASGKSRVVQFRFSCNKQLRHAAYWFSFVSLNRSEWANRYYRDQRAKGHNHHQALRALGAKWLKIIFVMWRDRKPYDENYHLANIARQRMRQAA

SEQ ID NO: 19263 - protein, 405 aa, unidentified
  source 1..405: note = protein_1970a98
  REGION 15..169: note = RuvC_domain
  SITE 18: note = RuvC_P1
  SITE 66: note = RuvC_P2
  SITE 106: note = RuvC_P3
  SITE 108: note = RuvC_P4
  SITE 111: note = RuvC_P5
  REGION 276..360: note = Tnp_domain
  SITE 284: note = Tnp_P1
  SITE 313: note = Tnp_P2
  SITE 321: note = Tnp_P3
  SITE 322: note = Tnp_P4
  SITE 334: note = Tnp_P5
MVTSIDRYDEVDVFVGLDVGKGEHHAVALDRTGKRLFDKALPNDERRLRAVLDRLTGHGVVLLVVDQPATIGALPVAVAQAAGALVGYLPGLAMRRIADLHPGEAKTDARDAAIIAETARTMPHTLRSIQVADEQVAELSMLCGFDDDLAGQVTQVSNRIRGLLTQIHPALERVLGPRLDHPAILDLLQRYPSPAAMRAAGEKRLGNRLIKNAPRKGRVWAAEIIAALDEQTVVVTGTDAAALVLPRLAEQLAALRRQRDEILVEVEKIVDQHPLQPVLTSMPGVGVRTTARLLTEVTTRTFPTPGHLAAYAGLAPVTRRSGTSIRGEHPSRRGNKILKRAMFLSAFAALHDPKSRAYYDRKVAQGKKHNQALIALARRRSDVLYAMLRDGTLYQPTTGEPALAA

SEQ ID NO: 19264 - protein, 309 aa, unidentified
  source 1..309: note = protein_cc07032
  REGION 8..150: note = RuvC_domain
  SITE 11: note = RuvC_P1
  SITE 54: note = RuvC_P2
  SITE 94: note = RuvC_P3
  SITE 96: note = RuvC_P4
  SITE 99: note = RuvC_P5
  REGION 190..274: note = Tnp_domain
  SITE 198: note = Tnp_P1
  SITE 227: note = Tnp_P2
  SITE 235: note = Tnp_P3
  SITE 236: note = Tnp_P4
  SITE 247: note = Tnp_P5
MKEELVYLGIDIAKSYLDAAIGSEKRRFFNDTVGHRQLIRWIKQTESAVQVICESSGGYERKLVQALARARVKVSLVQANRVRQFARAAGILAKTDRIDAEVLCEFGGVMRPQTVSAATLEQEHLRELESQRRHLTHLLVMEQNRGARVSDAAVVRLNRDLIAQIKKQIDKIDLLIKAHIEQSHELSAKVEKLTAISGVGLRTAALLLAQLPELGQLNRREVAALVGVAPFNRDSGKMRGKRTIYGGRRFVRHGLYMAALVAARHNPILRKFYLRLRAAGKPAKLALTATMRKLLIALNSTLKSDLSYA

SEQ ID NO: 19265 - protein, 305 aa, unidentified
  source 1..305: note = protein_fc2363f
  REGION 2..57: note = RuvC_domain
  REGION 167..267: note = Tnp_domain
  SITE 175: note = Tnp_P1
  SITE 205: note = Tnp_P2
  SITE 213: note = Tnp_P3
  SITE 214: note = Tnp_P4
  SITE 227: note = Tnp_P5
MLIISASLYYKEDLEPYKKRGIQLANLRHLTRQHDNITGMFVQTKLQFQAVLDQVFPDYSHVFGDLYSDVSLKIIHAFPTSEDILKANTEVLATKIKEFCNSRSIQWANKQAEKLMTAAAQNPFQKALYSSLALSLDMYINMLFEYKKHLSMLENEIDALSKSIEESKIIRSIPGIGEKIAATIVSEIGEIERFNHPKKLVAFAGLDPSVFESGTFKGTYNRITKKGSSRLRQALYMAVKCAIRDCRKQKTTDEILPRNKKLRAFYDKKREEGKPFRVAVIACANKLLHWIYALLKSKTSFQDLA

SEQ ID NO: 19266 - protein, 405 aa, unidentified
  source 1..405: note = protein_b844b80
  REGION 4..160: note = RuvC_domain
  SITE 7: note = RuvC_P1
  SITE 57: note = RuvC_P2
  SITE 97: note = RuvC_P3
  SITE 99: note = RuvC_P4
  SITE 102: note = RuvC_P5
  REGION 274..361: note = Tnp_domain
  SITE 282: note = Tnp_P1
  SITE 312: note = Tnp_P2
  SITE 320: note = Tnp_P3
  SITE 321: note = Tnp_P4
  SITE 334: note = Tnp_P5
MNAVGIDVSKGKSTVTIRRPGDVVLMPPCDIPHTQSAINALIEQIKSLDGETKACMEHTGRYYEPVANWLSDAGIFVSAVNPILIRDFGDDSLRAPKTDKADSKKIARYALDRWAKLKQYGSMDKTRSQLKTMNRQFGFYMDQKTSMKNNLIALLDQSYPGANDFFNSPARSDGTQKWVDFVYTYWHVDCVRSKSLQAFTEHYQKWCKRNGYNFSAAKAEKIYQSSSDLIAVFPKDDSTKTLIRQAVTMLNTASQTVESLRLKMDQTAATLPEYPVVMAMNGVGPSLGPQLMAEIGDVTRFTHRESLTAFAGVDPGKNDSGKRNQKSVRTSKKGSPSLRKTLFQIMDGLIKRSPVDDPVYAFMDKKRLEGKPYYVYMTAGANKFLRIYYGRVKEYLASLEGTKES

SEQ ID NO: 19267 - protein, 341 aa, unidentified
  source 1..341: note = protein_efd2047
  REGION 7..149: note = RuvC_domain
  SITE 10: note = RuvC_P1
  SITE 53: note = RuvC_P2
  SITE 88: note = RuvC_P3
  SITE 90: note = RuvC_P4
  SITE 93: note = RuvC_P5
  REGION 209..296: note = Tnp_domain
  SITE 217: note = Tnp_P1
  SITE 247: note = Tnp_P2
  SITE 255: note = Tnp_P3
  SITE 256: note = Tnp_P4
  SITE 268: note = Tnp_P5
MNNVALVGIDLGKHNFHLHGQDGAGRAVFRKKLSRLQMMRLFGNLPACTVVMEACAGAHFTARELNKLGHVAKLISPQFVRPIVKSNKNDFVDAEAICEAACRPSMRFVAPKTEAQQTLSVLHRMREALVRERTQATNQAHGFLLEFGICLPKGLATMKRLSSTLSEHSLPPQLTQLLMRLHQRFLYLDQQLKELESQLETQVVEDDLGSRLLSMPGVGPITASLLAVKMGDGWQYASSRDFSASLGLVPRQYSTGGRNTLLGISKRGDKHLRRLLVQCARVYLMRLEHQRGALATWARGLLIRRHSNVVACALANKLARIAWAIAVKHTRYEAEPDGLTA

SEQ ID NO: 19268 - protein, 343 aa, unidentified
  source 1..343: note = protein_50e1c5a
  REGION 5..151: note = RuvC_domain
  SITE 8: note = RuvC_P1
  SITE 53: note = RuvC_P2
  SITE 91: note = RuvC_P3
  SITE 93: note = RuvC_P4
  SITE 96: note = RuvC_P5
  REGION 211..296: note = Tnp_domain
  SITE 219: note = Tnp_P1
  SITE 249: note = Tnp_P2
  SITE 257: note = Tnp_P3
  SITE 258: note = Tnp_P4
  SITE 270: note = Tnp_P5
MDQYIGLDVSLKETAISIRQEGKRIWRGKCPSDPKLLSEMIRRHAPHAKRVVFETGPLSTWFYHALTAEGVPAICIEARHAQKILDETLNKTDANDADGLAHLAEAGFYKAVRVKAFDSMLTRTLVAARNQLLIVSTQLSNQIRGLMKTFGLIVPKGRGRIFDGNVRQFLDGNDGLAKIILPLLDAWCDIRRRAADLDHQLLVAARGSQETKLLMTIPGIGAVTAVSYVAAIEDPDNFKKSRSVGAWLGLTTRRYQSGEVDYDGHISRRGDNRLRGLLYEAAMVLLTRTSARTECCLKNWGLKLRDRLGFKRAAVAVARKLAVIMHSMLKTGEMFNASAGAPV

SEQ ID NO: 19269 - protein, 338 aa, unidentified
  source 1..338: note = protein_3e024a1
  REGION 2..144: note = RuvC_domain
  SITE 5: note = RuvC_P1
  SITE 48: note = RuvC_P2
  SITE 83: note = RuvC_P3
  SITE 85: note = RuvC_P4
  SITE 88: note = RuvC_P5
  REGION 206..291: note = Tnp_domain
  SITE 214: note = Tnp_P1
  SITE 244: note = Tnp_P2
  SITE 252: note = Tnp_P3
  SITE 253: note = Tnp_P4
  SITE 265: note = Tnp_P5
MIGVDLAKNSFQIHAATLNGQVKFRRKLARAQFLSFMAAQAPAVVVMEACGGAHHWARELSALGHEVRLIAPVYVKPFVKRQKNDAADAEAIVEAAQRPEMRFVEPKSTDQQARALLFRTREQLVHQRTELVNALRSYLYEYGHVLPIGIASLRRIEAILEDTDNDLPDLVRDICGDLLQQISEKTARIDALMKRIKSTAYDTETARRLQTMPGVGPVTALAIEAFAPPLESFRCGRDFAAWLGLVPRQNSTGGKQRLGRVTKAGQADIRRLLIVGAMSRLTWLGRKSIREGSWLARMLERKPKMLVAIALANKMARAIWAMLTRGEDYRNPAPAAAV

SEQ ID NO: 19270 - protein, 405 aa, unidentified
  source 1..405: note = protein_d2c9cfb
  REGION 10..162: note = RuvC_domain
  SITE 13: note = RuvC_P1
  SITE 61: note = RuvC_P2
  SITE 99: note = RuvC_P3
  SITE 101: note = RuvC_P4
  SITE 104: note = RuvC_P5
  REGION 269..355: note = Tnp_domain
  SITE 277: note = Tnp_P1
  SITE 308: note = Tnp_P2
  SITE 316: note = Tnp_P3
  SITE 317: note = Tnp_P4
  SITE 328: note = Tnp_P5
MDGATPARVAGLDWASRLHVVCVLDPDGQIRARFQVPHTGKDLRGLTRRLAKLEVGRVAIERPDGPVVQALLDTGFQVVVIPSRQVKHLRSRYGSAGNNHDRFDAYVLADVLRTDGHRLVPLRPDSPQTAGLRAVSRARKQLVDHRVALANELRANLEVAFPGAVSLFAEVDSPIALRFLGRFPSAERAAWLTQARLGGFLRRVGYCGRTTTAELYQRLVDAPDGLGGAEGEARAAVTGSLVATLRAVRAQIDELDGEIVERLAAHADGHIFTGLPRSGRVRAAALLAEIGDCRQRFPDSPSLECLAGAAPSTRQSGKHTTVTFRYACDKKLRQAVMDFAGDSRRANPWAAHIYDQARARGHRHPHAVRILARAWLRVIWRCWQDGTAYDPARHGAYQRLIAQGG

SEQ ID NO: 19271 - protein, 402 aa, unidentified
  source 1..402: note = protein_cec3880
  REGION 10..159: note = RuvC_domain
  SITE 13: note = RuvC_P1
  SITE 61: note = RuvC_P2
  SITE 99: note = RuvC_P3
  SITE 101: note = RuvC_P4
  SITE 104: note = RuvC_P5
  REGION 266..352: note = Tnp_domain
  SITE 274: note = Tnp_P1
  SITE 305: note = Tnp_P2
  SITE 313: note = Tnp_P3
  SITE 314: note = Tnp_P4
MDGATPARVAGLDWASRLHMVCVLDPDGQVRARFQVPHTGKDLRGLTRRLAKLAVGRVAIERPDGPVVQALLDAGFEVVVLPSRQVKHLRGRYASAGNKDDRFDAYVLADVLRTDGHRLHPLRPDSPETAGLRAVSPARKQLVDQLANQLRANLEVAFPGAAGLFAEVDSPIALRFLAQFPSAERAAWLTQARLGGFLRRVGYCGRVPTAELYQRLVHAPAGLQGSHGDACAAVTLSLVATLRAVRAQIEELDGEILERLAAHADGHIFTSLPRSGRVRAAALLAEIGDCRQRFPDPTALECLSGAAPSTRQSGTHTTVTFRFACDKKLRQAVMDFAGDSRHANPWAAHLYNQARARGHRHPHAVRILARAWLRVIWRCWQDGTAYDPARHGAYQRLIAKEA

SEQ ID NO: 19272 - protein, 342 aa, unidentified
  source 1..342: note = protein_16a2653
  REGION 6..148: note = RuvC_domain
  SITE 9: note = RuvC_P1
  SITE 52: note = RuvC_P2
  SITE 87: note = RuvC_P3
  SITE 89: note = RuvC_P4
  SITE 92: note = RuvC_P5
  REGION 210..296: note = Tnp_domain
  SITE 218: note = Tnp_P1
  SITE 248: note = Tnp_P2
  SITE 256: note = Tnp_P3
  SITE 257: note = Tnp_P4
  SITE 269: note = Tnp_P5
MKNIMIGVDLAKNVLQLHGASMTGEVLFRKKLSRGQFLRFMQSQPTAVVVMEACGSVHYWARELMSLGHEVKLIAPQYVRPFVKRQKNDAADAEAIVIAARQPEMRFVEPKTPDQQARAVLFRARERIVHQRTELVNALRAMLYEYGHVVPVGLGHVKRLEAILNDAASDLPDLVREEGHDLLAQIGEKTVRIDNKTQKLASLAKQTDVARRLQTMPGIGPMTAVAVEAFAPTMENFKSGRNFAAWLGLVPRQFSSGGKERLGKVSRAGQVDIRRLLIIGAMARVNWASRKATSTDPWMMRMLGRKPRMLVAIALANKMARMIWAMLTRQEDYRNPGLLAAA

SEQ ID NO: 19273 - protein, 340 aa, unidentified
  source 1..340: note = protein_29b5b97
  REGION 7..149: note = RuvC_domain
  SITE 10: note = RuvC_P1
  SITE 53: note = RuvC_P2
  SITE 88: note = RuvC_P3
  SITE 90: note = RuvC_P4
  SITE 93: note = RuvC_P5
  REGION 212..297: note = Tnp_domain
  SITE 220: note = Tnp_P1
  SITE 250: note = Tnp_P2
  SITE 258: note = Tnp_P3
  SITE 259: note = Tnp_P4
  SITE 271: note = Tnp_P5
MFSIFFCGVDLVKHHFSLHAVDDRGKVILHKSVLRAKLLTKLANIPAMRIGIKSCSDAHYWARAFTQLGHDTRIMAAKYDSPYRTKGKNDLNDAIAICEAVQRPNTRFVPVKSPERQAILAIHRMREHWVQERTALINRIRALLAEFGIVIPTGRAALHREIPLILEAAENGLPDIARAVLADCYEHLQTLNQRVEDTDQCFEMVTKASPNAQRILNVRGVGPQTATANIAAIGKGEQFHSRRDVTAWLGLIPKQYSTGGKPRLGRISKRGDKYLRTLLVHGARAVITNLGEKQDRLSVWGRNVLERRGMNRAIVALAAKNTRIIWALLHNQTEYQDYAA

SEQ ID NO: 19274 - protein, 392 aa, unidentified
  source 1..392: note = protein_d3c5a14
  REGION 4..163: note = RuvC_domain
  SITE 7: note = RuvC_P1
  SITE 60: note = RuvC_P2
  SITE 101: note = RuvC_P3
  SITE 103: note = RuvC_P4
  SITE 106: note = RuvC_P5
  REGION 268..353: note = Tnp_domain
  SITE 274: note = Tnp_P1
  SITE 304: note = Tnp_P2
  SITE 312: note = Tnp_P3
  SITE 313: note = Tnp_P4
  SITE 326: note = Tnp_P5
MIIVAVDVAKDKHDCFITNTDGEVLYDSFAIQNNQEGFEDLYQKICSVTDSSQNVKVGLEATGHYHLNLLGYLLDKGFPTCLINPLQTSLFRKSLSFRKTKTDPVDARAIARLLMSDRTLQPYSLTSYQNEELKSLTRYRADKVRERAKLKSSLSRLVVILFPELEKLVPTLHMPTVYDLLNEFPGASHIASAHLTRLSHLFSEASKGHYGKDDAIRIRNAARRSIGLVLPSKSLELQHTIAHIRFLDREIDEIESQIFALLDKHPPKMLDIPSMGPRMAAVIVAEIGDFRRFSSPDKLLAYAGLSPTTYQSGQLTSTYAKMEKRGSRYLRFALFNATKYVCVWDPTFRAYLAKKRAEGKHYNVAVSHAAKKLVRLIYHLETTGETYVSKAC

SEQ ID NO: 19275 - protein, 334 aa, unidentified
  source 1..334: note = protein_31e4112
  REGION 7..149: note = RuvC_domain
  SITE 10: note = RuvC_P1
  SITE 53: note = RuvC_P2
  SITE 88: note = RuvC_P3
  SITE 90: note = RuvC_P4
  SITE 93: note = RuvC_P5
  REGION 209..296: note = Tnp_domain
  SITE 217: note = Tnp_P1
  SITE 247: note = Tnp_P2
  SITE 255: note = Tnp_P3
  SITE 256: note = Tnp_P4
  SITE 268: note = Tnp_P5
MQNVALIGIDLGKHSFHIHCQDKSGNALLRKKFTRTKLMQFLATCPSSVVVMEACAGAHFMARRISDIGHEAKLISPQFVRPFVKSNKNDFIDAEAICEAASRPSMRFVQPRTETQQAMRALHRVRESLIRDKVKTTNQIHGFLLEFGISLPTGDAVIKRLSLVLAEHEIPEYLSRLLMKLHAHYLYLIEQITELESELNQSIKADATAQRIMTIPGVGPITASLLSSQLGDGKQFSCSRDFAASTGLVPRQYSTGGKSTLLGISKRGDKNLRRLLVQCARSFMMRLEHQQGRLAEWVRKQLDNKHSNIVACALANKLARIAWAITTQQKEYQA

SEQ ID NO: 19276 - protein, 343 aa, unidentified
  source 1..343: note = protein_ef760bf
  REGION 6..148: note = RuvC_domain
  SITE 9: note = RuvC_P1
  SITE 52: note = RuvC_P2
  SITE 87: note = RuvC_P3
  SITE 89: note = RuvC_P4
  SITE 92: note = RuvC_P5
  REGION 210..296: note = Tnp_domain
  SITE 218: note = Tnp_P1
  SITE 248: note = Tnp_P2
  SITE 256: note = Tnp_P3
  SITE 257: note = Tnp_P4
  SITE 269: note = Tnp_P5
MEIATIGLDLAKHWFQVHGIDGHGQTVVRRKLRRSEVIAYFESLAPCLVGMEACATAHHWARELAALGHEVRLMPPSYVKAYVKRNKNDAADAEAICEAVTRPSMRFVPVKTADQQSVLMLHRARNLLVRQRTMLVNALRAHMAEFGIVAAQGLRHVDDLTKELAHEQERLPELARSILQLVVEQLNGTMARVHEIEVQLVKWHRNSSVSRRLATVPGIGIIGATAIAATVTDPSLFRSGREFAAWLGMTPRQNSSGGKERLGRTSKRGDKYIRCLLVAGAVAILRHTRNRTTKDAAWVQGLLARRPAKVAAVALANKTARIAWAVMARGEGYRCRDVIGRAA

SEQ ID NO: 19277 - protein, 339 aa, unidentified
  source 1..339: note = protein_49ef377
  REGION 7..150: note = RuvC_domain
  SITE 10: note = RuvC_P1
  SITE 53: note = RuvC_P2
  SITE 89: note = RuvC_P3
  SITE 91: note = RuvC_P4
  SITE 94: note = RuvC_P5
  REGION 213..297: note = Tnp_domain
  SITE 221: note = Tnp_P1
  SITE 251: note = Tnp_P2
  SITE 259: note = Tnp_P3
  SITE 260: note = Tnp_P4
  SITE 272: note = Tnp_P5
MNEISMIGLDLAKRVFQVHCAGAVGELVLGRRLRRGQVLGFFARLSPCVVGMEACASAHYWARELEALGHEVRLVPPAYVKPFVKRGRKSDAADAAAILRAMASPGMCFVPVKSTEDQAGLMLHRARQLLVRQRTQLANALRAHLAELGIIAAQGETGLKELIAIVADGGDRRLPAAARTALTLLVAQWEAAGDGIARLDREIRAWHRASEASRRLATIPGIGPLAASAIVATVGDVSRFGRGRNFAAWLGLVPSQHSTGGKTVLGPITKMGDRYLRSLLVLGATAMLRRKGYGPWLVGLMARKKARQASVALANKMARIAWAILAHGGVYRQPEASAA

SEQ ID NO: 19278 - protein, 411 aa, unidentified
  source 1..411: note = protein_d744c29
  REGION 5..163: note = RuvC_domain
  SITE 8: note = RuvC_P1
  SITE 62: note = RuvC_P2
  SITE 102: note = RuvC_P3
  SITE 104: note = RuvC_P4
  SITE 107: note = RuvC_P5
  REGION 273..373: note = Tnp_domain
  SITE 281: note = Tnp_P1
  SITE 311: note = Tnp_P2
  SITE 319: note = Tnp_P3
  SITE 320: note = Tnp_P4
  SITE 333: note = Tnp_P5
MNPVVGLDVSKGESEVQGFLEKGKPYRKSFSIRHDLEGLELLLKFLKEIKDLTGQQPPVVLEATGHYHAPVVQYLEERNYLLIIVNPLISHRAKSSSLRKVKTDAVDAYRLCELYYKEELEPYKKRGIRLLNLRNLTRQHANITEIYVQTKLQFQAVLDQVFPEYKGVFGELYSVVSLLTLQKYPTSEDILAVSEDELANGIKGLYKHGSKKWVNEKVQKLKNAAARNPFQETLYKSHLLSMNMYIDMLLQYKEHLSKLETEIDTLAKEIEEYKIIQSIPGIGEKIAAPIISEIGEIDRFNHPKKLVAFAGVDPEVFESGKFKATLVRITKRGSSRLRHALYLAVRAGIRDARKKKTSDEIIPRNKRLREFYDKKRSEGKLYKVAVIACVNKLLHWIFAILKNKTTFQDIA

SEQ ID NO: 19279 - protein, 394 aa, unidentified
  source 1..394: note = protein_8967f9e
  REGION 4..161: note = RuvC_domain
  SITE 7: note = RuvC_P1
  SITE 60: note = RuvC_P2
  SITE 100: note = RuvC_P3
  SITE 102: note = RuvC_P4
  SITE 105: note = RuvC_P5
  REGION 267..353: note = Tnp_domain
  SITE 274: note = Tnp_P1
  SITE 304: note = Tnp_P2
  SITE 312: note = Tnp_P3
  SITE 313: note = Tnp_P4
  SITE 326: note = Tnp_P5
MFFVGIDIAKRKHEAVVIDEKGRIVQKPFHFPNSLSGYNSLISLVKRITSTRKDVVFGMESTSHYWLALYSHLIKDGYTTHVINPIQSDAFRGLFIRQAKTDPIDAVIIAEVIRFGKYSSTHFPQHKILALREMCRNRLYMVDSVSDLKRKITALIDQVFPEYEEIFSDIFLVSSIEVLYRYPTPKKLLHIRKDTLTNLLIKCSGGHFGSAKADEIMDAAKNSFGIDDPYDVYANLIKTYLKQIKFIQKNISEMDQKITEIMDEIGSPITSIPGIGVTLGAVILSEIGDISRFKSADKLAAFAGIDPSIKQSGDYSSIRNHMSKRGSPYLRRALWMACTPAVQFDPMFHAYYLKKRSEGKSHMKTMGHVAKKMICVIYAVLRDNKEYQPILTVA

SEQ ID NO: 19280 - protein, 330 aa, unidentified
  source 1..330: note = protein_4113291
  REGION 8..154: note = RuvC_domain
  SITE 11: note = RuvC_P1
  SITE 59: note = RuvC_P2
  SITE 97: note = RuvC_P3
  SITE 99: note = RuvC_P4
  SITE 102: note = RuvC_P5
  REGION 202..289: note = Tnp_domain
  SITE 210: note = Tnp_P1
  SITE 240: note = Tnp_P2
  SITE 248: note = Tnp_P3
  SITE 249: note = Tnp_P4
  SITE 262: note = Tnp_P5
MKSWNVILGVDVSKLTLDIACAERSIYIQIENNSKGFDVFKKWCKSHGIDLKETLVVLEYTGGYEYRFLQFCAAKSIPYCRVPGLEIKQSMGMVRGKSDKADSFRIAEYGEDKRNRLAPSKPLDDNVLKLKGLLSFRKRLVRDNAGLKSTEKERQHMYPVKQSDKIVRICTAKIKANEKFIVQVEQEIRELIKGNEKMLLNYRIITSIKGIGEVNGWMTIAYTENFTSFTDARAYGVYVGVIPFGHGSGTSIKGRPRVSHLANKELKSELNQAAKAAITYDKEMHDYAERKLKNKDYRLVLNNVKFKLILRMFSLVKRGEMYVENYNRAA

SEQ ID NO: 19281 - protein, 392 aa, unidentified
  source 1..392: note = protein_8cda852
  REGION 47..190: note = RuvC_domain
  SITE 50: note = RuvC_P1
  SITE 95: note = RuvC_P2
  SITE 130: note = RuvC_P3
  SITE 132: note = RuvC_P4
  SITE 135: note = RuvC_P5
  REGION 254..340: note = Tnp_domain
  SITE 262: note = Tnp_P1
  SITE 292: note = Tnp_P2
  SITE 300: note = Tnp_P3
  SITE 301: note = Tnp_P4
  SITE 313: note = Tnp_P5
MDSPPPRHHSATVAFEEANGSEGETMKKHSSKQGSLSSTDVELCTTICVDLAKQVFQLAGEDATGRVIYEDRIKSRQTFHDFLLKLPTTVAVLMECGPGAQAWARLLQAKGNPVRILPAQRVAEHRSGAKNDRNDCYAILRAGRDTSIASIPIKSTTALAIQALHRIRRGNIKRHTALGNQIRGLLLEHGVSMPQGDAAINKHVPQALEDASLPLPDLLRELLDELLMDWLSLGERIAVLSRRLEATAQEDKVAQRLITIRGVGPIIATAIVAKQTEPSRFASGRMYSAFFGIVPDQHSSGNKIRLCKMSKRGDGYIRSLLIQGAHAVLSQLRPDSDQPDDRRLLRWLSRLGRKEAAIRLANRNLRIIWALLQSDQVYQRKPNEKPEAAMSL

SEQ ID NO: 19282 - protein, 336 aa, unidentified
  source 1..336: note = protein_a7229a4
  REGION 6..147: note = RuvC_domain
  SITE 9: note = RuvC_P1
  SITE 52: note = RuvC_P2
  SITE 87: note = RuvC_P3
  SITE 89: note = RuvC_P4
  SITE 92: note = RuvC_P5
  REGION 209..299: note = Tnp_domain
  SITE 217: note = Tnp_P1
  SITE 247: note = Tnp_P2
  SITE 255: note = Tnp_P3
  SITE 256: note = Tnp_P4
  SITE 268: note = Tnp_P5
MTMTTIGLDLAKYVFQVHGVDAEGNVIEKRRLRRGQVIAYFASIPSCLVGMEACATAHFWGRELRKLGHEVRLMPPQYVKAYLKRGKNDAADAAAICEAVGRPSMRFVAIKAEEQQAVLVMHRARDLLVRQRTQLINALRGHAAEFGIIGAQGRWNIARLLVNIREGCAVPELARAIVEMLALQLDAISERIDEVDARINAWHKASPVSQRLATIPGIGPLIGTAIAATVADPAAFRSAREFAAWVGLTPRQKSTGGKQRLGRISRQGDQYIRRLLIIGAQTTLLRSKAARANPWIQSLLARCPRLKVAVALANKTARIAWALMAKEESYRQMASA

SEQ ID NO: 19283 - protein, 335 aa, unidentified
  source 1..335: note = protein_c76d413
  REGION 6..146: note = RuvC_domain
  SITE 9: note = RuvC_P1
  SITE 51: note = RuvC_P2
  SITE 86: note = RuvC_P3
  SITE 88: note = RuvC_P4
  SITE 91: note = RuvC_P5
  REGION 210..297: note = Tnp_domain
  SITE 218: note = Tnp_P1
  SITE 248: note = Tnp_P2
  SITE 256: note = Tnp_P3
  SITE 257: note = Tnp_P4
  SITE 269: note = Tnp_P5
MEPTTIAIDLAKRVFQIHFVDTDGTIHSKALKRAQMLPFFANRPAARIVMEACGSAHHWARQLSRLGHEVRLIAAQFVRPFVKSNKNDAADAAAIWEASQRPGMRFVAVKSAHQQAMLALHRMRQQLVRIRVMQVNQLRGLLYEFGVVLPQGRRPSIQAAQAAIATLADQFPAMLIDSLRDQLSRLHLLDEQIQRIEQRILEWRRGDPACRRISEIPGVGLLTATAAVSVIGQAKTFRSGREFAAYLGLVPRQNSSGGKVRLGGISKRGDVYLRTLLIHGARSVISSSKHLPERLRALLTRRPTNVVAVALANKMARTIWALLAYGRTYQAAPAQ

SEQ ID NO: 19284 - protein, 352 aa, unidentified
  source 1..352: note = protein_a3ee30f
  REGION 6..152: note = RuvC_domain
  SITE 9: note = RuvC_P1
  SITE 53: note = RuvC_P2
  SITE 91: note = RuvC_P3
  SITE 93: note = RuvC_P4
  SITE 96: note = RuvC_P5
  REGION 211..293: note = Tnp_domain
  SITE 219: note = Tnp_P1
  SITE 249: note = Tnp_P2
  SITE 257: note = Tnp_P3
  SITE 258: note = Tnp_P4
  SITE 270: note = Tnp_P5
MAIVTLGIDLAKNVFAVHGVDATGKPALVRPSVPRGKLLELIASMPRCLVGMEACSGAHHWARLFRAHGHTVKLMAPKFVSPYRLSGKKGKNDAADAAAICEAVTRPSMRFVPPKSLQQQSELLVHRARQGFVQQRTATINRIRGLLSEFGIVLPLKASTVRQEAMRQLEDLPGWANTVVGDLLSEVSRLDERIAQYDRHIEQIAKDSTPAGQLMQLPGVGPTTATALVAMIGRGQEFKCGRQLSAWLGLVPGQYSSGGKQRTGRITKAGDPYLRMLLIWAPDRCCNRPSTATIRSVDGPCSWRHVRATGRPSWPSPPRTRACAGPCWRGERVSSCRRDRRQLLFHRVMCKR

SEQ ID NO: 19285 - protein, 311 aa, unidentified
  source 1..311: note = protein_48613b6
  REGION 10..150: note = RuvC_domain
  SITE 13: note = RuvC_P1
  SITE 55: note = RuvC_P2
  SITE 95: note = RuvC_P3
  SITE 97: note = RuvC_P4
  SITE 100: note = RuvC_P5
  REGION 191..276: note = Tnp_domain
  SITE 198: note = Tnp_P1
  SITE 227: note = Tnp_P2
  SITE 235: note = Tnp_P3
  SITE 236: note = Tnp_P4
  SITE 248: note = Tnp_P5
MTILTSQTVVGIDIAKAEVVAYRADQQTIEPIKNDRATLKRWLKRLPAQSAIALEATNIYHLDTVELAHEMGHQVYVVDAYRVSHYRRGVGQRAKNDPCDARLLARYLESEQNKLRVWSPPPKAYSSLKSLLHRRATLIQNHSGLMLSWANEPLLKKVQTAQQKAFKQADQAIQKLLRKVSKEAGIEENIDRCKAIEGVGELTATGLAVTFMRGAFANSDAFIAFLGMDLAVDDSGKKKGVRHLTKKGDPEIRRLTYNAAMAACRSSKWKPFYESYLARGFSKTQALVALARKLCRVAFALMKNQSQYLSA

SEQ ID NO: 19286 - protein, 317 aa, unidentified
  source 1..317: note = protein_a537739
  REGION 9..152: note = RuvC_domain
  SITE 12: note = RuvC_P1
  SITE 56: note = RuvC_P2
  SITE 96: note = RuvC_P3
  SITE 98: note = RuvC_P4
  SITE 101: note = RuvC_P5
  REGION 191..275: note = Tnp_domain
  SITE 199: note = Tnp_P1
  SITE 228: note = Tnp_P2
  SITE 236: note = Tnp_P3
  SITE 237: note = Tnp_P4
  SITE 248: note = Tnp_P5
MTTPCEAYVGIDVGKTWLDVALWGNASVWRVPNDETGVAEIMVRVAELEPQLIAIEASGGYEQLLVQSLLVESLPVAVVNPTRVRALSKATGKLAKTDVIDARLIAEYAFKIQPEVLGPQEAQEIRLKALVSRREQLVAMRTTELNRLGTAHNSMRADIREHVEWMTARIQQLEAEIEQLVDSMPEWRVQAERLDSIPGVGLITATTVLAEMPELGKLDRQKIAALAGLAPFNRDSGQLRGKRRIFGGRKGIRRVLYMACMSAKRCNPVIRALFERLMKKGKVFKVAITACMRKMLTIMNAMLRDGANWRTLEHLSA

SEQ ID NO: 19287 - protein, 312 aa, unidentified
  source 1..312: note = protein_b954775
  REGION 1..80: note = RuvC_domain
  SITE 18: note = RuvC_P3
  SITE 20: note = RuvC_P4
  SITE 23: note = RuvC_P5
  REGION 186..273: note = Tnp_domain
  SITE 194: note = Tnp_P1
  SITE 225: note = Tnp_P2
  SITE 233: note = Tnp_P3
  SITE 234: note = Tnp_P4
  SITE 246: note = Tnp_P5
MNPLLISNFVKLQLRKTKTDKKDAWVIAQFLLLNRDSLSQTILSSDISDLRDLSRQRESLVDQMSSIKSEIKGLLTMTFPELEHIAGVFSKSMLRLLCQYPSAASIKQAKRSKIAKILIPGSYGKQTDVSVERILKAAQVSVGTSSATKEIILRQKASLLIQLGQHLQELTDILKELCEGKMQGNRDILTSMKGIGEKSAVNFLIEIGGEIKQFESHKKVIAMAGLDPAVYQSGKIDRKGKISKRGHRHLRRVIWIMTTKVIQFNERFKQYYLKRIKDGLPYKMAVLATAHKLIRVMFAMLKNKTLFDPRMN

SEQ ID NO: 19288 - protein, 403 aa, unidentified
  source 1..403: note = protein_990f062
  REGION 4..160: note = RuvC_domain
  SITE 7: note = RuvC_P1
  SITE 57: note = RuvC_P2
  SITE 97: note = RuvC_P3
  SITE 99: note = RuvC_P4
  SITE 102: note = RuvC_P5
  REGION 274..361: note = Tnp_domain
  SITE 282: note = Tnp_P1
  SITE 312: note = Tnp_P2
  SITE 320: note = Tnp_P3
  SITE 321: note = Tnp_P4
  SITE 334: note = Tnp_P5
MNAVGIDVSKGKSMVAILRPFGEIVYSPFEIKHTSHDINSLVDLIHSVNGESRVVMEHTGRYYEVLAHQLSEADIFVSTINPKLIKDFDNDSLRKVKSDKADAVKIARYALDKWLNLKQYSLMDELRNQLKTMNRQFGFYMKHKTAMKNNLIGILDQTYPGVNTYFDSPARSDGSQKWVDFASTYWHVDCVRKMSLNAFIDHYQNWCKRKKYNFSQSKAEEIYGKAKELVPVLPKDEITKRIIRQAVDQLNSASSTVEELRTLMNDTASKLPEYPIVMAMNGVGPSLGPQLIAEIGDVTRFTHKGAITAFAGVDPGVNESGAFSQKSVPTSKRGSADLRKTLFLVMDVLIKTMPQDDPVYQFLDKKRSQGKPYYVYMTAGANKFLRIYYGRVKEYLASLPQSE

SEQ ID NO: 19289 - protein, 411 aa, unidentified
  source 1..411: note = protein_57fd237
  REGION 5..164: note = RuvC_domain
  SITE 8: note = RuvC_P1
  SITE 61: note = RuvC_P2
  SITE 101: note = RuvC_P3
  SITE 103: note = RuvC_P4
  SITE 106: note = RuvC_P5
  REGION 272..358: note = Tnp_domain
  SITE 280: note = Tnp_P1
  SITE 311: note = Tnp_P2
  SITE 319: note = Tnp_P3
  SITE 320: note = Tnp_P4
MRLFVGDDWAEDHHDVEVMDEAGKVLAKRRLPEGVAGMTRLHELTGRFVPEDAADAEVVIGIETDRGPWVAALIAAGYTVYPVNPLQASRYRERHGVSGAKSDGGDAHMLADMVRTDSHQLRPAAGDSPAAGAIKVVARTHKTLIWDRTRAVQRLRHQLREYFPAALEAFEDLDAPDVLELLGKAPEPARAAKLTRAQISAALKRARRRNIKDKTDVILAALRGEHLGLPATLTAAYAATARSLIAVITTLNEQVKILEEQVREFFGRHPDAEIYQSQPGLAAILGARVLGEFGDDTGRYADAKARKNYGGTSPITRASGKKKVVAARFIHNDRLIDALMAWAFASLNASPGARAFYDQQRAKGLEHNDALRRLANRLVGILHGCLKTRTRYDEATAWGHRENLPQSSIAA

SEQ ID NO: 19290 - protein, 344 aa, unidentified
  source 1..344: note = protein_b6163a8
  REGION 7..150: note = RuvC_domain
  SITE 10: note = RuvC_P1
  SITE 55: note = RuvC_P2
  SITE 90: note = RuvC_P3
  SITE 92: note = RuvC_P4
  SITE 95: note = RuvC_P5
  REGION 214..301: note = Tnp_domain
  SITE 222: note = Tnp_P1
  SITE 252: note = Tnp_P2
  SITE 260: note = Tnp_P3
  SITE 261: note = Tnp_P4
  SITE 273: note = Tnp_P5
MNKLNRVGIDLAKNIFQLHGVNRTETSTWRRRLKRENWVKVLLNKVEPGCVIGMEACTGAHHWARLLQSKGFHVKLIAPQFVKPYVKSNKNDANDAEAICEAMSRPGMRFVTVKTVEQQEIQAVHRIRSELVGQRTAKGNQIRGLVAEYGLVAPQRMNHLRAAIPEWLEDAENGLSARFRRLLNGLWGDLNRLDERVSEMDKEIALIAERDPMAKRLQQLRGVGPMVATALLAAVGDGKQFANGRQMAASLGLTPKQHSSGGKERLLGISKRGDSYLRSLLIHGARSAIYAARGKEDRLSQWVISIATRRHPNVAAVALANKTARIAWAMLRHDTDYNPALAVA

SEQ ID NO: 19291 - protein, 400 aa, unidentified
  source 1..400: note = protein_0fe3303
  REGION 12..167: note = RuvC_domain
  SITE 15: note = RuvC_P1
  SITE 65: note = RuvC_P2
  SITE 105: note = RuvC_P3
  SITE 107: note = RuvC_P4
  SITE 110: note = RuvC_P5
  REGION 273..360: note = Tnp_domain
  SITE 281: note = Tnp_P1
  SITE 312: note = Tnp_P2
  SITE 320: note = Tnp_P3
  SITE 321: note = Tnp_P4
  SITE 333: note = Tnp_P5
MSGLKGNVNSYVGVDVSKDKFDACGITGEETKLFQFSTTMDRKGFEKLKGHLGTISVSSVLIGMESTASYHVNLFSYLVSEGYRVILINPLLISNYVKMQLRKTKTDKKDAVVIAHFLLANRDTLIQRVTPSLISDLRDLSRQRESLVNEMTSLKIEIKQLLNITFPELEHMVGIFTKSIIKLLQQYPSAFALRDADLNQLSQNLITDSYGHKREVFAAALIKAAHSSIGTNSPAKEMIIKQKIALLLHIEEALQEITTMLVEMARKLMEEDINIMTSIKGIRDKTAANFLVEMGGDINQFERSGKIIAMAGLDPAVYQSGNHEGKGRITKRGNRHLRRIIWMMTTKVIQYSDIFKVYYLKRRKEGLPYKKAVLATAHKLIRVIYAMLTQRTTFCPQVNL

SEQ ID NO: 19292 - protein, 290 aa, unidentified
  source 1..290: note = protein_50fe769
  REGION 2..105: note = RuvC_domain
  SITE 9: note = RuvC_P2
  SITE 44: note = RuvC_P3
  SITE 46: note = RuvC_P4
  SITE 49: note = RuvC_P5
  REGION 165..256: note = Tnp_domain
  SITE 173: note = Tnp_P1
  SITE 203: note = Tnp_P2
  SITE 211: note = Tnp_P3
  SITE 212: note = Tnp_P4
  SITE 224: note = Tnp_P5
MPATTIAMEACGGSHFMARKLAELGHFPKLISPQFVRPFVKSNKNDFVDAEAICEAASRPSMRFVQPRTESQQAMRALHRVRESLVQDKVKTTNQMHAFLLEFGISVPRGAAVISRLSTLLEDSSLPLYLSQLLLKLQQHYHYLVEQIKDLESQLKRKLDEDEVGQRLLSIPCVGTLTASTISTEIGDGKQYASSRDFAAATGLVPRQYSTGGRTTLLGISKRGNKKIRTLLVQCARVFIQKLEHQSGKLADWVRELLCRKSNFVVTCALANKLARIAWALTARQQTYEA

SEQ ID NO: 19293 - protein, 344 aa, unidentified
  source 1..344: note = protein_46a2894
  REGION 6..148: note = RuvC_domain
  SITE 9: note = RuvC_P1
  SITE 53: note = RuvC_P2
  SITE 88: note = RuvC_P3
  SITE 90: note = RuvC_P4
  SITE 93: note = RuvC_P5
  REGION 212..297: note = Tnp_domain
  SITE 220: note = Tnp_P1
  SITE 250: note = Tnp_P2
  SITE 258: note = Tnp_P3
  SITE 259: note = Tnp_P4
  SITE 271: note = Tnp_P5
MSIKVVGIDLAKNSFQVCVLSSSDSILSNRKVNRGSLLDTIRQLPEKTTIAMESCATSHHWARIFRGMGFKIALIPAQHVKPFVGRQKNDANDARAICEAFSRPDIHFVPVKSVEQQDLKSLRCVRARLVEQRTALANQIRGLSAEYGITFPLSIKALHSHLPLIIEDAENELSHVMRGLLHTLYSDLIDIGERIDELTCKITMLGQQHPRYDAIKSIPGFGPILTTALLSEVGTGNQFQNGRQFSAWCGLVPKQHSSGGKSSLGHLSKSGNRDLRTLLIHGARAVMRCGINRTDVMGDWLRSIIGRRGRAKAIVALANKLGRIAWRVLATDSSYNIHKAFKAV

SEQ ID NO: 19294 - protein, 341 aa, unidentified
  source 1..341: note = protein_bd78734
  REGION 6..148: note = RuvC_domain
  SITE 9: note = RuvC_P1
  SITE 52: note = RuvC_P2
  SITE 87: note = RuvC_P3
  SITE 89: note = RuvC_P4
  SITE 92: note = RuvC_P5
  REGION 211..295: note = Tnp_domain
  SITE 219: note = Tnp_P1
  SITE 249: note = Tnp_P2
  SITE 257: note = Tnp_P3
  SITE 258: note = Tnp_P4
  SITE 270: note = Tnp_P5
MKLNVVGVDIAKRVFQLHWVEADGGEIVSVQLKREKFLEHFANRVPCLIGMEACGGSQHWARALQKQGHEVKLMSARWVKPFVGGNKNDAADARAIWTAVQQPGIKTVAVKSEAQQAVLALHRMRQQLVKFRTAQINGLRGLLTEYGEVMPQGRAGIKRDIPGALQRLADRLPTVLIDTLREQFARLGELDAQILQIERRLQQWHQQDTDSQRIAAIPGVGLLTATAAVATMGDAKAFKSGREFAAWLGLVPRQSGTGGRVRLLGISKRGDKYLRTLLIHGARSVFTNSKAPPEWLTNLAQRRPKNVAVVALANKMARTIWALTAYERTYQQGYVCQPAAG

SEQ ID NO: 19295 - protein, 341 aa, unidentified
  source 1..341: note = protein_3eb1f2f
  REGION 7..149: note = RuvC_domain
  SITE 10: note = RuvC_P1
  SITE 53: note = RuvC_P2
  SITE 88: note = RuvC_P3
  SITE 90: note = RuvC_P4
  SITE 93: note = RuvC_P5
  REGION 211..296: note = Tnp_domain
  SITE 219: note = Tnp_P1
  SITE 249: note = Tnp_P2
  SITE 257: note = Tnp_P3
  SITE 258: note = Tnp_P4
  SITE 270: note = Tnp_P5
MEEVSTIGLDLAKHVFQAHGASASGAVVFRKKLRREQVLSFFASQPRCRVAMEACASAHYWARAIGDLGHEVRLIPPAYVKPFVKRQKNDMADAEAICEAAQRPTMRFVAVKSEAKQASTVIFRTRDLLVGQRTQIINALRGHMAEFGFIAPQGASHMGRLMAQVEDPSFTLPEGARSCLMRLVTMLRDLQEEVEALDREIAARAKSDDVARRLMTVPGIGPLIATAIEALAPPPETFRSGRDFAAWVGLTPVQKSTGGKQRLGRTSRMGERTLRRLLIIAASGVVRWAKRKGAPAGSWLARMLARKPPMLVIVALANKNARVAWALIAKGGIYRAPAVAA

SEQ ID NO: 19296 - protein, 298 aa, unidentified
  source 1..298: note = protein_0c4b7ea
  REGION 2..101: note = RuvC_domain
  SITE 7: note = RuvC_P2
  SITE 42: note = RuvC_P3
  SITE 44: note = RuvC_P4
  SITE 47: note = RuvC_P5
  REGION 166..251: note = Tnp_domain
  SITE 174: note = Tnp_P1
  SITE 204: note = Tnp_P2
  SITE 212: note = Tnp_P3
  SITE 213: note = Tnp_P4
  SITE 225: note = Tnp_P5
MQLIGMEACSGAHFLGKALRAQGHDVHLMPAQYVKPYGKTNKSDYIDAEAIAEAVQRRRMRFVPIQAEEQLDLQALHRVRERWVMRRTAVGSQIRSLLLERGLTLPQGRSHLGQMLPRILEDAELKLSGAFRVLLAQLKLELEQLAARIEQMDMVIQQEARENESCQRLPTIPGVGPVTATALIAAVGNGSAFGKGRDLSAWMGIVPGEYSTGGKQKLLGISKRGNKYLRRLFVQGARSVLQRRDKQAPGLSCWLAQLLARTHQNVAVVALANKLVRIAWAGLCRNENYRAPVLAATT

SEQ ID NO: 19297 - protein, 342 aa, unidentified
  source 1..342: note = protein_7b0f892
  REGION 7..149: note = RuvC_domain
  SITE 10: note = RuvC_P1
  SITE 53: note = RuvC_P2
  SITE 88: note = RuvC_P3
  SITE 90: note = RuvC_P4
  SITE 93: note = RuvC_P5
  REGION 211..296: note = Tnp_domain
  SITE 219: note = Tnp_P1
  SITE 249: note = Tnp_P2
  SITE 257: note = Tnp_P3
  SITE 258: note = Tnp_P4
  SITE 270: note = Tnp_P5
MNEVTLIGVDLAKSVFQAHGAAADGSTIFRKKLTRIQFAKFMAEQPPCVVAMEACGSAHYWAREMTKLGHTARLIAPIYVKPFVKRQKNDVADAEAIAEAASRPNMRFVPVKSEEQQARSALFRTRELLVRQRTQAANALRSHLAEFGIIVPKCMCNVKRLVTYVDDPQRLLPKSLRDLGLMYLLQIADLKHQIDQLEKSIKSEAQDSQISRRLQTMPGVGPIVAMAIEAFAPDMSNFKCGRNFSAWLGLVPRQHSTGGKQILGRTSKVGQKDIRRLLIIGAMSVIKATTIRGTVKGSWLERMLAKKPRMLVAIALANKMARSIWAMLTRGENYRNPMMAAA

SEQ ID NO: 19298 - protein, 342 aa, unidentified
  source 1..342: note = protein_674ae72
  REGION 6..148: note = RuvC_domain
  SITE 9: note = RuvC_P1
  SITE 52: note = RuvC_P2
  SITE 88: note = RuvC_P3
  SITE 90: note = RuvC_P4
  SITE 93: note = RuvC_P5
  REGION 209..295: note = Tnp_domain
  SITE 217: note = Tnp_P1
  SITE 247: note = Tnp_P2
  SITE 255: note = Tnp_P3
  SITE 256: note = Tnp_P4
  SITE 268: note = Tnp_P5
MAIVTIGLDLAKNVFQVHCVDESGLAVVRRQLRRAEVEAFFKAVPPCLVGIEACGSAHHWARLIAGLGHDVQLIAPTRVKAYVQRGKKNDANDAAAIAEAITRPHMTFVPVKSEEQQGMLMLHRSRDLLVRQRTMLINALRSHLAEFGLVAAQGWSKLRELVAGLGKAEIPDLARTALKLIAEQIDECDRRVEALEKQIVTWHRSNETSRNLATIPGIGPITASALAATITDPSAFDSGRKLAAWLGLVPRQSSTGGKDRLGGITKAGDSYIRRLLVIGATSVIRYAQAKAPGEAEWLKRLLDRKPARLASVALANKMARIAWSVLTRGEVFRENALSLKAA

SEQ ID NO: 19299 - protein, 360 aa, unidentified
  source 1..360: note = protein_0a48840
  REGION 6..163: note = RuvC_domain
  SITE 9: note = RuvC_P1
  SITE 68: note = RuvC_P2
  SITE 106: note = RuvC_P3
  SITE 108: note = RuvC_P4
  SITE 111: note = RuvC_P5
  REGION 213..299: note = Tnp_domain
  SITE 220: note = Tnp_P1
  SITE 250: note = Tnp_P2
  SITE 258: note = Tnp_P3
  SITE 259: note = Tnp_P4
  SITE 272: note = Tnp_P5
MKKIVIGIDISKEKIDATAIDVRDSQLGVVKLDYQVFENRPKGFRCMLAWARRLVKGIGLEEVLFCCETTGSYDRCLCDYLYGKGLDIWREGALQIKRSMGVRKGKDDKADSLMIAEYAMRHIDKAVIYETPDGAVRELKALFLYRHKLVQERTEKKVRASELKATAAMSDSMRFIMRDAMKSVRALDKSIRDCEKQILALIASNEEFRRNYGHIVSIPGISIVNATAFITYSNNFKGITTANKMASYWGCASFRLQSGISVDKKAYVKCYSSSLLKATLTQAAECAIKEHGIYRNYYLRLKKEGKPYGVIVNNVRNKLIHLAFSLVTNDKDYEENHELLREKRKREQRIHDKLEIINQK

SEQ ID NO: 19300 - protein, 433 aa, unidentified
  source 1..433: note = protein_10de86f
  REGION 26..185: note = RuvC_domain
  SITE 29: note = RuvC_P1
  SITE 84: note = RuvC_P2
  SITE 124: note = RuvC_P3
  SITE 126: note = RuvC_P4
  SITE 129: note = RuvC_P5
  REGION 295..395: note = Tnp_domain
  SITE 303: note = Tnp_P1
  SITE 333: note = Tnp_P2
  SITE 341: note = Tnp_P3
  SITE 342: note = Tnp_P4
  SITE 355: note = Tnp_P5
MTLQEALGDTDKLFYTGGDLIMNPVIGLDVSKGESQVQAFLDKGKPYRKSFSIKHNTDGLGSLLEFLHEVESSAGGHQPTVVLESTGHYHFPVIQFFEEQNYVYIVVNPLISYRAKSSSLRKVKTDAIDAYHLCELFYKEELEPYKKRGIQLLNLRNLTRQQESLAEISAQTKIQLHTLLDQVFPEYSGVFGSLYSKVSLLTLLAFPTSEVVLSVSEREITEKIASLCMSRSDAWANERAKKLREAALRNPFQNNLYQSNIFNLELLVKIVLQYQEHLSKIAVEIDALAKEIEEYHILQSIPGIGEKIAATIISEIGEIDRFNDAKKLVAFAGVDPSVFSSGKFTASVNRITKRGSSRLRHALYMAVQSGIRDARKKKTTDEIIARNKRLREFYDKKREEGKPFRVAVIACVNKLLHWIFALLKSRTTFQDTA

SEQ ID NO: 19301 - protein, 419 aa, unidentified
  source 1..419: note = protein_e37128e
  REGION 11..160: note = RuvC_domain
  SITE 14: note = RuvC_P1
  SITE 65: note = RuvC_P2
  SITE 100: note = RuvC_P3
  SITE 102: note = RuvC_P4
  SITE 105: note = RuvC_P5
  REGION 255..345: note = Tnp_domain
  SITE 263: note = Tnp_P1
  SITE 296: note = Tnp_P2
  SITE 304: note = Tnp_P3
  SITE 305: note = Tnp_P4
  SITE 316: note = Tnp_P5
MSFKILKNNCCGLDVHKTWIYACIGITDPNGRTEYKQARFSSFTKGLQELCDWLVKYNCNDVCMESTGKYWIPVFNVLEKNNLWVTLSHPKYTKPQKGNKTDRKDAKWICDLYMCGMVKPSFIPPADIRQLRDLVRYRFKLTCMITGEKNRAQNCLTVSNFKLDDVFSDVFGKSSRSITEQILQHPGETFDVAPFVDGRCKTPIEEIQAAVDGAISTEQAVKLRQCLNHIDELKKHQAEIEREIFRLSDKYESVLNLIRTVPGFDKNPLTAIQVLSEIGGDMSVFPTAKNLVSWAGCCPRNDQSNHKIKSTRISRAGFYFKPVLVQVANALIKSKKHPEFTTRYRRIKARRGHKKAVIAICRMILTAIWHILTDLKPYTPEGFLESRLVNDSKVLTTSQALNLLKQRGYVIKDDTVPVT

SEQ ID NO: 19302 - protein, 391 aa, unidentified
  source 1..391: note = protein_fa07c46
  REGION 48..189: note = RuvC_domain
  SITE 84: note = RuvC_P2
  SITE 123: note = RuvC_P3
  SITE 125: note = RuvC_P4
  SITE 128: note = RuvC_P5
  REGION 260..347: note = Tnp_domain
  SITE 268: note = Tnp_P1
  SITE 297: note = Tnp_P2
  SITE 305: note = Tnp_P3
  SITE 306: note = Tnp_P4
  SITE 318: note = Tnp_P5
MKKPKTKTVNDFSRCLDPLDMDATLIAVIEMSQSSWLVAGIVPGIERQPLKKLAIDEHALLNLLNRWRAEAEKQGHRISRIAVAFEAGHDGFWLARWLAAQGVEAHVIHASSVAVTREHRRAKTDRLDTELLKRAFLGWLRGERGHCKMVAVPTIAEEDAKRPSRERETLVGEASRLITRVKSAFVRLGIRGFNPKLKAAATRLETLRTPEGEPIPPNTLAALRRDLERHQIVKKQIREIEQTRLEHLAQAPAKGPHAMVRLLARVVGIGVETADMLVQEVLSRNMRDRRAVARYAGLTGSPDESGAKRREKGLARSGNARVRRGMIQLAWRFLMFQKDSALAEWYRQRTANAPSMRKTFVVALARKLLIALWRLARDGVVPEGVRLRAAA

SEQ ID NO: 19303 - protein, 308 aa, unidentified
  source 1..308: note = protein_6ce296b
  REGION 9..157: note = RuvC_domain
  SITE 12: note = RuvC_P1
  SITE 63: note = RuvC_P2
  SITE 97: note = RuvC_P3
  SITE 99: note = RuvC_P4
  SITE 102: note = RuvC_P5
  REGION 259..308: note = Tnp_domain
  SITE 267: note = Tnp_P1
  SITE 298: note = Tnp_P2
  SITE 306: note = Tnp_P3
  SITE 307: note = Tnp_P4
MKVTYPTCCGIDVHKSFLVATIIKTTGGIEPSYQKKRFSTFNNSILDFKSWLLENECHDVCMESTGKYWVPVFNLLEDQINVTIANPKWVKAVKGNKDDTKDSKWIGNLFRLGLVKGSFIPCKSIRILREYTRYRYKLVSCRSSEKNRYQNALTVCNVALDSVVSDIFGKSSSFIIDYLLEQSGTTINHEEIASKLLKRLKSKEDAVIESIEGYQMTDAQKYRMRLVRAHIDYITAEINDVDKQIESLISSVPDYVKAIQFLTTIPGVKHDSAITIISEIGIDMSQFCNSKRLCCWAGLTPGNNESAG

SEQ ID NO: 19304 - protein, 277 aa, unidentified
  source 1..277: note = protein_3d58024
  REGION 1..110: note = RuvC_domain
  SITE 16: note = RuvC_P2
  SITE 56: note = RuvC_P3
  SITE 58: note = RuvC_P4
  SITE 61: note = RuvC_P5
  REGION 151..236: note = Tnp_domain
  SITE 159: note = Tnp_P1
  SITE 188: note = Tnp_P2
  SITE 196: note = Tnp_P3
  SITE 197: note = Tnp_P4
  SITE 208: note = Tnp_P5
MAAELSKAGVTRVGIEATGGYERGVVGHLRAKGFSVVVLQPIQVRAYARVHLRRAKNDALDAVLIAACAATINRPSIEPDERLAKLADYLTFVEQVEEDMVRLKTRLEHIDEPRLRRIVTADIARLKARRAAELLRIVEELRIHGDLARRLDLVLSVPGIGERTALALIIRMPELGRISREEAAALAGLAPFDDDSGTHKGHKHIAGGRGRLRRSLYAAALPAAFRWNKALIDLHARLIARGKAHNAALVACARKLLIYANTVIARGTPWIQNPAAT

SEQ ID NO: 19305 - protein, 319 aa, unidentified
  source 1..319: note = protein_7f8452f
  REGION 5..152: note = RuvC_domain
  SITE 8: note = RuvC_P1
  SITE 55: note = RuvC_P2
  SITE 95: note = RuvC_P3
  SITE 97: note = RuvC_P4
  SITE 100: note = RuvC_P5
  REGION 199..271: note = Tnp_domain
  SITE 244: note = Tnp_P5
MSVHVGLDVGSRTTAMGWRDKGRSAGAWEIAQTPKGRKAAVKKLLALKPLSVVMEATGIYYLDLAMELSAAGLPVSVINPKSSRNFAKLMLQHSKTDAIDAQLLAEYGERMTPRLWSPPSLAQLELRAIGRHINRLTCHRTRAKNELHALQATETTSAMLIEDEEDAIEMFGKRIERFRLAGRVIIANSPTLQSQFNHMVAAPGMGDVSTFAVLAELTTLPVTLKSSQVSRTSIDKPGRLSKCGNAYLRSAMFMPAMCAVRCDPYVKAFYEALVGRGKRKIQAICAVMRKYLTGLWACMHAGEDFDTAKLFSEKHLIKA

SEQ ID NO: 19306 - protein, 392 aa, unidentified
  source 1..392: note = protein_d41b4cf
  REGION 4..161: note = RuvC_domain
  SITE 7: note = RuvC_P1
  SITE 59: note = RuvC_P2
  SITE 100: note = RuvC_P3
  SITE 102: note = RuvC_P4
  SITE 105: note = RuvC_P5
  REGION 266..352: note = Tnp_domain
  SITE 274: note = Tnp_P1
  SITE 304: note = Tnp_P2
  SITE 312: note = Tnp_P3
  SITE 313: note = Tnp_P4
  SITE 325: note = Tnp_P5
MIFVGIDVAKSHHDIAMIDDSGTIILQHLKIQNNFSGFATLQSKLNELAIDQSIYIAMEATGHYSLNILMFLQSLGYPTIAYNPFLIKEFIKATSLRKTKTDRADAISIAKKLASDTAPEVFTISKEMQELKFLSRHRNRLTARRAELKGQYVRLLDISFPELVSIIGKNNLHAHYVSDLLIKYPSHTKLARCKITSLINIIHIKHGNQFEYAQKIKTLAKHSIGLESKANELELIQTINMIQLLSTQILEVDQEINRLMITMEDAHIITSIAGISNRLGSVILAEINNIHNFKSAEQLLAFAGLEPSIYQSGQVNATGKMVKRGSAALRWALIQAAEYATRWSPTMRAYLHKKRDEGKHYFVAISHVAKKLVRIIFHLLTNHLTYNESKLL

SEQ ID NO: 19307 - protein, 342 aa, unidentified
  source 1..342: note = protein_19ace54
  REGION 7..148: note = RuvC_domain
  SITE 10: note = RuvC_P1
  SITE 53: note = RuvC_P2
  SITE 88: note = RuvC_P3
  SITE 90: note = RuvC_P4
  SITE 93: note = RuvC_P5
  REGION 211..301: note = Tnp_domain
  SITE 219: note = Tnp_P1
  SITE 249: note = Tnp_P2
  SITE 257: note = Tnp_P3
  SITE 258: note = Tnp_P4
  SITE 270: note = Tnp_P5
MKEVSIVGLDLAKRVFQVHAAGSDGSVVLRRKLSRSHVLAFFTELPKCIVAMEACATAHYWAREIGKLGHDVRLIPPAYVKPFVKRQKNDAADAEAIVEAATRPSMRFVASKTESQQACSMIFRTRDLFFRQRTQLINALRAHLAEHGVIAPQGTANLPLLTQIIEEDRSGLELIVVETARLYLEQIEALSSRIIGLEKALKSEAKRSENTARLMSMPGMGPITAMAIEAFAPTMTTFRKSRDFAAWLGLVPRQHSSGGKQVLGRTSKMGQRDIRRLLIIGAMTVIRWACRKAPPENSWLARMLARKPRMLVAIALANKMARTIWAMMTKNEIYRNSSPAAA

SEQ ID NO: 19308 - protein, 344 aa, unidentified
  source 1..344: note = protein_4ccce44
  REGION 6..163: note = RuvC_domain
  SITE 9: note = RuvC_P1
  SITE 63: note = RuvC_P2
  SITE 101: note = RuvC_P3
  SITE 103: note = RuvC_P4
  SITE 106: note = RuvC_P5
  REGION 208..295: note = Tnp_domain
  SITE 215: note = Tnp_P1
  SITE 246: note = Tnp_P2
  SITE 254: note = Tnp_P3
  SITE 255: note = Tnp_P4
  SITE 268: note = Tnp_P5
MKKVLIGIDFSKEKFDVAIIVKSTSTQEHALFDNKVSGYRKMIKWINSVVEDIPCSSWLFCGETTGGYSRMMSDWLYAQGYDVWIENALVIKRTFPLKRLKNDTVDAFMIAEYALRFEDRVQLYEPMNQALTELREIFLYRHHLVRHRCSFEVRRIEKRFTQQKSVNKNVISQSARHIITEINKEIAKCDEKIKEYIESDDQLSSIFAIVTSMPGIGTINAVSLMVYTNNFTKFAYNPRKIACYYGIAPFGRDSGTSVHTDPRVGFIANKMLKSLLTQAALTSVRTCPQIAKYYQRLIERGKKPMVALNNVKNKMIAIITAMVRTGCMYQPDNICLATQSVNVK

SEQ ID NO: 19309 - protein, 325 aa, unidentified
  source 1..325: note = protein_7804ee1
  REGION 4..149: note = RuvC_domain
  SITE 7: note = RuvC_P1
  SITE 52: note = RuvC_P2
  SITE 92: note = RuvC_P3
  SITE 94: note = RuvC_P4
  SITE 97: note = RuvC_P5
  REGION 191..278: note = Tnp_domain
  SITE 199: note = Tnp_P1
  SITE 229: note = Tnp_P2
  SITE 237: note = Tnp_P3
  SITE 238: note = Tnp_P4
  SITE 251: note = Tnp_P5
MTYVGIDISKSSFVAAFPQEKGYNTETFANDAKGIRKFIGKLSADTHHCVMEATGNYGLLLLYLLDKAGITASLVNPKKIKNYSRMIMSVTKTDDMDARLIAEFGEKMTPAPYKLPSETLMLLKQKKTVIRQLQKQLTATRNLQSSLEPLPVKDKKCLASLKQTIAFTEKQIRHLEEELVQTAGSVFEKQLKALTSIKGIGVTLATALIIATGGFSSFDNAKQLSRYIGICPTIEQSGSSINIRGHINRNGDANLRSMLYIAAWSASQHNKACKECYQRLRQRGKSGKLAMIAVANKLVRQAFAVATSNTSYIDGFVSTKPDTAV

SEQ ID NO: 19310 - protein, 316 aa, unidentified
  source 1..316: note = protein_b183aef
  REGION 5..151: note = RuvC_domain
  SITE 8: note = RuvC_P1
  SITE 52: note = RuvC_P2
  SITE 92: note = RuvC_P3
  SITE 94: note = RuvC_P4
  SITE 97: note = RuvC_P5
  REGION 186..270: note = Tnp_domain
  SITE 194: note = Tnp_P1
  SITE 223: note = Tnp_P2
  SITE 231: note = Tnp_P3
  SITE 232: note = Tnp_P4
  SITE 243: note = Tnp_P5
MASFLGIDVSSLSLDVAVRPQGIKMHLSNDPTGFEALLESLRKLSIQRVLLEATGGYERDVMRFLQDAGYKVIRVNPRRARSFADSLGIKAKTDAIDAEVLAHYAEVIPDQPSLQISPERALLRELLQQRDRLVQQRDDDLRRLKQVQSTAVANYLNANLKHFKAQIKLVEHEIEQQTAMLNDERVTQLIKVKGIGMVTAGKLIALLPELGRVESREIASLVGVAPFNHDSGKSMGKRSISGGRFEVRRSLYMACLVAMKYNPALKARYQSLRERGKLPKVAIVACMRTFIVRLNAMLRTGTSWLDLVLPQPESTT

SEQ ID NO: 19311 - protein, 349 aa, unidentified
  source 1..349: note = protein_decaff4
  REGION 4..158: note = RuvC_domain
  SITE 7: note = RuvC_P1
  SITE 57: note = RuvC_P2
  SITE 97: note = RuvC_P3
  SITE 99: note = RuvC_P4
  SITE 102: note = RuvC_P5
  REGION 221..306: note = Tnp_domain
  SITE 229: note = Tnp_P1
  SITE 259: note = Tnp_P2
  SITE 267: note = Tnp_P3
  SITE 268: note = Tnp_P4
  SITE 279: note = Tnp_P5
MIVVGIDPHKQTHTAVAVDGATDCVLAELTVRARSQGFERLVAWARRLGEERLFAVEDGRHVSGALERHLIARGERSVRVPPRMMGESRRTDRIWGKSDPVDATAVARAALRHPDLPEATLAGAEREIGLLVAHRESLVRERTDKICKLRWLLHDIDPELAPVPRSLNRFVTLDRLALTLEKMARGIDVEICLDLIARCREITTRANELERAITALVLTHAPALLQIPGCAALTAAKIVAETAQVGRFPTEGHFARYAGTAPIPASSGARHRQRFNRRGNRQLNTAVHRIAVTQIRMHEPAKDYIARKRAEGKTKTEAIRALKRHITRVVFKTLTSMNQPTDRLTAVAA

SEQ ID NO: 19312 - protein, 372 aa, unidentified
  source 1..372: note = protein_092f712
  REGION 1..136: note = RuvC_domain
  SITE 34: note = RuvC_P2
  SITE 74: note = RuvC_P3
  SITE 76: note = RuvC_P4
  SITE 79: note = RuvC_P5
  REGION 241..328: note = Tnp_domain
  SITE 249: note = Tnp_P1
  SITE 280: note = Tnp_P2
  SITE 288: note = Tnp_P3
  SITE 289: note = Tnp_P4
  SITE 301: note = Tnp_P5
MLSRRVANDEPELLKLIGDVLDLADGRKVTWALDMAGGGPGLLIALLVNHGQELVYIPGIVVNRASDSYRGAGKTDARDARVIADQARMRRDLQPIRPGDDAGIELKLLTERRVDLVADRTRTTNRLKGLLNSMFPALERALDIGTTGALLLLTGYQTPAAIRRTGLRRLTTWLRNRKARNPEALAAKAVEAAERQHTAVAGESAIAKMVHTLAKEVMVLNEKIAETDKLIEGRFREHELAEVIQSMPGIGAVLGAELLVGIGGSLDAFPTADRLAAFAGVTPAPRDSGKVVGNLHRPQRYHRRLQRVFYTSALVSIQFDPNSRKFYDRKRAEGKRHVQAVLALARRRVNVLWALIRDRRCYQVTPPVATAA

SEQ ID NO: 19313 - protein, 337 aa, unidentified
  source 1..337: note = protein_f814aac
  REGION 4..158: note = RuvC_domain
  SITE 7: note = RuvC_P1
  SITE 56: note = RuvC_P2
  SITE 97: note = RuvC_P3
  SITE 99: note = RuvC_P4
  SITE 102: note = RuvC_P5
  REGION 220..285: note = Tnp_domain
  SITE 228: note = Tnp_P1
  SITE 258: note = Tnp_P2
  SITE 266: note = Tnp_P3
  SITE 267: note = Tnp_P4
MIVIGIDPHKSSHTATAVDPATNTDLGSIRIDATLTGYRTLIAWAKSWPTRQWAVENAEGLGHHLAQWLLGPGETVLDIPTTATARIRELSRGGRRKNDRIDAAAAACVAALQGDARPVDPEGPTDILALLDERRTNMSHSRTRLVNQLHALLRQLFAGGAPTSLTAASATTLLRGFRARSEVDRTRVGLCRDLIADIRRLDDQLAANEKQMAHTLDEHGTRLREVDGIGAVTAARLIGRTGRASRFPTAAAYANYNGSAPVQIATASPATATDNSTARSTPSRWSRSGCPPAPAERTTTRKSMKANRPQRRGAPSNGTYPITSGASCSPTRNVAAD

SEQ ID NO: 19314 - protein, 428 aa, unidentified
  source 1..428: note = protein_f57495d
  REGION 19..171: note = RuvC_domain
  SITE 22: note = RuvC_P1
  SITE 70: note = RuvC_P2
  SITE 108: note = RuvC_P3
  SITE 110: note = RuvC_P4
  SITE 113: note = RuvC_P5
  REGION 279..365: note = Tnp_domain
  SITE 287: note = Tnp_P1
  SITE 318: note = Tnp_P2
  SITE 326: note = Tnp_P3
  SITE 327: note = Tnp_P4
  SITE 338: note = Tnp_P5
MKYALTQVLPDVPAGRVFAGIDWATADHVACVVDMAGRVIDRFSAAHDKAGIAELITRLRRAGVSEVAIERGDGVLVAALLAAGLTVVVIASRQVKNLRSRYGSAGAKDDRFDAFVLADTLRTDRARLRPLIPDAPATIALRAAVRARKNLVTHRVAACSQLHAHLAVAFPAAIGLFRDLDSPISLAFLARFGSQDAAGQLDEQAIAGWLKTIPVRGRPAPVSVLCARLRAAPDGVTGQEGAALAGVTAALTATVAMLAAQVKTLETGIGIQLAAHPDAHIFTSLPRTRTLRAARLLAEIGDCRARFPDPESLAALAGVAPVTRQSGTHTSRTFRWAVSRQLRDAVCDFADGSRHASAWAAAIYDAARARGKDHPHAVRILARAWIYIIWRCWQEGTAYDPAKHNALQRILDQQQAAPAVATGSGDIR

SEQ ID NO: 19315 - protein, 411 aa, unidentified
  source 1..411: note = protein_561755e
  REGION 9..168: note = RuvC_domain
  SITE 12: note = RuvC_P1
  SITE 65: note = RuvC_P2
  SITE 105: note = RuvC_P3
  SITE 107: note = RuvC_P4
  SITE 110: note = RuvC_P5
  REGION 276..362: note = Tnp_domain
  SITE 284: note = Tnp_P1
  SITE 315: note = Tnp_P2
  SITE 323: note = Tnp_P3
  SITE 324: note = Tnp_P4
MREVAVLFAGDDWSEDHHDVEVQDESGRVLGRARLGEGVAGIARFHDLIARFADPDAGPDHVAVGIETDRGPWVAALIAAGYVVYAVNPRQAARYRERHGMSGAKSDAGDAHVLADTVRTDSHQLRVVAGDSGQAQAVKVVARAHQALIWERTRNVLRLRSALREFFPGALEAFDDLTAPDALELLARAPDPAGAARLTVTQITAALKRARRRGGAEKAKQVQAALRSQQLAQPEVVAAAYAATVRAAVAVISVLNEQIAVMEAQVEAHFGRHPDAKILLSQPGLGKVLGARVLAEFGDDPDRYADARSRKNYAGTSPITRASGKKKTVLARYVRNRHLADALHQQAFCSLTASPGARAYYDQLRGRGTEHHAALRQLGNRLTGILHGCLKTGTVYDEATAWSHRQQQTAA

SEQ ID NO: 19316 - protein, 339 aa, unidentified
  source 1..339: note = protein_46670cf
  REGION 7..149: note = RuvC_domain
  SITE 10: note = RuvC_P1
  SITE 53: note = RuvC_P2
  SITE 88: note = RuvC_P3
  SITE 90: note = RuvC_P4
  SITE 93: note = RuvC_P5
  REGION 212..297: note = Tnp_domain
  SITE 220: note = Tnp_P1
  SITE 250: note = Tnp_P2
  SITE 258: note = Tnp_P3
  SITE 259: note = Tnp_P4
  SITE 271: note = Tnp_P5
MDEVSTIGLDIAKRVFQVHGVDSAGAVSVRRALRRSQMLAWFSKLPHCLVGMEACATAHYWARALAKLGHEVRLIPPAYAKAYVRRNKNDPADAAAICEAVSRPAMRFVAVKSERQQAAAGIHRVRDLLMKQHTMLRNQLRGLMAEFGIVTAKGRRGVSELVAILTDAEDQRIPSPLRDGPVMIAETLRGIDRKLEGIDRQLAAAGRADATYRHLITAPGYGPILSSAMAAMVVNPAAFRRSSDFAASLGLVPRQEGTGGKLWLGPISKRGNGYLRRLLVNGATALLNSKRAKEDPWLVKLLATKPRKVVAVALANKLARIGWALMMRQEDFRSPPAAA

SEQ ID NO: 19317 - protein, 397 aa, unidentified
  source 1..397: note = protein_cc0e566
  REGION 9..163: note = RuvC_domain
  SITE 12: note = RuvC_P1
  SITE 60: note = RuvC_P2
  SITE 100: note = RuvC_P3
  SITE 102: note = RuvC_P4
  SITE 105: note = RuvC_P5
  REGION 270..355: note = Tnp_domain
  SITE 278: note = Tnp_P1
  SITE 308: note = Tnp_P2
  SITE 316: note = Tnp_P3
  SITE 317: note = Tnp_P4
  SITE 329: note = Tnp_P5
MTQAYAVYCGIDVGKGEHHAVGLDPNGKRLFDKALPNDEARLRAVFDQLATRGRLLIVVDQPNTIGALPVTVARACGHDIAYLPGLSMRRIADLYPGQSKTDARDAHIIADAARTMPHTLRRVDTGDETLTELGVLVGFDDDLAGEATRTTNRIRGLLTSIHPALERVLGPRVAHPAVLEILSRCGGPEGIRAAGRRKLTTIAAKHAPRMGGRLVEEILAALPAQTVVVPGSRSAESVLPKLADSLKTVLLQRQQVAVDIEEMLDDHPLAQVLTSMPGIGVRTGARILLEVGDGTAFASAGHLASYAGIAPITHRSGSSIRGEFPSRSGNHKLKRALFLSAFAALHDPTSRAYYDRKRAEGKKHNAALICLARRRCDVLYAMLKTKQPYRTPRPVAA

SEQ ID NO: 19318 - protein, 407 aa, unidentified
  source 1..407: note = protein_90d1854
  REGION 4..160: note = RuvC_domain
  SITE 7: note = RuvC_P1
  SITE 57: note = RuvC_P2
  SITE 97: note = RuvC_P3
  SITE 99: note = RuvC_P4
  SITE 102: note = RuvC_P5
  REGION 274..361: note = Tnp_domain
  SITE 282: note = Tnp_P1
  SITE 312: note = Tnp_P2
  SITE 320: note = Tnp_P3
  SITE 321: note = Tnp_P4
  SITE 334: note = Tnp_P5
MNAVGIDVSKGKSMMMALQPMNQVVLKPREYSHTKAGLGQMAHDILRLGEETRVIMEATGRYHEPVAAALHEYGIRVTVMNPLFIKQSGSGSIRKVKTDKADAKKIAKYGLDNWMDLREYAPVEAIREQLKLVSRQFNLYMKNVVALQNNLISLTDKVFPGVNEVFSSKDRADGSQKWVDFITTFWHCECIALVSEAVFTERYRKWCKRKGYHFSGTKAAELYIGSIGHITTLPKNSNTKLIITTAAKELASAKSTLAVLRAEMDRLARQLPEYDTVRAMYGVGEKTAPQLMAEIGDVRRFPRRSSIVSFAGVDPAVDESGKHISKSNPTTKRGSPHLRKTLYQIVCTYLKKSPTDEPVYQFLDKKRAEGKPYFVYMTAAQNKFLRIYYARVKECLIMASVQESSES

SEQ ID NO: 19319 - protein, 274 aa, unidentified
  source 1..274: note = protein_b4d00ee
  REGION 2..76: note = RuvC_domain
  SITE 17: note = RuvC_P3
  SITE 19: note = RuvC_P4
  SITE 22: note = RuvC_P5
  REGION 141..228: note = Tnp_domain
  SITE 149: note = Tnp_P1
  SITE 179: note = Tnp_P2
  SITE 187: note = Tnp_P3
  SITE 188: note = Tnp_P4
  SITE 200: note = Tnp_P5
MRLIPAQFVKPYRKSNKNDFIDAEAIAEAVTKQNMRFVQIKTQEQLDWQAMHRVRDRLMQRRTALINEIRGFLLERGLTFAARPIYLRKNLPTVIEDAEQNLSPRLRWLLDRLWQEWKQTEIDIKAITDEIERISNDDARCRRLRQIPGFGPLVSTATVAAIGNGAAFRRGRDFAAWVGVVPRQYSTGGKQKLFGISKRGNIYLRRMLIHGARAVLLRVKYDTGGFGQWVHRLAQRAPRNKVVVAIANKLARMAWAVLSSGQEYRHQPLQPAAA

SEQ ID NO: 19320 - protein, 339 aa, unidentified
  source 1..339: note = protein_25454f5
  REGION 1..92: note = RuvC_domain
  SITE 29: note = RuvC_P3
  SITE 31: note = RuvC_P4
  SITE 34: note = RuvC_P5
  REGION 202..288: note = Tnp_domain
  SITE 210: note = Tnp_P1
  SITE 241: note = Tnp_P2
  SITE 249: note = Tnp_P3
  SITE 250: note = Tnp_P4
MVAAGYTVYAINPLQVARYRERHGTSGAKSDPGDAHVLAELVRLDRAHHRPVAGDSALAEHVKVLTRAHQSLIWSRQRQTNALRSMLREFYPGALAAFGDELAGRDALAILAIAPAPEAGRRLSQSKIAASLRRAGRQRNLEPTAERIQTALRAPQLEAHPGVVGAYAAAVRSLVTVITALVIQTAVLQGEVEAGFGQHPDAEIYLSQPGLGPILGARVLAEFGDDPHRYADPKARKNYSGMASITRASGTKRLVLARYTRNRRLADALYRQAFTALGVSPGARAYYDRQRDRGASHHQALRALANRLVSILHGCLRHHARYDEATAWHTNTGAAIAAA

SEQ ID NO: 19321 - protein, 338 aa, unidentified
  source 1..338: note = protein_38f5bc9
  REGION 7..149: note = RuvC_domain
  SITE 10: note = RuvC_P1
  SITE 53: note = RuvC_P2
  SITE 88: note = RuvC_P3
  SITE 90: note = RuvC_P4
  SITE 93: note = RuvC_P5
  REGION 211..299: note = Tnp_domain
  SITE 219: note = Tnp_P1
  SITE 249: note = Tnp_P2
  SITE 257: note = Tnp_P3
  SITE 258: note = Tnp_P4
  SITE 270: note = Tnp_P5
MGTISTIGLDLAKNVFQVHGIDSLGNILVRRRLRRGEVLRFFETLPPCLVGMEACGTSHYWARSIAAFGHTVKMMPPVYVKPYVKRGKTDAADAEAICEAVTRPTMRFVPVKSPAQQAALLQHKTRDLLVRQRTMQVNALRGHLAEFGIISAAGVAGLNQMITLLHAEQEMLPEPARKLFQEIVAHLRALEQRIDDIEKQIVAEHRASSVSRRLAGIPGIGPITASAIVAAVPDASTFRSGRQFAAWLGLTPKSHSSGGKERQVGISKQGDSYLRRLLVLGATAVIRLARKENSSRQWAAKLLEKKAARVVSVALANKTARIVWALLTTGNAYSARSA

SEQ ID NO: 19322 - protein, 349 aa, unidentified
  source 1..349: note = protein_eacac90
  REGION 7..148: note = RuvC_domain
  SITE 10: note = RuvC_P1
  SITE 53: note = RuvC_P2
  SITE 88: note = RuvC_P3
  SITE 90: note = RuvC_P4
  SITE 93: note = RuvC_P5
  REGION 212..297: note = Tnp_domain
  SITE 220: note = Tnp_P1
  SITE 250: note = Tnp_P2
  SITE 258: note = Tnp_P3
  SITE 259: note = Tnp_P4
  SITE 271: note = Tnp_P5
MGEVSTIGLDIAKNLFQIHGVDADGTVVIRKRIGRARILEFFADLPPCRVGMEACATAHQWARELRKLGHDTRLMAPTYVKAYVKRGKNDAADAAAICEAVTRPSMRFVPIKDAEQQSLLMLHRARDLLIRQRTQLINALRAHLAELGLVAAKGREGLHQLVAVVTECGNERLPSNARFACQAIVTQLNAAQIEISGLDKRITQTHRANADSKRLDTIPGFGVILSTAVAATMADPKAFRTGRDFAAWIGLVPRQNSTGGKERLGSISKQGDRYLRRLLVIGATSVINCARARPYQYPWVIELLGRRPTKVVAVALANKMARIAWAVLAKGKPYRVPTRSSNATVPAAA

SEQ ID NO: 19323 - protein, 266 aa, unidentified
  source 1..266: note = protein_b3e7ff6
  REGION 6..147: note = RuvC_domain
  SITE 9: note = RuvC_P1
  SITE 52: note = RuvC_P2
  SITE 87: note = RuvC_P3
  SITE 89: note = RuvC_P4
  SITE 92: note = RuvC_P5
  REGION 211..266: note = Tnp_domain
  SITE 219: note = Tnp_P1
  SITE 249: note = Tnp_P2
  SITE 257: note = Tnp_P3
  SITE 258: note = Tnp_P4
MQLQTVGIDLGKTVFHLVGLNERGEVVVRKKFSRKQLLHFTANLKVKLIGMEACGGSHFLGRALREQGHEVRLMPAQYVKPYVKTNKSDYIDAEAIAEAVGRPKMRFVPIKSDDQLDLQSLHRVRERWVMRRTAVINQIRGLLLERGITVRQGRRHIDAALPGILEDASAKLSGALRALLAQLRLELDHLQMRIDEADAVINKAAGENEACRRLVAIPGIGPVTATAIIASIGNGAAFKKGRGFSAWLGIVPGEHTTGGKQKLLGD

SEQ ID NO: 19324 - protein, 406 aa, unidentified
  source 1..406: note = protein_d5312e9
  REGION 4..163: note = RuvC_domain
  SITE 7: note = RuvC_P1
  SITE 60: note = RuvC_P2
  SITE 100: note = RuvC_P3
  SITE 102: note = RuvC_P4
  SITE 105: note = RuvC_P5
  REGION 271..357: note = Tnp_domain
  SITE 279: note = Tnp_P1
  SITE 310: note = Tnp_P2
  SITE 318: note = Tnp_P3
  SITE 319: note = Tnp_P4
MLFVGDDWSEDHHDVELIDSAGRTLAKARLPEGVAGVARLHAMVGAQLGEDAEVAEVLVGIETDRGPWVAALVAAGYAVYAVNPLQAARYRERHSVSGAKSDAADAHILADMVRTDSHQLRQVAADSPEAEAVKVVARVHKTLIWERTRHTQRLRHALREYFPAALEAFEDLDAADTLELLGKAPDPASAAKLTLGQIRAALKRARRRDIDVKATRIQAVLRAEHLGRAAVITAAYSVTTRSAVAVLATLDEQVKTLEKQVDAHFGRHPDAEILLSQPGIGVVLGARVLAEFGDAPGRYADAKSRKNYAATSPITRASGKKKVVLARFVHNDRLVDALMSQAFSSLQASPGARAYYDQLRAREVGHPAALRQLANRLVGILHGCLKTRTPYDEATAWSHRTEKSAA

SEQ ID NO: 19325 - protein, 372 aa, unidentified
  source 1..372: note = protein_f166b2e
  REGION 4..160: note = RuvC_domain
  SITE 7: note = RuvC_P1
  SITE 57: note = RuvC_P2
  SITE 97: note = RuvC_P3
  SITE 99: note = RuvC_P4
  SITE 102: note = RuvC_P5
  REGION 274..354: note = Tnp_domain
  SITE 282: note = Tnp_P1
  SITE 312: note = Tnp_P2
  SITE 320: note = Tnp_P3
  SITE 321: note = Tnp_P4
  SITE 334: note = Tnp_P5
MNAVGIDVSKGKSMIAAVRPFGEVIVTPYEVRHTASELRELAKTLKSLDGETRVVLEHTGRYYEPVAQTLSNAGGFVSAVNPLLIKEYGNNSIRKVKTDKADALKIARYGLDNWAELREHTPMDKLREQLKILNRQYSLYGKNKTAFKNNLIALLDQSFPGANAYFASPVREDGSQKWVDFAASFWHADCVRNLSLHAFTERYRKWCKRHSYNFSSATVAEIYENAKELVPTLPKNESTKVLLTEAITQLNAVSRTTEVLRSEMNRVAKELPEYEVVMGMYGVGTSLGPQIMAEIGDVRRFAHRGSLTAFAGVDPMPNQSGKSERQSNPSSKRGSPYLRKSLFFVMRNLRQPMLCTGSSTRNAARASRTMST

SEQ ID NO: 19326 - protein, 289 aa, unidentified
  source 1..289: note = protein_512d937
  REGION 1..48: note = RuvC_domain
  REGION 155..240: note = Tnp_domain
  SITE 163: note = Tnp_P1
  SITE 193: note = Tnp_P2
  SITE 201: note = Tnp_P3
  SITE 202: note = Tnp_P4
  SITE 214: note = Tnp_P5
MPHTLRRVGTDDETLAELTVLAGYDDDLTAQSTRLTNRLRDALLHVHPALERLLGPRMGRGGVLDLLAAAPTPQALRQLGEQGIAAAMRPRSPRLAKTLPAPILAALDAQTVTVPGTAAFGRVIAEVAARLREVRIERDTLASELEPLLEAHPLAEVLTSIPGLGVRTALKILTIAGDAAAFPTAGHLAAYAGLTPVTRRSGSSIKGETRSQRGNHALKSALFLSAFASLADPTSRAYYDRKRAQGKRHNAALICLARRRTDVIYAMLRDRRPYLRPSIPTPPPAAAAA

SEQ ID NO: 19327 - protein, 389 aa, unidentified
  source 1..389: note = protein_f96867e
  REGION 4..163: note = RuvC_domain
  SITE 7: note = RuvC_P1
  SITE 60: note = RuvC_P2
  SITE 101: note = RuvC_P3
  SITE 103: note = RuvC_P4
  SITE 106: note = RuvC_P5
  REGION 266..353: note = Tnp_domain
  SITE 274: note = Tnp_P1
  SITE 304: note = Tnp_P2
  SITE 312: note = Tnp_P3
  SITE 313: note = Tnp_P4
  SITE 326: note = Tnp_P5
MIYVGIDVAKDKHDCCILGSEADNLYPVFTIPNNKAGFDELYEKIFSVTDDKTEIKVGLEATGHYSLNLLGSLIDKGLATCVINPLHTNLYRKGLSLRKTKTDKVDAGSIAMMLMTDKTLKPYSDTSYHSEELKSLTRYRFDKVQERAKLKTSVTRLVNILFPELEKLVPNLHMTSVYALLYEFPGASYIAASHLTRLKNVIETASKGRYGRDMAVAIRNAARDSIGSVMTAKSMELKHTINLIEVMTDEIDEIESSIKSIMDTNNSPIMTIPGINYRMGAMILAEVGDFSRFSNADQILAFAGLSPSTYQSGQLDSCHSHMEKRGSKYLRYALFNATKFVCHWDETFSTYLSKKISEGKHYNVAVSHAAKKLIRTIYRMELTGETYRK

SEQ ID NO: 19328 - protein, 340 aa, unidentified
  source 1..340: note = protein_2575610
  REGION 5..151: note = RuvC_domain
  SITE 8: note = RuvC_P1
  SITE 53: note = RuvC_P2
  SITE 91: note = RuvC_P3
  SITE 93: note = RuvC_P4
  SITE 96: note = RuvC_P5
  REGION 211..297: note = Tnp_domain
  SITE 219: note = Tnp_P1
  SITE 249: note = Tnp_P2
  SITE 257: note = Tnp_P3
  SITE 258: note = Tnp_P4
  SITE 270: note = Tnp_P5
MTEYIGLDVSMKETAISIRCAGKRIWRGKCASDPAAIAELIRMRAPNAERVVFETGPLSVWFYHALRAEGLPAICVDARHAKAALDMAANKTDANDADGLAHLAEVGFFREVRVKGFNSMLSRTLVAARTKLMRTTLDVANQIRGVMKTFGLIVPCSMGGKFEVHVRSLLADNVGLSQIILPLLEAWRNLRLQATRLGRQLLAEARRNQQCQLLMSIPGVGAITATAYITAVEDPANFKRSRSVGAWLGLTTRRYQSGEVDYDGHISRRGDTHVRSLLYEAAVVILTRSRADSDLRSWGIKLREKIGFKRSAVAVARKLAVIMHAMLRSGELFNRATAAT

SEQ ID NO: 19329 - protein, 346 aa, unidentified
  source 1..346: note = protein_bd272ce
  REGION 7..148: note = RuvC_domain
  SITE 10: note = RuvC_P1
  SITE 53: note = RuvC_P2
  SITE 88: note = RuvC_P3
  SITE 90: note = RuvC_P4
  SITE 93: note = RuvC_P5
  REGION 210..296: note = Tnp_domain
  SITE 218: note = Tnp_P1
  SITE 248: note = Tnp_P2
  SITE 256: note = Tnp_P3
  SITE 257: note = Tnp_P4
  SITE 269: note = Tnp_P5
MIEISRIGMDTSKQLFQLHGVDASERPVLRKKLRRRDMVTFFKGLAPTVIAIEACGASHHWARLLESFGHEVRLIAPQYVKPYVKRGKNDAADAEALCEAMSRPTMRFVPVKSAEQQAALMLVGVRDRLVRNRTQISNAIRGHAAEFGLTAAKGLSHVTDLLDRIAADETLPELARELFALERVELERLQSDIEEVEVRLMAWHRANECSRRLAEIPAVGPIGASLLMMKAPSPELFKSGRDFAAWIGLTPKDHSTAGKVRLGVITRAGDPDLRRTLVTGATSLIQQIRAGRSKHVSPWLLDMLKRKPPKLVAIALANRIARIAWKMMMTGEHYSKPAASAMMAAA

SEQ ID NO: 19330 - protein, 357 aa, unidentified
  source 1..357: note = protein_a355da7
  REGION 23..165: note = RuvC_domain
  SITE 26: note = RuvC_P1
  SITE 69: note = RuvC_P2
  SITE 104: note = RuvC_P3
  SITE 106: note = RuvC_P4
  SITE 109: note = RuvC_P5
  REGION 227..314: note = Tnp_domain
  SITE 235: note = Tnp_P1
  SITE 265: note = Tnp_P2
  SITE 273: note = Tnp_P3
  SITE 274: note = Tnp_P4
  SITE 286: note = Tnp_P5
MPGWCCQATYQRTGAVLIQVTTIGLDIAKNVFQIHGVDSDGRVVLRKKVRRDKLLTVFGTLPGCLVGMEACATSHHWARELERLGHQVKLMPPAYVKAYVKRNKNDAADAEAICEAVTRPNMRFVAIKSANAQSILMLHRARQLLVRQRTAQVSALRAHLAEYGIIAPKGRTHVRDLIKVLGQQDAPLPELARQTLLLIAEMIDGLSQQIRRIEMELLAWHRTHPVCQRLETIPGIGFITATALVATINDATVFRSGRQFAAWLGLVPKQNSSGGKERMGGISKMGDRYLRHLLVVGATAVVRYTRRKATTVSRWANQLLERKPARLVTVAVANKVARIVWAVMTRDETYRLEPVGA

SEQ ID NO: 19331 - protein, 342 aa, unidentified
  source 1..342: note = protein_868b049
  REGION 6..147: note = RuvC_domain
  SITE 9: note = RuvC_P1
  SITE 52: note = RuvC_P2
  SITE 87: note = RuvC_P3
  SITE 89: note = RuvC_P4
  SITE 92: note = RuvC_P5
  REGION 211..292: note = Tnp_domain
  SITE 219: note = Tnp_P1
  SITE 249: note = Tnp_P2
  SITE 257: note = Tnp_P3
  SITE 258: note = Tnp_P4
  SITE 270: note = Tnp_P5
MIVVTVGIDLGKNSCSLAGLDATGAVLMRRRLSRGKLVALLARLPPCMVAMEACCGAHHLGRVFAGQGHEVRLMAPEYVQPYVKAQKNDDRDAEAIAEAATRPTMRFVALKSEAQLDQQTLHRVRSRLVNSRTRLMNQLRAILLERGITVAKGRRTLGLALGALLDDEASGLSPRLRELVDEMRREWAELDTRIAALDREFVEAARRSAPARRLATIPGIGALNATALTAAVGEAEDFAKGRDFAAWLGLVPRQMTTGGKARLGGITKRGNVYLRTLLIHGARAALPGLSRGDTALGAWLRSLLARAHVNVVVVALAAKLARIAWAVLRSGADYDRGAGAAA

SEQ ID NO: 19332 - protein, 353 aa, unidentified
  source 1..353: note = protein_25a16a6
  REGION 28..174: note = RuvC_domain
  SITE 31: note = RuvC_P1
  SITE 79: note = RuvC_P2
  SITE 119: note = RuvC_P3
  SITE 121: note = RuvC_P4
  SITE 124: note = RuvC_P5
  REGION 220..307: note = Tnp_domain
  SITE 228: note = Tnp_P1
  SITE 258: note = Tnp_P2
  SITE 266: note = Tnp_P3
  SITE 267: note = Tnp_P4
  SITE 280: note = Tnp_P5
MSKRNVSAVKPTASVNQSAHGDPARVFCGVDVSAETLAVAVLTREGAPRQREFSNTASGHRALIGWLTKGQGRARVSLEATGIYSMDLALALDEAEGIEVAVLNPKRIHDFARTIRRSKTDKADAQVLAEFSLRMDFVAWQRPSRSALELRAISRHIEALGVDRTRAHNRLQAARGSGSTPRCVLDDLKRSLERLAERILKLRRAAQALIEADERMREQFRLLTGMPGIAQISAVQILGELVLLAPDLKARQWVARSGLDPVQQDSGTSVHKPARISRQGSRHLRRALYMPALTAVRWDPHLKAFYQSLLARHKRKLQALMAVARKMLHAIYGIFKTKTAYDGGKLFPQLKIA

SEQ ID NO: 19333 - protein, 322 aa, unidentified
  source 1..322: note = protein_4c60817
  REGION 8..158: note = RuvC_domain
  SITE 11: note = RuvC_P1
  SITE 64: note = RuvC_P2
  SITE 102: note = RuvC_P3
  SITE 104: note = RuvC_P4
  SITE 107: note = RuvC_P5
  REGION 194..281: note = Tnp_domain
  SITE 202: note = Tnp_P1
  SITE 232: note = Tnp_P2
  SITE 240: note = Tnp_P3
  SITE 241: note = Tnp_P4
  SITE 254: note = Tnp_P5
MEQFSFFTGIDVSKLWLDIAVFKPDYGIVYQTRIDNDVKTIRSFLRNLKKQFKAEIAGHMFCMEHTGKYGHAFLNASILEQAKVWVELPIQIKRSQGLVRGKTDQWDAVRIAQYAYRFADKAVFWKPADKTVQDLKELQVKRSRLVKAYSQLSQENKNDPLFKKPLLALKQGIEAIELKMEHLIEQNESASHQYELLKTVPGIGKQTAMALIIVTNGFTRLTETRKLSCYSGVAPFPYSSGSSVKGRTKVSKMGDKKLKVLLNLSAWNAIRSITAFKDYFNRKVSEGKHKMSVINAVRNKLIALILAVIKRNSPFEKNYSFS

SEQ ID NO: 19334 - protein, 343 aa, unidentified
  source 1..343: note = protein_d14ff4b
  REGION 7..149: note = RuvC_domain
  SITE 10: note = RuvC_P1
  SITE 53: note = RuvC_P2
  SITE 88: note = RuvC_P3
  SITE 90: note = RuvC_P4
  SITE 93: note = RuvC_P5
  REGION 212..303: note = Tnp_domain
  SITE 220: note = Tnp_P1
  SITE 250: note = Tnp_P2
  SITE 258: note = Tnp_P3
  SITE 259: note = Tnp_P4
  SITE 271: note = Tnp_P5
MQAVTTIGLDIAKSVFQIHGVDAAGHVVVRRKLKRRYVVPFFQKLPPCLIGIEACASSHHWSRELKALGHTVRLMPPAYVKPYVKRQKNDAADAEAICEAVTRTNMRFVATKTPEQQSCLMLHRTRHLFIRQQTAVINAIRAHLAEFGIVAPVGRNGVEQLLDVVADASDKRLPEIARACLVALGTQLRTLKAQILNFDRQIMAWHRSSEASKRLDEIPGVGPALATALVASVADAKAFRSGRNFSAWIGLVPKQHSSGGKDKLGSISKQGDRYLRSLFTAGALAVIRYAKIHGTKHRPWLTALLARRPTKVAAIALANKIARMAWAMMARGDRYKEPVALAR

SEQ ID NO: 19335 - protein, 325 aa, unidentified
  source 1..325: note = protein_ba35933
  REGION 11..162: note = RuvC_domain
  SITE 14: note = RuvC_P1
  SITE 61: note = RuvC_P2
  SITE 101: note = RuvC_P3
  SITE 103: note = RuvC_P4
  SITE 106: note = RuvC_P5
  REGION 200..284: note = Tnp_domain
  SITE 208: note = Tnp_P1
  SITE 237: note = Tnp_P2
  SITE 245: note = Tnp_P3
  SITE 246: note = Tnp_P4
  SITE 257: note = Tnp_P5
MKTMSGSAVMIGIDVASAHVDVAAIGGELPAALGHVGNDADGHSALADGLARLKPELVLMEATGGYEAALACALQAAGLRVAVVNPRMARDFARAMQRLAKTDRIDAATLAEFAGVLARRPDCARFIRPLSEPEQQDLAALVTRRRQLVSMQLAERQRLRLARPVARPSIEALLEAIARQLDEVEAEMARHVEQHHAQMAKLLQSVAGIGRVAAATLIAELPELGRLNRRQICALVGVAPYANDSGASRGRRRIVGGRFEVRRALYMATLTATRHNAAIRAFYERLVAAGKLKKVALIACMRKLIIHLNALTRDHLNAQNRSIIA

SEQ ID NO: 19336 - protein, 341 aa, unidentified
  source 1..341: note = protein_cb88e9a
  REGION 7..149: note = RuvC_domain
  SITE 10: note = RuvC_P1
  SITE 53: note = RuvC_P2
  SITE 88: note = RuvC_P3
  SITE 90: note = RuvC_P4
  SITE 93: note = RuvC_P5
  REGION 209..303: note = Tnp_domain
  SITE 217: note = Tnp_P1
  SITE 254: note = Tnp_P2
  SITE 262: note = Tnp_P3
  SITE 263: note = Tnp_P4
  SITE 275: note = Tnp_P5
MENVALIGIALGKHSFHLHCQDKSGKALQRKKFTRTNLMQFLATCPSTVVVMEACAGAHFMARRISDIGHEAKLISSQFVRPFVKSNKNDFVDAEAICEAASRPSMWFVQPRTEVQQAMRALHRARESLIRDKVKTTNQINGFLLEFGISLPVGDTVIKRLPLVLVEHEIPEYLSRLLMKLHAHYLYLVEQITELESELNQSIKTDDATQRIMTIPGVGPITASLLSSQLGDGKQFSCSRDFAASTGLFAASTGLVPRQYSTGGKSTLLGISKRGDKNLRRLLVQCAHSFMMRLEHQQGRLAEWVREQLSKKHSNVVACALANKLARIAWAITTNHNAYQA

SEQ ID NO: 19337 - protein, 341 aa, unidentified
  source 1..341: note = protein_be2b14b
  REGION 7..149: note = RuvC_domain
  SITE 10: note = RuvC_P1
  SITE 53: note = RuvC_P2
  SITE 88: note = RuvC_P3
  SITE 90: note = RuvC_P4
  SITE 93: note = RuvC_P5
  REGION 209..303: note = Tnp_domain
  SITE 217: note = Tnp_P1
  SITE 254: note = Tnp_P2
  SITE 262: note = Tnp_P3
  SITE 263: note = Tnp_P4
  SITE 275: note = Tnp_P5
MENVALIGIALGKHSFHLHCQDKSGKALQRKKFTRTNLMQFLATCPSTVVVMEACAGAHFMARRISDIGHEAKLISPQFVRPFVKSNKNDFVDAEAICEAASRPSMWFVQPRTEVQQAMRALHRVRESLIRDKVKTTNQINGFLLEFGISLPAGDTVIKRLPLVLVEHEIPEYLSRLLMKLHAHYLYLVEQITELESELNQSIKTDDATQRIMTIPGVGPITASLLSSQLGDGKQFSCSRDFAASTGLFAASTGLVPRQYSTGGKSTLLGISKRGDKNLRRLLVQCARSFMMRLEHQQGRLAEWVREQLSKKHSNVVACALANKLARIAWAITTNHNAYQA

SEQ ID NO: 19338 - protein, 399 aa, unidentified
  source 1..399: note = protein_8d16b26
  REGION 12..166: note = RuvC_domain
  SITE 15: note = RuvC_P1
  SITE 63: note = RuvC_P2
  SITE 103: note = RuvC_P3
  SITE 105: note = RuvC_P4
  SITE 108: note = RuvC_P5
  REGION 273..357: note = Tnp_domain
  SITE 281: note = Tnp_P1
  SITE 310: note = Tnp_P2
  SITE 318: note = Tnp_P3
  SITE 319: note = Tnp_P4
  SITE 331: note = Tnp_P5
MIKSHESVDIFIGVDVGKSNHHAVAIDRQGKKLLDRALSQDEGKLRAIIKAVADKGTVLLVVDQPSTIGALPVAVAQAEGILVGYIPGLAMRRIADLHPGEAKTDARDAAIIAEAARSLPHTLRSIVVADEQAAELSMLCGFDDDLAKQATAASNRIRGLLTQIHPALERVIGPHLDHPAMPELLIKYPSPQALRKAGRARVATLLARHAPRAGKRWAAEIFTALGEQSVVVAGTGAAGIVLAQLAAMLKHLRGARDELLTKVEALVEAHPLHEVLTSMPAVGVRTAARIITEVAGKEFQSSGHLASYAGLAPVTWRSGTSIRGDHPSKKGNKTLKRAFFLSAFAALKDPLSRAYYDRKRAEGKRHNQALIALARRRCDVLFAMLRDGTLYDVPEPRTT

SEQ ID NO: 19339 - protein, 343 aa, unidentified
  source 1..343: note = protein_b8b30dd
  REGION 6..148: note = RuvC_domain
  SITE 9: note = RuvC_P1
  SITE 52: note = RuvC_P2
  SITE 87: note = RuvC_P3
  SITE 89: note = RuvC_P4
  SITE 92: note = RuvC_P5
  REGION 211..297: note = Tnp_domain
  SITE 219: note = Tnp_P1
  SITE 249: note = Tnp_P2
  SITE 257: note = Tnp_P3
  SITE 258: note = Tnp_P4
  SITE 270: note = Tnp_P5
MDVSTIGLDVAKSVFQVHGIDAAGQVVIRRQVKRRQVLRFFEKLGPCLVGIEACATAHHWGRKIAALGHEVRLMPAHYVKAYVKRGKNDVADAEAICEAVGRPTMRFVGLKSAEQQSVLMLHRTRELLVRQRTMLVNAIRGHMAEFGIVARAGLPQIKELLAVIADRDDHRLPPDARACLEGLARQFLSLHEEICAADKRLHAWHRSNPVSQRLATIPGIGPVTASALAASITDPLVFRSGREMAAWIGLVPRQNSTGGKQRLGKISKQGDQYLRWLLVAGAMAVIRHAKRRGTANQLWLDSLIARRPTKVAAVALANKMARTAWVLLRYGGTYRQPLVTASA

SEQ ID NO: 19340 - protein, 309 aa, unidentified
  source 1..309: note = protein_82de26b
  REGION 1..86: note = RuvC_domain
  SITE 23: note = RuvC_P3
  SITE 25: note = RuvC_P4
  SITE 28: note = RuvC_P5
  REGION 188..273: note = Tnp_domain
  SITE 196: note = Tnp_P1
  SITE 225: note = Tnp_P2
  SITE 233: note = Tnp_P3
  SITE 234: note = Tnp_P4
  SITE 246: note = Tnp_P5
MPRAYLPGLAAHGASRLFAGDAKTDERDAMVIAKTALGIPDALLAVADRPPEIEAARSLAAQRDFLACENTRSKNRLRGILLESCPEFEAQADLSGPATLKLMAAVGGPWSISEASPQAVGALTRGCRRAKVAALVESVESSSRPPSATVACEDRAVRLLARRISENAARIESLASEISALLAADETRRCLLTVPGIGPRTASELVISIDIADFAGHDRLASRCGLAPRSRQSGTSISSVSASRQGDKRLKNLLISSCNCLARAATDGGEYYARCRDRGMPHGKALKAVARKRLKVIYAIMRDKVPYAA

SEQ ID NO: 19341 - protein, 398 aa, unidentified
  source 1..398: note = protein_06e175c
  REGION 4..160: note = RuvC_domain
  SITE 7: note = RuvC_P1
  SITE 57: note = RuvC_P2
  SITE 97: note = RuvC_P3
  SITE 99: note = RuvC_P4
  SITE 102: note = RuvC_P5
  REGION 274..361: note = Tnp_domain
  SITE 282: note = Tnp_P1
  SITE 312: note = Tnp_P2
  SITE 320: note = Tnp_P3
  SITE 321: note = Tnp_P4
  SITE 334: note = Tnp_P5
MNSVGIDVSKGKSMVAALRPMGEVAMRPTEYLHTEVELERLAYAILALGEDTRVVMEATGRYHEPVAAALHEYGIYVSVLNPILIHQSGGGSVRKVKSDKKDSIKIAKYGLDNWVDLREYTPVDAVRQQLKLLSRQYNLYMKSAVSLKNNLISLTDKVFPGVNEYFKSPEKANGHQKWIDFVTTFWHCDCITLVSEKAFTERYRKWCKRKGYNFSVEKALDLYACSCGHITTLPKNSNTKLLITTAAKQLTAFNCLLASVKQEMFSLAKQLPEYETVIAIYGVGDISAAQLMAEIGDVRRFPNRNALVGFAGVDPIVDESGKDVSKCHPTTKRGSSHLRKTLFQVVSTYVKLAPADEPVYQFIQKKRAEGKPYYVYMTAAANKFLRIYYARVKECLND

SEQ ID NO: 19342 - protein, 405 aa, unidentified
  source 1..405: note = protein_8686520
  REGION 4..160: note = RuvC_domain
  SITE 7: note = RuvC_P1
  SITE 59: note = RuvC_P2
  SITE 99: note = RuvC_P3
  SITE 101: note = RuvC_P4
  SITE 104: note = RuvC_P5
  REGION 273..360: note = Tnp_domain
  SITE 281: note = Tnp_P1
  SITE 311: note = Tnp_P2
  SITE 319: note = Tnp_P3
  SITE 320: note = Tnp_P4
  SITE 333: note = Tnp_P5
MFYGGIDVAKYRHEVCLLDDAGNVVLQMHIDNNQKGMNKFLQALERLDIEPDSVKFCLEATGHYWLPIYCHLSELGFQLHVINPIQSDALRNLYVRKAKTDQKDALLLADLLRLGRTPTTKLPSETVLKLQTLSRLRFEFVRQVGGLKNRVLGILDRIFPEYPGCFSDVFIRTSRELLKSYPEPEELATVDLSELAAFLKEHSRGRLGEERAKKIQSLAKGTFGITLALDAFALQLRLLLEQIEFIEEQVKVIEEAINEVMEELRPDRDTPYRHVIETIPGIGPVLAAAIIGEIGDVSRFPNARALVAYAGLDASVRVSGLFEGTRNRMSKRGSPMLRNSLWLSAVLARRFNQELKEYYELKCSQGKHSSVATGAVARRLVHLIYALWKENRPYDPNYQWSPPRK

SEQ ID NO: 19343 - protein, 407 aa, unidentified
  source 1..407: note = protein_8f093da
  REGION 14..168: note = RuvC_domain
  SITE 17: note = RuvC_P1
  SITE 65: note = RuvC_P2
  SITE 105: note = RuvC_P3
  SITE 107: note = RuvC_P4
  SITE 110: note = RuvC_P5
  REGION 275..361: note = Tnp_domain
  SITE 283: note = Tnp_P1
  SITE 313: note = Tnp_P2
  SITE 321: note = Tnp_P3
  SITE 322: note = Tnp_P4
  SITE 334: note = Tnp_P5
MGDQPTATDVDVFVGVDMAKEDHYAHAIGPDGNELYARTVRNDQADIEAAIDTASEAGKPVLVIDMTASSAHLLLATAAARRVPVAYVTGLQMRRAADLYAGSAKTDPRDAFILADYARRHVDRLTWLDIDDELLVRLRVLNGRDVDLAGDATRTINRCRDALVAISPALERVVGPKLTHGGVQDLMGRWATPTALRTAGKTRVRTLIAKRSPRLADKLTDQIWDALDAQTLTLPAEDTWGEVIADLAGDLTKISSRRDALKGDIEEAFLAHPLGKVLVTLCGFGPRTGARTLAEIGDPHRFATGGHLASYAALAPVNRQSGRTLDTATRQRRGNHRLKNALFLAAFVATQHDPDARAYYQRKRTEGKKHNAAVICVARRRCDLILAMLKNQEPYRQPQPQNLPQAA

SEQ ID NO: 19344 - protein, 400 aa, unidentified
  source 1..400: note = protein_0aaa64c
  REGION 5..163: note = RuvC_domain
  SITE 8: note = RuvC_P1
  SITE 62: note = RuvC_P2
  SITE 102: note = RuvC_P3
  SITE 104: note = RuvC_P4
  SITE 107: note = RuvC_P5
  REGION 273..362: note = Tnp_domain
  SITE 281: note = Tnp_P1
  SITE 311: note = Tnp_P2
  SITE 319: note = Tnp_P3
  SITE 320: note = Tnp_P4
  SITE 333: note = Tnp_P5
MNPVIGLDVSKGESQVQAFLDKGKPFGKSFSVSHTTEGLDALLHYLKVVENETGIKPSVILESTGHYHTPVIQFLEEQNYLYIMINPLLSYQAKKSSLRNVKTDEIDAFRLCELYYKEELEPYKKRGIQRLNLRHLTRQHETLTGLYVQAKLQFHAILDQVFPEYKGVFGDLYSKVSLNILLEFSTSESVVQAGENKVTDKIASLCMSRSERWAQERAKKLYEAAQRNPFKSIVYQSHLISLEMYIQLLLQYQEHLAKLDDQIDALAGEIEEYKIIQSIPGIGEKIAATIISEIGEIERFNHPKKLVAFSGIDPSVHSSGKFTATINRITKRGSSRLRHALYMAVLCGIRSSRNKKLKEFYDRKREEGKPFKVAMIACVNKLIHWIYALLKRKEAFLDLA

SEQ ID NO: 19345 - protein, 397 aa, unidentified
  source 1..397: note = protein_3597f6b
  REGION 4..160: note = RuvC_domain
  SITE 7: note = RuvC_P1
  SITE 57: note = RuvC_P2
  SITE 97: note = RuvC_P3
  SITE 99: note = RuvC_P4
  SITE 102: note = RuvC_P5
  REGION 274..361: note = Tnp_domain
  SITE 282: note = Tnp_P1
  SITE 312: note = Tnp_P2
  SITE 320: note = Tnp_P3
  SITE 321: note = Tnp_P4
  SITE 334: note = Tnp_P5
MIAVGIDVSKSKSTVAILNGDGSIRAKPFDVHHTADELKSLISYIKGTSEVPTILMEPTSHYHYPILKAFQDAALPVCLVNPYQLKKYGDTALRKAKTDKKDAVKIAQYALEKSYTLTSYTPQDQKYDDLRFLSRQYNQRMSTLTANKVQLIRLLDETMPGITTILPLKSRDPENCVLLKLIKRFKSFDSVKKMGKNRFLDSYQVLVNKTKDRYAASKGLAIYEMALNSVTTRGDNSLTFMTQNQCVDLISASQNAVDDINLQMRTIAETIPEYRVLRSMAGVGDRLGPIILAEIGDIRRFHSGKALNAYAGNDAPPYQSGQFESRNRHISKRGNPALRKACFEVMQALKLTKPQDDPVYLFLLKKEQEGKPYNVAKMAAVNKFLRIYYARAMEVYK

SEQ ID NO: 19346 - protein, 385 aa, unidentified
  source 1..385: note = protein_442ec0a
  REGION 38..184: note = RuvC_domain
  SITE 79: note = RuvC_P2
  SITE 118: note = RuvC_P3
  SITE 120: note = RuvC_P4
  SITE 123: note = RuvC_P5
  REGION 255..342: note = Tnp_domain
  SITE 263: note = Tnp_P1
  SITE 292: note = Tnp_P2
  SITE 300: note = Tnp_P3
  SITE 301: note = Tnp_P4
  SITE 313: note = Tnp_P5
MSQLNDLSRSLTSLEQDNAIIAVIEMSQSSWLVAGIVPGIERHPLKKLEPNEGELLRLLMRWRAEATKMGCTITRIAVAYEAGRDGFWLARWLRAHDIETYVIHPTSVAVSREHRRAKTDRLDTGLLKRVFIGWLRGEPDHCHMVAIPTLAEEDAKRPNREREGLVRERTRIVNRMKSCLARFGVRSFKPTLRKAPERLATLVTPEGVPLPANTLLELRRDMARLRFIMDQIKEVEEARGQRLEQAPQEKSHAMVRLLARVIGVGIETADMLVHEILSRSLRDRRAVARYAGLTGAPDESGSRRQEKGLAKAGNARVRRGMIQLAWRFLLFQKDSALAQWYRTRTESAGKKRKTMIVALARKLLIALWRLVTIGEVPAGFVLRAA

SEQ ID NO: 19347 - protein, 400 aa, unidentified
  source 1..400: note = protein_1442ef9
  REGION 11..166: note = RuvC_domain
  SITE 14: note = RuvC_P1
  SITE 63: note = RuvC_P2
  SITE 103: note = RuvC_P3
  SITE 105: note = RuvC_P4
  SITE 108: note = RuvC_P5
  REGION 273..358: note = Tnp_domain
  SITE 281: note = Tnp_P1
  SITE 311: note = Tnp_P2
  SITE 319: note = Tnp_P3
  SITE 320: note = Tnp_P4
  SITE 332: note = Tnp_P5
MDDIDDVGVFLGLDVGKSAHHGHGLTPAGKKVFDKQLPNSEPKLRAVFDKLAAKFGTVLVIVDQPASIGALPLTVARDTGCKVAYLPGLAMRRIADLYPGEAKTDAKDAAVIADAARTMPHTLRSLELTDEITAELTVLVGFDQDLAAEATRTSNRIRGLLTQFHPSLERVLGPRLDHQAVTWLLERYGSPASLRRAGRRRLVEVIRPKAPRMAARLIDEVFDALDEQTVVVPGTGTLDVVIPSLARSLAAVHEQRRALEAQIGQLLEAHPLSAVLTSIPGVAVRTAATLLVTVGDGTSFPTAAHLASYAGLAPTTKSSGTSIHGEHAPRGGNRQLKRAMFLSAFAALHDPASRTYYDRCRARGKTHTQALLRLARHRISVLFAMLRDGTFYEPRTPRLA

SEQ ID NO: 19348 - protein, 398 aa, unidentified
  source 1..398: note = protein_07d54be
  REGION 6..162: note = RuvC_domain
  SITE 9: note = RuvC_P1
  SITE 60: note = RuvC_P2
  SITE 100: note = RuvC_P3
  SITE 102: note = RuvC_P4
  SITE 105: note = RuvC_P5
  REGION 267..354: note = Tnp_domain
  SITE 275: note = Tnp_P1
  SITE 306: note = Tnp_P2
  SITE 314: note = Tnp_P3
  SITE 315: note = Tnp_P4
  SITE 327: note = Tnp_P5
MSRIWAGTDCGKTHHHCLVLDAEGDTLLSRRVANDEPELLELIGDVLDIADGGRVTWAMDMTGGEPALLIELLIAHGQELVYIPGVVVNRATDSYRGEGKTDARDAKVIADQARMRRDLLPIRPGDEAAIELRLLTEHRSDLVEDRTRTLNRLKSLLNSMFPALERALDMGTVGALVLLTGYQSPAAIRRTGKRRLTTWLRNRKVYRAEALAAKAVEAAERQHTAVAGERAIAKMVHTLAREVIALNEKITETDKLIEGRFREHELANVITSMPGIGTTLGAELLAATGGSMDAFPTPDRLAAFAGVAPAPRDSGQVSGNLHRPKRYHRRLQRVFYTSALVSIRCDPNSRRFYDRKRAEGKRHVQAVLALARRRVNVLWALIRDRRCYTVTPPVTHAA

SEQ ID NO: 19349 - protein, 412 aa, unidentified
  source 1..412: note = protein_4cc2679
  REGION 5..164: note = RuvC_domain
  SITE 8: note = RuvC_P1
  SITE 63: note = RuvC_P2
  SITE 103: note = RuvC_P3
  SITE 105: note = RuvC_P4
  SITE 108: note = RuvC_P5
  REGION 274..374: note = Tnp_domain
  SITE 282: note = Tnp_P1
  SITE 312: note = Tnp_P2
  SITE 320: note = Tnp_P3
  SITE 321: note = Tnp_P4
  SITE 334: note = Tnp_P5
MNPVVGLDVAKGESQVQAFLDKGKPYRKSFSVVHDLDGLGTLLIFLQEVEKMAKGQQPTVILESTGHYHSPVIQFLEEKKYVYIIVNPLISHRAKSSSLRKVKTDAIDAYHLCELFYKEELEPYKKRGIQLLNLRNLTRQQESITEVAAQTKVQLHTLLDQIFPEYRGVFGDLYSRVSLLTLSVFPTSESVLGVSERELTEKIASLCTRRSDKWAGEKAEKLIEAAKRNPFQKNMYDSHVFNLNVLIDIVLQYQEHLSKIATEIDALAQEIEEYKILQTIPGIGEKIAATIISEIGEIDRFSHAKKLVAFAGVDPSVYSSGRFTASVNRITKRGSCRLRHALYMAVRSGIRDARKKKTTDEIIPRNKRLREFYDKKREEGKPFRVAVIACVNKLLHWIYALLRNKTTFHDIA

SEQ ID NO: 19350 - protein, 358 aa, unidentified
  source 1..358: note = protein_678181f
  REGION 6..169: note = RuvC_domain
  SITE 9: note = RuvC_P1
  SITE 68: note = RuvC_P2
  SITE 106: note = RuvC_P3
  SITE 108: note = RuvC_P4
  SITE 111: note = RuvC_P5
  REGION 212..299: note = Tnp_domain
  SITE 220: note = Tnp_P1
  SITE 250: note = Tnp_P2
  SITE 258: note = Tnp_P3
  SITE 259: note = Tnp_P4
  SITE 272: note = Tnp_P5
MKRIVIGIDISKEKIDASAIDMQNAHLGIQKLDYQSFENRPMGFRRMLVWARHLIKGVTLDEVLFCCETTGGYDRCLCDYIYAKDLDIWRESALQIKRSMGVRKGKDDKADSLMIAEYAMRHMDKAVIYQTPSSTVRELKALLQYRHKLVQEKTEKKVRMSHLADTAAKSKSMSFILRDARKSIKTLEKSIKLCEQQILELIKDDEELHSSYRHIVSVNGIGIVNATALIAYSNNFKGITTANRMASYYGIAAFRDTSGSSVDKKAYVKCYSNSLLKAYLTQAAEWTIRENGIYHDYYLRLKEKGKPYGIIINNARNKLIHLVFSLVQNDMDYEHDHEAIRTQRIGNDYTTTPLKKIN

SEQ ID NO: 19351 - protein, 416 aa, unidentified
  source 1..416: note = protein_cdf82c1
  REGION 4..170: note = RuvC_domain
  SITE 7: note = RuvC_P1
  SITE 67: note = RuvC_P2
  SITE 107: note = RuvC_P3
  SITE 109: note = RuvC_P4
  SITE 112: note = RuvC_P5
  REGION 278..364: note = Tnp_domain
  SITE 286: note = Tnp_P1
  SITE 317: note = Tnp_P2
  SITE 325: note = Tnp_P3
  SITE 326: note = Tnp_P4
MLFIGDDWAEDHHDVELEDEGGRRLARARLPEGLEGIARLHALVAEHARAGWSGLSSEEVAGRVVVGIETDRGPWVSALRAAGYQVFAINPLSVARYRERHSTSGAKSDAGDAHVLAEIVRLDRGHHRAIAGDSELADAVKLLSRAHQTAIWERTRHVLRLRSVLREFFPAAVEAFDDLASADALSLLGRAPDPARAAKLPRAQIPAALRAARRHHAEARADAMLTVLRAPGLRQPPVTEGAYAAVVAGQVRIITALNEQIAGLQEVMAGHFGRHPAADIYLSQPGFGVVLAARALGEFGDDNQRFSDARARKNYSGQSPITRASGKKTVVLARYATNRRLGAALHLQAFAALGASPGARAYYDALRGRNIGHHAALRQLANRLVGILHGCLKTGTLYDEDTAWQHHHTDTQTAAA

SEQ ID NO: 19352 - protein, 296 aa, unidentified
  source 1..296: note = protein_7d8a59c
  REGION 27..104: note = RuvC_domain
  SITE 43: note = RuvC_P3
  SITE 45: note = RuvC_P4
  SITE 48: note = RuvC_P5
  REGION 164..249: note = Tnp_domain
  SITE 172: note = Tnp_P1
  SITE 202: note = Tnp_P2
  SITE 210: note = Tnp_P3
  SITE 211: note = Tnp_P4
  SITE 223: note = Tnp_P5
MNTVTLIGIDLGKHSFHLHGQDEGHQAKLISPQFVRPFVQGNKNDFADAQAICEAASRPSMRFVSVRNEAQQTVSALHRVRESLVRERTGVINQLHAFLLEFGISRPRGQAIIRRLPAVLAEHELPPRLVALLERLQTHFKYLDEQIAQIERELCQQLREDERSQRLLEIPGIGPITASVLMTELGDAQQFGSARQFAASVGLVPRQYSTGGKPTLLGISKRGDKNLRRLLVQGARAIMQRVEQRTDRLGIWVRELLARRHSNLVACALANKLARIAWAILANGTNYRSQQAVAAA

SEQ ID NO: 19353 - protein, 300 aa, unidentified
  source 1..300: note = protein_3f39663
  REGION 1..99: note = RuvC_domain
  SITE 39: note = RuvC_P3
  SITE 41: note = RuvC_P4
  SITE 44: note = RuvC_P5
  REGION 161..247: note = Tnp_domain
  SITE 169: note = Tnp_P1
  SITE 198: note = Tnp_P2
  SITE 206: note = Tnp_P3
  SITE 207: note = Tnp_P4
  SITE 219: note = Tnp_P5
MALEACGGSHHWGRRLAALGHTVQLIPPQYVKPFVRRGKNDRNDAEAISEAAARPDMPSVPVKSAEQQAEAIVLSARELLVRQRTQLVNAVRGHAAEFGIVAAKTISQLPGLLEVVAAAETVPATAKEMLAFLGEQVAQLDEPIAELECRMKQQHKANPVSQLLAEVPGIGPVSALSLALTIDPGRFTSGRHFAAWLGLVPKEHSTGGRQRLGGISRAGNERLRQLLVVGAMAVIRFAKPGSKSASAWLLALLERKPRKLAAVALANKMARIVWAMMATGGTYRGSKRVVTPAAEAAAAA

SEQ ID NO: 19354 - protein, 402 aa, unidentified
  source 1..402: note = protein_6dd3790
  REGION 5..164: note = RuvC_domain
  SITE 8: note = RuvC_P1
  SITE 61: note = RuvC_P2
  SITE 102: note = RuvC_P3
  SITE 104: note = RuvC_P4
  SITE 107: note = RuvC_P5
  REGION 271..356: note = Tnp_domain
  SITE 279: note = Tnp_P1
  SITE 309: note = Tnp_P2
  SITE 317: note = Tnp_P3
  SITE 318: note = Tnp_P4
  SITE 329: note = Tnp_P5
MTLAVGIDIAKEFHWAAVVVAETGRELISRRVDNDPEAIAGFLQELDQAVAEHGPLTAGIDVLGGIAGLVTVMLLEHRHRLVHVPGLTVNRSRHGTRGGEHKSDPRDARVIADQLRLRGDWRPVTLGDELTNDLSLLVGRRRDLVTEQTRRINRTRDMLAGIFPGLERVVDLTTLCGLRLLARYVTPGEIRRAGRSRIVAYLRRNGVRSDYAERLATAVVEAAHHQRVVVPSQERIARFVREQAADALTARERLVAVEAEIGEVLARHPDAAPIRSMPGMGATLTAEFLAEIGDLARFANADALAAASGLAPVLQQSGKMNYTRRAVGGAKNLKRIFFRSAFCAIQLDPASKTYYLRKRGEGKRHTQAVIALARRRVNVLYAILRTRQPYRANHAATTNTAA

SEQ ID NO: 19355 - protein, 417 aa, unidentified
  source 1..417: note = protein_e04bebb
  REGION 18..170: note = RuvC_domain
  SITE 21: note = RuvC_P1
  SITE 69: note = RuvC_P2
  SITE 107: note = RuvC_P3
  SITE 109: note = RuvC_P4
  SITE 112: note = RuvC_P5
  REGION 277..363: note = Tnp_domain
  SITE 285: note = Tnp_P1
  SITE 316: note = Tnp_P2
  SITE 324: note = Tnp_P3
  SITE 325: note = Tnp_P4
  SITE 336: note = Tnp_P5
MEYLPDTLPAIPPGGVTCGIDWANDDHAVCVVDLAGKIVQRFTAEHSGEGLAGLVRRLRRAGAGEVAIERPGGKVADTLLEAGLTVVVISPNQVKNLRGRYGSAGNKDDRFDAFVLADTLRTDRARLRPLLPDTPATVTLRQVCRARKALVGHRVAVCNQLRAHLLIAFPGAVGLFAGLDSPISLAFLARFDCQDRADWLSPRRLAAWLQTQGYSGRKDPAELHARLAAAPRGATSDDGAAKAHITRALLAVLVSLVHQIKALDAQIAEQLALHADAHIFTSLPRSGTVRAARLLAEIGDCRARFPTPEALACLAGVAPSTRKSGKTTFVDFRWAADKQLRDAVCDFAGDSRRASPWAARLYNDAIARGKDHPHAVRILARAWLYVIWHCWRDGVAYDPARHKALQRILTEQQPAAA

SEQ ID NO: 19356 - protein, 347 aa, unidentified
  source 1..347: note = protein_49ecda3
  REGION 7..147: note = RuvC_domain
  SITE 10: note = RuvC_P1
  SITE 53: note = RuvC_P2
  SITE 88: note = RuvC_P3
  SITE 90: note = RuvC_P4
  SITE 93: note = RuvC_P5
  REGION 210..296: note = Tnp_domain
  SITE 218: note = Tnp_P1
  SITE 248: note = Tnp_P2
  SITE 256: note = Tnp_P3
  SITE 257: note = Tnp_P4
  SITE 269: note = Tnp_P5
MDEIIRIGVDTSKLVFQLHGVNAAEEPVLRKKLRRQEMIAFFEKCPPTVIGIEACAASHHWARLLGLFGHEVRLIAPQLAKPYVKRGKNDAADAEALCEAMSRPTMRFVPVKSAEQQADLMLVGMRERLVATQTQLCNVIRAYAAEFGITAAKGIHKISPLLERLAADDTLPALARELFAAHGDEFAQVGKRLKEVDAKLMAWHRNNECSRRLAKIPGVGPIGAALLVMKAPRAELFASGRQFAAWMGLTPKNHSTAGKVRLGVITRAGDEQVRKTLVVGATALLRHVREGKSRHASPWLVELLKRKPPKLAAVAFANKIARIAWKMMITGEVYQGSAARPALASAA

SEQ ID NO: 19357 - protein, 343 aa, unidentified
  source 1..343: note = protein_ded61a7
  REGION 5..152: note = RuvC_domain
  SITE 8: note = RuvC_P1
  SITE 55: note = RuvC_P2
  SITE 92: note = RuvC_P3
  SITE 94: note = RuvC_P4
  SITE 97: note = RuvC_P5
  REGION 212..300: note = Tnp_domain
  SITE 220: note = Tnp_P1
  SITE 250: note = Tnp_P2
  SITE 258: note = Tnp_P3
  SITE 259: note = Tnp_P4
  SITE 271: note = Tnp_P5
MDHFAGLDVSVKETSVCIVDDSGKIVREVKVASEPQVLLAVLRNPAYHFKRIGLEAGPLSQWLYSAFAEAGLPVICVETRHMRAVLKAQINKTDRNDARGIAQMMRVGLYRPVHVKTLRSQKLRMLLTHRKLLQSKAIALENDLRSTLRNFGLKVGMVGAVKFEGRIKELVENLPDLAVLVEPLLVVRRVLHEQIVILHRRLLTIVRDDDVCRRLMTVPGVGPVVALTYRATVDVPARFKNSKAVGASFGLTPSRHQSGESDRPGGISRCGDEMMRVMLYEAAQVMLTRTSKWSWLKAWAMKIARHRGRKKAIVALARRLAVIMHRLWVDGTEFRWTREVVAA

SEQ ID NO: 19358 - protein, 406 aa, unidentified
  source 1..406: note = protein_222712a
  REGION 6..159: note = RuvC_domain
  SITE 9: note = RuvC_P1
  SITE 57: note = RuvC_P2
  SITE 98: note = RuvC_P3
  SITE 100: note = RuvC_P4
  SITE 103: note = RuvC_P5
  REGION 221..306: note = Tnp_domain
  SITE 229: note = Tnp_P1
  SITE 259: note = Tnp_P2
  SITE 267: note = Tnp_P3
  SITE 268: note = Tnp_P4
  SITE 279: note = Tnp_P5
MTRVIIGVDPHKLSATIEVVDRHEKLLGSGRFRTDQAGYTAMRTYAKNWPDRLWAVEGSNGAGRPLAQRLLEAGEQVVDVPAKLAARVRLFDTGHNRKTDARDAHSIAIVAVRTTTLRVLRPDGELEALRMLCDRREELTRLRVQTVNRLQRLLAELIPGQAKKDLTALQAKAMLATVRPRDVAGKTRRRIAAEELADLVAVEAKMKKATAELKVLVGARGSRLMDLHGVGPVVAARTLADVGDIARFADRNRFASWTGTAPLEASSGEQNRHRLSRAGNRRMNHMIHIAAVSQIRLDTPGRLYYRRKLAAGKTKLEALRCLKRRISDAVYRQMLADTEQAHGSSAEPVGTGPGGHCGASQESSAVDLPPHIDTSDQPLPGPAKPTLQPHQPTRKTSRTKTPQSTG

SEQ ID NO: 19359 - protein, 344 aa, unidentified
  source 1..344: note = protein_7beca9d
  REGION 7..148: note = RuvC_domain
  SITE 10: note = RuvC_P1
  SITE 53: note = RuvC_P2
  SITE 88: note = RuvC_P3
  SITE 90: note = RuvC_P4
  SITE 93: note = RuvC_P5
  REGION 213..298: note = Tnp_domain
  SITE 221: note = Tnp_P1
  SITE 251: note = Tnp_P2
  SITE 259: note = Tnp_P3
  SITE 260: note = Tnp_P4
  SITE 272: note = Tnp_P5
MSKVITIGLDIAKNVFHAHGADERGAMVFSRKLTRGKLLEFFAGQPACTVALEACGGAHHWARQLQALGHDVRLIPPAYVKPFVKRNKNDAVDAEAICEAAQRPGMRFVAIKTEEQQAAGLVFRTRDLVVRQRTQLINAIRGHLAEYGWVAPRGTASMTMLADLLQDGDMASSLPEAARPMFKLMIDLLAELDEQIATLDREIARRAKDDEAARRLMTIPGIGPIAATAIIALAPPIETFRKGRDFAAWLGLAPRQHSTGGKQRLGSITKMGERTIRRLLIIGASSVVLQASRRGAQSGSWLERMLARKPRMLVSVALANKMARMVWALLTKDEDYRAPAAVSA

SEQ ID NO: 19360 - protein, 304 aa, unidentified
  source 1..304: note = protein_1a532f1
  REGION 4..147: note = RuvC_domain
  SITE 7: note = RuvC_P1
  SITE 50: note = RuvC_P2
  SITE 90: note = RuvC_P3
  SITE 92: note = RuvC_P4
  SITE 95: note = RuvC_P5
  REGION 183..266: note = Tnp_domain
  SITE 190: note = Tnp_P1
  SITE 219: note = Tnp_P2
  SITE 227: note = Tnp_P3
  SITE 228: note = Tnp_P4
  SITE 239: note = Tnp_P5
MFGIGIDVSGENLDVAVHEQAFRQFKNNKRGWASLIRWLQRWPAKQVVLEASGGYEQKALDALHEAGLPMVRINPGRGRSFASATGRQAKTDRIDAMVLAHMADALKLTRYVPPAAWQRRLGELCQRRRHLVQMRVSEHQRMRAFSEPCLISMLNQHLDEIQKSIKQLDATIAALLAEQDGWRDFAKLKGAGPVLMATLACELPELGKLSGKAISALVGVAPMNRESGTWKGRRNITGGRAVVREALYMAALTAKRYEPRLKEFFESLVNQGKPGKVALVAVMRKMLVILNARKREAEAQMASA

SEQ ID NO: 19361 - protein, 344 aa, unidentified
  source 1..344: note = protein_5ee56b5
  REGION 6..147: note = RuvC_domain
  SITE 9: note = RuvC_P1
  SITE 52: note = RuvC_P2
  SITE 87: note = RuvC_P3
  SITE 89: note = RuvC_P4
  SITE 92: note = RuvC_P5
  REGION 211..296: note = Tnp_domain
  SITE 219: note = Tnp_P1
  SITE 249: note = Tnp_P2
  SITE 257: note = Tnp_P3
  SITE 258: note = Tnp_P4
  SITE 270: note = Tnp_P5
MNITTIGIDLAKNVFAVHGMDAQGHTVLKKLLRRDQLTNFFANVPACRVGMEACGGAHHWARQLQALGHDVRLIAPQFVKPFVKSNKNDAADAQAICEAVARPSMRFVPVKTLEQQSILALHRARQGFVEARTAQANQIRGLLAEFGLILPQGIAHVRERVPNLVDEHRDELPGPFVELISALLEHFRMLDVQARALEKNIERWAKEQDDCRRLQTVPGLGPITASALVASIGNASAFTSGRQLAAWLGLVPRQHSSGGKNMLLGMSKRGDSYLRTLLIHGARAVIHAIQRRPPAHGWIQSLLGRRHANVAAVALANKNARIVWALLTHRRSYMPGFEPVPMQG

SEQ ID NO: 19362 - protein, 424 aa, unidentified
  source 1..424: note = protein_ad357f7
  REGION 4..157: note = RuvC_domain
  SITE 7: note = RuvC_P1
  SITE 57: note = RuvC_P2
  SITE 94: note = RuvC_P3
  SITE 96: note = RuvC_P4
  SITE 99: note = RuvC_P5
  REGION 285..371: note = Tnp_domain
  SITE 292: note = Tnp_P1
  SITE 323: note = Tnp_P2
  SITE 331: note = Tnp_P3
  SITE 332: note = Tnp_P4
  SITE 344: note = Tnp_P5
MLGVGIDWAESFHDVAVGHPGKGVIEQFRIDHTAAGVHRLVTRCLELEPDPAEIRVVLETRHGLLVESLVDAGFTVLPVNPDLVARRRGPAKKKDDAEDARICCLMALDQFLELRKLIPHGELAGELRSITRDDERASRDERRLLNRLRADLLTTFPAALAIAGDDLGSPVMLKLLARWPGHRQLAAAGAEELEAFARAAKHGWPARFAARVTDALAAEQLSTQDYLVRAKETTIALTATQLLALRQARKAWERRMGELLLGSARYGRAKQPKDPDPGKAIPGGDIYLSFPGLGDILAARIAGEIGDHIDQFDSPSGLQCYAGTAPVTRRSGRSELTVARRLAHNRYLGNAVYQWAFCSLTKSRWAREFYDTKIAMGKGHHAVLRALGNRWLEILWHCLMKGTRYDETIHVRNRQQALGPRAAA

SEQ ID NO: 19363 - protein, 340 aa, unidentified
  source 1..340: note = protein_c89bd0c
  REGION 6..147: note = RuvC_domain
  SITE 9: note = RuvC_P1
  SITE 52: note = RuvC_P2
  SITE 87: note = RuvC_P3
  SITE 89: note = RuvC_P4
  SITE 92: note = RuvC_P5
  REGION 211..300: note = Tnp_domain
  SITE 219: note = Tnp_P1
  SITE 249: note = Tnp_P2
  SITE 257: note = Tnp_P3
  SITE 258: note = Tnp_P4
  SITE 270: note = Tnp_P5
MKITTFGLDLAKNVFQLHWVEPETGEVKRRSLKRDQTIKFFAQRSASVVAMEACGSAHYWARKLIELGHEARLIAPQFVRPFVRSNKTDAADAQAIWEAAQRPERRFVAVKSVHQQAVLMLHRVREQRVKMRTMQINQLRGLLYEFGVILPAGRHKAMPQVTQALARLEDTLPAMALEVLREQCASIEALSAQIEEIERKLAAWRKEDEAAKRLMQMPGVGLLTATAAVAAVGDAKVFSSGREFAAFLGLVPRQSGTGGRVKLLGISKRGDGYLRRLLIHGARAVITHAKARDPWVEALLARRPLNAVVVALANKMARTIWALLAHGRHYEPRGQALGCA

SEQ ID NO: 19364 - protein, 401 aa, unidentified
  source 1..401: note = protein_7c39615
  REGION 4..156: note = RuvC_domain
  SITE 7: note = RuvC_P1
  SITE 56: note = RuvC_P2
  SITE 93: note = RuvC_P3
  SITE 95: note = RuvC_P4
  SITE 98: note = RuvC_P5
  REGION 264..350: note = Tnp_domain
  SITE 272: note = Tnp_P1
  SITE 303: note = Tnp_P2
  SITE 311: note = Tnp_P3
  SITE 312: note = Tnp_P4
MWYAGVDWADSHHDVVVITETSRQVASRRVAHTAEGLAELIAFLQAIAPLDQIACIIETSQGLLISTMLEAGCTIYPVNPKTIDRRRAASGAKTDTIDAYLLAKTGRSDLPDLRKLTPDSPIIQELKALTRDQDSLVQSQTRVVNQLTACLKAYYPVALQLFSKLQQRSTLIFLQTYPTLEAAQQASVAEITRILKEAGHPTARQSALKIQEALHQPQLHADAITTRTKSRLMMALVAQLLPLIEQISSYDKEITALFLTHEDRELFSSLPGAGKRLAPRLLAEWGSDRTRYGGSTSVQALAGTAPVAFQSGNYAKAHKRYACLKPLRNTLHQFAWQSTKQETWALLYYKRKRVEGKSHSMAVRSLANVWVRIIYAMWFEHKGYETATFEAAQHHHASRAA

SEQ ID NO: 19365 - protein, 344 aa, unidentified
  source 1..344: note = protein_4f4a5c7
  REGION 19..167: note = RuvC_domain
  SITE 22: note = RuvC_P1
  SITE 69: note = RuvC_P2
  SITE 109: note = RuvC_P3
  SITE 111: note = RuvC_P4
  SITE 114: note = RuvC_P5
  REGION 210..297: note = Tnp_domain
  SITE 218: note = Tnp_P1
  SITE 248: note = Tnp_P2
  SITE 256: note = Tnp_P3
  SITE 257: note = Tnp_P4
  SITE 270: note = Tnp_P5
MMNIQLKTNDVQVNSIHQAGIDVGAEELVMVIRKNGKLFNPQTFTNTRADRARLVMKLVKLPGVIVCMEATGVYHFDLAVALHDAGVLVMVINPKSSHNFAKVLMKNSKTDAVDANTLAEYAARMDFAAWTRPSDETIAVRCFSRRITALTTQKAAAKNHLHALTATQETPKAVLRDAKLAITQLQKRIDRLTTEALLLIGKHPKLERALTLLISIKGIAETSAISLMGELLLLPPDLTHREWVKFAGLDPKAFDSGKSVHKKSRISKAGNRNIRAALYMPALSAKQHDPHVRAYFQHLVANGKKPLQAVCAIMRKLIHAIHGMLKNDEPFDNTRFYKIPVSAV

SEQ ID NO: 19366 - protein, 401 aa, unidentified
  source 1..401: note = protein_0d0749a
  REGION 10..165: note = RuvC_domain
  SITE 13: note = RuvC_P1
  SITE 62: note = RuvC_P2
  SITE 102: note = RuvC_P3
  SITE 104: note = RuvC_P4
  SITE 107: note = RuvC_P5
  REGION 271..357: note = Tnp_domain
  SITE 279: note = Tnp_P1
  SITE 309: note = Tnp_P2
  SITE 317: note = Tnp_P3
  SITE 318: note = Tnp_P4
  SITE 330: note = Tnp_P5
MSTRQARIWVGIDAGKGHHWAVALDADGETLFSTKVINDEAQILALIETARERADEVRWAVDISGRASTLLLALLVAHGQNVVYVPGRTVNRMSGAYQGEGKTDAKDARVIADQARMRPKSFAVLDTPPELVSTLRVLTNHRADLIADRVRLINRLRDLLVGICPALERAFDYSAAKGPVVMLTEYQTPAALRRVGVKRLTTWLERRKVRSADTVAAKAVEAAQSQQIALPGEKRAAKLVCDLAHQLLALDERIKDNDREIRETFRTDDRAEIIESMPGMGPILGAEFVAIVSDLSGYRDAGRLASHAGLAPVARDSGRRTGNYHRPKRYNRRLRHIFYMAAQTAMMRPGPSRDYYLRKRSEGLIHTQALLALARRRVDVLWAMLRDKRHFTSAPPATQAA

SEQ ID NO: 19367 - protein, 339 aa, unidentified
  source 1..339: note = protein_966bb4f
  REGION 6..148: note = RuvC_domain
  SITE 9: note = RuvC_P1
  SITE 52: note = RuvC_P2
  SITE 87: note = RuvC_P3
  SITE 89: note = RuvC_P4
  SITE 92: note = RuvC_P5
  REGION 211..300: note = Tnp_domain
  SITE 219: note = Tnp_P1
  SITE 249: note = Tnp_P2
  SITE 257: note = Tnp_P3
  SITE 258: note = Tnp_P4
  SITE 270: note = Tnp_P5
MELNVVAIDIAKKVFQLHWVELDTGSIESLKLKRSQLLAWFASHQPVRVVMEACGGAHEWGRELIKLGHDVRLLPPKMVRPFVQRNKTDAADARAIWTASRQPGVRFVALKSEAQQIVLALHRVRAQLMKMRIMQTNELRGLLYEFGIVLPEGHPALMKELPAALRTAQARLPAMFLDTLHEQVRRVAQLQADIGAIERRLSHQMREMPACNTVAEIPGVGLMTATAIVASMGSPSAFKDGREFAAWIGLVPRQTGTGGRVRQLGISKRGDAYLRTLLMHGARAVVRSDRATTWPWLAALLKRKPYTVAVAAVANKIARTIWALLAKGQAWQPRAWQPA

SEQ ID NO: 19368 - protein, 338 aa, unidentified
  source 1..338: note = protein_870afa8
  REGION 6..147: note = RuvC_domain
  SITE 9: note = RuvC_P1
  SITE 52: note = RuvC_P2
  SITE 87: note = RuvC_P3
  SITE 89: note = RuvC_P4
  SITE 92: note = RuvC_P5
  REGION 212..293: note = Tnp_domain
  SITE 220: note = Tnp_P1
  SITE 250: note = Tnp_P2
  SITE 258: note = Tnp_P3
  SITE 259: note = Tnp_P4
  SITE 266: note = Tnp_P5
MQVSTIGVDLAKNVFQVHGVDSAGKVVISRQLRRKQVIDFLSKIPACLVGMEACGTAHHWAREVSKLGHTVRLMPPSYVKGYVKRSKNDAADAAAICEAVTRPSMRFVPIKSADQQALLMLHRTRDLLIRQRTQLINALRAHLAEFGLVAETGREGLAHRAAIITDERNREALPSAMKQALQAIVDQLAALELRVGALDRAIHAHHRANDMSCRLETVPGIGVIGATAIASTVTDPSTFKSGRDFAAWIGLVPRQHSTGGKERLEGDRYLRRLLVIGATAVVQHARRHPQKYPWVMRLLAKKPAKLVAVAVANKMAHIAWAIMAKGGHYRAPELAAAA

SEQ ID NO: 19369 - protein, 333 aa, unidentified
  source 1..333: note = protein_6c77f62
  REGION 10..169: note = RuvC_domain
  SITE 13: note = RuvC_P1
  SITE 66: note = RuvC_P2
  SITE 106: note = RuvC_P3
  SITE 108: note = RuvC_P4
  SITE 111: note = RuvC_P5
  REGION 277..333: note = Tnp_domain
  SITE 285: note = Tnp_P1
  SITE 316: note = Tnp_P2
  SITE 324: note = Tnp_P3
  SITE 325: note = Tnp_P4
MGERMRVLLAGDDWAEDHHDVELMDQAGGTLARARLPEGVAGMARLHAMIGEQLGEDAEAAEVRVGIETDRGLWVAALAAAGYVVYGINPLQVARYRERHAVSGAKADKADAHTLADMVRTDGHQLRPVAGDSEQAQAVKVIARAHKTLVWERTRAVQRLRHQLRDYFPAALEAFADLDAPDALELLAKAPDPASAARLTAAQIDAVLKRARRRDRAGKTAAIKTALRGQQLAQPPAVTAACAAVTRSLTALITTLNQQVRVLEGQVAEHFRAHPDAEIIASQPGLGQVLGARVLAEFGDDRYRYTSAKARKNYAATSPITRQSGKRKTVIAR

SEQ ID NO: 19370 - protein, 344 aa, unidentified
  source 1..344: note = protein_bb2fbb7
  REGION 6..147: note = RuvC_domain
  SITE 9: note = RuvC_P1
  SITE 52: note = RuvC_P2
  SITE 87: note = RuvC_P3
  SITE 89: note = RuvC_P4
  SITE 92: note = RuvC_P5
  REGION 211..294: note = Tnp_domain
  SITE 219: note = Tnp_P1
  SITE 249: note = Tnp_P2
  SITE 257: note = Tnp_P3
  SITE 258: note = Tnp_P4
  SITE 270: note = Tnp_P5
MSIAILGIDLGKNSCSVVGVDAAGAVVVRRTMRRQTLIDYVVKLPACVVAMEACCGAHHLGRRFAEQGHEIRLMSPEYVRPYIKAQKNDDRDAEGIAEAASRPTMRFVDLKSQEQLDIQTLHRVRSRLVAERTNLLNQMRAILLERGLIFPAGRLKFEHELDQMLSERNETLSPRMQDLIGGLRAEWKELDKKIGALNREFVQLARNDAAAHRLTLIPGIGVLNATALIAAVGDASSFAKARDLGSWLGLVPRQYSTGGKPRLLGISKRGNTYLRTLLIHGARAALPSLSKSDTPIGRWLTEMIERGVHRNAIVVALANKLARIAWAVLRKKTSFERGYLAAAA

SEQ ID NO: 19371 - protein, 338 aa, unidentified
  source 1..338: note = protein_f526c80
  REGION 6..148: note = RuvC_domain
  SITE 9: note = RuvC_P1
  SITE 52: note = RuvC_P2
  SITE 87: note = RuvC_P3
  SITE 89: note = RuvC_P4
  SITE 92: note = RuvC_P5
  REGION 211..298: note = Tnp_domain
  SITE 219: note = Tnp_P1
  SITE 249: note = Tnp_P2
  SITE 257: note = Tnp_P3
  SITE 258: note = Tnp_P4
  SITE 270: note = Tnp_P5
MDITRIGIDLAKQVFQIHGVDRHGKAVVRKQLRRSQMMAYFSKLPPTLIGMEACGSAHYWARELAKLGHDARLMSPQFVKPYVKSGKNDANDAEAICEAVSRPNMRFVPVKSIEQQVMQAEHRIRARLIRARTALGNEIRGLLGEFGIILPTSLGSVRRALPELLEDAENGLTGEFRRLLSQLGEELRRLDDGIKEYDARLVQRTKEDDRIKRLLEIEGIGPVSASALVSAVGDGSQFAKGRDMAAWLGLVPNQHSSGGKNRLGHISKRGDKYVRMLLIHGARAVLKAAESKTDGRSRWVTSLAQRRNKNIATVALANKNARIAWAILSRDESYRRAA

SEQ ID NO: 19372 - protein, 274 aa, unidentified
  source 1..274: note = protein_fc09541
  REGION 3..118: note = RuvC_domain
  SITE 18: note = RuvC_P2
  SITE 57: note = RuvC_P3
  SITE 59: note = RuvC_P4
  SITE 62: note = RuvC_P5
  REGION 151..235: note = Tnp_domain
  SITE 159: note = Tnp_P1
  SITE 188: note = Tnp_P2
  SITE 196: note = Tnp_P3
  SITE 197: note = Tnp_P4
  SITE 208: note = Tnp_P5
MALKRWLGAGLPELVVYEATGAYHSAFELAFSGQLPLHKINPLQARRFAQACGLRAKTDKVDAAMLAAMGATLDMEPDPVVSKEHYELKELQIERTALIKDRTRLKNRLKTQILALTRRQTKARLAQIERQLKAIDGEIETRIEQDRPRALDILKSIPGIGSTTAAAILIECPEIGSLGRKQIASLAGLAPMTRQSGQWRGTAFIQGGRKFLRDALYMPALVTSKFNPDMAAKYKAMRRERKPEKVALTAIMRKLIELANTLIKQNRTWTQKPA

SEQ ID NO: 19373 - protein, 408 aa, unidentified
  source 1..408: note = protein_10cdb04
  REGION 10..158: note = RuvC_domain
  SITE 13: note = RuvC_P1
  SITE 64: note = RuvC_P2
  SITE 98: note = RuvC_P3
  SITE 100: note = RuvC_P4
  SITE 103: note = RuvC_P5
  REGION 253..342: note = Tnp_domain
  SITE 261: note = Tnp_P1
  SITE 293: note = Tnp_P2
  SITE 301: note = Tnp_P3
  SITE 302: note = Tnp_P4
  SITE 313: note = Tnp_P5
MLKIVYPNCCGIDVHKTFVLAVIAITDEHGVTQYFRHRFSTFTKGLGELKQWLEYYSCTDVCMESTGKYWIPVYNVLEDSCSICLAHPKYVKAIRGKKTDKKDAKWIADLFKHDLVAGSFIPPLPIRELRDLVRYHFKLTNFCSSEANRLQNSLTVSNITLSSVLSDVLGVSGSRIIDAILEKPTDEIDLSALIHGRLKSKLSDLELAIDGKITDEQAIKIRIIKSHYDALTLCKSDLEKAIIEVAEEFRAQQELIQTVPGCANQFTAIKIISEIGVDMGQFPTAGHLCSWAGLTPTNDESANKKKSVRISKAGHYLKPLLVQIANGIVKSEKYPEHRNKYLQLKKRRGHKKAIIAIARRILTAIYHVLLKREPYDSSYYSIEIVHPNRVMTINGAISFAKSHGFVVS

SEQ ID NO: 19374 - protein, 339 aa, unidentified
  source 1..339: note = protein_d9e0cd1
  REGION 3..157: note = RuvC_domain
  SITE 6: note = RuvC_P1
  SITE 55: note = RuvC_P2
  SITE 96: note = RuvC_P3
  SITE 98: note = RuvC_P4
  SITE 101: note = RuvC_P5
  REGION 219..304: note = Tnp_domain
  SITE 227: note = Tnp_P1
  SITE 257: note = Tnp_P2
  SITE 265: note = Tnp_P3
  SITE 266: note = Tnp_P4
  SITE 277: note = Tnp_P5
MIIGVDPHKSTHTVVAIDRDERPLARLRLVAERCQTQRLLAWAEPLGRERTWAVESAGGLGKLVAQQLLEAGEHVVDVPPTLAARVRLLGSTKASKNDPNDALATAIAGLGHCGLRAVRVEDHTAVLRMLIDRYDDLVALRTHAACRLHVALRELIAGGAPRRLGASRATKLLGNIDPQGAAGLERKRLAVELLADLRRLDRDIATAKRRVSDAVTASGTSLLELHGVGPIVAGFILGHVGDPARFATPERFASYNGTAPIEASSGPRKRHRLNPRGNRKLNHALHLAAVTQVRHDTPGRAYYQRKIAEGKSKKEALRALKRRISDAVWRQLQVDLGRR

SEQ ID NO: 19375 - protein, 341 aa, unidentified
  source 1..341: note = protein_050eb69
  REGION 7..148: note = RuvC_domain
  SITE 10: note = RuvC_P1
  SITE 53: note = RuvC_P2
  SITE 88: note = RuvC_P3
  SITE 90: note = RuvC_P4
  SITE 93: note = RuvC_P5
  REGION 210..297: note = Tnp_domain
  SITE 218: note = Tnp_P1
  SITE 248: note = Tnp_P2
  SITE 256: note = Tnp_P3
  SITE 257: note = Tnp_P4
  SITE 269: note = Tnp_P5
MKSFIRIGIDLAKNFFQVHAIEREGAPAVARKLSRGKVLGFFAQAAPCRVGMEACGSSHYWAREIQALGHEVVLIPPAYTKPYVKRGKNDANDAAAICEAMSRPDMRFVPIKSADQQAVLMLHKTRELLVKQRTMTVNALRGHLSEFGLIAPKGIHRVKELLALALADETLPEEAKQASAMLASHSGGLDEKIDDLEKTIARASGKNQTSQLLDEIPAFGPLIASAIAALTPDPRVFRSGSDFSASLGLTPSQHSSGGKDKLGAITKKGNRYLRKMLVVGCTSVLRAAHKHKGALAEWIVAMRARKPERVVAVALANKLARIAWAMMSTGESFRTELYTKA

SEQ ID NO: 19376 - protein, 343 aa, unidentified
  source 1..343: note = protein_76ec493
  REGION 6..147: note = RuvC_domain
  SITE 9: note = RuvC_P1
  SITE 52: note = RuvC_P2
  SITE 87: note = RuvC_P3
  SITE 89: note = RuvC_P4
  SITE 92: note = RuvC_P5
  REGION 211..298: note = Tnp_domain
  SITE 219: note = Tnp_P1
  SITE 249: note = Tnp_P2
  SITE 257: note = Tnp_P3
  SITE 258: note = Tnp_P4
  SITE 270: note = Tnp_P5
MNIVRIGLDLAKYVFHLHGVDERGKVVLRKTLRRPGVAPFFANLPRCVVGMEASNGAHYWAKTLSEFGHDVRLISPQFVTPYVKSSKNDRNDAEAICEAVGRPNMRFVSVKSAEQLAIQAVHRIRSRLVASRVRLVNQIRGLLGEHGVVVAQTIGNLRRALPPIIDDEANGLNSIVRALIGELREELSDLDGRITIYDRKIINLYRMSEACQRLGEVEGIGPITATALVAAAGDGKCFKNGRQFAAWIGLVPKQRSSGGRSRLLGISKRGDRYLRTLLIHGARAALGRTRGKQDPRSLWLLKMRERRHANVVAVALANKNARIAWGLLASGMNYDQHLTVSSA

SEQ ID NO: 19377 - protein, 265 aa, unidentified
  source 1..265: note = protein_2c924f5
  REGION 7..89: note = RuvC_domain
  SITE 28: note = RuvC_P3
  SITE 30: note = RuvC_P4
  SITE 33: note = RuvC_P5
  REGION 149..236: note = Tnp_domain
  SITE 157: note = Tnp_P1
  SITE 187: note = Tnp_P2
  SITE 195: note = Tnp_P3
  SITE 196: note = Tnp_P4
  SITE 208: note = Tnp_P5
MARKLEELGHSPKLISPQFVRPFVKSNKNDFVDAEAICEAASRPSMRFVQPRTESQQAMRALHRVRESLVQDKVKTTNQMHAFLLEFGISVPRGAAVISRLSTILEDNSLPLYLSQLLLKLQQHYHYLVEQIKDLESQLKRKLDEDEVGQRLLSIPCVGTLTASTISTEIGDGKQYASSRDFAAATGLVPRQYSTGGRTTLLGISKRGNKKIRTLLVQCARVFIQKLEHQSGKLARLGQGFTVPEKQLCRHLCSGKQAGQNSLGP

SEQ ID NO: 19378 - protein, 406 aa, unidentified
  source 1..406: note = protein_7928684
  REGION 4..163: note = RuvC_domain
  SITE 7: note = RuvC_P1
  SITE 60: note = RuvC_P2
  SITE 100: note = RuvC_P3
  SITE 102: note = RuvC_P4
  SITE 105: note = RuvC_P5
  REGION 271..357: note = Tnp_domain
  SITE 279: note = Tnp_P1
  SITE 310: note = Tnp_P2
  SITE 318: note = Tnp_P3
  SITE 319: note = Tnp_P4
MLFVGDDWAEDHHDVEVQDSDGKVLKRARLPEGMAGMSRFHELVGRFVAADAEPCDVGVCIETDRGPWVRALVAAGYRVFAVDPKQAARHREILGSSGAKSDKGDAHALADMLRTRHRQLREVAGDSEVAEAVKVVTRAHQSMVWERTRHMLRLRSALREYFPAALEAYKPLGLTSPAVLRLLAKAPAPAAAAKLTAGQIAAALTGRRDVHAKAAAVQQVLRAEHLGQGEIVTSAYAATVRSLVAVITTLNAEITALQGQVEAHFGRHPDAEIILSQPGLGTVLGARVLAEFGDADGRYTCAKARKNYAGTSPITRQSGKMRTVHARFVHNDRLVDALHMQASCALLHDPHVRAYYDQLKARDIGHNAALRQVANRLVGILHGCLKTHTPYDQTTAWSHHHHDLAA

SEQ ID NO: 19379 - protein, 317 aa, unidentified
  source 1..317: note = protein_5e8c61c
  REGION 4..151: note = RuvC_domain
  SITE 7: note = RuvC_P1
  SITE 54: note = RuvC_P2
  SITE 94: note = RuvC_P3
  SITE 96: note = RuvC_P4
  SITE 99: note = RuvC_P5
  REGION 191..276: note = Tnp_domain
  SITE 199: note = Tnp_P1
  SITE 228: note = Tnp_P2
  SITE 236: note = Tnp_P3
  SITE 237: note = Tnp_P4
  SITE 249: note = Tnp_P5
MTFAGIDVSKPHLDLALVSNSPKPTRLRFPNTPEGRQALLAALAHHNPAWVALEPTGPYHLPLLRLLAEKGLPVALVNPYHLAAFRKAKGERNKTDRQDALLLARYAQVYHEDLRAYTLPPETLQTLKALVGYREDLAGREQAILNQMEAAEWAGSREVLALLQKELSCVKALLGEVEARIQALLAALPEAEVLMGLPGVGPQVAAAVLALLPPELWGRAKAAASYAGLIPEREESGKSVERGRLSRKGPPLLRRKLYMGALVAVRHDPEMRAFYHRLLSRGKTKKQALLAVAHKLLRRMMGRLREYYAGQPAQGVA

SEQ ID NO: 19380 - protein, 343 aa, unidentified
  source 1..343: note = protein_68b17e9
  REGION 7..149: note = RuvC_domain
  SITE 10: note = RuvC_P1
  SITE 53: note = RuvC_P2
  SITE 88: note = RuvC_P3
  SITE 90: note = RuvC_P4
  SITE 93: note = RuvC_P5
  REGION 211..298: note = Tnp_domain
  SITE 219: note = Tnp_P1
  SITE 249: note = Tnp_P2
  SITE 257: note = Tnp_P3
  SITE 258: note = Tnp_P4
  SITE 270: note = Tnp_P5
MNINTMIGVDLAKSVFQVHGASMNGEIRFQHKLSRKAFGTFMAKQPTSIVIMEACGSAHYWARVLTGLGHEVRLIAPSYVRPFVKRQKNDAADAEAIVIAAQRPEMRFVERKSEEQQSAAILYRSRQRIVRQRTQAVNALRAALYEFGHIIPQGVHHIPRIRGILEMPDSDLPALMREECLAMLEQIAVLSGWIDTKTAKIKELASTTPVSKRLQTMPGIGPLVAMAVEAFAPDMSSFRSGRDFAAWLGLVPRQFSSGGKERLGRISKAGQADIRQMLIIGAMSRLNWMGRKSIPENSWLARMMSRKPRMLVAIALANKMARQIWAMLTKNEDFRDPVLVMAA

SEQ ID NO: 19381 - protein, 342 aa, unidentified
  source 1..342: note = protein_89b7e91
  REGION 7..148: note = RuvC_domain
  SITE 10: note = RuvC_P1
  SITE 53: note = RuvC_P2
  SITE 88: note = RuvC_P3
  SITE 90: note = RuvC_P4
  SITE 93: note = RuvC_P5
  REGION 211..296: note = Tnp_domain
  SITE 219: note = Tnp_P1
  SITE 249: note = Tnp_P2
  SITE 257: note = Tnp_P3
  SITE 258: note = Tnp_P4
  SITE 270: note = Tnp_P5
MSEIITVGLDLAKNVFQAHGADASGRAVLRKKLRRDQVLAFFSQLPPCGVAMEACGGAHFWGREIGKLGHEVRLIPPAYVKPFVKRQKNDAADAEAICEAAQRPTMRFVPVKSEETQGAAMVFRIRELLIRQRTQAINALRGHLGEFGRIVPQGAANAARLIAIVEDPESGLPADAIATLKVLVGALTHLEAEIGRLDAEIARRAKENEVARRLMTVPGIGPLIATAIAVLAPPPETFRKARDFAAWLGLVPRQHSTGGKQRLGATTKMGERSLRRLLIIGANSVIIKRHVHAAARPGTWLGGMLTRKPPMLVRVALANKMARIVWALMARGGVYQSPVAAA

SEQ ID NO: 19382 - protein, 348 aa, unidentified
  source 1..348: note = protein_7388ef9
  REGION 7..147: note = RuvC_domain
  SITE 10: note = RuvC_P1
  SITE 53: note = RuvC_P2
  SITE 88: note = RuvC_P3
  SITE 90: note = RuvC_P4
  SITE 93: note = RuvC_P5
  REGION 212..299: note = Tnp_domain
  SITE 220: note = Tnp_P1
  SITE 250: note = Tnp_P2
  SITE 258: note = Tnp_P3
  SITE 259: note = Tnp_P4
  SITE 271: note = Tnp_P5
MTNITTVGLDLAKTVFQVHAADQDGRPVVRRKLRRAQMIPFFADMAPCLIGMEACASAHYWARELQALGHEVRLIPPQYVKPFVKTNKNDAADAEAICEALVRPTMRFAAVKSGEQQSVLMLHRARELLVRQRTMLINALRGHCGEFGIVAARGAPKVADLIAVIEDPEDQRVPTLAREALGSLIDQLRAAQAQIRDLEKKLTAWHRANEASRRLEAIPGVGVITATALVATIGDASQFQSGRQLAAWLGLVPRQYSSGGKERLGRISKRGDGYLRRLLVHGARADLRWSRHRKAQRSLWQESLLARRPTNVVLVAMANKTARVVWAMLSRGEAFRTETFRAETPANA

SEQ ID NO: 19383 - protein, 344 aa, unidentified
  source 1..344: note = protein_da9c8c9
  REGION 5..152: note = RuvC_domain
  SITE 8: note = RuvC_P1
  SITE 55: note = RuvC_P2
  SITE 92: note = RuvC_P3
  SITE 94: note = RuvC_P4
  SITE 97: note = RuvC_P5
  REGION 212..300: note = Tnp_domain
  SITE 220: note = Tnp_P1
  SITE 250: note = Tnp_P2
  SITE 258: note = Tnp_P3
  SITE 259: note = Tnp_P4
  SITE 271: note = Tnp_P5
MEHFAGLDVSVKETSVCIVDEAGRITREVKVASTPEALMQVLRAPAYHLKRVGLEAGPLSQWLFGALAEANVPVICVETRHMRAVLKAQINKTDRNDARGIAQMMRAGLYRPVHVKTLRSQKLRMLLTHRKLLQSKAIAIENDLRATLRNFGLKVGMVGTAKFEARIKELVGDDSDLVLMVEPMLIVRRVLREQLAILHRHLLALARDDGVCRRLMTVPGVGPVVALTFRATVDVPARFQNSRAVGAVFGLTPCKHQSGESDYTGGISKCGDEMMRMMLYEAAQIVLIRATKWSWLKSWAMQIAKRRGVKKAIVALARRLAVIMHRIWIDGTEFCWIRQEAVAA

SEQ ID NO: 19384 - protein, 347 aa, unidentified
  source 1..347: note = protein_285bf11
  REGION 6..148: note = RuvC_domain
  SITE 9: note = RuvC_P1
  SITE 52: note = RuvC_P2
  SITE 87: note = RuvC_P3
  SITE 89: note = RuvC_P4
  SITE 92: note = RuvC_P5
  REGION 211..296: note = Tnp_domain
  SITE 219: note = Tnp_P1
  SITE 249: note = Tnp_P2
  SITE 257: note = Tnp_P3
  SITE 258: note = Tnp_P4
  SITE 270: note = Tnp_P5
MKITRIGLDLAKSVFQVFGVDAQEKRVLSRQLKRKEIEAFFRALPPCLVGMEACASAHYWAWVLTEMGHTVQLMAPQFVKPYVKGNKNDANDAEAICEAVSRPGMRFVPVKTIEQLHIQARHRVRTELVKQRTAKANQIRGLLAEYGIVIGLGVRCLRHHLPEILEEAETRLQEDFRVLLTGLREDLVYLDERIKTEDKAIEQLASTHASARRLQQLRGVGPLVATALIAALGDGRQFTNGRQASAWAGLVPGQHSSGGKQTLLGISKRGDTYLRTLLIHGARSALRVARNKTDPLSLWLQGLCARRNRNVAAVALANKTMRLAWVLIRREQDYDPLHGHARPTQPA

SEQ ID NO: 19385 - protein, 339 aa, unidentified
  source 1..339: note = protein_7df6f66
  REGION 6..147: note = RuvC_domain
  SITE 9: note = RuvC_P1
  SITE 52: note = RuvC_P2
  SITE 87: note = RuvC_P3
  SITE 89: note = RuvC_P4
  SITE 92: note = RuvC_P5
  REGION 209..294: note = Tnp_domain
  SITE 217: note = Tnp_P1
  SITE 246: note = Tnp_P2
  SITE 254: note = Tnp_P3
  SITE 255: note = Tnp_P4
  SITE 267: note = Tnp_P5
MKFKRIAIDTSKHVFTLHGVDEHDKPLLRRELKRNQMVPFFSKLAPTEVVLEACGGSHHWGHVLRELGHNVRLIPPQYVKPFVKRSKNDRNDAEAINEAAARPLMRSVAIKTIDQQAQGIVLKHREMLVNQRTQTINALRGHAAEFGVVAAKGTAKVTALLELLTAENGIPAVAVGMFAQMGAHIESLDERIAALDMELAELHKKDSLCRALSEIPGVGRLVATTATLTVDPAKFVSGRHFAAWLGLTPREKSTGGKQRMGSISKAGNERLRQLLVVGAMSVVRYAKPGSKSASPWLLKLLERKPRMLAAVALANKMARIIWAMMAHGEVYRRQPMATA

SEQ ID NO: 19386 - protein, 341 aa, unidentified
  source 1..341: note = protein_68d7820
  REGION 6..146: note = RuvC_domain
  SITE 9: note = RuvC_P1
  SITE 52: note = RuvC_P2
  SITE 87: note = RuvC_P3
  SITE 89: note = RuvC_P4
  SITE 92: note = RuvC_P5
  REGION 211..297: note = Tnp_domain
  SITE 219: note = Tnp_P1
  SITE 249: note = Tnp_P2
  SITE 257: note = Tnp_P3
  SITE 258: note = Tnp_P4
  SITE 270: note = Tnp_P5
MEIDILGIDLAKHVFQLHGADRRGRPVHRAKVSRGSLLEAVRTLKPAMVVMEACSTAHHWARRFQSLGIEVRLISPQYVSPFVKTNKNDRNDAEAIVEAASRPAMRFVTVKSVEQQDIQAAHRMRAILLRHRTAMINQMRGLLGERGLTISRSPEAFKRAIPELLSKSTDELTSFCQTLLTELLQHLHAIEERVHLIETSIQSFMKRSALCKKIAEVPGIGPITATAMVAAVGDAKQFRNGRHLAAWLGLVPRQYSSGGKPRLHGISRRGDTYLRTLLIHGARAVLRYATRKVDPQSVWLQQLIARRGHNCAAVALANKNARIIQALLSSDSTYMKRSAAA

SEQ ID NO: 19387 - protein, 341 aa, unidentified
  source 1..341: note = protein_67592a0
  REGION 6..148: note = RuvC_domain
  SITE 9: note = RuvC_P1
  SITE 52: note = RuvC_P2
  SITE 87: note = RuvC_P3
  SITE 89: note = RuvC_P4
  SITE 92: note = RuvC_P5
  REGION 211..304: note = Tnp_domain
  SITE 219: note = Tnp_P1
  SITE 249: note = Tnp_P2
  SITE 257: note = Tnp_P3
  SITE 258: note = Tnp_P4
  SITE 270: note = Tnp_P5
MKLTTIGIDLAKNVFQVHGADDKGRAVLRKQLKRTQMLPFFAKLSPCRVGLEACGSAHYWARKLQALGHTVELIAPQYVKPFVKRNKNDAADAAAICEAVTRPDMPTVPIKNADQQAILSVHRARQGFVKARTAQSNQIRGLLAEFGFVLPKGIGLLLRRVPEIIEDAENDLPGNFRLLMARLLDHLKELDRQVGELAAEIQLWHRQNTASQRLAAIPGLGPLTATALVASIGDARNFKNGRQLAAWLGIVPRQHSTGGKPTLLGISKRGDAYLRTLLIHGARAVIRTAERKPDADPWLRQLLARRNKNVAAVALANKNARTIWALLAHDREYQADYRMAA

SEQ ID NO: 19388 - protein, 410 aa, unidentified
  source 1..410: note = protein_68c8378
  REGION 15..169: note = RuvC_domain
  SITE 18: note = RuvC_P1
  SITE 66: note = RuvC_P2
  SITE 106: note = RuvC_P3
  SITE 108: note = RuvC_P4
  SITE 111: note = RuvC_P5
  REGION 276..361: note = Tnp_domain
  SITE 284: note = Tnp_P1
  SITE 314: note = Tnp_P2
  SITE 322: note = Tnp_P3
  SITE 323: note = Tnp_P4
  SITE 335: note = Tnp_P5
MEETDNLTEPYTVFCGLDVGKETHHATALNPAGKKLHDRPLPNDEPALRQVFTQLTEAGRVLVIVDQPASIGALSIAVARQMGLDVAYLPGLAMRRLADLHPGESKTDARDAYVIADAARTLPRTLRRVGTDDETLAGLTVLVGYDSDLAAESTRLTNRLRDALLHIHPAAERLLGKHIHRPGVLELLADAPTPADWRQLGGAGIATTMRPRSPRLAKTLPAQLVRVLDEQTVTVPGTAAFDRVIAGVARKLLGVLDERADLAQDVEAALEAHPLAEVLISMPGVGIRTAASLLTIIGDVSAFPTAAHLAAYAGLAPVTRRSGSSIRGEVRSQRGNHALKSTLFLSAFASLGDPTSRGYYDRKRAEGKRHNAALICLARRRVDVLYAMIRDRKHYQPPATNPTPEPARAA

SEQ ID NO: 19389 - protein, 396 aa, unidentified
  source 1..396: note = protein_07597ef
  REGION 6..160: note = RuvC_domain
  SITE 9: note = RuvC_P1
  SITE 58: note = RuvC_P2
  SITE 98: note = RuvC_P3
  SITE 100: note = RuvC_P4
  SITE 103: note = RuvC_P5
  REGION 265..352: note = Tnp_domain
  SITE 273: note = Tnp_P1
  SITE 304: note = Tnp_P2
  SITE 312: note = Tnp_P3
  SITE 313: note = Tnp_P4
  SITE 325: note = Tnp_P5
MAAIWAGIDAGKTHHHCVAIDDSGRRLLSRRVANDEPQLLELLADVQALSDEVTWGIDLADGGAALAIAIFLSHDQPVHYISGRAIHRASESYRGEGKTDAKDAAVIADQVRVRRDLQSLHADDGAVTDLKILTGRRTDLVADRTRTVNRLRAQLTGIFPGLERALDVTNTGPLTLLAGYQTPAAIRRIGSKRLETWLRNRHVLRADRLAEIAVQAAERQHTSLPGEKLTAQLVHTLATEVTALNQRIAELDKAIEARFRDHATFEVITSMPGLGIILGAEFLAATGGDMNLFGTADRLAGFGGVAPVPRDSGKVSGNLRRPQRYNRRLQRVFYISALFSIRHCPESRRFYDRKRAEGKRHTQAVLALARRRVNVLWALLRDGRCYEATPPTVLAA

SEQ ID NO: 19390 - protein, 342 aa, unidentified
  source 1..342: note = protein_ba3d94f
  REGION 7..148: note = RuvC_domain
  SITE 10: note = RuvC_P1
  SITE 53: note = RuvC_P2
  SITE 88: note = RuvC_P3
  SITE 90: note = RuvC_P4
  SITE 93: note = RuvC_P5
  REGION 211..295: note = Tnp_domain
  SITE 219: note = Tnp_P1
  SITE 249: note = Tnp_P2
  SITE 257: note = Tnp_P3
  SITE 258: note = Tnp_P4
  SITE 270: note = Tnp_P5
MDQVSIIGIDLAKRVFQAHGSAPDGSVVFRKKLSRAQLLLFLAAQPRCTVAMEACATAHGWGREIGELGHEVRLIPPIYVKPFVKRQKNDAADAEAIAEAASRPTMRFVAVKSEDQQARSMIFRTRDLLVRQRTQLINALRGHLAEHGVVAPQGTAHVKRLADVIGDETAVLPATVREIGRLYLEQIGLLTGRIEELEKKLRTEAGQAEATRRLQTMPGVGPITAVAIESFAPPMETFRRGRDFAAWVGLVPRQNSTGGKQRLGRTAKMGQRDIRRLLIIGAMAVVNSAARHGAPEGSWLERMLAKKPKMLVAIALANKMARGVWAMMTKQEDYRYPAAVAA

SEQ ID NO: 19391 - protein, 405 aa, unidentified
  source 1..405: note = protein_800ca88
  REGION 5..158: note = RuvC_domain
  SITE 8: note = RuvC_P1
  SITE 56: note = RuvC_P2
  SITE 97: note = RuvC_P3
  SITE 99: note = RuvC_P4
  SITE 102: note = RuvC_P5
  REGION 220..305: note = Tnp_domain
  SITE 228: note = Tnp_P1
  SITE 258: note = Tnp_P2
  SITE 266: note = Tnp_P3
  SITE 267: note = Tnp_P4
  SITE 278: note = Tnp_P5
MKVLIEVDPHKLSATIEVVDTNETVLATGRFGTDNAGYRAMRKRVAAWPERTWAVEGSNGAGRPLAQRLLADGEHVLDVPAKLSARARLFDTGHNRKTDAHDAHSVAVVAVRTTGLRVLSYDAELEALRMLTDRRDELSRTRVQTVNRLHRLLAELIPGTAKKEITAGQAKAMLASVRPRDVVGKTRRRLAAELLAELVVVEKKIKELKKELKAMVLARGSTLMELPGVGPVVAARVLADVGDVARFADRNRFASWTGTAPIEASSGEIVRHRLSRAGNRRMNHMTHIAAATQIRHNTEGRAYYLRKIAAGKTRREAMRCLKRRISDALYRQLVADARAAGIVSAEIGEAGPGGHSGASHKSSAAGLHPHTGTSDQPLPGPAHTTLPPTSPTRKTSPGRTLQTAS

SEQ ID NO: 19392 - protein, 408 aa, unidentified
  source 1..408: note = protein_e3e8376
  REGION 6..159: note = RuvC_domain
  SITE 9: note = RuvC_P1
  SITE 57: note = RuvC_P2
  SITE 98: note = RuvC_P3
  SITE 100: note = RuvC_P4
  SITE 103: note = RuvC_P5
  REGION 221..306: note = Tnp_domain
  SITE 229: note = Tnp_P1
  SITE 259: note = Tnp_P2
  SITE 267: note = Tnp_P3
  SITE 268: note = Tnp_P4
  SITE 279: note = Tnp_P5
MSLVVIGMDPHKRSATIEVMAGDEAVLGGGRYGTDAAGYAAMLAAVKAWPERIWAVEGCQGIGRHLANRLLADGEQVVDVPPKLSARIRVFATGQGRKTDATDAHSVALAATRMGRLRPVADNAQLAVLRILADRRRSLGEDHTRMVCQLHHLLLELIPGGAKKDLSAAQAKALLAKVRPRDAAGKARRRVAAELISDLERIYQRKKAANKELRDLLKATGSTLTRLHGIGPSGAARLLVEVADITRFPSKAHFASWDGTAPIDASSGDQVRHRLSRAGNRQVNRALHIMAVVQLRTPTEGRAYYDHKVAAGKTPMEAMRALKRRLSDIVYHQMILDHQAVQTGPGGHLGAATGSSAAGFNPSTGASEKSLPGPANHRPYPGRPIRSSGRSRRTQQAPARSRGQTHFA

SEQ ID NO: 19393 - protein, 396 aa, unidentified
  source 1..396: note = protein_3df0412
  REGION 4..158: note = RuvC_domain
  SITE 7: note = RuvC_P1
  SITE 59: note = RuvC_P2
  SITE 99: note = RuvC_P3
  SITE 101: note = RuvC_P4
  SITE 104: note = RuvC_P5
  REGION 264..354: note = Tnp_domain
  SITE 272: note = Tnp_P1
  SITE 302: note = Tnp_P2
  SITE 310: note = Tnp_P3
  SITE 311: note = Tnp_P4
  SITE 327: note = Tnp_P5
MITVGIDIGGKRHAVARCRTGQDQADREVLRVTQDRAGFDRLDAWLKGQPEPVGRITMESSGHYWMPLTSHLRGGPVPVTVVNPLGAKYFAKSRLSRTKSDPADARCLALMAQHDHTEPRDPLAGVELRQASRFAMTLVTEQARVCQRLVRLVELGFPELGELFDDPACRTAREVLRVAPTAAAARKRRTSTLADANAGPGHRRLGEAKAERLKEAAATSIAVAELDEEVAFEVGMLLDQYDLYEGQIAEAEEHLASLLDGELARRLRTIPGVGPAITATLIAEIGDIWRFDDADQLLAYAGVHPAERSSGRKGADPETSWHMSKAGNAHLRAAAYRMAVVGISHNPVIKAHYERKRKAGKSKMNALGHCMSKALNLVWGVWRNEADWDPDWGSRT

SEQ ID NO: 19394 - protein, 398 aa, unidentified
  source 1..398: note = protein_aeee139
  REGION 5..163: note = RuvC_domain
  SITE 8: note = RuvC_P1
  SITE 62: note = RuvC_P2
  SITE 102: note = RuvC_P3
  SITE 104: note = RuvC_P4
  SITE 107: note = RuvC_P5
  REGION 273..362: note = Tnp_domain
  SITE 281: note = Tnp_P1
  SITE 311: note = Tnp_P2
  SITE 319: note = Tnp_P3
  SITE 320: note = Tnp_P4
  SITE 333: note = Tnp_P5
MDPVIGLDVAKGESQVQAFLARKQPFGKTFKFKHDTNGLRDFHVFYQEVKLNAETDPVVIFESTGHYHEPVLQYLEERRITYYLVNPVVSYETKKSSLRKVKSDPADARHLCELYYKEDLETFHRKNVQTMNLRNLSRQHDSLTRNYVQLKLQFQTILDQVFPEYKGVFGNLYSQVSLKILLLYSTSDCILKAPTDEIASMMHSLGGKRSYAWFWEKANKLKEAAERNPFKKTLYKSHLVTLKMYIQMLLQQKEFLSILEQEIDALATEFEEYKILRSIPGVGCKIAATLISEIGEITLFSHPKKLVAYAGIDPRIFQSGKFTATINRITKRGSTKLRQSLYTAVQCGLTNNRNTRLREFYDKKRSEGKPHKVAIIACANKLLHWIYAILKHKEPFKV

SEQ ID NO: 19395 - protein, 407 aa, unidentified
  source 1..407: note = protein_7e32b92
  REGION 4..160: note = RuvC_domain
  SITE 7: note = RuvC_P1
  SITE 57: note = RuvC_P2
  SITE 97: note = RuvC_P3
  SITE 99: note = RuvC_P4
  SITE 102: note = RuvC_P5
  REGION 269..355: note = Tnp_domain
  SITE 277: note = Tnp_P1
  SITE 308: note = Tnp_P2
  SITE 316: note = Tnp_P3
  SITE 317: note = Tnp_P4
MIFAGVDWAEAHHDVYFQDVQGRRLAGGRLPEGVRGITGFHELAAAHADEPGEVVIGIETDRGLFVSALLAAGYQVFAVNPMSASRYRDRHGSSGAKSDPGDAKVLADLVRTDRHNHRPVAGDSDLAQGIRALARAHQSMIWARRRQANQLRSALREFYPAALAAFDDLTGGDATAVLKAAPQPALGAALSRAQITAALRRGGRTRRLAERTAAIQAALRAPQLQPAPALAAAMGAAVAATAAVIAEMNTQITALEQQIAADFELHPDAQVVRSLPGLGTILGARVLGEFGDASGRYATAKSRKNYAGTSPITRASGTRRAVLARHARNKRLSDAIYLWAFAALTASPGARAFYDHRRAAGDTHHQALRALGNRLVGILHGCLASRTPYSENTAWAHRTSQETPHAA

SEQ ID NO: 19396 - protein, 401 aa, unidentified
  source 1..401: note = protein_a2a09f9
  REGION 9..163: note = RuvC_domain
  SITE 12: note = RuvC_P1
  SITE 60: note = RuvC_P2
  SITE 100: note = RuvC_P3
  SITE 102: note = RuvC_P4
  SITE 105: note = RuvC_P5
  REGION 270..355: note = Tnp_domain
  SITE 278: note = Tnp_P1
  SITE 308: note = Tnp_P2
  SITE 316: note = Tnp_P3
  SITE 317: note = Tnp_P4
  SITE 329: note = Tnp_P5
MTSSYGVFLGLDVGKGNHHAVGLDPTGKRLHDGPLPNTEAKLQALFDTLAVHGSLLVVVDQPATIGALPVAVARAAGHQVAYLPGLAMRRIADLYPGTAKTDARDAFIIADAARSLPHTLRQVDPGDEALAELEVLVGFDDDLAGEATRLSNRIRGLLTGIHPTLERVLGPRVTHRAVLEILSRCGGPTGIRTAGRRKVTAIATTHAPRMGEKLVADIWTALDEQTVTVPGTTAADTVLPRLADSLKTVLQQRSQVATEVEEILDAHPLARVLTSMPGIGVRTAARILLEIGDASAFKSSGHLAAYAGIAPVTRTSGSSIKGEHPARTGNRKLKRAFFLAAFAALHDPTSRAYYDRKRAEGKKHNAALICLARRRCDVLYAMLRNHTHYRTPQPKNTPAAA

SEQ ID NO: 19397 - protein, 387 aa, unidentified
  source 1..387: note = protein_e1c3cfa
  REGION 7..158: note = RuvC_domain
  SITE 21: note = RuvC_P1
  SITE 64: note = RuvC_P2
  SITE 99: note = RuvC_P3
  SITE 101: note = RuvC_P4
  SITE 104: note = RuvC_P5
  REGION 221..310: note = Tnp_domain
  SITE 229: note = Tnp_P1
  SITE 259: note = Tnp_P2
  SITE 267: note = Tnp_P3
  SITE 268: note = Tnp_P4
  SITE 280: note = Tnp_P5
MTKIIRIGVDTSKSVFVLRVDTSKSVFVLHGVDAAERVVLRKRLRRRQVLELFAQLEPTKVGLEACGAAHYWARELQGLGHEVVLLPPQYVKPYVKRNKNDAADAEAICEAMSRPTMRFVPVKTAEQQAALMLVGTRDALVRRRTQLTNAIRGYAAEFGLIAAKGLDKIEPLLARIAAHAPLPGLARELFAAHAKEYARLQAQIREIEAKLRAWHKHNELSRRLAEVPGIGPIGATLAVMKVPNPKAFRCGRDFSAWIGLTPKDHSTAGKTRLGVITRAGDEALRSALVAGATAVIQHVKQGKGHPSPWLIELVRRKPAKLAAVALANKNARIAWKLMVSTERYNPAHGRAVAASGGRGPALRGGSAPRPPLAPHDKSREITATTRA

SEQ ID NO: 19398 - protein, 392 aa, unidentified
  source 1..392: note = protein_1dc183d
  REGION 6..159: note = RuvC_domain
  SITE 9: note = RuvC_P1
  SITE 57: note = RuvC_P2
  SITE 98: note = RuvC_P3
  SITE 100: note = RuvC_P4
  SITE 103: note = RuvC_P5
  REGION 222..306: note = Tnp_domain
  SITE 229: note = Tnp_P1
  SITE 259: note = Tnp_P2
  SITE 267: note = Tnp_P3
  SITE 268: note = Tnp_P4
  SITE 279: note = Tnp_P5
MSSVIIGVDPHKLSATIEVVDHHGRRLGGGRYPTDNDGYKRVRKYVAQWPDRVWAVEGANGAGRPLAQRLLADGESVVDVPAKLAARVRLFDTGHNRKTDATDAHSIAAVAVHTKNLRVLSADGALEAIRMLCDRRDELSHQRVQTVNRIQRLLSELLPGQRKRDLSADQAKALLATVKPRDLAGKTRRRITAEEIADLVAIDRKLKKINTELKTSVLERGSGLMDIHGIGPAVASRILADVGDVARFADRNRFASWTGTAPLDASSGEQIRHRLSRAGNRRMNHVIHIAAIVQIRNDTEGRAYYRRKLAAGKTPMEALRCLKRRISDVIYRQLVADADEAGPGGHCGATLISSAVDLPPHIDTSDQPLPGPVPVTLRPDASADQRHHPAAS

SEQ ID NO: 19399 - protein, 405 aa, unidentified
  source 1..405: note = protein_35b3ec5
  REGION 15..169: note = RuvC_domain
  SITE 18: note = RuvC_P1
  SITE 67: note = RuvC_P2
  SITE 107: note = RuvC_P3
  SITE 109: note = RuvC_P4
  SITE 112: note = RuvC_P5
  REGION 274..361: note = Tnp_domain
  SITE 282: note = Tnp_P1
  SITE 313: note = Tnp_P2
  SITE 321: note = Tnp_P3
  SITE 322: note = Tnp_P4
  SITE 334: note = Tnp_P5
MYDELTEVAVPEIWAGVDIGKEHHHCVVIDAQGTRLLSRRVLNDETELLQLLADVLALSRNVLWAVDINHGGAALLLGLLVSHDQHVTYITGLAVHRASAGYRGQAKTDAKDAFVIADQARMRTDLGVLRPGDEIAVDLRTLVTRRTDLVCDRTRQINRLRAQLLEIFPALERSLDLTKKGPVLLLTGYQTPAAIRRAGAARITTWLKNRKVRSSEALARSVVEAAEAQFSALPGEKLAATMVARLAKGVMALDEEIAELDALIEGRFREHPRAEVIQSLPGMGTLLSAEFLAATGGDMVAFGTADRLAGYAGLAPVPRDSGRVSGNLHRPRRYHRGLLRAFYLSAFASLRSCPASKRFYERKRAEGKGHKQALLALARRRANVLWAMIRDGACYQATPPVTAAA

SEQ ID NO: 19400 - protein, 278 aa, unidentified
  source 1..278: note = protein_513e9c6
  REGION 3..84: note = RuvC_domain
  SITE 24: note = RuvC_P3
  SITE 26: note = RuvC_P4
  SITE 29: note = RuvC_P5
  REGION 148..234: note = Tnp_domain
  SITE 156: note = Tnp_P1
  SITE 186: note = Tnp_P2
  SITE 194: note = Tnp_P3
  SITE 195: note = Tnp_P4
  SITE 207: note = Tnp_P5
MTKLGHDVRIIAPRFVAPYRKSSKNDDNDAEAICEAVGRPNMRFVPIKTEDQQAVLCLHRIRRGLTKERTAQINQVRGLLAEFGLIIPQGRYAARRRVPEILEDAENGLPMLTRRLLNDINQRILQLDEEILAYDREIEAMARRDEQARRLMAIPGIGPQTATALLASAPDPRQFKSGRHFAAWLGLVPRQYSTGGKVRLGRITKRGDKYLRMLLIHGTRAVIAKLPDRNDRLSGWARDLVERRGYKRAAVALAAKNARIIWALLMNQTEFKTQPVEG

SEQ ID NO: 19401 - protein, 346 aa, unidentified
  source 1..346: note = protein_1db31d1
  REGION 7..147: note = RuvC_domain
  SITE 9: note = RuvC_P1
  SITE 52: note = RuvC_P2
  SITE 87: note = RuvC_P3
  SITE 89: note = RuvC_P4
  SITE 92: note = RuvC_P5
  REGION 211..297: note = Tnp_domain
  SITE 219: note = Tnp_P1
  SITE 250: note = Tnp_P2
  SITE 258: note = Tnp_P3
  SITE 259: note = Tnp_P4
  SITE 271: note = Tnp_P5
MNATTYAADIAKNVLQVHWVDPLTGEIGRKKLTRAKFTEFFASRQPARIVMEACGSAHHWGRTFEAMGHSVELLPARQVRAFVWGNKDDAADARAIWMAAQQGDIRRVPVKTTDQQAVQFLHRTRAHWVSLRTATVNLLRSMLYEFGVLLPQGRNCGLHALAERRAALDESLPAPVLRLIDAQIQVLREMDRQVVAVEAELTLVQKQSQTAKRLRAVPGLGLLGATALASLLGKDGQAWRNAREFACCLGLVPKHTGTGGKVQMGGISKRGDPYIRTILISGARCVMAHLKNPPDWIVKLQARRPANVVAVAIANKLARMAWAIVAHGRDYDQRWSVSPAIPSLAG

SEQ ID NO: 19402 - protein, 347 aa, unidentified
  source 1..347: note = protein_f3c4a69
  REGION 7..147: note = RuvC_domain
  SITE 10: note = RuvC_P1
  SITE 53: note = RuvC_P2
  SITE 88: note = RuvC_P3
  SITE 90: note = RuvC_P4
  SITE 93: note = RuvC_P5
  REGION 210..295: note = Tnp_domain
  SITE 218: note = Tnp_P1
  SITE 248: note = Tnp_P2
  SITE 256: note = Tnp_P3
  SITE 257: note = Tnp_P4
  SITE 269: note = Tnp_P5
MEKLIRIGMDTSKQVFQLHGVNAAEEPVLRRKLRRKEMVAFFQGLEPTVVGIEACGGAHHWARVLQEFGHQVKLLPPKYAKAYVKRGKNDAADAEALCEAMSRPTMRFVAAKTAEQQAAQMLAGTRDRLIRRRTQLTNAIRGYAAEFGLIAARGVDKIAPLLARLHSEPTLPALARELFAGHAKEYAQLQAQLEAIDAQLMAWHRQNEPSRRLVKIPGIGPIGATLLVMKVAQPEAFQSGRHFSAWIGLTPKDHSTAGKTRLGGITRAGDEALRSVLVVGATAVIQQVRRGKGHPSPWLVELLKRKPPKLAAVALANKMARIAWKLMVSGQHFNPAHGIATAMDEAA

SEQ ID NO: 19403 - protein, 329 aa, unidentified
  source 1..329: note = protein_857cf2d
  REGION 4..154: note = RuvC_domain
  SITE 7: note = RuvC_P1
  SITE 54: note = RuvC_P2
  SITE 94: note = RuvC_P3
  SITE 96: note = RuvC_P4
  SITE 99: note = RuvC_P5
  REGION 196..282: note = Tnp_domain
  SITE 203: note = Tnp_P1
  SITE 233: note = Tnp_P2
  SITE 241: note = Tnp_P3
  SITE 242: note = Tnp_P4
  SITE 255: note = Tnp_P5
MCHVGIDIAAASFDMVVRKGDQNEKVITFKQSAAGFDSAIEKLKGCKPISIVMEATGIYYFDLARALNKAGLPVCVINPKSFRHFAELRMKTTKTDSVDAALLADFGQCMKPRQWIAPDDSAVALRDIGRQINRLTHQKTQAKNRLHALQAKSNTQAFIIDDEVDGIEHLERRIQRLTQAAKDQIKGSESLSTPFTNLTFANGVGEASGLAILAELIVLPRCLKAPQVARYAGLDVRLTQSGTSVNKPGRLNKSGNSYLRSAMYMPALSASRCDPNARAFYESLVARGKKKKQAIIAIMRKYLMGIWACIQTGKPFDASLLFSEAHLKG

SEQ ID NO: 19404 - protein, 335 aa, unidentified
  source 1..335: note = protein_371c8e7
  REGION 2..142: note = RuvC_domain
  SITE 45: note = RuvC_P2
  SITE 82: note = RuvC_P3
  SITE 84: note = RuvC_P4
  SITE 87: note = RuvC_P5
  REGION 202..260: note = Tnp_domain
  SITE 210: note = Tnp_P1
  SITE 240: note = Tnp_P2
  SITE 248: note = Tnp_P3
  SITE 249: note = Tnp_P4
MEISSVCVVDAEGRIVREARVPSEPKALIAWFAAHGAPLARIGLEAGPPSHWLHAAMTEAGSAMELLETRHVRAAFKTMPVKTDKKGARGIAQLMRMGWVRSVHCKSPAAQEVRAMLTACKLLQGKLHDVEMSLRGILRGFGLKVGPTTLRTYAARVRALVEGHSTLEAIAAALLKARDVLADELRGFERRVRKMARDNEQARRLMTTPGVGAIVSLTYVSAIDEANRFRSSRMVGAHFGVTPKKYQLARRTIPAGSPRSATPVSGPRSMSAAHVILTPPVKGSDLKTWALGVAKHAGLRKAAVTLARKLAVVLHRMLRDQTDFAAHQAKPMMAA

SEQ ID NO: 19405 - protein, 339 aa, unidentified
  source 1..339: note = protein_0c042d7
  REGION 6..147: note = RuvC_domain
  SITE 9: note = RuvC_P1
  SITE 52: note = RuvC_P2
  SITE 87: note = RuvC_P3
  SITE 89: note = RuvC_P4
  SITE 92: note = RuvC_P5
  REGION 211..298: note = Tnp_domain
  SITE 219: note = Tnp_P1
  SITE 249: note = Tnp_P2
  SITE 257: note = Tnp_P3
  SITE 258: note = Tnp_P4
  SITE 270: note = Tnp_P5
MQVTTIGLDLAKNGFQVHGITKDEEVVFNRPLRRVQLLPFFSKIEPCLIGKEACRSAHHWARELTKFGHEVRLIPPICVKPYVKRGKSDAIDAEAICEAVTRPTMRFVAIKTVEPQALLSLHRARSLLVSQRTQLINGLRGMVSEFGVYIAKGLARVVGFAEDILSGETLDLPDIANEVIHNLCEHLMVLHTRIRWYEDRLKLVAKEDARVRLLRTIPGVGAVTASAIIASIGDGHQFSNGREFAAWLGLTPANKSSGGKEKLGRITKMSDQYLRSLLVVGMTSLVRQTKSHPERASKWLISLLERKPARLATVAMANKTARIVWAVLTRNKPYPPHTA

SEQ ID NO: 19406 - protein, 408 aa, unidentified
  source 1..408: note = protein_37b90c3
  REGION 6..169: note = RuvC_domain
  SITE 9: note = RuvC_P1
  SITE 63: note = RuvC_P2
  SITE 109: note = RuvC_P3
  SITE 111: note = RuvC_P4
  SITE 114: note = RuvC_P5
  REGION 281..367: note = Tnp_domain
  SITE 288: note = Tnp_P1
  SITE 318: note = Tnp_P2
  SITE 326: note = Tnp_P3
  SITE 327: note = Tnp_P4
  SITE 340: note = Tnp_P5
MNPLFVGIDVSSKNNVVCLMKPDGTKFSTFSVQNNLGGAKMLSERIVSALDKLQLSEVTIGMEATSIYGDSLVYALREDGSLGRYQRHIHVLNPKQVRKFKDAYPDLPKNDYVDAFVIADHLRFGRIASEVYMDDYRYRSLQTLTRARFDAVQNLTREKQRFANYLFLKCSGIAQDKDIPNTSATTLAILEHFETVDELAGCDLETLTAFVSAAGRGRFADPEATAKAVQAAARGSYRLPKTVNDSINQAMSVSIASMRALESQIKVLEKAIEQQLEIIPNTLTSIPGIGKVYSAGIIAEIGDIRRFESQASVAKYAGLVWTQHQSGDFEAQNTRMIKSGNRYLRYYLLEAANSVRRCDSEFRRYYDLKFHEVNKFQHKRALALTARKLVRVVFRLLKDNRLYIVPES

SEQ ID NO: 19407 - protein, 390 aa, unidentified
  source 1..390: note = protein_28bc30b
  REGION 4..163: note = RuvC_domain
  SITE 7: note = RuvC_P1
  SITE 60: note = RuvC_P2
  SITE 101: note = RuvC_P3
  SITE 103: note = RuvC_P4
  SITE 106: note = RuvC_P5
  REGION 266..353: note = Tnp_domain
  SITE 274: note = Tnp_P1
  SITE 304: note = Tnp_P2
  SITE 312: note = Tnp_P3
  SITE 313: note = Tnp_P4
  SITE 326: note = Tnp_P5
MICVGIDVAKDKHDCFIINSEGKVLADVFTIPNSMNGFTSLLQRIQDCSSPQDKIKVGLEATGHYSYNILGFLLDNGLDSFVINPLHTNLYRKSLSLRKTKTDRVDARTIAAMLMSDVGLKPYTDTAYHNEELKSLTRYRFDKVKERAQLKQSVARLVCILFPELEKLVPTLHMASIYALLEEFPGAKQVADANMTHLKSVLCDASRGRYGRDKAIEIREAAKTSIGSVIPAKSLELRHTLRLIHELEAEIDEIEAEIQQIMEELHSPITTIPGVGTRMGAMILAEVGDFSRFDSPDKVLAYAGLSPSTYQSGQLTNCYSHMEKRGSRYLRYAIFNATKYVCLWNPDFAAYLAKKRAEGKHYNVAISHAAKKLVRLIFALEKSGRAYQAA

SEQ ID NO: 19408 - protein, 306 aa, unidentified
  source 1..306: note = protein_30e001d
  REGION 6..149: note = RuvC_domain
  SITE 9: note = RuvC_P1
  SITE 54: note = RuvC_P2
  SITE 89: note = RuvC_P3
  SITE 91: note = RuvC_P4
  SITE 94: note = RuvC_P5
  REGION 176..263: note = Tnp_domain
  SITE 184: note = Tnp_P1
  SITE 214: note = Tnp_P2
  SITE 222: note = Tnp_P3
  SITE 223: note = Tnp_P4
  SITE 235: note = Tnp_P5
MKIIRVGVDLAKNVFQVHAVDRCEKVVWRKKLGRAEWLTALLEKIEPGCVVGMEACGGAHHWARQLQKRGFTVKLIAPQFVKPYVKSNKNDANDAEAICEAMSRPSMRFVAVKSVEQQDLQAIHRIRAELVSQRSAKGNQIRGLCSEFGLVAPREMIQLRAAIQEIEIAASTDPVATRLQQLRGVGPIIATAIVANVGDAKQFSSGRQMAASLGLTPQQNSSGGKERLLGITKRGDAQLRTLLIHGARSVLRTAASKNDRMSRWVTHIAETRHHNIAAVALANKTARIAWAMITKGTDYQPGTVVV

SEQ ID NO: 19409 - protein, 353 aa, unidentified
  source 1..353: note = protein_0d6212a
  REGION 4..158: note = RuvC_domain
  SITE 7: note = RuvC_P1
  SITE 56: note = RuvC_P2
  SITE 97: note = RuvC_P3
  SITE 99: note = RuvC_P4
  SITE 102: note = RuvC_P5
  REGION 220..306: note = Tnp_domain
  SITE 228: note = Tnp_P1
  SITE 258: note = Tnp_P2
  SITE 266: note = Tnp_P3
  SITE 267: note = Tnp_P4
  SITE 278: note = Tnp_P5
MIVIGVDPHKSTHTATALDPSTNSDLGSLRIEASVADYERLIGWAKVWPERTWAIENADGLGHHLALWLLARGEVVLDVSATATARVRELSRGGRRKNDRIDAAAAASVAALQGDARPVHSETTTDSLALLDERRVNLSQHRTRTINQLHALLRELIAGGVPTSLTPAKATTALRGLRPRTGTDRVRLELAKDLIADVRRLDDQLAANAAKESALLEEHGTRLQQIDGVGPILAARILGRTGSAARFASAAAYANYTGTAPVQVASADSSQHRLSRYGDRQLNCAIHTIAMVQIRMPASTGRAFYDKKIAQGKPPRHATRALKRHLAAHLWRVMHADELRITGRPPTTIQKAS

SEQ ID NO: 19410 - protein, 398 aa, unidentified
  source 1..398: note = protein_cfef84a
  REGION 6..162: note = RuvC_domain
  SITE 9: note = RuvC_P1
  SITE 60: note = RuvC_P2
  SITE 100: note = RuvC_P3
  SITE 102: note = RuvC_P4
  SITE 105: note = RuvC_P5
  REGION 267..354: note = Tnp_domain
  SITE 275: note = Tnp_P1
  SITE 306: note = Tnp_P2
  SITE 314: note = Tnp_P3
  SITE 315: note = Tnp_P4
  SITE 327: note = Tnp_P5
MSRIWAGIDSGKGHHHGLVLNAEGKTLLSRRVVNDEPELLKLIGDVLDLADGSEITWAIDMTGGEPALLLALLVNHGQEVLYMPGRLVNRASDGYRGEGKTDARDAYVIADQARMRRDLRPIRPGDEATVELKLLTGRRADLVEDRTRAVNRLRGTLLSMFPALERVLDVTNTGPLRLLTGYQTPAAIRRAGVTRLTTWLANRKVRNARTLAEAAVEAAERQHTSVAGEKTIAELVHTLAEEVMALNKRIAEMDKLIEGRFREHELAGIVLSIPGIGSVLGAEFLAAVGGTLDGFDSPDALAAFAGLAPRPRDSGKVSGNLHRPLVYHRRLQRVLYTSALISVRNDPNSQKFYDRKRAEGKKHVQAVLALARRRVNVLWALIRDRRCYQVTPPATTAA

SEQ ID NO: 19411 - protein, 420 aa, unidentified
  source 1..420: note = protein_b03d965
  REGION 21..177: note = RuvC_domain
  SITE 24: note = RuvC_P1
  SITE 74: note = RuvC_P2
  SITE 114: note = RuvC_P3
  SITE 116: note = RuvC_P4
  SITE 119: note = RuvC_P5
  REGION 291..378: note = Tnp_domain
  SITE 299: note = Tnp_P1
  SITE 329: note = Tnp_P2
  SITE 337: note = Tnp_P3
  SITE 338: note = Tnp_P4
  SITE 351: note = Tnp_P5
MSKLVSTIANTFKGVDFMNAVGIDVSKGKSTVAIYQPGDQVILKPCDFHHTQSDISSLIGIIKGLDGATKVCMEHTGRYYEPVATWLSDAGIFVSAVNPILIKQFGDDSLRAPKTDKADAKKIARYTLDRWTKLKQYSHMDEIRNQLKTMNRQFGFYMDQKTAMKNNLIALLDQTYPGANTFFDSPARSDGSQKWVDFVYTYWHVDCVRGKSLEVFTEHYKKWCKSKGYNFSAVKAEEVYNDSADLIAVFPKTTNTKMLIHQAVDMLNLASKTVEALRAKMDQTAATLPEYPVVMAMNGVGPTLGPQLIAEIGDVTRFVKRGSLTAFAGVDPGKNDSGKHSQKSVPTSKKGSPHLRKTLFQIMDSLIQRSPADDPVYAFMDKKRAQGKPYYVYMTAGANKFLRIYYGRVNEYLSTLSEGE

SEQ ID NO: 19412 - protein, 314 aa, unidentified
  source 1..314: note = protein_4040ce5
  REGION 7..148: note = RuvC_domain
  SITE 10: note = RuvC_P1
  SITE 53: note = RuvC_P2
  SITE 93: note = RuvC_P3
  SITE 95: note = RuvC_P4
  SITE 98: note = RuvC_P5
  REGION 188..272: note = Tnp_domain
  SITE 196: note = Tnp_P1
  SITE 225: note = Tnp_P2
  SITE 233: note = Tnp_P3
  SITE 234: note = Tnp_P4
  SITE 245: note = Tnp_P5
MSTQVFVGIDVSKAQLDVAFRPEGRFSAPNDEAGCAQVLERLRAVPPTLVVLEATGGLEIPLTGVLAAAGMPVVVVNPRQVRDFAKATGRLAKTDTLDARTLAHFAEVMRPELRPLPDQQTQALAAILARRRQLVEMLTAEKNRLGSAPKPVRKSLRTHIAWLERELSHTDSNLAHAIRESPVWREKDALLRSTPGVGPVMTTTLLANLPELGTLTGKQIAALAGVAPLNRDSGTWRGKRTVWGGRAQIRATLYMAALVAARFNPVIRAFYQRLCATGKAKKVALTACMRKLLIILNAMLKHRTPWRTELVRCA

SEQ ID NO: 19413 - protein, 332 aa, unidentified
  source 1..332: note = protein_3b165a9
  REGION 4..145: note = RuvC_domain
  SITE 7: note = RuvC_P1
  SITE 49: note = RuvC_P2
  SITE 84: note = RuvC_P3
  SITE 86: note = RuvC_P4
  SITE 89: note = RuvC_P5
  REGION 206..295: note = Tnp_domain
  SITE 214: note = Tnp_P1
  SITE 244: note = Tnp_P2
  SITE 252: note = Tnp_P3
  SITE 253: note = Tnp_P4
  SITE 265: note = Tnp_P5
MRMLAIDLAKQSFHVHGISADGEIISRRVGRQGLPSLIVKLAPAVIAMEACATAHYWGRLFMAAGHEVRLINPHFVKPFVRGSKNDAVDAEAIFDAASRPTMRFVPVKTEEQQDLQSRHRVRDRLVVQRTSLINHLRGLLAEYGLIYPKGAALLLSRVRGGLAEARVSAMARETFEALLDELESLEGRIERLDDRLIAICREDETCRRLMTLPGVGPIVATALAASIGDPRQFQSGREMAAWIGLVPRQYSTGGKSRLGGVGRRANHYLRRQLVHGARAVALRLKTKTDPRSRWFQAVIDRRGFNKGIVAMANKTVRIAWAMLTRQEDYARA

SEQ ID NO: 19414 - protein, 331 aa, unidentified
  source 1..331: note = protein_ad358dd
  REGION 7..157: note = RuvC_domain
  SITE 10: note = RuvC_P1
  SITE 62: note = RuvC_P2
  SITE 100: note = RuvC_P3
  SITE 102: note = RuvC_P4
  SITE 105: note = RuvC_P5
  REGION 205..292: note = Tnp_domain
  SITE 213: note = Tnp_P1
  SITE 243: note = Tnp_P2
  SITE 251: note = Tnp_P3
  SITE 252: note = Tnp_P4
  SITE 265: note = Tnp_P5
MNYSHFVGLDVGKKTFDASLMSADEKELSHKSFDNTPTGIQSLLDWIAGYHLSLSKLLFCAENMGSYVTELSVSSVSMGFSLALVCPLTIKKSIGLQRGKNDRIDAKRIANYAVLHYRKLELYKLPDKDLVRLRGWIIIRDNLVKQKVSSIKLLETFSWMAKLADVTESISFLEEQLKSIKERILEVEEDMEQLIAASTSLYTNYLLLRSIKGIGIINAIVLLCVTDNFQRFDNPRKFACYCGGAPFEHTSGISIRGKTQTSSLANKEVKVYLTRAAITAISWDPQMKAYYKRKIAEGKHKAAVINAVRAKIIARSFAVIRRQTPFVTLAV

SEQ ID NO: 19415 - protein, 315 aa, unidentified
  source 1..315: note = protein_d54b98e
  REGION 9..152: note = RuvC_domain
  SITE 12: note = RuvC_P1
  SITE 56: note = RuvC_P2
  SITE 96: note = RuvC_P3
  SITE 98: note = RuvC_P4
  SITE 101: note = RuvC_P5
  REGION 191..276: note = Tnp_domain
  SITE 199: note = Tnp_P1
  SITE 228: note = Tnp_P2
  SITE 236: note = Tnp_P3
  SITE 237: note = Tnp_P4
  SITE 248: note = Tnp_P5
MTQTNITTAGIDTSKAKLDVAVHGRTERWQVANALPGWRALAANLAKAGVTRIGIEATGGYERGVVEHLRSAGFTVLLLQPLQVKAFAKVHLRRAKNDALDAVLIAACAAALDPPEIAPDPRLTELADYLTFLEQIEEDIRRFKTRLEHIDEPALRRIVDSDITRLKARRAAQIRDIAKRLRAYDDLAKRLKLVLSVPGIGERTALAIVIRMPELGRVSREQAAALAGLAPFDADSGQHRGQRKIAGGRSRLRRSLFAAALPAAFRWNKALIALYARLMANGKVHNAALIACARKLLIYANTVVQRGTPWIEKAA

SEQ ID NO: 19416 - protein, 251 aa, unidentified
  source 1..251: note = protein_80917ea
  REGION 4..146: note = RuvC_domain
  SITE 7: note = RuvC_P1
  SITE 50: note = RuvC_P2
  SITE 90: note = RuvC_P3
  SITE 92: note = RuvC_P4
  SITE 95: note = RuvC_P5
  REGION 182..247: note = Tnp_domain
  SITE 190: note = Tnp_P1
  SITE 219: note = Tnp_P2
  SITE 227: note = Tnp_P3
  SITE 228: note = Tnp_P4
  SITE 239: note = Tnp_P5
MNGIGIDVSKRQLDVGTTDRETLQVSNSPSGFVELNAWLKKRPAIQIVLEATGGYEQPVLDFLHKAGHRVVRANAFRARKLAQGLDQIAKTDRLDAYALAQMAALVKLPAYQPLEPWQQKLREFVRARRQMMQALTVARQQQEMVRDRELRRLLQTNITRLQTLVERLGKQIAEQVAQQPQLTILKSMKGVGPGLQAVLASYLPELGQISGKAIASLVGVAPMSHDSGTIRGKRSIHGGRAEIRQEWRSWR

SEQ ID NO: 19417 - protein, 400 aa, unidentified
  source 1..400: note = protein_be5ac3a
  REGION 4..160: note = RuvC_domain
  SITE 7: note = RuvC_P1
  SITE 57: note = RuvC_P2
  SITE 97: note = RuvC_P3
  SITE 99: note = RuvC_P4
  SITE 102: note = RuvC_P5
  REGION 275..362: note = Tnp_domain
  SITE 283: note = Tnp_P1
  SITE 313: note = Tnp_P2
  SITE 321: note = Tnp_P3
  SITE 322: note = Tnp_P4
  SITE 335: note = Tnp_P5
MISVGIDVAKGKSTVCILKPYGEIVCKPFDIEHQNKDLSELASMILKFDDEVKVVMEATGIYHLPVLTYLQEKGIFVTVINPYLMKVYRSESLRKAKTDKIDSRIIANYGIEHWFTMEEFKVSEDIYGELRLLGQQYRHYMKLHVTSLHELTHLLDYTMPGIKTMLASWNEGNRKDKLSDFVEQFWHFDEITKYSESEFIDAYAAWAKDKKYHQSQTKAKAIYELAHEGIPTLSSETPSVKMLVTEAVRVLKEIDATLGVILSRMQELAKSLPEYSVVREMGGVGDVLAPKLIAEIGDVRRFHSGKALIAYAGIDTPPYESGQFIGSNRTITKRGSAALRKVGYETMRCIKTCPRPDDPVYQYVIKKEAEGKAKKSAKIAGLNKFLRIYYARVKEIYNNS

SEQ ID NO: 19418 - protein, 291 aa, unidentified
  source 1..291: note = protein_b8bd926
  REGION 1..98: note = RuvC_domain
  SITE 37: note = RuvC_P3
  SITE 39: note = RuvC_P4
  SITE 42: note = RuvC_P5
  REGION 160..247: note = Tnp_domain
  SITE 168: note = Tnp_P1
  SITE 198: note = Tnp_P2
  SITE 206: note = Tnp_P3
  SITE 207: note = Tnp_P4
  SITE 219: note = Tnp_P5
MEACATAHYWARAIGKLDNEVRLLPPAYVKPFVKRQKNDSADAEAIVEAASQPSMRFVAPKTEGQQAHSMIFRTRDLFVRQRTQLINAVRAHLAEHGFIAPQGITNLAALTAIIEDTNIGLELIVVETARLYLEQIDMLSSRIASLEKTLKSEAKRSESTARLMSMPGMGPITAMAIEAFAPSMTVFRKGRDFAAWLGLVPRQYSSGGKQVLGRTSKMGQRDIRGLLIIGAMTVIRWACRKAPAETSWLARMLTRKSRMLVAIALANKMARSIWAMMTKNEDYRDSGLAAA

SEQ ID NO: 19419 - protein, 397 aa, unidentified
  source 1..397: note = protein_328700e
  REGION 4..161: note = RuvC_domain
  SITE 7: note = RuvC_P1
  SITE 60: note = RuvC_P2
  SITE 100: note = RuvC_P3
  SITE 102: note = RuvC_P4
  SITE 105: note = RuvC_P5
  REGION 266..353: note = Tnp_domain
  SITE 274: note = Tnp_P1
  SITE 304: note = Tnp_P2
  SITE 312: note = Tnp_P3
  SITE 313: note = Tnp_P4
  SITE 326: note = Tnp_P5
MFYCGIDIAKHKHEASVIDSEGKALIESISFSNTKEGCEKITAVFEKLGASVSDVVIGMEATGHYWLSVYTFFLELGFSVKVINPIQSEAFRKMYIRQTKNDSVDSFIIAQIMRFGEYSSSGLAEEYIIALRQLSRYRLALVDACGDCKRRVIALLDQVFPEYNSLFSDTFGKTSEEILLSCPTPEELLEVSTRKLTNILNKASHGRFGKEKAEQLKTAAKETFGIAFAKDAFSFQIKQLMEQIVFLENQLSELEEQISGLLHETNQYITTISGIGDTIGTIIVSEIGDINRFERPNQLVAYAGLDVTVKQSGEFSGTKNRISKRGSPYLRRAIWLASQRAAFCNPILSEYYQSLRARGKHHLTAVGGVARKMCNIIFVILKENRPYQPLPPKHFKN

SEQ ID NO: 19420 - protein, 397 aa, unidentified
  source 1..397: note = protein_fb37c70
  REGION 4..160: note = RuvC_domain
  SITE 7: note = RuvC_P1
  SITE 57: note = RuvC_P2
  SITE 97: note = RuvC_P3
  SITE 99: note = RuvC_P4
  SITE 102: note = RuvC_P5
  REGION 274..361: note = Tnp_domain
  SITE 282: note = Tnp_P1
  SITE 312: note = Tnp_P2
  SITE 320: note = Tnp_P3
  SITE 321: note = Tnp_P4
  SITE 334: note = Tnp_P5
MIAVGIDISKAKSTVAVIDSDGTVLASPFTMAHTQLEMEAFVTYLKGLGEPTTILMEYTGHYHYPVLQKLQDEGFPVCIVNPYQMKKYGDVEIHKAKTDKKDALRIAAYALEKSYKLVPYSSMEQKYEDLKFLSRQYNQRISYVAKLKVQLIALLDQTMPGITRILPLNSRNPEKCALLLFIKRFKSFDEIQRIGKARFLASYDVLAKKASERSASSKGLSIYELAVDSITTRGEDPYIWLSQNQCVDLLSATQNAADEIISQMRNIAETIPEYKVLRAMHGVGDRLGPIILAEIGDVHRFHSGKALNSYAGNDAPPYQSGQFESRNRHISKRGSSTLRKACYEVMQALKLTKPQDDPVYLFMLKKEQEGKPFNVAKMAGVNKFLRIYYARAMELYK

SEQ ID NO: 19421 - protein, 344 aa, unidentified
  source 1..344: note = protein_72652db
  REGION 7..149: note = RuvC_domain
  SITE 10: note = RuvC_P1
  SITE 53: note = RuvC_P2
  SITE 88: note = RuvC_P3
  SITE 90: note = RuvC_P4
  SITE 93: note = RuvC_P5
  REGION 213..297: note = Tnp_domain
  SITE 221: note = Tnp_P1
  SITE 251: note = Tnp_P2
  SITE 259: note = Tnp_P3
  SITE 260: note = Tnp_P4
  SITE 272: note = Tnp_P5
MSEVITIGLDIAKHVFQLHGADGRGRAMFSKRISRGKLLDFFAAQPSCTVALEACGGAHHWARQLTQLGHEVRLIPSAYVKPFVKRQKNDASDAEAICEAAQRPSMRFVAMKSEEQQAAGLLFRTPDLLARQRTQLINAIRGHLTEYGWIAPKGPSHVSMLADLVDAEAMASSLPEAAHTMFRLMLDLFAGLNGKIADLDKEIARRAREDEVSRRLMTVPGIGPISATAIAALAPPAETFAKGRDFAAWLGLTPLQRSTGGKQKLGATSKMGERTLRRLLIIGSSAVVQQASKRGGPKGSWLEQMLARKPRMLVTVALANKMARIVWALLVKQENYRAPVAAKA

SEQ ID NO: 19422 - protein, 346 aa, unidentified
  source 1..346: note = protein_7241d12
  REGION 6..148: note = RuvC_domain
  SITE 9: note = RuvC_P1
  SITE 52: note = RuvC_P2
  SITE 87: note = RuvC_P3
  SITE 89: note = RuvC_P4
  SITE 92: note = RuvC_P5
  REGION 211..297: note = Tnp_domain
  SITE 219: note = Tnp_P1
  SITE 249: note = Tnp_P2
  SITE 257: note = Tnp_P3
  SITE 258: note = Tnp_P4
  SITE 270: note = Tnp_P5
MKITTIGVDLAKEVFQIHGVDAHGKAVLRKQLRRNEMAKFFANLEPCLIGMEACGSAHYWARKLGEFGHTAKLMAPQFVKPYVKTNKNDMADAEAICEAVSRPNMRFVPIKDVEQQAIISVHRARQGFVKARTAQANQIRGLLSEFGIVIPQGIKSIAKRMPDILEDGENSLPGAMRNLLERLNDNLKEMDRQVAELELQIKQWHHGNEASRKLEAIPGIGPITASAIVATVGNATEFKNGRQLAAWLGLVPKQHSSGGKQTLLGISKRGDTYLRTLLIHGARAVIRFAENKAEPDQWLCKLMGRRNKNVAAVALANKNARIIWALLAKGNAYEQDYISAAKTAAA

SEQ ID NO: 19423 - protein, 398 aa, unidentified
  source 1..398: note = protein_f9002d9
  REGION 7..163: note = RuvC_domain
  SITE 10: note = RuvC_P1
  SITE 61: note = RuvC_P2
  SITE 101: note = RuvC_P3
  SITE 103: note = RuvC_P4
  SITE 106: note = RuvC_P5
  REGION 269..355: note = Tnp_domain
  SITE 277: note = Tnp_P1
  SITE 308: note = Tnp_P2
  SITE 316: note = Tnp_P3
  SITE 317: note = Tnp_P4
  SITE 328: note = Tnp_P5
MGQQLWAGVDAGKSEHHCVVIDGDGQRLLSQRVANDETVLLELIQAVITLADGGDVTWAIDLNHGGAALLITLLITHEQRLLYIPGRTVHHASGGYRGDGKTDAKDAAIIADQARMRRDLQPLRAGDEIAVDLRILTARRIDLVADRTRAINRLRAQLLEYFPALERAFDYGHSKAALILLTGYQTPDALRRAGVARLEAWLRKRKAYNATAVAATAIAAANAQHSTVPGQQIAAAMVARLAKEVMALDTEIGDTETMIEDRFRRHRHAEIILSMPGFGVQLGAEFLAATGGDMTTFDSVDRLAACPGWPRYREIPARQRQPQTPRRYDRRLLRACYLSAQIAIRTDPASRTYYDRKRSEGKTHTQAILALARRRLNVLWAMLRDHAVYQPTTTAAAA

SEQ ID NO: 19424 - protein, 342 aa, unidentified
  source 1..342: note = protein_e796191
  REGION 7..148: note = RuvC_domain
  SITE 10: note = RuvC_P1
  SITE 53: note = RuvC_P2
  SITE 88: note = RuvC_P3
  SITE 90: note = RuvC_P4
  SITE 93: note = RuvC_P5
  REGION 211..296: note = Tnp_domain
  SITE 219: note = Tnp_P1
  SITE 249: note = Tnp_P2
  SITE 257: note = Tnp_P3
  SITE 258: note = Tnp_P4
  SITE 270: note = Tnp_P5
MFEITTVGLDLAKNVFQAHGADVSGRVVLRKKLRRDQVLAFFSQLRPCVVAMEACGGAHFWGREIGKLGHEVRLIPPAYVKPFVKRQKNDAADAEAICEAAQRPTMRFVPVKSEETQGAAMVFRIRELLIRQRTQMINALRSHMGEFGQTVPQGAANTARLISIVEDLESGLPADATATLKVLVGALTHVETEISKLDAEIARRAKENEIARRLMTVPGIGPLIATAIAVLAPPPETFRKARDFAAWLGLTPRQHSTGGKQRLGATTKMGERSLRRLLIIGANSVIIERHVHAAAQPGTWLGEMLKRKPPILVRVALANKMARIVWALMAKGGVYRSPAAAA

SEQ ID NO: 19425 - protein, 404 aa, unidentified
  source 1..404: note = protein_423cb6b
  REGION 5..161: note = RuvC_domain
  SITE 8: note = RuvC_P1
  SITE 58: note = RuvC_P2
  SITE 98: note = RuvC_P3
  SITE 100: note = RuvC_P4
  SITE 103: note = RuvC_P5
  REGION 275..362: note = Tnp_domain
  SITE 283: note = Tnp_P1
  SITE 313: note = Tnp_P2
  SITE 321: note = Tnp_P3
  SITE 322: note = Tnp_P4
  SITE 335: note = Tnp_P5
MYNAVGIDVSKGKSTVAILQPGGTVIRKPFDVSHTSQNLHELAKYLDTLNGDTRIVMECTGRYHEPILKTLSEAGLFVSVVNPHLIKNFGSNSLRKVKSDPADARKIARYTLDNWANLRQYSGMDNMRTQLKTLNSQFSFFMKQKVAAKANLIALLDNTYPGVNKLFDSPTRDDGSEKWVDYAYSFWHVDCVRGIGLKAYTERYQAFCKRHHYIFQADKPEKLFNASKELTAVFPKEKTYKLLIQQSIQQLNLASAHVERLRREMNELASTLPEYNTVMSIYGVGKTYGPQLIAEIGDVSRFTHREALTAFAGVDPGVDESGQHKSKSNRASKVGSARLRKTLFQIMTTLLQNAPEDDPVYRFLDKKRSQEKPYYVYMTAGANKFLRIYYGKVKECLRNIEQES

SEQ ID NO: 19426 - protein, 340 aa, unidentified
  source 1..340: note = protein_edff2c6
  REGION 6..147: note = RuvC_domain
  SITE 9: note = RuvC_P1
  SITE 52: note = RuvC_P2
  SITE 87: note = RuvC_P3
  SITE 89: note = RuvC_P4
  SITE 92: note = RuvC_P5
  REGION 211..299: note = Tnp_domain
  SITE 219: note = Tnp_P1
  SITE 249: note = Tnp_P2
  SITE 257: note = Tnp_P3
  SITE 258: note = Tnp_P4
  SITE 270: note = Tnp_P5
MQVTTIGLDLAKNIFQVHGVREDGSVAFNRPVRRAQLLNFFKKQTACLVGMEACGSSHYWGRELTKLGHDVRLMAPVYVKPYVKRGKSDAADAEAICEAVTRPTMRFVPIKSVEQQGVLTQHRVRELLIRQRTQLSNTIRALVGEFGYIIRKGVNYIRDFAVEMRAGGAEGIPAMARSAITALCRQFLGLNEKLIIVEKEIVRVARKDKRVQLLQTIPGIGPINASAIVATIGSGEQFRTGRDFAAWVGLTPINKSSGGKERLGRISRMGNKYLRKLLVIAMTSRVSAAISRPDRVDPWTASILAKKPVRLATVAMANKTARIIWAVLSRGEPFRHAAAA

SEQ ID NO: 19427 - protein, 316 aa, unidentified
  source 1..316: note = protein_23f87d7
  REGION 6..157: note = RuvC_domain
  SITE 9: note = RuvC_P1
  SITE 54: note = RuvC_P2
  SITE 94: note = RuvC_P3
  SITE 96: note = RuvC_P4
  SITE 99: note = RuvC_P5
  REGION 188..272: note = Tnp_domain
  SITE 196: note = Tnp_P1
  SITE 225: note = Tnp_P2
  SITE 233: note = Tnp_P3
  SITE 234: note = Tnp_P4
  SITE 245: note = Tnp_P5
MISCFVGIDVSKATLDVAFWPERSKPFQLKNDPEGIAQMLVCLNEIEPERVVLEATGGYENAVFKALRVAGLNATRVNPKRSRAYADAVGQIAKTDRIDAQILAKFAQHLETKTLVEPNQARDELAELVKLRDQIIGHRDDDRRRAKQATSAIALAFFASHIASLEAELKSLNKHIDIATKALDRNKVERLQAIKGIGRVTTAKLLAYLPELGLLTGREITALVGLAPYNNDSGSKSSPRHIEGGRYKVRGALYMAAWVMIRHTADFKARYNALIARGKCSKKAVVACMRVLLVRLNAMMRDGVSWKEHQHQAPAA

SEQ ID NO: 19428 - protein, 332 aa, unidentified
  source 1..332: note = protein_1fefaf3
  REGION 10..157: note = RuvC_domain
  SITE 13: note = RuvC_P1
  SITE 57: note = RuvC_P2
  SITE 97: note = RuvC_P3
  SITE 99: note = RuvC_P4
  SITE 102: note = RuvC_P5
  REGION 193..278: note = Tnp_domain
  SITE 201: note = Tnp_P1
  SITE 230: note = Tnp_P2
  SITE 238: note = Tnp_P3
  SITE 239: note = Tnp_P4
  SITE 250: note = Tnp_P5
MMAQNDLIVVGLDVAKDKVDACIRSLSQRQTFASTAEGRRALIRWLRRHKVSKAAMEASGGYERDWARALREAGIEALIVDPKRVRSFARSAGRLAKNDPIDAEMIAWFAETFVEAKGQAYDATREKLAQIVNARQVLLNVRTSLRNRGEHCAPEVVQKMQVRLLKDIALEIARLEAAIAGLIKATPHFTELAEIIESVPGLAEVTSAGLIAAMPELGQMGNNAAAALLGAAPYDNDSGKRRGERHIQGGRRRVRNLFYMACMGAATRHNPVLKAFYDRLIAKGKPKKVAIVACMRKLIVILNVMIARGEKWDVTRYKESEPARLLPSVCAA

SEQ ID NO: 19429 - protein, 396 aa, unidentified
  source 1..396: note = protein_d42bf61
  REGION 8..162: note = RuvC_domain
  SITE 11: note = RuvC_P1
  SITE 60: note = RuvC_P2
  SITE 100: note = RuvC_P3
  SITE 102: note = RuvC_P4
  SITE 105: note = RuvC_P5
  REGION 267..353: note = Tnp_domain
  SITE 275: note = Tnp_P1
  SITE 305: note = Tnp_P2
  SITE 313: note = Tnp_P3
  SITE 314: note = Tnp_P4
  SITE 326: note = Tnp_P5
MRVQRVWVGVDVAKAHHWAVAVDHEGRRLLSRKVANDEEAILAMIAAACEWAGEVRWAVDISSRLSALLLALLVSHGQQVVYVPGRTVNRMAGAFAGEGKTDAKDAQVIADVARMRSGFRLITTSPETIHELALLTSCRRDLASHRVRMINRLRELLVGICPALEREFEYKSRTGLVLLTGFQTPAALRRIGVKRLTDWLVRRKVRSAADIAERAVMAGRAQQTILPGEARAARLVADLAQQILDLDERVKQLDAEITEVLAGDETAEIIQSLPGMGPLLTAEFIARTGDLSSYRNAGHLAAHAGIAPVPNDSGRRLNNLHRPAHYDRRLCRIFYLSAQTAMSRPGPSQEYYRRKRDEGKSHVQAVLSLARRRVDVLWAMSRDRRRYTAVPPTVAA

SEQ ID NO: 19430 - protein, 343 aa, unidentified
  source 1..343: note = protein_5342439
  REGION 6..146: note = RuvC_domain
  SITE 9: note = RuvC_P1
  SITE 52: note = RuvC_P2
  SITE 87: note = RuvC_P3
  SITE 89: note = RuvC_P4
  SITE 92: note = RuvC_P5
  REGION 211..297: note = Tnp_domain
  SITE 219: note = Tnp_P1
  SITE 249: note = Tnp_P2
  SITE 257: note = Tnp_P3
  SITE 258: note = Tnp_P4
  SITE 270: note = Tnp_P5
MNTKVLGIDIAKNVFQLHGVDGPGKAVLKKRLSRNQLAAYVANLPECLIVMESCGGANYWARVFQRSGHTVRLISPQFVKPFVKTNKNDANDAEAIVEAASRPSMHFVPIKQVEQQDIQSIHRVRSRVVKNRTALINEIRGLNLEYGITVAPGAARVKRSLCAIIADNINELTPLSRECMQNLYDELVAIEARLKNLDKTIRQLCQQNETCRRILKIPGVGELTATAMVAAVPNANEFNNGRHMSAWLGLVPRQSSSGDKRVLLGISKRGDRYLRTLLIHGARSALSHYKNTDNDYGRWLTGKRERLSFNKAAVALANKNARIIWSLLNTGEEFNCNAQMAAT

SEQ ID NO: 19431 - protein, 406 aa, unidentified
  source 1..406: note = protein_99a5ed3
  REGION 9..174: note = RuvC_domain
  SITE 12: note = RuvC_P1
  SITE 65: note = RuvC_P2
  SITE 105: note = RuvC_P3
  SITE 107: note = RuvC_P4
  SITE 110: note = RuvC_P5
  REGION 274..359: note = Tnp_domain
  SITE 282: note = Tnp_P1
  SITE 312: note = Tnp_P2
  SITE 320: note = Tnp_P3
  SITE 321: note = Tnp_P4
  SITE 332: note = Tnp_P5
MTTTSDIRVSIDVGCHSHSVAIGLPCGEVLDEFDLPHRPEGFELFFERIERHHHRYGGEVSVAMEGYNGWARPLDTLVRSRGYRLFNINNLKLARFKEIFPAAAKTDRIDARKGLELFQLRDYLPSAKGVLQEVTATPVENEKLKRLTRRRRSLVDEKSRLLSRMQADLQAVCPGLLAITKDAENLWFLNFITYSDDLRKLARIRQNTVLSIKGIGRKYAKVIGDWQKAASFSHDIEWVGPMIVEDAQRILDLRQKIKALEVRCEELMGQSEIAQLVDTIPGFATVCSSELAGEIGTIERFAKEGSLAVYVGMANLDNSSGNQRGSKNPKHVNTRAKAAMMVGVDRHRKQVPESQRFYEKKRSQGKSHNQAIRALGRHLCRVLFRMLKQGRAYEIREPSPEKTSSK

SEQ ID NO: 19432 - protein, 261 aa, unidentified
  source 1..261: note = protein_afe9818
  REGION 10..91: note = RuvC_domain
  SITE 29: note = RuvC_P3
  SITE 31: note = RuvC_P4
  SITE 34: note = RuvC_P5
  REGION 134..222: note = Tnp_domain
  SITE 142: note = Tnp_P1
  SITE 172: note = Tnp_P2
  SITE 180: note = Tnp_P3
  SITE 181: note = Tnp_P4
  SITE 194: note = Tnp_P5
MQSTPVNIRSLWLENAAEIKYSSGVQRGKNDKVDAKRIAIYASRFQDKVRYYEHPTEDIERLKQLESERTLYVTDLAKYKGQMKDQKDYMPKALYERKMKRLQALMDDLKEAIQAITDEMDEVIASCPVLFRQQELLMSIDGVGRVVATNMIIATEAFTRFDDPRKFNCYAGVAPCSYSSGSSQHSKARVSHRADKVMKRLLHLAAVAVTHRVGGELKKYYERKVAEGKNKMSVINALRVKIVARMFAVIKRNEKYKPILS

SEQ ID NO: 19433 - protein, 430 aa, unidentified
  source 1..430: note = protein_644942d
  REGION 47..202: note = RuvC_domain
  SITE 50: note = RuvC_P1
  SITE 101: note = RuvC_P2
  SITE 141: note = RuvC_P3
  SITE 143: note = RuvC_P4
  SITE 146: note = RuvC_P5
  REGION 306..393: note = Tnp_domain
  SITE 314: note = Tnp_P1
  SITE 344: note = Tnp_P2
  SITE 352: note = Tnp_P3
  SITE 353: note = Tnp_P4
  SITE 366: note = Tnp_P5
MAAVSIPIVDWLDKPQSFHFVQGYEDRFLWNTVVANDTRSDAYMIYLGIDVAKNSHVAAAMSSEGEVLLMPFPFANSADGFTLLREKLNSLPKLPLLVGLESTAHYGENLIYFLCGNGYHVAMINPLQTAAIRKSAIRKTKTDKVDAFVIAKALMMEGYTELQQADIQILKLKGLCKTRQNLILMRTRCKIQLGSFVDQLFPELNQFFRSGLHINVSYTLLKAHPRPAEVGALHLTYLSNLLRKASRGKYKKEDAIRLRELARNSIGTDSPALALQIRQAVSQIELFSAQLKQVESEISTIMDSLGSPIMTVPGIGYLNGAMILSCIGNIQRFSSPAKLLAYAGLDPAVVQSGNFSAKSTRMSKRGNSMLRYALINASHNVVRNNETFAQYYNSKIAQGKSHYCALGHTAHKLIRVIFTLLTNNIAFDLA

SEQ ID NO: 19434 - protein, 410 aa, unidentified
  source 1..410: note = protein_58dac5b
  REGION 4..163: note = RuvC_domain
  SITE 7: note = RuvC_P1
  SITE 60: note = RuvC_P2
  SITE 100: note = RuvC_P3
  SITE 102: note = RuvC_P4
  SITE 105: note = RuvC_P5
  REGION 273..359: note = Tnp_domain
  SITE 281: note = Tnp_P1
  SITE 312: note = Tnp_P2
  SITE 320: note = Tnp_P3
  SITE 321: note = Tnp_P4
MLFLGNDWAEAHHDIELVDDSGRRLARRRLPEGVEGLPALHSLIVDHLAEDAEPGQVIVGIETDRGPWVQALVAAGYTVYAINPRQVARYRERHGTAGAKSDPGDAHVLAELVRLDRAHHRPVAGDSALAEHVKVLTRTHQSLIWSRQRQTNALRSMLREFYPAALTAFGEDLASREALAILALAPSPETGRRLSQSKIAAALRRAGRQRGIDASAERIQAALRTPQLQAHPGVVSAYAAAVRSLVAVIDALVTQVEVLRGEVEAGFGRHPDAEIYLSQPGLGPVLGARVLAEFGDDPTRYADAKGRKNYSGMAPITRASGLRRMVLARPARNRRLANALYFQAFAALSSSPGARAYYDAQRARGATHHQALRALANRLVGILHGCLRHHIAYDEAIAWHRESQSQGTAA

SEQ ID NO: 19435 - protein, 406 aa, unidentified
  source 1..406: note = protein_c83ea9c
  REGION 1..160: note = RuvC_domain
  SITE 4: note = RuvC_P1
  SITE 57: note = RuvC_P2
  SITE 97: note = RuvC_P3
  SITE 99: note = RuvC_P4
  SITE 102: note = RuvC_P5
  REGION 269..355: note = Tnp_domain
  SITE 277: note = Tnp_P1
  SITE 308: note = Tnp_P2
  SITE 316: note = Tnp_P3
  SITE 317: note = Tnp_P4
MGNDWAEDHHDVEVVDESGRRLVRRRFSEGIAGIAELHAVIADHLDEDAEASDVVVGIETDRGPWVAALAAAGYQVYPINPMQVARYRERHGTSGAKSDRGDAHVLAEIVRLDRDHHQLLAADSELAGAVQTLARVHQNLVWSRQRQANQLRSMLREFYPAALHAFDDLHGRDALAVLAAAPTPWAGQALTPEAITDILRQAGRQRYLTTTATRIHTALQTEHLRALPQITEAYGAATAALVAIITEMGQQIEALEAQVVTHFGRHPDSKIYLSQPGLGKILSARVLGEFGDAANRYANAKARRNYAGTSPITRASGKKLVVLARYARNKRLADALFQQAFTALTASPGARAYYDSLRARGISHNDALRRLSNRLVGILHGCLTRGCVYDEATAWPTHKQDQQEVA

SEQ ID NO: 19436 - protein, 323 aa, unidentified
  source 1..323: note = protein_a13bf5e
  REGION 14..156: note = RuvC_domain
  SITE 17: note = RuvC_P1
  SITE 62: note = RuvC_P2
  SITE 102: note = RuvC_P3
  SITE 104: note = RuvC_P4
  SITE 107: note = RuvC_P5
  REGION 197..281: note = Tnp_domain
  SITE 205: note = Tnp_P1
  SITE 234: note = Tnp_P2
  SITE 242: note = Tnp_P3
  SITE 243: note = Tnp_P4
  SITE 254: note = Tnp_P5
MRSPTHELDSAAHAGIDVSKERLDVHLLPKGEAFAVNNDPEGIDALVERLLQGERPELVVLEATGRYERPAATAIAAAGIAVAVVNPRQARDFAKATGRLAKTDKIDAQILARFAAAIEPSPSVLPDQEAQALQAILTRRRQLILMLVSEKNRLAMSPEPVARRIHAHIRWLEKELERTDRELDEAVHESEVWRCNEQLLRSVPGVGPVLARTLLAELPELGTITHKRLSSLVGVAPFNRDSGKIRGKREVWGGRAPVRATLYMGALVATRHNPTLKEFYERLLAAGKPKKVALVACMRKLLSILNAVMRDRANWRCPHVLTP

SEQ ID NO: 19437 - protein, 333 aa, unidentified
  source 1..333: note = protein_4ec64b7
  REGION 5..158: note = RuvC_domain
  SITE 8: note = RuvC_P1
  SITE 61: note = RuvC_P2
  SITE 99: note = RuvC_P3
  SITE 101: note = RuvC_P4
  SITE 104: note = RuvC_P5
  REGION 204..291: note = Tnp_domain
  SITE 212: note = Tnp_P1
  SITE 242: note = Tnp_P2
  SITE 250: note = Tnp_P3
  SITE 251: note = Tnp_P4
  SITE 264: note = Tnp_P5
MEHWIGIDVSSTTLDFALLDRKGSHLESVQIGNDRKAVLKLMVQWRKRHGVDTARSLICLEPTGHYTLMVLNLVVEQQWSTWLAHPLDIHQAMGIKRVKNDKVDALRIAQYARTFHEKARLFTAENLKLDKLKHLLTRRQHLVRSRAKHKAHITDLNRYMDRPVQAEFDRMDKRQIALEDKLVAHVDALIIGQIKADPKTERQYDLLRTIPGVGPQLAAYLVAITDGFTRFNTPRQLSCHAGVAPFERSSGSSVRGRTQVSHQANKSLKTLLHMSALVSVREPGELRHYYERKRAEGKKPILVVNAVRNKLVHRICAVIRNNKPYELRPIATN

SEQ ID NO: 19438 - protein, 401 aa, unidentified
  source 1..401: note = protein_b728bc4
  REGION 10..164: note = RuvC_domain
  SITE 13: note = RuvC_P1
  SITE 62: note = RuvC_P2
  SITE 102: note = RuvC_P3
  SITE 104: note = RuvC_P4
  SITE 107: note = RuvC_P5
  REGION 270..356: note = Tnp_domain
  SITE 278: note = Tnp_P1
  SITE 308: note = Tnp_P2
  SITE 316: note = Tnp_P3
  SITE 317: note = Tnp_P4
  SITE 329: note = Tnp_P5
MAAQRDRAWAGIDVGKRHHWVCAVDADGTRLLSVKIANDEAEICTLVATVGELARQVTWAVDIIGAPSALLLALLAAAGQQVRYACGRVVAAMSSAYAGEGKTDSKDAYVIAETARIRRDLPIIDRDTDLVRNLAVLTGHRADLIADRVRMINRLRDLMTSVFPGLEREFDFSCHKGALVLLTGYASPDRIRRTGRTRLASWLRTRRVRDYAGVAARAVAAAQAQSVVLPGQDLSGSIIAELAGNILALDARLKELDAQIEDAFEQHPQAAIIQSMPGFGPFLGACLLVGAGDLRAFPSAGHLAAAAGLVPVPDDSGRRTGNLHRPDRYSRPLRHVFYLSAQTSMMRAGPNRDYYRKKRVHGATHSQAVIALARRRIDVLWALLRDGRTWSAEPPAPAQAA

SEQ ID NO: 19439 - protein, 406 aa, unidentified
  source 1..406: note = protein_b62c1c1
  REGION 4..163: note = RuvC_domain
  SITE 7: note = RuvC_P1
  SITE 60: note = RuvC_P2
  SITE 100: note = RuvC_P3
  SITE 102: note = RuvC_P4
  SITE 105: note = RuvC_P5
  REGION 271..357: note = Tnp_domain
  SITE 279: note = Tnp_P1
  SITE 310: note = Tnp_P2
  SITE 318: note = Tnp_P3
  SITE 319: note = Tnp_P4
MLFIGDDWAEDHHDVEVQDEQGRVLRRERVPEGIAGIRGFGELVGRFVDDDTEFSDVLVCIETDRGPWVQALLAAGYRIFGVDPKQAARHREILGSSRSKSDKGDAHALADMVRTRRHQLREVADDSDRVEAVKVVTRAHQTLIWERTRHMLRLRAALRDYFPAALEAYTPLGLTCAPVLTLLAKAPTPEVAAKLTLRQIALTLKGRRDIDAKAAAIQQVLRAEHLGRPAAVTAAYAVTVRSLVAIVTTLNTEIANLEKDVSAHFGQHPDAEILLSQPGLGVVLGARVLAEFGDAPDRYVSAKARKNYAGTSPVTRASGKTRIVSARHVHNDRLVDALHMQATCAILHDKHVRTYYDQLRAREVGHNAALRQVGNRLVGILHGCLKTRTVYDQATAWSHREVGVAA

SEQ ID NO: 19440 - protein, 395 aa, unidentified
  source 1..395: note = protein_ee0c5f4
  REGION 4..161: note = RuvC_domain
  SITE 7: note = RuvC_P1
  SITE 60: note = RuvC_P2
  SITE 100: note = RuvC_P3
  SITE 102: note = RuvC_P4
  SITE 105: note = RuvC_P5
  REGION 266..353: note = Tnp_domain
  SITE 274: note = Tnp_P1
  SITE 304: note = Tnp_P2
  SITE 312: note = Tnp_P3
  SITE 313: note = Tnp_P4
  SITE 326: note = Tnp_P5
MFIVGIDIAKRSHEAIIITEDGQVVRKAFSFRNNCTGYNLLLEQVRRLTLVKSQIVFAMESTAHYWLALYARLLKDGYTVMVLNPIQSHSLRELYIRKAKTDARDSLIIADLVRFDRCKASNVPQDKILALRELCRSRAYLVDMAADLKRKLIALLDRIFPEYESLFDSVFSKASIAVLRKYSTPQKVKNANLRKLTDILMESSNGHFGEWKAHQLKEAACSSFGIDDSDGVYSTLLGMFLEQILSLTAQADSLEKQISVFFQEFNNPLTSIPGVGTVLAATSLSEIGDITRFSSADKLLAYAGLDPSVKQSGEFKSNQNRMSKRGSPYLRRAIWLASTVAVHRDPMFQTYNEKKLSEGLHYMNVIGHVSRKMTAVIFAVLRDGQPYQPILQSAG

SEQ ID NO: 19441 - protein, 266 aa, unidentified
  source 1..266: note = protein_0c02d1d
  REGION 2..78: note = RuvC_domain
  SITE 17: note = RuvC_P3
  SITE 19: note = RuvC_P4
  SITE 22: note = RuvC_P5
  REGION 137..224: note = Tnp_domain
  SITE 145: note = Tnp_P1
  SITE 175: note = Tnp_P2
  SITE 183: note = Tnp_P3
  SITE 184: note = Tnp_P4
  SITE 196: note = Tnp_P5
MAPKFVSPYRMAGKTGKNDAADAQAICEAVQRPHMRFVPVKDESQQAMLCLHRTRQGFIEEKTTIYNRLRGLISEFGIIAPQSTDALCHTVVDQKNSLPMQVRLCVDDLLAHITSIEERIAEYDRILSRVAKTDLRSQRLMELKGIGPTTACALVASISNAHDFKNGRQLSAWLGLTPSQYSSGGKSKLGRITKAGDSYLRTLLVQGARSVLIGAEKRTDSFSRWVCTLVERRGYWRAVVAIAAKNARLCWASLHYGDDFRLYSAS

SEQ ID NO: 19442 - protein, 341 aa, unidentified
  source 1..341: note = protein_7070905
  REGION 7..149: note = RuvC_domain
  SITE 10: note = RuvC_P1
  SITE 53: note = RuvC_P2
  SITE 88: note = RuvC_P3
  SITE 90: note = RuvC_P4
  SITE 93: note = RuvC_P5
  REGION 209..295: note = Tnp_domain
  SITE 217: note = Tnp_P1
  SITE 247: note = Tnp_P2
  SITE 255: note = Tnp_P3
  SITE 256: note = Tnp_P4
  SITE 268: note = Tnp_P5
MSDLALVGIDLGKHTFHLHGQEKSGRELFRKKCSRQQMMCFFGNLPACTVVMEACAGAHFVARELMAMGHQARLISPQFVKPFVKGNKNDFVDAEAICEAASRPSMRFVSPKTEAQQTLSVLHRLRESLIHDRTKAVNQMHGFLLEFGISLPPGLVMMKRLASILAEYELPVRLTVLLQRLHDHFVYLDEQIKALDKELAGQLADDDLGTRLLSLPCVGPITASLLAVEMGDGKQYGCSRDFAASVGLVPRQYSTGGKANLLGISKRGDKNLRRLLVQCARVYLQHLEYQKGPLADWVRSLLMRRHSNVVACALANKLARIAWAIAANHTEFEAGPISMAA

SEQ ID NO: 19443 - protein, 389 aa, unidentified
  source 1..389: note = protein_031016a
  REGION 1..147: note = RuvC_domain
  SITE 44: note = RuvC_P2
  SITE 84: note = RuvC_P3
  SITE 86: note = RuvC_P4
  SITE 89: note = RuvC_P5
  REGION 261..346: note = Tnp_domain
  SITE 269: note = Tnp_P1
  SITE 299: note = Tnp_P2
  SITE 307: note = Tnp_P3
  SITE 308: note = Tnp_P4
  SITE 321: note = Tnp_P5
MIAIMRPFGGVVVSPREIRHTDSELGELAKLLKSLDGETRVVMEATGNYHAPVAWLLHDAGLYVSVVNPILVHDYGNNSLRRAKTDRKDAVKLANYGLDHWLSLPRYVPEEDTRLMLKSCCRQYQQYSKVQTMLKNNLISLLDTAFSDANRLFSSPARADDSEKWVDFVDAFWHCECVCGLSEKAFTAKYQKWCKKHGYNFSEDKALDIYASACGHFGVMPKTDTARLLVEQAVSQLRATSAALAALRQEMQTLSSSLPEYSMVMGMYGVGPTFGPQLMAEIGDVRRFHSKKALVAYAGIDAPPYQSGQMDVHSRSISKRGSPALRKTLFLVMGVIFQNALADDPVYQFMNRKRTEGKPYKVYMMASANKFLRIYYASVKAHLDSLEMD

SEQ ID NO: 19444 - protein, 343 aa, unidentified
  source 1..343: note = protein_59d62fb
  REGION 7..149: note = RuvC_domain
  SITE 10: note = RuvC_P1
  SITE 53: note = RuvC_P2
  SITE 88: note = RuvC_P3
  SITE 90: note = RuvC_P4
  SITE 93: note = RuvC_P5
  REGION 211..295: note = Tnp_domain
  SITE 219: note = Tnp_P1
  SITE 249: note = Tnp_P2
  SITE 257: note = Tnp_P3
  SITE 258: note = Tnp_P4
  SITE 270: note = Tnp_P5
MTKDVMIGVDLAKNVFQLHAASLTGHLRYRKKLSREAFRRFMAEQPPAIVVMEACGSAHYWAREMARHGHEVRLIAPRYVKPFVKRQKNDAADAEAIVVAAQRPEMRFVEPKSAEQQGKAILFRSRERLVHQRTELINALRAYLYEYGHVIPQGIRQLGKIEDFLDAPNCDLPDLVHEECRNLLEQITEKTTRIDAQTRKIKKLAAEADTARRLQTIPGVGPMIALAVEAFAPPMESFRCGRDFAAWLGLVPRQFSSGGKERLGRISKAGQTDIRRLLIVGAMSRLNWLGRQSIVKGSWLSQMLMRKPRMLLAIALANKMARTIWAMIVRKEDYRVPAEATVA

SEQ ID NO: 19445 - protein, 283 aa, unidentified
  source 1..283: note = protein_1d0daa8
  REGION 7..147: note = RuvC_domain
  SITE 10: note = RuvC_P1
  SITE 53: note = RuvC_P2
  SITE 88: note = RuvC_P3
  SITE 90: note = RuvC_P4
  SITE 93: note = RuvC_P5
  REGION 210..271: note = Tnp_domain
  SITE 218: note = Tnp_P1
  SITE 248: note = Tnp_P2
  SITE 256: note = Tnp_P3
  SITE 257: note = Tnp_P4
MDQISRIGMDTSKHIFQLHGVNTAEQPVLRKKLRRKEMFAFVETLAPTVIAIEACGASHHCARLLQSFGHSVKLIAPQLVKPYLKRGKNDAADAEALCEAMSRPTMRFVPVKTAEQQAALMLVGVRDRLIRNRTQLSNAIRGHAGEFGLTAAKGKAPLASLLERIHADESLPALARELFAAQAEEYAQLQAQIDKVDARLMAWHRADECSRRLTKIPGVGPIGAVLLTMKTPQPELFRSGRQFAAWIGLTPKDHSTAGKVRLGGSREPATKDCAACWSSGLPP

SEQ ID NO: 19446 - protein, 340 aa, unidentified
  source 1..340: note = protein_202ea97
  REGION 5..145: note = RuvC_domain
  SITE 8: note = RuvC_P1
  SITE 51: note = RuvC_P2
  SITE 86: note = RuvC_P3
  SITE 88: note = RuvC_P4
  SITE 91: note = RuvC_P5
  REGION 210..296: note = Tnp_domain
  SITE 218: note = Tnp_P1
  SITE 248: note = Tnp_P2
  SITE 256: note = Tnp_P3
  SITE 257: note = Tnp_P4
  SITE 269: note = Tnp_P5
MEQVIGIDLAKRVFQLNIVSPLGKTIKNTVIKREKLTEFIAQQPPSKIVMEACGSANYWSRQFKRFGHEVKQISPQYVAPFRMGNKNDKNDAVAIVEADSRPGMRYVPEKTQAQQDIQCLHRVRQRLMKNRTALINQIRGLGLEYGIAIPESAHKVEQCLPDHLENAENDLTPLSRELFQELLRELKEQQQRLNVLDKRLNHLNAQQEDIRRLLTLPGIGPLGASALMIALGDSTDFKNGRHFASYLGLVPREHSSGGKVRLLGITKRGDGYLRGILIHGARSVVYRVQKLPDEQCNGLQRWLKGVIARSGINKAAVALANKNARIAWALVNQQSVYEAR

SEQ ID NO: 19447 - protein, 303 aa, unidentified
  source 1..303: note = protein_57f0c59
  REGION 10..150: note = RuvC_domain
  SITE 13: note = RuvC_P1
  SITE 56: note = RuvC_P2
  SITE 91: note = RuvC_P3
  SITE 93: note = RuvC_P4
  SITE 96: note = RuvC_P5
  REGION 215..281: note = Tnp_domain
  SITE 223: note = Tnp_P1
  SITE 253: note = Tnp_P2
  SITE 261: note = Tnp_P3
  SITE 262: note = Tnp_P4
  SITE 274: note = Tnp_P5
MAEALRIAFVGIDIGKNSFHVVGLDGRGAIVLRQKWSRGQVEARFANIPPCLIGMEACVGAHHLSRRLQRLGHDARLMPARYVRPYSKGQKNDFRDAEAIAEAVQRPTMKFVATKTADQLDLQGLHRVRERLVSQRTGIINQIRAFLLERGVAVRQGLRFLRAELPDILAAPSDALSPRMVRIIEDLAGDWRRLDERVERLSKEIEAIARRDAGCERLISVPGIGPIISSAVVAAIGAGDVFSKGRDFAAWLGLVPRQISTGDRTILGKISKRGNRYLRVRAGRVGGADQAEELGASRAQVLD

SEQ ID NO: 19448 - protein, 353 aa, unidentified
  source 1..353: note = protein_e36a434
  REGION 4..158: note = RuvC_domain
  SITE 7: note = RuvC_P1
  SITE 56: note = RuvC_P2
  SITE 97: note = RuvC_P3
  SITE 99: note = RuvC_P4
  SITE 102: note = RuvC_P5
  REGION 220..306: note = Tnp_domain
  SITE 228: note = Tnp_P1
  SITE 258: note = Tnp_P2
  SITE 266: note = Tnp_P3
  SITE 267: note = Tnp_P4
  SITE 278: note = Tnp_P5
MIVIGIDPHKSTHTATALDPATNTDVGSLRIEASLAEYQRLIAWAKPWPERTWAIENADGLGHHLALWLLARGQVVFDIPTTATARVRELSRGGRRKNDRIDAAAAASVAALQGDARQVYPETTTDSLALLDERRVNLSHSRTRAVNQLHALLRELMAGGAPTSLTPVSATSAVRGLRPRTGPDRIRVELAKELIADVRRFDEQLAANAAKITVLLEEHGTRLRKIDGIGPILAARLLGRTGPPNRFASAAAYANYTGTAPVQIASADSSRHRLSRYGDRQLNSAIYTIAMIQIRMPASTGRAYYDKKIAEGKTPRYATRALKRHLAGHLWRTMLADQTRTARTPSKDVANAS

SEQ ID NO: 19449 - protein, 418 aa, unidentified
  source 1..418: note = protein_171f8a0
  REGION 4..156: note = RuvC_domain
  SITE 7: note = RuvC_P1
  SITE 55: note = RuvC_P2
  SITE 93: note = RuvC_P3
  SITE 95: note = RuvC_P4
  SITE 98: note = RuvC_P5
  REGION 263..349: note = Tnp_domain
  SITE 271: note = Tnp_P1
  SITE 302: note = Tnp_P2
  SITE 310: note = Tnp_P3
  SITE 311: note = Tnp_P4
  SITE 322: note = Tnp_P5
MKYVGLDWASQATVLDEAGQVLDRWAFPHSEAGWLMTMDRLRRQGMPEELPVIVERTSGPVVDRLLSAGHPVVPVHPTAFFAARPRWGASGAKSDPGDSYKLADYLRTDGHRLRRLAPVDPGLQELQALVRLRDNHVRARTAASNQLTAMLDAYWPGPRQLFVSLTSLIALSFLADYPTPAVAAHLTEARMAAFLRRHHYRGGKTPAELVARLRAAPVAHAGLPTATLAAMVTTQVQLLRTLQQLISDTERLIAARVLAYPRTRVLADLPGVGMINLAQLLAEVGPILDRVDSAEQAATECGAAPVTRASGKTSGVYFRWAANTRARKAITSFAHNARLQDSWAAKLYADARARGKRHPHATRIVARAWLRIIWACWTTQQSYDPSRHRTSTSSYPPVPPPPANPPARRRGQDGAPHG

SEQ ID NO: 19450 - protein, 273 aa, unidentified
  source 1..273: note = protein_638354a
  REGION 2..78: note = RuvC_domain
  SITE 17: note = RuvC_P3
  SITE 19: note = RuvC_P4
  SITE 22: note = RuvC_P5
  REGION 141..227: note = Tnp_domain
  SITE 149: note = Tnp_P1
  SITE 179: note = Tnp_P2
  SITE 187: note = Tnp_P3
  SITE 188: note = Tnp_P4
  SITE 200: note = Tnp_P5
MRLIPAQFVKPYVKSNKSDIIDAEAIAEAATRPTMRFAAIKSEEQADLQALHRVRDQMIGTRTRLINQMRAFCLEYGIALRQGAGLFKLDLPLVLEDQSNGLSSAMRKLLAELFTDLRLLEKRIGDVTREIEAIASREDAARRLMTIPGVGALGATALLAAIGNGRQFQKARDLAAWLGFVPREYSTGGKQKLLGISKRGNRYVRKLLVHGARSCFRHLDRTRDRLGNWLDGRQARMHPNKAVVALAAKMARIVWVVLTKPGALYERRDPAFT

SEQ ID NO: 19451 - protein, 341 aa, unidentified
  source 1..341: note = protein_63b3ce4
  REGION 7..148: note = RuvC_domain
  SITE 10: note = RuvC_P1
  SITE 53: note = RuvC_P2
  SITE 88: note = RuvC_P3
  SITE 90: note = RuvC_P4
  SITE 93: note = RuvC_P5
  REGION 209..294: note = Tnp_domain
  SITE 217: note = Tnp_P1
  SITE 247: note = Tnp_P2
  SITE 255: note = Tnp_P3
  SITE 256: note = Tnp_P4
  SITE 268: note = Tnp_P5
MDTVSLIGIDLGKHCFHLHAQDASGRLVFRKKLTRGQMLTLLGNSPRCTVVMEACAGAHWVARRIQSFGHEAKLISPQFVKPFLTGNKNDFADAQAICEAASRPSMRFVSAHNETQQTLSALHRVREGLVRDRTGTVNQIHAFLLEFGVSLPKGAAVIRRLPAVLAKHELPPRLVALLERLHAHFKYLDEQIDQLERELQLQLREDERSQRLLEIPGIGPITASVLTTELGDTRQFASARQFAASIGLVPRQYSTGGKPTLLGISKRGDKNLRRLLVQCARTIMQHVERRSDRLGVWVRSLLSRRHGNVVACALANKLARIAWAILARGTRYQGEQAVAAA

SEQ ID NO: 19452 - protein, 393 aa, unidentified
  source 1..393: note = protein_fbaf8fd
  REGION 5..162: note = RuvC_domain
  SITE 8: note = RuvC_P1
  SITE 62: note = RuvC_P2
  SITE 101: note = RuvC_P3
  SITE 103: note = RuvC_P4
  SITE 106: note = RuvC_P5
  REGION 269..355: note = Tnp_domain
  SITE 277: note = Tnp_P1
  SITE 307: note = Tnp_P2
  SITE 315: note = Tnp_P3
  SITE 316: note = Tnp_P4
  SITE 328: note = Tnp_P5
MYLNIGIDVAKNIHEACILNDRGEQIGKYIRIQNFERSIEKFIERVESIAFESDLIPRIGMEATGIYWYSIYCKLSKHYEIHLYNPSQVKGFAAVNVRGAKTDKIDAKTIAGMLRFGEAPKICYGDKTRMEIKEFCRFRFKLVSLMANLKKRLIRNVHLIFPGYDQLFSSIFTKTSIAILNKAPRPSDMLEMGEEKLYELMRKTSRNHFSPEKARELLEMAKDSISLDFIEDALLFEVESLLKLIEYIEDQIKEVETRILSLWETVKDKHYLQTIPGVSDLMAATIWAELGDIENFNHPDQIVAFAGYDPKVKKSGNKEVILGPNKRGSRLLRWVLGRAVVQAKMCNPVIEQYFKKKISEGKHFNTALCATAKKLIRIIWSVEKNKRAFQIPT

SEQ ID NO: 19453 - protein, 336 aa, unidentified
  source 1..336: note = protein_d3f5808
  REGION 6..142: note = RuvC_domain
  SITE 81: note = RuvC_P3
  SITE 83: note = RuvC_P4
  SITE 86: note = RuvC_P5
  REGION 204..291: note = Tnp_domain
  SITE 212: note = Tnp_P1
  SITE 242: note = Tnp_P2
  SITE 250: note = Tnp_P3
  SITE 251: note = Tnp_P4
  SITE 263: note = Tnp_P5
MKDMLIGVDLAKNVFQLHGASMTGDVKYRKKLSRGQFFRFMSEQPSALVVMEAWARELVKLGHAVKLIAPQYVRPFVKRQKNDATDAEAIVIAARQPEMRFVEPKTADQQARAVLFRARERIVHQRTELVNALRAVLYEYGQVIPQGIGHIKRIEAIVENAEIGLPELVQEECRDLLAQIGEKTARIEKKAKKLAELSRQSETARRLQTMPGVGPLIALAVEAFAPAMQSFRCGRDFAAWLGLVPRQFSSGGKERLGRVSKAGQADIRRLLILGAMARVSWAGRKPPAQGSWLSRMLAKKPRMLVAIALANKMARKIWAMLTKQEDYRDPALAVAA

SEQ ID NO: 19454 - protein, 354 aa, unidentified
  source 1..354: note = protein_68877e4
  REGION 12..152: note = RuvC_domain
  SITE 15: note = RuvC_P1
  SITE 58: note = RuvC_P2
  SITE 93: note = RuvC_P3
  SITE 95: note = RuvC_P4
  SITE 98: note = RuvC_P5
  REGION 217..302: note = Tnp_domain
  SITE 225: note = Tnp_P1
  SITE 255: note = Tnp_P2
  SITE 263: note = Tnp_P3
  SITE 264: note = Tnp_P4
  SITE 276: note = Tnp_P5
MSETAHTAVAVVGIDIGKNSFHVVGHDERGAIVLHQKWSRGQVEARLATMPPCLIGMEACVGAHHLSRKLKALGHDARLMPAKYVRPYSKGQKNDFRDAEAIAEAVQRPTMKFVATKTGDQLDLQALHRVRERLVSQRTGIINQIRGFLLERGVAVRQGQRFLRAELSRVLATPPDVLSPRMVQVIEDLASDWRRLDERIEGLSSEIKAIACQDSGCERLMSVPGIGPIISSAMVAAIGAGDGFSKGRDFAAWLGLVPRQMSTGDRTILGRISKRGNRYLRVLFVQAAWVVLIKPNIWERHGLKPWIEAAKKRLHHNVLAIALANKLARIAWSVLARGRAFEARTINEAAAQSS

SEQ ID NO: 19455 - protein, 348 aa, unidentified
  source 1..348: note = protein_ced4e21
  REGION 6..147: note = RuvC_domain
  SITE 9: note = RuvC_P1
  SITE 52: note = RuvC_P2
  SITE 87: note = RuvC_P3
  SITE 89: note = RuvC_P4
  SITE 92: note = RuvC_P5
  REGION 209..296: note = Tnp_domain
  SITE 217: note = Tnp_P1
  SITE 247: note = Tnp_P2
  SITE 255: note = Tnp_P3
  SITE 256: note = Tnp_P4
  SITE 268: note = Tnp_P5
MKATTIGFDLAKAEFQVHAVDAAGKVVMRKKLRRAQVLPFFAKLSGCTVGMEACASAHHWARKLIGLGHTAKLMAPQFVKPYVKANKTDAADAEAICEAVARPNMRFVPVKSVEQQAILAVHRVRSGLVAERTAELNRLRALLAEFGLIAPRGRRALIERLPALLADETLPGVARQLFERQSTRMRELEAQITAEEAVIMHWHRNNELCRRIDAVAGVGPITATALVASFGEAREFDNGRQLAACLGLVPRQHSSGGKTRLLGISKRGDSYVRMLLIHGARAVIRTLERRARGALNRTDQWLTKLLARRNPNVAAVALANKTVRVIWALLAHDRTYDRNWMNQQPIAA

SEQ ID NO: 19456 - protein, 405 aa, unidentified
  source 1..405: note = protein_7a532f0
  REGION 15..169: note = RuvC_domain
  SITE 18: note = RuvC_P1
  SITE 66: note = RuvC_P2
  SITE 106: note = RuvC_P3
  SITE 108: note = RuvC_P4
  SITE 111: note = RuvC_P5
  REGION 276..360: note = Tnp_domain
  SITE 284: note = Tnp_P1
  SITE 313: note = Tnp_P2
  SITE 321: note = Tnp_P3
  SITE 322: note = Tnp_P4
  SITE 334: note = Tnp_P5
MVTSIDRYDEVDVFVGLDVGKGEHHAVALDRTGKRLFDKPLPNDERRLRAVLDQLAAHGTILLVVDQPATIGALPVAVAQASGALVGYLPGLAMRRIADLHPGEAKTDARDAAIIAETARTMPHTLRSIQVADEQVAELSMLCGFDDDLAGQITQVSNRIRGLLTQIHPALERVIGPRLDHPAMLDLLQRYPSPAAMKAAGEKRLGSRLLKNAPRKGRVWAGEIATALGEQTVVVTGTDAAALVLPRLAEQLAALRRQRDEIAVEVEKIVEQHPLQPVLTSMPGVGVRTAVRLLTEVTTKTFPTAGHLAAYAGLAPVTRRSGTSIRGEHPSRRGNKILKRIMFLSAFAALRDPESRAYYDRKIAHGKRHNQALIALARRRSDVLFAMLRDGTLYQPRLTPPALTA

SEQ ID NO: 19457 - protein, 322 aa, unidentified
  source 1..322: note = protein_93eca69
  REGION 7..156: note = RuvC_domain
  SITE 10: note = RuvC_P1
  SITE 54: note = RuvC_P2
  SITE 94: note = RuvC_P3
  SITE 96: note = RuvC_P4
  SITE 99: note = RuvC_P5
  REGION 190..274: note = Tnp_domain
  SITE 198: note = Tnp_P1
  SITE 227: note = Tnp_P2
  SITE 235: note = Tnp_P3
  SITE 236: note = Tnp_P4
  SITE 247: note = Tnp_P5
MAMLSFGGIDVSKDRLDITVLPDEQCSSVSNDAAGWAELIEQLRGSSITAIGVEASGGYERGVVRALLAAGMSVRQINPFKLRQFAKASGILAKNDRLDARMIASFVAIMPTRPAQQQAPMIELLAAMLTVRRQLSDHKVAAENVSRLLEGAMLQRLSRRRIAGLTADIDLLDQRLVEIVTADPALAHRFRLLTSMPGVGAVLACTLIALLPELGQMSRKQVAALVGLAPYDFDSGKLKGRRCIWGGRARVRHVLYMAAMSASNWNPRLKAFHDRLEAAGKKPKVTIVAVMRKMITTLNAMVRDDVVWADRLSCRHSVPTAR

SEQ ID NO: 19458 - protein, 342 aa, unidentified
  source 1..342: note = protein_9f9c82d
  REGION 7..149: note = RuvC_domain
  SITE 10: note = RuvC_P1
  SITE 53: note = RuvC_P2
  SITE 88: note = RuvC_P3
  SITE 90: note = RuvC_P4
  SITE 93: note = RuvC_P5
  REGION 211..294: note = Tnp_domain
  SITE 219: note = Tnp_P1
  SITE 249: note = Tnp_P2
  SITE 257: note = Tnp_P3
  SITE 258: note = Tnp_P4
  SITE 270: note = Tnp_P5
MEEVTIIGIDLAKNVFQLHGAAADGRPVFRKKLTRLQFQRFMAAQPPRTVAMEACPGSHYWAREMAELGHTVKVISPQYVTPYVKRQKNDAADAEAIAEAATRPHMRFVEPKSAEQQARAVVFRVRQKVIAQRIELVNALRSHLYEFGFIAPVGLQHLPKLIAVLEDESSDLPGPARIACRGILRQIESLGAEIAALDAQIAELSKESRWARLLQTMPGVGPITAMAIEAFAPPMETFRRGRDFAAWLGLVPRQSSSGGKARLGKVSKAGQHDIRRLLVVGAMAAIVGACRRGIPEDTWLGKLMLRKPRILVAIALANKMARRIWAMLTKGESYRDPALAAA

SEQ ID NO: 19459 - protein, 402 aa, unidentified
  source 1..402: note = protein_9a2f331
  REGION 4..160: note = RuvC_domain
  SITE 7: note = RuvC_P1
  SITE 57: note = RuvC_P2
  SITE 97: note = RuvC_P3
  SITE 99: note = RuvC_P4
  SITE 102: note = RuvC_P5
  REGION 274..361: note = Tnp_domain
  SITE 282: note = Tnp_P1
  SITE 312: note = Tnp_P2
  SITE 320: note = Tnp_P3
  SITE 321: note = Tnp_P4
  SITE 334: note = Tnp_P5
MNSVGIDISKGRSTIAVMRPFGEIVISPFEVRHTDSELSELARRLKSLNGETRVVMEATGNYHAPVAKQLHDAGLYVSVVNAKLVHGYGNNDLRRVKTDRKDAVKLANYGLDRWLTLPRYVPEENTRLLLKNCYRQYRQYSKVQTVLKNNLISLLDMTFPNANRLFVSPARADGSEKWVDFVAEFWHCECVSERSLKSFVNKYWRWCRKHGYNFSEEKAHAIYDEASGHIGVMPKSETTKLLVEQAVSQLSATSAALAALKQEMQSLSSQLPEYPVVMGMFGVGPILGPQLIAEIGDVRRFYSKKALVAYAGIDAPPNDSGDVIGRHKSMSKVGASSLRRTLFLIMSAYLQNSPPNEPVYQFMDRKRSEGKPYRVYMMASANKFLRIYYATVKAYLETLEQF

SEQ ID NO: 19460 - protein, 341 aa, unidentified
  source 1..341: note = protein_ed23088
  REGION 6..148: note = RuvC_domain
  SITE 9: note = RuvC_P1
  SITE 52: note = RuvC_P2
  SITE 87: note = RuvC_P3
  SITE 89: note = RuvC_P4
  SITE 92: note = RuvC_P5
  REGION 211..301: note = Tnp_domain
  SITE 219: note = Tnp_P1
  SITE 249: note = Tnp_P2
  SITE 257: note = Tnp_P3
  SITE 258: note = Tnp_P4
  SITE 270: note = Tnp_P5
MKLTTIGIDLAKEVIQVHGADDKGKAVLKKQLKRAQVLPYFANLTPCRIGMEACGGAHYWARKLQALGHEVKLIAPQYVKPYVRRNKNDAADAEAICEAVTRPNMPTVPIKNVEQQAILSVHRARQGLIKARTAQSNQMRGLLAEYGFAIPRGIAYLAQRVPEILEDADNELPGSFRRLIQRLLDHLKELDRQAKELEAEIGCWHKENAASQKLAGIPGVGPLTASAMAASIGDARNFKNGRQLAAWLGLVPRQHSTGGKSTLLGISKRGDSYLRTLLIHGARAVLRRLAAKPEAEPWINDLLSRRHKNVATVALANKNARTIWALLAHDREYQADYRRAA

SEQ ID NO: 19461 - protein, 310 aa, unidentified
  source 1..310: note = protein_fde64e5
  REGION 1..76: note = RuvC_domain
  SITE 13: note = RuvC_P3
  SITE 15: note = RuvC_P4
  SITE 18: note = RuvC_P5
  REGION 183..268: note = Tnp_domain
  SITE 191: note = Tnp_P1
  SITE 221: note = Tnp_P2
  SITE 229: note = Tnp_P3
  SITE 230: note = Tnp_P4
  SITE 242: note = Tnp_P5
MRRIADLYPGNAKTDARDAFIIADAARTLAHALRSIDVDDEALAELDVLVGYDDDLAAEATRLSNRIRGLLTGTHPALERILGPKIAHPAVLEILSRCGGPTGIRTAGRRKLTTIATKYAPRMGTKLVNNILTALDEQTVVVPGTAAADTVLPRLAESLKTVLAQRKTVAGEVEEILDAHPLAQVLISMPGIGVRTAARILLEIGDASAFKTSGHLAAYAGIAPVTHHSGTSIRGEHPARSGNRKLKRAFFLAAFAALSDPTSRAYYDRKRAEGKKHNAALICLARRRCDVLFAMLRTKTPYQPPTLRAA

SEQ ID NO: 19462 - protein, 407 aa, unidentified
  source 1..407: note = protein_f25ee87
  REGION 6..159: note = RuvC_domain
  SITE 9: note = RuvC_P1
  SITE 57: note = RuvC_P2
  SITE 98: note = RuvC_P3
  SITE 100: note = RuvC_P4
  SITE 103: note = RuvC_P5
  REGION 221..307: note = Tnp_domain
  SITE 229: note = Tnp_P1
  SITE 259: note = Tnp_P2
  SITE 267: note = Tnp_P3
  SITE 268: note = Tnp_P4
  SITE 279: note = Tnp_P5
MAAVMIGVDPHKGSHTAVAIGADEEPLGQLRVRASVTQAGRLVAWAAAWPERTWAVEGAGGLGHLLAQQLVAAGERVLDVQPKLGARVRLLATGASNKNDPNDARSVALAALRSKTRRPVTADDHGAVLRVWSRRHRDLGRAKNQAACRLHAVLSELVPGGVPDEITAARAIRILDRSTPSGAVGQARFDLATELLDDMRRLDAQIRESQKKLAVAVKASGTSLTGLFGVGPFIAATVIGDVADVARFATRDHFAAYNGTAPIEVSSGNRKIYRLSLRGNRRINHAIHMAAITQIRHSHSDGRAYYDKKLAEGKTHKEALRSLKRQISNAIYRCLQADARQAAAAACAKGPGGQPGNDSDSSAAGSHPERRLFGQATPGPSPTLRAATPAGRTTPPKQTSKKTRRSA

SEQ ID NO: 19463 - protein, 324 aa, unidentified
  source 1..324: note = protein_88b613a
  REGION 15..158: note = RuvC_domain
  SITE 18: note = RuvC_P1
  SITE 63: note = RuvC_P2
  SITE 103: note = RuvC_P3
  SITE 105: note = RuvC_P4
  SITE 108: note = RuvC_P5
  REGION 198..282: note = Tnp_domain
  SITE 206: note = Tnp_P1
  SITE 235: note = Tnp_P2
  SITE 243: note = Tnp_P3
  SITE 244: note = Tnp_P4
  SITE 255: note = Tnp_P5
MSTTTSPERNPRVLVGIDVSKGYLDVCRLPEGETFRLANDQGGIDELLRRFSEETRPELVVLEATGRYERPAATAIAAAGIAVAVVNPRQARDFAKATGRLAKTDKIDAEVLARFASAIEQLPSILPDEEAQHLQAILTRRRQLLLMLTAEKNRLLMAPEPVAKRIRAHIRWLEKELERTDRELDEAVQESEVWRRNEELLRSVPGVGPVLARTLLAELPELGTITHKRLSSLVGVAPFNRDSGKIRGKREVWGGRAPVRAALYMGALVATRHNPILKEFYERLLSAGKPKKVALVACMRKLLSILNAVMRDRAVWRCPHALTP

SEQ ID NO: 19464 - protein, 343 aa, unidentified
  source 1..343: note = protein_51c6b68
  REGION 6..148: note = RuvC_domain
  SITE 9: note = RuvC_P1
  SITE 52: note = RuvC_P2
  SITE 87: note = RuvC_P3
  SITE 89: note = RuvC_P4
  SITE 92: note = RuvC_P5
  REGION 210..298: note = Tnp_domain
  SITE 218: note = Tnp_P1
  SITE 248: note = Tnp_P2
  SITE 256: note = Tnp_P3
  SITE 257: note = Tnp_P4
  SITE 269: note = Tnp_P5
MTISTIGLDLAKHWFQVHGVDAGGTVRVRRKLRRSEVLAFFQSLPPCLVGMEACATAHHWARELTALGHTVKLMPPAYVKAYVKRNKNDAADAEAICEAVARPSMRFVPMKDAGQQSVLMLHRTRNLLVRQRTMLVNALRAHMAEFGIIAPQGLRNVELLTKEVAREQERLPELARSILQLIVDQLTDTIIRVRAIEVRLTRWHRQSRVSQSLATVPGVGIMGASAIAATVADPSLFRSGREFAAWLGMTPRQNSSGGKERMGRTSKRGDKYIRSLLIAGAVAVLRHARNRPTRDGAWVRALMERKPTKVAAVALANKTARIVWAVMTRGDGYRAKQVLGQPA

SEQ ID NO: 19465 - protein, 319 aa, unidentified
  source 1..319: note = protein_195edf7
  REGION 10..154: note = RuvC_domain
  SITE 56: note = RuvC_P2
  SITE 96: note = RuvC_P3
  SITE 98: note = RuvC_P4
  SITE 101: note = RuvC_P5
  REGION 196..280: note = Tnp_domain
  SITE 204: note = Tnp_P1
  SITE 233: note = Tnp_P2
  SITE 241: note = Tnp_P3
  SITE 242: note = Tnp_P4
  SITE 253: note = Tnp_P5
MDNLSHGRVIGIEVSRDWLDIHCLPDGHRLRVPNAPAGHAAVADLARDRDAVVCFESTGGQEWQLWALLEAEGVAARQVPPAQVKAFAQSRGTRAKTDRIDAELIARFFVFRPEAGRGLPAEKLRLLRALTSKRPQLVEMRKRLLAQIRAHQKLGTAVMFEDVDSELKQRIDGIIEELEDRITRAIASDDHLSELAVVLRSIPGIGPVASSMLIAEMPEIGTINGEEAAALTGLAPVAHDSGTLRGKRAIAGGRRALRHVMFQAALVSAHHNPSLRSFADRLRRAGKPHKVIITAVARKLVTIANALCKSRQKWVATAL

SEQ ID NO: 19466 - protein, 322 aa, unidentified
  source 1..322: note = protein_866cedc
  REGION 12..154: note = RuvC_domain
  SITE 15: note = RuvC_P1
  SITE 57: note = RuvC_P2
  SITE 97: note = RuvC_P3
  SITE 99: note = RuvC_P4
  SITE 102: note = RuvC_P5
  REGION 195..280: note = Tnp_domain
  SITE 203: note = Tnp_P1
  SITE 232: note = Tnp_P2
  SITE 240: note = Tnp_P3
  SITE 241: note = Tnp_P4
  SITE 252: note = Tnp_P5
MMAEPTEIQSILGLDVSRDTVTLCDGRRHTVTVANEADALRAALLPYQGTATLAVCEATGGYEDILLGVLLELAIPAHRADPAKVKAYIASFGKRAKNDPIDARWLSRYGRDRATTLPRWQPADPTQQKLELLVARRLDLVAMRVQEQNRLKAPRSRLIADNIRDHLAELERHIEALNAEIDTLVGESRDLALRAQQLRSVPGVGPVLAPLLLAVIPELGTLNRRQVASLAGVAPHPKDSGKANWHRSTTGGRRQIRPALFIAALAACRGDNPLAVAYKALLKAAKPKRVALTAIMRKIITIANARVRDAVRHQNEIGKINA

SEQ ID NO: 19467 - protein, 357 aa, unidentified
  source 1..357: note = protein_394bcf8
  REGION 4..160: note = RuvC_domain
  SITE 7: note = RuvC_P1
  SITE 57: note = RuvC_P2
  SITE 97: note = RuvC_P3
  SITE 99: note = RuvC_P4
  SITE 102: note = RuvC_P5
  REGION 224..311: note = Tnp_domain
  SITE 262: note = Tnp_P2
  SITE 270: note = Tnp_P3
  SITE 271: note = Tnp_P4
  SITE 284: note = Tnp_P5
MNAVGIDVSKGKSMMMALQPMNQIVLKPREYPHTEVGLEQMAHDILRLGEDTRVIMEATGRYHEPVVAVLHEHGIRVTVMNPLFIKQSGGGSIRKVKTDKADARRIAKYGLDNWTDLREYTPMEAIREQLKLISRQYDLYMKNVVALQNNLISLTDKVFPGVNEMFSSPDRADGSQKWVDFIMTFWHCECIALISEAAFTERYRKWCKRKGYHFSGSKAADLYIDSIGHITTLPKNSNTKLMAEIGDVRRFPRRSSIVSFAGVDPAVDESGKHISKSNPTTKRGSPHLRKTLYQIVCTYLLKAPADEPVYQFLDKKRAEGKPYFVYMTAAQNKFLRIYYARVKECLLAADAREYSER

SEQ ID NO: 19468 - protein, 356 aa, unidentified
  source 1..356: note = protein_b25705c
  REGION 3..107: note = RuvC_domain
  SITE 44: note = RuvC_P3
  SITE 46: note = RuvC_P4
  SITE 49: note = RuvC_P5
  REGION 215..301: note = Tnp_domain
  SITE 223: note = Tnp_P1
  SITE 254: note = Tnp_P2
  SITE 262: note = Tnp_P3
  SITE 263: note = Tnp_P4
  SITE 274: note = Tnp_P5
MPVAIERPNGRLVGLLLEAGHPVVPVSPNAIKTWREGEVLSGAKSDAGDAAVIAEYLRLRQHRLKTAAPYSDETLALRTVVRSRGDLVEMRVAATSQLSALLEAHWPGAKAVFADVESPISLEFLTRYPTPAAAAHLGEKRMAAFLVKHGYSGRRPAAGLLARLRAAPAGTGREPLAEALRDTVLAAVGVLTAMNAAVKNLDRSVAAHLGEHPDGKIFTSLPRSGQVNAAQVLAERGDCRQACDGPGSVAALAGCTPVTSQSGKHRSVQFRWACNKRFRVAMTTFADNSRHASPWAAKTYSDARASGKDHPHAIRILARAWIRVIWPCWLNGVPYDPARHGAAAALAEQSAKQIAA

SEQ ID NO: 19469 - protein, 393 aa, unidentified
  source 1..393: note = protein_033af7c
  REGION 4..163: note = RuvC_domain
  SITE 7: note = RuvC_P1
  SITE 60: note = RuvC_P2
  SITE 101: note = RuvC_P3
  SITE 103: note = RuvC_P4
  SITE 106: note = RuvC_P5
  REGION 265..352: note = Tnp_domain
  SITE 273: note = Tnp_P1
  SITE 303: note = Tnp_P2
  SITE 311: note = Tnp_P3
  SITE 312: note = Tnp_P4
  SITE 325: note = Tnp_P5
MIYVGIDIAKDKHDCFIVNSDGEVVFDVFTIPNNMDGFLDLLFKIRTCEKDADKVKVGLEATGYYSCNILGFLKNKGLPTIVINPLYTSLSRKSISLRKTKTDKVDARTIASMIMSDVSLKPYSDKLYHNEDLKSLTRYRFDKVMQRAKLKQSVSRLVNILFPELEKLVSTLHGNAVYKLLSEFPSAQHIASANLKHLTHLLNTASKGRLRVTADEIRETARKSISSYLPAKSLELRHTIKMICELNSEISEIEAEIKKIMDVIDSPILSIPGIGQNLGAMIIAEIGDFSRFDNPDKILAFAGCSPSTYQSGQLYSSHAKMEKRGSRHLRWALINAAAYVCNWEPTFSAYLQKKRSEGKHYYVALSHAAKKLVRLLYHLETTGETYQTSSILS

SEQ ID NO: 19470 - protein, 342 aa, unidentified
  source 1..342: note = protein_4adad24
  REGION 7..148: note = RuvC_domain
  SITE 10: note = RuvC_P1
  SITE 53: note = RuvC_P2
  SITE 88: note = RuvC_P3
  SITE 90: note = RuvC_P4
  SITE 93: note = RuvC_P5
  REGION 211..296: note = Tnp_domain
  SITE 219: note = Tnp_P1
  SITE 249: note = Tnp_P2
  SITE 257: note = Tnp_P3
  SITE 258: note = Tnp_P4
  SITE 270: note = Tnp_P5
MEMVAIIGMDLAKRSFQVHGATAGGDVLFRKKLSRVQVVPFFAQLPNCTVAMEACATAHDWGRQIGALGHEVKLIPPIYVKPFVKRHKNDAADAEAIAEAASRPTMRTVAVKTPEQQSRAVLFRTRDLLLRQRTQLINALRAHLAEFGRVAPKTTTNIKRLREILEDPENGLPQVVTDVGSIYLGQIATLTEQIGGLEKQVRIEATRDDTARRLQTMPGIGPITATAVSAFAPPMEIFRRGRDFAAWVGLVPKQHSTGGKQKLGRTSKMGQRDIRRLLVIGAMSVVKVAVHKGASEGSWLQKMLARKPRMVVAIALANKMARRLWAMLVKHEDYRDPAIAAA

SEQ ID NO: 19471 - protein, 312 aa, unidentified
  source 1..312: note = protein_ad7e607
  REGION 6..153: note = RuvC_domain
  SITE 9: note = RuvC_P1
  SITE 53: note = RuvC_P2
  SITE 93: note = RuvC_P3
  SITE 95: note = RuvC_P4
  SITE 98: note = RuvC_P5
  REGION 189..273: note = Tnp_domain
  SITE 197: note = Tnp_P1
  SITE 226: note = Tnp_P2
  SITE 234: note = Tnp_P3
  SITE 235: note = Tnp_P4
  SITE 246: note = Tnp_P5
MTDITIGADISKDHIDLHSLPDGQTLKVANDRKGFAAVIAWIGSKAVQRIVYEPTGFYHKAFERFMAVQGLPLSKVNPRLARRFCEATGRLAKTDRIDAGLLARYGALLEPRLLQATPQIHNDLRELHMVRLALIKDRTAAKNRAKTLTSPLLKRHNADRLRQIERQIKAVDEAIMALIAEDACLKARFDILISIPGLSQITAFTLLIEMPELGELDNKTAAALSGLAPMSRQSGRWAGRAFIAGGRAIVRQALYMPALVACRFNPDLKAKYDQLQAAGKAPKVAITAIMRKLVVLANALLRKSRKWTPKHA

SEQ ID NO: 19472 - protein, 375 aa, unidentified
  source 1..375: note = protein_89f69e8
  REGION 9..159: note = RuvC_domain
  SITE 12: note = RuvC_P1
  SITE 63: note = RuvC_P2
  SITE 99: note = RuvC_P3
  SITE 101: note = RuvC_P4
  SITE 104: note = RuvC_P5
  REGION 225..311: note = Tnp_domain
  SITE 233: note = Tnp_P1
  SITE 263: note = Tnp_P2
  SITE 271: note = Tnp_P3
  SITE 272: note = Tnp_P4
  SITE 284: note = Tnp_P5
MSDHSEAFVAFDTSKLRNAVAIADAGRSGEVRFISEIENTGAATAKLVRRLAAKYERLTFCYEAGPTGYGLHRQIKSLGHECVVVAPSLIPKKPGDRVKTNRRDAVSLAKLLRADELTAVWVPDGGHEAMRDLTRARETAVMDLRSKRQQVSAFLLRQGRHYPQDRKTWTNAHRDWLASQKFEYAEHRLVFEEMMLAVRQAQERLERLEQAIRGALADWSLAEVVTALMAMRGMDLIAAATFLAEIGDLSRFRTPTELMAYLGLVPSEDSTGDTIKRGPITKAGNRRARRMLVECAWSYQHPPRVGRAKQHKVAAAPRAVREIAWNAQCRLHRRYRALVRRGKLKTVAITAIARELAGFIWAVSREITTAPAVAR

SEQ ID NO: 19473 - protein, 341 aa, unidentified
  source 1..341: note = protein_7e0e3fa
  REGION 6..148: note = RuvC_domain
  SITE 9: note = RuvC_P1
  SITE 52: note = RuvC_P2
  SITE 87: note = RuvC_P3
  SITE 89: note = RuvC_P4
  SITE 92: note = RuvC_P5
  REGION 211..303: note = Tnp_domain
  SITE 219: note = Tnp_P1
  SITE 249: note = Tnp_P2
  SITE 257: note = Tnp_P3
  SITE 258: note = Tnp_P4
  SITE 270: note = Tnp_P5
MKHTMIGIDLAKSVFQLHGVDDKGHAVMKKQLKRVQVLPFFANLTPCRVGMEACGSAHYWARKLQALGHTVHLIPPQYVKPFVKRNKNDAADAAAICEAMMRPNMPGVPVKNAEQQAILSVHRARQGLVKARTAQANQIRGLLAEFGFIIPTGISHIPKRVPKIVEDGENDLPGSFRLLIQRLVDHLKELDRQVGELGAEIQRWHRENTVSQKLAKIPGIGPMSASALAASVGDARNFKNGRQLAAWLGIVPRQHSTGGKSTLLGISKRGDTYLRTLLIHGARSVIRVVEHKPDADPWVKKLLARRNKNIAAVALANKNARTIWALLAHDREYVANYKMAA

SEQ ID NO: 19474 - protein, 315 aa, unidentified
  source 1..315: note = protein_96d0aaa
  REGION 9..157: note = RuvC_domain
  SITE 12: note = RuvC_P1
  SITE 56: note = RuvC_P2
  SITE 96: note = RuvC_P3
  SITE 98: note = RuvC_P4
  SITE 101: note = RuvC_P5
  REGION 193..276: note = Tnp_domain
  SITE 200: note = Tnp_P1
  SITE 229: note = Tnp_P2
  SITE 237: note = Tnp_P3
  SITE 238: note = Tnp_P4
  SITE 249: note = Tnp_P5
METNVAQNLGVDICKATLDVHLHPAGIARQFTNDAKGLNALLGWLGDHHVTRVVFEPTGRYHHGFERRLGSAGLSLAKVNPRQARRFAEAIGCNAKTDAVDAEMLARMGALLELPSRPIASEILDNMKELQVARLGLIKDRTAAKNREHVCRSSLLKRQAAQRLAQVDRQIDAIDAELKASLSREPDLAARFDVLVSIPGIGEITAIAMLIDMPELGTLDSKQVASLAGLAPIARDSGQHRGKRHIRGGRAELRHALYMPALVATRFNPDLKAKYNALVAAGKPPKLAITAVMRKLVILANSLLKAGRPWAPKPA

SEQ ID NO: 19475 - protein, 345 aa, unidentified
  source 1..345: note = protein_f21225e
  REGION 7..148: note = RuvC_domain
  SITE 10: note = RuvC_P1
  SITE 53: note = RuvC_P2
  SITE 88: note = RuvC_P3
  SITE 90: note = RuvC_P4
  SITE 93: note = RuvC_P5
  REGION 210..296: note = Tnp_domain
  SITE 218: note = Tnp_P1
  SITE 248: note = Tnp_P2
  SITE 256: note = Tnp_P3
  SITE 257: note = Tnp_P4
  SITE 269: note = Tnp_P5
MGQIIRIGMDTSKYIFQIHGVDASEQVVLRKRLSRKAMLEFFAKLPPTVVVIEACGAAHHLARLLGRSGHTVKLIAPQLVKPYVSRNKNDGRDAEGLCEAASRPRMRYVPVKTAEQQAALMLLGVREQLVARRTQLSNTIRGHAAEFGLIAAKGLDKLAGFLAAISQDEGVPALARELFAMLARQYDQVQVELKAVEAKLLAWHRADATSRRLAQIPGIGPVTAAALVMKAPDPHAFRSGRLFAAWLGLTPKDHSTAGKTRLGKITRAGDERLRQLLVVGATSVVKMAKTRDRGSRWLIELLTRKTPKLAAVALANKMARIAWKLMTTGESYDGARLDATTATAA

SEQ ID NO: 19476 - protein, 342 aa, unidentified
  source 1..342: note = protein_cbb38a1
  REGION 6..148: note = RuvC_domain
  SITE 9: note = RuvC_P1
  SITE 52: note = RuvC_P2
  SITE 87: note = RuvC_P3
  SITE 89: note = RuvC_P4
  SITE 92: note = RuvC_P5
  REGION 211..297: note = Tnp_domain
  SITE 219: note = Tnp_P1
  SITE 249: note = Tnp_P2
  SITE 257: note = Tnp_P3
  SITE 258: note = Tnp_P4
  SITE 270: note = Tnp_P5
MNITTIGIDLAKSVFQVHGVDKRGKVVVQRQMRRSKVLEFFVQLPPCLIGMEACSSAHYWARKLSEQGHEVKLMAPQFVKPYVKANKTDAADAEAICEAVTRPTMRFVPIKSVDQHAVLSLHRARSGFVKSRTAQANQIRGLLGEFGIVLPQGIVHVARCLPDIIEDADNELPMVFRELLLRLRSHLLELNRQVEALEDQIATWHKNNEDSQRLANIPGVGVLTASALVASVGDASCFKNGRELAAWLGLVPRQHSSGGKPLLLGISKRGDAYLRTLLVHGARSVVRVSANKQTPTDSWTNEMSTRRHINVVSVARANKNARIAWALLAHKRDYDGEYKKAA

SEQ ID NO: 19477 - protein, 315 aa, unidentified
  source 1..315: note = protein_dd91dc0
  REGION 12..162: note = RuvC_domain
  SITE 15: note = RuvC_P1
  SITE 57: note = RuvC_P2
  SITE 97: note = RuvC_P3
  SITE 99: note = RuvC_P4
  SITE 102: note = RuvC_P5
  REGION 192..276: note = Tnp_domain
  SITE 200: note = Tnp_P1
  SITE 229: note = Tnp_P2
  SITE 237: note = Tnp_P3
  SITE 238: note = Tnp_P4
  SITE 250: note = Tnp_P5
MAMLVAQTKPVVGVDVAKNELVIYQDQSDRLEAIPNTKAAISKWLRTLAGTVSIAVEATNTYHVLFADMAYEAGCTIYMIDGYQLSHYRKGVNVRAKTDALDARLLARYLKKEADELHPWVPPCPLYRQLLSLFRRRAALVQARTGLVQSWSNEPLLKTAFAAQINSMKRLEALVEKKIKDVLQRAGLMGQVSRCMKVEGIGFLTAARLVTTFQRGEFSNANAFIAFLGLDLRVSKSGQSDGPRRLTKRGDPEARRLLHNAAMSGSRTAAWKPFYEEQRKRGFSTTQALVMLARKMARVVFALLKTQSEYRSKAA

SEQ ID NO: 19478 - protein, 310 aa, unidentified
  source 1..310: note = protein_1e67259
  REGION 8..151: note = RuvC_domain
  SITE 11: note = RuvC_P1
  SITE 54: note = RuvC_P2
  SITE 94: note = RuvC_P3
  SITE 96: note = RuvC_P4
  SITE 99: note = RuvC_P5
  REGION 190..274: note = Tnp_domain
  SITE 198: note = Tnp_P1
  SITE 227: note = Tnp_P2
  SITE 235: note = Tnp_P3
  SITE 236: note = Tnp_P4
  SITE 247: note = Tnp_P5
MIIAPGFVGIDVSKHHLDIFDAAVGIVARLTNTAAAVAELAHDWARRDAFVLFEATGRYDLDLRHALTAEGVRFARVNPARARDFARAAGFLAKTDAVDAEMLATMAQCLQLPPAKAGLAAREQLAALNKRRDQLVANRQQERTRQRECPDPFSRQSIAAHLAWLDAAIKAIQAQIAAAIAVEPELEHDRRLLSSAPGVGPVTAATLLALMPELGRRSPKQLAALAGLAPFNNDSGTRRGQRSIRGGRKRVRDALYVAAFIAARHAPRFKAFFKTLIDAGKPRKLALIAVARKLLTVLNAILRDRQPFHA

SEQ ID NO: 19479 - protein, 313 aa, unidentified
  source 1..313: note = protein_6d5ef14
  REGION 8..148: note = RuvC_domain
  SITE 11: note = RuvC_P1
  SITE 53: note = RuvC_P2
  SITE 93: note = RuvC_P3
  SITE 95: note = RuvC_P4
  SITE 98: note = RuvC_P5
  REGION 189..273: note = Tnp_domain
  SITE 197: note = Tnp_P1
  SITE 226: note = Tnp_P2
  SITE 234: note = Tnp_P3
  SITE 235: note = Tnp_P4
  SITE 246: note = Tnp_P5
MTIALRCVGIDVSKHFLDIFDEATGASERIANATQAITRLVARWRCDALVVFEATGIYDLELREALRQAGIRFARINPARARDFARASGKLAKTDPIDARMLAAFGRAMQPATEQVATPARDALARLAKRRDQLVLMRAMEKNRRSEADDRAMAERIGRLIEFFDGEIEEIEADIRALIKAEQEISDDAQLMRSLPGIGPVACMQLIAQMPELGHVGPKQIAALAGLAPFNVDSGTYRGKRKIGGGRKRVRDALYMAALNAVRRAEPFKAFYARLRQAGKPAKLALIAVARKLLTVLNAMMRDRKPYKLASAA

SEQ ID NO: 19480 - protein, 407 aa, unidentified
  source 1..407: note = protein_e79c17a
  REGION 4..163: note = RuvC_domain
  SITE 7: note = RuvC_P1
  SITE 60: note = RuvC_P2
  SITE 100: note = RuvC_P3
  SITE 102: note = RuvC_P4
  SITE 105: note = RuvC_P5
  REGION 271..357: note = Tnp_domain
  SITE 279: note = Tnp_P1
  SITE 310: note = Tnp_P2
  SITE 318: note = Tnp_P3
  SITE 319: note = Tnp_P4
MLFIGDDWAEDHHDVEVQDDQGRVLRRERLPEGIAGIEGFGELVGRFAEEDTDVTDVLVCIETDRGPWVQALLAAGYRVFGVDPKQAARHREILGSSGAKSDKGDAHALADMVRTRRHQLRQVAADSEVAEAVKVVARAHQTLIWERTRHMLRLRVALRDYFPAALEAYTPFGLTSTPVLTLLAQAPTPEAAAKLTLRQIAAALKGRRGIDAKAAAIQQVLRAEHLGQPAAVATAYAATVRSLVAILTTLNTEIANLEKDVTAHFGQHPDAEILLSQPGLGVVLGARVLAEFGDAPGRYASAKARKNYAGTSPITRASGKTRVVSARHVHNNRLLDALHMQAACAILHDKQVRLYYDQLRARDVGHNAALRQVGNRLVGILHGCLKTHTPYDQAIGWAHREAAAVAA

SEQ ID NO: 19481 - protein, 398 aa, unidentified
  source 1..398: note = protein_0d1c42e
  REGION 6..162: note = RuvC_domain
  SITE 9: note = RuvC_P1
  SITE 60: note = RuvC_P2
  SITE 100: note = RuvC_P3
  SITE 102: note = RuvC_P4
  SITE 105: note = RuvC_P5
  REGION 267..354: note = Tnp_domain
  SITE 275: note = Tnp_P1
  SITE 306: note = Tnp_P2
  SITE 314: note = Tnp_P3
  SITE 315: note = Tnp_P4
  SITE 327: note = Tnp_P5
MSRIWAGIDSGKTHHHGLVIDTDGKKLLSRRVLNDESELLELLADVLALADGDPVTWAVDMTGGEPALLIALLFNHGQEILYIPGKTVNRASDGYRSEGKTDARDAYVIADQARIRRDLTPVRPGDETAVELGLLTGRRTDLVRDRTRAVNRLRSTLTGMFPSLEPALEVTNTGPLVLLTGYQTPAALRRLGRAQLTRWLQARGVRGAEALAEAAVSAAERQHTAVPGESAIAGMVKTLALEVIAFNEKVAEIDTRVATRFRRHALAEIILSMPGIGPLLGAEFLAATGGDLSGFASPDRLAAFSGLAPAPHDSGKVSGNLRRPRSYHRRLQRVFYQSAMTSVSCDPNSRAFYARKRKEGKSHVQAVLALARRRVNVLWALIRDRRCYEVLPPVAAAA

SEQ ID NO: 19482 - protein, 290 aa, unidentified
  source 1..290: note = protein_27afbcb
  REGION 1..97: note = RuvC_domain
  SITE 37: note = RuvC_P3
  SITE 39: note = RuvC_P4
  SITE 42: note = RuvC_P5
  REGION 161..248: note = Tnp_domain
  SITE 169: note = Tnp_P1
  SITE 199: note = Tnp_P2
  SITE 207: note = Tnp_P3
  SITE 208: note = Tnp_P4
  SITE 220: note = Tnp_P5
MESCSSAHHWARELTALGHDVRLIPPMYVKPYVKRGKSEAIDAEAICEAVTRPTMRFVAIKTVGQQSLLSLHRARDLLVRQRTQLINGLRGLVAEFGVYIPRGLARVIGFAEDITLGEVLDLPDIANEVIRNLSEQLMSLHQRVRWYEERLKQVAKEDARVRLLRTIPGVGAVTASAIIASIGDGHQFRNGREFAAWLGLTPANKSSGGKEKLGRITKMGDQYLRQRLVVGMTSLVRQTRSHPERASKWLTSLLERKPARVATVAMANKTARIVWAVLTRDEPYSPRAAA

SEQ ID NO: 19483 - protein, 343 aa, unidentified
  source 1..343: note = protein_2be9616
  REGION 6..150: note = RuvC_domain
  SITE 9: note = RuvC_P1
  SITE 54: note = RuvC_P2
  SITE 89: note = RuvC_P3
  SITE 91: note = RuvC_P4
  SITE 94: note = RuvC_P5
  REGION 213..298: note = Tnp_domain
  SITE 221: note = Tnp_P1
  SITE 251: note = Tnp_P2
  SITE 259: note = Tnp_P3
  SITE 260: note = Tnp_P4
  SITE 272: note = Tnp_P5
MTIIRVGVDIAKSVFHVHGADRQGKTCWQGKYSRNKWLDAISKKVPINAEIGMEACASSHHWARELQKRGYRVRLIAAQFVKPYVKSNKNDRVDAEAICEAMSRPNMRFVTPKSVEQQDIQAMHRVREELIAQRTAKANQIRGLVGEYGIIAPVGIQQLRRALPSWLEEVDSGLTYSFRLLLSDLAEDLRHLDGRVQRLDEQILESVQRDPVAKRLMTLRGVGPLTASALAGALGDGKAFKKGRDFAASLGLTPKQHSTGGKDRLLGISKRGDGYLRKLLVHGARSVLHHVTGKEDGLSRWLTGLASRKHQNVAVVALANKTARIAWALINKNIDYNESLAAA

SEQ ID NO: 19484 - protein, 357 aa, unidentified
  source 1..357: note = protein_82f5cff
  REGION 21..161: note = RuvC_domain
  SITE 24: note = RuvC_P1
  SITE 67: note = RuvC_P2
  SITE 102: note = RuvC_P3
  SITE 104: note = RuvC_P4
  SITE 107: note = RuvC_P5
  REGION 226..312: note = Tnp_domain
  SITE 234: note = Tnp_P1
  SITE 264: note = Tnp_P2
  SITE 272: note = Tnp_P3
  SITE 273: note = Tnp_P4
  SITE 285: note = Tnp_P5
MEKLLTHSRQKGTSMTEIMTIGLDLAKTVFQIHGADGDGRPVLRKRLRRGQVLAFFASTPSCLVGLEACASAHHWARELQALGHEVRLIPPQYVKPFVKTNKNDAADAEAICEAVLRPTMRFAAVKSADQQAVLMLHRSRELLVRQRTMLINALRGHCGEFGLVAAQGAHKVVALIAVIEDPDDHRLPPLARDALGSLVVQLRAAEERIAALEKELLVWHRSNDASLRLAAIPGVGLLTATALVATVGDATQFRSARQFAAWLGLVPRQQSSGGKDRLGRISKRGDGYLRRLLVHGARIVLFWSRRRKETRSGWLEALLARRPTNVVLVAMANKTARIVWAMLSRDEAFQPDRRAAA

SEQ ID NO: 19485 - protein, 347 aa, unidentified
  source 1..347: note = protein_1d67d37
  REGION 6..163: note = RuvC_domain
  SITE 9: note = RuvC_P1
  SITE 68: note = RuvC_P2
  SITE 106: note = RuvC_P3
  SITE 108: note = RuvC_P4
  SITE 111: note = RuvC_P5
  REGION 212..299: note = Tnp_domain
  SITE 220: note = Tnp_P1
  SITE 250: note = Tnp_P2
  SITE 258: note = Tnp_P3
  SITE 259: note = Tnp_P4
  SITE 272: note = Tnp_P5
MKKIFIGVDVSKEKCDATAIYAEKGLTEVKNLDYFVFENRPKGFSSLLSWAKKLKADVSLESILFVCETTGAYDRALCDYIYSKGLDIWRESALQILWSSGVRRGKDDKADSLMIAEYALHHMDKIHLYESPDSRILEIRALFLYRRKLEQEKTSKLVRIKELEATAGKSKTISFILRDAKKSVRQLEKSIKESEEKILELVDEDEMLRKSYQHLDSVKGLGIVNITALIVYTNNFRAFKTSRKMASYWGVAAFRSKSGSSVDKRADVRNLSSSMLKSYLTQAAMHTIARGGIYHDYYQRKISEGKTHSIALNNAKNKLLHLAMSLVIHDMDYEMNHELLKVQRATN

SEQ ID NO: 19486 - protein, 343 aa, unidentified
  source 1..343: note = protein_6c5d4ea
  REGION 5..152: note = RuvC_domain
  SITE 8: note = RuvC_P1
  SITE 55: note = RuvC_P2
  SITE 92: note = RuvC_P3
  SITE 94: note = RuvC_P4
  SITE 97: note = RuvC_P5
  REGION 212..300: note = Tnp_domain
  SITE 220: note = Tnp_P1
  SITE 250: note = Tnp_P2
  SITE 258: note = Tnp_P3
  SITE 259: note = Tnp_P4
  SITE 271: note = Tnp_P5
MDYFAGLDVSVKDTSVCIVDGTGKITREVKVASEPDALLAVLNNPAYHFKRIGLEAGPLSQWLFSALAEADLPVICVETRHMRAVLKARINKTDRNDARGIAQMMRVGLYRPVHVKTLRSQKLRTLLTHRKLLQSEAIAVENDLRASLRNFGLKVGVVGTVKFEARVKELVENFPDLLALVEPLLVVRRVLREQISILHRRVLAAVRNDEVCRRLMTVPGVGPVVALTYRATVDVPARFRKSKSVGAVFGLTPARDQSGESDRPGAISRCGDEMMRTTLYEAAQVMLLRSAKWSWLKAWAMKIARHRGMKKAIVALARRLAVIMHRIWIDGTEFRWTREAAAA

SEQ ID NO: 19487 - protein, 375 aa, unidentified
  source 1..375: note = protein_a8eae72
  REGION 9..159: note = RuvC_domain
  SITE 12: note = RuvC_P1
  SITE 63: note = RuvC_P2
  SITE 99: note = RuvC_P3
  SITE 101: note = RuvC_P4
  SITE 104: note = RuvC_P5
  REGION 225..311: note = Tnp_domain
  SITE 233: note = Tnp_P1
  SITE 263: note = Tnp_P2
  SITE 271: note = Tnp_P3
  SITE 272: note = Tnp_P4
  SITE 284: note = Tnp_P5
MTNHSEAFVAFDTSKLRNAVAIADAGRSGEVRFVGEIENGGAATAKLVRKLAAKYERLTFCYEAGPTGYGLYRQIKSLGYECLVAAPSLIPTKPGDRVKTNRRDALNLAKLLRAGELTAVWVPDARHEAMRDLSRARGAAAEDLRRKRQQVSSFLLRHGLHYPPGRKTWTKSHMIWLASQKLEHLEQRIAFEEMLFALRQAQERIERLEQAIRAAVPDWSLAEVVTALMAMRGIDLISATTFLAEIGDLSRFQTPRELMAYLGLVPSEGSTGDTVKRGPITKAGNRRARRTLVECSWSYQHPARVGKEKQEKVAAAPRAVREIAWKAQCRLSARYRALVRKGKPKTVAVTAVARELAAFIWAISREVTTARAAAK

SEQ ID NO: 19488 - protein, 339 aa, unidentified
  source 1..339: note = protein_7f47e8f
  REGION 6..147: note = RuvC_domain
  SITE 9: note = RuvC_P1
  SITE 52: note = RuvC_P2
  SITE 87: note = RuvC_P3
  SITE 89: note = RuvC_P4
  SITE 92: note = RuvC_P5
  REGION 211..303: note = Tnp_domain
  SITE 219: note = Tnp_P1
  SITE 249: note = Tnp_P2
  SITE 257: note = Tnp_P3
  SITE 258: note = Tnp_P4
  SITE 270: note = Tnp_P5
MQVTTVGLDLAKNIFQVHGVTETGEVAFNRPLRRAQVLAFDERLSRCLIGIEACASSHHWARELSMLGHTVRLMPPMYVNPYVKRSKSDAVDAEAICEAVTRPTMRFVEIKSEEQQALLSLHRARDFVVGQCTQLINMIRSLAAEFGITIARGVQRAIEFAKTVIDGKQPGLPELAQDVLRVLSRQLLYLHNRLGWYEAMLRIQARLSRQAQLLQTIPGVGPVTASAVAATIGSGRQVRSGREFAAWLGLTPRNHSSGGKGRLGKIRKMGERYLRQLIVVGMTSRVRKVATHPERADPWLTKLLQRKPARLATVAMANNTARIMWAVLTGDEPYKAHAA

SEQ ID NO: 19489 - protein, 417 aa, unidentified
  source 1..417: note = protein_bdc60dc
  REGION 19..171: note = RuvC_domain
  SITE 22: note = RuvC_P1
  SITE 70: note = RuvC_P2
  SITE 108: note = RuvC_P3
  SITE 110: note = RuvC_P4
  SITE 113: note = RuvC_P5
  REGION 278..364: note = Tnp_domain
  SITE 286: note = Tnp_P1
  SITE 317: note = Tnp_P2
  SITE 325: note = Tnp_P3
  SITE 326: note = Tnp_P4
MDYAPTAVLAAEPANGVTAGLDWSRDDQAVSVVDSRGAEVLRELTDHSARGLRTLVDTLTRAGVSEVAIERPDGPVVDTLLEAGFTVVVISPNQLKNLRGRYGSAGNKDDRFDAFVLADTLRTDRTRLRPLVPDSPATVALRSTCRARKELIRHRVAVTNQLREHLNRVFPGAVGLFADLDSPISLTFLARFDCQDRADWLTPARMANWLASVGYTGRTDPAVLHTRLITAPRGATGHEGATHARITHALLATLTTLVKQITSLSDQIAEQLAAHCDAHIFTSLPRSGKIRAAKLLAEIGDCRGRFPTPESLTCLAGVAPSTRQSGTMRTVGFRWSCDKHLRDAVTDFAADSRRANPWADNLYRQARSRGRDHQHAVRILARAWLYVIWHCWQDNTAYDPHRHGALQAHLRAQQPAA

SEQ ID NO: 19490 - protein, 298 aa, unidentified
  source 1..298: note = protein_fc68802
  REGION 6..147: note = RuvC_domain
  SITE 9: note = RuvC_P1
  SITE 52: note = RuvC_P2
  SITE 87: note = RuvC_P3
  SITE 89: note = RuvC_P4
  SITE 92: note = RuvC_P5
  REGION 211..273: note = Tnp_domain
  SITE 219: note = Tnp_P1
  SITE 249: note = Tnp_P2
MKITTVGIDLAKNVLQVHGINEHGKSALKKQLRREQMAAFFVNLPSCLIGMEACGSAHHWARKLQELGHTVRLMAPLFVKPYVKTNKNDAADAEAICEAVGRPNMRFVPIKNVEQQAVLALHRVRQGFVKARTAQANQIRGLLGEFGLIIPQGIGYIGTRVPELIEDASNDLPSAFRVLVQRLLDNLKELDRQVDELEAQIQAWHRSSDLSRKVAQVPGIRPITASALVASIGDARNFDSGRQSGSMAGRCSPAALLGRQGQPAGHEQARRQLPANAADTRGSIGDLSRWSEAGVECV

SEQ ID NO: 19491 - protein, 336 aa, unidentified
  source 1..336: note = protein_6b453a5
  REGION 6..147: note = RuvC_domain
  SITE 9: note = RuvC_P1
  SITE 52: note = RuvC_P2
  SITE 87: note = RuvC_P3
  SITE 89: note = RuvC_P4
  SITE 92: note = RuvC_P5
  REGION 209..294: note = Tnp_domain
  SITE 217: note = Tnp_P1
  SITE 247: note = Tnp_P2
  SITE 255: note = Tnp_P3
  SITE 256: note = Tnp_P4
  SITE 268: note = Tnp_P5
MTITRIGLDTSKHVFQIHGVDKNEQPVLRRQIRRGEVAKFFAKLAPTRIGIEACGASHHWARVLRGLGHEVLLIPPQYIKAYVKRGKNDAIDAEAICEAMSRPTMRFVPVKTAEQQAALTMLGVRDLLIKQRTMLINALRGHAAEFGVTAAKGPNKIVELLQRLAAGEGVPTLAREMLGMLASQLEAVNDKLKAIEARLMAWHRQDQTSQCLATIPGVGPIAGVSFALKIPDARAFRSARHFAAWIGITPRENSTAGKHRPGKISHEGDESLRRLLVLGATAVIQRAKKGRVSPWLLGLLARKPKKLAAVALANKMARVIWAMMISGEVYRRPQEA

SEQ ID NO: 19492 - protein, 419 aa, unidentified
  source 1..419: note = protein_4752d19
  REGION 2..154: note = RuvC_domain
  SITE 5: note = RuvC_P1
  SITE 53: note = RuvC_P2
  SITE 94: note = RuvC_P3
  SITE 96: note = RuvC_P4
  SITE 99: note = RuvC_P5
  REGION 217..303: note = Tnp_domain
  SITE 225: note = Tnp_P1
  SITE 255: note = Tnp_P2
  SITE 263: note = Tnp_P3
  SITE 264: note = Tnp_P4
  SITE 275: note = Tnp_P5
MIGIDPHKGSHTAVAIDGNETPLGRVRVRATMRQAEGLRQWAQRWPQRSWAVEGARGLGQLLAQQLIATGERVLDVPPKLGARVRLLDSGQINKTDENDARSVAVAALRAHRLREVRGEDQTMVLRVWSRRHHDLGRLRTQAVCRLHAVLCELLAGGVRKHLSTIKAAAIVEGLSADTPVAQAKLDLARDLVADLQRLDAQRREVKRRIAHAVAETDTSITDIYGVGPIVAATVLGQVRDIRRFSDRDRFASYNGTAPIEVSSGDRKIYRLSRRGNRHLNHAIHVVAVAQISHPENPGHTYYQRKRAEGMTGKCALRALKRKISDTLYNALLRDSYPREDPGGQSGNDAVASVAGSHPDRPALRRSHSRVATNSKTAGTSPPTTELRPAPDRRRTSRSAAGVKVEPRPRPLRGHGQERP

SEQ ID NO: 19493 - protein, 319 aa, unidentified
  source 1..319: note = protein_c4ba3b8
  REGION 7..162: note = RuvC_domain
  SITE 10: note = RuvC_P1
  SITE 55: note = RuvC_P2
  SITE 95: note = RuvC_P3
  SITE 97: note = RuvC_P4
  SITE 100: note = RuvC_P5
  REGION 194..278: note = Tnp_domain
  SITE 202: note = Tnp_P1
  SITE 231: note = Tnp_P2
  SITE 239: note = Tnp_P3
  SITE 240: note = Tnp_P4
  SITE 251: note = Tnp_P5
MSVSSVVGIDVAKAHVDVFVLGAEFKPRRFDNDAEGHSALAAALALLEVRLVVMEATGGYEAALACSLQAAGLAVAVVNPKQARDFAKGMGYLAKTDAIDAQALAAFADALARQPDLASYIRPLADEAQRDLAALVTRRRQLLAMMLSERQRMQLAVAKVRPSIEAMIAAIKAQLDDVEGQMVGHVQAHFGKLDALLRSTKGIGPVASATLIAELPELGKLNRRQIAALVGVAPMANDSGNSKGRRRVVGGRFEVRRTLYMATLTATRHNPAIAAFYARLLAAGKLPKVALIACMRKLLTTLNAMAKHGLPWDPDFKNT

SEQ ID NO: 19494 - protein, 287 aa, unidentified
  source 1..287: note = protein_f9c9fc1
  REGION 7..149: note = RuvC_domain
  SITE 10: note = RuvC_P1
  SITE 53: note = RuvC_P2
  SITE 88: note = RuvC_P3
  SITE 90: note = RuvC_P4
  SITE 93: note = RuvC_P5
  REGION 212..279: note = Tnp_domain
  SITE 219: note = Tnp_P1
  SITE 249: note = Tnp_P2
  SITE 257: note = Tnp_P3
  SITE 258: note = Tnp_P4
  SITE 270: note = Tnp_P5
MNEVTMIGVDLAKSVFQAHGATAAGEPVLRKKLSRGQFLKFLSEQPNCVAAMEACASSHYWGREIMKLGHDVRLIPLIYVKPFVKRQKKDANDAEAIAEAAVRPTMRFAPVKSAEQQSRSMVFKTRDLFVRQHNAIINALRGHLMEYGIIAPPGRNFVKKLAEQIEDPESGLPLIVTELSRVYLDQLSTCSYKIVVIERRLKDEATADPETIRLQTAPGVGPVSAMAIKAFSPPLEGFKRGRDFATWLGLAPVQKSTGGRQILGRTSKMGQRDILLRQLEAVTLGKM

SEQ ID NO: 19495 - protein, 396 aa, unidentified
  source 1..396: note = protein_be429e6
  REGION 6..160: note = RuvC_domain
  SITE 9: note = RuvC_P1
  SITE 58: note = RuvC_P2
  SITE 98: note = RuvC_P3
  SITE 100: note = RuvC_P4
  SITE 103: note = RuvC_P5
  REGION 265..352: note = Tnp_domain
  SITE 273: note = Tnp_P1
  SITE 304: note = Tnp_P2
  SITE 312: note = Tnp_P3
  SITE 313: note = Tnp_P4
  SITE 325: note = Tnp_P5
MPEIWAGVDIGKEHHHCVVIDAQGERLLSRRVLNDESALLELISGVLALSEDALWAVDINHGGAALLIGLLLGHDQPMVYLTGLAVHQASAAYRGQGKTDAKDAFVIADQARMRRDLGVLRPGDEIAVDLKILVRRRTDLVNDRTRQINRLREQLLEICPALERALSLTNKGPVLLLTGYQTPAAIRRSGAKRIETWLKNRKVKGAATLAQAAVEAAQAQHTALPGERLAASMVARLAKGVIALEEEVAELDALIEARFHDHPHAEVIRSLPGMGAMLGATFIAATGGEMEAFGTADRLAAFAGLSPVPRDSGRVSGNMRRPRRYHRGLLRAFYLSSMASIRSCPASRAYYDRKRAEGKGHKQAVLSLARRRANVLWAMIRDGASYQPAPTVTMAA

SEQ ID NO: 19496 - protein, 318 aa, unidentified
  source 1..318: note = protein_bab3007
  REGION 14..159: note = RuvC_domain
  SITE 17: note = RuvC_P1
  SITE 61: note = RuvC_P2
  SITE 101: note = RuvC_P3
  SITE 103: note = RuvC_P4
  SITE 106: note = RuvC_P5
  REGION 196..280: note = Tnp_domain
  SITE 204: note = Tnp_P1
  SITE 233: note = Tnp_P2
  SITE 241: note = Tnp_P3
  SITE 242: note = Tnp_P4
  SITE 253: note = Tnp_P5
MGSMDRSKSSTTIAGIDVGKRQLDAAVHGRAEQHQVANDPAGWEALVAWLGDRGVARVGLEAPAGYERGVRARLEAAGLEVVVHQPLEVKLFARLKRRRAKTDRLDAALIAAATAQVDTVRAAQDPRLAELAERLTAYEQITDQAAQLKTFMEHVALPDLVASLGEQIQSLSRLKARLAREILARLKAWPDLLARWRLLQSLPGVGPLVAASLVVRMPELGVLRRGQPAALLGVAPFDRQSGQWRGQSFIGGGRSRPRRMLYLAAIAAKRFDPGFKAFAERLLSAGKPPKVAIVAVMRKLIEAANLILARQQPWVRHP

SEQ ID NO: 19497 - protein, 341 aa, unidentified
  source 1..341: note = protein_96b62a0
  REGION 7..149: note = RuvC_domain
  SITE 10: note = RuvC_P1
  SITE 53: note = RuvC_P2
  SITE 88: note = RuvC_P3
  SITE 90: note = RuvC_P4
  SITE 93: note = RuvC_P5
  REGION 211..301: note = Tnp_domain
  SITE 219: note = Tnp_P1
  SITE 249: note = Tnp_P2
  SITE 257: note = Tnp_P3
  SITE 258: note = Tnp_P4
  SITE 270: note = Tnp_P5
MEEVITIGLDLAKSVFQAHGADRAGGVVFRKKLRREQLLAFFASQPRCLVAMEACASAHYWAREIGGLGHEIRLIPPAYVKPFVKRQKNDMADAEAICEAAQRPTMRFVTPKSAQAQGSAVVFRTRDLLVRQRTQLINALRGHLAEFGFVVRQGAAHAARLMDVVDDPNSDLPIEARPVLAIIAASLRALQGQIAKLDAEIAARAKRDPVARRLMTIPGVGPVVATALVALAPAASTFKRGRDFAAWVGLTPRQHSSGGKERLGRTSKMGERSLRRLLILGASAAARVSGRESAPANPWLESMLARKPRMLVTVALANKMARIVWALMAHGGTYRAPAVAV

SEQ ID NO: 19498 - protein, 345 aa, unidentified
  source 1..345: note = protein_612d5a6
  REGION 5..152: note = RuvC_domain
  SITE 8: note = RuvC_P1
  SITE 55: note = RuvC_P2
  SITE 92: note = RuvC_P3
  SITE 94: note = RuvC_P4
  SITE 97: note = RuvC_P5
  REGION 212..315: note = Tnp_domain
  SITE 220: note = Tnp_P1
  SITE 250: note = Tnp_P2
  SITE 258: note = Tnp_P3
  SITE 259: note = Tnp_P4
  SITE 271: note = Tnp_P5
MEHYAGIDVSLESASLCVVDATGRIVHEGKVASEPETLIGWFRDLEFAATRIGLEAGPLSQWLYAAMRDAGLAVELLDTRHVRNAFKAMPVKTDRKDARGIAQLMRLGWFRPVHCKSLPAQEVRALLTARKLLQIKNHDVEMSLRGVLRGFGLKVGPTTPRTFPGRIRELVADHTTLSTVAEALLAARSTLFEQWQKLEKRLRSLARENGRVRRLMTAPGVGPIVALTYASAIDEPARFRSSKSVGAHFGLTPKKYQSGETDVTGRISKIGDGSVRTALYEAANVILTRPVKGSSLKSWAMRLAARAGMRKAKVALARKLAVVLHRMLADGTSFHAGKAAVAAAH

SEQ ID NO: 19499 - protein, 343 aa, unidentified
  source 1..343: note = protein_37cb893
  REGION 7..149: note = RuvC_domain
  SITE 10: note = RuvC_P1
  SITE 53: note = RuvC_P2
  SITE 88: note = RuvC_P3
  SITE 90: note = RuvC_P4
  SITE 93: note = RuvC_P5
  REGION 211..295: note = Tnp_domain
  SITE 219: note = Tnp_P1
  SITE 249: note = Tnp_P2
  SITE 257: note = Tnp_P3
  SITE 258: note = Tnp_P4
  SITE 270: note = Tnp_P5
MTKDTMIGVDLAKSVFQIHGASMDGTVKFRKKLSRPQFLNFMSKQAPSVVTMEACGSANFWARELTRLGHDVKLISPRYVKPFVKRQKNDAADAEAIVEAAQRPEMRFVEPKTEDQQARAMLYRIRERLVCQRTELVNALRSYLYEFGHAFPQGIAHLNRIAALVDEPDSKLPALVCDECRDLLIQISEISERIDIKTRRIQDLAAETDTARRLQTMPGVGPITALAVEAFAPCMTSFKRGRDFAAWLGLVPRQHSSGGKERLGRVSKAGQADIRKLLIMGAMSRLNWLGRKNIPDGVWLAKLMERKPKMLVAIALANKMARAIWAMLTKNEDYREPAGAVAA

SEQ ID NO: 19500 - protein, 335 aa, unidentified
  source 1..335: note = protein_5f74d74
  REGION 2..134: note = RuvC_domain
  SITE 39: note = RuvC_P2
  SITE 74: note = RuvC_P3
  SITE 76: note = RuvC_P4
  SITE 79: note = RuvC_P5
  REGION 198..284: note = Tnp_domain
  SITE 206: note = Tnp_P1
  SITE 236: note = Tnp_P2
  SITE 244: note = Tnp_P3
  SITE 245: note = Tnp_P4
  SITE 257: note = Tnp_P5
MFQIHGINALGKPVIKKQLKRNQMAEFFVNLPPCLIGMEACGGAHHWARKLQGFGHTVKLMAPQFVKPYVKTNKSDAADAEAICEAVARPNMRFVPIKNVEQQSVLAQHRVRQGFVKARTAQANQIRGLLAEFGLIIPQGIGHIANRVPELIEDASNELPGAFRLLVQRLLDHLKELDHQVGELETQIQQWHRSSDVSSKLAQIPGIGPITASALVASLGDAKNFDNGRQVAAWLGLVPRQHSSGGKQNLLGISKRGDTYLRTLLIHGARSVIYRAGQKSEPNKTCAWVNAVVERRNKNVAAVALANKNARIICALLTHDRQYEAGYTKHMATAL

SEQ ID NO: 19501 - protein, 351 aa, unidentified
  source 1..351: note = protein_2791c06
  REGION 13..153: note = RuvC_domain
  SITE 16: note = RuvC_P1
  SITE 59: note = RuvC_P2
  SITE 94: note = RuvC_P3
  SITE 96: note = RuvC_P4
  SITE 99: note = RuvC_P5
  REGION 218..302: note = Tnp_domain
  SITE 226: note = Tnp_P1
  SITE 256: note = Tnp_P2
  SITE 264: note = Tnp_P3
  SITE 265: note = Tnp_P4
  SITE 277: note = Tnp_P5
MSRQISQSTITTIGIDIGKNTFHLIGLDPRGAIVLQLKVSRDQLNRRLANVPKCLIGLEACSGAHHIGRQLAALGHDVRLIPAQYVKPFLKGHKNDYRDAEAIAEAVQRPTMHFVTIKTPEQMDLLALHRVRSRLVGQRTGVVNQIRGFLIERGITVRQGLTFLRKALPEILSSRPDVLSPRLVRLIADLAEDWRRLDDRIATVSAEIEALAEQDDSCQRLMTVPGIGPTISSAVVAAIGNGTGFRQGRDFGAWLGLVPKQESTGDRTILGKISKRGNKYLRTLFVQAAHVILVRRPRVAMLGLWQWIEQASKRMHRNMLAIALANKLARIAWAVLARGQAYQPKKVLNVA

SEQ ID NO: 19502 - protein, 341 aa, unidentified
  source 1..341: note = protein_3d2c286
  REGION 7..149: note = RuvC_domain
  SITE 10: note = RuvC_P1
  SITE 53: note = RuvC_P2
  SITE 88: note = RuvC_P3
  SITE 90: note = RuvC_P4
  SITE 93: note = RuvC_P5
  REGION 211..294: note = Tnp_domain
  SITE 219: note = Tnp_P1
  SITE 249: note = Tnp_P2
  SITE 257: note = Tnp_P3
  SITE 258: note = Tnp_P4
  SITE 270: note = Tnp_P5
MEQIITVGLDLAKHVFQVHGADRSGAVVLRKKLRRDQLLVFFAGLPRCTVAMEACGGAHHWAREIGQLGHEVRLIAPAYVKPFVKRQKNDTADAEAICEAAQRPTMRFVPVKTEAAQASALVFRTRDLLVRQRTQLINAVRGHMTEFGMVVAQGPMHVGRLIAIIEDPHSDLLESARNVLGVIIAELRALDDRVSMLDAEIVRRAKEDPVARRLMTIPGIGPITATALIALAPSAATFRRGRDFAAWLGLTPTQHSSGGKERLGRTSRMGERTLRRLLIIGASAVASWASRKGPVPGSWLASMMARKPPMLVRVALANKMARTVWALLAHGGVYRAPAVAA

SEQ ID NO: 19503 - protein, 341 aa, unidentified
  source 1..341: note = protein_9ba7660
  REGION 5..151: note = RuvC_domain
  SITE 8: note = RuvC_P1
  SITE 54: note = RuvC_P2
  SITE 91: note = RuvC_P3
  SITE 93: note = RuvC_P4
  SITE 96: note = RuvC_P5
  REGION 211..297: note = Tnp_domain
  SITE 219: note = Tnp_P1
  SITE 249: note = Tnp_P2
  SITE 257: note = Tnp_P3
  SITE 258: note = Tnp_P4
  SITE 270: note = Tnp_P5
MEEYIGLDVSMKETAVSIRREGKRVWRGKCASDPRGIAELIRKRAPGAKRVVFETGPLSVWFYHALRAEGVPAICIDARHAKAALDMAPNKTDANDADGLAHLAEVGFFREVRVKGFDSMLTRTLVAARNRLVRITTELSNQIRGFMKTFGLLVPAGKGSTFEKNVRKLLVDQEGLATIVLPMLEAWRSMRIRAAELGRQLVAAARQSQACQILMSIPGVGTITATAFATAIEDPDNFRKSRSVGAWLGLTTRRYQSGEVDYDGHISRRGDHHLRGLLYEAATVILTRSSIDSALRRWGLKLRERVGFKRSAVAVARKLAVTMHAMLKSGALFDRNAGATA

SEQ ID NO: 19504 - protein, 322 aa, unidentified
  source 1..322: note = protein_7dea2b2
  REGION 8..150: note = RuvC_domain
  SITE 11: note = RuvC_P1
  SITE 55: note = RuvC_P2
  SITE 95: note = RuvC_P3
  SITE 97: note = RuvC_P4
  SITE 100: note = RuvC_P5
  REGION 191..276: note = Tnp_domain
  SITE 199: note = Tnp_P1
  SITE 228: note = Tnp_P2
  SITE 236: note = Tnp_P3
  SITE 237: note = Tnp_P4
  SITE 248: note = Tnp_P5
MPQEGRIVGLDVSKLKVDGCIRSVGLRRSERSTPEGQAEMLSWLKANDVRLAVMEASGGYERSWAKALQDGGMAVRIVDPKRVRHFAKSAGRLAKNDPIDAEMIAWFAETFPDAPSQAQDVEREELAGLVKARLALLQIKTELGNQAEHQQPRSVVKAFAAVTRSVDAQLARLEAAIAAKIAAKERFAARAEIIESVPGLATQSAAGLIAWMPELGLIDDKAASALIGVAPYDDDSGKHRGERHIKGGRQALRTLLYMPVVGAATHHNPVLKAYYQRLRAKGKEGKVAIIACMRKLIVILNAMLARGEKWDPARGRRSAATA

SEQ ID NO: 19505 - protein, 392 aa, unidentified
  source 1..392: note = protein_9e185b8
  REGION 10..163: note = RuvC_domain
  SITE 13: note = RuvC_P1
  SITE 61: note = RuvC_P2
  SITE 102: note = RuvC_P3
  SITE 104: note = RuvC_P4
  SITE 107: note = RuvC_P5
  REGION 225..310: note = Tnp_domain
  SITE 233: note = Tnp_P1
  SITE 263: note = Tnp_P2
  SITE 271: note = Tnp_P3
  SITE 272: note = Tnp_P4
  SITE 283: note = Tnp_P5
MNETTTRVVIGMDPHKRSVTIEVMEADETVLCGERFGTDEAGFAALMDYVSQFEDRVWAIEGCNGIGRHVAVRLVDRGEEVVDVPPKLSARARVFTTGQGRKTDATDAHSIALVGTRMTGLRPVANDQDLAVLRLLVDRRRSLGEEHTRKVSQLHALLLELIPGGAKKDLSAAQAKALLATVRPRDLAGKTRRRVAAELVGDLERIYTRKKAANKELVELVAASGSTLLDLPGIGPSGAARLLVEVGDITRFPTRGHFASWNGTAPIDASSGDHVRHRLSRKGNRQINKTLHIMATVQLRRPSEGRSYFDRKTAAGKSNIEAMRCLKRRLSDLVYKTMLDDLVTIKATGPGGHRGNVSQSSATGSQPHTGSSDQSLPEPATTKPKPALPAAS

SEQ ID NO: 19506 - protein, 309 aa, unidentified
  source 1..309: note = protein_e838732
  REGION 3..147: note = RuvC_domain
  SITE 6: note = RuvC_P1
  SITE 50: note = RuvC_P2
  SITE 90: note = RuvC_P3
  SITE 92: note = RuvC_P4
  SITE 95: note = RuvC_P5
  REGION 187..270: note = Tnp_domain
  SITE 194: note = Tnp_P1
  SITE 223: note = Tnp_P2
  SITE 231: note = Tnp_P3
  SITE 232: note = Tnp_P4
  SITE 243: note = Tnp_P5
MFVGVDISKARFDVAVRPTGELFSQPNSPAGITEMVQHLQGLGPTLVVVEATGGLEQLLVIALAECGLPVVVVNARQVRDFARATGRLAKTDKLDAMVLALFAEAVRPQLRPLPDAAQRALGALVARRAQLVEMTVAERNRLHASHDPAVREDIQSHLAFLEGRLSQMDRELLEAIVANSALKTRFDLMVSAPGVGKVLAFTLLSDLPELGRLNRRQIAALVGVAPLNRDSGQLRGHRGIWGGRASVRRALYMAAVAALRWNPVVSRLYRRLVAAGKPAKVALVACMRKLLVILNAMLRSGTRWMPEPR

SEQ ID NO: 19507 - protein, 405 aa, unidentified
  source 1..405: note = protein_0e2ccd1
  REGION 4..162: note = RuvC_domain
  SITE 7: note = RuvC_P1
  SITE 60: note = RuvC_P2
  SITE 101: note = RuvC_P3
  SITE 103: note = RuvC_P4
  SITE 106: note = RuvC_P5
  REGION 274..360: note = Tnp_domain
  SITE 282: note = Tnp_P1
  SITE 312: note = Tnp_P2
  SITE 320: note = Tnp_P3
  SITE 321: note = Tnp_P4
  SITE 333: note = Tnp_P5
MYYVGVDIAKEKHYVCILDDTKELACKPFWIYSDILGLRELLKRLAELSLDMNDFIIGIESTGAFSENFYSYITDADYKVILLNSYQTSKYRDFSTLKKIKNDSIDAYVIAELLASGKYKASYISNEDYHNLKVLNRLKKSLDDKIKTIKREISTVVATVNPEIEKVFPNIFTKSALAIIKSYPTAMDISKATPEKLTRLFRHIKGNNFSEDKAEYLISLAKTSIYTGRANESRALMIKTNIKILELYIQERDEVEEQIQILIDNQLDDDSSNIENLKSIPGVSNKTVTAILGECGDLRRFESAKAFIGFLGFYPTLYQSGKSLSTGTLAKRGIPIAKHALYMAAVSSVRHNTELNKLFRDKLSAGKSKKEALIIIAKKLASIIYSLFKYNQAYNPYRVLIQHKK

SEQ ID NO: 19508 - protein, 345 aa, unidentified
  source 1..345: note = protein_d77bf82
  REGION 6..149: note = RuvC_domain
  SITE 9: note = RuvC_P1
  SITE 54: note = RuvC_P2
  SITE 89: note = RuvC_P3
  SITE 91: note = RuvC_P4
  SITE 94: note = RuvC_P5
  REGION 213..300: note = Tnp_domain
  SITE 221: note = Tnp_P1
  SITE 251: note = Tnp_P2
  SITE 259: note = Tnp_P3
  SITE 260: note = Tnp_P4
  SITE 272: note = Tnp_P5
MTISRVGVDIAKSVFHVHGVDRHDQVQWRGKYARDKWLDAIAIRVPTGAVIAMEACASSHYWARELQARGYHVKLIAAQFVKPYVKSNKNDRVDAEAICEAMGRPTMRFVIAKTTAQQDIQATHRIREELVQQRTAKANQIRGLVGEYGLVAPVGIGQLRMALPRWLEDAENGLTYNFRFLLAGLAEDLRYLDDRIASVTEHITLHAKTDPVAKRLMTLRGVGSITASALAGALGDAKAFKRGRDFAASLGLTPRQHSTGGRDRLLGISKRGDSYLRTLLVHGARAVLRYTEGKEDNLSHWIRQLAERKHVNVAVIALANKTARIAWSITCHDSDYDPDRAAQAA

SEQ ID NO: 19509 - protein, 322 aa, unidentified
  source 1..322: note = protein_b77d1bf
  REGION 9..157: note = RuvC_domain
  SITE 12: note = RuvC_P1
  SITE 56: note = RuvC_P2
  SITE 96: note = RuvC_P3
  SITE 98: note = RuvC_P4
  SITE 101: note = RuvC_P5
  REGION 195..279: note = Tnp_domain
  SITE 203: note = Tnp_P1
  SITE 232: note = Tnp_P2
  SITE 240: note = Tnp_P3
  SITE 241: note = Tnp_P4
  SITE 252: note = Tnp_P5
MSVSNQCCAGIDVSKGTLDMAISSTACQLTVPNEADGFKIILKELKQNGMQLILMEATGGLESNVACFLQSEGFDVVVINPRQARDFARAMGYLAKTDRIDARVLLQMAEVINLHPEREKYIRPIPDERRKLLAAMVVRRRQLTIMLTSERNRLHPSHSQNHESIRFIISVLKSELTRINGEMAGYISENFSELSALLSAVKGVGAATVAVLLAEVPELGSLTRREISALIGVAPINRDSGTMRGRRTVFGGRASVRTALYMAALVATRHNPVIRDFYTRLVAVGKPKKVALTACIRKLLTILNAMLKKNEAWDPLYHSHAS

SEQ ID NO: 19510 - protein, 322 aa, unidentified
  source 1..322: note = protein_30bbcb2
  REGION 9..157: note = RuvC_domain
  SITE 12: note = RuvC_P1
  SITE 56: note = RuvC_P2
  SITE 96: note = RuvC_P3
  SITE 98: note = RuvC_P4
  SITE 101: note = RuvC_P5
  REGION 195..279: note = Tnp_domain
  SITE 203: note = Tnp_P1
  SITE 232: note = Tnp_P2
  SITE 240: note = Tnp_P3
  SITE 241: note = Tnp_P4
  SITE 252: note = Tnp_P5
MSVSNQRCAGIDVSKGTLDIAISNNASQFTVPNGSDGFTQIIGELKRNKTRLILMEETGGLESGVACHLQSEGFDVVVINPRQARDFARAMGYLAKTDRIDARVLLQMSEVINLHPEREKYILPLPDAHRQILAAMVVRRRQLTIMLTAERNRLHPSHPQSYESIKSIISALKGELARIEGEMAIHIKDHFSELSDLLSAVKCVGAATVAVLLAEVPELGSLSRREISALIGVAPVNRDSGTMRGRRTVFGGRASVRTALYMSALVGTRHNPVIKEFYTRLVAAGKPKKVALTACIRKLLTILNAMLKKNEAWDPMYHQHAS

SEQ ID NO: 19511 - protein, 318 aa, unidentified
  source 1..318: note = protein_c9d2bc8
  REGION 5..152: note = RuvC_domain
  SITE 8: note = RuvC_P1
  SITE 52: note = RuvC_P2
  SITE 92: note = RuvC_P3
  SITE 94: note = RuvC_P4
  SITE 97: note = RuvC_P5
  REGION 187..270: note = Tnp_domain
  SITE 194: note = Tnp_P1
  SITE 223: note = Tnp_P2
  SITE 231: note = Tnp_P3
  SITE 232: note = Tnp_P4
  SITE 243: note = Tnp_P5
MVSFVGIDVSSRTLDIAVRPQSLTINVTNDRAGFEVLEKSLRGLKVKRVLLEATGGYEREVLSFLQSAGYKVIRVNPRRARSFAESMNIKAKTDAIDAAVLAHFAEVIPDKPTLQVSPQRALLRELLPQRDRLIQQRDDDRRRLKQAQSEVVARFLKSNLQHFRSQIRQIEHEIKLHAEGLGDERIAQLVQVKGIGLVTAGKLVTLLPELGHVEAREIASLVGVAPFNHDSGTSVGKRSISGGRFGIRCALYMSCLVAVRQNPSLKAKYQALRERGKAAKVALVACMRVFIVRLNAMLRTGTPWQDVELPQCKSAPPA

SEQ ID NO: 19512 - protein, 322 aa, unidentified
  source 1..322: note = protein_7384b98
  REGION 9..163: note = RuvC_domain
  SITE 12: note = RuvC_P1
  SITE 60: note = RuvC_P2
  SITE 100: note = RuvC_P3
  SITE 102: note = RuvC_P4
  SITE 105: note = RuvC_P5
  REGION 191..276: note = Tnp_domain
  SITE 199: note = Tnp_P1
  SITE 229: note = Tnp_P2
  SITE 237: note = Tnp_P3
  SITE 238: note = Tnp_P4
  SITE 250: note = Tnp_P5
MDDGYAVFPGLDVGKGEHHAVGLDPAGRRLHGGPLPNSEPKLREVFDKLAKLGRVLVVVDQHNTIGALPVTVARACGLDVAYLPGLATRGIADLYPGNAKTDARDAFVIADAARTLPHALRRIDVGDDTLAELDVLIGFDDDLAAEATRISNRIRGLLTGLHPALERVLGPRAAHPATLEILSRPAARSAARVLTSMPGIGVRTAARILLEVGDASAFKSSAHLAAYAGIAPVTRTSGTSIKGEHPARSGNRKLKRAFFLSAFAALHDPAGRTYYDRQRAEGKKHNAALIRLARRRRDVLFAMLRNSAHYRHTEPAHTAIAA

SEQ ID NO: 19513 - protein, 278 aa, unidentified
  source 1..278: note = protein_e34c116
  REGION 2..74: note = RuvC_domain
  SITE 14: note = RuvC_P3
  SITE 16: note = RuvC_P4
  SITE 19: note = RuvC_P5
  REGION 138..226: note = Tnp_domain
  SITE 146: note = Tnp_P1
  SITE 176: note = Tnp_P2
  SITE 184: note = Tnp_P3
  SITE 185: note = Tnp_P4
  SITE 197: note = Tnp_P5
MPAAFVKAFNIRNKNDAADARAIWLAVQQPSKPIAVKTEVQQAMLALHRTREQLVKFRTMQINSLRGLLTEYGEVMGRGRAALDNKAIPDVLARVAERLPAALIDTLREQWNGLAKLDLQIGAIERRMRMWVKEDRAVRAISDIPGVGMLTASAAVSMIGDAKVFRSGREFAAWAGLVPKQTGSGGKTNLHGISKRGDTYLRTLLIHGARSVLTHSKEPSQWLEQISKRRPPNVVIVALANKMARTIWAVLAHDRPYQRGYMSLKPAPTVCTREGINF

SEQ ID NO: 19514 - protein, 405 aa, unidentified
  source 1..405: note = protein_ffab849
  REGION 4..160: note = RuvC_domain
  SITE 7: note = RuvC_P1
  SITE 57: note = RuvC_P2
  SITE 97: note = RuvC_P3
  SITE 99: note = RuvC_P4
  SITE 102: note = RuvC_P5
  REGION 274..361: note = Tnp_domain
  SITE 282: note = Tnp_P1
  SITE 312: note = Tnp_P2
  SITE 320: note = Tnp_P3
  SITE 321: note = Tnp_P4
  SITE 334: note = Tnp_P5
MNAVGIDVSKGKSTVTIRRPGDVVLMPPCDIPHTQSGINDLIVYLQNLDGETKVCMEHTGRYYEPVASWLSDAGIFVSAVNPILIRDFGDGSLRTPKTDKADSKKIARYTLDRWAKLKQYGSMDKTRNQLKTMNRQSAFYMAQKTAMKNNLISLLDQTYPGANDFFNSPARSNGSQKWVDFVHTYWHVDCVRSKSLNAFTEHYQSWCRRRGYNFSADKAEKIHHLSSDLIAVFPKDDITKMLIRQAVALLNTASETEKSLRLKMNELASTLPEYPIVMDMDGVGPTLGPQLIAEIGDVTRFTHREALTAFAGVDPGRNDSGQHVQKSVRTTKKGSPYLRKALFQVMDSLIKRSPVDDPVYAFMDKKRAQGKPYYVYMTAGANKFLRIYYGRVKEYLTTLPENEGV

SEQ ID NO: 19515 - protein, 320 aa, unidentified
  source 1..320: note = protein_9719f99
  REGION 10..154: note = RuvC_domain
  SITE 13: note = RuvC_P1
  SITE 55: note = RuvC_P2
  SITE 95: note = RuvC_P3
  SITE 97: note = RuvC_P4
  SITE 100: note = RuvC_P5
  REGION 190..274: note = Tnp_domain
  SITE 198: note = Tnp_P1
  SITE 227: note = Tnp_P2
  SITE 235: note = Tnp_P3
  SITE 236: note = Tnp_P4
  SITE 248: note = Tnp_P5
MAMRMQPLLIGVDVSKAKLDICEAPGQPLRQLCNERSAIRAWLKALPGPACIAVEATNTFHLLLLEEAHRLEHTLYVIDGYRLNRYRESIGGRAKTDASDARLLRRYLEREQAELRPWSPPPKGYVCIQRLLHRRAVLVKSKVALEQSLRELPELKRSAKVLMRQLTRLDTLIQQRLRQALEQQGWLAELKRCQAIEGVGPLTGAALVMAFNRGPFKSSDAFIAFLGLDVRVRDSGQCRKRRKLTKKGDPELRRLLHLAAMRACHTPAWEAFYQRYLDRGLTKIQALVILARKLARIAFALLKNQTTYRTNALRETCLTT

SEQ ID NO: 19516 - protein, 400 aa, unidentified
  source 1..400: note = protein_d9634be
  REGION 11..166: note = RuvC_domain
  SITE 14: note = RuvC_P1
  SITE 63: note = RuvC_P2
  SITE 103: note = RuvC_P3
  SITE 105: note = RuvC_P4
  SITE 108: note = RuvC_P5
  REGION 273..358: note = Tnp_domain
  SITE 281: note = Tnp_P1
  SITE 311: note = Tnp_P2
  SITE 319: note = Tnp_P3
  SITE 320: note = Tnp_P4
  SITE 332: note = Tnp_P5
MTSSDGTDLYLGLDVGKGEHHATALTPAGKKVFDKALPNSEPRLRELFTKLQAKHGTMLVVVDQPATVGALPLAVARDAGCRIAYLPGLTMRRIADLYPGEAKTDARDAHVIADAARAMPHTLRDLAPSDETVAELEMIAGFDDDLAGESTRIKNRLRGLLTQIHPSLERVLGPRLDHPAVLALLERHGSPAQLRKAGRRRVITLLRPKAPRMAERLVEDIFTALDEQSVVVPGTEAATLIVPSLASSLSSVLEQRKLLAVRIEELLEAHPLSPVLTSMPGIGIRTAARILVDVGDARAFPTSGHLAAYAGLAPVTRASGSSIRGEHPSRRGNKQLKRAFYLAAFASLSQPESRTYYDRKRREGKHHVAALVALARRRIDVLFAMLRDGTLYQPPAATAA

SEQ ID NO: 19517 - protein, 407 aa, unidentified
  source 1..407: note = protein_da7183a
  REGION 4..163: note = RuvC_domain
  SITE 7: note = RuvC_P1
  SITE 60: note = RuvC_P2
  SITE 100: note = RuvC_P3
  SITE 102: note = RuvC_P4
  SITE 105: note = RuvC_P5
  REGION 273..359: note = Tnp_domain
  SITE 281: note = Tnp_P1
  SITE 312: note = Tnp_P2
  SITE 320: note = Tnp_P3
  SITE 321: note = Tnp_P4
MIFVGVDWAEVHHDVCIMDADGQVLERKRISDSLTGLSELHALVADHLGENDEPSDVIVGIEKDRGLIVMSLLAANYQIFAVNPIAAARYRERHVTSGAKSDPGDAKVLADLVRTDRHNHRAVAGDSTLSEAIKLLSRVHQNTIWNRQRQVNSLRSALKDYYPGALEAFGTDLCGQDAVAILAIAPTPSLGRTLSRAKITSALRKVGRSRHLEERTERIYQALRQEQLRQPAVLETAYGVATETAIANIVQFNASLVKLEASLSEHFEQHPSAKVILSLPGMGTVLGARVLGEFGDDPNRYSDAKSRRNYAGTSPITRASGRSRVVLARHSRNKRLAGALDQWAFSSLLPSPGARAYYDELKARDKHHRKAIRQLANKWVGILHACLESGTPYDEQIAWSPREQRVA

SEQ ID NO: 19518 - protein, 360 aa, unidentified
  source 1..360: note = protein_35eb678
  REGION 8..153: note = RuvC_domain
  SITE 11: note = RuvC_P1
  SITE 57: note = RuvC_P2
  SITE 93: note = RuvC_P3
  SITE 95: note = RuvC_P4
  SITE 98: note = RuvC_P5
  REGION 218..305: note = Tnp_domain
  SITE 226: note = Tnp_P1
  SITE 255: note = Tnp_P2
  SITE 263: note = Tnp_P3
  SITE 264: note = Tnp_P4
  SITE 276: note = Tnp_P5
MKVQRTSVGLDVHARSVVACGLDGDTGKVFERRLIPDRDEILDWVRSLPGPVAVTYEAGPTGFWLARFLLAAGVVCVVAAPSKLIRPAGDRVKTDARDAAHLARLLHLGQVVAVAIPTVEQEAARDLVRAREDVRGDLMTARHRLSKLLLRQGIVYCGGRAWIREHERWLRRQRFDNAALQLAYDTAFDTMLATVDRRERLDAAIAEMATDSQFTPVVTRLGCLRGVSTLTAFGLAVEIGDWSRLTGRSIGAYLGLVPSEYSSGATRTQGGVTKTGNGHARRLLVEAAWHHRAPYRPGAEMRRRWDAASPAARARGQAGNRRLHERWMHFDQRKKRSVVANAAIARELAGWCWSLAVLDD

SEQ ID NO: 19519 - protein, 345 aa, unidentified
  source 1..345: note = protein_49a1689
  REGION 6..148: note = RuvC_domain
  SITE 9: note = RuvC_P1
  SITE 52: note = RuvC_P2
  SITE 87: note = RuvC_P3
  SITE 89: note = RuvC_P4
  SITE 92: note = RuvC_P5
  REGION 211..297: note = Tnp_domain
  SITE 219: note = Tnp_P1
  SITE 249: note = Tnp_P2
  SITE 257: note = Tnp_P3
  SITE 258: note = Tnp_P4
  SITE 270: note = Tnp_P5
MKIAAIGLDLAKNVFQVHGVDPRGVPVLRKQLKRIQVLPFFATLEPCLVGMEACCGAHFWARKLQAYGHTVKLIAPQFVKPYVKSNKNDAADAEAICEAVSRPNMRFVPVKSIEQQAILALHRVRQGFVTARTAHANQIRSLLAEYGLVVPQGIHHLHQDVPDLLEDVSNELPGVFRQLVMHQLDYLRELDRQVQLLEAQIKTWHRENEASRRLAQIPGIGPITATALVASVGDARCFASGRQLAAWIGLVPRQHSSGGKQVLLGIGKRGDAYLRCLLVHGARAVISAVRQKADTSTSWLGRLLARRHTNIATVALANRNARIAWALLAHHREFCSDYGRAAPVV

SEQ ID NO: 19520 - protein, 412 aa, unidentified
  source 1..412: note = protein_42d6a7e
  REGION 4..170: note = RuvC_domain
  SITE 7: note = RuvC_P1
  SITE 67: note = RuvC_P2
  SITE 107: note = RuvC_P3
  SITE 109: note = RuvC_P4
  SITE 112: note = RuvC_P5
  REGION 278..364: note = Tnp_domain
  SITE 286: note = Tnp_P1
  SITE 317: note = Tnp_P2
  SITE 325: note = Tnp_P3
  SITE 326: note = Tnp_P4
MLFVGDDWAEDHHDIEVQDEHGHRLARARLPEGIAGLSKLHELIAEHLTDDDVDPETGFVAQSVMLGIETDRGTWVSALVAAGYQVFPLNPVQVARYRERHGASGAKSDRGDAHVLAEIVRLDRSHHRPIAGDSPEVEGLKLVARSHQAFIWDRTRHFQRLRSALREFFPAAIEAFPDLMAPDALELLERAPDPARAARLSRSKITAALTRARRREPAARAEAIQATLRAPALRQDPAIEAAYAVIVASAVRLIAQLNIQIGELQAVVAEGFGRHPDADIVTSQPGLGAILGARVLAEFGDDHVRYSDAKARKNYAGTSPITRASGTRRVVLARYARNKHLADATHQWAFCALTASPGARAYYDTIRARGASHHAALRQLGNRLVGILHGCLKTHTHYDEDTAWPRITEAAA

SEQ ID NO: 19521 - protein, 408 aa, unidentified
  source 1..408: note = protein_3dd0d7d
  REGION 11..167: note = RuvC_domain
  SITE 14: note = RuvC_P1
  SITE 63: note = RuvC_P2
  SITE 104: note = RuvC_P3
  SITE 106: note = RuvC_P4
  SITE 109: note = RuvC_P5
  REGION 274..358: note = Tnp_domain
  SITE 282: note = Tnp_P1
  SITE 311: note = Tnp_P2
  SITE 319: note = Tnp_P3
  SITE 320: note = Tnp_P4
  SITE 332: note = Tnp_P5
MSERPRPAVFVGLDVGKSDHHAVAVTAAGKTVYDKALPNDEARLRTILEELATAHGPVLMVVDQPATIGALPVAVAQAMESVTVAYLPGLAMRRIADLHPGAAKTDARDAAIIAEAARTMPHTLRNIRVDEAQIAELVVLAGFDDDLAAQITATSNRLRGMLTQIHPALERALGPRVTHPAVADLLSRYPTPGKLAAAGRGHVRARLKKHAPRLAEPLTEAIFDALSQQTVVVAGTEAATTVIPILAGQLASLIRQRATVATQVEALVEAHPLSAVLTSMPGIGVRTAARILTEVVGKDFADAGHLASYAGIAPVTRRSGTSIRGEHAPRGGNKRLKRALFLSAFASLHHGPSRAYYDRKRAQGKRHNQAIIALARRRTDVLYAMLRDGTLYQDPTDPQTSSSVALAA

SEQ ID NO: 19522 - protein, 344 aa, unidentified
  source 1..344: note = protein_1091333
  REGION 6..147: note = RuvC_domain
  SITE 9: note = RuvC_P1
  SITE 52: note = RuvC_P2
  SITE 87: note = RuvC_P3
  SITE 89: note = RuvC_P4
  SITE 92: note = RuvC_P5
  REGION 211..298: note = Tnp_domain
  SITE 219: note = Tnp_P1
  SITE 249: note = Tnp_P2
  SITE 257: note = Tnp_P3
  SITE 258: note = Tnp_P4
  SITE 270: note = Tnp_P5
MHITSIGIDLGKTTFHLVALGERNKILVRKKFSRAQLLAYTANLPASLIGLEACAGAHFLGAALQGQGHQVRLIPAQFVKPYRKSNKNDFIDAEAIAEAVAKQNMRFAQLKTQEQLDWQAMHRVRDRLVQHRIALINEIRGFLLERGITFAAGPIHLRKNLPLLLEDAEQNLSPRLRWLLQRLRQEWQQIEVDIQAITDEIERISNEDALCRRLRQIPGFGPLVSTATVAAIGNGSAFRRGRDFAAWVGVVPRQYSTGGKQKLFGISKRGNLYLRRMLIHGARAVLLRVRYDTGGFGQWVHRLAQRAPRNKVVVAIANKLARIAWAVLSSGKNYQPQPLLNAAA

SEQ ID NO: 19523 - protein, 338 aa, unidentified
  source 1..338: note = protein_f73cf7a
  REGION 6..147: note = RuvC_domain
  SITE 9: note = RuvC_P1
  SITE 52: note = RuvC_P2
  SITE 87: note = RuvC_P3
  SITE 89: note = RuvC_P4
  SITE 92: note = RuvC_P5
  REGION 209..295: note = Tnp_domain
  SITE 217: note = Tnp_P1
  SITE 246: note = Tnp_P2
  SITE 254: note = Tnp_P3
  SITE 255: note = Tnp_P4
  SITE 267: note = Tnp_P5
MEFKRISIDTSKHVFTIHGVDLQERPILQREIRRAQVEPFFAKLAPTEVVLEACAGSHHWGRVLGGMGHRVRLIPPQYVKPFVKRSKNDRNDAEAISEAASRPSMRTVPVKSADEQAATIIVKHRELMVNQRTQAINALRGHAAEFGIVAAKGCANVTALLAVLSAEEMIPAIAKAMFEQMGRHVTDLEAKIDALERQLLEQHKANAVSARLAAIPGVGPITAITMALTVNPTNFETGRHFAAWLGLTPREHSTGGKHRLGRISKAGSERLRQLLVVGAMAVIRYAKPGSKSATAWLLQLLERRPRKVAAVAMANKMARIIWAMMARGEAYRRQPVAA

SEQ ID NO: 19524 - protein, 351 aa, unidentified
  source 1..351: note = protein_a7128a6
  REGION 12..152: note = RuvC_domain
  SITE 15: note = RuvC_P1
  SITE 58: note = RuvC_P2
  SITE 93: note = RuvC_P3
  SITE 95: note = RuvC_P4
  SITE 98: note = RuvC_P5
  REGION 215..301: note = Tnp_domain
  SITE 223: note = Tnp_P1
  SITE 253: note = Tnp_P2
  SITE 261: note = Tnp_P3
  SITE 262: note = Tnp_P4
  SITE 274: note = Tnp_P5
MKEPPVEQIIRIGMDTSKNVFQLHGVNSAEQPVLRKKLTRREMVRFFEKLPPTVVAIEACGSAHHWARLLGSYGHEVRLIAPQLAKPYVKRGKNDAADAEALCEAMSRPTMRFVPAKSVEQQAALMLIAMRTRLIQKRTQLANTIRGFAAEFGVTAATGMCRIEPLLERIAADEAIPELARELFALHGREYSQLLMEIERVEAQVMEWHRNDECSQRLAKIPGVGPIGASLLMMKTPDPQQFKSGRDFAAWIGLTPRDHSTAGKVRLGVITRAGDELLRSTLVVGATAVVQHVRRTGGKNASVWLLGSLERKKPKLVAVALANKIARIAWKLMVSGEQYRRAELSPPAVAA

SEQ ID NO: 19525 - protein, 349 aa, unidentified
  source 1..349: note = protein_a0392df
  REGION 6..147: note = RuvC_domain
  SITE 9: note = RuvC_P1
  SITE 52: note = RuvC_P2
  SITE 87: note = RuvC_P3
  SITE 89: note = RuvC_P4
  SITE 92: note = RuvC_P5
  REGION 209..295: note = Tnp_domain
  SITE 217: note = Tnp_P1
  SITE 246: note = Tnp_P2
  SITE 254: note = Tnp_P3
  SITE 255: note = Tnp_P4
  SITE 267: note = Tnp_P5
MNLKRIGLDTSKAVFTLHGVDQDEKAVLRRNMRRAEMEAFFAKLPPTLVALEACGGSHHWGRQLAAMGHTVQLIPPQYVKPFVRRGKNDRNDAEAISEAAARPDMPSVPVRSAEQQAEAIVLSARELLVRQRTQLVNAVRGHAAEFGVVAAKGTSQVPALLEAVATGEAVPDAAKGMLAFLGAQVVQLDGQIAELDRRMKQQHKANPVSQLLAEVPGIGPVTALSLALTIDPGRFTSGRHLAAWLGLVPKQHSTGGRQRLGGISRAGDERLRQLLVVGAMAVIRFAKPGSKSASAWLLALLERKPRKLAAVALANKMARIVWAMMATGEAYRGSKRAAAPAAGAAAAAA

SEQ ID NO: 19526 - protein, 340 aa, unidentified
  source 1..340: note = protein_dccaeb5
  REGION 6..147: note = RuvC_domain
  SITE 9: note = RuvC_P1
  SITE 52: note = RuvC_P2
  SITE 87: note = RuvC_P3
  SITE 89: note = RuvC_P4
  SITE 92: note = RuvC_P5
  REGION 211..295: note = Tnp_domain
  SITE 219: note = Tnp_P1
  SITE 249: note = Tnp_P2
  SITE 257: note = Tnp_P3
  SITE 258: note = Tnp_P4
  SITE 270: note = Tnp_P5
MKIAVLGIDLGKNSCSLVGLDQNGQVVVRRRMHRETVIAFASRLPACIVAMEACCGAHHMGRSLAAQGHTVRLMSPEYVRPYVKAQKNDDRDAEAIAEAATRPTMRFVELKSEDQLDMQTLHRVRDRLVAERTSLMNQIRSVLLERGYVVPQGRAKLAGRLAEIVADPACMLSLRIRHLIAEMRERWELLDQRITALDDEFHQHCRSNDQARRLTSIPGIGSLNATALVAAVGDAHTFARGRDLAAWLGLVPRQATTGGKPRLLGISKRGSKYLRKMLIQGARAALPTLRNTNTRLGVWLRGLLGRAHPNIAVVALAAKMARIVWALLRHERSYQAAAAA

SEQ ID NO: 19527 - protein, 341 aa, unidentified
  source 1..341: note = protein_8d77b2e
  REGION 7..148: note = RuvC_domain
  SITE 10: note = RuvC_P1
  SITE 53: note = RuvC_P2
  SITE 88: note = RuvC_P3
  SITE 90: note = RuvC_P4
  SITE 93: note = RuvC_P5
  REGION 211..301: note = Tnp_domain
  SITE 219: note = Tnp_P1
  SITE 249: note = Tnp_P2
  SITE 257: note = Tnp_P3
  SITE 258: note = Tnp_P4
  SITE 270: note = Tnp_P5
MSEVSIIGLDLAKNVFQAHGADASGVALFRKKLRRDQVLKFLDGQPACTVAMEACGSSHYWAREITKLGHDVRLIAPSYVKPFVKRQKNDAADAEAICEAAQRPTMRFVTAKSEKQQAAAMVFRARDLLVRQRTQTINAIRGHLAEFGLVAAQGLFHVAKLAIAIEDEGSAIPEAARPILFLLLEQLRSLDERVALLDREIARRAREDEDARRLMTIPGIGPVTATALSALAPSAPIFKRGRDFAAWLGLTPLQRSTGGKQKLGETSRMGERTLRRLLIIGASAAVRWAMRKGTTADPWLSRMLSRKPPMLVIVALANKTARIVWALMAKGGTYRPPGMAG

SEQ ID NO: 19528 - protein, 359 aa, unidentified
  source 1..359: note = protein_73c9792
  REGION 5..121: note = RuvC_domain
  SITE 58: note = RuvC_P3
  SITE 60: note = RuvC_P4
  SITE 63: note = RuvC_P5
  REGION 228..313: note = Tnp_domain
  SITE 236: note = Tnp_P1
  SITE 265: note = Tnp_P2
  SITE 273: note = Tnp_P3
  SITE 274: note = Tnp_P4
  SITE 286: note = Tnp_P5
MRSTSACRQRGRCWWWSISPATIGALAVAVAQDMGITVGYLPGLSMRRIADLTPGSAKTDAKDAAVIAQAARTMPHTLRAVSTSDEEAAALSMLTGFDLDLARQVNQTANRIRGLYTQIHPALEAVVGPWLEHDAILEVITAWPTPADLKRAGKTRIDARLKKHGCRRHATWAGQIVSALKHQTVVVAGTDAAGTVLPHLARQLITLHAQRADIAAQVETLVQAHPLYQVLTSMPGIGVRTAAVFLAETLGKTFDTGAQLASYSGLAPVTRRSGSSIRGEHVSHGGNKRLKRAMFLSAFASLRSDPVSRAYYQRKRDQGKRHNQAVLALAHRRILTLHAMIRNGALYDPQPATKLPAAA

SEQ ID NO: 19529 - protein, 345 aa, unidentified
  source 1..345: note = protein_e131ee8
  REGION 7..148: note = RuvC_domain
  SITE 10: note = RuvC_P1
  SITE 53: note = RuvC_P2
  SITE 88: note = RuvC_P3
  SITE 90: note = RuvC_P4
  SITE 93: note = RuvC_P5
  REGION 210..291: note = Tnp_domain
  SITE 218: note = Tnp_P1
  SITE 248: note = Tnp_P2
  SITE 256: note = Tnp_P3
  SITE 257: note = Tnp_P4
  SITE 269: note = Tnp_P5
MEQITRIFIDTSKQFFQLHGVNAAEEVVLRRKLKRDQFVAFFAKLPATLVGLEACGASHYWARELMAQGHAVKLVPAQYVKAYVKRGKNDARDAEAGCEAMSRPTMRFVPIKSAENQASLMVMSMRERLTRERTRLANTIRGHAAEFGLTAPKGVAHIAPLLAEAADAEGVPKLARQMFATLAREWDRLGVSRREADARLMAWHRTDALSRRLAQVPSLGPIGASMMVMKLPDPKAFKSARHFAAWIGLTPKDHSTAGKQRLGAITCAGDEALRSVLVVGATAVLKPIGKGGGLRSPWLLKLLEKDKPKLAAVALANRVARIAWKMMVTGEAYDPKRLMRELPTT

SEQ ID NO: 19530 - protein, 408 aa, unidentified
  source 1..408: note = protein_d35748c
  REGION 4..165: note = RuvC_domain
  SITE 7: note = RuvC_P1
  SITE 62: note = RuvC_P2
  SITE 102: note = RuvC_P3
  SITE 104: note = RuvC_P4
  SITE 107: note = RuvC_P5
  REGION 273..359: note = Tnp_domain
  SITE 281: note = Tnp_P1
  SITE 312: note = Tnp_P2
  SITE 320: note = Tnp_P3
  SITE 321: note = Tnp_P4
MLFVGDDWAEDHHDVELMDTAGRRLARARLPEGVAGIARLHAMIAEHLGPDTDPDQARVVIGIETDRGPWVAALVAAGYAVFAVNPLQAVGYRRRHGVSGAKSDAADAHMLANMVRTDAHELRPIAGDSPEAEAVKVITRAHKTLIWERTRHTQRLRHSLREYFPAALEAFEDLDAPEALELLGKAPDPDSAARLSLSQIRAALRRARRRDIEGKATRIQSLLRAQQLGQPAVVTAAYAATTRAAVTVLATLRAQVSTLQGQVETFFGQHPDAEIVLSQPGLGPILGARVLAEFGDDPNRYASAKARKNYAATSPITRASGKKKVVLARFVHNDRLIDALMTQAFAALNTSPGARTYYDQQRARGVGHNPALRQLANRLVGILHGCLKTRTLYNETTAWSHHANNIAA

SEQ ID NO: 19531 - protein, 394 aa, unidentified
  source 1..394: note = protein_e67e164
  REGION 4..157: note = RuvC_domain
  SITE 7: note = RuvC_P1
  SITE 58: note = RuvC_P2
  SITE 98: note = RuvC_P3
  SITE 100: note = RuvC_P4
  SITE 103: note = RuvC_P5
  REGION 263..353: note = Tnp_domain
  SITE 271: note = Tnp_P1
  SITE 301: note = Tnp_P2
  SITE 309: note = Tnp_P3
  SITE 310: note = Tnp_P4
  SITE 326: note = Tnp_P5
MATIGIDVGKRQHVAAIHRDGEREAHRAVLRFGADRDGLADLTAWLARQGEISRAVLESSGHYHLNLAAALQRRGIPVAIVNPLESKYFGKRRLQRTKSDPADARTLATLAMVDEPQVRDVLAGAELREAARFAMHLVDELGRVDQRICRLVEIGFPELERAYDDPTCVSALAVLRTAPTAAAAARKRSATLAQASRPGGGRRIGPKKAEQISALAKDTIAAPELADQIGFQMRLLIAQHDLLESQIAEAEAHLATLMDGELVRRLRTIPGAGPAIVATLVAEIGDIARFSEFDKLVAYIGVHPAEKSSGEKGRNPETSWRMSKAGNAYLRTALYRMAIVGIQHNPVIRAHYARKRAQGKSKMNAVGHCMKKALAIVWGVWRSGTDFAAPPSTP

SEQ ID NO: 19532 - protein, 262 aa, unidentified
  source 1..262: note = protein_b35dfc7
  REGION 2..70: note = RuvC_domain
  SITE 9: note = RuvC_P3
  SITE 11: note = RuvC_P4
  SITE 14: note = RuvC_P5
  REGION 132..218: note = Tnp_domain
  SITE 140: note = Tnp_P1
  SITE 170: note = Tnp_P2
  SITE 178: note = Tnp_P3
  SITE 179: note = Tnp_P4
  SITE 191: note = Tnp_P5
MKPFVKRQKNDMADAEAICEAAQRPTMRFVAPKSADAQGSAVVFRTSDLLVRQRTQLINALRGHLAEFGFVVRQGAGYTAKLIQVVEDPSSDLPAEARPVLTIIVESLRALQDKVAQLDAEIAARAKRDPVARRLMTIPGIGPVVATALMALAPAACTFRRGRDFAAWVGLTPQQHSSGGKERLGRTSKMGERSLRRLLILGASSAAKAAARDGSRASPWLTGMLARKPRMLVTVALANKMARIVWALMAHGGTYRAPAVAV

SEQ ID NO: 19533 - protein, 346 aa, unidentified
  source 1..346: note = protein_5642ec3
  REGION 14..156: note = RuvC_domain
  SITE 17: note = RuvC_P1
  SITE 60: note = RuvC_P2
  SITE 95: note = RuvC_P3
  SITE 97: note = RuvC_P4
  SITE 100: note = RuvC_P5
  REGION 218..304: note = Tnp_domain
  SITE 226: note = Tnp_P1
  SITE 256: note = Tnp_P2
  SITE 264: note = Tnp_P3
  SITE 265: note = Tnp_P4
  SITE 277: note = Tnp_P5
MGNITTDLSAVVTVGLDLAKHVFQVHAIDATGRVVTTRALRRKDVLAFFESLPCCLVGLEACGSAHHWARELMKFGHDVRLMPPAYVKAYVRRQKNDAADAAAICEAVTRPSMRFVPVRSVENQAALMHHKVRELLVAQRTQLLNALRSHMAEIGIIAAQGPNNARALAILVIEGNDMIPATVRSALLPLVRQLSELDTEIRQSDQAILALAKADETARRLMTVPGIGPITASALAASVQDITAFSGPREFAAFLGLTPRQNSSGGKERLGRVSKMGNRYLRKLLVVGAHAVLFHRKRSGDMLRNWADRLMDTKPFKLVAVATANKLARIAFALMRDETHYVGTPA

SEQ ID NO: 19534 - protein, 334 aa, unidentified
  source 1..334: note = protein_40828bc
  REGION 6..147: note = RuvC_domain
  SITE 9: note = RuvC_P1
  SITE 51: note = RuvC_P2
  SITE 86: note = RuvC_P3
  SITE 88: note = RuvC_P4
  SITE 91: note = RuvC_P5
  REGION 208..296: note = Tnp_domain
  SITE 216: note = Tnp_P1
  SITE 246: note = Tnp_P2
  SITE 254: note = Tnp_P3
  SITE 255: note = Tnp_P4
  SITE 267: note = Tnp_P5
MTMKMLAIDLGKQSFHLHGIDAHGVVISRKVSRTKLESAVAELEPDTIAMEACASAHHWGRQFRAAGREVRLVNPRFVKAFVRGSKNDAVDAEAIYDAASRPTMRFVPVKTTEQQDLQSLHRVRERLVIQRTSLINHARGLLAEYGVVLPKGPWRFRDQAPQAIEEAGLSDLARELFTELLDQLRDVEARLAKLDAELVRICREHDACRRLAALPGVGPVIATALVAAVDDGRHFRSGRELAAWIGLVPRQYTTGGKPRLGGIGRRANHYLRRQLIHGARAVISRLAGRDDRRSAWLKGIVARAGFNKALVALANKTARIAWVLLARKECYMPG

SEQ ID NO: 19535 - protein, 339 aa, unidentified
  source 1..339: note = protein_574f79a
  REGION 7..149: note = RuvC_domain
  SITE 10: note = RuvC_P1
  SITE 53: note = RuvC_P2
  SITE 88: note = RuvC_P3
  SITE 90: note = RuvC_P4
  SITE 93: note = RuvC_P5
  REGION 212..300: note = Tnp_domain
  SITE 220: note = Tnp_P1
  SITE 250: note = Tnp_P2
  SITE 258: note = Tnp_P3
  SITE 259: note = Tnp_P4
  SITE 271: note = Tnp_P5
MKQIITIGLDIAKQVFEVHGVDGQGAVVVRRSLRRGQLIGWFAKLAPCLVGIEACATAHHWARELGELGHSVKLIPPAYAKAYVRRNKNDAADAAAICEAVSRPSMRFVAIKSKEQQAAAGIHRVRELLMKQRTMTLNTVRSLMAEFGIVVREGPRHVVELEAILADPQDERVPEPLHGGLLKLVEILRGLESRIAVIDKAIVTAGRDNAIFRHLITIPGYGPILSSAMAAMVIDPKAFKNGRHFAASLGLVPRQEGTGGKVKLGPISKRGNGYLRRLLVNGAMAILATKRAKQDPWLARLLATKKRKLVAVALANKMARIGWALMTRQQDFCALPAAA

SEQ ID NO: 19536 - protein, 406 aa, unidentified
  source 1..406: note = protein_16c8a5a
  REGION 4..162: note = RuvC_domain
  SITE 7: note = RuvC_P1
  SITE 60: note = RuvC_P2
  SITE 101: note = RuvC_P3
  SITE 103: note = RuvC_P4
  SITE 106: note = RuvC_P5
  REGION 268..355: note = Tnp_domain
  SITE 276: note = Tnp_P1
  SITE 306: note = Tnp_P2
  SITE 314: note = Tnp_P3
  SITE 315: note = Tnp_P4
  SITE 328: note = Tnp_P5
MRYVGIDIAKKDHQIAAVDEFGNVILKSFSAGNNESGFAKIAEKLEAARIESDECLVGMEATGHYWISLWEFLDANGYEVVVINPIQTDAFRKVDSLRKTKTDAIDSVLIAEYLRFANPESSKMANPDVEQLRELARFRSFLVEQATQLKNKAIRVLDQAFPEYGKLFSNTFGEASKALLKQCPAPEEVLATDIRTLTRILKENSGGNCGRAKAEAVKDAARSSIGAKFGARALSFEIKLLVKRLSFTQVQIEELEDEISELLHRSDGHWLTTIPGIGDSLAASIAGEIGDPDRFETPKKLIAYAGMDASKYQSGANQDTNGHMSKRGSSELRRALMLAADKVRIYDPYFGEYYDSMKARGKHHYVALSGVARKLAGVCLSLMREQRPYESEPPEHHLPGHLQRQA

SEQ ID NO: 19537 - protein, 343 aa, unidentified
  source 1..343: note = protein_230efe5
  REGION 7..149: note = RuvC_domain
  SITE 10: note = RuvC_P1
  SITE 53: note = RuvC_P2
  SITE 88: note = RuvC_P3
  SITE 90: note = RuvC_P4
  SITE 93: note = RuvC_P5
  REGION 211..296: note = Tnp_domain
  SITE 219: note = Tnp_P1
  SITE 249: note = Tnp_P2
  SITE 257: note = Tnp_P3
  SITE 258: note = Tnp_P4
  SITE 270: note = Tnp_P5
MTYDTMIGIDLAKNVFQVDGALLSGEVKFRRKLSRQHFRRFMAGQGASIVVMEACGSAHYWSREMTKLGHEVRLIAPQYVRPFVKRQKNDAADAEAIVTAAQRPGMRFVTPKLEEQQAQALLFRGRERLVRQRTELVNALRSVLYEFGHPIPPGIGQLTRIEAMVEAENSDLPELVRDECRDLLLQIAEKTQRIEWKTKQIGALASLTDTARRLQTMPGIGPMSALAVEAFAPPMESFRRGRDFAAWLGLVPRQHSSGGKERLGRISKAGQADIRRLLIMGAMSRLNWLGRRTIPERSWLSGMLARKPRMLVAIALANKMARAIWAMLTTGKDYQNPTQTAAA

SEQ ID NO: 19538 - protein, 341 aa, unidentified
  source 1..341: note = protein_fe8ec79
  REGION 6..147: note = RuvC_domain
  SITE 9: note = RuvC_P1
  SITE 52: note = RuvC_P2
  SITE 87: note = RuvC_P3
  SITE 89: note = RuvC_P4
  SITE 92: note = RuvC_P5
  REGION 211..296: note = Tnp_domain
  SITE 219: note = Tnp_P1
  SITE 249: note = Tnp_P2
  SITE 257: note = Tnp_P3
  SITE 258: note = Tnp_P4
  SITE 270: note = Tnp_P5
MQISVLGIDLGKNSCSIVGLDEAGKVVVRRRMRRETVIAFAAKLSGCVVAMEACCGAHHMGRVLAGQGHKVRLMSPEYVRPYVKAQKNDDRDAEAIAEAATRPTMRFVELKSEEQLDMQTLHRVRDRLVRERTSLMNQIRSLLLERGHIVPQGRAKLAVRLNELLDTEEQILRPRIRILIADMRERWEALDRRIASLDTEFVEHARSDDRARRLLTIPGIGALNATALVAAVGDANTFGRGRDLAAWLGLVPRQATTGGKPRLLGITKRGSRYLRKMLIQGARAAMPALSKSKTQLGAWLRGLLARSHPNVAVVALAAKLARIVWALLRYGRTYQPVALAT

SEQ ID NO: 19539 - protein, 407 aa, unidentified
  source 1..407: note = protein_03d541d
  REGION 4..160: note = RuvC_domain
  SITE 7: note = RuvC_P1
  SITE 57: note = RuvC_P2
  SITE 97: note = RuvC_P3
  SITE 99: note = RuvC_P4
  SITE 102: note = RuvC_P5
  REGION 269..355: note = Tnp_domain
  SITE 277: note = Tnp_P1
  SITE 308: note = Tnp_P2
  SITE 316: note = Tnp_P3
  SITE 317: note = Tnp_P4
MIFVGDDWAEAHHDVYLCDEAGNRLGKARLPEGIEGIGRFNELIAGHAGEPADVVVGIETDRGLWVQALVEAGYRVYAINPRAASRYRDRHTLSGAKSDPGDAKLLAELVRTDRHNHRPVAGDSDLGEGIKVLARAHQNLIWDRTRATNRLRCALREYFPAALDTFAELADRDTLSVLAVAPDPVTARKLTPGRVRTLLRNAGRQRNIEVRAHAIVEGLRAETLTAPPAVVSAFAATTRAQVALIAELNTQIAGLETELAAHFEQHPDADIYLSQPGIGVILGARVLGEFGDDPNRYADAKSRKNYAGTSPITRASGTRSVALARFVRNARLADAIDQWAFCALTNSSGARAFYDHRRDQGDSHHKALRALGNRLVGILHGCLRTHTTYDETIAWSHRQDRPDHIAA

SEQ ID NO: 19540 - protein, 412 aa, unidentified
  source 1..412: note = protein_9d03810
  REGION 4..170: note = RuvC_domain
  SITE 7: note = RuvC_P1
  SITE 67: note = RuvC_P2
  SITE 107: note = RuvC_P3
  SITE 109: note = RuvC_P4
  SITE 112: note = RuvC_P5
  REGION 278..364: note = Tnp_domain
  SITE 286: note = Tnp_P1
  SITE 317: note = Tnp_P2
  SITE 325: note = Tnp_P3
  SITE 326: note = Tnp_P4
MLFVGDDWAEDHHDVEIVDDTGRLLARKRLPEGLDGVTRLHALIWEQAPVEWADLEPGVAAAMVKVGIETDRGPWVAALATSGYEVFAINPMSVARYRERHSTSGAKSDAADAHLLAEIVRVDRAHHRPLAGDTAEGEAIKVTARAHQSLVWDRTRHVLRLRSALRDFFPAALKAFSDLDAPDALELLKSAPGPDQGARLPKSKIVAALTRAHHRDVAAKAAQITAILREDQLRQPPAIQSAYAAVVTSEVTIIETLNTQVNQLGAVVAAHFGRHPDAEIYASQPGLGTILAARVLGEFGDDPHRYRDAKARKNYAGTSPITRASGSKKVVLARYVRNRRLADALQQWAFCAMRGSPGAKAYYHQLRDRKIGHQAALRQLANRLVGILHGCLKTHTNYDERTAWVQQKTAAA

SEQ ID NO: 19541 - protein, 290 aa, unidentified
  source 1..290: note = protein_a47145f
  REGION 10..153: note = RuvC_domain
  SITE 13: note = RuvC_P1
  SITE 56: note = RuvC_P2
  SITE 96: note = RuvC_P3
  SITE 98: note = RuvC_P4
  SITE 101: note = RuvC_P5
  REGION 196..282: note = Tnp_domain
  SITE 204: note = Tnp_P1
  SITE 233: note = Tnp_P2
  SITE 241: note = Tnp_P3
  SITE 242: note = Tnp_P4
  SITE 253: note = Tnp_P5
MNTVSRDRIIGIDVSRDWLDIYCLPEGKHARLPNKVEGHEQVAQLAREPGALVCFEATGGQEWRLWSALDTTGIATRQLPPAQIKAFAASQGTRAKTDRIDAELIARFMAFRPDAGRVLPHEKIRLLRALISKRGQLVETRKRLLAQIKAHGKLGSPDMFDAMDAELKDLLDRQIAELNVRIEQTIASDNDLAAIADVLRSVPGIGPVASTMLIAEMPELGQLSGEQAAALAGLAPIAHDSGSMRGKRAIGGGRRQLRHVMFQAALVARKLVTIANALCKNRQKWADQAT

SEQ ID NO: 19542 - protein, 396 aa, unidentified
  source 1..396: note = protein_a94f7ce
  REGION 4..158: note = RuvC_domain
  SITE 7: note = RuvC_P1
  SITE 59: note = RuvC_P2
  SITE 99: note = RuvC_P3
  SITE 101: note = RuvC_P4
  SITE 104: note = RuvC_P5
  REGION 264..354: note = Tnp_domain
  SITE 272: note = Tnp_P1
  SITE 302: note = Tnp_P2
  SITE 310: note = Tnp_P3
  SITE 311: note = Tnp_P4
  SITE 327: note = Tnp_P5
MMTVGIDIGGKQHAVARCREGMDKAEREVLHMTQDRAGFDRFDAWLRAQPEPVGSVTMESSGHYWMCLTSHLKGGPVPVKVVNPLEAKYFAKSRMSRTKSDPADARILALMAQHDPSPAHDPLEGVELRQASRFAMRLVTEQARVCQRLIRLVELGFPELGQLFDDPACRTAREVLRVAPTAAVARRRRVSTLADANAGPGHRRLGQTKAVRLKEAAATSIAVTELDDEMAFEVGLLLDQYDLLEAQIERAEAHLATLLDGELARRLRTIPGVGPAITATLIAEIGDIWRFDDADQLLAYAGVHPAERSSGRKGANPETSWHMSKAGNAHLRAAAYRMAVVGVTHNPVIKAHYERKRKAGKSKMNALGHCMSKALNLVWGVWRNEADWDPDWGSRS

SEQ ID NO: 19543 - protein, 323 aa, unidentified
  source 1..323: note = protein_d2773ca
  REGION 8..149: note = RuvC_domain
  SITE 11: note = RuvC_P1
  SITE 52: note = RuvC_P2
  SITE 92: note = RuvC_P3
  SITE 94: note = RuvC_P4
  SITE 97: note = RuvC_P5
  REGION 191..278: note = Tnp_domain
  SITE 199: note = Tnp_P1
  SITE 229: note = Tnp_P2
  SITE 237: note = Tnp_P3
  SITE 238: note = Tnp_P4
  SITE 251: note = Tnp_P5
MNKDIKYLGIDISKDFFDVCDNNLVYYQFKNNLSGFRKLVKLLDSNTICVMEATGYYHTRLAYFLLELGFGVSVVNPLKIKRYIQMDLSKIKTDKSDAKMIQLYGKDRRPKLWIGQSDTQQECLQLLRMLSIYSKQSTQLKNKIHGEEVLGYPSKVVINSLNRSLKKLKKEMEVLEKALNDNVKKEYQESLTLLKSIPGIGDKTALILLVFTDGFHRFESSKELCSYTGLTPITRQSGSSIKGRPRISKMGNPKLRNLLFMCSFNACKYNQGCKALYDRIVAKGKSKKLALIAVCNKLLKQAFSIVKNGVPYNNQYKSTLVNN

SEQ ID NO: 19544 - protein, 336 aa, unidentified
  source 1..336: note = protein_6dafa02
  REGION 7..146: note = RuvC_domain
  SITE 10: note = RuvC_P1
  SITE 53: note = RuvC_P2
  SITE 88: note = RuvC_P3
  SITE 90: note = RuvC_P4
  SITE 93: note = RuvC_P5
  REGION 206..292: note = Tnp_domain
  SITE 214: note = Tnp_P1
  SITE 244: note = Tnp_P2
  SITE 252: note = Tnp_P3
  SITE 253: note = Tnp_P4
  SITE 265: note = Tnp_P5
MSEVTTIGLDLAKAVFQAHGADATGSVIFRKRLRRNQVLSFFAALPRCLVAMEACASAHYWAREISTLGHETRLIPPAYVKPFVHRQKNDMADAQAICEAAQRPTMRFVTPKSAQAQGAAVIFRTRDLLVRQRTQLINALRGHLIVAQGPGHVSKLIDLIDDPASDMPAEARPVLAMIATSLQMLQSNIAELDRKIAARSKADPVAKQLMTIPGIGPIAATALVALAPAAHTFRRGRDFAAWLGLTPQQHSSGGKERLGRTTKMGERSLRRLLILGASSAVKVAARDRSRASPGLDGMLARKPRMLVTVALANKIARIVWALMAHGGSYRAPTAAA

SEQ ID NO: 19545 - protein, 338 aa, unidentified
  source 1..338: note = protein_b8a8818
  REGION 6..148: note = RuvC_domain
  SITE 9: note = RuvC_P1
  SITE 52: note = RuvC_P2
  SITE 87: note = RuvC_P3
  SITE 89: note = RuvC_P4
  SITE 92: note = RuvC_P5
  REGION 211..297: note = Tnp_domain
  SITE 219: note = Tnp_P1
  SITE 249: note = Tnp_P2
  SITE 257: note = Tnp_P3
  SITE 258: note = Tnp_P4
  SITE 270: note = Tnp_P5
MKITTIGLDIAKSVFHAVGVDKAGKLIKKKMLRRKDLLPFVAQIEPCLIVMEACSGANYWTREFELLGHSVKLIAPQFVVPFRQGNKNDYNDALAIAEAAQRPNMRFVKPKSVEQQDVQLLHRMRERLTKQSTALINQVRGMLAEYGIVIAKSKSAFKVQFPEILTNETNALTTKGRTIFYQLYEEFTDIERRLKDCDTQVLTETKNNVICQRLETIPGIGPVTATAFYAAAGEGKDFSNGRHFSAWCGLVPKQHSSGGKDNLLGISKRGNAYLRTLFIHGARAVLQHSCHKQDKFSCWAIQLAERRGFNRACVAVANKLARMAWVIPAREEEYRLPV

SEQ ID NO: 19546 - protein, 416 aa, unidentified
  source 1..416: note = protein_57ea283
  REGION 12..167: note = RuvC_domain
  SITE 15: note = RuvC_P1
  SITE 64: note = RuvC_P2
  SITE 104: note = RuvC_P3
  SITE 106: note = RuvC_P4
  SITE 109: note = RuvC_P5
  REGION 275..361: note = Tnp_domain
  SITE 283: note = Tnp_P1
  SITE 314: note = Tnp_P2
  SITE 322: note = Tnp_P3
  SITE 323: note = Tnp_P4
  SITE 334: note = Tnp_P5
MPLALPEALFFTGIDWAAVTHAVCVMDAAGKITAEFTIGHSADGIATLIRRLARHGDPAGMPVGIERPNGQLADLLLEAGHPVVPVSPNAIRTWREGEVLSGARPDAGDAAVIAGYLRLRCHRLRAAAPYSDETKAVRAVVRARDDLVAMRVAATSQLPALPEAHWPGAKAIFADVGSPVSLAFLTHYPTPAAARHLGEKRIAAFCASHGYSGRRPAAGLLARLRSAPAGAAGEALTRSLRDTVLALAGVLTALNAAIRDLSRSCAARLEEHPDGKIFTSLPRPGQVSAAQMLAERGDCRQACDGPDAVAALAGCTPVTRQSGKHRAVQFRWACNKRFRKAITTFADNSRHASPWAARIYNDVRASGKDHPHAIRVLARAWIRVIWPCWINGVPYNPARHGAAATLAKQATEQIAA

SEQ ID NO: 19547 - protein, 340 aa, unidentified
  source 1..340: note = protein_9523716
  REGION 8..149: note = RuvC_domain
  SITE 10: note = RuvC_P1
  SITE 53: note = RuvC_P2
  SITE 88: note = RuvC_P3
  SITE 90: note = RuvC_P4
  SITE 93: note = RuvC_P5
  REGION 211..303: note = Tnp_domain
  SITE 219: note = Tnp_P1
  SITE 249: note = Tnp_P2
  SITE 257: note = Tnp_P3
  SITE 258: note = Tnp_P4
  SITE 270: note = Tnp_P5
MNTMTLLDIDIGKHSFHLHGQDAKGHQVLRKKTSRSQLLGTLAQLPACTVVMESCGGAHWLARQVEALGHEVKLIAPQYVKPFVKGNKNDFIDAEAICEAASRPAMRFCSIKTAEQQTLSALHRVRDSLIGHRTVATNQIHGFLLEFGISLPIGATALNRVPALLDDPQHPVPLRLKSVVMRLHRQIQQLNDEIKDIESDLKQQLKEDDAGNRLQSIPGIGPITASAVLADVGDASNYRSGRDFAASLGLVPRQYSTGGKTVLLGISKRGDKHIRQLLVQGARSVIQHIDKREDALGPWVRELLTRRHSNVVACALANKLARIVWAVLAKGGQYDPHPNA

SEQ ID NO: 19548 - protein, 397 aa, unidentified
  source 1..397: note = protein_494df9e
  REGION 6..161: note = RuvC_domain
  SITE 9: note = RuvC_P1
  SITE 58: note = RuvC_P2
  SITE 98: note = RuvC_P3
  SITE 100: note = RuvC_P4
  SITE 104: note = RuvC_P5
  REGION 266..353: note = Tnp_domain
  SITE 274: note = Tnp_P1
  SITE 305: note = Tnp_P2
  SITE 313: note = Tnp_P3
  SITE 314: note = Tnp_P4
  SITE 326: note = Tnp_P5
MPELWAGVDIGKTHHHCVVINADGQRLLSRRILNDEKALLELIGDVEALSQDVLWTVDLNHGGAALLIGLLLNHGQPVAYLTGLAVYRASGTYRGEGKTDCGHDAFVIADQARVRRDIGLLRPGDEIAVDLRTLTTRRLDVVFDRTRQINRLRAQLLEIFPALERAVELTRKGPVLLLTGFQTPGAIRRAGANRIESWLRTRKVRGAAALAKVAVEAAQAQHTTLPGQRLAATMVARLAKGVMNLDEEIAELDSLIEARFRQHPHAEVIRSLPGMGTNLAAEFLAATGGDMTTFDSVDRLAGFAGLAPRPRDSGRVSGNLHRPRRYHRGLLRSMYLSSMVSLQCCAASKAYYQRKRHEGKGHKQALLALARRRLNVLWAMIRDGKCYHASPPVTAVA

SEQ ID NO: 19549 - protein, 366 aa, unidentified
  source 1..366: note = protein_bc96ab8
  REGION 41..189: note = RuvC_domain
  SITE 44: note = RuvC_P1
  SITE 91: note = RuvC_P2
  SITE 131: note = RuvC_P3
  SITE 133: note = RuvC_P4
  SITE 136: note = RuvC_P5
  REGION 232..319: note = Tnp_domain
  SITE 240: note = Tnp_P1
  SITE 270: note = Tnp_P2
  SITE 278: note = Tnp_P3
  SITE 279: note = Tnp_P4
  SITE 292: note = Tnp_P5
MHAQGREPANSLLSLTHSCQITMTPHPLIKTVPESQPALFAGIDVGAEELILVIRKNGKSVDPQKFANPPADRARLVKKLVKLPGLIVCLEATGIYHFDLALALHDAGVLLRVINPKASHNFAKVLMKNSKTDAVDADTLAEYAARMDFVAWTRPTNEKLALRSFARRINALTGQKAAAKNHLHALAASQETPKAVLKDAKLAITQLEKRIDQMTAQALLLIAKHPELNRVLTLLTGIKGIAETSAIALMGELLLLPPGLSHREWVKFAGLDPKAFDSGKSVHKKTRMSKAGNRHIRSALYMPALSAKTHDAHVSAFFQHLIANGKKPLQAVCAVMRKLLHAIHGMLKNDTPFDNTRFYAIPVAAN

SEQ ID NO: 19550 - protein, 342 aa, unidentified
  source 1..342: note = protein_706216d
  REGION 6..146: note = RuvC_domain
  SITE 9: note = RuvC_P1
  SITE 52: note = RuvC_P2
  SITE 87: note = RuvC_P3
  SITE 89: note = RuvC_P4
  SITE 92: note = RuvC_P5
  REGION 209..296: note = Tnp_domain
  SITE 217: note = Tnp_P1
  SITE 247: note = Tnp_P2
  SITE 255: note = Tnp_P3
  SITE 256: note = Tnp_P4
  SITE 268: note = Tnp_P5
MEHTTIAVDLAKSVFQVAVSHRPGHLDKERRLSRDRFLAFFAQRPPATIVLEACGSAHYGARQLQPLGHAVRLLPVHDVRPYVRRNATDRTDAKGLLEANRNEEIHPVPVKSIEHQAIASLHRLRSTWVATRTARVNTLRGLRREFGIFIPTGSRRVVPRVRALHEDPAVPSLLHATLAAACDEIEMLEVNRRAVERQLTALADDMPDVQLLQTIPGVGLITATALVALVTDIRRFPSGRHVASFLGLTPREDSSALRRRLGAISKQGDVYVRMLLTHGARSLVWHAKAAGRPTSLQQWAMQTELRRGRNVAAVAMANKLARIVWAVWVQQRPFAADHRLGS

SEQ ID NO: 19551 - protein, 350 aa, unidentified
  source 1..350: note = protein_b03ca5d
  REGION 6..148: note = RuvC_domain
  SITE 9: note = RuvC_P1
  SITE 52: note = RuvC_P2
  SITE 87: note = RuvC_P3
  SITE 89: note = RuvC_P4
  SITE 92: note = RuvC_P5
  REGION 211..303: note = Tnp_domain
  SITE 219: note = Tnp_P1
  SITE 249: note = Tnp_P2
  SITE 257: note = Tnp_P3
  SITE 258: note = Tnp_P4
  SITE 270: note = Tnp_P5
MNVTTIGIDLAKAVFQVHGADDKGRAVMKKQLKRAQMLPFFANLTLCRIGMEACGSAHYWARKLQALGHTVQLIPPQYVKPFVKRNKNDAADAEAICEAMMRPNMPTVPIKNVEQQAILSVHRARQGFVKARTAQANQIRGLLAEYGFIIPKGISHIPKRVPEIIEDGENDLPGSFRVLIARLVDHLKELDRQVGELEADIQRWHRDNATSQGLAKIPGIGPLSASAMVASIGDARNFKNGRQLAAWMGIVPRQHSTGGKSTLLGISKRGDTYLRTLLIHGARAVIRAAERKPDADPWLKRLMTRRNKNVAAVALANKNARTIWALLAHDRKYEAHYAPQGVHLGNGIAA

SEQ ID NO: 19552 - protein, 333 aa, unidentified
  source 1..333: note = protein_95d678a
  REGION 7..159: note = RuvC_domain
  SITE 10: note = RuvC_P1
  SITE 65: note = RuvC_P2
  SITE 103: note = RuvC_P3
  SITE 105: note = RuvC_P4
  SITE 108: note = RuvC_P5
  REGION 204..291: note = Tnp_domain
  SITE 212: note = Tnp_P1
  SITE 242: note = Tnp_P2
  SITE 250: note = Tnp_P3
  SITE 251: note = Tnp_P4
  SITE 264: note = Tnp_P5
MEKKRFVGIDISKKTLDVVIYDSKKKHADCNTYRRVTNDEEGYKILLDWFKSERIKLSELVVGLENTGAYGYDLCLFLESKQVDYCSFNPLTLKRSMGLVRGKNDKVDAERIAYFTWLHRDELKYTKLAGSTILRLRELSTERKRFVKQRAEYEGLLTERKRPDMTSTSLRAEKMRRILEEEIDAVEKEMEEVIKQDPQIHQNFQLLMSIKGIGKVNAISTIIHTNNFESFQTARQYACYLGIAPFEHSSGTSIKGKPKVSCVGAKQLKADLSQAAVSAVQWDREIRLYYVRKINEGKTYGVVLNAIKFKLVCRMFSVIRRGTPYVDLMAYKN

SEQ ID NO: 19553 - protein, 403 aa, unidentified
  source 1..403: note = protein_152a6ac
  REGION 6..158: note = RuvC_domain
  SITE 9: note = RuvC_P1
  SITE 57: note = RuvC_P2
  SITE 95: note = RuvC_P3
  SITE 97: note = RuvC_P4
  SITE 100: note = RuvC_P5
  REGION 266..352: note = Tnp_domain
  SITE 274: note = Tnp_P1
  SITE 305: note = Tnp_P2
  SITE 313: note = Tnp_P3
  SITE 314: note = Tnp_P4
  SITE 325: note = Tnp_P5
MKSIFAGLDWASRTHAVCVIDECGTVCKQWVVAHDADGLRELLRQLRALRAARIAIERPSGLLVDALVEAGFEVVPIHPNAVKASRPRYRSHGGKSDASDAYLLADLLRTDGHRFKPLAAQSDEIRALRALVRGRDDLVATRVQLANQLRALLESYWAGAAEVFADVDSPIALAFIQRYPTPEAASRLGPKRMAAFCAQHAYCGRRSAEELLQRLRHAPAVGLGELEMDAKGELVSGLARTLSTLVDQIRLLSSRIEHHVAACDDGRILMSFPRAGRICAAQILAELGSVRERFDSDEHLAAEAGVAPVTYASGKHKAVTFRWACNHRLRRALTTLADNSRHASAWAADVYAKARGRGCDHPHAIRILSRAWLRVIWRAWTDRKPYDPTAHGGLQTMLKTAGG

SEQ ID NO: 19554 - protein, 404 aa, unidentified
  source 1..404: note = protein_1bf7310
  REGION 4..159: note = RuvC_domain
  SITE 7: note = RuvC_P1
  SITE 61: note = RuvC_P2
  SITE 96: note = RuvC_P3
  SITE 98: note = RuvC_P4
  SITE 101: note = RuvC_P5
  REGION 267..353: note = Tnp_domain
  SITE 275: note = Tnp_P1
  SITE 306: note = Tnp_P2
  SITE 314: note = Tnp_P3
  SITE 315: note = Tnp_P4
MWYAGIDWANDHHDALVIDDQGRQVGSLRVDHTPQGMTRLNTFLEQIVGAESKDQMACIIETTHGLLIAHLLEAGWPVYPVNPRTVDRRRSASGAKTDTIDAYLLAKTGRADLADLHRLTPDSEKIAELKLLTRDQDALIRMQTRLVNQLTACLKAYYPVALELFTKLPQKSTLRFLQTYPTPQAAMAVSAEQIQQVLRQAKHSNPTAVAATIFERLHQPHLQADAVITRSKSRLMLALVSQLLPLIEQIAQYEKEIKTLFLTHEDHEIFASLPRAGKRLAPRLLAEIGDDRTRYQDASSLQALGGTSPVLFQSGMYSKAHRRLGCIKPLRNALHQFAWQSTQSEPWARQDYQRKRAEGKSHTVAVRALANVWVRIIFAMWLHHQCYETATFEQAQQQHARRAA

SEQ ID NO: 19555 - protein, 402 aa, unidentified
  source 1..402: note = protein_75829da
  REGION 14..168: note = RuvC_domain
  SITE 17: note = RuvC_P1
  SITE 65: note = RuvC_P2
  SITE 105: note = RuvC_P3
  SITE 107: note = RuvC_P4
  SITE 110: note = RuvC_P5
  REGION 275..360: note = Tnp_domain
  SITE 283: note = Tnp_P1
  SITE 313: note = Tnp_P2
  SITE 321: note = Tnp_P3
  SITE 322: note = Tnp_P4
  SITE 334: note = Tnp_P5
MEEPSSGRGYAVFLGLDVGKGEHHATALDPQGARLHDKPLPQDERALRALFEQLATRGPVLVVVDQPASIGALPVAVARDVGVEVAYLPGLAMRRIADLHPGNAKTDARDAYVIAEAARTLPHALRRVDTGEEALADLEVIVGFDDDLAAEVTRVTNRIHGLLTQIHPALERAIGSRLHHKAILELLHRFGGPAGLRQAGKRRIAAVVRPRAPRSHHGIVEAIMTALDQQSVSVPGTKAAELVLPQLADQLSALLAQREQAAVQVEEMLDAHPLSAVLTSMPGIGVRTGARILLEVGDGSTFPTPGHLAAYAGLAPVTRRSGSSIRGEHPSRSGNKNLKRAMFLAAFAALHDPASRAYYDRKRAQGKKHNAALICLARRRCDVIYAMLRDGAPYQPRPATAA

SEQ ID NO: 19556 - protein, 343 aa, unidentified
  source 1..343: note = protein_56cb02e
  REGION 6..150: note = RuvC_domain
  SITE 9: note = RuvC_P1
  SITE 54: note = RuvC_P2
  SITE 89: note = RuvC_P3
  SITE 91: note = RuvC_P4
  SITE 94: note = RuvC_P5
  REGION 213..299: note = Tnp_domain
  SITE 221: note = Tnp_P1
  SITE 251: note = Tnp_P2
  SITE 259: note = Tnp_P3
  SITE 260: note = Tnp_P4
  SITE 272: note = Tnp_P5
MKLSHVGVDLAKNVFQLHGVDRHGKTIWQRRLRRHQWLEVLLATIDSDCIVGMEACGGAHHWARQLQARGITVRLIAPQFVKPYVKSNKNDRNDAEAICEAMMRPSMRFVAVKTVEQQDIQAIHRVRATVMSQRIAKANQIRGLVTEYGLVAPLQIVHLRRAVPVWLEDAENGLTDCFRALLNELWVDLLQFEERLKALDKQIEAIARTNPVTQRLQQLRGVGPLIATALVATVGDGSHFDKGRQMAAAIGLTPRQHSTGDKHRLLGISKRGDAYLRTMLIHGARAVVSQAKHRDDSLSRWVTDIAKRSHTNVAAVALANKTARIAWTMLREQSDYDPARAVA

SEQ ID NO: 19557 - protein, 422 aa, unidentified
  source 1..422: note = protein_7130489
  REGION 4..157: note = RuvC_domain
  SITE 7: note = RuvC_P1
  SITE 56: note = RuvC_P2
  SITE 94: note = RuvC_P3
  SITE 96: note = RuvC_P4
  SITE 99: note = RuvC_P5
  REGION 285..371: note = Tnp_domain
  SITE 292: note = Tnp_P1
  SITE 323: note = Tnp_P2
  SITE 331: note = Tnp_P3
  SITE 332: note = Tnp_P4
MLGVGIDWAEEFHLVALGHPDEGVIELSRVEHTPAAVEALIERIARLEPDPAAVRVVIETRHGLLVERLTDAGYTVLPVNPDLIARRRGPARKKDDAEDARIACLLALDRHAGLRPLVPHGELAGELRAIARDDERAARDQRRLLNRLRQDLISTFPAALELAGDDLGAPTVLRLLERWPTRTQLAQASHDELVAFARAARHGWPDRFADRIQQALAADHLIPRDYLVRAKAATIRLTAIQLLAIGTQRRAWERRMAELLLGARPTGKSGRRREERPGNAVPGGKVYLSFPGLGDRLAARVAGEIGDHVDQFESPNALQCYAGKAPVTRRSGKSELVVATRLACNRHLADAVQQWAFCSLRASGWAREFYDAQRARGKHHHAALRALGNRWLEVLWHCLIRGVCYDEATHVANRNRALAKAA

SEQ ID NO: 19558 - protein, 353 aa, unidentified
  source 1..353: note = protein_ce473bf
  REGION 14..154: note = RuvC_domain
  SITE 17: note = RuvC_P1
  SITE 60: note = RuvC_P2
  SITE 95: note = RuvC_P3
  SITE 97: note = RuvC_P4
  SITE 100: note = RuvC_P5
  REGION 219..307: note = Tnp_domain
  SITE 227: note = Tnp_P1
  SITE 257: note = Tnp_P2
  SITE 265: note = Tnp_P3
  SITE 266: note = Tnp_P4
  SITE 278: note = Tnp_P5
MHTQQKSSDPVATIGLDIGKNTFHLVGLDQRGAIAMRIKVLRNQLIRRLVNLPPCLIGLEAGSGSHHIARQMKPLGHDVRLIPAQYVKPFLKGHKNDYRDAEAIAEAVQRPTMSFVAIKTPEQSDLLSLHRVRSRLVRQRTAIINQIRGFLIERGITVRQGPAPLRKALPEVLSSPPEALSPRILRLIAELAEDWRHLDARLEVLSAEIESLSQHDVACQRLMTVPGIGPIISSAVVAAIGTGSGFKQGRDFAAWLGLVPKQESTGDRTKLGRISKRGNKYLRTLFVQAAHVVLERRPAAAMRALWPWIERASKRLAHRNLLAIALANKLARIAWAVLARGRDYEPRITPNAA

SEQ ID NO: 19559 - protein, 344 aa, unidentified
  source 1..344: note = protein_209ecee
  REGION 5..152: note = RuvC_domain
  SITE 8: note = RuvC_P1
  SITE 53: note = RuvC_P2
  SITE 92: note = RuvC_P3
  SITE 94: note = RuvC_P4
  SITE 97: note = RuvC_P5
  REGION 212..298: note = Tnp_domain
  SITE 220: note = Tnp_P1
  SITE 250: note = Tnp_P2
  SITE 258: note = Tnp_P3
  SITE 259: note = Tnp_P4
  SITE 271: note = Tnp_P5
MNYYAGIDVSLESSSVCIVDATGEIVKEVKVESHPDALVKFFKAFGLPLAVIGLEAGPLSQWLYAGLTKAGFVTSLMETRHVNAALSATTVKTDRRDARGISQLLRMGWFRPVHAKSAGSQEMRALLVARKQLQHKLRDIELSLRGILRGFGLKVGKVTDKTFEARIRELVTGHPMLEQIAEAMLAARAMLLEQFNKLHKAVLKIARRDEACRRFMTTPSVGAIVAITYKSALDDPSRIKKSRNAGPLFGLTPKRYQSGETDITGGISRVGDEMVRTALYEAANVLLSRVTRFSALKRWGLEVAKRRGLKRAKVAVARKLAVILHRMWINGSTFRWTKTEAAHA

SEQ ID NO: 19560 - protein, 318 aa, unidentified
  source 1..318: note = protein_bfaaa4f
  REGION 6..151: note = RuvC_domain
  SITE 9: note = RuvC_P1
  SITE 53: note = RuvC_P2
  SITE 93: note = RuvC_P3
  SITE 95: note = RuvC_P4
  SITE 98: note = RuvC_P5
  REGION 193..277: note = Tnp_domain
  SITE 201: note = Tnp_P1
  SITE 230: note = Tnp_P2
  SITE 238: note = Tnp_P3
  SITE 239: note = Tnp_P4
  SITE 250: note = Tnp_P5
MQRIIIGVDVSQDFLDVHVRPTSAQRRFANTADGIAQLVAWVKPLAAERILFESTGPYQIAAVGALLAEGLPAVVVNARQVRDFAKAMNYLAKTDKIDAGVIAHFGEVADTKVRPLDTEESRILRELYDRRGQLVHMLAMEKNQRHSAAVARASAKVLQSIDKHIDYLNKRIRDLEQRLDRLIESSEAFRARNEILQTITGIGPQVSRTLLIHLPELGQYSRQTIAALVGLAPFNDDSGNHSGQRHIRGGRHKVRIGMYQAAIAAIRHCPHMKAFYAALKARGKASRVAIIAIARKLLVLANAMIRDMKPYRETPNSV

SEQ ID NO: 19561 - protein, 309 aa, unidentified
  source 1..309: note = protein_57c04c2
  REGION 5..157: note = RuvC_domain
  SITE 8: note = RuvC_P1
  SITE 52: note = RuvC_P2
  SITE 92: note = RuvC_P3
  SITE 94: note = RuvC_P4
  SITE 97: note = RuvC_P5
  REGION 186..270: note = Tnp_domain
  SITE 194: note = Tnp_P1
  SITE 223: note = Tnp_P2
  SITE 231: note = Tnp_P3
  SITE 232: note = Tnp_P4
  SITE 243: note = Tnp_P5
MTAYAGIDVSKATLEIALFPPSNNFTLPNSAEGLATAVNHLKACQVERVLVEATGGYEKLSVKLLANAGFKVQRINPSRARHFAQAMGKKAKTDPIDAQMLAMFASALEEKNLVMPDEAREQLAELVNQRAVLVHQRDDNRRRIQQAQSPEVLNTYQELNAILQMLINKADRQIAEKTRHIDAELMERLHAVKGIGPVTIASLFCYLPELGDLNRAQVAALAGVAPYNNDSGAKRGKRRIYGGRAKVRRAAYMCTLVMVRHNEDFKARYARLRAAGKCAKVALVACMRVLLVRLNAMVRDGTPWRDQPV

SEQ ID NO: 19562 - protein, 339 aa, unidentified
  source 1..339: note = protein_b0e8563
  REGION 8..150: note = RuvC_domain
  SITE 11: note = RuvC_P1
  SITE 54: note = RuvC_P2
  SITE 89: note = RuvC_P3
  SITE 91: note = RuvC_P4
  SITE 94: note = RuvC_P5
  REGION 212..302: note = Tnp_domain
  SITE 220: note = Tnp_P1
  SITE 250: note = Tnp_P2
  SITE 258: note = Tnp_P3
  SITE 259: note = Tnp_P4
  SITE 271: note = Tnp_P5
MKQEVVTVGLDLAKSVFQVHAIGRDGAVLVRRKLRRAELIGFFTDLPACLVGMEACASAHHWARELIKLGHQVRLMPPAYVKPYVKRGKTDAADAEAICEAVTRPTMRFVAVKTVEQQAVLMLHKSRDLMVRQRTMLINALRGHLAEYGVVTGVGAGGVSAMLKGLHEQQDKLPVHARSALHALAAQLRALSSEVDRLEAQILAWHRADETSRRLATIPGIGPITASAISAAVPDASLFRSGRQFAAWLGLTPRANSSGGKERLGGITKQGDGYLRRLLVVGATAVMRMARKNAARQPWLAQLLERKPAKIATVALANKTARIAWAVMLRNEVYAASAA

SEQ ID NO: 19563 - protein, 323 aa, unidentified
  source 1..323: note = protein_62b7c8a
  REGION 8..147: note = RuvC_domain
  SITE 11: note = RuvC_P1
  SITE 52: note = RuvC_P2
  SITE 92: note = RuvC_P3
  SITE 94: note = RuvC_P4
  SITE 97: note = RuvC_P5
  REGION 191..278: note = Tnp_domain
  SITE 199: note = Tnp_P1
  SITE 229: note = Tnp_P2
  SITE 237: note = Tnp_P3
  SITE 238: note = Tnp_P4
  SITE 251: note = Tnp_P5
MNKYKETFGVDISKDVFDVHGSDNGHDQFKNNEKGFAAFLKILPEDSIVVMEATGYYHYRLAQFLYKNNVVVSVVNPLSVKRFIQMKLAKVKTDKSDAKAICEYALANEVPLYNALTEVQAECLQLFRLMDSYLKKRTATKNKLHGEETLGIPSKFVYRSLKLDRKHLDKEIAGIEERLLSLVKMEQQQQLTLLTTVPGIGTKTVLFLIVITDGFSKFETAAQLCSYVGITPTIRESGSSVRGRSRISKVGNKKLRNLLFLCAFNACKHNKACREVYERIVNKGKSKKLALIAVANKLLKQCFAIANSGLPYDDAHVSVLKIK

SEQ ID NO: 19564 - protein, 342 aa, unidentified
  source 1..342: note = protein_e2a38f7
  REGION 5..152: note = RuvC_domain
  SITE 8: note = RuvC_P1
  SITE 55: note = RuvC_P2
  SITE 92: note = RuvC_P3
  SITE 94: note = RuvC_P4
  SITE 97: note = RuvC_P5
  REGION 212..294: note = Tnp_domain
  SITE 220: note = Tnp_P1
  SITE 250: note = Tnp_P2
  SITE 258: note = Tnp_P3
  SITE 259: note = Tnp_P4
  SITE 271: note = Tnp_P5
MNYYAGTDVSLEWSSVCVVDASGRIVQEGKVASDPAALIAWFGSLGYELTRIGLEAGPLSQWLYAAMKQAGLPVELLETRHVRDAFKAMPVKSDRNDARGIAQLMRLGWFRPVHCKSMEAQETRAVLTARKLLQNKLRDLEASLRGILRGFGLKVGKTTSKRFAERIKELVVGHPSLEVLSEALLAAHAVLLREFNGFERRVRTMARQDAKARLLMSTPGVGAIVALTFASAIDDPARFKSSKQVGAHFGLTPRKYQSGETDYTGRISKIGDKEVRTGLFESSHVILTKPVRGFALKSWAMRLAKRVGMKKAKVALARKLAVIMHRMLVDGTPFNFAAGAAA

SEQ ID NO: 19565 - protein, 341 aa, unidentified
  source 1..341: note = protein_339b0b1
  REGION 7..149: note = RuvC_domain
  SITE 10: note = RuvC_P1
  SITE 53: note = RuvC_P2
  SITE 88: note = RuvC_P3
  SITE 90: note = RuvC_P4
  SITE 93: note = RuvC_P5
  REGION 209..296: note = Tnp_domain
  SITE 217: note = Tnp_P1
  SITE 247: note = Tnp_P2
  SITE 255: note = Tnp_P3
  SITE 256: note = Tnp_P4
  SITE 268: note = Tnp_P5
MNEITLIGIDLGKHVFHLHAQDAKGHEVFRKKLSRVQLLPFFSNLKAVTVVMEACAGSHWLARKLNAMGHEAKLISAQYVRPFVKSNKNDYIDAEAICEAACRPSMRFVEPRTEAQQLLAAMHRAREGLVAERTATINRIHGILLEFGIVVPLSKATLRRLPDVLAVHDLPPRLIQLVHRLHAHYRYLDQQVDDLERDLTVQLREDENAARLLSIPGIGTITASLLASEVGNVAQFEGSRNFAASIGLVPRQHSTGGRSVLCGISKRGDKHLRHLLVQGARAVIQRVEKRTDRLGEWIRSMLTRRHSNVVACAVANKLARIAWAVLTRHTTYDPARLKLAD

SEQ ID NO: 19566 - protein, 337 aa, unidentified
  source 1..337: note = protein_995a692
  REGION 7..148: note = RuvC_domain
  SITE 10: note = RuvC_P1
  SITE 53: note = RuvC_P2
  SITE 88: note = RuvC_P3
  SITE 90: note = RuvC_P4
  SITE 93: note = RuvC_P5
  REGION 209..297: note = Tnp_domain
  SITE 217: note = Tnp_P1
  SITE 247: note = Tnp_P2
  SITE 255: note = Tnp_P3
  SITE 256: note = Tnp_P4
  SITE 268: note = Tnp_P5
MENITLIGLDLGKNSFHIHGQNSHGKAIYRKKFTRAKLFQFLANCPATTIVMEACGGAHFMVRKLTELGHCAKLISLQFVRPFVKSNKNDFIDAEAICEAASRPSMRFVKPRTESQQAMHALHRVRESLVRDRVKTTNQMHAFLLEFGVSAPKGAALIKGLTEILETNEFPPYLESLLQKLREHYDYLLEQIKDLETQLKASLNEDCTGQRLLSIPCVGPLTASLLSTHLGDGKQYGDSREFAASTGLVPRQYSTGGRNTLLGISKRGNKKLRALLVQCARVYLRTLAYRSGKLADWVKQLLQRKNNFVVTCALANKLARIVWALTTRQQSFDSESS

SEQ ID NO: 19567 - protein, 340 aa, unidentified
  source 1..340: note = protein_bce82af
  REGION 7..149: note = RuvC_domain
  SITE 10: note = RuvC_P1
  SITE 53: note = RuvC_P2
  SITE 88: note = RuvC_P3
  SITE 90: note = RuvC_P4
  SITE 93: note = RuvC_P5
  REGION 212..300: note = Tnp_domain
  SITE 220: note = Tnp_P1
  SITE 250: note = Tnp_P2
  SITE 258: note = Tnp_P3
  SITE 259: note = Tnp_P4
  SITE 271: note = Tnp_P5
MGTVKTIGLDLAKSVFQVHGVDADGMAVLRQRLTRGRMLKFFAKLPPCLIGIEACSSSHYWARELMGLGHNVKLMPAQYVKPYVKRGKNDAADAEAICEAVTRPTMRFVGIKSPEQQGAMLLHRVRLILNRQRTQISNALRAQMAEFGIIAPAGRGGIDRLLEIIADTADQRISSEVRDCMEMLATQLRMVKVQILENDRRILASARATDMGRRLMEIPGVGPLLASAFIATIAEPKIFRSGRNLAAWIGLVPRQNSSGTKERLGGITKAGNRYLRQMLVVGAMAVIRQIERSGAKKPWLVQLLARRKIKVAAVALANKTARTIWAMMISGEHYREPVAV

SEQ ID NO: 19568 - protein, 399 aa, unidentified
  source 1..399: note = protein_9e69db3
  REGION 32..170: note = RuvC_domain
  SITE 75: note = RuvC_P2
  SITE 115: note = RuvC_P3
  SITE 117: note = RuvC_P4
  SITE 120: note = RuvC_P5
  REGION 216..302: note = Tnp_domain
  SITE 223: note = Tnp_P1
  SITE 253: note = Tnp_P2
  SITE 261: note = Tnp_P3
  SITE 262: note = Tnp_P4
  SITE 275: note = Tnp_P5
MRVQGREARVLNNAGWRGNATDQDAGGDRRERETLAVARWRENEDKGKAKEFENDAGGHSELVQWIGKGARVCMEATGVYHLQLALKLVSAGIEVMVVNPRVAKDFGRALSNRSKTDRVDAWSLLEYVQRMEFVPWKAPSAAVLELRELGRRLSELIQARADEKNRLHAKKTAGISATVVKDVKAHIAQLESRIKQIEKAAVAVVRGDAGLREQFGILTKITGVGGRSAILLLTELAVLDPTMTVKQIVGHAGLDPRQYESGSSVQKPPRISKVGNARLRRILYMNAITAIRHDRGARLFFAQLVARGKKRMQAIVAVMRKLLHGIWIVLQRRVPFDSSVLFAASLAKAESSDSAVAADQPEPSQDHPKGRSEAEELRQQLDPGSAQATHSAKTTSKAA

SEQ ID NO: 19569 - protein, 343 aa, unidentified
  source 1..343: note = protein_9bf4a67
  REGION 6..148: note = RuvC_domain
  SITE 9: note = RuvC_P1
  SITE 52: note = RuvC_P2
  SITE 87: note = RuvC_P3
  SITE 89: note = RuvC_P4
  SITE 92: note = RuvC_P5
  REGION 211..303: note = Tnp_domain
  SITE 219: note = Tnp_P1
  SITE 249: note = Tnp_P2
  SITE 257: note = Tnp_P3
  SITE 258: note = Tnp_P4
  SITE 270: note = Tnp_P5
MKIRTVGLDLAKTQFQVHGVDETGTKVVNKALKRSQMLSFFANLPPCLVGMEACGSAHYWARKLSELGHTVKLMAPQFVKPYVKSNKNDAADAEAICEAVTRPNMRFVPVKDEEQQAVLALHRARQGFVKTRTAQANQIRGLLAEYGVVIPQGIGHIAKRLPDILEDGENDLPFLFRQLLERLGEHLKELDRQVGELDAAIQTWHRQSAASRRLAEIPGIGPITASALVASVGDAKNFANGRQLAAWLGLVPRQHSSGGKPTLLGISKRGDTYLRTLLIHGARAVVRVAEGKENADPRLKRLLERRHKNIATVAWANRNARIVWALLAHDRTYQTDYAPAHSA

SEQ ID NO: 19570 - protein, 288 aa, unidentified
  source 1..288: note = protein_25f3ece
  REGION 5..151: note = RuvC_domain
  SITE 8: note = RuvC_P1
  SITE 91: note = RuvC_P3
  SITE 93: note = RuvC_P4
  SITE 96: note = RuvC_P5
  REGION 211..268: note = Tnp_domain
  SITE 219: note = Tnp_P1
  SITE 249: note = Tnp_P2
  SITE 257: note = Tnp_P3
MEDYIGLDVSMKETAVSIRREGKRVWRRRCASDPKVIAELVRKRAPAAKRVVFETGPLSVWFYHALRAEGLPAICIDARHAKAALDMAANKTDANDADGLAHLAEVGFFREVRVKGFDSMLTRTLVAARTRLVRITTELSNQIRGLIKTFGLLVPAGKGSTFERNVRNLLVDQDGLTPIVLPMLEAWRSMRVRAAELGRQLVAGARQSRACQILVSIPGVGVITATSFVTAIEEPDNFKKSRSVGAWLGLTTRRYQYTNRERSTMMATYPGGAIVICEGFSTKLRRSS

SEQ ID NO: 19571 - protein, 377 aa, unidentified
  source 1..377: note = protein_402df8c
  REGION 18..166: note = RuvC_domain
  SITE 21: note = RuvC_P1
  SITE 70: note = RuvC_P2
  SITE 106: note = RuvC_P3
  SITE 108: note = RuvC_P4
  SITE 111: note = RuvC_P5
  REGION 252..339: note = Tnp_domain
  SITE 260: note = Tnp_P1
  SITE 291: note = Tnp_P2
  SITE 299: note = Tnp_P3
  SITE 300: note = Tnp_P4
  SITE 312: note = Tnp_P5
MTIVADPPARVDTIEVTLGIDTHADTHVAGLIDPLGRHLGHATFDTTVAGFKALLAWATSFGTITLAGVEGTGAYGAGLARFLTAEAVTVVEVDRPDRKTRHTEGKSDPIDAYAAARAAASGRASGTPKTRTGDVESVRALRVARNGAVKARAVALTQLKALIVTAPDVLRAQLDGLDGPKLVTTCARLRPARGPAPTPSPFAKRPPRPGRLVDPGAATKRSLASIAGRVQTLSVEIAELDNDLDALVTPLAPTLLALQGIGLDVAGQLLVTAGDNPDRIHSEAAFAHLCGVAPIPASSGKTTNRHRLNRGGDRAANAALYRIVICRLRWDPRTRAYVDRRTQEGRSKKEIIRCLKRYIAREVFTAIQTDLNPKTSP

SEQ ID NO: 19572 - protein, 312 aa, unidentified
  source 1..312: note = protein_c90e048
  REGION 6..149: note = RuvC_domain
  SITE 9: note = RuvC_P1
  SITE 53: note = RuvC_P2
  SITE 93: note = RuvC_P3
  SITE 95: note = RuvC_P4
  SITE 98: note = RuvC_P5
  REGION 189..273: note = Tnp_domain
  SITE 197: note = Tnp_P1
  SITE 226: note = Tnp_P2
  SITE 234: note = Tnp_P3
  SITE 235: note = Tnp_P4
  SITE 246: note = Tnp_P5
MTDITIGADISKEHIDLHSLPDGQTLRATNDRKGFAAILQWIGAKSVERIVYEPTGPYHKAFERFMAANGLALSKVNPRLARRFAEATGRLAKTDKIDAGLLARYGALLQPRILEANTQLLNDLKELHVARLALAKDRTAAKNRGKNLSNPLLKKQNADRLRQIERQITAVDDAIMALIGKDASLKARLDILVSIPGVSEITAFTLLIEMPELGELDEKAAAALSGLAPMCRQSGRWTGRASIAGGRAIVRQALYMPALVASRFNPDLKAKYDVLTKAGKPPKVAITAIMRKLIVLANALLRNNRKWTPKPA

SEQ ID NO: 19573 - protein, 385 aa, unidentified
  source 1..385: note = protein_5606247
  REGION 11..162: note = RuvC_domain
  SITE 14: note = RuvC_P1
  SITE 59: note = RuvC_P2
  SITE 99: note = RuvC_P3
  SITE 101: note = RuvC_P4
  SITE 104: note = RuvC_P5
  REGION 264..349: note = Tnp_domain
  SITE 272: note = Tnp_P1
  SITE 301: note = Tnp_P2
  SITE 309: note = Tnp_P3
  SITE 310: note = Tnp_P4
  SITE 322: note = Tnp_P5
MMPGTRPGIVIGLDVGKASHWACVVACDGEILASRPVANRESAVDELYSEYPGALVVVDQVRNIGALALSRAKAAGMPRAYLPGLAAHGASKLFAGDAKTDERDAAVIAKTALGIPDALLPVPERTPEIEAARQLAAQRDFLTCENTRAKNRLRSILLESCPEFEARADLSDRATLSLMAALGGPWSMAAASPRAIGTLARKCGRAKAAALLDSVTASTEPSAAAVACEDRAVRLLARRISENAAEIEGLTAAISALLSADETYRCLLTVPGIGPRTASELVISVDIEDFPSHDRLASYCGLAPRNRQSGTSISSVSASRQGNKRLKNLLIFSCNCLTRSRNRWSEYYARCRRRGMSHGQALKAVARKRLKVIYAIMRDKRPYVA

SEQ ID NO: 19574 - protein, 337 aa, unidentified
  source 1..337: note = protein_ad780c0
  REGION 6..147: note = RuvC_domain
  SITE 9: note = RuvC_P1
  SITE 52: note = RuvC_P2
  SITE 87: note = RuvC_P3
  SITE 89: note = RuvC_P4
  SITE 92: note = RuvC_P5
  REGION 211..297: note = Tnp_domain
  SITE 219: note = Tnp_P1
  SITE 249: note = Tnp_P2
  SITE 257: note = Tnp_P3
  SITE 258: note = Tnp_P4
  SITE 270: note = Tnp_P5
MKITTIGIDLAKNVFQVHGVDEHGKAQLKKQLKRNQIMEFFTNQPPSLIGMEACGSAHFWANKLQSLGHTVKLMAPQFVKPYVKTNKNDAADAEAICEAVTRPTMRFVPIKSSEQLAVLALHRARQGFVKARTAQANQLRGLLAEQGIIIPKGISHINQRLPEILEESENTLPRTFCQLLARLGNHFKELHKQVKELEVQIQCWHQQNVASMKLARIPGIGALTASALLASIGDAKNFKSGRQLAAWLGLVPRQSSSGGKQNLLGISKRGDIYLRTLLIHGARAVLRVSEHKADSWLAKLMVRRNYNIAVVALANKNARIVWALLAHDREFNAEFGA

SEQ ID NO: 19575 - protein, 333 aa, unidentified
  source 1..333: note = protein_f5e87de
  REGION 4..160: note = RuvC_domain
  SITE 7: note = RuvC_P1
  SITE 57: note = RuvC_P2
  SITE 97: note = RuvC_P3
  SITE 99: note = RuvC_P4
  SITE 102: note = RuvC_P5
  REGION 274..333: note = Tnp_domain
  SITE 282: note = Tnp_P1
  SITE 312: note = Tnp_P2
  SITE 320: note = Tnp_P3
  SITE 321: note = Tnp_P4
MNAVGIDVSKGKSTVTIRRPGDVVIMPPHDIPHIQSAINDLIEQIRNLDGETRVCMEHTGRYYEPVATWLSDAGIFVSAVNPILIRDFGDDSLRTPKTDKADSKKIARYTLDRWAKLKQYGSMDKTRNQLKTMNRQFGFYMAQKTSMKNNLIALLDQTYPGANDFFDSPSRSDGSQKWVDFVHTYWHVDCVRYKSLDAFTEHYQNWCRRKGYNFSAQKAENIYQFSSDLIAVFPKDDGTKLLIRQAVAMLNTASATVESLRLRMDETASLLPEYPVVMAMNGVGTTLGPQLMAEIGDVTRFTHRGALTAFAGVDPGKNDSGQHIQKSVPTTKK

SEQ ID NO: 19576 - protein, 343 aa, unidentified
  source 1..343: note = protein_7126ded
  REGION 6..148: note = RuvC_domain
  SITE 9: note = RuvC_P1
  SITE 52: note = RuvC_P2
  SITE 87: note = RuvC_P3
  SITE 89: note = RuvC_P4
  SITE 92: note = RuvC_P5
  REGION 211..297: note = Tnp_domain
  SITE 219: note = Tnp_P1
  SITE 249: note = Tnp_P2
  SITE 257: note = Tnp_P3
  SITE 258: note = Tnp_P4
  SITE 270: note = Tnp_P5
MKITTVGIDLAKNVFQVHGVDERGKAVLKKPLKREQVAPFFANLPPCLIGMEACGSAHHWARKLEAFGHTVKLMAPQFVKPYVKTNKNDAADAEAICEAVGRPNMRFVPIKNGEQQAILAMHRARQGFVKARTAQANQIRGLLAEYGIIIPQGISHIAKRLPDILEDGENGLPGAFRQLLHRLGDHLKELDRQVGELEVQIQVWHRENEASKKLAQIPGIGPITASALVASIGDAKSFESGRQLAAWLGLVPKQHSSGGKQLLLGISKHGDTYLRTLLIHGARAVIRVAERKAGYAQTWLAQLIGRRNKNIAAVALANKNARISWALLAQERDYQPGYEPSAA

SEQ ID NO: 19577 - protein, 396 aa, unidentified
  source 1..396: note = protein_3a0a2f9
  REGION 6..160: note = RuvC_domain
  SITE 9: note = RuvC_P1
  SITE 58: note = RuvC_P2
  SITE 98: note = RuvC_P3
  SITE 100: note = RuvC_P4
  SITE 103: note = RuvC_P5
  REGION 265..352: note = Tnp_domain
  SITE 273: note = Tnp_P1
  SITE 304: note = Tnp_P2
  SITE 312: note = Tnp_P3
  SITE 313: note = Tnp_P4
  SITE 325: note = Tnp_P5
MPEIWAGLDIGKEHHHCVVIDSAGERLLSRRVLNDEAQLLQLIGDVLALSEDVLWAVDINRGGAALLIGLLLDHDQPVVYLPGLAVHHASAAYRGQGKTDAKDAHIIADQARMRRDLGILRPGDEVAIDLRPLITRRTDLVCDRTRQINRLRAQLLEIFPALERALTLTNQGPVMLLTGYQTPAAIRRTGAKRIETWLKNRKIRGATELARAAVEAAQAQHTALPGEKLAASLVARLAKGVIALNEEIAEIDALIEARFHQHQHAKVINTLPGMGPRLGAEFIAATGGDLEPFGTADRLATFAGLAPVPRDSGRVNGNVRRPSRFHRGLLRAFYLSSLASLRVCPASRTYYERKRKEGKNHQQALRSLARRRVNVLWAMIRDGAWYQGAPTAASTT

SEQ ID NO: 19578 - protein, 273 aa, unidentified
  source 1..273: note = protein_84de0f5
  REGION 1..50: note = RuvC_domain
  REGION 155..242: note = Tnp_domain
  SITE 163: note = Tnp_P1
  SITE 194: note = Tnp_P2
  SITE 202: note = Tnp_P3
  SITE 203: note = Tnp_P4
  SITE 215: note = Tnp_P5
MRRTPSSSPTRPGDEIAVDLRTLTTRRLDVVFDRTRQINRLRAQLLEIFPALERSLDLTNKGPVMLLTGYQTPAAIRGTGTRRIETWLKNRKVKGAAALARTVVEAAQAQHTALPGEQLAAAMVVRLAKGVVALDGEIAELDALIETRFQQHPHAEVIRSLPGMGARLGAEFIAATGGDMDAFGSADRLAGFVGLAPQPRDSGRVSGNLRRPRRYHRGPLRTMNLSALASLKSCPASKAYYQLPAEEERGKGTQAGSAGPRPPTRQCSVGDAP

SEQ ID NO: 19579 - protein, 296 aa, unidentified
  source 1..296: note = protein_a8e0337
  REGION 2..75: note = RuvC_domain
  SITE 14: note = RuvC_P3
  SITE 16: note = RuvC_P4
  SITE 19: note = RuvC_P5
  REGION 138..230: note = Tnp_domain
  SITE 146: note = Tnp_P1
  SITE 176: note = Tnp_P2
  SITE 184: note = Tnp_P3
  SITE 185: note = Tnp_P4
  SITE 197: note = Tnp_P5
MPPAYVKPYVKRQKNDAADAEAICEAVRRPTMQFVETKTPEQQSCLMLHRTRHLIIRQLNAVTNAIRAHLAEFGIVAPVGRRGVEDLRKVVTDVNDARVPEVARACLIALGDQMRGLKAYVLKFDRLTTAWHRSNEMSMRLDALPGVGPALATALVASVPDPKTFRSGRNFSAWVGLVPKQNSSGGKQRLSSISKQGDRYLRSLFTVGALAVIRYAKIHGTGHRPWLTALLARRSTKVAAVALANKIARMAWAIMTRASATENPLHWQRKRDRATSVRCEGWEGEQHVMQSRSIRR

SEQ ID NO: 19580 - protein, 400 aa, unidentified
  source 1..400: note = protein_5b8969b
  REGION 11..165: note = RuvC_domain
  SITE 14: note = RuvC_P1
  SITE 62: note = RuvC_P2
  SITE 102: note = RuvC_P3
  SITE 104: note = RuvC_P4
  SITE 107: note = RuvC_P5
  REGION 272..357: note = Tnp_domain
  SITE 280: note = Tnp_P1
  SITE 309: note = Tnp_P2
  SITE 317: note = Tnp_P3
  SITE 318: note = Tnp_P4
  SITE 330: note = Tnp_P5
MVTQETPHVFLGLDVGKTEHWACAVTAEQKVVWNKALPNDEAKLVDIYTRLQEHGSLLVVVDQPATIGALAVAVAQHMGIPVAYLPGLTMRRIANLYSGDAKTDEKDAFIIADAARSLPHTLRELTPADVDEATLGMLTGFDLDLSRQVNQVSNRIRGLFTQIHPALEKVLGLRLEHDAILEVLITWPTPDKLHKAGRARIDAKLKKHGARRHSAWTEEILNTLAKQTVTVTGTDAAGIVIPHLARQLIHLHAQRADVTREVEEIVVGHPLYLVLTSMPGVGLRTCAVIIAELSGKTFTSAAALASYAGLAPTTRQSGTSIKSERVSHSGNKRLKRALFLSAFAVIRTDPVSRAYYDRKRTQGKRHNQAIIALAHRRLGVLYAMLRDGTLYEPPEIVLAA

SEQ ID NO: 19581 - protein, 339 aa, unidentified
  source 1..339: note = protein_1f31585
  REGION 7..149: note = RuvC_domain
  SITE 10: note = RuvC_P1
  SITE 53: note = RuvC_P2
  SITE 88: note = RuvC_P3
  SITE 90: note = RuvC_P4
  SITE 93: note = RuvC_P5
  REGION 207..291: note = Tnp_domain
  SITE 215: note = Tnp_P1
  SITE 245: note = Tnp_P2
  SITE 253: note = Tnp_P3
  SITE 254: note = Tnp_P4
  SITE 266: note = Tnp_P5
MSQAITIGVDLAKNVFQVHGVESTGKPVVRRQLRRSQFLAFFEGLPRCLVGIEACAGAHHWGRQLQEMGHEVRLMPPSYVKPYVKRGKTDAADAAAICEAVTRPSMRFVAVKSEAASAVIVLHRVPDFLVRRVTQTGNAIRAHIAEFGIVAAKGSKVVEGLASELDALPEAARLPIEVLLGQLADIRARVDRLTGEIEAAHRKSEVSLRLAAIPGVGTLTATVVAATTPDVSNFASARDYAAWLGLTPKPHSTGGKPRTGRISRMGNRYIRRLLYLGAMSLIMVRRRRGPGVDWLWQKPAAKKTRVVAIALANRMARTIFALLRDGAMYRPRVSATMPG

SEQ ID NO: 19582 - protein, 408 aa, unidentified
  source 1..408: note = protein_09a16a5
  REGION 6..169: note = RuvC_domain
  SITE 9: note = RuvC_P1
  SITE 63: note = RuvC_P2
  SITE 109: note = RuvC_P3
  SITE 111: note = RuvC_P4
  SITE 114: note = RuvC_P5
  REGION 281..367: note = Tnp_domain
  SITE 288: note = Tnp_P1
  SITE 318: note = Tnp_P2
  SITE 326: note = Tnp_P3
  SITE 327: note = Tnp_P4
  SITE 340: note = Tnp_P5
MNPLFVGIDVSSRNNVAYLMKPDGSKHSSFSVQNNLGGAKLLSERIVSALHSMQLCDVVIGLEATSIYGDSLVYALREDGGLSQFQRKIHVLNPKQVKKFKEAYPDLPKNDWVDAFVIADHLRFGRIGKEVYMDDYRYKALRTLTRARFDVIQNMTREKQRFANYLFLKCSGMAQNKDIANSSATTIALMERFETVDELADADLDELTAFITEAGRGRFADSEAAAKAIQAAAKGSYRLPKTVNDTVNQAMSVSIASMRALKAQVKVLEKAIEQQFEIIPNTLTSIPGIGKVYSAGIIAEIGDVRRFNSQASVAKYAGLVWTQHQSGDFEAEHTHLIKSGNRYLRYYLLEAANSVRRCDSEFRRYYDLKFHEVNQFQHKRALALTARKLVRLVFRLLKDNRLYIPPEG

SEQ ID NO: 19583 - protein, 409 aa, unidentified
  source 1..409: note = protein_4576a61
  REGION 6..162: note = RuvC_domain
  SITE 9: note = RuvC_P1
  SITE 59: note = RuvC_P2
  SITE 99: note = RuvC_P3
  SITE 101: note = RuvC_P4
  SITE 104: note = RuvC_P5
  REGION 271..357: note = Tnp_domain
  SITE 279: note = Tnp_P1
  SITE 310: note = Tnp_P2
  SITE 318: note = Tnp_P3
  SITE 319: note = Tnp_P4
MDVLFVGDDWAEDHHDVCLMDGEGRVVASRRLPEGLVGMERFHALVADRVDDPSQVIVGIETDRGLWVQALVAAGYQVFAINPGSVSRYRDRHHIGGGKSDTSDARMLANVVRTDRHNHRPVAANSELAEAVKVLARAHQSLVWSRSAATNRLRAGLLEYFPGAVQAFEDLTDRDTLAVLAAAPDPDQAARLSRSSIKAALRRGGRQRNLDWRAEQIQAALRAPQPRTSPLLGQALAAVTRSHVAVIRELNTQIAELAAELQPHFEQHPDAAIYLSLPGLGVILGARMLGEFGDDPNRYANRKCRKNYAGTSPLTVASGRKKTVHARHLRNKRLADATHLWAFEAISTSPGARACYQRHRDAKQGHHQALRAVANKLVGCLHACLRDRVPYDETTAWANQPKPSNTRAA

SEQ ID NO: 19584 - protein, 348 aa, unidentified
  source 1..348: note = protein_3719ddf
  REGION 6..147: note = RuvC_domain
  SITE 9: note = RuvC_P1
  SITE 52: note = RuvC_P2
  SITE 87: note = RuvC_P3
  SITE 89: note = RuvC_P4
  SITE 92: note = RuvC_P5
  REGION 212..299: note = Tnp_domain
  SITE 220: note = Tnp_P1
  SITE 250: note = Tnp_P2
  SITE 258: note = Tnp_P3
  SITE 259: note = Tnp_P4
  SITE 271: note = Tnp_P5
MKRTTIGLDLAKRVFQVHSVDTDTGEIARASLKRSQVLKHFANLEPSVVAMEACGSGHYWARELVKLGHEVRLIAAQFVRPFVKSNKTDAADAEAIWEAAQRPGMRYVALKSEEQQAVLGLHRLRERRVKMRSMLVNQLHGLMAEFGVALPKGWGVMLKQAGELLADGESGPIPGLLRDALLDQIQQIRTLSEQIKALERQIGAWQRRAEACQRIAAIPGVGLLTATAAVATMGDAKSFHSGREFAAFLGLVPRQSGTGGRVKLLGISKRGDRYLRTLLIHGARTVLSWQRRPGRELDPWLKGLLARRAQNVVVVALANKMARTIWALLAHGRTYQRGYGAAIAPTAA

SEQ ID NO: 19585 - protein, 339 aa, unidentified
  source 1..339: note = protein_3419832
  REGION 6..147: note = RuvC_domain
  SITE 9: note = RuvC_P1
  SITE 52: note = RuvC_P2
  SITE 87: note = RuvC_P3
  SITE 89: note = RuvC_P4
  SITE 92: note = RuvC_P5
  REGION 210..295: note = Tnp_domain
  SITE 218: note = Tnp_P1
  SITE 248: note = Tnp_P2
  SITE 256: note = Tnp_P3
  SITE 257: note = Tnp_P4
  SITE 269: note = Tnp_P5
MKYTPVGVDIAKHLIQVHFIDEHTGEVVDKQLRRQDFLTFFCNREPCLIGMEACGGSQHWARELKKQGHKVRLLQARFVKAFVMGNKNDVMDARAIWMAVQQPGKEISVKTEEQQSILVLHRTRLQLVKFRTAQINALHGTLLEFGETVHKGRAAMDRELPAALERMKAKLPPYLITVLEDQYSRLSELDSLIDGLEKQLNSVARQNEICKRLMEIPGVGALIATAAVATMGEASAFKSGRAFASYVGLVPKQTGSGGKVRLLGISKRGDTYLRTLFIHGARSASLRVKEPGSWITELKKRRPTGVAVVAMANKLARTVWAIAAHDRKYNKDHISIRPY

SEQ ID NO: 19586 - protein, 282 aa, unidentified
  source 1..282: note = protein_28ee6f0
  REGION 7..149: note = RuvC_domain
  SITE 10: note = RuvC_P1
  SITE 53: note = RuvC_P2
  SITE 88: note = RuvC_P3
  SITE 90: note = RuvC_P4
  SITE 93: note = RuvC_P5
  REGION 209..282: note = Tnp_domain
  SITE 217: note = Tnp_P1
  SITE 247: note = Tnp_P2
  SITE 255: note = Tnp_P3
  SITE 256: note = Tnp_P4
  SITE 268: note = Tnp_P5
MQDVTLVGIDLGKHSFHLHGQDRRGNMVFRRKVTRRQLIEFFASFHACTVVMEACAGAHYMARKLATSGHEVKLISPQFVRPFVKSNKNDFVDAEAICEAATRPAMRFVTPKTESQQTLSALHRVRESLVHDRVKVINQIHGFLLEFGISLPIGLAVIRRLPAVLAEQPLPPRLIVLLERLHAHFKYLSEQIGELDKDLARQLADDDLGQRLLTIPGVGPVTASLLTAEMGDGKQYGCSRDFAASIGLVPRQYSTGGRPNLLGISKRGDKSLRRLLVQCAPI

SEQ ID NO: 19587 - protein, 343 aa, unidentified
  source 1..343: note = protein_d117bff
  REGION 6..146: note = RuvC_domain
  SITE 9: note = RuvC_P1
  SITE 52: note = RuvC_P2
  SITE 87: note = RuvC_P3
  SITE 89: note = RuvC_P4
  SITE 92: note = RuvC_P5
  REGION 211..295: note = Tnp_domain
  SITE 219: note = Tnp_P1
  SITE 249: note = Tnp_P2
  SITE 257: note = Tnp_P3
  SITE 258: note = Tnp_P4
  SITE 270: note = Tnp_P5
MQIRSVGIDLGKTTFHLVALGDNGKVLLKKKFTQRQLITFTANLQTTLIGLEACAGAHFLGRALREQGHDVKLIPAQFVRPFVKSNKNDFLDAEAIAEAVDRQNMRFVSIKTDDQLDLQALHRVRDRLITRRTSVINQLRAFLLERGLVFAKSPAKLRERMPEILENAEEDLTPRMRNLLALLWNEWKDLEQQVVDLNHEVELIASSDAACLRLRQIPGIGPLVATAIVASIGNGAAFHKRREFAAWIGLVPRQYSTGGKAKLYGISKRGNRYLRKILIHGARAMVLRCKRDRVPMGAWMTALEARAPRNVLIVAAANKLARIAWAVLSSGQDYRAVQEPVAA

SEQ ID NO: 19588 - protein, 428 aa, unidentified
  source 1..428: note = protein_9212304
  REGION 9..161: note = RuvC_domain
  SITE 12: note = RuvC_P1
  SITE 64: note = RuvC_P2
  SITE 100: note = RuvC_P3
  SITE 102: note = RuvC_P4
  SITE 105: note = RuvC_P5
  REGION 257..344: note = Tnp_domain
  SITE 265: note = Tnp_P1
  SITE 297: note = Tnp_P2
  SITE 305: note = Tnp_P3
  SITE 306: note = Tnp_P4
  SITE 317: note = Tnp_P5
MKVLYERVAGIDVHKDMIKVAIRSPGEKPWTRKTEVLQFRTFYGVLRETARELRRRGVTHVVMEASGVYTGPVYYALAEQDFTTVAVINPAHARALRGHKTGAKDCARLAELFECGLLHGSYIPAPELKEVRDLTRYRIKTVQARTSEIQRLAKALESAGIKLGSVASDITGKSATAMIGALIDGERRGQVLADLAIGRMRTAGKLADLSMALTGRFSGHHAMLCRLHRDRIEVFDAAVAGLEEQIAAKTVPWQKELDLLKTIPGFGDAVAQAWLGEIGPAPHQWFASHEKLASWVSLCPGNNISAGKRKHGRTGDAGTYLKPLLIQAAWAAIRSQGRLQARYRRLARRFGGDSSPAAKKKAITAIAHTLLKIAYQVLKTGTPYQEPGADFYTRRESSAARQAYLERQLQKLHPGATITITISPPEAA

SEQ ID NO: 19589 - protein, 342 aa, unidentified
  source 1..342: note = protein_0843fd6
  REGION 7..150: note = RuvC_domain
  SITE 10: note = RuvC_P1
  SITE 53: note = RuvC_P2
  SITE 89: note = RuvC_P3
  SITE 91: note = RuvC_P4
  SITE 94: note = RuvC_P5
  REGION 213..300: note = Tnp_domain
  SITE 221: note = Tnp_P1
  SITE 251: note = Tnp_P2
  SITE 259: note = Tnp_P3
  SITE 260: note = Tnp_P4
  SITE 272: note = Tnp_P5
MVEVSMIGLDLAKSVFQVHGLDAAGQVVLQRRLRRTDVIKFFTKLSACVIGMEACASAHYWARTLSELGHEVRLIPPAHVKPYVKRGRKNDAVDAAAIAEAMARPHMRTVPIKTEEQQAALMLHRVRRLLMSQRTRLSNALRSHFAEFGIIEPAGDGGLSQLITAALDMPGTALPQPAREALALLAAQWRETSAKIDALDQEILAWHRGNADSRRVATIPGMGPLIASAIVATVGDPGRFKTSRQFAAWLGLVPSQHSSGGKTVLGAITKTGDRYLRSLLVVGATSVMARRGKKQGTWLAALLARKTPRQVSVALANKMARTAWAILVKGGTYEETASATVT

SEQ ID NO: 19590 - protein, 443 aa, unidentified
  source 1..443: note = protein_d698a88
  REGION 22..175: note = RuvC_domain
  SITE 25: note = RuvC_P1
  SITE 78: note = RuvC_P2
  SITE 114: note = RuvC_P3
  SITE 116: note = RuvC_P4
  SITE 119: note = RuvC_P5
  REGION 285..371: note = Tnp_domain
  SITE 293: note = Tnp_P1
  SITE 324: note = Tnp_P2
  SITE 332: note = Tnp_P3
  SITE 333: note = Tnp_P4
  SITE 344: note = Tnp_P5
MVLRDVEEIPDEEHEQVIGRVCAIDVAKESGKVCTRVPHESRPGGRVCKVWDVAATTRSVTELAEHLAGEGIEVVTVESTSDYWRIFFYLLEAGGLKVQLVNARDVKNVPGRPKTDKLDAVWLAKLTEKGLLRPSFVPPAEIRRLRDYTRTRTDLTQERTRYWSRLEKLLEDALIKVSSVASKIDGMSVRDMVEALIAGERDPWVLAGLARGRLKAKHTALISALNGQFDEHHAELARILLDQIDGLSRQIGKLTARIEELVAGLPAAAAPAGDGEAEQPPLPAVGRLMEVPGIALRGAQVILAEIGLDMSRFATAGHLVSWAKLCPRTIQSGAKSSAAKSGKGNPYLKGILGEAAAAAAKTETFLGERYRRIVKRRGKLKALVAVARSILVIIWHLLADPAARYRDLGPDYHASRIDQGRKARNHIRQLEALGYSVTLSPAA

SEQ ID NO: 19591 - protein, 345 aa, unidentified
  source 1..345: note = protein_1188495
  REGION 6..147: note = RuvC_domain
  SITE 9: note = RuvC_P1
  SITE 53: note = RuvC_P2
  SITE 86: note = RuvC_P3
  SITE 88: note = RuvC_P4
  SITE 91: note = RuvC_P5
  REGION 210..303: note = Tnp_domain
  SITE 218: note = Tnp_P1
  SITE 250: note = Tnp_P2
  SITE 258: note = Tnp_P3
  SITE 259: note = Tnp_P4
  SITE 272: note = Tnp_P5
MNNTIVGVDLSKNCIQVCVVKQNKVISNREMSSAQFTSWLAKTKPATVVFEACSTSNYWKQTATRLGHDARLVSAKLVAKIRQNQKTDRNDALAVVQASQLVNTRFINGKSFSQQELQSLIRIRELAVKQKGALKNQIQALLLEFNIRTHAQRGGLNTVIQQVLEDAENGFCLQFRQGLQRAWGSYLSTVEAIADYDKLLGSTMEDHADCEKLTALEGVSVINAVNLCIQLGCGEAGVFRTSQDASACIGLTPIQHSTGGKTRLGSIGKKVKNSSLRSYLVSGAMSVVNQVSRREPKTAKEQWLKQLIERRGKRCAAVALANKTVRTAFAMLTHGTEYQPQPLKG

SEQ ID NO: 19592 - protein, 264 aa, unidentified
  source 1..264: note = protein_2846ab4
  REGION 1..70: note = RuvC_domain
  SITE 9: note = RuvC_P3
  SITE 11: note = RuvC_P4
  SITE 14: note = RuvC_P5
  REGION 133..227: note = Tnp_domain
  SITE 141: note = Tnp_P1
  SITE 171: note = Tnp_P2
  SITE 179: note = Tnp_P3
  SITE 180: note = Tnp_P4
  SITE 192: note = Tnp_P5
MKPYVKRQKNDTTDAEAICEAVTRPNMRFVPTKTVEQQSCLMLHRARHLFIRQQTAVINSIRAYLAELGIVAPVGRRGVDQLLEVVADTADRRFPEVARACLAVLGSQLRALKVQILEFDRRIVAWHRSSATSKRLDAIPGVGPALATALVASVADAKAFRSGRDFSAWVGLVPKQNSNGGKDKLGSISKQGDRYLRSLFTAGALAVIRYAKIHGTGRRPWLSALLARRATKVAAIALANKLARIAWAMMARNERYKEPAALMA

SEQ ID NO: 19593 - protein, 265 aa, unidentified
  source 1..265: note = protein_9c9ffe6
  REGION 1..48: note = RuvC_domain
  REGION 153..236: note = Tnp_domain
  SITE 158: note = Tnp_P1
  SITE 188: note = Tnp_P2
  SITE 196: note = Tnp_P3
  SITE 197: note = Tnp_P4
  SITE 209: note = Tnp_P5
MTVEYKPYPSSFYHLDKLKSLTRFRNSLVRQRSRQLVELTNVLDKLFPEFKPFFKDKFSVTALYILAHYQTPERIANMNARSYEALRKLSRGRFTLSNFTQLKALAKNTVGTQSDYLLDQMNILLELYSQLDSKVDELDAQIKECVRGIDPPCLSIPGVGELSAAMILSEFGDFSKFQNPSKMLAFAGLEPGYFQSGQSEYTGHMVKHGSSRLRYALMNCCLPLISNEPVFAAYYAKKRSEGKPHRVALTHVAKKTSAGHLHIAN

SEQ ID NO: 19594 - protein, 323 aa, unidentified
  source 1..323: note = protein_2271351
  REGION 5..155: note = RuvC_domain
  SITE 8: note = RuvC_P1
  SITE 58: note = RuvC_P2
  SITE 98: note = RuvC_P3
  SITE 100: note = RuvC_P4
  SITE 103: note = RuvC_P5
  REGION 195..281: note = Tnp_domain
  SITE 203: note = Tnp_P1
  SITE 233: note = Tnp_P2
  SITE 241: note = Tnp_P3
  SITE 242: note = Tnp_P4
  SITE 254: note = Tnp_P5
MPSVIGIDIAKHTFDLATLQPNGKYRTKAKLANDKAGFAVLRDWLNKHSEPGAWVVMEATGIHHEALAEWLLEQGYRVCVLNPAQVAHYARSQLQRVKTDKVDAKLIAEYGERHQDSLRPWQPEPRAVRRLKALVRRLEDLREIEQMERNRLEVADASVQASIQSVLEHIGQEIEETLKAIDDHIDNDPDLRGKRDLLTSIDGIADKTAALLLAELGDPLRFANSRAVTAFAGLNPRLQESGNHRGQTRISKTGSSRLRAGLFMPAISALTYNEAIRALSERLRAKGKTGKQIVCAAMRKLLNIAYGVLKSGQPFNAKLALAH

SEQ ID NO: 19595 - protein, 409 aa, unidentified
  source 1..409: note = protein_0d2b80d
  REGION 6..159: note = RuvC_domain
  SITE 9: note = RuvC_P1
  SITE 57: note = RuvC_P2
  SITE 98: note = RuvC_P3
  SITE 100: note = RuvC_P4
  SITE 103: note = RuvC_P5
  REGION 222..307: note = Tnp_domain
  SITE 230: note = Tnp_P1
  SITE 260: note = Tnp_P2
  SITE 268: note = Tnp_P3
  SITE 269: note = Tnp_P4
  SITE 280: note = Tnp_P5
MSQVVIGMDPHKRTATIEVMAGDEAVAGQGRYATDAAGYAAMLAEARHWPQRMWAIEGCQGIGRHIANRLLADGEHVVDVPPKLSARTRLFATGQGRKTDATDAHSVALAATRMQGLRPAVDDQQLAVLRILADRRRSLGEDHTRMICQLHRLLLELIPGGAKKALSAAQAKALLARVRPRDAAGRARRMVAAELISDLERIHQRKKAANKELNALLKASSTTTLTTLHGIGPSGAARLLVEVADVTRFPDKAHFASWNGTAPIDASSGDQVRHRLSRAGNRQINRVLHIMAVVQLRNPTEGRAYYDRKVAAGKTPMEAMRALKRRLSDIVYHQMITDARAAVTGPGGHVGTATGSSAAGLHPAAGTSEKSLPGPATSDPTPPRPARFSGRSAAPAPRRTAAAVKRPLA

SEQ ID NO: 19596 - protein, 400 aa, unidentified
  source 1..400: note = protein_a7b841e
  REGION 10..164: note = RuvC_domain
  SITE 13: note = RuvC_P1
  SITE 62: note = RuvC_P2
  SITE 102: note = RuvC_P3
  SITE 104: note = RuvC_P4
  SITE 107: note = RuvC_P5
  REGION 270..356: note = Tnp_domain
  SITE 278: note = Tnp_P1
  SITE 308: note = Tnp_P2
  SITE 316: note = Tnp_P3
  SITE 317: note = Tnp_P4
  SITE 329: note = Tnp_P5
MNPPRARAWAGVDAGKGHHWAAVVDDTGATLWSKKIDNDETAIWTALGEILALAEEVSFAVDISGTASALLLALLAAHGISAVYVPGRTVNRMSGAYRGEGKTDAKDAYVIDETSRHRNDFTTIEVPAQLAADLALLTAHRADLVADRVRMINRLRDVLTGVFPALERAFDYSAHKGALVLLTGYQTPAAIRRRGHTRLTAWLANRHVRSAETVAATAIAAAAAQQTTLPGEAVAAQIVAELARAILDLDDRIKRLEGQIRDTFREHPQAGVIESLPGFGPILGAELVVAAGDLASYTDAGHLASAAGLVPVPRDSGRRTGNLHRPKRYSRRLRRVFYLSAQTSIIRDGPNRDFYLKKRSEGCKHVQAVIALARRRVAVLWALLRDDRVFTPAPPVTLAA

SEQ ID NO: 19597 - protein, 352 aa, unidentified
  source 1..352: note = protein_df3635d
  REGION 10..158: note = RuvC_domain
  SITE 13: note = RuvC_P1
  SITE 62: note = RuvC_P2
  SITE 98: note = RuvC_P3
  SITE 100: note = RuvC_P4
  SITE 103: note = RuvC_P5
  REGION 228..314: note = Tnp_domain
  SITE 236: note = Tnp_P1
  SITE 267: note = Tnp_P2
  SITE 275: note = Tnp_P3
  SITE 276: note = Tnp_P4
  SITE 287: note = Tnp_P5
MPKRTRIVIGGVDTHGRTHHAAVIDQTGRLLGDRQFPADRSGYRQLLGWLGRHGQLRAVGVEGTGSYGAGLTQVLLDQGVRVVEVDRPDRRTRRQRGKSDPIDAEAAARAVLAGTATAVPKRRDGIVESIRALRTARSGAVKARTAAINQLKALLVTAPAMLREALDGRSTPALVVACARLRPDQTALADPVQGTKAALVVVAQRIQLLDQEIALADQRLAVLVGRAAPRLLGLLAIGNDHAGQLLTTAGQHPERLRGEAAFAHLCGVAPIPASSGKTHRHRLHRGGDRDANRALHLAVVVRMRFCPRTRAYVERRTKQGLSKPEIIRCIKRYLAREVYHALVADFEALHAT

SEQ ID NO: 19598 - protein, 400 aa, unidentified
  source 1..400: note = protein_db45a01
  REGION 11..165: note = RuvC_domain
  SITE 14: note = RuvC_P1
  SITE 62: note = RuvC_P2
  SITE 102: note = RuvC_P3
  SITE 104: note = RuvC_P4
  SITE 107: note = RuvC_P5
  REGION 272..359: note = Tnp_domain
  SITE 280: note = Tnp_P1
  SITE 311: note = Tnp_P2
  SITE 319: note = Tnp_P3
  SITE 320: note = Tnp_P4
  SITE 332: note = Tnp_P5
MMTPDDIDVWVGLDVGKSAHHAHALDHDGNTLYDKPLKQDEKAIRTMLGKLSKHGRVLLVVDQPNTIGSLPLTVARNMGIAVAYLPGTAMRRTAQLLPGDAKTDRRDAHVIAWAALKLPETLRDAGPDDETLAALKLLAGHDEDLAHESPRHVNRLRSLLLQTHPAFERALKGERITRDATLALLERYGGPMGVKRAGIEDVKDWAKSNGLRAGRIIDDMFKAIGEQTVTVPGTLMAETIIPSIAHDIKTIRDRRREVGRQVEKLLEDHPLLTVLTSMPGIGVRTASNILLGIGGDIANFKSSAHLAAYAGISPATGQSGTSIKGERPSRRGNKRLKNALWQTAFVASTKHPPSVAYYKRKREQGKHHNAAIICLARRRCDVIYSMLKNGTLYQEPALVA

SEQ ID NO: 19599 - protein, 342 aa, unidentified
  source 1..342: note = protein_0267f89
  REGION 1..106: note = RuvC_domain
  SITE 3: note = RuvC_P2
  SITE 43: note = RuvC_P3
  SITE 45: note = RuvC_P4
  SITE 48: note = RuvC_P5
  REGION 213..298: note = Tnp_domain
  SITE 221: note = Tnp_P1
  SITE 251: note = Tnp_P2
  SITE 259: note = Tnp_P3
  SITE 260: note = Tnp_P4
  SITE 272: note = Tnp_P5
MVDQPASIGALPLAVARDMGCPVAYLPGLTMRRIADLYPGEAKTDARDAFIIADAARAMPHTLRAIDGEDETIAELEMIVGFDDDLAGEATRVANRLHGLLTQIHPSLERVLGPRLQHPAVLTLLERFGSPAQIRKAGRRRLVTLLRPKAPRMAERLVDEIFAALDEQTVTVPGTEAAALIVPSLAASLTAVLDQRKLLAGRIEELLEAHPLSKVLTSMPGVGVRTGARILIEVGDGSTFPTAGHLAAYAGLAPATRSSGSSIRGEQPSRRGNKQLKRAFFLSAFAALGDPISRAYYDKKIAQGKHHTQALLCLARRRADVLFAMLRDGTFYEPQPATADGV

SEQ ID NO: 19600 - protein, 358 aa, unidentified
  source 1..358: note = protein_5d37fab
  REGION 7..147: note = RuvC_domain
  SITE 10: note = RuvC_P1
  SITE 53: note = RuvC_P2
  SITE 88: note = RuvC_P3
  SITE 90: note = RuvC_P4
  SITE 93: note = RuvC_P5
  REGION 210..295: note = Tnp_domain
  SITE 218: note = Tnp_P1
  SITE 248: note = Tnp_P2
  SITE 256: note = Tnp_P3
  SITE 257: note = Tnp_P4
  SITE 269: note = Tnp_P5
MEHITRIGMDTSKQIFQLHGVNAVEEPVLRKKLRRKEMVRFFEELPPTEVAIEACGSSHHWARLLQSLGHEVKLIPPQFVKPYVKRNKNDAADAEALCEAVSRPTMRFVPAKTAEQQAALMLVGVRERLVRNRTQLSNAIRGYAAEFGVTASKGLCRIDQLLERIATDDTLPALARELFAIHGKEYRQLQAQLEKIEARLMAWHRANACSQRLAEIPGIGPIGASMLVMKTPAPETFRSGRHYAAWLGLTPKDHSTAGKSRLGGITRAGDEALRSVLVVGSTSVLHRVRQRGTGSPWLIDLLKRKPPKLAAVALANKNARIAWKLMVSGERYRTNPTPIANPNTGFSPPRRALQARSC

SEQ ID NO: 19601 - protein, 380 aa, unidentified
  source 1..380: note = protein_2d3464c
  REGION 8..151: note = RuvC_domain
  SITE 11: note = RuvC_P1
  SITE 56: note = RuvC_P2
  SITE 96: note = RuvC_P3
  SITE 98: note = RuvC_P4
  SITE 101: note = RuvC_P5
  REGION 196..283: note = Tnp_domain
  SITE 204: note = Tnp_P1
  SITE 234: note = Tnp_P2
  SITE 242: note = Tnp_P3
  SITE 243: note = Tnp_P4
  SITE 256: note = Tnp_P5
MQSIKTWAGVDVSAKTLTAQRWRKSEETGIREFTNDASGHRELLGWIGRNARVCMEATGVYHLQLALMLVAAGVEVMVINPRVAKDFARALANRSKTDRVDAWSLLEYVRRMEFMPWNAPRAAVLELRELGRRLSELVRAAAEEKNRFHAKKVAAISRTVVNDVQAHVTQIEKRVKQIEKSAVAVIRDDAGLREQFEILTKIPGIARRSAILLLTELAVLDPTMTVKQIVGHAGLDPREHESGSSVQKPPRISKLGNAHLRAILYLPALTAIRHDRGARLFFAQLLSRGKKKMQGIVAVMRKLLHGIWIVLQRRVTFDSSVLFAASLAKAESSDSAVAANQPEPSQDHPKGRSEAEELRQQLDPGSAQATRPPKRRSKAA

SEQ ID NO: 19602 - protein, 354 aa, unidentified
  source 1..354: note = protein_c7a267b
  REGION 12..152: note = RuvC_domain
  SITE 15: note = RuvC_P1
  SITE 58: note = RuvC_P2
  SITE 93: note = RuvC_P3
  SITE 95: note = RuvC_P4
  SITE 98: note = RuvC_P5
  REGION 217..303: note = Tnp_domain
  SITE 225: note = Tnp_P1
  SITE 255: note = Tnp_P2
  SITE 263: note = Tnp_P3
  SITE 264: note = Tnp_P4
  SITE 276: note = Tnp_P5
MSDKSNLLIATMGIDIGKNAFHVVGLDRRGAIVLRQRWSRGQVEARLVNMPPCLIGMEACVGAHHLSRRLHSQGHDARLMPAKYVRPYSKGQKNDFRDAEAIAEAVQRPTMKFVATKTADQLDLQALHRVRARLVSQRTGIINQIRAFLLERGVAVRQGLRFLRAELPIILATRSDVLSPRMVRVIEELAGDWRRVDERIDGLSQEIEALARQDPACERLMTVPGIGPIISSAMVAAIGNGAVFTKGRDFGAWLGLVPKQISTGDRTILGAISRRGNRYLRALFVQAAWVVLVRIKDWDRYGLKAWIDAAKKRLHHNVLAIALANKLARIAWAVLNKERGFEYVKTRATASQPA

SEQ ID NO: 19603 - protein, 360 aa, unidentified
  source 1..360: note = protein_7deddeb
  REGION 8..153: note = RuvC_domain
  SITE 11: note = RuvC_P1
  SITE 57: note = RuvC_P2
  SITE 93: note = RuvC_P3
  SITE 95: note = RuvC_P4
  SITE 98: note = RuvC_P5
  REGION 218..318: note = Tnp_domain
  SITE 226: note = Tnp_P1
  SITE 255: note = Tnp_P2
  SITE 263: note = Tnp_P3
  SITE 264: note = Tnp_P4
  SITE 276: note = Tnp_P5
MKVQRTSVGLDVHARSVVGCGLDGDTGELFQQRLCPDHREVLEWIHGLPAPVAVTYEAGPTGFGLARALIAAGVDCRVAAPSKLQRPTGDRVKTDARDAAHLARLLHLGQIVEVTIPTVSQEAARDLVRAREDCRGDLMGARHRISKLLLRQGIVYCGGQAWTGKHELWLRAQRFDTAGLQLAYDTAFDAMVCCVHRRDRLDEAIVGLAADSEFTPMVRRLGCLRGVSTLTAFGLAVEIGDWGRLTGRSIGAYLGLVPTESSSGATRAQGGLTKTGNTHARRLLIEAAWHHRAPYRPSRDLRRRWDAATAAARARGHAANHRLHTRWVGFDARKKRPVVANAAIARELAGWCWSLAILDG

SEQ ID NO: 19604 - protein, 408 aa, unidentified
  source 1..408: note = protein_a465681
  REGION 6..170: note = RuvC_domain
  SITE 9: note = RuvC_P1
  SITE 63: note = RuvC_P2
  SITE 109: note = RuvC_P3
  SITE 111: note = RuvC_P4
  SITE 114: note = RuvC_P5
  REGION 282..368: note = Tnp_domain
  SITE 289: note = Tnp_P1
  SITE 319: note = Tnp_P2
  SITE 327: note = Tnp_P3
  SITE 328: note = Tnp_P4
  SITE 341: note = Tnp_P5
MNPLYVEIDVSSRSNVVYLMLPNGDKHSNFSVANSQVGSAQLVKRILSALTSHSLDSVLIGLEATSVYGDNLVYFLREDATLAPFNRKIHVLNPKQVKKFHDAYNDLPKNDYVDSFVIADCLRFGRINKEVYIGDYRYLALKNLTRARYYAVCNLVKEKQRFMNVLFKKHSTMTQEKVFSDTFSTTALAVYEEFESAEALANMDLQELTDFIMEKGKNRFSDPDSVAKAIQKAAKSSYRLPKTVNDSVNQVLSISITSMKALESQIKEFDKAISAQMELLPNVLISIPGIGPVFSAGIMAEIGDINRFGNHAQLAKYAGLAWKQHQSGGFEAQTTRLINSGNRFLKYYLCEAAFSLVRCDKEYSDFYHLKYKEVNRYQHKRALALTARKFVRLVFVLLKDNRLYRPAK

SEQ ID NO: 19605 - protein, 342 aa, unidentified
  source 1..342: note = protein_4f15322
  REGION 2..138: note = RuvC_domain
  SITE 43: note = RuvC_P2
  SITE 79: note = RuvC_P3
  SITE 81: note = RuvC_P4
  SITE 84: note = RuvC_P5
  REGION 211..294: note = Tnp_domain
  SITE 216: note = Tnp_P1
  SITE 247: note = Tnp_P2
  SITE 255: note = Tnp_P3
  SITE 256: note = Tnp_P4
  SITE 267: note = Tnp_P5
MAGVADQVGWIPGTREFPATAEGYAAALAWMRSHGELVKVGVEGTGSYGAGLARYLAAEGVEVAEVMRPNRQARRRRGKSDAADAVAAALAALNGEASGKPKSGDGAVESIRALHVARRGAGKARTQAGNQLRDLIITAPQALREKLAGLPAPERIRVAARFRPAGLTSPAEAVKAAMATVARRHQALAAEIAQLDTALEALVEHAAPAGFRDRTGVGTRVAATLLVTVGDNPARVRTEASFAALCGVSPVDASSGKQRRHRLNRGGDRQANSVLWRIVFTRMATDPRTQAYVTRRTSEGKTTREIMRCLKRYVAREVYKTLAAHARQPTQDSMTQIYSMIP

SEQ ID NO: 19606 - protein, 411 aa, unidentified
  source 1..411: note = protein_dbb980d
  REGION 5..164: note = RuvC_domain
  SITE 8: note = RuvC_P1
  SITE 61: note = RuvC_P2
  SITE 101: note = RuvC_P3
  SITE 103: note = RuvC_P4
  SITE 106: note = RuvC_P5
  REGION 272..358: note = Tnp_domain
  SITE 280: note = Tnp_P1
  SITE 311: note = Tnp_P2
  SITE 319: note = Tnp_P3
  SITE 320: note = Tnp_P4
MRLFVGDDWAEDHHDVEVMDAAGKVLAKKRLPEGVAGMTQLHELIGRLVPEDAEDAEVVIGIGTDRGPWVAALVAAGYVVFPVNPLQASRYRERHGVSGAKSDRGDSHMLADMVRTDSHQLRPAAGDSPEAEGIKVVARTHKTLIWDRTRAVQRLRHQLREYFPAALEAFEDLDARDTLELLGKAPDPARARRLTRAQVAATLKRARRRDIAGKTDAILAALRGEHLGQPAALTAAYAATARSLIAVITTLNEQVKALEEQVRDHFGRHPDAEIYRSQPGMGAILGARVLGEFGDDLHRYADGKARKNYAATSPITRASGKKKVVTARFIHNDRLIDALMTQAFSSLNASPGARAFYDELRAKGTEHNDALRRLANRLVGILHGCLKTRTLYDEATAWGHRENLPQSSVAA

SEQ ID NO: 19607 - protein, 319 aa, unidentified
  source 1..319: note = protein_1849135
  REGION 9..155: note = RuvC_domain
  SITE 12: note = RuvC_P1
  SITE 56: note = RuvC_P2
  SITE 96: note = RuvC_P3
  SITE 98: note = RuvC_P4
  SITE 101: note = RuvC_P5
  REGION 192..277: note = Tnp_domain
  SITE 200: note = Tnp_P1
  SITE 229: note = Tnp_P2
  SITE 237: note = Tnp_P3
  SITE 238: note = Tnp_P4
  SITE 249: note = Tnp_P5
MTQNNPVVVGIDVAKDKVDACIRTVTERKTCRTTAAGQRGLIVWLRKHQVGKAVMEASGGYERVWVRALRQADIEVRIVDPKRVRSFAESAGRLAKNDKIDAEMIAWFAETFSEAPSQVDDPAHEEMKALVKGRKSLIDVRARLEMQKEHELPALVRKAHARLLKKLAGEIATIETAVVAKIKTTPAFAKRAEIIQSVPGFAEATAITLLAGLPELGQVSNEVAAALVGVAPYDDDSGKRHGQRCIKGGRRWVRNALYMPCVGAATLNNPVFKVFYQRLIAKGKAPKVALVACMRKLLVILNTMIARAEKWDTKRYQML

SEQ ID NO: 19608 - protein, 343 aa, unidentified
  source 1..343: note = protein_348c445
  REGION 7..149: note = RuvC_domain
  SITE 10: note = RuvC_P1
  SITE 53: note = RuvC_P2
  SITE 88: note = RuvC_P3
  SITE 90: note = RuvC_P4
  SITE 93: note = RuvC_P5
  REGION 212..305: note = Tnp_domain
  SITE 220: note = Tnp_P1
  SITE 250: note = Tnp_P2
  SITE 258: note = Tnp_P3
  SITE 259: note = Tnp_P4
  SITE 271: note = Tnp_P5
MNDVITIGVDLAKNVFQVHGVDAEGAVIVRRRLRRGQVLPFFKKQRPCLVGMEACATSHHWAREIAALGHQVRLMPPRYVKPYVKRNKNDMADAEAICEAVTRPTMRFVEIKTADQQSVLMLHRTRHLFVRQRTTLINALRAHLAEFGIVAGVGRNGLERLLKVIEDGEDDRVPPSARDCLLALRDQLEMVRHQIFEADRRILAWHSSSEISRRLDDIPGVGPLIATALVASIPNPHAFKSGRDLAAWIGLVPRQNSTGGKERLGHISKAGNRYLRMLLVVGALSVIRRAKQTGYTRRPWLAELLQRRSTKIAAIALANKNARTAWAMMAHGTFYQEPESQAA

SEQ ID NO: 19609 - protein, 408 aa, unidentified
  source 1..408: note = protein_db398ab
  REGION 5..165: note = RuvC_domain
  SITE 8: note = RuvC_P1
  SITE 62: note = RuvC_P2
  SITE 102: note = RuvC_P3
  SITE 104: note = RuvC_P4
  SITE 107: note = RuvC_P5
  REGION 273..359: note = Tnp_domain
  SITE 281: note = Tnp_P1
  SITE 312: note = Tnp_P2
  SITE 320: note = Tnp_P3
  SITE 321: note = Tnp_P4
MRLFVGDDWAEDHHDVELMDATGRRLATARLPEGVAGMARLHAMIGERVGEDPDEDVEVVVGIETDRGPWVAALVAAGYTVMAVNPLQAARFRDRLGMSGAKSDAGDAHVLADMVRTHAHELRPVAGDSARAAAIKVVARTHKTLIWERTRHTQRLRHALRDYFPAALVAFADLDAADTLELLAKAPTPAQAARLTSPQISAALKRARRRNVAEKAAVIQTALRAEHLGQPEVVADAYAASVQALIAVLIVLNTQVTTLQGQVEAHFGQHPAAEIITSQPGLGPILGARVLAEFGDDPHRYTCAKARKNYAGTSPITRASGKKKAVLARFVHNDRLIDALMTQAFAALKASPGARAYYDRHRARGASHNAALRQLANRLVGILHGCLKTGTLYDETTAWSHHAENVAA

SEQ ID NO: 19610 - protein, 403 aa, unidentified
  source 1..403: note = protein_99a818f
  REGION 10..164: note = RuvC_domain
  SITE 13: note = RuvC_P1
  SITE 61: note = RuvC_P2
  SITE 101: note = RuvC_P3
  SITE 103: note = RuvC_P4
  SITE 106: note = RuvC_P5
  REGION 297..357: note = Tnp_domain
  SITE 309: note = Tnp_P2
  SITE 317: note = Tnp_P3
  SITE 318: note = Tnp_P4
  SITE 330: note = Tnp_P5
MDIGDIEVFIGIDVGKSEHWATALSRDGQKVLDKALPNDEERLRALYKKLADHGNLLVVVDQPATIGALAVAVAQEAGFTVGYLPGLSMRRIADLTPGSAKTDAKDAAVIAGAARSMPHTLRAVTTSDEEAAALSMLTGFDLDLARQVNQTANRIRGLYTQIHPALEAVVGPWLEHDAILEVIAAWPTPAELKRAGKTRIDARLKKHGCRRHATWAGQIVSALKHQTVVVAGTDAAAVVLPHLARQLITPRAQRADVAAQVETLVQAHPLYQVLTSMPGIRGPGRRRPCWPRPWARPPGTGAQLASYAGLAPVTRRSGSSIRGEHVSHGGNKRLKRAMFLSAFASLRSDPVSRAYYQRKRDQGKRHNQAVLALAHRRILTPHAMIRNGALYDPQPATKLPAAA

SEQ ID NO: 19611 - protein, 312 aa, unidentified
  source 1..312: note = protein_115ca27
  REGION 6..148: note = RuvC_domain
  SITE 9: note = RuvC_P1
  SITE 53: note = RuvC_P2
  SITE 93: note = RuvC_P3
  SITE 95: note = RuvC_P4
  SITE 98: note = RuvC_P5
  REGION 189..273: note = Tnp_domain
  SITE 197: note = Tnp_P1
  SITE 226: note = Tnp_P2
  SITE 234: note = Tnp_P3
  SITE 235: note = Tnp_P4
  SITE 246: note = Tnp_P5
MAKDTIGIDVSKDRLDAFWHSQDAALSLPNTVEGFAQLCTWLGKNKGVLVVFEATGAYHRGLERYLSLAGQPFIKVNPKQARRFAQAIGRLAKTDSVDARMLARMGVVLDLAPQGIEGEDVHDLRELLTARRAMVKDQITAKTRLATASNPLVKDQLCRRIDDIDTDIKALDQVIAQIAQQRGTLDERIRRLMTIPGIGRLTATTLVIDMPELGHLDSKKIAALAGLAPMTQQSGKWQGKERIIGGRALLRRAIYMPALVAIRFNHDFRDKYQQFVNAGKAKKVAITAVMRRIIVLANTLLREGRDWQPVRP

SEQ ID NO: 19612 - protein, 347 aa, unidentified
  source 1..347: note = protein_28856bf
  REGION 10..152: note = RuvC_domain
  SITE 13: note = RuvC_P1
  SITE 56: note = RuvC_P2
  SITE 91: note = RuvC_P3
  SITE 93: note = RuvC_P4
  SITE 96: note = RuvC_P5
  REGION 217..304: note = Tnp_domain
  SITE 225: note = Tnp_P1
  SITE 255: note = Tnp_P2
  SITE 263: note = Tnp_P3
  SITE 264: note = Tnp_P4
  SITE 276: note = Tnp_P5
MESTVNLPVVGMDIAKNVFQLHVVDTKTGEVQRHKLKRDHVAAFFANHERSLVAMEACGGAHHWSRTLRRLGHEVKLLPAKHVRPFVLRDKTDARDAQAIWVAAQQPHIRAVPVKSEQQQACLALHRMRAQLMKMRIMQTNALRGLLYEFGIVLPEGHQALLKRIPDELAKAQENGRLSEIVVVSVQEQLKRISHLQQDIDQLDRRLVQLVKQNFQMQAIQTIPGIGPLTATALVATATELSSFDSGRQFAAWLGLTPRQTGTGGKTRQLGISKRGDAYVRTLLMHGARAVICRSRQTAWIQQLLARRPFSVVVAALANKLARTVWALLTRGKAFDQAQWEVAGATV

SEQ ID NO: 19613 - protein, 418 aa, unidentified
  source 1..418: note = protein_d8cfa64
  REGION 14..172: note = RuvC_domain
  SITE 17: note = RuvC_P1
  SITE 69: note = RuvC_P2
  SITE 109: note = RuvC_P3
  SITE 111: note = RuvC_P4
  SITE 114: note = RuvC_P5
  REGION 280..366: note = Tnp_domain
  SITE 288: note = Tnp_P1
  SITE 319: note = Tnp_P2
  SITE 327: note = Tnp_P3
  SITE 328: note = Tnp_P4
MVVVPRMGERVLFLGDDWSEEHHDVELMDAAGRVLARARLPEGAAGMARLHAMIGGQLGDADDAEVAVGIETDRGLWVQALVAAGYVVFGINPLQAARYRERHGVSGAKSDTSDAHMLADMVRTDSHQLRPVAGDSDGAQAVKVVARAHKTLIWERTRHVQRLRHQLLDFFPAALSAFDDLDAPDALELLAKAPDPASAAKLSTAQIDAALRRARRRNRADKTAAIKTALRAPQLAQPPQVTAACAAVVRSLTAVITTLSGQIAVLEGQVSEHFRVHPDAEIILSQPGLGPVLGARVLAEFGDDPHRYASAKARKNYAATSPITRQSGKKKTVMARYVHNDRLRDALDGQAFAALTASPGARACYDAHRAAGAGHRAALRKLANRLVGILHGCLKNRTSYDEAIAWPEYASQEIKAAA

SEQ ID NO: 19614 - protein, 400 aa, unidentified
  source 1..400: note = protein_6fc639e
  REGION 11..166: note = RuvC_domain
  SITE 14: note = RuvC_P1
  SITE 63: note = RuvC_P2
  SITE 103: note = RuvC_P3
  SITE 105: note = RuvC_P4
  SITE 108: note = RuvC_P5
  REGION 273..358: note = Tnp_domain
  SITE 281: note = Tnp_P1
  SITE 311: note = Tnp_P2
  SITE 319: note = Tnp_P3
  SITE 320: note = Tnp_P4
  SITE 332: note = Tnp_P5
MIDTSDIGAFLGLDVGKGEHHATALTPAGKKAFDKRLPNSEPKLRKVFAKLIAKHGTVLVVVDQPASIGALPLAVARDAGCKVAYLPGLTMRRIADLYPGEAKTDARDAFIIADAARAMPHTLRSIELTDETVAELEMIVGFADDLAGEVTRVANRLRGLLTQIHPHLERVVGPRIQHPAVLTLLERFGSPAQIRKAGRRRLVTLIRPKAPRMAERLVDEIFTALDEQTVVVPGTDAAALIVPSLAASLQAVLDQRKILATRIEELLANHPLSKVLTSMPGIGVRTGARILIDIGDGSSFPSAAHLASYAGLAPATRSSGSSIRGEQPSRGGNKQLKRAFFLSAFAALADPASRTYYDKKIKQGKHHTQAILCLARRRADVLFAMLRDGTFYQPQPAPSA

SEQ ID NO: 19615 - protein, 309 aa, unidentified
  source 1..309: note = protein_77ea57b
  REGION 5..152: note = RuvC_domain
  SITE 8: note = RuvC_P1
  SITE 52: note = RuvC_P2
  SITE 92: note = RuvC_P3
  SITE 94: note = RuvC_P4
  SITE 97: note = RuvC_P5
  REGION 186..270: note = Tnp_domain
  SITE 194: note = Tnp_P1
  SITE 223: note = Tnp_P2
  SITE 231: note = Tnp_P3
  SITE 232: note = Tnp_P4
  SITE 243: note = Tnp_P5
MSAYAGIDVSKATLQVALFPKADDLCVPNTEEGLASIAEYLSAHQVERVLVEATGGYERLSVKLLANAGFKVQRINPVRSRQFALAMGKRAKTAPIDAQMLAMFASSLEEKGFAKPDEEREVLLELVNLRGNLLQQRDDNRRRIKQAVLPCVVEIYLALEASLKVQIKSVDQLVAAQTRRVDSELLQRLEAVKGVGAVTIASLFCYLPELGDLSRGQIAALAGVAPYNNDSGTKTGKRQIYGGRSKLRRAAYMCALVMVRYNPDFKERYARLRAKGKCAKVALVACMRVLLIRLNAMARDGTPWRDQVV

SEQ ID NO: 19616 - protein, 427 aa, unidentified
  source 1..427: note = protein_a17deb7
  REGION 19..178: note = RuvC_domain
  SITE 22: note = RuvC_P1
  SITE 75: note = RuvC_P2
  SITE 115: note = RuvC_P3
  SITE 117: note = RuvC_P4
  SITE 120: note = RuvC_P5
  REGION 286..372: note = Tnp_domain
  SITE 294: note = Tnp_P1
  SITE 325: note = Tnp_P2
  SITE 333: note = Tnp_P3
  SITE 334: note = Tnp_P4
MLPGVVDVETGEARVVLFVGDDWAEEHHDVEVMDAAGQRLARARLPEGVAGVARLHAMIAEQLGHEVDEAEVLVGIETDRGPWVAALIAAGYRVFAINPLQVSRYRERHSVSGAKSDAADAHMLADMVRTDAHQLRPVAGDTAEAEAVKVVSRAHKTLIWERTRHTQRLRQALREYFPAALEVFDDLDAADTLELLAKAPDPASAAALTLAQIRGALHRARRRDVDEKAARIQAVLRGEHLGRAEVITAAYAATTRSAAAILGTLNEQVKVLESQVDANFGQHPDAEIILSQPGMGRILGARVLAEFGDDPARYTTAKNRKNYAGTSPITRASGKKKAVLARFVHNDRLVDALISQAFSALQASPGARGYYDQQRARGAGHNAALRQLANRLVGILHGCLKTRTPYDEATAWSHHHANHTGQEAIAA

SEQ ID NO: 19617 - protein, 404 aa, unidentified
  source 1..404: note = protein_e726aab
  REGION 6..162: note = RuvC_domain
  SITE 9: note = RuvC_P1
  SITE 60: note = RuvC_P2
  SITE 100: note = RuvC_P3
  SITE 102: note = RuvC_P4
  SITE 105: note = RuvC_P5
  REGION 271..358: note = Tnp_domain
  SITE 279: note = Tnp_P1
  SITE 310: note = Tnp_P2
  SITE 318: note = Tnp_P3
  SITE 319: note = Tnp_P4
  SITE 331: note = Tnp_P5
MPELWAGTDAGKAEHHCTAIDTNGKTVLSRRVPNNETELLELLGDVLDLADGAPVTWAVDLNAGGAALWIALLVSHGQKLIYIPGRTVHHASAAYRGSGKTDAKDAFVIADTARMRRDLQPLQETGEIAVDLRILTARRIDLSADRTRAINRLRAQMLEYFPALERAFDYSVSKSALVLLTGYQTPAALRRIGRARLATWLKNHGVRTANTAKSTADASVTAAEAQFTAVPGEKTAAKMVHTLAREVMSLDQEIAELEALIEGRFREHPDAGVITSMPGIGDMLGAEFVAATGGDMAVFGSPDRLAGVAGLAPVPRDSGKISGNLRRPRRYSRRLLRMFYLSAQVAAMRCPVSKAFYRRKRVEGKSHKQAILALARRRLNVLWALIRDGRTFDARLPGPAAAAA

SEQ ID NO: 19618 - protein, 411 aa, unidentified
  source 1..411: note = protein_244236b
  REGION 5..164: note = RuvC_domain
  SITE 8: note = RuvC_P1
  SITE 61: note = RuvC_P2
  SITE 101: note = RuvC_P3
  SITE 103: note = RuvC_P4
  SITE 106: note = RuvC_P5
  REGION 272..358: note = Tnp_domain
  SITE 280: note = Tnp_P1
  SITE 311: note = Tnp_P2
  SITE 319: note = Tnp_P3
  SITE 320: note = Tnp_P4
MRLFVGDDWAEDHHDVEVMNEAGKVLARKRLPEGAAGMAGLHEVIGRRLGEDADGAEVAVGIETDRGLWVAALVAAGYAVFGVNPLQASRYRERHGVSGAKSDSGDARMLADMVRTDSRQLRAVAGDSAEAEGLKVLARTHKTMIWERTRQVQRLRHQLLAYFPAALEAFDDLDAPDALELLGKAPDPARAARLTRAQVSAALKRAGRRNITDKATAILAALRSPQLGQPPAVTAAYAATVRSLIAVITVLNEQVKALQGQVEADFGRHPDAEIYRSQPGLGAVLGARVLAEFGDDPGRYADGKCRRNYAGTSPLTRASGKKKVVAARFIHNDRLVDALNAQAFASLKNSPGARALYDELRARGIEHNDALRRLANRLVGILHGCLKTRTLYDEATAWGHRQNLSQSSVAA

SEQ ID NO: 19619 - protein, 341 aa, unidentified
  source 1..341: note = protein_f058212
  REGION 10..163: note = RuvC_domain
  SITE 13: note = RuvC_P1
  SITE 65: note = RuvC_P2
  SITE 105: note = RuvC_P3
  SITE 107: note = RuvC_P4
  SITE 110: note = RuvC_P5
  REGION 206..293: note = Tnp_domain
  SITE 214: note = Tnp_P1
  SITE 244: note = Tnp_P2
  SITE 252: note = Tnp_P3
  SITE 253: note = Tnp_P4
  SITE 266: note = Tnp_P5
MTDASPTLFVGIDIAAKTLAAAWLRPGEAVSRLITLAQSPQGFATLHERLGQTGCVPAEVHVVMEATGSYWIALATTLAHTGYRVSVINPAQAHHFAKALLKRAKTDAIDAQTLAHLAALLKPALWTPPPAVYYEVQQRLAQRDALLDVQRQLMNQLHALLFAPLVVASVKARMEELIEILGQQITALDAEVREALAADAAWAASAARLQSIKGVGLITAAWLLVTTLNFTICSTPEAAVAYAGLAPNPYESGTSVRGRARIGHTGNGRLRTALYLATLSAAQHNPVIKAFDERMRAAGKPAKVARCAAARKLLHIAWAVVCREQDFDPEYAQRQMQPVVA

SEQ ID NO: 19620 - protein, 366 aa, unidentified
  source 1..366: note = protein_394a61b
  REGION 13..166: note = RuvC_domain
  SITE 16: note = RuvC_P1
  SITE 64: note = RuvC_P2
  SITE 105: note = RuvC_P3
  SITE 107: note = RuvC_P4
  SITE 110: note = RuvC_P5
  REGION 228..313: note = Tnp_domain
  SITE 236: note = Tnp_P1
  SITE 266: note = Tnp_P2
  SITE 274: note = Tnp_P3
  SITE 275: note = Tnp_P4
  SITE 286: note = Tnp_P5
MSAASSIDRRVVIAIDPHKASWTAAAVDASLRPLDTIRAPVTRDGYRSLQRFARTWRANMWAIEGAHGMGAPLTAQLARDGVNVVDVPAKLAARVRLLSTGHGRKNDDADALSVGIAALNAGHLTTVTIDDAATALRAIVEHREDLVKTRTQTVNRLHVLLTKLSPGGVSGTMTAERAATLLRTIRPRDAAAKALRALAVDIVSDVRHLDRRISKAAGDIDSAVTASGTTLTKLHGIGTISAAKILSRVGPIRRFRSAAAFATYTGTAPIDVSSGEVTRHRLSRAGDRQLNACLHTMALTQIRSNTPGRTYYLRKRSEGKSKREAMRCLKRRLSDVVYRQLTREANPLKADPGGHSGATLLSRAVG

SEQ ID NO: 19621 - protein, 412 aa, unidentified
  source 1..412: note = protein_79827c1
  REGION 4..161: note = RuvC_domain
  SITE 7: note = RuvC_P1
  SITE 57: note = RuvC_P2
  SITE 98: note = RuvC_P3
  SITE 100: note = RuvC_P4
  SITE 103: note = RuvC_P5
  REGION 276..359: note = Tnp_domain
  SITE 283: note = Tnp_P1
  SITE 313: note = Tnp_P2
  SITE 321: note = Tnp_P3
  SITE 322: note = Tnp_P4
  SITE 335: note = Tnp_P5
MNAAGIDVSKGKSMVAVYRPFNEMVAKPFEVRHTGSELKQLADYLKSLDGETRVVMEHTGRYYEQIAQYLHDEGIYVSAVNPKLIKDYGTGNTLRHVKTDKADAKKIAKFGIDRWAELRQYASMDTIRYQLKMLNRQCGLYTKTKTMMKNNLIALLDQTYPGVNALFDSPVREDGTQKWVDFAASFWHIDYVRGMSQTAFSERYRKWCRRHGYNFSSDKVVKIYSKAQDQIAMMPKNALTKLLVKQAIDALNAVSATLERLKAEMLQLASQLPEFPVVMAMRGVGDSLGPQLMAEIGDVTRFAHRGAITSFAGVDPGANQSGAHEAKSVRTSKSGSPELRKDLFLVMDCLLKTAPPNDPVFLFMDKKRAEGKPYLVYMTAGANKFLRIYYGRVKEYLVSLETSPAPDSSGHI

SEQ ID NO: 19622 - protein, 340 aa, unidentified
  source 1..340: note = protein_081cf84
  REGION 6..148: note = RuvC_domain
  SITE 9: note = RuvC_P1
  SITE 52: note = RuvC_P2
  SITE 87: note = RuvC_P3
  SITE 89: note = RuvC_P4
  SITE 92: note = RuvC_P5
  REGION 211..299: note = Tnp_domain
  SITE 219: note = Tnp_P1
  SITE 249: note = Tnp_P2
  SITE 257: note = Tnp_P3
  SITE 258: note = Tnp_P4
  SITE 270: note = Tnp_P5
MQPTIIGLDLAKSVFQVHAVDEHGTVILTKRLRRDGVRTFFANLPACIVGMEACASAHFWAREISRLGHTVRLMPPQYVKPYVKRHKNDQADAEAICEAVQRPSMRFVPIKTEEQQSTLVIHRVRETLVRQKTQLINALRGHLAEFGIVAPQGAQKVTQLIAQLADPGDEQVPAAAKAVLRVLVDQLRETERRVSDLDGQLAEQAKRDETCRRLLTIPGIGPIVATALVATIGDANAFRSGRHLAAWLGLVPRQNSSGGKERLGGISKAGDGYLRRMLVHGARALLRWWRTSSPWVAKLLERRPVNVAVVALANKTARIAWAVMTRGETYRRPEPVPTGA

SEQ ID NO: 19623 - protein, 386 aa, unidentified
  source 1..386: note = protein_7f8a1d6
  REGION 5..158: note = RuvC_domain
  SITE 8: note = RuvC_P1
  SITE 56: note = RuvC_P2
  SITE 97: note = RuvC_P3
  SITE 99: note = RuvC_P4
  SITE 102: note = RuvC_P5
  REGION 220..305: note = Tnp_domain
  SITE 228: note = Tnp_P1
  SITE 258: note = Tnp_P2
  SITE 266: note = Tnp_P3
  SITE 267: note = Tnp_P4
  SITE 278: note = Tnp_P5
MPVIIGMDPRKRSATIEVITELGDVVTIGKFGTDQSGYAEMLSFGRRFPERTWAVEGCNGVGRNVAHRLVHDGEAVLDVPAKLSAQVRVFATGNGRKTDPVDAHSVALAVLRAPNLVRVQVDPELVVLGMLVDRRDELGRSGTQTVNRLHRLLLELFPGGAKKFLSATQARALIATIKPRDIVGKTRRRLTVELIAELETIDKKIKTAEKDLRELVIARGSTLLDLHGIGLSGAARLLADVADIHRFASRDRFASWNGTAPLDASSGEQQRHRLSRAGNRRINRTLHIMGVVQLRNSTAGRVYFDGRKAAGKTSMEAMRALKRRLSNVVYARMLADQRRREAAGPGGHSGTTLQSSVTGLTPDTGPSDKPQPEPANRQPTPARAIP

SEQ ID NO: 19624 - protein, 343 aa, unidentified
  source 1..343: note = protein_41716c9
  REGION 7..149: note = RuvC_domain
  SITE 10: note = RuvC_P1
  SITE 53: note = RuvC_P2
  SITE 88: note = RuvC_P3
  SITE 90: note = RuvC_P4
  SITE 93: note = RuvC_P5
  REGION 212..297: note = Tnp_domain
  SITE 220: note = Tnp_P1
  SITE 250: note = Tnp_P2
  SITE 258: note = Tnp_P3
  SITE 259: note = Tnp_P4
  SITE 271: note = Tnp_P5
MEKITIIGIDLAKRFFQLHGATADGQPMLRKKVSRSQLLSFLARQSRAVVAMEACATAHYWGRAIVELGHEVRLIPPIYVKPFVRRQKNDATDAEAIVEAASRPTMRFVAVKTEDQQARAMIFRTRDLLVRQRTQLINALRGHLAEHGIVAAQGIAQVSRLAAALNEAVDATLPALVRELGQQYLEHIDRLSTEITGLEQRLRRLSKDDETAVRLQTVPGIGPITAAAIEAFAPPMTTFRRGRDFAAWLGLVPRQHSSGGKQRLGRTSKMGQRDIRRLLIIGAMGVIRWTIRTGPAEGSWLARMLARKPRLVVAIALANKMARSVWAMLSRGEDYRGSAMVAA

SEQ ID NO: 19625 - protein, 412 aa, unidentified
  source 1..412: note = protein_8c06e53
  REGION 4..170: note = RuvC_domain
  SITE 7: note = RuvC_P1
  SITE 67: note = RuvC_P2
  SITE 107: note = RuvC_P3
  SITE 109: note = RuvC_P4
  SITE 112: note = RuvC_P5
  REGION 278..364: note = Tnp_domain
  SITE 286: note = Tnp_P1
  SITE 317: note = Tnp_P2
  SITE 325: note = Tnp_P3
  SITE 326: note = Tnp_P4
MLFVGDDWAEDHHDVEIVNEQGRQLARRRLPEGLDGITRLHALIAQFFPEEWADLEPAEAASRVKVGIETERGPWVQALIAAGYEVFAINPMSVARYRERHSTSGAKSDSGDAHVLAEIVRLDRAHHRPVAGDSELGEAIKLVARSHQSLVWDRTRHVLRLRGVLREFFPAALEAFADLDAADTLELLAIAPDPDRAARVSKAKITAALRRANRRSVEEKAAHIQSVLRAPALRQPAQVQAAFAAITASQVRLITTLNGEIAQLGEVVAHHFGRHPDAEIYASQPGLGVILSARVLAEFGDDRTRFADAKARKNYAGTSPITRASGTRKVVLARYARNTRLGDAAQQWAFGALKGSPGARAYYDALRARKIGHQAALRQLANRLVGILHGCLKTGTLYDENTAWAHHHTAAA

SEQ ID NO: 19626 - protein, 343 aa, unidentified
  source 1..343: note = protein_d3b3e38
  REGION 6..149: note = RuvC_domain
  SITE 9: note = RuvC_P1
  SITE 54: note = RuvC_P2
  SITE 89: note = RuvC_P3
  SITE 91: note = RuvC_P4
  SITE 94: note = RuvC_P5
  REGION 213..299: note = Tnp_domain
  SITE 221: note = Tnp_P1
  SITE 251: note = Tnp_P2
  SITE 259: note = Tnp_P3
  SITE 260: note = Tnp_P4
  SITE 272: note = Tnp_P5
MKLSRIGIDLAKNVFQLHGVDRHGMALWKRRLKRDQWLKAVLDKAEPGCEIGMEACTGAHHWARKLQSRGYTVRMMPPQFVKPYVKSNKNDANDAEAICEAMNRPNMRFVAVKSVEQQDIQATHRIRAELKDQRNAKANQIRGLVAEYGLVAPLTLRALRAAIPCWLEDAENGLTDHFRSLLHGVQVDLVALDDRVLELDREIEKLAISNEITKRLQQLRGVGPMVATALVATVGNAEQYHKGRQMAASLGLTPRQHSSGDKYRLLGITKRGDVYLRTLLIHGARAVVSQAKHRDDRLSRWVTGIAKRSHTNVAAVALANKTARMAWAMLRNETNYDPDFAIR

SEQ ID NO: 19627 - protein, 340 aa, unidentified
  source 1..340: note = protein_b13cfbc
  REGION 6..148: note = RuvC_domain
  SITE 9: note = RuvC_P1
  SITE 52: note = RuvC_P2
  SITE 87: note = RuvC_P3
  SITE 89: note = RuvC_P4
  SITE 92: note = RuvC_P5
  REGION 212..300: note = Tnp_domain
  SITE 220: note = Tnp_P1
  SITE 250: note = Tnp_P2
  SITE 258: note = Tnp_P3
  SITE 259: note = Tnp_P4
  SITE 271: note = Tnp_P5
MKIKRIGIDLAKKVFQIHAVNEQEEVVIRKSVNRSQLKKLLHNIEPTTIAMEACGTSHYWAREMMALGHNAKLIPPQFVKPYVKRHKNDSVDAEAICEAASRPNMRYVTVKTVDQQVMQSIHRVRSRIVRSRTALINEIRGVLAEFGIVIDDLGVSAVRRKIPELLEDGDNQLPFVFRELLSELYEELLSTDKRLESMTKKIVQHGVVDERVKRLQDLPGVGPITASAIVSSIGDGKQFKKSRDFSAWLGMVPNQHSSGGKNCLGSISKRGDSYLRTLLIHGARSCMKVVERQPGRKSDWLKKLMGRRNKNIATVALANKHARIIWAMLTRNEHYCAGTM

SEQ ID NO: 19628 - protein, 344 aa, unidentified
  source 1..344: note = protein_fcbba44
  REGION 7..148: note = RuvC_domain
  SITE 10: note = RuvC_P1
  SITE 53: note = RuvC_P2
  SITE 88: note = RuvC_P3
  SITE 90: note = RuvC_P4
  SITE 93: note = RuvC_P5
  REGION 213..297: note = Tnp_domain
  SITE 221: note = Tnp_P1
  SITE 251: note = Tnp_P2
  SITE 259: note = Tnp_P3
  SITE 260: note = Tnp_P4
  SITE 272: note = Tnp_P5
MSQVTIIGLDIAKNVFQAHGADERGAMVFSRKLTRAKLLDFFTGQPACVVALEACGGAHHWARELQAMGHEVRLIPPAYVKPFVKRNKNDAIDAEAICEAAQRPGMRFLAVKSEAQQAAGLVFRTRDLIVRQRTQLINAIRGHLAEYGWVAPRGTTNMTLLASLIDEEEMASTLPAAALPMFKLMLDLLAELDDRVATLDREIARRAMEDEAARRLMTIPGIGPIAATAILALAPPVETFRKGRDFAAWLGLTPRQHSTGGKQRLGSISRMGERTIRRLLITGGSSMVRQASRFGAPAGSWLEKMLARKPRMLVSVALANKMARMVWALLTKAEDYRAPAAVAA

SEQ ID NO: 19629 - protein, 338 aa, unidentified
  source 1..338: note = protein_3742100
  REGION 16..166: note = RuvC_domain
  SITE 19: note = RuvC_P1
  SITE 66: note = RuvC_P2
  SITE 106: note = RuvC_P3
  SITE 108: note = RuvC_P4
  SITE 111: note = RuvC_P5
  REGION 212..295: note = Tnp_domain
  SITE 220: note = Tnp_P1
  SITE 247: note = Tnp_P2
  SITE 255: note = Tnp_P3
  SITE 256: note = Tnp_P4
  SITE 268: note = Tnp_P5
MRNAPSINVFQDCLSIGIDVSKDELAIVGVSADEPYLKCIRNEMKTIKAFMRKLQQSGYRGKLICESTGHYHLKLALVCHELGLELIVLNPLQSSKHSKARIRKTKTDPQDALTLATMALTEPKLPQPLQLTRAKALIRLKMGQLASVEKQLQQFNQSRAQYEETYAELGLALSPSQLALREHSKTLTRLRKQLEKELEGLLSQALADDECLAYLRSMPGFSDVVAGLVGNLDRTVKGADSWTAFVGLDVSVRQSGKWKGYGKLTKRGNGYMRKRLFQASWGACLNYDYVRAYYDHLKADGRKHAEAVCIIARKLLRIAYHVVTKKIPFDPKTAFAQN

SEQ ID NO: 19630 - protein, 379 aa, unidentified
  source 1..379: note = protein_39dccc1
  REGION 37..178: note = RuvC_domain
  SITE 40: note = RuvC_P1
  SITE 83: note = RuvC_P2
  SITE 118: note = RuvC_P3
  SITE 120: note = RuvC_P4
  SITE 123: note = RuvC_P5
  REGION 243..330: note = Tnp_domain
  SITE 251: note = Tnp_P1
  SITE 281: note = Tnp_P2
  SITE 289: note = Tnp_P3
  SITE 290: note = Tnp_P4
  SITE 302: note = Tnp_P5
MEAKRKDPLTLRHRCARVEMSSNHSQDRGSDMQVTTYGVDLAKSVFQVHWVETDSGEVRRKMLTRGQLQAFFACRAPGVVAMEACGSAHHWGRTLKALGHQVRVISSQFVRPFVKSNKTDAADAQAIWEAAQRPEMRFVALKSEQQQALMGLHRIRAQLVKQRTMQANQVRGLLYEFGVVVPKSWRALLAQAAPILADASRGEIPDLIRGELQQQLQGLRDLTGRIEQLERSIGAYRAQDEQCRRIEAIPGVGLLSSTAIVGSVGDARTFRSGREFAAFLGLVPRQSGTGGRVKLLGISKRGDPYLRTLLIHGARAVVNHSSRPGRSMPRWLRELLSRRPKNVAIVALANKIARTIWALLAHERTFDDRWGQAMPIPVL

SEQ ID NO: 19631 - protein, 427 aa, unidentified
  source 1..427: note = protein_7d2323c
  REGION 40..194: note = RuvC_domain
  SITE 43: note = RuvC_P1
  SITE 91: note = RuvC_P2
  SITE 131: note = RuvC_P3
  SITE 133: note = RuvC_P4
  SITE 136: note = RuvC_P5
  REGION 301..385: note = Tnp_domain
  SITE 309: note = Tnp_P1
  SITE 338: note = Tnp_P2
  SITE 346: note = Tnp_P3
  SITE 347: note = Tnp_P4
  SITE 359: note = Tnp_P5
MDADATTVRPADEAGAPLEYVEVALHPSQGIDVSDVAVFLGIDVGKAKHYAVALDRSGTALLQAELPQDEARIRALIEGLMTIGTVLTVVDQPASIGALPVAVARAVGTQVAYLPGLAMRRLADLHPGEAKTDARDSFVIASAARSTPHALRSLELDDEQRAELAMLAGFDDDLQTSIVSATNRLRDLLTQIHPALERAVGPDLERPGALDLLMKYPGPEALCLAGRTRIRKVVATRSPRIADRLTDAVCDALTRQTVVVTGTTAAAQVVPRLAAQLSMLREQRRQIAEQVERLVEAHPLSPVLTSMPGVAVRTATRILTEVVGKDFPTPGHLASYAGLAPVSRRSGSSIRGEHAPRGGNRRLKRALFLSAFASLSDPASRAYYDRKRAERKTHNQALLALARRRCDVLYAMLRDHTPYDHEHGHAA

SEQ ID NO: 19632 - protein, 393 aa, unidentified
  source 1..393: note = protein_77c2eef
  REGION 1..150: note = RuvC_domain
  SITE 47: note = RuvC_P2
  SITE 87: note = RuvC_P3
  SITE 89: note = RuvC_P4
  SITE 92: note = RuvC_P5
  REGION 258..344: note = Tnp_domain
  SITE 266: note = Tnp_P1
  SITE 297: note = Tnp_P2
  SITE 305: note = Tnp_P3
  SITE 306: note = Tnp_P4
MEVMDSTGRRLAKARVPEGVAGMARLHAIIGDLVGDEDTDEVEILVGIETDRGPWVGALVAAGYTVLAVNPLQASRFRDRLGVSGAKSDAGDAHVLADMVRTHSHELRPVAGDSARAEAVKVVARTHKTMIWERTRHTQRLRHALRDYFPAALTAFEDLDAADTLELLAKAPTAAQAARLTIAQISAVLERARRRDVAAKAAIIQAALRSEQLGQPEVVTSAYAASVQALLAVLGVLNTQIKTLEGQVDAHFGQHPAAEIILSQPGLGPILGARVLAEFGDDPTRYASAKARKNYAGTSPITRASGKKKVALARFVHNDRLIDTLHAQAFSALLRSPGARAYYDRQRARGAGHNPALRQLANRLVGILHGCLKTSTLYNESTAWPQLAETATT

SEQ ID NO: 19633 - protein, 407 aa, unidentified
  source 1..407: note = protein_cd001ba
  REGION 5..164: note = RuvC_domain
  SITE 8: note = RuvC_P1
  SITE 61: note = RuvC_P2
  SITE 101: note = RuvC_P3
  SITE 103: note = RuvC_P4
  SITE 106: note = RuvC_P5
  REGION 272..358: note = Tnp_domain
  SITE 280: note = Tnp_P1
  SITE 311: note = Tnp_P2
  SITE 319: note = Tnp_P3
  SITE 320: note = Tnp_P4
MRLFVGDDWAEDHHDVEVMDGSGRRLAKARLSEGVAGMARLHAIVGELAGDDADDVEIVVGIETDRGPWVRALIAAGYTVLAVNPLQAARFRDRLGVSGAKSDAGDAHVLADMVRTHGHELRPVAGDSAEVEAVKVVARVHKTLIWERTRHTQRLRHALRDYFPAALIAFEDLDAADTLELLGKAATPVRASRLSIAQISGALKRARRRNIAEKAAVIQAALRAEHLAQPEIVATAYAASVQALIAVLTTLNTQITTLQGQVEAHFGSHPAAEIVLSQPGLGPILGARVLAEFGDDPTRYATAKARKNYAGTSPITRASGKKKVALARFVHNDRLVDALLTQAFSALTRSPGARAYYDRQRARGAGHNAALRQLANRLVGILHGCLKTGTHYDETTAWSHHTENLAA

SEQ ID NO: 19634 - protein, 346 aa, unidentified
  source 1..346: note = protein_137416e
  REGION 7..149: note = RuvC_domain
  SITE 10: note = RuvC_P1
  SITE 53: note = RuvC_P2
  SITE 88: note = RuvC_P3
  SITE 90: note = RuvC_P4
  SITE 93: note = RuvC_P5
  REGION 212..303: note = Tnp_domain
  SITE 220: note = Tnp_P1
  SITE 250: note = Tnp_P2
  SITE 258: note = Tnp_P3
  SITE 259: note = Tnp_P4
  SITE 272: note = Tnp_P5
MSYSTTVGVDLAKNVIQISVVNGRGKELLNRSLTRKKFAEFLGKQKPSLVAFESCATAHYWSRAAKRHGHEVRIIPAKAVAPFRQGHKTDSNDALAVAEAARRPNIKEAPIKSVEQQGLQAILRARDRLIQECIAQSNHMRGILLEFGIAIPLGFAALLRTLPEVLEDGDNELPDFYRPTLHRMYHRMLELREDIDAMTKEVGELVKNHPVCSRLTDIEGIGPIGAMSLYATLGSGAAFSKGREASAYVGLTPRQYSSGGKANIVGLSKCVGNRKLRSVLIQGALAYVYRMKEPRSTKDRWLRELIERAGPRRAAVALANKNVRTAWALIAQGTEYQRRPQLEMAA

SEQ ID NO: 19635 - protein, 399 aa, unidentified
  source 1..399: note = protein_d4af53a
  REGION 13..166: note = RuvC_domain
  SITE 16: note = RuvC_P1
  SITE 64: note = RuvC_P2
  SITE 105: note = RuvC_P3
  SITE 107: note = RuvC_P4
  SITE 110: note = RuvC_P5
  REGION 228..313: note = Tnp_domain
  SITE 236: note = Tnp_P1
  SITE 266: note = Tnp_P2
  SITE 274: note = Tnp_P3
  SITE 275: note = Tnp_P4
  SITE 286: note = Tnp_P5
MIDAFGGGSRVVIGMDPHKRSVTIEVMTADESFLGGGRYATDEAGFAAMGRYVSQFPDRVWAIEGCSGIGHHVAMRILATGEEVLDVPPKLSARIRAFSTGQGRKTDATDAHSIALVGTRMAGLRPVVNDEQLAVLRLLVDRRRSLGDEHTRKTSQLHQLLLELIPGGAKKDLSAAQAKALLAKVRPRDVVGKTRRRVAAELVTDLERIYARKKAANKELTELVEATGTNLLDLHGIGPSGAARLLVEVGDITRFPDRDHFASWNGTAPIDASSGDQVRHRLSRKGNRQINRVVHIMATVQLRNATEGRAYYDRRKAEGKTSMEAMRALKRRLSNIVYKTMLDDTITHAAAGSRTGPGGQRGNDSDSSAAGSQPHTNSSDKPLPGPARTHPKTPLPAAS

SEQ ID NO: 19636 - protein, 312 aa, unidentified
  source 1..312: note = protein_06c35ee
  REGION 6..152: note = RuvC_domain
  SITE 9: note = RuvC_P1
  SITE 53: note = RuvC_P2
  SITE 93: note = RuvC_P3
  SITE 95: note = RuvC_P4
  SITE 98: note = RuvC_P5
  REGION 189..273: note = Tnp_domain
  SITE 197: note = Tnp_P1
  SITE 226: note = Tnp_P2
  SITE 234: note = Tnp_P3
  SITE 235: note = Tnp_P4
  SITE 246: note = Tnp_P5
MNDITIGADISKDHIDLHSLPDGQTLRVSNDRKGFATIVRWITEKGVARIVYEPTGPYHKAFEQFMMAQGLPLSKVNPRLARRFCEATGRLAKTDRIDAELLARYGQLLEPRTLKANPQIHNDLKELHAARLALIKDRTATKNRANNLTSPLLKRHNADRLAQVERQLKAVDHAIMTMIGADASLSARFDILVSIPGVSQITAFTLLIEMPELGQLDEKAAAALSGLAPMTRQSGRWNGRAFIAGGRAIVRQALYMPALVACRFNPNLKAKYHQLKAAGKPPKVAITAVMRKLIILANALLRNKRKWTPKSA

SEQ ID NO: 19637 - protein, 392 aa, unidentified
  source 1..392: note = protein_090eaff
  REGION 4..164: note = RuvC_domain
  SITE 7: note = RuvC_P1
  SITE 62: note = RuvC_P2
  SITE 103: note = RuvC_P3
  SITE 105: note = RuvC_P4
  SITE 108: note = RuvC_P5
  REGION 267..354: note = Tnp_domain
  SITE 275: note = Tnp_P1
  SITE 305: note = Tnp_P2
  SITE 313: note = Tnp_P3
  SITE 314: note = Tnp_P4
  SITE 327: note = Tnp_P5
MLFVGIDVAKSKHDCCIIDSDGVIITDSLRISNTKEGFDTLYTSIISALHSSDFSNVKIGLESTGHYSTNITNYLYSKGFRITVLNPLVTNAFRKAGTLRKTKTDKCDAKVIATMLFSDESKSYSPSSYQIQELKSLTRHRYRMIGYRSKLKLSVTRLIDIIFPELPDFVWSIHQSSSYQLLLELPCPDEICKCHLTHLTNVISKASRGKYGREKALQLRELAADSIGSSNRALTFELQQTIRLIQSIQAEINTLDKQIKLVVDELNTPLMTIPGIRYTIAAIILAEIGDINNFSSPAKLLAFAGMEPSTYQSGKYNAAKTPMVKRGSTYLRWAIMQAARLVSMRDSTFSAYMAKKRSEGKHFNVAQTHVGKKLIRVIYSLLKNNTAFVPQM

SEQ ID NO: 19638 - protein, 339 aa, unidentified
  source 1..339: note = protein_0b5e62a
  REGION 6..148: note = RuvC_domain
  SITE 9: note = RuvC_P1
  SITE 52: note = RuvC_P2
  SITE 87: note = RuvC_P3
  SITE 89: note = RuvC_P4
  SITE 92: note = RuvC_P5
  REGION 211..297: note = Tnp_domain
  SITE 219: note = Tnp_P1
  SITE 249: note = Tnp_P2
  SITE 257: note = Tnp_P3
  SITE 258: note = Tnp_P4
  SITE 270: note = Tnp_P5
MHVTTVGLDLAKHVFQVHGIDQDGQVLIRRQLRRGELIGFFRRLPPCLIGMEACSTAHFWARELAALGHEVRLMPAAYVKPYIKRGKSDALDAAGICEAVTRPTMRFVAIKSPEQQAVLMLHRTRELLVRQRTMLVNALRGHLAEYGIIAPQGLPSVPKLREVAEKARGAALPELAWRCIRLIIAQLEEAHVRITEVEQEILAWHRTNEVSQRLETIPGVGIITASAIAATISDPGSFRSGRHLAAWIGLVPRQSGTGGKVRLGHISKQGDRYLRRLLVLGATTLLRHARGKASAAAGWINALLARRPAGIVKVAIANKLARVAWAVLQGNQGYRAAAA

SEQ ID NO: 19639 - protein, 337 aa, unidentified
  source 1..337: note = protein_41b25b3
  REGION 6..148: note = RuvC_domain
  SITE 9: note = RuvC_P1
  SITE 52: note = RuvC_P2
  SITE 87: note = RuvC_P3
  SITE 89: note = RuvC_P4
  SITE 92: note = RuvC_P5
  REGION 211..297: note = Tnp_domain
  SITE 219: note = Tnp_P1
  SITE 249: note = Tnp_P2
  SITE 257: note = Tnp_P3
  SITE 258: note = Tnp_P4
  SITE 270: note = Tnp_P5
MNITIIGLDIAKQVFHAACCNEQGKLVKKKVLKRAAVLSFFSNMPSCIVAIEACATAHYWAREIERCGHTVKLIPPQHVKAFLVGNKNDYNDALAIAVAASQHHIRVVNANTIEQQDNQALHKARQLAIRQRTAVCNQIRGLAAEYGMCISRSVSAVRQNIMVWLSDECTELSVLFKQLLFQLKEQLNMLDVSIGVFDEMINVTSKENAICQRLQSIPGVGPMIASAYFNEVGNGSAYRKGRDVSASLGLVPKQHSSGGKDVLLGISKRGNSYLRCLLVQGAKAVVSRAKKKEDKLSCWINHLVKTRGHNRACVAYANKIARMAWSITVNDTEYSAI

SEQ ID NO: 19640 - protein, 299 aa, unidentified
  source 1..299: note = protein_f466069
  REGION 4..151: note = RuvC_domain
  SITE 7: note = RuvC_P1
  SITE 54: note = RuvC_P2
  SITE 94: note = RuvC_P3
  SITE 96: note = RuvC_P4
  SITE 99: note = RuvC_P5
  REGION 191..253: note = Tnp_domain
  SITE 199: note = Tnp_P1
  SITE 228: note = Tnp_P2
  SITE 236: note = Tnp_P3
  SITE 237: note = Tnp_P4
  SITE 249: note = Tnp_P5
MTFAGIDVSKTHLDLALVSNSPKPTRLRFPNSPEGRQALLAALAHHNPAWVALEPTSAYHLPLLKLLAENRLQVALVNPYHLAAFRKAKGERQKTDRQDALLLARYAQVYHEDLRAYTLPPETLRELKALVGYREDLAGRERTILNQMEAAEWAGSKEVLALLQKELACVKGLLGEVEARIQALLATLPEAEVLMALPGVGPQVAAAVLALLPPELWGRAKRAASYAGLIPEREESGKSVERSQLSKKGLPSCGESSTWAPWWRCAMTRRCGPSTTACSRGERERSRRWWPWPTSSSGG

SEQ ID NO: 19641 - protein, 310 aa, unidentified
  source 1..310: note = protein_106a811
  REGION 8..154: note = RuvC_domain
  SITE 11: note = RuvC_P1
  SITE 54: note = RuvC_P2
  SITE 94: note = RuvC_P3
  SITE 96: note = RuvC_P4
  SITE 99: note = RuvC_P5
  REGION 190..274: note = Tnp_domain
  SITE 198: note = Tnp_P1
  SITE 227: note = Tnp_P2
  SITE 235: note = Tnp_P3
  SITE 236: note = Tnp_P4
  SITE 247: note = Tnp_P5
MIITRGFIGIDVSKHHLDVFEGGFGRGERIANRPEALAPLVARWKNGGVFVLFEATGHYDVRLRQALTAAGIAFARINPARARDFARAAGFLAKTDRIDARMLAAMAQSLAPAPAKAIDSDRQGLALAHKRRDQLVHIRQQERTRRTECHDAILLADIEAHLQWLDVRIAQWDEQIRCLLAQCERLHPIAKLLRSIPGIGPVAATTLIALMPELDVLPSKQVTAIAGLAPFNVDSGQLRGLRRIKGGRKRVRDALYMAAVAAARSHDRFRTVYRRLRAAGKPAKVALIAVARKLLVTANAVLRDKTAFQT

SEQ ID NO: 19642 - protein, 391 aa, unidentified
  source 1..391: note = protein_6046924
  REGION 4..163: note = RuvC_domain
  SITE 7: note = RuvC_P1
  SITE 60: note = RuvC_P2
  SITE 101: note = RuvC_P3
  SITE 103: note = RuvC_P4
  SITE 106: note = RuvC_P5
  REGION 266..353: note = Tnp_domain
  SITE 274: note = Tnp_P1
  SITE 304: note = Tnp_P2
  SITE 312: note = Tnp_P3
  SITE 313: note = Tnp_P4
  SITE 326: note = Tnp_P5
MICVGIDVAKDKHDCFIISSEGVVLADVFTIPNNREGFNCLLGRIQACAMPGNEIKVGLEATGHYSCNILGFLLDNGLDSFVINPLHTNLYRKSLSLRKTKTDRVDARTIAAMLMSDVGLKPYTDTAYHNEELKSLTRYRFDKVKERAQLKQSVARLVCILFPELEKLVPTLHMASVYALLDEFPGAQQIADAHLTHLKAVLHDASKGRYGRDRAIELREAARASIGCRMPAKSLELRHTIRLIRELDAEIDEIESAIQQIMDEIHSPITTIPGIGTRMGAMILAEVGDFSRFDSPDKILAYAGLSPSTYQSGQLTNCYAHMEKRGSRYLRFAIFNATKYVCLWDPTFAAYLAKKRAQGKHYNVAISHAAKKLVRLIYALEKSREPYHQAA

SEQ ID NO: 19643 - protein, 253 aa, unidentified
  source 1..253: note = protein_e2c7056
  REGION 2..64: note = RuvC_domain
  SITE 4: note = RuvC_P3
  SITE 6: note = RuvC_P4
  SITE 9: note = RuvC_P5
  REGION 124..211: note = Tnp_domain
  SITE 132: note = Tnp_P1
  SITE 162: note = Tnp_P2
  SITE 170: note = Tnp_P3
  SITE 171: note = Tnp_P4
  SITE 183: note = Tnp_P5
MAGKSGKNDAQAISEAVRRPHMRFVPVKDESQQAMQCLHRTRQGFIEEKTATYNRLRGLISEFGVIAPQSTGALRHMVSEQKSSLPFPVQQCIDDLLKHIDRIEDNVAEYDRILSRMAKTDHRNQRLMELKGIGPTTACALVASIGNAHDFKNGRQLAAWLGLTPSQYNCGGKSKLGRITKAGDSYLRILLVQGPRSVLIGAEKKTDSFSRWICSLVERRGYWRAVETTAAKNARLCWASLHYGNDFRLYSVS

SEQ ID NO: 19644 - protein, 344 aa, unidentified
  source 1..344: note = protein_e9774b2
  REGION 8..150: note = RuvC_domain
  SITE 11: note = RuvC_P1
  SITE 54: note = RuvC_P2
  SITE 89: note = RuvC_P3
  SITE 91: note = RuvC_P4
  SITE 94: note = RuvC_P5
  REGION 213..297: note = Tnp_domain
  SITE 221: note = Tnp_P1
  SITE 251: note = Tnp_P2
  SITE 259: note = Tnp_P3
  SITE 260: note = Tnp_P4
  SITE 272: note = Tnp_P5
MMTAPTIVGIDLGKNWFHLVGLDGQGAAVLRKKLNRKQLAEYAATAPRCVVATESCPGSQYWGRVFAQAGYEVRILPAQFVKPYLRSNKNDFNDAQAIAEAASRASMRCVPLKTTEQLELQALHRVRQRVVTERTAVINQMRALLLEHGIVIPIGRTLLIGRLPAIFAEAEHRLSPRLVGLLHRLRQRWLALDVEIEDTTRDLTAWAKQSDLCQRITTVPGIGPMIATAAVAAVGNGRMFARGRDMAAWLGIVPRQYSTGGKPTLGRISKRGNMYLRQLFIQGAQSSFLYLKRDQSSLGQWLRQVETRRHRQVVVVALANKMVRICWKVLTSEQVYEPYPARVA

SEQ ID NO: 19645 - protein, 411 aa, unidentified
  source 1..411: note = protein_f8911ed
  REGION 5..164: note = RuvC_domain
  SITE 8: note = RuvC_P1
  SITE 61: note = RuvC_P2
  SITE 101: note = RuvC_P3
  SITE 103: note = RuvC_P4
  SITE 106: note = RuvC_P5
  REGION 272..358: note = Tnp_domain
  SITE 280: note = Tnp_P1
  SITE 311: note = Tnp_P2
  SITE 319: note = Tnp_P3
  SITE 320: note = Tnp_P4
MRLFVGDDWAEDHHDVEVMDEAGKVLAKRRLPEGVAGIAQLHELIGRHLGEDADGAEVVAGIETDRGPWVTALVTAGYRVFPVNPLQASRYRERLGVSGAKSDAGDAHMLADMVRADSHQLRPAAGDSAEAEGLKVLARTHKTLIWERTRAVQRLRHQLREYYPAALEAYDDLDAPDTLELLGKAPDPARAAKLTRAQVSAALKRARRRNITDKATAILAALRSPQLGQPAAVTAAYAATVRSLIAVITVLNEQVKILQRQVEENFGRHPDAEIYQSQPGMGAILGARVLAEFGDDPHRYADGKARRNYAATSPITRASGKKKVVAARFIHNDRLVDALNAQAFTALRASPGARALYDELRARGIEHNDALRRLANRLVGILHGCLKTRTLYDEATAWSHRQNLPQSSVAA

SEQ ID NO: 19646 - protein, 269 aa, unidentified
  source 1..269: note = protein_4c1af9a
  REGION 2..75: note = RuvC_domain
  SITE 14: note = RuvC_P3
  SITE 16: note = RuvC_P4
  SITE 19: note = RuvC_P5
  REGION 138..229: note = Tnp_domain
  SITE 146: note = Tnp_P1
  SITE 176: note = Tnp_P2
  SITE 184: note = Tnp_P3
  SITE 185: note = Tnp_P4
  SITE 197: note = Tnp_P5
MPPAYVKPYVKRQKNDAADAEAICEAVTRSNMRFVETKTPEQQSCLMLHRTRHLFIRQQTAVINSIRAHLAEFGIVARVGRRGVEELLEVAADPSDGRVPELARACLIALGAQLRMLKDQILQFDRHIMAWHRSNEMSKRLDEIPGVGPALATALVSSVANPRAFRSARHFSAWIGLVPKQHSSGGKDKLGSISKQGDRYLRSLFTAGALAVIRYAKMHGTKHRPWLTALLARRPTKVAAVALASKIARMAWAMMIKGERYKEPAALAA

SEQ ID NO: 19647 - protein, 270 aa, unidentified
  source 1..270: note = protein_c794c11
  REGION 6..147: note = RuvC_domain
  SITE 9: note = RuvC_P1
  SITE 52: note = RuvC_P2
  SITE 87: note = RuvC_P3
  SITE 89: note = RuvC_P4
  SITE 92: note = RuvC_P5
  REGION 212..270: note = Tnp_domain
  SITE 220: note = Tnp_P1
  SITE 250: note = Tnp_P2
  SITE 258: note = Tnp_P3
  SITE 259: note = Tnp_P4
MKLKRIGVDLAKQVFQVHGVDSHEQVKCRKQLKRHQMLDFFRQLEPCVVAMEACGSAHYWARELGKLGHEVRLIAPQFVKPYVKGGKNDANDAQAICEAASRPTMRYVEVKTVEQQASQSVHRIRGRLIKARTALVNEVRGLLAEFGLIESRKGIAATRELLCRAIDDSDSSMPGTMRELLRGLSEELQGYDERLKKLEQLIQREAREDERVRRLMKIEGLGPISATAIVSAVGDARQFASGRQFAAWLGLVPSQYSTGGKERQIHSIAQ

SEQ ID NO: 19648 - protein, 396 aa, unidentified
  source 1..396: note = protein_0caf534
  REGION 4..158: note = RuvC_domain
  SITE 7: note = RuvC_P1
  SITE 59: note = RuvC_P2
  SITE 99: note = RuvC_P3
  SITE 101: note = RuvC_P4
  SITE 104: note = RuvC_P5
  REGION 264..354: note = Tnp_domain
  SITE 272: note = Tnp_P1
  SITE 302: note = Tnp_P2
  SITE 310: note = Tnp_P3
  SITE 311: note = Tnp_P4
  SITE 327: note = Tnp_P5
MTTIGIDIGGRTHVVARCREGQPKADREILRVGQSRAGFTALDAWLARQAEPVTLVTMESSGHYWMALASHLRRRNVSVALVNPLAAKYFAKSRLARTKSDPADARSLAEMAMRDAPSARDPLAGVELRQAARFAMTQVAEQARVCQRLVRLVELGFPELGELFDDPTCRTAREVLRVAPTAKAATRRRASTLANANSAPGRRRLGLTRAERLQAAAADSIAVPELDAEVAFEVGLLLDQFDLLEHQIKAADRRVASLLDGETARRLQTIPGVGPAITATLLAEIGDISRFTDFDQLLAFAGVHPAERSSGRKGANPETAWHMSKAGNSHLRAAAYRMAVVGIQHNPVIKAHYERKRAAGKSKMNALGHCMRKALSLVWGVWRNGQDFDPRWGLES

SEQ ID NO: 19649 - protein, 388 aa, unidentified
  source 1..388: note = protein_815dd5f
  REGION 4..160: note = RuvC_domain
  SITE 7: note = RuvC_P1
  SITE 58: note = RuvC_P2
  SITE 98: note = RuvC_P3
  SITE 100: note = RuvC_P4
  SITE 103: note = RuvC_P5
  REGION 264..351: note = Tnp_domain
  SITE 272: note = Tnp_P1
  SITE 302: note = Tnp_P2
  SITE 310: note = Tnp_P3
  SITE 311: note = Tnp_P4
  SITE 324: note = Tnp_P5
MIYVGIDIAKLNHFASAISSDGEILMEPFQFSNDADGFHMLVSRLHSLESDNIIIALESTAHYGDNLVRYLVASSFNVCVLNPIKTSSMRKNNIRKTKTDKVDTYIIAKTLMMQDSYRFVTFYDLDLMDLKQLGRFRQKAIKQRTRLKIQLTSYVDQAFPELQYFFKSGLHHKAVYALLKEAPSPQDIASMHMTHLSHLLTTASHGHFKKEQANELRVLARKSVGANDSALSIQITQTIAQIELLDSQLKKVETEMTEIMKFHDSVIMTIPGIGYINGGIILGEIGDIHRFSTPSKLLAFAGLDPSVYQSGNFQAKRTRMSKRGSRVLRYALINAAHNVVKNNATFKAYYDKKMAEGRTHYNALGHCAGKLVRVIWKMLTDEVEFNLD

SEQ ID NO: 19650 - protein, 345 aa, unidentified
  source 1..345: note = protein_b289899
  REGION 7..149: note = RuvC_domain
  SITE 10: note = RuvC_P1
  SITE 53: note = RuvC_P2
  SITE 88: note = RuvC_P3
  SITE 90: note = RuvC_P4
  SITE 93: note = RuvC_P5
  REGION 212..297: note = Tnp_domain
  SITE 220: note = Tnp_P1
  SITE 250: note = Tnp_P2
  SITE 258: note = Tnp_P3
  SITE 259: note = Tnp_P4
  SITE 271: note = Tnp_P5
MAEVTTIGLDLAKRVFQVHGVDAAGVVMVRRALRRQQVLAFFAKLPRCLVGIEACATAHYWARELASLGHDVRLIPPPYAKAYVRRNKNDPADAAAICEAVSRPSMRFVAVKTEAQQAAAGIHKVRELLIKQRTMLINTLRGLMAEFGIIVAEGPRHVSELVAILADPADARIPAPSHHGLMAIVETLRGLEQRIERVEKQIVGWGRANATCRHLITIPGYGPILSSAMTAMVVNPAGFTSARHFAASLGLVPRQDGTGGKAKLGPISKRGNGYLRRLLVNGAMSVLGSRRAKDDAWLVKLLQRKERKVVACALANKLARTGWALMMRQQDYRRPRQDQLCPDLA

SEQ ID NO: 19651 - protein, 425 aa, unidentified
  source 1..425: note = protein_6636392
  REGION 37..195: note = RuvC_domain
  SITE 40: note = RuvC_P1
  SITE 93: note = RuvC_P2
  SITE 134: note = RuvC_P3
  SITE 136: note = RuvC_P4
  SITE 139: note = RuvC_P5
  REGION 300..387: note = Tnp_domain
  SITE 308: note = Tnp_P1
  SITE 338: note = Tnp_P2
  SITE 346: note = Tnp_P3
  SITE 347: note = Tnp_P4
  SITE 360: note = Tnp_P5
MRVALRAIPRISSRRLRSRVRKQEPAAEQKGDPMIYAGVDIAKADHVIGAVDETGAQAAKPMAFKNSEAGFERCIAWLESVAQTEDDVFVGMEATGHYWMACFAHLTAAGYRVCVVNPMQVSAMRRLKGLSGVKNDRIDSLLVAETLRQGDYDQTRLATDEVQALKQLTRYHQGLKRELATVKTQAICVLDAYFPEYAGLFSDMFGAASLKVLSECPTPSEAARKRASSIAKMLSEGSHGRLGAERAAQIKAAARSSVGIRLGEDAASFQIKTMVSQIEFLNRTIAKVEREVEGLLERIEPNITTIPGVSTTTGAQIVAEVGDVKRFKNAASIVKYAGLNSGVDESGKFSAEGVPITKQGSPYLRRSLWLAANRARQYDPRLKAFYDKKRREGKPHRVAVTAVARKLCHVVYAVMRDGEPYDPSK

SEQ ID NO: 19652 - protein, 406 aa, unidentified
  source 1..406: note = protein_1396495
  REGION 4..163: note = RuvC_domain
  SITE 7: note = RuvC_P1
  SITE 60: note = RuvC_P2
  SITE 100: note = RuvC_P3
  SITE 102: note = RuvC_P4
  SITE 105: note = RuvC_P5
  REGION 271..357: note = Tnp_domain
  SITE 279: note = Tnp_P1
  SITE 310: note = Tnp_P2
  SITE 318: note = Tnp_P3
  SITE 319: note = Tnp_P4
MLFVGDDWAEDHHDIEVQDEHGRAVKRIQLSEGMAGMARFHALVAEFLPEDAEPADVLVCIETDRGPWVRALVAAGYRVFAVNPKQAARHREIISNSGAKSDKGDAHGLADMVRTRRHQLPQVAGDSDVAEAVKVVTRAHQTLLWERTRHMLRLRSALRDYFPAALEAFKPLGLTSPAVLRLLAKAPTAATAAKLTVSQISAALKGHRNIPGKAAAIQQALRTQQLGQAELVAAAYASTVRALVAVITTLNTEINNLEGEVEAHFGRHPDAEIYLSQPGLGVVLGARVLAEFGDAKNRYASAKARKNYAGTSPITRQSGKTKTVHARFVHNDRLVDALHLQASCAILHDCEVRAYYDELRARDVGHNAALRQVGNRLVGILHGCLKTGTHYDQTTAWHHRHDTQAA

SEQ ID NO: 19653 - protein, 283 aa, unidentified
  source 1..283: note = protein_2fb255a
  REGION 7..147: note = RuvC_domain
  SITE 10: note = RuvC_P1
  SITE 53: note = RuvC_P2
  SITE 88: note = RuvC_P3
  SITE 90: note = RuvC_P4
  SITE 93: note = RuvC_P5
  REGION 201..279: note = Tnp_domain
  SITE 209: note = Tnp_P1
  SITE 239: note = Tnp_P2
  SITE 247: note = Tnp_P3
  SITE 248: note = Tnp_P4
  SITE 260: note = Tnp_P5
MDQIIRIGMDTSKHVFQLHGVNAAEQPVLRKKLRRKEMLEYFRKLPATVITIEACGGSHHWARLLSTFGHEVKLIAAQLIKPYVKRGKNDAADAEALCEAMSRPTMRFVPAKRAEQQASLMLIGMRDRLVRNKTQLANSIRGYAAEFGLTAALDRIAADETLPTLARDLFAAHAREYQQLQEELDGIEAKLMAWHRADECSRRLAQIPGVGPIGASLLMMKTPGPELFKSGRHFSAWIGLTPKDHSTAGRNRLGIITRAGDEVLRSTLVLGAGARQEYFTLAP

SEQ ID NO: 19654 - protein, 270 aa, unidentified
  source 1..270: note = protein_c44de6f
  REGION 1..76: note = RuvC_domain
  SITE 16: note = RuvC_P3
  SITE 18: note = RuvC_P4
  SITE 21: note = RuvC_P5
  REGION 146..232: note = Tnp_domain
  SITE 154: note = Tnp_P1
  SITE 185: note = Tnp_P2
  SITE 193: note = Tnp_P3
  SITE 194: note = Tnp_P4
  SITE 205: note = Tnp_P5
MEVDRPDRRTRRQRGKSDPIDAEAAARAVLAGVATAPAKRRDGIVEAIRALRAARSGAIKAPTAAINQLKGLLVTAPASLREALDGRSTPVLVAACARLRPDETALADPVNATKAALRVVACRIHQLEEEIGVADQRLAKLVGRAAPRLLKLQAIGIDHAGQLLVTAGQHPERLRGEAAFAHLCGAAPIPASSGKTHRHRLHRGGDRGANRALHLAVVVRMRWCPRTRGYAEQRTKQGRSKPEIMRCIKRYLAREVYHALVADFEALNAT

SEQ ID NO: 19655 - protein, 405 aa, unidentified
  source 1..405: note = protein_6aa16f6
  REGION 5..161: note = RuvC_domain
  SITE 8: note = RuvC_P1
  SITE 58: note = RuvC_P2
  SITE 98: note = RuvC_P3
  SITE 100: note = RuvC_P4
  SITE 103: note = RuvC_P5
  REGION 271..368: note = Tnp_domain
  SITE 279: note = Tnp_P1
  SITE 310: note = Tnp_P2
  SITE 318: note = Tnp_P3
  SITE 319: note = Tnp_P4
MGIYVGIDWAEAHHDICVLDETGTVLIKRRIAEGLEGVAQLHALVADHASEPNQVVVGIETDRGLLVGTLLAAGYQVYAINPLAASRYRERHVTSGAKSDPGDAKVLADLVRTDRHNHRPVAGDSELAASLQVLARAHQNLIWSRQRLVNQLRNNLREYYPAALAAFGTELAHPVALGVLDAAPTPALGRTLSRAKLAAILRRAGRERGVEEKAAAIQAQLRAPQLAAPALVGEAYGKSVASTVRILRGVNTELASLEAELAPSFEKHPDAEIYRSLPGLGIVLGARVLSEFGDDRTRFAHPKARKNYAGSSPITKTSGKSRVVLARLARNRRLADACHQWAFCALTPSAGARDYYHRLRQRGKTHHQALRALANRLVGILHGCLDHRQTYREDIAWPSSLTVAA

SEQ ID NO: 19656 - protein, 345 aa, unidentified
  source 1..345: note = protein_586d6e1
  REGION 5..153: note = RuvC_domain
  SITE 8: note = RuvC_P1
  SITE 55: note = RuvC_P2
  SITE 93: note = RuvC_P3
  SITE 95: note = RuvC_P4
  SITE 98: note = RuvC_P5
  REGION 213..301: note = Tnp_domain
  SITE 221: note = Tnp_P1
  SITE 251: note = Tnp_P2
  SITE 259: note = Tnp_P3
  SITE 260: note = Tnp_P4
  SITE 272: note = Tnp_P5
MKYYAGLDVSVKETSVCIVDERGTIIRERKAVSHPADLVALLSDPQLHLERVGLEAGPLSQWLYEGMAKAGLPVICIETRHTKAFLKAHTPNKSDRNDARGIAQMMRVNLFRPVHVKTLTSQKRRALLTARKMLQEKAIAIENDVRGLLRNFGLKVGAVGTLKFEERIRELVEDAPDLAAIMEPLLAGRRKLREEFAKLDRQVLKEAKYDPVCKRLMTVPGVGPIVALAYTSTIDIPARFRNSRSVGAVLGLTPVLNQSGESHRIGHVSRCGDAMMRGLLYEAAQVLLTRVAKWSWLKAWAMDVAKRRGVRKAIVALARRLGVILHRMWCDESDFRWTRETLPAA

SEQ ID NO: 19657 - protein, 342 aa, unidentified
  source 1..342: note = protein_3e6096b
  REGION 6..148: note = RuvC_domain
  SITE 9: note = RuvC_P1
  SITE 52: note = RuvC_P2
  SITE 87: note = RuvC_P3
  SITE 89: note = RuvC_P4
  SITE 92: note = RuvC_P5
  REGION 210..293: note = Tnp_domain
  SITE 218: note = Tnp_P1
  SITE 248: note = Tnp_P2
  SITE 256: note = Tnp_P3
  SITE 257: note = Tnp_P4
  SITE 269: note = Tnp_P5
MENIMIGIDLAKNVFQVHGALRTGEVQFRKKLTRAQFSVFMAQQEPCLVIFESCGSAHHWAREMEALGHEVKLIAPQYVRPFVKRQKNDAADAEAIVIAARQPEMRFVEPKTIEQQSRAAVFRSRERLVHQRTADVNALRALLYEHGHVFPVGTRYLARMTALLEDLTSDVPDLIREECQDLLTQIAEKAARIAERTAKLKTLASQSDRVRRLQTMPGVGPLTAVAVEAFGPDMTQFKAGRDFAAWLGLVPKQHSSGGKERLGRMTKAGQADIRRLLIIGAMSRLTWLGQRTIVAGSWLSRMLTRKPKMLVAVALANKMARQIWAMLTKNEDYRDPALAVAT

SEQ ID NO: 19658 - protein, 341 aa, unidentified
  source 1..341: note = protein_d8968b9
  REGION 7..149: note = RuvC_domain
  SITE 10: note = RuvC_P1
  SITE 53: note = RuvC_P2
  SITE 88: note = RuvC_P3
  SITE 90: note = RuvC_P4
  SITE 93: note = RuvC_P5
  REGION 211..296: note = Tnp_domain
  SITE 219: note = Tnp_P1
  SITE 249: note = Tnp_P2
  SITE 257: note = Tnp_P3
  SITE 258: note = Tnp_P4
  SITE 270: note = Tnp_P5
MEQTITIGLDIAKYIFQAHGADAAGHVLFRKRLTRAKLLGFLATQAPCVVAMEACAGSHYWGREIGKLGHTVRLIPPAYVKPFVKRQKNDAADAEAICEAAQRPSMRFVTVKDEAQQANGVVFRARDLLVRQRTQCINALRGHLCEYGYVFRQGITHVGTLIAHVEDPNSSLPESARVILRLLIDSFAALEARIAELDAEINRRSKADPVARRLMTIPGVGPITATAVTALVPAPGSFRTGRDFAAWLGLTPLQKSTGGKQKLGAVSKRGERTIRRLLILGASAVVRQACRRGAPTGSWLAQMLTRKPKMLITVALANKMARVVWALLVKGGVYRAPAATA

SEQ ID NO: 19659 - protein, 401 aa, unidentified
  source 1..401: note = protein_b2128c5
  REGION 6..158: note = RuvC_domain
  SITE 9: note = RuvC_P1
  SITE 57: note = RuvC_P2
  SITE 95: note = RuvC_P3
  SITE 97: note = RuvC_P4
  SITE 100: note = RuvC_P5
  REGION 266..352: note = Tnp_domain
  SITE 274: note = Tnp_P1
  SITE 305: note = Tnp_P2
  SITE 313: note = Tnp_P3
  SITE 314: note = Tnp_P4
  SITE 325: note = Tnp_P5
MSTLFAGLDWASQTHAACVIDERGAIRVQFEITHDKAGLAELCHRLKACGVRAVAIERPSGLIVDALMDAGFAVVPIHPNVVKATRPRYRSHGGKSDRSDAYLLADLLRTDGHRFAPLAPQSDEILALRALVRGRDDLVATRVQLANQLRTLLESFWPGAAAIFADVDSPIALAFIERYPTPDSAARLGPKRMAAFCAQHACSGRRSAAELLERLHQAAGGLAGELQMDAKGELARCLARILRRVVEQIRLISSRIEHHVASFDDGQILMSFPRAGRICAAQIVAELGSVRERFDTLERFTAEAGIAPVTYASGKSKAVAFRWACNHRLRAALTCLADNSRHANAWAANLYAQARARGCDHPHATRILARAWAGVIWRAWQDRKPYDPTRHRAAQTHLQTT

SEQ ID NO: 19660 - protein, 340 aa, unidentified
  source 1..340: note = protein_19c0264
  REGION 6..147: note = RuvC_domain
  SITE 9: note = RuvC_P1
  SITE 52: note = RuvC_P2
  SITE 87: note = RuvC_P3
  SITE 89: note = RuvC_P4
  SITE 92: note = RuvC_P5
  REGION 211..297: note = Tnp_domain
  SITE 219: note = Tnp_P1
  SITE 249: note = Tnp_P2
  SITE 257: note = Tnp_P3
  SITE 258: note = Tnp_P4
  SITE 270: note = Tnp_P5
MKITTIGLDLAKSVFQLHAVDANGTLVWRKKVRRAALLDTLSKIPPCLVGMEACATAHHWAREISVLGHEVRLMPPAYVKAYLRRQKNDAADAEAICEAVRRPTMRFVPAKSAERQAVLVLHRSRELLVRQRTMLINAIRAHCAEFGLIAVQGASGTRDLIDRVGQADGSILPEVARGVVMLLAQQLDALVAQIQALNRRLLSWHRQSEESKRLATIPGVGVISATALAASVTDPAQFRSGREFAASLGLVPRQNSSGGKDKLGRISKMGDRYLRKLLVVGATSVVRRARTSDAPAANWVRSLLERKPARLVTVAMANKTARIVWAIMARGETYRAPAEA

SEQ ID NO: 19661 - protein, 349 aa, unidentified
  source 1..349: note = protein_558c466
  REGION 12..159: note = RuvC_domain
  SITE 15: note = RuvC_P1
  SITE 65: note = RuvC_P2
  SITE 101: note = RuvC_P3
  SITE 103: note = RuvC_P4
  SITE 106: note = RuvC_P5
  REGION 230..314: note = Tnp_domain
  SITE 237: note = Tnp_P1
  SITE 267: note = Tnp_P2
  SITE 275: note = Tnp_P3
  SITE 276: note = Tnp_P4
  SITE 287: note = Tnp_P5
MPSLAEVVDVVIGVDTHKHTHTAVVVDARTGGVLAERTVSTDARGYAELLEWARAHGPAVAWALEGAGGYGAGLARHLQAAGQQVLELDRPVRAVRRHGAKSDSLDAARAAREALGRAHLAQVKSDGPRGQLAALMAARRSAVEAATLAQRQLHALVIAAPEVLRAMFRGQSTATMTTTAARLRPRAAWDGHTATTATVLRALARRVIALQAEARQHEQAMAVIVRAWRPDLLTQPGVGVIVAVEVLISWSHPGRIRSEAAFAMLAGTAPVPASSGLRTRHRLNRSGDRQLNRALHVVVLSRTRYDQRTRDYIERRRHEGKTDREIRRCLKRYIARDLFRQLEHRPTTA

SEQ ID NO: 19662 - protein, 341 aa, unidentified
  source 1..341: note = protein_38a9aac
  REGION 7..149: note = RuvC_domain
  SITE 10: note = RuvC_P1
  SITE 53: note = RuvC_P2
  SITE 88: note = RuvC_P3
  SITE 90: note = RuvC_P4
  SITE 93: note = RuvC_P5
  REGION 211..296: note = Tnp_domain
  SITE 219: note = Tnp_P1
  SITE 249: note = Tnp_P2
  SITE 257: note = Tnp_P3
  SITE 258: note = Tnp_P4
  SITE 270: note = Tnp_P5
MNEVTIIGVDLAKRVFQAHGAAADGSVVFRKKLSRAQVLPFLERQPSCIVAMEACATAHHWGREIGKLGHEVRLIAPHYVKPFVKRQKNDAADAEAIAEAASRPTMRFVALKSRECQARALLFRSRDLMVRQRAQLITSLRGHLAEYGLVVARGKEQIRHLARALEDPETDLPELLRTTSRMYLEQIGALTGRIGELDKMIRTEAARGATSARLQNMPGIGPVSAMAIETFAPSMETFGRGRDFSAWLGLVPRQNSSGGKQVLGKTSKMGQRDIRRLLVSGAMSVIRAASRNAPPEGSWLARMLARKPRMLVAIALANKMARSAWAMLTKQENYRNPAAAA

SEQ ID NO: 19663 - protein, 344 aa, unidentified
  source 1..344: note = protein_292b4ad
  REGION 4..157: note = RuvC_domain
  SITE 7: note = RuvC_P1
  SITE 55: note = RuvC_P2
  SITE 96: note = RuvC_P3
  SITE 98: note = RuvC_P4
  SITE 101: note = RuvC_P5
  REGION 219..304: note = Tnp_domain
  SITE 227: note = Tnp_P1
  SITE 257: note = Tnp_P2
  SITE 265: note = Tnp_P3
  SITE 266: note = Tnp_P4
  SITE 277: note = Tnp_P5
MITIGIDPHKSSLTAVAVEPNGQTHRPIRAVVDKTTPEMLLAWAAQWPERQWAVEGATGLGRGIAQQLVAAGEAVLDVPAKLAARARLLGSSSARKTDVADAVSVAAVALHNRRLNRVQVEDHTTIMRLLTERRDDLVAEHTRWINRLHVLLRDLHPGGAEVRLDTTQASVLLAKIRPVTAADQQRKQIARDIVRDLKRHEASIKDLEKQLRAAVNASGTTLTEIQGIGFLTAAKILALTGDIRRFPNQEHYASYAGTAPIDVSSGDQQTHRLSRRGNRQLNAAIHVAAVTQARDPGPGRDHYRRKIAEHKTAKEARRSLKRRISNAIYRRILADQQRLQQAAA

SEQ ID NO: 19664 - protein, 399 aa, unidentified
  source 1..399: note = protein_b835dbe
  REGION 9..163: note = RuvC_domain
  SITE 12: note = RuvC_P1
  SITE 60: note = RuvC_P2
  SITE 100: note = RuvC_P3
  SITE 102: note = RuvC_P4
  SITE 105: note = RuvC_P5
  REGION 271..357: note = Tnp_domain
  SITE 279: note = Tnp_P1
  SITE 309: note = Tnp_P2
  SITE 317: note = Tnp_P3
  SITE 318: note = Tnp_P4
  SITE 330: note = Tnp_P5
MTPEYAITLGLDVGKSAHHGCALTPEGQRVYDHELPQDETALRAVITDLQEHGAVLVVVDQPNMIGALPIAVARDVGADVAYLPGLAMRKAADLHPGRSKTDARDALIIADTARTMPHTLRAVDRDSDVLSALKVLSGFDEDLARESTRAINRLRSLLVQIYPSLERVFAGVTLTRAIVLELFIRYHGPAGLKAAGRAGVKRWARNHSRKDPGPLIDQAFAALAEQTVTVPGADAVELVIPRVAAQIKELKHQRNIVAGEVEKLVDDFPLSQVLTSMPGVGVKTAAQILLAAGDMSAFPTPGHLAAYAGIAPVTSRSGTSIRGEFPARAGNKRLKNALFRSAWVASCHDPRSQAYYERKRGEGKRHNAAVMCLARRRLNVMYAMIKTGTLYEPRVPTVA

SEQ ID NO: 19665 - protein, 358 aa, unidentified
  source 1..358: note = protein_b6037fa
  REGION 12..166: note = RuvC_domain
  SITE 15: note = RuvC_P1
  SITE 67: note = RuvC_P2
  SITE 103: note = RuvC_P3
  SITE 105: note = RuvC_P4
  SITE 108: note = RuvC_P5
  REGION 232..317: note = Tnp_domain
  SITE 240: note = Tnp_P1
  SITE 270: note = Tnp_P2
  SITE 278: note = Tnp_P3
  SITE 279: note = Tnp_P4
  SITE 290: note = Tnp_P5
MSIVAHLYNFFIGVDTHARNHVYTIITNTGLLVATRSFPTSRAGIKRALNWAGRRTSGDLDTLWVVEGTASYGAVLTGHIAAAGYSVVEAGRMDAKARFGVGKSDELDSYRIAASVLALRTDQLRWPRQGAGVRQALRVLLAARDAMTTERTRMINSLTALVRTIDLGIDARQSLTDDQVTEIAKWRARNEDIDVSTARDEAIRLAKRVLALNDDLQDNHDRLAELVEASPAAVLLAEPGIGPFSAAVCFTAWSHPGRVRNEAAFAALAGVNPIPASSGNTHRHRLNRGGDRQLNRALHTVITNRMIHDERTRDYVAQRFGEDPTKKSKRELKRKLKWYLARRVFRILNGLETSPAPA

SEQ ID NO: 19666 - protein, 320 aa, unidentified
  source 1..320: note = protein_50ae7d0
  REGION 7..151: note = RuvC_domain
  SITE 10: note = RuvC_P1
  SITE 57: note = RuvC_P2
  SITE 97: note = RuvC_P3
  SITE 99: note = RuvC_P4
  SITE 102: note = RuvC_P5
  REGION 192..278: note = Tnp_domain
  SITE 200: note = Tnp_P1
  SITE 230: note = Tnp_P2
  SITE 238: note = Tnp_P3
  SITE 239: note = Tnp_P4
  SITE 251: note = Tnp_P5
MQTRTPVGIDIASKKFDVAVWKGDTSYKTKVFPNTPKGFSALKKWLEPFGDCHICMEATGAYSEPLATFLHDEGYDVSVENPARIKRFGQAELNRNKTDKDDARMIARYCKLHGPSLWQPAPLNERRLKALVKRLTNLQEMRQMEENRLEISDAVVQPSIRVVIAALDAQINETKRAINDHIDNDPDLKKNRELLESIPGIAGVLSSTMLAYMGDMSRFSSSKALVAWAGLNPMRQESGEWKGKSRISKMGNSAMRKALYMPAIVAMKWNPAVNSLKKRLDAGKKTGKVVVCAAMKKLLQLAYGVLKSGRPFDAEICLAR

SEQ ID NO: 19667 - protein, 337 aa, unidentified
  source 1..337: note = protein_fd9cda8
  REGION 16..162: note = RuvC_domain
  SITE 19: note = RuvC_P1
  SITE 66: note = RuvC_P2
  SITE 106: note = RuvC_P3
  SITE 108: note = RuvC_P4
  SITE 111: note = RuvC_P5
  REGION 213..295: note = Tnp_domain
  SITE 247: note = Tnp_P2
  SITE 255: note = Tnp_P3
  SITE 256: note = Tnp_P4
  SITE 268: note = Tnp_P5
MRKASTVKVFRDCLGIGIDVSKAELVVVGLTTSEPYIKRISNRLTAVKAFVRALKKSGYRGKMICESTGHYHLKLALACHETGMDIIVLNPLQSSKHSKANVRKTKTDPADGLMLASMCMTEPNLPKPTRLTVSKALIRLKMGQLASIEKQLQKSQLSLNQYEETYAALGLELSELQLRLRDHFQLLKQLRKQMEKELEELLVENMADRKSFTRLCKFPGYSDVVAGLVGQLDRQVKGPNSWVAYVGVDVSVQESGTWKGRGKLTKRGNAYLRKRLYQAAWGACMNYDYVRAYYDELKAKGRNHVEANCIISRKLLRIAYHVVVNEKEYDPRIAFSS

SEQ ID NO: 19668 - protein, 398 aa, unidentified
  source 1..398: note = protein_e39b825
  REGION 4..163: note = RuvC_domain
  SITE 7: note = RuvC_P1
  SITE 61: note = RuvC_P2
  SITE 102: note = RuvC_P3
  SITE 104: note = RuvC_P4
  SITE 107: note = RuvC_P5
  REGION 269..356: note = Tnp_domain
  SITE 277: note = Tnp_P1
  SITE 307: note = Tnp_P2
  SITE 315: note = Tnp_P3
  SITE 316: note = Tnp_P4
  SITE 329: note = Tnp_P5
MLYVGIDIAKYKHDIAIIDSEGTIFVKHLQISNDREGFTKLQATLTNLQKSTGDKLQIALEDTGHYCFNLLRFLRTNGYPTLSYNPLLIKEFAKHHSLRKTKTDKKDAMTIARKLKDDINKQLFQTETIISELKYATRNVARIKENCTKQKINYTRLLDILFPELATFLGSPTAKHDSCIYAMLKEYPSPKKLKNAHLTKLTNLLSSHSRGHFGKEQAQALKNLASTSIGSDSPSLEFELLQTIDTIQYFTNQRKLADKVVAKLMQEIDSPILSIPGIGVNLGSIILAEIRDIHNFKSPNQLLAYAGCEPSISTSGTNQIESGHMVKRGSSQLRWALHEAARLMSVWSPSMRLYLEKKRSEGKHYGVAISHVVKKLVRIIFQLLKNNEPYDEEKMIVN

SEQ ID NO: 19669 - protein, 342 aa, unidentified
  source 1..342: note = protein_5a9d652
  REGION 6..148: note = RuvC_domain
  SITE 9: note = RuvC_P1
  SITE 52: note = RuvC_P2
  SITE 87: note = RuvC_P3
  SITE 89: note = RuvC_P4
  SITE 92: note = RuvC_P5
  REGION 210..294: note = Tnp_domain
  SITE 218: note = Tnp_P1
  SITE 248: note = Tnp_P2
  SITE 256: note = Tnp_P3
  SITE 257: note = Tnp_P4
  SITE 269: note = Tnp_P5
MKDTMIGVDLAKNAFQLHGASMTGQVKFRKKLTRLQFLKFMAEQLPTVVVMEACGSASYWAREMVKFGHEVKLIAPQYVRPFVKRQKNDMADAEAIVIAAQRPEMRFVEPKSEKQQARAVMFRSRERLVHQRTELVNALRAVLYEYGHTIPLGIRQLKRIEALLDEPNSDLPALVREECRDMMAQIAEKTTRIEARTKRAAELAASDDMAKRLQTMPGVGTLTALAVEAFAPDMTSFRRGRDFAAWLGLVPRQHSTGGKQRLGRVSKAGQADIRRLLIIGSMSRLNWLGRRTIPEGSWLARMAERKPRMLVAIALANKMARAIWAMLTKNEDYRDPAWAAAA

SEQ ID NO: 19670 - protein, 339 aa, unidentified
  source 1..339: note = protein_62d9f8e
  REGION 17..164: note = RuvC_domain
  SITE 20: note = RuvC_P1
  SITE 67: note = RuvC_P2
  SITE 107: note = RuvC_P3
  SITE 109: note = RuvC_P4
  SITE 112: note = RuvC_P5
  REGION 208..295: note = Tnp_domain
  SITE 216: note = Tnp_P1
  SITE 246: note = Tnp_P2
  SITE 254: note = Tnp_P3
  SITE 255: note = Tnp_P4
  SITE 268: note = Tnp_P5
MTIQSEKIVQGTKSLFAGIDVGAEELILVVRKNGTAHHPQKFANTPADRARLVKKLVKLTGIVVCLEATGVYHFDLSVALHDAGVALMVVNPKSSHNFAKVLMKNSKTDAVDAETLAQYAERMDFIAWTRPSDEKIALRSFARRIDALTRQKAAAKNNCHALSVSQETPKAVLRDVKLAISQLEKRIANLGKEALLLIEKHADLERVFQLLTGIKGIAQASAIALMGELLLLPQALSHREWVKFAGLDPRAFDSGKSVHKKTRISKAGNRHIRSALYMPAMSAKQHDPHVKAYFQHLMDNGKKPLQALCAVMRKLLHAIHGMLKNNMPFDNTRFYAIPA

SEQ ID NO: 19671 - protein, 341 aa, unidentified
  source 1..341: note = protein_0c4ddec
  REGION 7..149: note = RuvC_domain
  SITE 10: note = RuvC_P1
  SITE 53: note = RuvC_P2
  SITE 88: note = RuvC_P3
  SITE 90: note = RuvC_P4
  SITE 93: note = RuvC_P5
  REGION 211..299: note = Tnp_domain
  SITE 219: note = Tnp_P1
  SITE 249: note = Tnp_P2
  SITE 257: note = Tnp_P3
  SITE 258: note = Tnp_P4
  SITE 270: note = Tnp_P5
MLEVNIIGLDLAKNVFQAHGADASGIALFRKKLRRDQVLRFLAEQPTCTVAMEACASSHYWAREISGLGHSVRLIAPGYVKPFVKRQKNDAADAEAICEAAQRPTMRFVAVKSEEQQAAAIVFRVRDLVVRQRTQTINAIRGHLAKFGMVAAQGLFHVAKLLAAIEDKGSAVPEVARSILRLLVEQLRSLDEKMALLDREIARRAKEDTEARRLMTIPGIGPITATALAALAPSAQTFKRGRDFAAWLGLTPLQRSTGGKQKLGETSRMGERTLRRLLIIGASAAVRWAMRKGKSADPWLMRILGRKPPMLVIVALANKTARIVWALMAKGGTYRAPAVAG

SEQ ID NO: 19672 - protein, 407 aa, unidentified
  source 1..407: note = protein_195b9b4
  REGION 5..164: note = RuvC_domain
  SITE 8: note = RuvC_P1
  SITE 61: note = RuvC_P2
  SITE 101: note = RuvC_P3
  SITE 103: note = RuvC_P4
  SITE 106: note = RuvC_P5
  REGION 272..358: note = Tnp_domain
  SITE 280: note = Tnp_P1
  SITE 311: note = Tnp_P2
  SITE 319: note = Tnp_P3
  SITE 320: note = Tnp_P4
MRLFVGDDWAEDHHDVEVMDTSGRRLVKARLPEGVAGMTRLHSIIGDLVGEDADDTEVLIGIETDRGPWVGALVAAGYTVLAVNPLQAARFRDRLGVSGAKSDAGDAHVLADMVRTHSHELRPVAGDSARAEAIKVVARMHKTMIWERTRHTQRLRHALRDYFPAALVAFEDLDAADTLELLAKAPTPAQAARLTTTQIGAALKGARRRNVADKAATIAAALRCEHLGQPEVVTDAYAATVRALVAVLTVLNSQIKTLGGQVDAHFGQHPAAEIILSQPGLGQALGARVLAEFGDDHDRYASAKARKNYAGTSPITRASGRKKVAVARFVHNDRLLDALTSQAFSALSRSPGARAYYDKQRARGVGHNPALRQLANRLVGILHGCLKTGTPYDEATAWPRPVEKVTA

SEQ ID NO: 19673 - protein, 332 aa, unidentified
  source 1..332: note = protein_0ec2872
  REGION 7..159: note = RuvC_domain
  SITE 10: note = RuvC_P1
  SITE 62: note = RuvC_P2
  SITE 100: note = RuvC_P3
  SITE 102: note = RuvC_P4
  SITE 105: note = RuvC_P5
  REGION 205..293: note = Tnp_domain
  SITE 213: note = Tnp_P1
  SITE 243: note = Tnp_P2
  SITE 251: note = Tnp_P3
  SITE 252: note = Tnp_P4
  SITE 265: note = Tnp_P5
MENFYFIGVDVSKKKLDFCVMFEGKVVHEEETSNHQSAIMSLLHHLEEDYGIDNARMLVCAEHTGQYTFPLACACKAVECKLWLENAAEIKYSSGVQRGKNDKVDAKRIAIYASRFQDKVQYYERPTEDIERLKQLESERTLYVTDLAKYKGQMKDQKDYMPKGLYERKMKRLQALMDDLEEAIQAITDEMDEVIASCPVLFRQRELLMSIDGVGRVVATNMIIITEAFTRFDDPRKFNCYAGVAPFSYSSGSSLHSKARVSHRADKVVKRLLHLAAVAVTHRVGGELKKYYERKVAEGKNKMSVINALRAKIVARMFAVIKRNEKYKPILS

SEQ ID NO: 19674 - protein, 347 aa, unidentified
  source 1..347: note = protein_a76257b
  REGION 7..149: note = RuvC_domain
  SITE 10: note = RuvC_P1
  SITE 53: note = RuvC_P2
  SITE 88: note = RuvC_P3
  SITE 90: note = RuvC_P4
  SITE 93: note = RuvC_P5
  REGION 212..303: note = Tnp_domain
  SITE 220: note = Tnp_P1
  SITE 250: note = Tnp_P2
  SITE 258: note = Tnp_P3
  SITE 259: note = Tnp_P4
  SITE 271: note = Tnp_P5
MKDVTTIGLDLAKQVFQVHGADAEGAPFFNRKLRRAEVLRFFAKLPPCLVGMEACASAHYWAREIAAIGHDVRLLPPQYVKPFVKRGKTDAADAEAIAEAVTRKTMRFVPVKTSEQQAAVMVLKTRALLVRQRTQAINALRSHMGELGIIAPTGIANVKSLAVIVRDEDDVRLPPAARFALTEIVEQIEMLAARIDKLEREIVIQARKDEDMRRLTTIPGVGAIIAMAVKAFVPDPAGFKSARHFAAWIGLTPKAHSSGGKERLGRISKMGNPELRSLLTSGASAVLRHVRYHDRAWPWLKDMLARRPFKVVAVALANKIARMIWALLNRGGTYRNPMEMMEAAVPA

SEQ ID NO: 19675 - protein, 393 aa, unidentified
  source 1..393: note = protein_fbf69e7
  REGION 4..164: note = RuvC_domain
  SITE 7: note = RuvC_P1
  SITE 61: note = RuvC_P2
  SITE 102: note = RuvC_P3
  SITE 104: note = RuvC_P4
  SITE 107: note = RuvC_P5
  REGION 269..355: note = Tnp_domain
  SITE 276: note = Tnp_P1
  SITE 306: note = Tnp_P2
  SITE 314: note = Tnp_P3
  SITE 315: note = Tnp_P4
  SITE 328: note = Tnp_P5
MVCVGIDVAKDKHDCCILDSDGMVRADCFTIPNNMDGFKQLLQTIRNCTQKVRQNKKVGLEATGHYSYNILGFLLDNDLAVYVMNPLHTNLYRKSLSLRKTKTDRVDARTIATMLLSDVDLKSYTDTAYHNEELKSLTRYRFDKVRERAKLKQSVSRLVTILFPELEKLVTSLHIASVYALLSEYPGAKQISEIHLTKLTNLLATASKGRYEKKKKAIQIREAARTSIGSVMSVKFLELKHTIKLIKELTSEIDEIEDSIQQIMDELHPPILSIPGMGVHSAAMILAEIGDFSNFESPDKILAYAGCSPSTYQSGKLTNCYAHMEKRGSRYLRYALYNATKYVCHWNPVFAEYLAKKRSEGKHYNVALSHAMKKLVRLIYALQKSGKAYLTAA

SEQ ID NO: 19676 - protein, 323 aa, unidentified
  source 1..323: note = protein_330fa83
  REGION 5..160: note = RuvC_domain
  SITE 8: note = RuvC_P1
  SITE 58: note = RuvC_P2
  SITE 98: note = RuvC_P3
  SITE 100: note = RuvC_P4
  SITE 103: note = RuvC_P5
  REGION 195..281: note = Tnp_domain
  SITE 203: note = Tnp_P1
  SITE 233: note = Tnp_P2
  SITE 241: note = Tnp_P3
  SITE 242: note = Tnp_P4
  SITE 254: note = Tnp_P5
MTIVVGVDIAKHTFDIATLQSNGKHRTKGKLANNATGFAVFADWLERYAESGAWIVMEATGIYHESLAEHFHGLGYRIAVLNPAQIKSYAKSQLQRSKTDKLDAKLIATYGHLHQGRFKPWQPEPLNIRQLRALTRRLEDLQELRQMELNRLEVSRDNVHASINAVLQRLDEQIAETLRLIKNHIDDDPDLRGKRDLLVSIDGISDKTASLLLAELGDPQRFNNARAVVAFAGLDPQLHESGKYQGCVRISHTGSARLRAGLYMPAVSSLKHNPAIRALAERMKSRAKKGKQIVCAAMRKLLTIAYGVLKSCRPFDANLAVAR

SEQ ID NO: 19677 - protein, 404 aa, unidentified
  source 1..404: note = protein_dbc6093
  REGION 4..160: note = RuvC_domain
  SITE 7: note = RuvC_P1
  SITE 57: note = RuvC_P2
  SITE 97: note = RuvC_P3
  SITE 99: note = RuvC_P4
  SITE 102: note = RuvC_P5
  REGION 275..362: note = Tnp_domain
  SITE 283: note = Tnp_P1
  SITE 313: note = Tnp_P2
  SITE 321: note = Tnp_P3
  SITE 322: note = Tnp_P4
  SITE 335: note = Tnp_P5
MNAVGIDVSKGKSTVAVLRPFGEVVASPFDVAHTGSELKSLADFLKKLRGETKVVMEATGNYYEPIARYLHEQNIFVSVVNPVLISDFGGNTLRKPKTDKKDSLKIASYALSYWGDLKEYVPQEDLRKSLKLLNRQYLQASKLKTMMNNNLISLLDLTFPGINKLFTSPPRESDGHEKWNDFVLTFPHCDMISKLTIKAFSKKYKKWCTGNSYYFTEASCEKIYKFSKECISSVSSTESTVFAVIQAARMLNSATENCNAIQLEMNRVAAQLPEYETVMSMYGVGKAMGPQLIAEIGDPRRFHSRKAITAYFGYDSENNDSGQKISKSNTMTKKGAGALRRTLFIIIQILLKTKPVDNPVYNFLIKKQSEGKHYYSYMNAAANKFLRIYYAKVKEVLTAADTPT

SEQ ID NO: 19678 - protein, 322 aa, unidentified
  source 1..322: note = protein_309aba8
  REGION 4..162: note = RuvC_domain
  SITE 7: note = RuvC_P1
  SITE 60: note = RuvC_P2
  SITE 100: note = RuvC_P3
  SITE 102: note = RuvC_P4
  SITE 105: note = RuvC_P5
  REGION 200..286: note = Tnp_domain
  SITE 208: note = Tnp_P1
  SITE 237: note = Tnp_P2
  SITE 245: note = Tnp_P3
  SITE 246: note = Tnp_P4
  SITE 259: note = Tnp_P5
MITLGIDVSKAKIDCCIFPSGLTGKRKTKRFDNAQSGFVKLVKWLTELDVNLSDTRAVMEATSVYHENLAHFLYDMQLTICIANPARVRAFSKGLSMLNKTDKADSEALVYYANTVKLATWQPEKENVRILKALINRYAVLEEDLQREKNRLEKAQSTQTFPQVLLSINIRIQQLEQEIIRLDETISSHVNGNSELKNDLALLTTIPAVGRKTGLLMLGLLRSHHFEKASQVAAYVGLVPIHFQSGSSVNKRSRLSKAGDSKIRSSLFMPSIVALQYNPHIKALYQRLREKGKPKMLIVSAAMRKLVHLCYGVLKHQTAYQI

SEQ ID NO: 19679 - protein, 327 aa, unidentified
  source 1..327: note = protein_7f735f0
  REGION 1..79: note = RuvC_domain
  SITE 18: note = RuvC_P3
  SITE 20: note = RuvC_P4
  SITE 23: note = RuvC_P5
  REGION 189..289: note = Tnp_domain
  SITE 197: note = Tnp_P1
  SITE 227: note = Tnp_P2
  SITE 235: note = Tnp_P3
  SITE 236: note = Tnp_P4
  SITE 249: note = Tnp_P5
MNPLIYHRARSTSLRKVKTDAVDAYLLCELYYKEEIEPYKKRGIQLLNLRNLTRQQETISSISTQTKVQLLTVLDQVFPEYRGVFGNLYSKVSLQTLSLFPTSEHVLNTTESVLTDKIVSLCTRRSEKWAKEKAQKLIEVALRNPFQTNLYESHIFNLKMLITIVLQYQEHLSKLETEIDALAKEIEEYKIIQSIPGIGEKIAATIIYEVGEIDRFNHPKKLVAFAGIDPSVYSSGRFTATNNRITKRGSRRLRQALYMAVYCGIRDARKQKTSDTVIPRNKKLREFYDKKRDEGKPYRVAIIACVNKLLHLIYTLLKNKTIFQELA

SEQ ID NO: 19680 - protein, 343 aa, unidentified
  source 1..343: note = protein_28814be
  REGION 6..147: note = RuvC_domain
  SITE 9: note = RuvC_P1
  SITE 52: note = RuvC_P2
  SITE 87: note = RuvC_P3
  SITE 89: note = RuvC_P4
  SITE 92: note = RuvC_P5
  REGION 211..296: note = Tnp_domain
  SITE 219: note = Tnp_P1
  SITE 249: note = Tnp_P2
  SITE 257: note = Tnp_P3
  SITE 258: note = Tnp_P4
  SITE 270: note = Tnp_P5
MQIHSVGIDLGKTTFHLVALSAAGKVLLRKKFTQKQLIAFTANMQISLIGMEACVGAHFLSRTLREQGHEVKLIPAQFVRPFVKSNKNDFLDAEAIAEAVDRQNMRFVPIKTDDQLDLQAIHRVRDRLVARRTSVINQLRAFLLERGMTFAKTPFKLKVAMPDLLENAEANLTPRMRNLISLLWSEWKDLEQQIVGMNEEIEQIASSDPACQRLRQIPGIGPLVATAIVAAIGNGAAFHKGREFSSWLGLVPRQHSTGGKARLFGISKRGNRYLRKLLVHGARSAVLRVKRERSPFGPWLDTLETRAPINVVVTAAANKLARIAWSVLSSGQDYRAPVNTVAA

SEQ ID NO: 19681 - protein, 353 aa, unidentified
  source 1..353: note = protein_dcbcbbb
  REGION 4..158: note = RuvC_domain
  SITE 7: note = RuvC_P1
  SITE 56: note = RuvC_P2
  SITE 97: note = RuvC_P3
  SITE 99: note = RuvC_P4
  SITE 102: note = RuvC_P5
  REGION 220..306: note = Tnp_domain
  SITE 228: note = Tnp_P1
  SITE 258: note = Tnp_P2
  SITE 266: note = Tnp_P3
  SITE 267: note = Tnp_P4
  SITE 278: note = Tnp_P5
MIVIGIDPHKSSHTATAVDPVTNTDLGSIRIDATRTGYKVLISWAKSWPTRKWAVENAEGLGHHLAQWLLVLGELVFDVPTTSTARIRELSRGGRRKNDRIDAAAAACVAVLQGDARPLDREGPTDILALLDERRTNMSNSRTRLVNQLHALLRQLFAGGAPTSLTAASATTLLRGFRARSEVDRTRVGLCRDLIADIRRLDDQLAANEKHMSQALDKHGTRLREIDGIGPVTATRLIGRTGRASRFPTAAAYANYNGTAPVQIASADTDRHRLSRYGDRQLNSALYTVAMVQTRMPASAGRAYYDKKIDEGKSPRAATRSLKRHLSDHVWRTILADEKRSHRQRERERASAA

SEQ ID NO: 19682 - protein, 267 aa, unidentified
  source 1..267: note = protein_6301214
  REGION 1..97: note = RuvC_domain
  SITE 2: note = RuvC_P2
  SITE 42: note = RuvC_P3
  SITE 44: note = RuvC_P4
  SITE 47: note = RuvC_P5
  REGION 137..223: note = Tnp_domain
  SITE 145: note = Tnp_P1
  SITE 175: note = Tnp_P2
  SITE 183: note = Tnp_P3
  SITE 184: note = Tnp_P4
  SITE 196: note = Tnp_P5
MEATGAYSTPLATHLHESDITVSVENPARIHAFAQSELTRNKTDRNDAKMIARYCCLYQPPLWKPAPPDIRQLLALMTRLDALKEMRRMELNRILVADPIITNSLQKNIDSLSVQIEEIQQTVKEHVNNNKALKRNKELLKSIPGVGDILSYTFLAYTGDVSRFSNNKKLVAWVGLNPMLQESGLWKGRSKISKKGNIELRKALYMPAVAALTHNSVFIAFKKRLQQNGKSGKSIVCAGMKKLLQIMYGVLKSGVPFDEKYSLPNKF

SEQ ID NO: 19683 - protein, 338 aa, unidentified
  source 1..338: note = protein_ebb9625
  REGION 7..149: note = RuvC_domain
  SITE 10: note = RuvC_P1
  SITE 53: note = RuvC_P2
  SITE 88: note = RuvC_P3
  SITE 90: note = RuvC_P4
  SITE 93: note = RuvC_P5
  REGION 211..297: note = Tnp_domain
  SITE 219: note = Tnp_P1
  SITE 249: note = Tnp_P2
  SITE 257: note = Tnp_P3
  SITE 258: note = Tnp_P4
  SITE 270: note = Tnp_P5
MSNTHIIGIDLGKNTFHIAAHDQNGHELFRKKLYRNKLLEFLSNIEPTIIAMESCGGAHWLARKCESYGHTAKLIPPQYVKPYVKTNKNDFIDACAIAEAASRPTMRFTSPKTESAQIISTVRKLRSGYIRERTSCMNRIGSILLEFGISLPKGHSAMKNLFQWLAEQGHYLPPQLLFELSELHEHYELLNSKVESQQRKIERILSESKQMQQLQTIPGVGPVIASACISSIGNPSDFKNGRNFAAWVGLVPVQCSTGGKTTLLGISKRGNRELRTLFIHAARSILWRDKSVDKYFGSWLAELKQRKPFNVAVVALANKIARVAWSVMMTPKPFSPQI

SEQ ID NO: 19684 - protein, 339 aa, unidentified
  source 1..339: note = protein_a9749e8
  REGION 7..150: note = RuvC_domain
  SITE 10: note = RuvC_P1
  SITE 53: note = RuvC_P2
  SITE 89: note = RuvC_P3
  SITE 91: note = RuvC_P4
  SITE 94: note = RuvC_P5
  REGION 210..293: note = Tnp_domain
  SITE 218: note = Tnp_P1
  SITE 248: note = Tnp_P2
  SITE 256: note = Tnp_P3
  SITE 257: note = Tnp_P4
  SITE 269: note = Tnp_P5
MVEIITIGLDIAKSVFQVHGVDASGSVVVRRQLRRGELLKYFGSLPPCLIGMEACGSAHYWARQMGALGHQVRLLPPAHVKPYVKRGKKNDAADAAAICEAVTRPQMRSVPVKSEANQAVLLLHRSRDLLVRQRTMLICAFRSHLAEFGVIAGQGKGNFAKLVAGLDQQALPAPALVALRLLAAQIDDARAKVDALEDEIVAQHRREDASRRLASIPGIGPIIASAIAASVPDASVFKSGRQFAAWLGLVPRQNSTGGKERLGGITKAGDRYLRRLLVIGATGLIRYKRKTIPGGLAWVSALLVKKPVRLVTVALANKMARIAWAVLCRNEVYREAAAA

SEQ ID NO: 19685 - protein, 388 aa, unidentified
  source 1..388: note = protein_f1d8455
  REGION 4..160: note = RuvC_domain
  SITE 7: note = RuvC_P1
  SITE 58: note = RuvC_P2
  SITE 99: note = RuvC_P3
  SITE 101: note = RuvC_P4
  SITE 104: note = RuvC_P5
  REGION 263..350: note = Tnp_domain
  SITE 271: note = Tnp_P1
  SITE 301: note = Tnp_P2
  SITE 309: note = Tnp_P3
  SITE 310: note = Tnp_P4
  SITE 323: note = Tnp_P5
MIYVGIDVAKKKHDCYIVNSDGEVIKDVFTISNSREGFDKLFDAIPKDSLDKVKVGLEATGHYSTNIVNFINDKQFPLVIFNPLQTNLFRKAQTLRKSKTDKIDARLIALMLHMSDFKPYSTSSYQLSELKSLTRHKSRLKENMARYKIHLIRIMDIMFPELESHVYSLNQASTYMLLKTFGSKDAIASAHITKLTNILKKASNGKYSREKALIIKNAAQNSIGYDSKALSFELSQILNFITIYTNEIKSIEKEIKIIVDELDSPLLSIPGISYGLGSVILSEINDIHQFSTPSKLLAFAGLEPSTFESGQFVATNMKMVKRGSSYLRWALLEAARLVAMRDKTFHDYYHKKKAEGKHHYVANSHVAKKLVRVIHHLLTNNLTFKPQN

SEQ ID NO: 19686 - protein, 337 aa, unidentified
  source 1..337: note = protein_8568464
  REGION 6..147: note = RuvC_domain
  SITE 9: note = RuvC_P1
  SITE 52: note = RuvC_P2
  SITE 87: note = RuvC_P3
  SITE 89: note = RuvC_P4
  SITE 92: note = RuvC_P5
  REGION 210..296: note = Tnp_domain
  SITE 218: note = Tnp_P1
  SITE 248: note = Tnp_P2
  SITE 256: note = Tnp_P3
  SITE 257: note = Tnp_P4
  SITE 269: note = Tnp_P5
MTIIRIGLDTAKHVFQVHGVDENEQVVFRRQLGRSEMERFFAKLPATRIGLEACGASHYWGRLLRGLGHEVVLMPGQYIKPYVKRGKNDAIDAAAICEAMSRPGMRFVPIKSAENQAALMLLSVRDLLVKQRTMLINAVRGHAAEFGVIAAKGRGNVAELVQRAHAEEAGVPALALALLRVLARQLGALDVKLKGLEAKLMTLHRQDPVSQCLATQPGIGPIGAVSFSLKVPDPKAFGSGRHFAAWLGITPKENSSGGRHRQGRISRQGDEGLRRLLVLGATAVIRFAKSGRASPWLINLLARRPRKVAAVALANKMARTLWAMMVSGEVYRRPLAA

SEQ ID NO: 19687 - protein, 387 aa, unidentified
  source 1..387: note = protein_d077086
  REGION 1..147: note = RuvC_domain
  SITE 44: note = RuvC_P2
  SITE 84: note = RuvC_P3
  SITE 86: note = RuvC_P4
  SITE 89: note = RuvC_P5
  REGION 261..348: note = Tnp_domain
  SITE 269: note = Tnp_P1
  SITE 299: note = Tnp_P2
  SITE 307: note = Tnp_P3
  SITE 308: note = Tnp_P4
  SITE 321: note = Tnp_P5
MVAALRPMGEVALAPKEYPHTAIGLEQMAHDIISLGENTKVITEATGRYHEPVSAALHEYGIFVCVLNPILIHQSGGGSVRKVKSDKKDAIKIAKYGLDNWTDLQKYASVDILRQQLKLYSRQYNLYMKNVVALKNNLLALTDKVFPGVNELFESPEKTNGHQKWVDFIYAFWHCDCICRVSENAFSQRYQKWCKRNHYHFSSRKSSDIYTASCGHFTTLPRNNNTKFLVTTAAKQLTSIKENIALLRAEIFSLAKQLPEYDVVMGMFGVGEITGAQLMAEIGDVRRFPNRSSLVAFAGVDPSVNQSGKYNAHSNSTTKRGSSHLRKTLFQIVSTYVKCSPVDEPVYQFICKKRSEGKPYYVYMTAAENKFLRIYYARVKECLNAQN

SEQ ID NO: 19688 - protein, 325 aa, unidentified
  source 1..325: note = protein_0a8d320
  REGION 4..158: note = RuvC_domain
  SITE 7: note = RuvC_P1
  SITE 57: note = RuvC_P2
  SITE 97: note = RuvC_P3
  SITE 99: note = RuvC_P4
  SITE 102: note = RuvC_P5
  REGION 197..283: note = Tnp_domain
  SITE 205: note = Tnp_P1
  SITE 234: note = Tnp_P2
  SITE 242: note = Tnp_P3
  SITE 243: note = Tnp_P4
  SITE 256: note = Tnp_P5
MFYLGIDVSKAKLDCLLLDTTSNKRKSKSIPNTPAGYSTLLTWLDKQQASNVHVIMEPTGPYHEPAALALTDGGVTLSLVNPAQVRQFAQGIGVKSKTDAADSAVLAQYGAARQPAPWQPPSLSVRQLRALLARRDAVADDLQREKNRAEKALATETPPLVQASIEQSIAFLSNELNQLQQAIAQHIDDDPDLRGKKELLLTIPGVGQRVSDHLTALLAARDFHAAEQLAAYLGLTPVEWQSGSSVRGRPRLSKAGPAHLRKLLYLPAVAATKCNPHIKATYERLIARGKPKMAAIGAAMRKLAHLCFGVVKTGQPYNPHWLVDA

SEQ ID NO: 19689 - protein, 342 aa, unidentified
  source 1..342: note = protein_1db59ea
  REGION 6..148: note = RuvC_domain
  SITE 9: note = RuvC_P1
  SITE 52: note = RuvC_P2
  SITE 87: note = RuvC_P3
  SITE 89: note = RuvC_P4
  SITE 92: note = RuvC_P5
  REGION 211..297: note = Tnp_domain
  SITE 219: note = Tnp_P1
  SITE 249: note = Tnp_P2
  SITE 257: note = Tnp_P3
  SITE 258: note = Tnp_P4
  SITE 270: note = Tnp_P5
MQVTTVGLDLAKSVFQVHAVDAEGRVVFRKALRRAQVLPFFAKLPACLVGMEACGTAHHWARELTKLGHAVRLMPPAYVKPYVKRGKTDAADAEAICEAVTRPTMRFVPVKSAEQQAALALHRTRELLVRQRTQLVNMLRGLLAEFGIEMARGLHHALRLARRLSAGEAPEVPPSARLVGQGLADQIGTVQLQLARLEKELLAWHHSNELSQRLATIPGIGVISATALAASAIEPERFRSGRQFAASLGLTPLQNCSGGRERMGRISRMGDRYLRRLLVVGMTSLVRRARIQPASVDPRLPAMLARKPARLVTVAAANRTARVAWAIMTRGGTYRAPISAAA

SEQ ID NO: 19690 - protein, 369 aa, unidentified
  source 1..369: note = protein_8c20411
  REGION 7..157: note = RuvC_domain
  SITE 10: note = RuvC_P1
  SITE 60: note = RuvC_P2
  SITE 97: note = RuvC_P3
  SITE 99: note = RuvC_P4
  SITE 102: note = RuvC_P5
  REGION 223..309: note = Tnp_domain
  SITE 231: note = Tnp_P1
  SITE 261: note = Tnp_P2
  SITE 269: note = Tnp_P3
  SITE 270: note = Tnp_P4
  SITE 282: note = Tnp_P5
MTNMLYVGLDVHKDTIAVAVADEGRGGEIRFFGTIAHKADSVLRLTKQLSKSGKTPTFCYEAGPCGYGLHRHLTKLGFECAVVAPAMIPRKTGDRVKTDRRDAEMLARLWRAGELTAIWAPDEEQEAMRDLIRTRKQAMDAVKVAKQQLLSFLLRHGLCYENGSYWTKGHRRWLAELRRFRFDYQQLAFEELKRAVDQAEVRVATLDRAIEDAVQTWRFAPVVDALRALRGVNTIIAATVVAEIGDITRFGNPRQLMAWLGLVPSEHSSGNTTRRGRLTKTGNALARTMLIEAGWSYRHPPKEGQPYLKRSAHLPQEIRDIGWKAQTRLYKRFRHLSNSGKPQPRVLAAIARELAGFIWDIARKTPLPA

SEQ ID NO: 19691 - protein, 427 aa, unidentified
  source 1..427: note = protein_760bbd2
  REGION 19..179: note = RuvC_domain
  SITE 22: note = RuvC_P1
  SITE 77: note = RuvC_P2
  SITE 118: note = RuvC_P3
  SITE 120: note = RuvC_P4
  SITE 123: note = RuvC_P5
  REGION 286..374: note = Tnp_domain
  SITE 294: note = Tnp_P1
  SITE 324: note = Tnp_P2
  SITE 332: note = Tnp_P3
  SITE 333: note = Tnp_P4
  SITE 345: note = Tnp_P5
MNFTQNEKLNQLSERSIVIGVDIASEVHYARAFDWRGMELGKVFKFTNNAEGFENFYAWIERLKKQAQKECVMVGAEPTGHYWFGLASYLKDQSIKLVLVNPFHVKRSKELDDNHPSKTDAKDPKTIAKLVIEGRYNEPYIPEGIYAELRIATSCRLRIQKEMNSIKNRIHRWLKIYFPEHETVFGKFDATSSMMVLQVAPLPRDIKELGAEGINKIWRDNKLRAVGMKRAKSLYEAAGKTIGCTEGESCSRMEIKLLLQDYNHKTLQYLAVMEIINELCMQIPEVAKLLEIKGVGLVTVAGFLSEVGDIRRFKSPKQIQKLGGLALKESSSGKHKGQTTISKRGRSRLRAILFQAVMPLVAKNAEFAELHKYYTTRSKNPLKKKQSLIALSCKLIRVFYAILTKGISYDAQKLIQDIRRPVENLAA

SEQ ID NO: 19692 - protein, 315 aa, unidentified
  source 1..315: note = protein_1ec872b
  REGION 9..158: note = RuvC_domain
  SITE 12: note = RuvC_P1
  SITE 56: note = RuvC_P2
  SITE 96: note = RuvC_P3
  SITE 98: note = RuvC_P4
  SITE 101: note = RuvC_P5
  REGION 192..276: note = Tnp_domain
  SITE 200: note = Tnp_P1
  SITE 229: note = Tnp_P2
  SITE 237: note = Tnp_P3
  SITE 238: note = Tnp_P4
  SITE 249: note = Tnp_P5
MADTIARTLGIDISKDRLDVHLLPDGIDKQFLNDAKGLRTLIRWLSPYAPTRIVFEATGAYHRRLERMLATANLPGVKVNPQRLRAFAKACGRLAKTDRIDASVMARFGAVMAPDIRPIRSQALDLLAELLTARRALVKDRSALLHRQKQLTIPLLQRQAEQRLRQVEAQIEAVDAESRRLIAAEPQLQHRFDILTSIPGIGATCAMALIADMPELGTLANKQAASLAGLAPIVRQSGQWRGKSFIQGGRTQLRRALYMPALVAIRFNPDLKSKYQQLTATGKAAKAAITAIMRKLIVLANALIREDRFWTPQQA

SEQ ID NO: 19693 - protein, 405 aa, unidentified
  source 1..405: note = protein_5a26db1
  REGION 5..162: note = RuvC_domain
  SITE 8: note = RuvC_P1
  SITE 58: note = RuvC_P2
  SITE 99: note = RuvC_P3
  SITE 101: note = RuvC_P4
  SITE 104: note = RuvC_P5
  REGION 276..363: note = Tnp_domain
  SITE 284: note = Tnp_P1
  SITE 314: note = Tnp_P2
  SITE 322: note = Tnp_P3
  SITE 323: note = Tnp_P4
  SITE 336: note = Tnp_P5
MLNAVGIDVSKGKSTIAVLRPAGEIVRKPFDVRHTPKELSILSSYIQHLEGDTRIVMECTGHYHEPILKVLSDSGFFVSAVNPHLIKEYDGDNSLRKVKSDSADAKKVAGYTLDKWHLLRQYSAMDNTRTQLKTLNTQFQFLMRQKTALKNNLISLLDLTYPGVNAFFDSPVRKNGSQKWLDYAYSFWHADCVRTIGLKTFTERYKKFCKRQGYIFQPDKPKSLFESSKELIAVVPKDHIYKDMVLSAIVQVNLISAQIESMRLKMDELASTLPEYEVVMNMFGVCHTFGPQLMAEIGDISRFNHRSALTAFAGVDPGVNQSGKMKIDSNRASKRGAPRLRKTLFQIMQTLMQNAPADNRVYLFMMKKKAEGKPYHVYMTAGANKFLRIYYGTVKAHLASQSQTE

SEQ ID NO: 19694 - protein, 290 aa, unidentified
  source 1..290: note = protein_1801d83
  REGION 7..53: note = RuvC_domain
  REGION 159..246: note = Tnp_domain
  SITE 167: note = Tnp_P1
  SITE 198: note = Tnp_P2
  SITE 206: note = Tnp_P3
  SITE 207: note = Tnp_P4
  SITE 219: note = Tnp_P5
MPTGPDAPRPATAATGDDIAVELRILTARRTDLVADRTRAINRLRAQLLEYFPALERAFDYSTSKAALILLTGYQTLNGLRRAGAARLTAWLAKHKARNASAVATKAIEAANAQHTTVPGQNLAATMVARLAKEVMTLDTEIDATETMIEDRFRRHHHAEIILSMPGFGVILGAEFIAATGGDMSAFDCADRLAGVSGLAPVPRDSGRISGNLKRPRRYNRRLLRACYLSAQIAIRTDIASRTYYDRKRTEGKTHTQAVLALARRRLNVLWAMLRDHSIYQSTAPNAAAA

SEQ ID NO: 19695 - protein, 341 aa, unidentified
  source 1..341: note = protein_16782f5
  REGION 6..148: note = RuvC_domain
  SITE 9: note = RuvC_P1
  SITE 52: note = RuvC_P2
  SITE 87: note = RuvC_P3
  SITE 89: note = RuvC_P4
  SITE 92: note = RuvC_P5
  REGION 211..297: note = Tnp_domain
  SITE 219: note = Tnp_P1
  SITE 249: note = Tnp_P2
  SITE 257: note = Tnp_P3
  SITE 258: note = Tnp_P4
  SITE 270: note = Tnp_P5
MKHSVIGMDIAKKVFQLHTVDQCTGRIERIKLRRDEVLAFFANYPTSLVAIEACGSAHWWARQLQQQGHEVRLLAPRSVRPFVLRNKTDAADAQAIWTAVQQPGACLVAIKQADQQAILSLHRIRAQLLKFRIMQSNGLRGLLYEFGIVLPEGYTQLSKAVPEAFAGAEHRVPSMLLDSLRDQWTRIIQLDEEIRKIELRLKQCLRESTDCQKIAEIPGIGLLTATAAVASLGEATTFHSGRQFAAWLGLVPRQTGTGGRVRQLGLSKRGDTYLRTLLMHGARSILNRGQRSAWVERLLTRRPYNVAVAAVANKLARTLWAVLSKGSPYRAELFTACPAGH

SEQ ID NO: 19696 - protein, 346 aa, unidentified
  source 1..346: note = protein_292f3a3
  REGION 7..149: note = RuvC_domain
  SITE 10: note = RuvC_P1
  SITE 53: note = RuvC_P2
  SITE 88: note = RuvC_P3
  SITE 90: note = RuvC_P4
  SITE 93: note = RuvC_P5
  REGION 212..300: note = Tnp_domain
  SITE 220: note = Tnp_P1
  SITE 250: note = Tnp_P2
  SITE 258: note = Tnp_P3
  SITE 259: note = Tnp_P4
  SITE 271: note = Tnp_P5
MKQITTIGLDLAKHVFQIHGADAEGSPVVNRKLRRAQVLRFFEKQPACLVGLEACGSSHYWAREIAALGHEVRLIPPAYVKPFVKRGKSDAADAEAISEAVTRKTMRFVPIKSAEQQAAAMVLRTRGLLVRQKTQVINALRAHLSELGIIASIGTTKIAGLIEIVRDGSDARLPKAARFALTAIADQIEMLIEQIDKLEREIVAEAKRDPDMRRLATIPGVGPITAASIKALVPDPGGFKSGRHFAAWLGLTPRSHSSGGKERLGGISKMGNPELRSLLVLGASSVLRRVRGNDKGPKWLSALLMRRPYKVVAVALANKTARIIWAMLTKGGTYRGMAMGNGVESA

SEQ ID NO: 19697 - protein, 404 aa, unidentified
  source 1..404: note = protein_e9a6edb
  REGION 5..161: note = RuvC_domain
  SITE 8: note = RuvC_P1
  SITE 58: note = RuvC_P2
  SITE 98: note = RuvC_P3
  SITE 100: note = RuvC_P4
  SITE 103: note = RuvC_P5
  REGION 275..361: note = Tnp_domain
  SITE 283: note = Tnp_P1
  SITE 313: note = Tnp_P2
  SITE 321: note = Tnp_P3
  SITE 322: note = Tnp_P4
  SITE 335: note = Tnp_P5
MNNVAGIDISKGKSTVSVLRPFGEVVAKPFSVGHTGSELKELADYLKSLDGETRVVMEHTGRYYEPVARFLHDQGIFVSAVNPKLIKDYGNNTLRKVKTDKADARKIARYGLDNWVELRQHTPMDTIRMQLKTLNRQQGLYSKTKTMMKNNLIALLDQTYPGVNALFDSPVREDGSQKWVDFATAFWHVDCVRNISLTAFTERYRKWCKRHGYNFSQSRAVEIHAGAQDLIAMLPKDALTKTMIRQAIDALNAVSASLERLKAEMRTLAAQLPEYPVVMAMHGVGDSLGPQLMAELGDVTRFTHRNAITAFAGVDPGADQSGTHEAKSTRASKSGPPELRKALFLVMDCLLKTMPADDPVYCFMDKKRAEGKPYLVYMTAGANKFLRIYYGRVKEYLALRENAD

SEQ ID NO: 19698 - protein, 311 aa, unidentified
  source 1..311: note = protein_1f8db74
  REGION 2..117: note = RuvC_domain
  SITE 21: note = RuvC_P2
  SITE 56: note = RuvC_P3
  SITE 58: note = RuvC_P4
  SITE 61: note = RuvC_P5
  REGION 180..271: note = Tnp_domain
  SITE 188: note = Tnp_P1
  SITE 218: note = Tnp_P2
  SITE 226: note = Tnp_P3
  SITE 227: note = Tnp_P4
  SITE 239: note = Tnp_P5
MKRRSVLAFFQKLPPCLVGIEACASAHHWSRELQALGHKVRLIPPAYVKPYVKRQKNDAADAEAICEAVTRANMRFVPTKTLEQQSGLVLHRTRHLFIRQQTAVINAIRAHLAEFGIVAPVGRHGVEELLNVVADPNDKRVPEMARACLSAFGAQLRRIQEQVLEFDRLIRAWHRSDEMSMRLDEAPGVGPVLATAVVATVADPKSFRSGRNFSAWIGIVPKQHSSGGKNRLGNISKQGDRYLRGLFVAGALAVIRYAKIHGTKHRPWLTALLARRPTKVAAIALANKLARMVWAMMARGERYKEPVALAA

SEQ ID NO: 19699 - protein, 348 aa, unidentified
  source 1..348: note = protein_773d176
  REGION 6..147: note = RuvC_domain
  SITE 9: note = RuvC_P1
  SITE 52: note = RuvC_P2
  SITE 87: note = RuvC_P3
  SITE 89: note = RuvC_P4
  SITE 92: note = RuvC_P5
  REGION 211..298: note = Tnp_domain
  SITE 219: note = Tnp_P1
  SITE 249: note = Tnp_P2
  SITE 257: note = Tnp_P3
  SITE 258: note = Tnp_P4
  SITE 270: note = Tnp_P5
MNATTYAVDIAKSVFHVHWVEPETGEIHNRKLSRAKFSAFIAQRQPGRIVMEACGSAHYWGRTFMALGHQVELLPAFEVHKRVIGNKDDCADAAAIWLTAQSATVRRVPVKTVQQQADLTVHRVRSQLVRERTARVNALRGLLYEFGVVMPKGRRLGLRWLADNRAQIEQRLPERMQRLVQLQLDTLRQLDEHIEVLEAEVKEMVSTSELARRLIKVPGLGCLSASAGASLVGDASGWRNARQFACCLGLEPSHVGTGGKVRMGPISKRGDAYLRTLLIHGARNLVRTAAPSQWIARMLERRPFNVVATAVAHKLARIMWAMAAHGREYDPNWLSQAPHAKAASTAAA

SEQ ID NO: 19700 - protein, 351 aa, unidentified
  source 1..351: note = protein_07f27bd
  REGION 13..155: note = RuvC_domain
  SITE 16: note = RuvC_P1
  SITE 59: note = RuvC_P2
  SITE 94: note = RuvC_P3
  SITE 96: note = RuvC_P4
  SITE 99: note = RuvC_P5
  REGION 218..302: note = Tnp_domain
  SITE 226: note = Tnp_P1
  SITE 256: note = Tnp_P2
  SITE 264: note = Tnp_P3
  SITE 265: note = Tnp_P4
  SITE 277: note = Tnp_P5
MTQQTQPESITTIGIDLGKNTFHLIGMDARGRIVLRRKVSRGQLLPCLANLPVCLIGMEACAGAHHVGRQLATLGHDVRLLPAQYVKPFLKGHKNDYRDAEAIAEAAQRPTMRPVPLKSAEQLDLQALHRVRSRLVGQRTAVINQIRGFLLECGIPVRQGPAGLREALPTLLAQRTDVLSPRMIHLIEDLAGDWRHLDERIETLTQDITALARQDAGCRRLMGIPGVGVITASAMVAAVGTGAAFAKGRDFAAWLGLVPKQISTGDRTILGGLSKRGNRYLRTLFVSGARVLLQRPGHWDGHGFGRWLAAARARLHRNVLAAALANKLARLAWGVLNHEHGYDPEYTIRGA

SEQ ID NO: 19701 - protein, 349 aa, unidentified
  source 1..349: note = protein_8b40dfc
  REGION 7..148: note = RuvC_domain
  SITE 10: note = RuvC_P1
  SITE 53: note = RuvC_P2
  SITE 88: note = RuvC_P3
  SITE 90: note = RuvC_P4
  SITE 93: note = RuvC_P5
  REGION 212..298: note = Tnp_domain
  SITE 220: note = Tnp_P1
  SITE 250: note = Tnp_P2
  SITE 258: note = Tnp_P3
  SITE 259: note = Tnp_P4
  SITE 271: note = Tnp_P5
MGEVSTIGVDIAKSVFQVHGVDADGTVVIRKRIGRAKVLEFFADLPPCLVGMEACATAHQWARELKKLGHDVRLMPPTYVKAYVKRGKNDAADAAAICEAVTRPSMRFVPIKSVEQQSALMLHRTRDLLIRQRTQLINALRAHLAELGLVAAKGHEGLQQLVMAVTESSDERLPSHARLACLSIVAQLHAAQTQISGLDKRITQAHRANADSKRLEAIPGFGVILSTAVVATMTDPKAFRTGREFAAWIGLVPRQNSTGGKERRGSISKQGDRYLRRLFVLGAISIVRTARMRPDKYPWVTELLGRRPTKIVAVALANKMARTAWAVLAKGETYRAPIRLSSAAVAAAA

SEQ ID NO: 19702 - protein, 345 aa, unidentified
  source 1..345: note = protein_f446894
  REGION 6..148: note = RuvC_domain
  SITE 9: note = RuvC_P1
  SITE 52: note = RuvC_P2
  SITE 87: note = RuvC_P3
  SITE 89: note = RuvC_P4
  SITE 92: note = RuvC_P5
  REGION 210..297: note = Tnp_domain
  SITE 218: note = Tnp_P1
  SITE 248: note = Tnp_P2
  SITE 256: note = Tnp_P3
  SITE 257: note = Tnp_P4
  SITE 269: note = Tnp_P5
METTIIGIDIAASVFQLHAQDRSGEVLWRKRLRREELGAFLAKQAPALIGMEACGSAHHWGRVLGGLGHEVRLMHAKYVKAYVKRGRSDLRDAEAICEAVQRPDMRFVPIKSVEQQTARALEHARDLLMKQHTQLTDATRGLLAELGIVASPGLRGFKTLVGKIDAGDSAIPGALLSCVKPLVEQWRALHASIDALEARIVAQANSDERMRRLQTIPSVGPIIAHALVSAIGDPRRCANARDCAAWVGLTPLTNNSAEKTRIGHISRQGDHSLRRLLVLGAANLARRAKAKPNPAKPNQANAWLHGIIARRPFKVATVAQAAKTARIAWALLCSGETYRAMAPAA

SEQ ID NO: 19703 - protein, 396 aa, unidentified
  source 1..396: note = protein_7e8d86c
  REGION 6..160: note = RuvC_domain
  SITE 9: note = RuvC_P1
  SITE 58: note = RuvC_P2
  SITE 98: note = RuvC_P3
  SITE 100: note = RuvC_P4
  SITE 103: note = RuvC_P5
  REGION 248..352: note = Tnp_domain
  SITE 273: note = Tnp_P1
  SITE 304: note = Tnp_P2
  SITE 312: note = Tnp_P3
  SITE 313: note = Tnp_P4
  SITE 325: note = Tnp_P5
MAAIWAGIDAGKTHHHCVAIDEGGRRLLSRRVANDEPELLELLTDVLALGDEVTWGIDLADGGAALAIGILLNHDQLVHYISGRAIHRASESYRGEGKTDAKDAAIIADQTRIRRDLHPLRPSDETVTDLKILTGRRMDLVADRTRTVNRLGAQLTGIFPGLERALDLTNKGPLTLLTGYQTPAAIRRLGARRLETWLRNRKVLRADQLAQAAVEAAERQHTSLPGVKLTAQLVHTLAKEVSALNEQIAEVDKLIEARFRDHRHFEVITSMPGLGIILGAEFLAATGGDMSVFGTPDRLAGFGGVAPVPRDSGKISGNLRRPQRYNRRLQRVLYTSALFSIRRNDESRRFYDRKRAEGKRHTQAVLALARRRVNVLWALLRDGRCYELTPPTALAA

SEQ ID NO: 19704 - protein, 410 aa, unidentified
  source 1..410: note = protein_49b3089
  REGION 8..161: note = RuvC_domain
  SITE 11: note = RuvC_P1
  SITE 60: note = RuvC_P2
  SITE 100: note = RuvC_P3
  SITE 102: note = RuvC_P4
  SITE 105: note = RuvC_P5
  REGION 274..363: note = Tnp_domain
  SITE 282: note = Tnp_P1
  SITE 312: note = Tnp_P2
  SITE 320: note = Tnp_P3
  SITE 321: note = Tnp_P4
  SITE 333: note = Tnp_P5
MENCKVIVGIDVSSKDSTVCVLMDKVRQGKTFKISNDMVGFQQLYKRLRLYSVIPLIVFESTGVYSLSLQAFLEKKHIQYLKLNPLKAKKLMDNNLRHNKTDQVDAYRLALIQFNAPQKLLKPQSRAYHEMQNASRYYEELNKAMVVAKNQLHRNLQTTFPQIENLMCHPTGKIYWSVVALFPHAQAVLDSNKEHILGELETISGLSQKKAEYLTHRLISLARLTCAYDNKDSIVIRAIQRNIASLFSLDQEKKEVLAYLYKLASKNQADTRILTIYQSIPGIAKTTALRLLAELGDLRRFDSPNQIDAFIGIDPGIYQSGELDSHLSITKHGNSIARKIMYLSIGQMESVKTTQPCHITDYYDRKKSSQSRGFKKIAIASVHKLIRTMYALVTKNQLYDYNVATRNQRL

SEQ ID NO: 19705 - protein, 416 aa, unidentified
  source 1..416: note = protein_8345b23
  REGION 29..188: note = RuvC_domain
  SITE 32: note = RuvC_P1
  SITE 85: note = RuvC_P2
  SITE 126: note = RuvC_P3
  SITE 128: note = RuvC_P4
  SITE 131: note = RuvC_P5
  REGION 291..378: note = Tnp_domain
  SITE 299: note = Tnp_P1
  SITE 329: note = Tnp_P2
  SITE 337: note = Tnp_P3
  SITE 338: note = Tnp_P4
  SITE 351: note = Tnp_P5
MTVYLERGYKRKEYPWVPNSINYFSMIYAGIDVAKDKHDCFITNSDGEVLFKAFTIPNNRDGFDDLYLKILSVTDDLNKVKVGLEATGHYSYNILGYLLDKGLTTFVINPLHTNLYRKSLSLRKTKTDKVDAHTIATMLMSDVNLKSYSDTSYHNEELKSLTRYRFGKVKQRAKLKSSVARLVNILFPELENLVPTLHMASVYALLSEFPSASDIAGSHLTRLTNLLSAASKGHYGKDNAILFREAAKTSIGSHMPAKSLELKHTIQLIQELTSEINDIETAIKRIMDEINSPILTIPGISYRMGAMILAEIGDFSRFDSADKILAYAGMSPSTYQSGQLDNCYAHMEKRGSRYLRYSLYNATKYVCHWDEAFGSYLEKKRSEGKHYNVALSHAAKKLVRLIYAMERSGQPYRTAA

SEQ ID NO: 19706 - protein, 297 aa, unidentified
  source 1..297: note = protein_f84f960
  REGION 1..52: note = RuvC_domain
  REGION 160..246: note = Tnp_domain
  SITE 168: note = Tnp_P1
  SITE 199: note = Tnp_P2
  SITE 207: note = Tnp_P3
  SITE 208: note = Tnp_P4
MVRTDRHQLRPIAPDSALAEAVKVLARAHQTLVWDRSRQVLRLRAALLEFFPAALQAFDDLAAPDALELLAAAPDPASAARLPAGTIIAALKRARRQRVADKAARLQAVLRAEHLAQPSVVVAAYAVTVRAAVAVIGTLNAQIETLEAQVGAHFGRHPDAEIYQSQPGLGEVLAARVLGEFGDATDRYATVRSRKNYAATSPITRQSGKRKFVLARYARNNRLADALHQQAFSALRASAGARAYYDALRARGVGHHAALRQLANRLVGILHGCLKTHTCYDEATAWPQHGQAEATAA

SEQ ID NO: 19707 - protein, 418 aa, unidentified
  source 1..418: note = protein_f04895f
  REGION 12..167: note = RuvC_domain
  SITE 15: note = RuvC_P1
  SITE 66: note = RuvC_P2
  SITE 104: note = RuvC_P3
  SITE 106: note = RuvC_P4
  SITE 109: note = RuvC_P5
  REGION 275..361: note = Tnp_domain
  SITE 283: note = Tnp_P1
  SITE 314: note = Tnp_P2
  SITE 322: note = Tnp_P3
  SITE 323: note = Tnp_P4
MSLALPEALFFTGLDWAAQTHAVCVMDAGGKIAAEFTIEHSADGIATMIRRLARYGLPGDMPVAIERPNGRLVDLLLEAGHPVVPVSPNAIKTWREGEVLSGAKSDAGDAAVIAEYLRLRQHRLRTAAPYSDETLALRTVVRSRGDLVEMRVAAINQLSALLEAHWPGAKAIFADVESPISLEFLTRYPTPAAAAHLGEKRMAAFLVKHGYSGRRPAAELLARLRAAPAGTSRESLTEALRDAVLAAVGVLTALNAAVKNLDRSVTAHLGEHPDGAIFTSLPRSGQVNAAQVLAEWGDCRQAYDGPDSVAALAGCTPVTNQSGKHRAVHFRWACNKRFRVAMTTFADNSRHASPWAATIYSDARASGKDHPHAVRILARAWIRVIWPCWLQGIPCDPARHGAAAALARQTAQPVTARG

SEQ ID NO: 19708 - protein, 342 aa, unidentified
  source 1..342: note = protein_4c7cc5c
  REGION 7..149: note = RuvC_domain
  SITE 10: note = RuvC_P1
  SITE 53: note = RuvC_P2
  SITE 88: note = RuvC_P3
  SITE 90: note = RuvC_P4
  SITE 93: note = RuvC_P5
  REGION 211..296: note = Tnp_domain
  SITE 219: note = Tnp_P1
  SITE 249: note = Tnp_P2
  SITE 257: note = Tnp_P3
  SITE 258: note = Tnp_P4
  SITE 270: note = Tnp_P5
MQKVTIIGLDLAKNIFQAHGARRDGSVAFRKKISRAKLLSFFASIPKCVVAMEACASAHHWGRHIGALGHEVRLIAPIYVKPFVKRNKNDAADAEAIAEAASRPTMRFVAVKSVEKQAAGMAFKTRDLLVRQRTQTINAIRGHMAEYGVVAPNGPVHIKRLVEALQDPDSGLPESIHGVCELLLRHIALLSEKIGLLEREIRERTRRDELAKRLMEIPGVGEICAVAMEALAPPPESFSKGRDFAAWLGLTPRQNSSGGKTRLGGTSKMGQRDLRRLLVCGAMTVVRWAARKGAPEGSWLEQMMKRKPRLVVAVALANRTARIAWALMMTGERYRASKAISA

SEQ ID NO: 19709 - protein, 339 aa, unidentified
  source 1..339: note = protein_dd52d80
  REGION 6..147: note = RuvC_domain
  SITE 9: note = RuvC_P1
  SITE 52: note = RuvC_P2
  SITE 87: note = RuvC_P3
  SITE 89: note = RuvC_P4
  SITE 92: note = RuvC_P5
  REGION 211..299: note = Tnp_domain
  SITE 219: note = Tnp_P1
  SITE 249: note = Tnp_P2
  SITE 257: note = Tnp_P3
  SITE 258: note = Tnp_P4
  SITE 270: note = Tnp_P5
MKITTYGLDLAKRVFQLHWVDMETGEICRRQLKRAEVAEFFANRAPAVIAMEACGSAHYWARQFAALGHEVRLIAAQFVRPFVKSNKTDAADAHAIWEAAQRPGMKFVAVKSEGQQAVLTLHRMRELLVKMRTMQINQLRGLLYEFGAELPPGRQKGLARIPTELAKLEEALPAMVIEVMHGQLERIAALDEDIAEIERKLSAWKKEDAASRKLMDIPGVGLLTATAAVATIGDAGAFKSGREFAAFLGLVPRQCGTGGRVKLLGISKRGDVYLRTLLIHGARSVITRQKTHEPWLDNLLARRPFNAAVVALANKMARTIWALLALDRTYQKGYAATAA

SEQ ID NO: 19710 - protein, 347 aa, unidentified
  source 1..347: note = protein_89d36ec
  REGION 5..153: note = RuvC_domain
  SITE 8: note = RuvC_P1
  SITE 55: note = RuvC_P2
  SITE 93: note = RuvC_P3
  SITE 95: note = RuvC_P4
  SITE 98: note = RuvC_P5
  REGION 213..301: note = Tnp_domain
  SITE 221: note = Tnp_P1
  SITE 251: note = Tnp_P2
  SITE 259: note = Tnp_P3
  SITE 260: note = Tnp_P4
  SITE 272: note = Tnp_P5
MKYYAGLDVSVKETSICIIDETGKICRETKVVSHPEDIAKLLCDPRWHLERVGLEAGPLSQWLYEGLAKASLPVICIETRHTKAFLKAQQPNKSDRTDARGIAQMMRVHLFKAVHVKTLTSQERRAMLTARKLLQEKAIAIENDIRGLLRNFGLKVGIVGTVKYETRIRELIEGLPGLIAIVEPLLAAREKLRDEFAKLDRIVRDEAKQDPVCRRLTTVPGVGPIVSLAYVATIDIPARFRTSRAVGAVLGLTPLLNQSGESKRIGHVTLCGDAMLRGLLYEAAQALLTRSAKWSWLKAWAMNVAKRRGARKAIVALARRLAVILHRMWSDGTDFRWTREVAPAAAS

SEQ ID NO: 19711 - protein, 317 aa, unidentified
  source 1..317: note = protein_e79a2a0
  REGION 9..152: note = RuvC_domain
  SITE 12: note = RuvC_P1
  SITE 56: note = RuvC_P2
  SITE 96: note = RuvC_P3
  SITE 98: note = RuvC_P4
  SITE 101: note = RuvC_P5
  REGION 191..276: note = Tnp_domain
  SITE 199: note = Tnp_P1
  SITE 228: note = Tnp_P2
  SITE 236: note = Tnp_P3
  SITE 237: note = Tnp_P4
  SITE 248: note = Tnp_P5
MKKHSMICAGIDTGKRKLDVALNGQAERLQVANADAGYRELIAWLRRHRVKRVGIEASGGYEQAVVNRLRRDGFLVIVFQPMQVRAYARFHLQRAKNDRIDAALIAGCAAEAKKIHAPPDPRLAALAAQQTLIDQIVDQMARFKNYREACRDAPLRQFWNDEIKRFRGLFKRELKQLVTAIRRHPDLAERLELIASVDGIALRTATAILVRLPEIGSVSREQAAALAGVAPYDDESSDRIGERHIAGGRERLRKNIYGAALAASFHWNAELIELYQRLTAAGKDHKVALIACSRKLLVFANAVVARGTPWQPRTAVH

SEQ ID NO: 19712 - protein, 354 aa, unidentified
  source 1..354: note = protein_e476a25
  REGION 12..152: note = RuvC_domain
  SITE 15: note = RuvC_P1
  SITE 58: note = RuvC_P2
  SITE 93: note = RuvC_P3
  SITE 95: note = RuvC_P4
  SITE 98: note = RuvC_P5
  REGION 217..302: note = Tnp_domain
  SITE 225: note = Tnp_P1
  SITE 255: note = Tnp_P2
  SITE 263: note = Tnp_P3
  SITE 264: note = Tnp_P4
  SITE 276: note = Tnp_P5
MSNKSNATVATMGIDIGKNSFHVVGLDQRGAIVLLQKWSRSQVEARLTNMAPCLIGMEACVGAHHLSRKLQLLGHDARLMPAKYVRAYSKGQKNDFRDAEAIAGAVERPTMKFVATKTIEQLDLQALHRVRERLVSQRTGIINQIRAFLLERGVAVRQGLRFLRTELPNILAIRLDVLSPRMVHVIEQLAGDWHRLDERIEGLSTDIKALADQDPACERLMTVPGIGPIISSAMVAAIGNGAAFSKGRDFGAWLGLVPRQMSTGDRTILGKISKQGNRYLRVLFVEAAWVVLVKPTTWERHGLKRWIEAAKKRLHPNALAIGLANKLARIAWAVLNKEHKFECTRTNAMASRSA

SEQ ID NO: 19713 - protein, 334 aa, unidentified
  source 1..334: note = protein_a2170ae
  REGION 7..149: note = RuvC_domain
  SITE 10: note = RuvC_P1
  SITE 53: note = RuvC_P2
  SITE 88: note = RuvC_P3
  SITE 90: note = RuvC_P4
  SITE 93: note = RuvC_P5
  REGION 209..298: note = Tnp_domain
  SITE 217: note = Tnp_P1
  SITE 247: note = Tnp_P2
  SITE 255: note = Tnp_P3
  SITE 256: note = Tnp_P4
  SITE 268: note = Tnp_P5
MENIALIGIDLGKNSFHIHCQDHHGKVVYRKKFTRQKLYEFLATCPATTIVMEACGGANFMVRKLTELGHTPKLISPQFVRPFVKTNKNDFVDAEAICEAASRPSMRFVQPRTVSQQTMHALHRVRESLVRDKVKTTNQLQAFLLEFGISAPKGPTLIKRFAEILEANELPPYMVCLLQKLREHYDYLVKQIKELETQLQAFLVEDSAGQRLLSIPCIGPLTASLLSTQLGDGKQYGNSRDFAASTGLVPRQHSTGGRTTLLGISKRGNKKLRALLVQCARVYLRTLEHQSGKLADWVRKLLLRKNNFVVTCALANKLARIAWALTTRQQSFEV

SEQ ID NO: 19714 - protein, 369 aa, unidentified
  source 1..369: note = protein_415e4bc
  REGION 1..124: note = RuvC_domain
  SITE 21: note = RuvC_P2
  SITE 61: note = RuvC_P3
  SITE 63: note = RuvC_P4
  SITE 66: note = RuvC_P5
  REGION 232..318: note = Tnp_domain
  SITE 240: note = Tnp_P1
  SITE 271: note = Tnp_P2
  SITE 279: note = Tnp_P3
  SITE 280: note = Tnp_P4
MHALIGEHLDVGAAEDAVVIGIETDRGPWVAALVAAGYSVYAVNPLQAARYRDRHTVSGAKSDPADAHVLADMVRTDSHQLRLVAADSPQAEAVKVVARAHKTLIWERTRTTQRLRHSLREYFPAALEAFDDLTASDALELLAKAPEPVAAARLSRNQIRAALTRARRRDIDTKVTRVQAALRADHLRRDQVIDAAYAATTRASIQILITLQEQIAELAAQVEAYFGRHPDAEIVLSQPGIGVILGARVLAEFGDARGRYASAKARKNYAGTSPITRASGKKKIVAARFVHNDRLIDSLAQQAFCALTASPGARAYYDRHRARGMEHRAALRQLANRLVGILHGCLKTRTPYNEATAWTPGVADQATTA

SEQ ID NO: 19715 - protein, 289 aa, unidentified
  source 1..289: note = protein_d2b6c7d
  REGION 7..149: note = RuvC_domain
  SITE 10: note = RuvC_P1
  SITE 53: note = RuvC_P2
  SITE 88: note = RuvC_P3
  SITE 90: note = RuvC_P4
  SITE 93: note = RuvC_P5
  REGION 212..271: note = Tnp_domain
  SITE 220: note = Tnp_P1
  SITE 250: note = Tnp_P2
  SITE 258: note = Tnp_P3
  SITE 259: note = Tnp_P4
MPEIATIGLDIAKNVFQLHGVDRSGRIVLRRALRRSQMPGFFKTLSPCLIGMEACATAHHWARTLMAFGHDVRLIPPAYVKPYLRRQKNDAADAAAICEAVTRPSMRFVPVKSPQQQSTLMLHGVRDLLIGQRTALINALRGHFAELGIVVAQGARNTRQLIAFLHEEANPDFPAAARTALQPLATMLLGIEAQIARLDKAILAAHRSDPVSLRLATIPGIGPIVASCLSASIPDASLFQGSREFAAYLGWCPSSIQPAASRGLAPSPRWATGTCVSCWSWERTPRSTA

SEQ ID NO: 19716 - protein, 313 aa, unidentified
  source 1..313: note = protein_ea6d8e5
  REGION 8..148: note = RuvC_domain
  SITE 11: note = RuvC_P1
  SITE 53: note = RuvC_P2
  SITE 93: note = RuvC_P3
  SITE 95: note = RuvC_P4
  SITE 98: note = RuvC_P5
  REGION 189..273: note = Tnp_domain
  SITE 197: note = Tnp_P1
  SITE 226: note = Tnp_P2
  SITE 234: note = Tnp_P3
  SITE 235: note = Tnp_P4
  SITE 246: note = Tnp_P5
MIIPLRYVGIDVSKQYLDIFDEVLGVPERIANATQAITQLVARWRCETLVVFEATGVYDLELREALRQAGIRFARINPARARDFARASGRLAKTDPIDARMLAAFARAMQPVSEQLADPARNTLAKLAKRRDQLVLMRAQEKTRRSEAEDHAMAGRISRLIEVLDSEIAEIEADISALIKAEPEISDDAQLMRSLPGVGPVACMQLIAQMPELGKVGPKQVAALAGLAPFNVDSGAFRGKRKIAGGRKRVRDALYMAALNAVRRASPFKTFYSRLRQAGKPAKLALIAVARKLLTVLNAMMRDRKSYLQTNPT

SEQ ID NO: 19717 - protein, 402 aa, unidentified
  source 1..402: note = protein_8c8d3e3
  REGION 4..160: note = RuvC_domain
  SITE 7: note = RuvC_P1
  SITE 57: note = RuvC_P2
  SITE 97: note = RuvC_P3
  SITE 99: note = RuvC_P4
  SITE 102: note = RuvC_P5
  REGION 275..362: note = Tnp_domain
  SITE 283: note = Tnp_P1
  SITE 313: note = Tnp_P2
  SITE 321: note = Tnp_P3
  SITE 322: note = Tnp_P4
  SITE 335: note = Tnp_P5
MNAVGIDVSKGKSMVAIMRPFGEVVASPFEVMHTGSELGELADKLRSLHGETKVIMEYTGSYFQPIAYALNEAGLFVSAVHAKLIHDYGNNTIRRVKTDKADAIKIANYGLSNWMELPQYIPEDDIRRMLKAFSRQYTKYQKLKTMLKNNFIALTDQTFPGVNELFTSPPRKSDGHEKWMDFAFKFWHCECVCSLSSKAFAERYRKWCKKEGYYFSEQKADDIYISSLGYSSVMPKNDTTRLLITQSINQLNAVSENIAVIAKEMKRLAEQLPEYRVVMDFYGVGDILGPQIMAEIGDITRFRSKGSLVCFAGLEAPPYQSGTFESQNRHISKRGSPHLRKTLFQVMDCLLKKAPADDPIYQFLDRKRAEGKHYYSYMTAGCAKLLRIYYARVNEMIDKMDD

SEQ ID NO: 19718 - protein, 316 aa, unidentified
  source 1..316: note = protein_0508996
  REGION 2..153: note = RuvC_domain
  SITE 5: note = RuvC_P1
  SITE 52: note = RuvC_P2
  SITE 92: note = RuvC_P3
  SITE 94: note = RuvC_P4
  SITE 97: note = RuvC_P5
  REGION 191..275: note = Tnp_domain
  SITE 199: note = Tnp_P1
  SITE 228: note = Tnp_P2
  SITE 236: note = Tnp_P3
  SITE 237: note = Tnp_P4
  SITE 248: note = Tnp_P5
MVGIDVASTHVDVACLGATLPAALTHISNDTEGHVALADALTKLQPGLVLMEATGGYEAALACTLQAAGSRVAVINPRMARDFARAMQRLAKTDRIDAATLAEFAAVLAQRPDCERFVRPLSDPAQQDLAALVTRRRQLVAMRLSERQRLRLARPVTRPSIQALLEAIACQLDEADAKMLSHVEQHRAVMSKVLQDVAGVGRVAATTLIAELPELGHLNRRQICALVGVAPYAKDSGSIRGRRRIAGGRFEVQRALYMATLTATRFNPAVRAFYESLVAAGKLKKVALIACMRKLITHLNAIARTHLNAQNQPVTA

SEQ ID NO: 19719 - protein, 346 aa, unidentified
  source 1..346: note = protein_b5c4b29
  REGION 7..148: note = RuvC_domain
  SITE 10: note = RuvC_P1
  SITE 53: note = RuvC_P2
  SITE 88: note = RuvC_P3
  SITE 90: note = RuvC_P4
  SITE 93: note = RuvC_P5
  REGION 210..297: note = Tnp_domain
  SITE 218: note = Tnp_P1
  SITE 248: note = Tnp_P2
  SITE 256: note = Tnp_P3
  SITE 257: note = Tnp_P4
  SITE 269: note = Tnp_P5
MEQITHIGMDTSKNVFQLHGVDAADRPILRKRLTRRKMVEFFEELPPTVVAIEACGSAHYWARVLGSFGHEVKLIAPQLVKPYVKRGKNDAADAEALREAMSRPTMRFVPTKSADQQAALMLVGMRTRLIKKRTQLANAIRGFAAEFGITAATGMCRIEHLLDRIAADERLPELARELFALHGQEYAQLLHEIERVEAKLMEWHRNDECSQRLANIPGIGPIGASLLMMKAPDPRMFKSGRDFAAWIGLTPKDHSTAGKVRLGGITRAGDELLRSTLVVGATAVVQHVRRSGGRNASPWLLGLLERKKPKLVAVALANKIARIAWKLMVSGEGYRRADLGAPTVAA

SEQ ID NO: 19720 - protein, 311 aa, unidentified
  source 1..311: note = protein_acca8a3
  REGION 6..154: note = RuvC_domain
  SITE 9: note = RuvC_P1
  SITE 53: note = RuvC_P2
  SITE 92: note = RuvC_P3
  SITE 94: note = RuvC_P4
  SITE 97: note = RuvC_P5
  REGION 188..272: note = Tnp_domain
  SITE 196: note = Tnp_P1
  SITE 225: note = Tnp_P2
  SITE 233: note = Tnp_P3
  SITE 234: note = Tnp_P4
  SITE 245: note = Tnp_P5
MTDHNIGVDISKSHLDVFRMEDGAAQRFDNSASGFRAFAKWLGKATVARIVFEPTGPYHKAFEAALGEKFPLVKVNPLQARRFAEAHGTRAKTDAVDARMLARMGAAFDLVPQVPCSKEILVLRDLHVARTGLIKDRTRLSNRAQTQDIAVLKRQTKARLAQVERQIAELDTEIAALIAAGKATARNRDILCSMPGIGTVTAAAMLILMPEIGTLERKQVASLAGLAPITRQSGQWQGKAFIGGGRKPLRDALYMPALVAMRHNPDLKAKYEHLRSAGKPAKVAIVAIMRKLIETANALVKADRLWAKKPA

SEQ ID NO: 19721 - protein, 337 aa, unidentified
  source 1..337: note = protein_d155eab
  REGION 7..149: note = RuvC_domain
  SITE 10: note = RuvC_P1
  SITE 53: note = RuvC_P2
  SITE 88: note = RuvC_P3
  SITE 90: note = RuvC_P4
  SITE 93: note = RuvC_P5
  REGION 211..296: note = Tnp_domain
  SITE 219: note = Tnp_P1
  SITE 249: note = Tnp_P2
  SITE 257: note = Tnp_P3
  SITE 258: note = Tnp_P4
  SITE 270: note = Tnp_P5
MSTIHILGIDLGKHCFHAVGNNHSGKELIRRKFNRSQLLRFLSVLEPTTIAFEACGGAHWLARKCDAYGHQVRLIPPQYVKPYVKGNKNDFIDAAAIAEAASRPTMRFVSVKSEEAQVIATIHRVRDGYIKERTACMSRIGAILLEFGLSFPKGHAKMKVLFQWLAEQDAKLPQSLIAELLSVHEHYKYLNDQVSEQDKKLKVIIQNNENAELLKTIPGIGDLTATLCVANISSPSNFCGGREMAAWLGLVPRQFSTGGKSKLLGMSKRGNKHLRTLFIHGARAVLARIETTGKVFGDWLVNLRATKPFNVVVVALANKLARIAWAVLYHRQAFKAV

SEQ ID NO: 19722 - protein, 396 aa, unidentified
  source 1..396: note = protein_7643b14
  REGION 6..160: note = RuvC_domain
  SITE 9: note = RuvC_P1
  SITE 58: note = RuvC_P2
  SITE 98: note = RuvC_P3
  SITE 100: note = RuvC_P4
  SITE 103: note = RuvC_P5
  REGION 265..352: note = Tnp_domain
  SITE 273: note = Tnp_P1
  SITE 304: note = Tnp_P2
  SITE 312: note = Tnp_P3
  SITE 313: note = Tnp_P4
  SITE 325: note = Tnp_P5
MPEIWAGVDIGKEHHHCVVIDAQGKRLLSRRILNNEAELLQLIADVLELSRDVLWAVDINHGGAALLLGLLVSHDQHITYITGLAIHRASAGYRGQAKTDAKDAFVIADQARMRTDLGVLRPGDEISVDLRTLVTRRTDLVCDRTRQINRLRAQLLEIFPALERSLDLTKKGPVLLLTGYQAPAAIRRAGASPDRGVAEEPQGPQQRGPGPDRRGGRRGPVHRTARRETRGHHGGPSGEGVMALDEEITELEALIEARFREHPHAEVIQSLPGMGTMLSAEFLAATGGDMDTFGTADRLAGYAGLAPVPRDSGRVSGNLHRPRRYHRGLLRAFYLSAFASLRNCPASKQFYERKRAEGKGHKQALLALARRRANVLWAMIRDGACYQATPPVTATA

SEQ ID NO: 19723 - protein, 327 aa, unidentified
  source 1..327: note = protein_309fc49
  REGION 4..158: note = RuvC_domain
  SITE 7: note = RuvC_P1
  SITE 61: note = RuvC_P2
  SITE 101: note = RuvC_P3
  SITE 103: note = RuvC_P4
  SITE 106: note = RuvC_P5
  REGION 203..287: note = Tnp_domain
  SITE 211: note = Tnp_P1
  SITE 240: note = Tnp_P2
  SITE 248: note = Tnp_P3
  SITE 249: note = Tnp_P4
  SITE 261: note = Tnp_P5
MMFIGFDISKDKVDLCWLRDPITNKKKTKVFKNNHLAFREIKQWLLSTTKTIAEEIVITVEPTGVYHEPLMYFLYQQGFNIILANPSKAKKYAEALNVVHKTDRSDAIMLASYGYAKQSTVNFWQPEAKEIRELKALLRRLDALEPNKQREQNRLEASEFNATSERVTQSLKETINFLDDEIKKLKSDIDSHINSFPDLKKNRTLLETIPGIGPVMSRELTYIFAAKNFSRAKQAAAYCGLIPRLHESGKMKGRTTMSKLGPSKIRSKLYMAAVVAGQWNYKIQQQKIALLNNGKTSMQIIGANMRKLIHICFGVIKNQEAFKIQES

SEQ ID NO: 19724 - protein, 407 aa, unidentified
  source 1..407: note = protein_96b5f4f
  REGION 4..164: note = RuvC_domain
  SITE 7: note = RuvC_P1
  SITE 61: note = RuvC_P2
  SITE 101: note = RuvC_P3
  SITE 103: note = RuvC_P4
  SITE 106: note = RuvC_P5
  REGION 273..359: note = Tnp_domain
  SITE 281: note = Tnp_P1
  SITE 312: note = Tnp_P2
  SITE 320: note = Tnp_P3
  SITE 321: note = Tnp_P4
MLFVGDDWAEDHHDVELMDAGGRRLAKARLPEGVVGVARLHAMIGEHLGDADDEAVIVKIGIETDRGPWVQALIAAGYTVYPVNPLQAARYRERLAVSGAKSDAADAHMLADMVRTDSHQLRPAAGDSPDAEAVKVVTRMHKTMIWDRDRAVQRLRHALREYFPAALAAFDDLDAADTLELLGKAPDPAAAARLSLTQISAALKHARRRGDITAKAAAIQAVLRAQHLGQPVVVAAAYAATTRSLIALLITLNEQVSALQGQVEAHFGRHPDAEVILSQPGLGVILGARVLAEFGDDHARYSSAKARKNYAATSPITRASGKKKTVIARYVHNDRLVDALHYQAFCALRVSPGARAYYDRQRTRGISNNAALRQVANRLVGILHGCLKTGTPYNETTAWAHHLSQTA

SEQ ID NO: 19725 - protein, 406 aa, unidentified
  source 1..406: note = protein_da5a485
  REGION 4..163: note = RuvC_domain
  SITE 7: note = RuvC_P1
  SITE 60: note = RuvC_P2
  SITE 100: note = RuvC_P3
  SITE 102: note = RuvC_P4
  SITE 105: note = RuvC_P5
  REGION 271..357: note = Tnp_domain
  SITE 279: note = Tnp_P1
  SITE 310: note = Tnp_P2
  SITE 318: note = Tnp_P3
  SITE 319: note = Tnp_P4
MLFVGDDWAESHHDVELMDAKGRRLAKARLPEGVAGMARLHAMIGEQLGQDAEDVEVIVGIETDRGPWVQALIAAGYTVFAVNPLSVARYRERHGVSGAKSDAADALTLADMVCTDSYQLRPVAGDTDQAEAVKVVARAHKTLIWERTRHTQRLRHALRDYFPAAVEAFTDLDAGDTLELLGKAPDPDAAARLSLNQIRAALKRARGRDVDTKAAAIQAVLRADHLGQPAVVTAAYAATTRAAVAVLTTLREQVKELEKQVQAHFGRHPDAEIILSQPGLGPILGARVLAEFGDDPDRFATAKCRKNYAATSPITRASGKKKAVLARFVHNDRLIDALMTQAFAALNASPGARAYYDQLRARGAGHNPALRQLANRLVGILHGCLKTRTLYNETTAWSHRVEKTAA

SEQ ID NO: 19726 - protein, 392 aa, unidentified
  source 1..392: note = protein_92f26ce
  REGION 6..159: note = RuvC_domain
  SITE 9: note = RuvC_P1
  SITE 57: note = RuvC_P2
  SITE 98: note = RuvC_P3
  SITE 100: note = RuvC_P4
  SITE 103: note = RuvC_P5
  REGION 221..306: note = Tnp_domain
  SITE 229: note = Tnp_P1
  SITE 259: note = Tnp_P2
  SITE 267: note = Tnp_P3
  SITE 268: note = Tnp_P4
  SITE 279: note = Tnp_P5
MAHVVIGMDPHKRSATIEVLDDREKLLATGRFGTDRDGYKQLLAVGRGWPNRLWAVEGCEGVGRHIAQRLVADGEPVVDVPAKLSAQARVFSTGQGRKTDATDAHSVALVALRTPGLRSVQVDGATVALRLLVDRRDELGAARTFTVNRLHRLLVELIPGGAKTFLSATQAKALLATVRPRDLVGKTRRKLAAELIGELVSIDKRIKVANTELRELVEATGSTLLELHGVGPSGAARLLGDIGDVARFPTRGHFASWNGTAPIDASSGEQNRHRLSRAGNRRINRVLHIMAIVQLRNDTEGRAYYRRKLAAGKTPMEAIRAVKRRLSDLVYHQLVADQKRQSRTAAGTGPGGQVGAATGSSAADSNPNVDASEKSLPGPATTKPKTDLVAVS

SEQ ID NO: 19727 - protein, 274 aa, unidentified
  source 1..274: note = protein_432b263
  REGION 1..81: note = RuvC_domain
  SITE 21: note = RuvC_P3
  SITE 23: note = RuvC_P4
  SITE 26: note = RuvC_P5
  REGION 141..229: note = Tnp_domain
  SITE 149: note = Tnp_P1
  SITE 179: note = Tnp_P2
  SITE 187: note = Tnp_P3
  SITE 188: note = Tnp_P4
  SITE 200: note = Tnp_P5
MPVICIETRHVKAFLKAQPNKTDRNDARGIAQMMRVNLYRPVHVKTLTSQKRRALLAARKLLQEKAIAIENDIRGLLRNFGLKVGAVGTAKFEERIRELTEGMPDLAAIMEPLLAARGKLRTEFARLHRQALAVVKDDATCRRLMTIPGVGPVVALAYTATIDIPQRFRNSKAVGSILGLTPKLHESGESKRVGCISLCGDGTMRTLLYEAAQLLLTRVGKWSWLKAWAMKIAKRRGMAKAKVALARRLAVVMHRMWLDGTEFRWTREAMTSAS

SEQ ID NO: 19728 - protein, 285 aa, unidentified
  source 1..285: note = protein_2c8d888
  REGION 5..152: note = RuvC_domain
  SITE 8: note = RuvC_P1
  SITE 55: note = RuvC_P2
  SITE 92: note = RuvC_P3
  SITE 94: note = RuvC_P4
  SITE 97: note = RuvC_P5
  REGION 212..275: note = Tnp_domain
  SITE 220: note = Tnp_P1
  SITE 250: note = Tnp_P2
  SITE 258: note = Tnp_P3
  SITE 259: note = Tnp_P4
  SITE 271: note = Tnp_P5
MEHFAGIDVSLEQSSVCVVDGAGRIVRETKVASEPEALVRFFRELGIGMTRIGLEAGPLSQWLHAGLVAAEFEVVLLETRHVKAALSAMVIKTDRKDARGIAQLLRMGWFRPVHAKSPGAQEVRALLVARKLLQTKLLDVECSIRGILRGFGLKMGEVSKGRFVARVRELAAGHPMLERITEPMLRAREALRTEYARLHGEMLAIAKPDPVCRRLMTAPGVGALVAITFKSAVDDPGRFTRSRALGAYFGLTPKKYQSGEKDVTGAISRVGDPMGSLSTRRPISC

SEQ ID NO: 19729 - protein, 392 aa, unidentified
  source 1..392: note = protein_494af4c
  REGION 5..163: note = RuvC_domain
  SITE 8: note = RuvC_P1
  SITE 62: note = RuvC_P2
  SITE 102: note = RuvC_P3
  SITE 104: note = RuvC_P4
  SITE 107: note = RuvC_P5
  REGION 267..356: note = Tnp_domain
  SITE 275: note = Tnp_P1
  SITE 305: note = Tnp_P2
  SITE 313: note = Tnp_P3
  SITE 314: note = Tnp_P4
  SITE 327: note = Tnp_P5
MEPVVGVDVAKGSSVVQAFLRRNEPYGKLESIPHEECGFERLGELLAGLQTVTKTDPIVVLEATGHYHRGLAAYLERSGWTYFIVNPLQSKRAKGTQLRKVKTDAADAWHLADMYYRGDVTAHRIWDETYTELQHVTRQHEFVTGMFIQAKLNTRALLDQVFPAYEKVFRDLFSVTSLKVLARCLEGNFENNVEAIREDTGKSHSRRWAEEKAERLGEVLLHWRDQPRSRSQTVTLSGMVSLLLAFSEQLSELEKQMNEIAAALPEVELVKSIPGIGDKLAAAIVAEIGDARQFKDANQLVAFAGLDPGIFSSGKFTATSSRITKRGSKRLRRALYLAVQCGIRGSINAKIRNYYDRKRIEGKPYKVVVIACANKLLHHIFAILSKSQPYST

SEQ ID NO: 19730 - protein, 344 aa, unidentified
  source 1..344: note = protein_e6e43c6
  REGION 7..149: note = RuvC_domain
  SITE 10: note = RuvC_P1
  SITE 53: note = RuvC_P2
  SITE 88: note = RuvC_P3
  SITE 90: note = RuvC_P4
  SITE 93: note = RuvC_P5
  REGION 213..299: note = Tnp_domain
  SITE 221: note = Tnp_P1
  SITE 251: note = Tnp_P2
  SITE 259: note = Tnp_P3
  SITE 260: note = Tnp_P4
  SITE 272: note = Tnp_P5
MSEVITVGLDIAKHVFHAHGVDNRGRTIFSKRISRGKLLDFFAAQPRCTVALEACGGAHHWARQLAQLGHEVRLIPPAYVKPFAKRQKNDAIDAEAICEAAQRPNMRFVPMKSEQQQAAGLVFRTRDLLVRQRTQLINAVRGHLTEYGWIAPKGPSHVAELAHLIEEERMASSLPAAARAMFRLMLDQLASLNRRIAVLDKEIARRAREDEVSRRLMTIPGIGPISATAIAALAPPAETFAKGRDFAAWLGLTPVQRSTGGKQKLGATSKMGERTLRRLLIIGSSAVVQQACKRGAAKGSWLEQMLARKPRMLVTVALANKMARIVWALLVRREVYKAPAAASV

SEQ ID NO: 19731 - protein, 344 aa, unidentified
  source 1..344: note = protein_2915693
  REGION 7..151: note = RuvC_domain
  SITE 10: note = RuvC_P1
  SITE 55: note = RuvC_P2
  SITE 90: note = RuvC_P3
  SITE 92: note = RuvC_P4
  SITE 95: note = RuvC_P5
  REGION 214..301: note = Tnp_domain
  SITE 222: note = Tnp_P1
  SITE 252: note = Tnp_P2
  SITE 260: note = Tnp_P3
  SITE 261: note = Tnp_P4
  SITE 273: note = Tnp_P5
MNKLSRVGIDLAKNVFQLHGVDRYGKAVWRRRLTRDKWLNALLEKIEPGCEIGMEACSGAHYWARQLQAKGFTVKLIAPQFVKPYVKSNKNDANDAEAVCEAMSRPNMRFVAVKTVEQQDIQAAHRIRSELIGQRTAKGNQIRGLMAEYGLVAPIKLARLRSAVPAWLEDAENGLTNRFRGLLSGLWNDLTTLDRRVTELDHEINMIAQSNPVAKRLQQLRGVGPMVATALVATVGNARQFANGRQMAASLGLTPKQHSSGGKDRLLSISKRGDAHLRSILIHGARAVIQTARSKDDRLSQWVTSLAERRHPNVAAVALANKTARIAWAMLRYDMDYDPDYIAA

SEQ ID NO: 19732 - protein, 325 aa, unidentified
  source 1..325: note = protein_6fde59e
  REGION 1..77: note = RuvC_domain
  SITE 16: note = RuvC_P3
  SITE 18: note = RuvC_P4
  SITE 21: note = RuvC_P5
  REGION 184..270: note = Tnp_domain
  SITE 192: note = Tnp_P1
  SITE 222: note = Tnp_P2
  SITE 230: note = Tnp_P3
  SITE 231: note = Tnp_P4
  SITE 243: note = Tnp_P5
MHVKKSKELDDNSPTKNDTKDAKVIAQLIKDGRYSVPNLLDGIYAELREGAKLRDQLVKQLMITDGRIQNVIQRYFPEFFDVFKDWEGKAALCTLKSFPFPSQIKEMTPEEVLEKWKTQVKRGVGIKKATKLVEAARKSIGIQVGMKFAKREIDCLLEQYELYNQQIQQLDQELESLVEDLPGARQMMAIPGLGKTTVALFFAEVGDITKYSHPQQLVNLAGLSLKEHSSGKFKGQTTITKRGRKRLRRALYLAIRPLVVHNPAFKALHQYYTKRPKHPLKKQQSLIALCCKLLRVLFAIGNKQCDFDGAKLLQGLPQIETLQVA

SEQ ID NO: 19733 - protein, 402 aa, unidentified
  source 1..402: note = protein_bd5201b
  REGION 5..163: note = RuvC_domain
  SITE 8: note = RuvC_P1
  SITE 62: note = RuvC_P2
  SITE 102: note = RuvC_P3
  SITE 104: note = RuvC_P4
  SITE 107: note = RuvC_P5
  REGION 276..365: note = Tnp_domain
  SITE 284: note = Tnp_P1
  SITE 314: note = Tnp_P2
  SITE 322: note = Tnp_P3
  SITE 323: note = Tnp_P4
  SITE 336: note = Tnp_P5
MNPVIGLDISKDESHGQAFLERGKPYKGTFKFEHTREGLTKLLQAVQDVEHVSGLRPMLLLEATGHYQSPVVQFLEEHHYLYIVINPLISNRLRKSNLRKVKTDAADAYLLGELYYKEEFEPFKKRGVQLLNLRYLTRQYESLSKMCVQTKLQFQAVLDQVFPTYKGVFGAIYSSVSLRFLNEFPTSYLVLQSDEETLNSKVKELLPSRRGRSENWICVRVKRLLNAAKQNPFQQTMYSSHLVNLRVLISLILQYQGHLSRLEENIDALAEEMEEYDLIQSIPGIGPKIAATILSEIGEVDRFDHPKKLVAFAGIDPSVFASGKFTATRNRITKRGSRQLRYTLVMAVQCGLIRSRNLRLKDSYDRKRAEGKPHKVALIACANKLVHWLYVILKSKKSFRTA

SEQ ID NO: 19734 - protein, 323 aa, unidentified
  source 1..323: note = protein_e43e2ba
  REGION 4..152: note = RuvC_domain
  SITE 7: note = RuvC_P1
  SITE 57: note = RuvC_P2
  SITE 97: note = RuvC_P3
  SITE 99: note = RuvC_P4
  SITE 102: note = RuvC_P5
  REGION 197..283: note = Tnp_domain
  SITE 205: note = Tnp_P1
  SITE 234: note = Tnp_P2
  SITE 242: note = Tnp_P3
  SITE 243: note = Tnp_P4
  SITE 256: note = Tnp_P5
MFYLGVDVAKKKLDCMLLDSSSGKLKSKAVDNTADGFAKLLEWLDKQNAASAHVVMEPTGVYHEAAALALADAGLTVSFVNPAQLRSFAQGLGVKTKTDKQDSTVLAKYGATQKPAPWQPPSMSVRRLKALLTRRDAIADDLQRERNRQEANGFSLTPEAVSESIAQSIAFLEAELKRLEKMIASHIDNDPDLRNKKDLLETIPGVGPRVATHMTTLFAGRTFDSAEQLAAYLGLVPVERQSGTSVRGRPHMSKAGPAHLRKVLYMPAVVARRWNPHIKALNERLLAKGKSKMAAIGAAMRKLAHLCFGVVHTGKPYDPKFAM

SEQ ID NO: 19735 - protein, 280 aa, unidentified
  source 1..280: note = protein_52c33b4
  REGION 1..50: note = RuvC_domain
  REGION 153..240: note = Tnp_domain
  SITE 161: note = Tnp_P1
  SITE 191: note = Tnp_P2
  SITE 199: note = Tnp_P3
  SITE 200: note = Tnp_P4
  SITE 213: note = Tnp_P5
MLLSREYSLVTQSDIEYLSLKKLNRIRDSLVKQKSKCKILLTRNLDSIFPELHLLPSGIHSKAVYALLKKYPSSEEIAALGIDVLTNILKTNSRGHFCEKTACIIKSQAKSSVGFEDISLSFHISQLISSIELLEEQIRNTEKQINAIIEKLKPVILSIPGISNVACACILGEIGNISRFRSPSKLLAFAGLDPKVRQSGQFRALSCRMSKRGSKYLRYSLIYTAWNAVRNNEVFSNYYALKRSQGKNHYKALGHVAHKLVRVIYRLMKDNIPFDAEQLI

SEQ ID NO: 19736 - protein, 343 aa, unidentified
  source 1..343: note = protein_ab1e5ed
  REGION 6..147: note = RuvC_domain
  SITE 9: note = RuvC_P1
  SITE 52: note = RuvC_P2
  SITE 87: note = RuvC_P3
  SITE 89: note = RuvC_P4
  SITE 92: note = RuvC_P5
  REGION 212..298: note = Tnp_domain
  SITE 220: note = Tnp_P1
  SITE 250: note = Tnp_P2
  SITE 258: note = Tnp_P3
  SITE 259: note = Tnp_P4
  SITE 271: note = Tnp_P5
MQASTIGIDLAKSAFQVHGVDATGKVSISRQLRRGQLIDFFRKLPPCLIGMEACATAHHWARELTKLGHAVRLMPASYVKAYVKRSKNDAADAAAICEAVTRPNMRFVPIKTVEQQSALMLHRARDLLIRQRTQLINALRAHLAEIGLVAATGVDGVKSLVAIVIDGANRQQLPEAMRLALQPLVVQLIALGEQIGRLERSIHTQHRASYESQRLESVPGIGVISATAITATVTDPHAFKSGRDLAAWIGLVPRQHSTGGKQRLGGISKQGDRYLRRLLIVGAMAVIRQARTHPEKHAWVTKLLAKKPAKVVAVALANKVARIAWAILVKGGTYRAPALLAPA

SEQ ID NO: 19737 - protein, 432 aa, unidentified
  source 1..432: note = protein_657a7fb
  REGION 21..169: note = RuvC_domain
  SITE 24: note = RuvC_P1
  SITE 75: note = RuvC_P2
  SITE 109: note = RuvC_P3
  SITE 111: note = RuvC_P4
  SITE 114: note = RuvC_P5
  REGION 268..356: note = Tnp_domain
  SITE 276: note = Tnp_P1
  SITE 307: note = Tnp_P2
  SITE 315: note = Tnp_P3
  SITE 316: note = Tnp_P4
  SITE 327: note = Tnp_P5
MASLYFSGGALPMKVVYQTCCGVDVHKSFLVATIIKTTSGVQPSYQKKRFSTFNNSILEFKKWLLDNSCRDICMESTGKYWIPVFNLLEDEINVTIANPKWVKAVKGNKDDTKDSKWIGDLFRLGLVPGSYIPCKEIRILREFTRYRYKLTSCRSSEKNRFQNALTVCNVALDSVVSDIFGKSATSVIDYLLEQSDNSINHEEISSRLLRSLKKKSESVIESIEGYQMTDSQKYRMRLVHAHMDYITSTISDIDSMIDSLVEPYDNAVKLLCTIPGVDRNSAITIISEIGTDMSQFSNSKRLCCWAGLTPGNNESAGKKKSVRITRAGVYLKPALVQVAHAAVKSNKSPYYKAKYERIMKRRGKKRAIIAIARMILTAAYQMLSTGEVWNPTDLYKIDMPEPLKEKQKEKAIKQAKKLLIAEGIIEESLLAS

SEQ ID NO: 19738 - protein, 343 aa, unidentified
  source 1..343: note = protein_3fde9e0
  REGION 7..149: note = RuvC_domain
  SITE 10: note = RuvC_P1
  SITE 53: note = RuvC_P2
  SITE 88: note = RuvC_P3
  SITE 90: note = RuvC_P4
  SITE 93: note = RuvC_P5
  REGION 211..301: note = Tnp_domain
  SITE 219: note = Tnp_P1
  SITE 249: note = Tnp_P2
  SITE 257: note = Tnp_P3
  SITE 258: note = Tnp_P4
  SITE 270: note = Tnp_P5
MEEASVIGIDLAKNTFQVHGAKADGSVAYRKKLGRAKLLGFLAARPRCVVAMEACASAHYWGREIMALGHEVRLVPPVYVKPFVKRHKNDAADAEAITEAAQRPTMHFVEVKTEGQQARAMLFRTRDLLVRQRTQIINALRGHLAEFGIVAPQGTARTGRLAGALEDGDSGLPEAVVELGGLLLERIHELDDRIDGLNGELRECAREDKEEARLMTIPGIGPVTALAIQAFAPPMESFRRGRDFSAWLGLVPLQHTTGGKPRLGKISKMGQRDLRRLLISGAMAVIQSAIRRGETADPWLASMLERKPRTLVAVALANRTARIVWALSTKKEVYRVHTAAAAA

SEQ ID NO: 19739 - protein, 388 aa, unidentified
  source 1..388: note = protein_4916f16
  REGION 6..159: note = RuvC_domain
  SITE 9: note = RuvC_P1
  SITE 57: note = RuvC_P2
  SITE 98: note = RuvC_P3
  SITE 100: note = RuvC_P4
  SITE 103: note = RuvC_P5
  REGION 221..306: note = Tnp_domain
  SITE 229: note = Tnp_P1
  SITE 259: note = Tnp_P2
  SITE 267: note = Tnp_P3
  SITE 268: note = Tnp_P4
  SITE 279: note = Tnp_P5
MDGVVIGMDPHKRSVTIEVMAADETVVGGGRFGTDKDGYAAMLGYARRWPDRVWAIEGCAGIGRHVAHRLLAEGQEVVDVPPKLSARARVFATGQGRKTDATDAHSVALVGTRMVGLRPVVNDQQLAVLRILVDRRRSLGEDHTRMVSQLHQLLLELIPGGAKKDLSAAQAKALLAKVRPRDAAGKARRRVAAELISDLERIYKRKKAADKELRELVAATGTSLLDLKGIGPSGAARLLVEVGDITRFPDQNHFASWNGTAPIDASSGDQVRHRLSRAGNRQINRVLHIMATVQLRNPTEGRDYFDRKKASGKTSMEAMRCLKRRLSNLVYRHMVKDTITHATTGPGGQQGHDSDSSVTGSHPNTGSSDKPLPGPASTNPTTQLQTAS

SEQ ID NO: 19740 - protein, 320 aa, unidentified
  source 1..320: note = protein_4f195a6
  REGION 10..148: note = RuvC_domain
  SITE 13: note = RuvC_P1
  SITE 55: note = RuvC_P2
  SITE 95: note = RuvC_P3
  SITE 97: note = RuvC_P4
  SITE 100: note = RuvC_P5
  REGION 191..274: note = Tnp_domain
  SITE 198: note = Tnp_P1
  SITE 227: note = Tnp_P2
  SITE 235: note = Tnp_P3
  SITE 236: note = Tnp_P4
  SITE 248: note = Tnp_P5
MTILTSQTVVGIDIAKAEIVVYRSDLQAIDTIKNDRTALKRWLKTLPTQSALAVEATNIYHLDTVELAHAMGHQVYVVDAYRVSNYRRGIGQRAKNDPCDARLLARYLTNEQHELRLWNPPPKAYTTLKSLLHRRATLVKNHAGLMLSWADEPLLKKALIAQQKAFKEAIQAIQKLLQKVSKESGIEANIDRCKAIEGVGELVATGLATSFMRGDFADSDAFIAFLGKDLRVDDSGKKNGPRYLSKKGDPEIRRLAHIAAMTACRSPRWKPFYESYLVRGFSKTQALVVLARKLCRVAFALMKNQSEYQPKPMLQGCPAT

SEQ ID NO: 19741 - protein, 418 aa, unidentified
  source 1..418: note = protein_76a6f46
  REGION 4..160: note = RuvC_domain
  SITE 7: note = RuvC_P1
  SITE 57: note = RuvC_P2
  SITE 97: note = RuvC_P3
  SITE 99: note = RuvC_P4
  SITE 102: note = RuvC_P5
  REGION 274..361: note = Tnp_domain
  SITE 282: note = Tnp_P1
  SITE 312: note = Tnp_P2
  SITE 320: note = Tnp_P3
  SITE 321: note = Tnp_P4
  SITE 334: note = Tnp_P5
MNAAGIDVSSRKSMVAVLRPFGEVVMLPFEVRHDAKSLSHLAQTLKNLDGETRVVMEHTGRYYEPIANVLHDAGLFVSAVNPLLIKEYGGNSLRKVKTDKADATKIARYGLDNWADLRDYTPMDTIRYDLKTLNRQFHLAVKQKTATANNLIALQEQSFPGIRKCFTSPVRKDGTQKWVDFTHDFWHADCVRGVSKNAFTERYRKWCKRHGYSFRQDKVEDVYTLAKSVVVLVAKSEVTKLLVQGAADQLTSISRSVEIYRAEMNRLASMLPEYPFVMAMYGCGDSTGPQLMAEIGDVRRFATKKSLVAFAGIDPAPNDSGIKVSKSNKTTKRGSPYLRRTLFNIMEIYIRTSPADEPIFQFLDRKRAEGKPYYVYMTAGANKFLRRYYAQVNDYLKTLEPKEADPSQETTAETVSTS

SEQ ID NO: 19742 - protein, 321 aa, unidentified
  source 1..321: note = protein_f139bd0
  REGION 10..153: note = RuvC_domain
  SITE 13: note = RuvC_P1
  SITE 56: note = RuvC_P2
  SITE 96: note = RuvC_P3
  SITE 98: note = RuvC_P4
  SITE 101: note = RuvC_P5
  REGION 191..275: note = Tnp_domain
  SITE 199: note = Tnp_P1
  SITE 228: note = Tnp_P2
  SITE 236: note = Tnp_P3
  SITE 237: note = Tnp_P4
  SITE 249: note = Tnp_P5
MTSQNEAVCFGIDVSKHWLDIAEHPSAQVTRVDNTAAAIRGWLRTLPRGAQRIACESTGSYHCTLVKLLIKAGHQVFLIDGFKLSRYRDTVGQRAKTDRHDARLIARYLAHEGTDLRPFSLPAPAVTELRCLLRRRATVVRSLGRIRQSMEDLPGFAREVRVALARLTALIKRFEQRIASLINESGWTEPYRRILKIEGVGALTAAGLCAMFHRAAFSGADAFIAFLGMDVSVRDSGKKTGRRALSKKGDSEMRRLLYNAAMAASRSTTWQPFYQRMLQRGFSRTQALVALARKLARVAFSVMKNAADYVPKQHENACGGT

SEQ ID NO: 19743 - protein, 407 aa, unidentified
  source 1..407: note = protein_3933dca
  REGION 4..160: note = RuvC_domain
  SITE 7: note = RuvC_P1
  SITE 57: note = RuvC_P2
  SITE 97: note = RuvC_P3
  SITE 99: note = RuvC_P4
  SITE 102: note = RuvC_P5
  REGION 275..362: note = Tnp_domain
  SITE 283: note = Tnp_P1
  SITE 313: note = Tnp_P2
  SITE 321: note = Tnp_P3
  SITE 322: note = Tnp_P4
  SITE 335: note = Tnp_P5
MNAIGIDVSKGKSTVAVLRPFGEIVAEPFDVIHNDDDLNSLINRIKSLSGETKVVMEYTGKYFEPIANALHNAGIFVSLVNAILVHDYGGNSIRKVKTDKKDALKIASFALDKWVDLPEYTPEEDIRKTLKILNRQYIQFSKIQIMQKNNLISLLDTVFPNANSLFTSPQRKSDGHEKWVDFVSKFYHVDCVAKLSLSAFQLKYQSWCRKNNYYYKESQAEKIHTYAREQVSTLPMTDSVKLLIEQSVNQLNSILETLAAIRKEMDKLSSQLPEYNTVMDFYGVGTVLGSQLMAEIGDTRRFHNRKAITAFAGLDAPPYQSGTLDVKSRSISKRGSPSLRKTLFQVVDVIIKNQPENNAVYQFLDKKRSEGKPYKVYMMAAANKFLRIYYARVNEVLNMEIYSSETS

SEQ ID NO: 19744 - protein, 405 aa, unidentified
  source 1..405: note = protein_a14f94b
  REGION 4..160: note = RuvC_domain
  SITE 7: note = RuvC_P1
  SITE 57: note = RuvC_P2
  SITE 97: note = RuvC_P3
  SITE 99: note = RuvC_P4
  SITE 102: note = RuvC_P5
  REGION 274..361: note = Tnp_domain
  SITE 282: note = Tnp_P1
  SITE 312: note = Tnp_P2
  SITE 320: note = Tnp_P3
  SITE 321: note = Tnp_P4
  SITE 334: note = Tnp_P5
MNAVGIDVSKGKSTVTIRRPGDVVVMSPRDIPHTQSAINDLIGLIRGLDGETKACMEHTGRYYEPVATWLSDAGIFVSAVNPVLIKDFGDDSLRTPKTDKADSQKIARYTLDRWAKLKQYGIMDKARNQLKTMNRQFGFYMNQKTAMKNNLIALLDQTYPGANDFFGSPARSNGSQKWVDFVHTYWHVDCVRSRSLDAFTEHYQNWCRRKGYNFSASKAEDIYRLSSDIIAVFPKDDSTKLLIRQAVAMLNSASETVESLRLKMDEAASTLPEYPVVMAMNGVDPTLGPQLMAEIGDVTRFTHRGALTAFAGVDPGKDESGQHIRKSVPTTKKGSPYLRKTLFQIMDSLIKRSPVDDPVYAFMDKKRAQGKPYYVYMTAGANKFLRIYYGRVREYLSALAEAENI

SEQ ID NO: 19745 - protein, 352 aa, unidentified
  source 1..352: note = protein_a4e6523
  REGION 20..171: note = RuvC_domain
  SITE 23: note = RuvC_P1
  SITE 76: note = RuvC_P2
  SITE 116: note = RuvC_P3
  SITE 118: note = RuvC_P4
  SITE 121: note = RuvC_P5
  REGION 216..302: note = Tnp_domain
  SITE 224: note = Tnp_P1
  SITE 253: note = Tnp_P2
  SITE 261: note = Tnp_P3
  SITE 262: note = Tnp_P4
  SITE 275: note = Tnp_P5
MYKGNRRDGSVKGKMLMFQLGIDVSKKTLDLCLLREGVKGRVKTRKLKNDVDAACSVIDWLRRQRCEPADVHIIMEATGVYHESLAYGLHTAGARVSLANPHRSREFARGMGIMTKNDSVDAWVLACYGALKEPAPWEPPPENVRYLSALLRHRDTLVTDCTREKNRLEKCRATDTPDAIIESIGNVLQSLSAETDHLDNLIREHLEQYPELKKDFDLLTSIKSVGFQLGLNMLVILRGHRFDTAEQAAAFLGVVPVEKFSGTSVRGKPRMSKIGPPEIRAKLYLAALCGLRFNPVMKAMYERLCLSGKAKMCAIGALMRKLVHWCYGVLKTQKPFDAEYLSSDARSACQAA

SEQ ID NO: 19746 - protein, 346 aa, unidentified
  source 1..346: note = protein_01f3239
  REGION 6..147: note = RuvC_domain
  SITE 9: note = RuvC_P1
  SITE 52: note = RuvC_P2
  SITE 87: note = RuvC_P3
  SITE 89: note = RuvC_P4
  SITE 92: note = RuvC_P5
  REGION 211..304: note = Tnp_domain
  SITE 219: note = Tnp_P1
  SITE 249: note = Tnp_P2
  SITE 257: note = Tnp_P3
  SITE 258: note = Tnp_P4
  SITE 270: note = Tnp_P5
MQVSTMGIDLAKNLFVLHGVDHNGKTVLRKKLSRRQFVPFIIQLPACLIGMEACSSSHHFARLFSNAGHRVKLIPPQYVKPYVKTNKTDAADAEAICEAVTRPNMRFVQIKTAEQQGVLALHTERSFLVRERNGCANSLRAMLAEFGCVMATGFSALYKAVPEILEDEENELPHFVRVSVQRQLEHLKTLETRIRQTEHELSDWARTQPACQRVEKVPGVGLMTATYLVASIGNGRQFGTAKQFASWLGLTPREHSSGGKQKLGGISKRGDSYFRCLLVHGARAVLRHISKNEKRMPWLAALVRRKHRNVAAVAQACKTARILWSMLFHETEYRPLTEALRHQRQH

SEQ ID NO: 19747 - protein, 343 aa, unidentified
  source 1..343: note = protein_5c3a63d
  REGION 6..148: note = RuvC_domain
  SITE 9: note = RuvC_P1
  SITE 52: note = RuvC_P2
  SITE 87: note = RuvC_P3
  SITE 89: note = RuvC_P4
  SITE 92: note = RuvC_P5
  REGION 212..297: note = Tnp_domain
  SITE 219: note = Tnp_P1
  SITE 249: note = Tnp_P2
  SITE 257: note = Tnp_P3
  SITE 258: note = Tnp_P4
  SITE 270: note = Tnp_P5
MKATTIGIDLAKSVLQVHGVDARGNAVVRKQLKRDQVLPFFGNLAACRIGMEACGSAHYWARKLEKLGHSVKLMAPQFVKPYVKTNKNDAADAEAICEAVSRPNMRFVPIKNGEQQAVLALHRARQGFVTARTAQANQIRGLLSEYGIVIPQGLSHVSKRLPEILEDGENDLPGVFRQLLQRLGDHLRELHRQVGELELQIQLWHRQHDASCRLARIPGIGPLTASALVASIGDAKSFANGRQLAAWLGLVPRQHSSGGKSVLLGISKRGDSYLRMLLVHGARAVIRVAEKKPGYADSWLARLIGRRHPNITAVALANKNARIVWALLKHDRDYRIGYQPAMT

SEQ ID NO: 19748 - protein, 347 aa, unidentified
  source 1..347: note = protein_45d09ec
  REGION 6..147: note = RuvC_domain
  SITE 9: note = RuvC_P1
  SITE 52: note = RuvC_P2
  SITE 87: note = RuvC_P3
  SITE 89: note = RuvC_P4
  SITE 92: note = RuvC_P5
  REGION 211..297: note = Tnp_domain
  SITE 219: note = Tnp_P1
  SITE 249: note = Tnp_P2
  SITE 257: note = Tnp_P3
  SITE 258: note = Tnp_P4
  SITE 270: note = Tnp_P5
MNLTTIGIDLAKNVFQIHGVDGQGKTRLRKQLKRSQIRAFFANLPSCLIGMEACGGAHHWARELQKHGHTVRLMAPQFVKPYVKTNKNDVADAEAICEAVGRPNMRFVPIKNVDQQALLALHRARQSFVQARTAQVNQLRGLLAEFGLTLPSGIHHVLRQLPGILEDGENGLPGLSRELFQRLYEHCRELDRQVKEIEAQIQSWHRTNPMSQRLEAIPGIGPITASALVASIGNAGSFKNGRQLAAWLGLVPRQHSSGGKEQLLGISKRGDTYLRTLLIHGARSVLWHVKGKTDACSCWLERLVARRNANVAAVALANKNARIVWALLRRECDFKASYCVSPQRATA

SEQ ID NO: 19749 - protein, 323 aa, unidentified
  source 1..323: note = protein_e777e8b
  REGION 5..155: note = RuvC_domain
  SITE 8: note = RuvC_P1
  SITE 58: note = RuvC_P2
  SITE 98: note = RuvC_P3
  SITE 100: note = RuvC_P4
  SITE 103: note = RuvC_P5
  REGION 195..281: note = Tnp_domain
  SITE 203: note = Tnp_P1
  SITE 233: note = Tnp_P2
  SITE 241: note = Tnp_P3
  SITE 242: note = Tnp_P4
  SITE 254: note = Tnp_P5
MSSIIGVDIAKDSFDIATLQANGKYRTKAKLANKLAGFEVLESWLEQHSEPGAWIVMEATGIYHEALAEYLYGLGFKVCVMNPAQISSYAKSQLQRVKTDKVDAKLIADYGLRHVDQLRAWQPEPKATKQLRALLRRLKDLQEFQQMERNRLEVASSNVRPSIEAMLEHTAAQIAETEKQIRDHIDDDPDLRGKLDLLTTIDGIGKLTAAQLLAELGDPLRFANARAITAFAGLNPRLQESGNQRGHVRISRVGSSRLRACLYMPGVVSLSCNAAVQAMAQRLRERGKAGKQIICAAMRKLLHIAYGVLKSGQPFDAQKALAH

SEQ ID NO: 19750 - protein, 343 aa, unidentified
  source 1..343: note = protein_42bddc2
  REGION 6..147: note = RuvC_domain
  SITE 9: note = RuvC_P1
  SITE 52: note = RuvC_P2
  SITE 87: note = RuvC_P3
  SITE 89: note = RuvC_P4
  SITE 92: note = RuvC_P5
  REGION 211..299: note = Tnp_domain
  SITE 219: note = Tnp_P1
  SITE 249: note = Tnp_P2
  SITE 257: note = Tnp_P3
  SITE 258: note = Tnp_P4
  SITE 270: note = Tnp_P5
MQIVRVGLDLAKYVFEVHGVDGRGKVVLRKTLRRDAVSSFFANLPSCLIGMEASNGAHYWARVLSGLGHEVRLISPQFVTPYVKSNKNDRNDAEAICEAVGRPTMRFVPAKSVDQLAVQAVHRIRSRLVSGRTRLANQIRGVLAEHGVIVARNIAKLRQNLADIVGNRGNGLSDLVRALVGELQQELADLDRRITTYDRRIRELYRGSEVCQRLGQIEGIGPLSATALVAAVGDRQGFKNGRQFAAWLGLVPKQRSSGGRDRLFGISKRGDRYLRTLLIHGARAALGRAGGKQDPRSRWLGKLRERRHPNIAAVALANKNARIAWALLSNGEAYDPGLTVGSA

SEQ ID NO: 19751 - protein, 344 aa, unidentified
  source 1..344: note = protein_1ca7c68
  REGION 5..152: note = RuvC_domain
  SITE 8: note = RuvC_P1
  SITE 55: note = RuvC_P2
  SITE 92: note = RuvC_P3
  SITE 94: note = RuvC_P4
  SITE 97: note = RuvC_P5
  REGION 212..299: note = Tnp_domain
  SITE 220: note = Tnp_P1
  SITE 250: note = Tnp_P2
  SITE 258: note = Tnp_P3
  SITE 259: note = Tnp_P4
  SITE 271: note = Tnp_P5
MDHFAGLDVSVKETSVCIVDDTGRIVKEVKVASEPQSLLKVLGSPAYRFKRIGLEAGPLSQWLFSALAEAALPVICVETRHMQAVLKAQINKTDRNDARGIAQMMRAGLYRPVHVKTLRSQKQRMLLTHRKLLQSKAIAIENDLRGTLRNFGLKVGMVGKVRFEARIQELVENQPDLAILVEPLLIVRRVLREQIVILHRRLLATVRNDEVCRRLMTTPGVGPVVALTYRATVDVPARFRKSKSVGAVFGLTCSRYQSGEIDWSGKISRCGDEMMRTMLYEAAQSMMHSKKWSWLKAWAMQIARRRGMKKAIVALARRLAVIMHRIWVDGTEFRWTREQAAAAA

SEQ ID NO: 19752 - protein, 266 aa, unidentified
  source 1..266: note = protein_4b654ba
  REGION 2..75: note = RuvC_domain
  SITE 14: note = RuvC_P3
  SITE 16: note = RuvC_P4
  SITE 19: note = RuvC_P5
  REGION 138..226: note = Tnp_domain
  SITE 146: note = Tnp_P1
  SITE 176: note = Tnp_P2
  SITE 184: note = Tnp_P3
  SITE 185: note = Tnp_P4
  SITE 197: note = Tnp_P5
MPPSYVKPYVKRQKNDMADAEAICEAVTRPTMRFVPVKSPEQQSVMVLHRTRSILIRQRIQISNAIRSHMAEFGMAAAVGRQGLQALIAIVEDSSDVRVPGEARGCLGMLAAQLRLVNDQILDTDRLIRTNARSTEVGRRLMEIPGVGPLLASALVGTITDPKAFKTGRNLAAWIGLVPRQNSSGGKERLGGITKQGDRYLRQMLVVGALAVVRYAVRNGTRRPWLVQLLARRTPKVAAVALANKTARMVWAIMTSGERYREPLAA

SEQ ID NO: 19753 - protein, 342 aa, unidentified
  source 1..342: note = protein_1e9764f
  REGION 6..148: note = RuvC_domain
  SITE 9: note = RuvC_P1
  SITE 52: note = RuvC_P2
  SITE 87: note = RuvC_P3
  SITE 89: note = RuvC_P4
  SITE 92: note = RuvC_P5
  REGION 211..297: note = Tnp_domain
  SITE 219: note = Tnp_P1
  SITE 249: note = Tnp_P2
  SITE 257: note = Tnp_P3
  SITE 258: note = Tnp_P4
  SITE 270: note = Tnp_P5
MQISTIGLDIAKNVFQVHGIDATEKVIVRKQLRRGQVMKFFAALPPCLVGMEACATAHYWARELTKLGHEVRLMPAKDVKAYVKRNKNDAADAEAICEAVRRPTMRFVRAKSAEQQGRLMQHRTRDLLLRQQTQVINALRAHLAELGIVAAQGREGLKQLLAIIADQADARLPLDARACLIVLAAQLQALHTLIKSIEKRLLVQHRANEASKRLESIPGIGIIGASAIAATVTDPKAFQSGRDFAAWIGLVPRQDSTGGKQKLGPISKQGDRYLRRILVVGAHAVMRWAKQNPGKYPWLTQLLARRPFKVVAIALANKMARVAWALLASGAKYRAPRLAAAT

SEQ ID NO: 19754 - protein, 387 aa, unidentified
  source 1..387: note = protein_e0b5764
  REGION 5..158: note = RuvC_domain
  SITE 8: note = RuvC_P1
  SITE 56: note = RuvC_P2
  SITE 97: note = RuvC_P3
  SITE 99: note = RuvC_P4
  SITE 102: note = RuvC_P5
  REGION 220..305: note = Tnp_domain
  SITE 228: note = Tnp_P1
  SITE 258: note = Tnp_P2
  SITE 266: note = Tnp_P3
  SITE 267: note = Tnp_P4
  SITE 278: note = Tnp_P5
MSVIIGMDPHRRSATIEVVDERGRVLAVGRFGTDKAGYADMLAAGRKYADRVWAVEGCNGIGKHIAHRLVHDGETVLDVPAKLSAQVRVFATGNGRKTDPVDAHSGAMVALRSPNLVQVQVDPDLQVMGMLADRRDELGRARTQTINRLHRLLLELLPGGAKKFLSAPQARALIATVKPRDIVGKTRRRLAVELISELEGIDKKIKSADKDLKALVLARGSTLMELHLIGPSGAARLLADVADISRFADRDRFASWNGTAPLDASSGDQKRHRLSRAGNRRINRTLHIMAVVQLRNRTEGRAYFDAKKGAGKTSMEAMRALKRRLSNVVYARMVADQKRRQAADPGGHSGTTLQSSVTDLTPDIGPSDKPLPGPATSQPKPALRAVS

SEQ ID NO: 19755 - protein, 350 aa, unidentified
  source 1..350: note = protein_db4407c
  REGION 8..129: note = RuvC_domain
  SITE 25: note = RuvC_P2
  SITE 66: note = RuvC_P3
  SITE 68: note = RuvC_P4
  SITE 71: note = RuvC_P5
  REGION 237..323: note = Tnp_domain
  SITE 245: note = Tnp_P1
  SITE 276: note = Tnp_P2
  SITE 284: note = Tnp_P3
  SITE 285: note = Tnp_P4
MVADHFPEDWIQLESEQIQGLVKVGIETDRGPWVAAALVAAGYEVFAINPLSVSRYRERHSTAGANSDAGDAHVLAEIVRVDRAHHRPLADDSEEAEAIKLVARTHQSLTWERSRHVLRLRAALRDFFPAELEAFADLDAPDALELLAAAPGPDRAGRLNRRQIITALRRAKRRDVEARAAELLQIFGAEQLRRSAPVETAYAAIVASQATIIATLNTQIDQMATVGEAHFGRHPDAEIYANQTGLGVVLAARVLGEFGDDPHRYTDAKARKNYADTAPITRASGKKKIVLARYARSRRLGDALQQWAFCSLRGSPGARAYYRQLAPAASDTTPLCARSRTASSASSTAA

SEQ ID NO: 19756 - protein, 333 aa, unidentified
  source 1..333: note = protein_a01deea
  REGION 25..191: note = RuvC_domain
  SITE 28: note = RuvC_P1
  SITE 72: note = RuvC_P2
  SITE 112: note = RuvC_P3
  SITE 114: note = RuvC_P4
  SITE 117: note = RuvC_P5
  REGION 207..292: note = Tnp_domain
  SITE 215: note = Tnp_P1
  SITE 244: note = Tnp_P2
  SITE 252: note = Tnp_P3
  SITE 253: note = Tnp_P4
  SITE 264: note = Tnp_P5
MVEGTEGSHHKEGATKMSKSTTMCAGIDTGKHKLDAAIDGCTERLQVDNNAEGHRALSAWLRQRRVERIGIEASGGYEQAVVSSLRADGFVVIVFQPIQVRAYAKFVLQHAKNDAIDAALIARCTAAATDTREPPDARLAPLARHLTLIEQLTEDVGQLKTRREACREERIREFWKQEINRLKALLSSELKRLVAAIREHRDLSDRLDLIASVDGVGLRTAVAILVRMPEIGRITREQAAAIVGLAPYDDDSGLRRGSRRIKGGRQRLRQSLYAAALPAVFYWNAQLKAVYKRLLAAGKPHRLALVACARKLIIFVNTVVARGTPWTSSAAAT

SEQ ID NO: 19757 - protein, 403 aa, unidentified
  source 1..403: note = protein_4ced496
  REGION 4..160: note = RuvC_domain
  SITE 7: note = RuvC_P1
  SITE 57: note = RuvC_P2
  SITE 97: note = RuvC_P3
  SITE 99: note = RuvC_P4
  SITE 102: note = RuvC_P5
  REGION 269..355: note = Tnp_domain
  SITE 277: note = Tnp_P1
  SITE 308: note = Tnp_P2
  SITE 316: note = Tnp_P3
  SITE 317: note = Tnp_P4
MINVGIDWAEAHHDVCVEHGGGHVLDKGRVPDGIEGVEAIHEMLGAHATDPSEVVIGIELDRGLLVGALVAAGYEVHAVNPLAVSRYRDRLAPAGAKSDPGDARVLAEAMRTDRHLLREVAGDSTEAEAVKVLARAHQNLVWTRQRVGNQLRSALREFYPGALHTFSELASADAIAVLQIAPTPTTGRALSKAKVRKALAGGGRERRLDARASEIVEGLGAPQLSAPALVEEAFGHQVASLVAVLGALRTQIEELRAELERSLEGHPDAEIITSLPGLSSVLGARVLAEFGDDRTRYADARARRSYAGTAPITKASGTRKVVLARVARNRRLADACYGWAFSSLLRSPGARAFYDRQRATGKTHHQALRALGNRWVGILHGCLEHRTTYREDVGWGGQLETAA

SEQ ID NO: 19758 - protein, 341 aa, unidentified
  source 1..341: note = protein_f017d2f
  REGION 14..166: note = RuvC_domain
  SITE 17: note = RuvC_P1
  SITE 65: note = RuvC_P2
  SITE 106: note = RuvC_P3
  SITE 108: note = RuvC_P4
  SITE 111: note = RuvC_P5
  REGION 229..309: note = Tnp_domain
  SITE 237: note = Tnp_P1
  SITE 267: note = Tnp_P2
  SITE 275: note = Tnp_P3
  SITE 276: note = Tnp_P4
  SITE 287: note = Tnp_P5
MPSAPALTSSQVVIAIDPHKASWTAVVVDARLQAVASIRVPVNRDGYRQLRRFSRRWPDASWAIEGAAGLGAPLTTRLAADDVHVVNVPAKLARRVRLLSTGHGRKTDEADALSVGIAALTATRLNTAVIDEALAALRAVTEHRDDLVRTRTQTVNRLHVLLAHLIASGLPRKLTAEAAAAALRTIRPRTLLARTVRRLAVELLAELRRLDRRITDATAALGAAVAASGTTLTELHGIGDVMAAKILARTGPVSRFRSESAFASFCGVAPIEVSSGDVQRHRLSRAGDRQLNYALHVMAMTQPSDPLRAGTTTSANEPPGRLTRKPCAASSGGSPTSSSEP

SEQ ID NO: 19759 - protein, 343 aa, unidentified
  source 1..343: note = protein_e2700d4
  REGION 7..149: note = RuvC_domain
  SITE 10: note = RuvC_P1
  SITE 53: note = RuvC_P2
  SITE 88: note = RuvC_P3
  SITE 90: note = RuvC_P4
  SITE 93: note = RuvC_P5
  REGION 212..299: note = Tnp_domain
  SITE 220: note = Tnp_P1
  SITE 250: note = Tnp_P2
  SITE 258: note = Tnp_P3
  SITE 259: note = Tnp_P4
  SITE 271: note = Tnp_P5
MKQITTIGLDLAKQFFQVHAADAEGSPVLSRKLRRAEVLGFFEKQPACLVGIEACGSAHHWAREIASLGHEVRLIPPAYVKPFVKRGKTDAADAEAISEAVTRKTMRFVPVKSAEQQAAAMVLKTRALLVRQQTQVVNALRSHLSELGIIAGIGTARIAGLISIVRDETDARLPAAARFALTTIADQIEALALQINKLERELVSQAKHDEDMRRLVTIPGVGAVTAASIKALIPDPNGFRSGRHLAAWLGLTPKSHSSGGKERLVGISKMGNPELRCLLVLGATAVLRHARGNDNAPKWLCDLLARRPYKVAAVALANKMARIIWALLTKGGVYRGLDRAQRA

SEQ ID NO: 19760 - protein, 353 aa, unidentified
  source 1..353: note = protein_a1e7554
  REGION 4..158: note = RuvC_domain
  SITE 7: note = RuvC_P1
  SITE 56: note = RuvC_P2
  SITE 97: note = RuvC_P3
  SITE 99: note = RuvC_P4
  SITE 102: note = RuvC_P5
  REGION 220..306: note = Tnp_domain
  SITE 228: note = Tnp_P1
  SITE 258: note = Tnp_P2
  SITE 266: note = Tnp_P3
  SITE 267: note = Tnp_P4
  SITE 278: note = Tnp_P5
MIVIGIDPHKSTHTATAVDPVTNTDLGSIRIDATLADYKTLIAWAKAWPQRQWAVENAEGLGHHLAQWLVVLGEMVLDVPATATARVRQLSRGGRRKNDRIDAAAAACVAALQGDARPVVPEGPTDVLALLDERRTNLCNNRTRIANQLHALLRQLLAGGAPTSLTAASATALLRGFRARSEVDRTRVGLCRDLIADLRRLDDRLAVNEKQMTQALDEHGTRLREVDGIGPVTAARLIGRTGRVSRFPTAAAFANYNGSAPVQIASADTDRHRLSRYGDRQLNSALYTIAMVQIRMPASTGRGYYDKKIAEGKSGRAANRSLKQHLSDHVWRIMLADEKRSHRQREEESERAA

SEQ ID NO: 19761 - protein, 407 aa, unidentified
  source 1..407: note = protein_f2f6ee6
  REGION 4..163: note = RuvC_domain
  SITE 7: note = RuvC_P1
  SITE 60: note = RuvC_P2
  SITE 100: note = RuvC_P3
  SITE 102: note = RuvC_P4
  SITE 105: note = RuvC_P5
  REGION 271..357: note = Tnp_domain
  SITE 279: note = Tnp_P1
  SITE 310: note = Tnp_P2
  SITE 318: note = Tnp_P3
  SITE 319: note = Tnp_P4
MLFAGDDWAEDHHDIEVQDERGRVLARARLPEGVAGLTRLHALIGQFADLDVEPGEVAFGIGTDRGLWVTALHTAGYAVYAINPRQVARYRERHGTSGAKSDKAGSHTMAGMVRTDSHQLRPVAGDSPGAEAIKVAARTHQTLIWERTRQVQRLRHQLREYFPAALEAFEELDAPDALDLLARAPDPARAARLTRAQIAAALKRARRRGIAGKTDAILAALRGEQLCQPQPVTAACAAAVSSLTVIIAALNGEIAKMEQQVTACFRGHPDAAIYLSQPGIAEIPGARQLGEFGDDPHRYASARARKNYAATSPVTRQSGKKKIVLARFIRNDRLADALHRQAQSALRASPGARAFYDEQRGRGLDHNAALRALSNRLVGILHGCLKTRTLYDEATAWSHRVTTSGAA

SEQ ID NO: 19762 - protein, 341 aa, unidentified
  source 1..341: note = protein_2807d7c
  REGION 5..152: note = RuvC_domain
  SITE 8: note = RuvC_P1
  SITE 55: note = RuvC_P2
  SITE 92: note = RuvC_P3
  SITE 94: note = RuvC_P4
  SITE 97: note = RuvC_P5
  REGION 212..296: note = Tnp_domain
  SITE 220: note = Tnp_P1
  SITE 250: note = Tnp_P2
  SITE 258: note = Tnp_P3
  SITE 259: note = Tnp_P4
  SITE 271: note = Tnp_P5
MNHYVGIDVSLEASSLCVVDANGKIAREGKVASEPDALIAWLRGLKLEQTRIGLEAGPLSQWLFAAMRQAGFAVELLETRHVCTALKTMPVKSDRNDARGIAQLMRMGWFRPVHCKSIAAQETRALLTARKLLQGKLHDIEMSLRGILRGFGLKVGPATPVHFEERIRELVAGHPSLETIAEGLLAVRVALRREFDRFEKQVRATARGDRRARLLMSVPGVGAIVSLTFASAIDDPARFKSSKQVGAYFGLTPTKYQSGETDIDGRISKVGDGWVRAALYEGAHIILTKPLKGCTALKSWAMKIARRAGMKKAKVALARKLAVIMHRMLVDGTSFRNLAAV

SEQ ID NO: 19763 - protein, 392 aa, unidentified
  source 1..392: note = protein_e823fec
  REGION 10..163: note = RuvC_domain
  SITE 13: note = RuvC_P1
  SITE 61: note = RuvC_P2
  SITE 102: note = RuvC_P3
  SITE 104: note = RuvC_P4
  SITE 107: note = RuvC_P5
  REGION 226..310: note = Tnp_domain
  SITE 233: note = Tnp_P1
  SITE 263: note = Tnp_P2
  SITE 271: note = Tnp_P3
  SITE 272: note = Tnp_P4
  SITE 283: note = Tnp_P5
MSQEFPRVVIGMDPHKRSVTIEVMDGDEHVLGGGRFATGTAGYRSMLDSVGAWPNRIWAIEGCNGIGRHIAHRLIADREQVVDVPPKLSARARVFATGQGRKTDATDAHSVALVGTRMTGLRPVVADEQLEVLRLLVDRRRALGEEHTRKVSQLHALLLELIPGGAKVFLSAAQARKLLASVRPRDVVGKTRKRVATELVIDLEKIYARTKAADKELTELVKATGTGLLDLHGIGPSGAARLLVEVGDITRFPDRAHFASWTGTAPIDASSGDHVRHRLSRGGNRQINRVLHVMAVVQLRNPTEGRAYFDRKKTTGKTSMEAMRCLKRRLSDLIYKTMLDDLVAAQKTGPGGQPGNDSVSSATGSQPSTGSSDKSHPEPAKTKPNRTLPAAS

SEQ ID NO: 19764 - protein, 313 aa, unidentified
  source 1..313: note = protein_1ad01b4
  REGION 8..155: note = RuvC_domain
  SITE 11: note = RuvC_P1
  SITE 55: note = RuvC_P2
  SITE 95: note = RuvC_P3
  SITE 97: note = RuvC_P4
  SITE 100: note = RuvC_P5
  REGION 190..274: note = Tnp_domain
  SITE 198: note = Tnp_P1
  SITE 227: note = Tnp_P2
  SITE 235: note = Tnp_P3
  SITE 236: note = Tnp_P4
  SITE 247: note = Tnp_P5
MSKAEAVVGIDVSKAVLDIAILPMNETFQVANDEAGWVALIERVGALAVKAIGLEPSGGYERGLVKALRQAGLPVRLVNPYRVRQFARAFGRLAKNDRIDAAMIARFAAELPPRTPRIDPVVERMAELVTARRQLTEDRVRLKNRLEQVRDPVLRRMHRHRLARIDAEILLIGKRLTQIVADTPELAAKDRLIQSMPGAGPVLSHTLLAMVPEIDDVDRREIAALVGVAPFDDDSGKRAGKRAIWGGRAEVREVLYMAALSAARCHPTLKPFRERLIADGKTPKMAIIAVARRMLGIILAMLRNGQEWNPALA

SEQ ID NO: 19765 - protein, 313 aa, unidentified
  source 1..313: note = protein_88ebe55
  REGION 7..151: note = RuvC_domain
  SITE 10: note = RuvC_P1
  SITE 54: note = RuvC_P2
  SITE 94: note = RuvC_P3
  SITE 96: note = RuvC_P4
  SITE 99: note = RuvC_P5
  REGION 190..274: note = Tnp_domain
  SITE 198: note = Tnp_P1
  SITE 227: note = Tnp_P2
  SITE 235: note = Tnp_P3
  SITE 236: note = Tnp_P4
  SITE 247: note = Tnp_P5
MMTNITIGADISKEHIDLHSLPDGGTLKVANDRKGFAAIVRWIGTIGVERIVYEPTGTYHKAFERFMTTQGVPLSKVNPRSARRFAEATGRLAKTDTIDAAMLARYGTLLEPRLLQASAQINNDLKELHVARLALIKDGTAAKNRAKTLSSPLLKRQNADRLRQIERQIKAVDQAILALIAEDTLLKARFDILVSIPGVSRITAFTLLIEMPELGEMDEKAAAALCGLAPMSRQSGRWTGRAFIAGGRAIVRQALYIPALVACRFNPDLKAKYDQLKAAGKEPKVAITAIMPKVIVLANALIRTNRKWEPKPT

SEQ ID NO: 19766 - protein, 407 aa, unidentified
  source 1..407: note = protein_ab35213
  REGION 4..160: note = RuvC_domain
  SITE 7: note = RuvC_P1
  SITE 57: note = RuvC_P2
  SITE 97: note = RuvC_P3
  SITE 99: note = RuvC_P4
  SITE 102: note = RuvC_P5
  REGION 269..355: note = Tnp_domain
  SITE 277: note = Tnp_P1
  SITE 308: note = Tnp_P2
  SITE 316: note = Tnp_P3
  SITE 317: note = Tnp_P4
MIFVGVDWAEAHHDVFVQNEDSKRLAGGRLPEGVEGIARFHEMVGHHAEEPEEVVIGIETDRGLFVGALVAAGYQVFAVNPMSTSRYRDRHSTSGAKSDPGDAKVLADMVRTDRHNHRPVAGDSELADAIKVLARAHQTMIWSRTRQTNFLRSTLREFYPAALVAFDDLTSGDALEVLKAAPTPTLGAGLSRSKIAAALRRGGRQRRVDQRAEEIQKDLRTPQLQGSALVATAMGSSVSATVTVIATMNTQVAELARELEAHFEQHPDAEVIRSLPGLGTILSARVLGEFGDEPNRYATAKSRKNYAGTSPITRASGTKRTVLARHVRNKRLADAVYFWAFASMSASPGARAFYDYRRAAGDTHHAALRTLGNRLVGILHGCTVSHTVYDETTAWGHRAELEQALAA

SEQ ID NO: 19767 - protein, 347 aa, unidentified
  source 1..347: note = protein_970c685
  REGION 8..149: note = RuvC_domain
  SITE 11: note = RuvC_P1
  SITE 54: note = RuvC_P2
  SITE 89: note = RuvC_P3
  SITE 91: note = RuvC_P4
  SITE 94: note = RuvC_P5
  REGION 212..300: note = Tnp_domain
  SITE 220: note = Tnp_P1
  SITE 250: note = Tnp_P2
  SITE 258: note = Tnp_P3
  SITE 259: note = Tnp_P4
  SITE 271: note = Tnp_P5
MNANAKVAGLDIAKEVFVAVGLDRNGKTVMKLKMKRSEVLPTFRKLQPMALGIEACSGSHYWARELKALGHDVKLIAAQHTRAFVSGNKNDTNDAAAIAEARSRSSTKYVPINTPAQQDLQMLHRARSALMSERIAMINRIRAFAGEYGRVFAAGVAKFKAGLLAWLADPDNGLSGMALATFRELKEQLDDKEQRMLAYERKLNQAAKSEVAQKLMEVPGVGPLTATAVMASVADPHHFRSGRDFAANLGLVPREHSSGGKQRLYGITRKGDSHLRTLLIHGARSALRCAGNKTDSQLRWASNLAQRRNFNVASVGLANKMARVIWAILAHGRSYVPVWPNSTTRPA

SEQ ID NO: 19768 - protein, 401 aa, unidentified
  source 1..401: note = protein_7cae1b7
  REGION 7..172: note = RuvC_domain
  SITE 10: note = RuvC_P1
  SITE 63: note = RuvC_P2
  SITE 103: note = RuvC_P3
  SITE 105: note = RuvC_P4
  SITE 108: note = RuvC_P5
  REGION 272..357: note = Tnp_domain
  SITE 280: note = Tnp_P1
  SITE 310: note = Tnp_P2
  SITE 318: note = Tnp_P3
  SITE 319: note = Tnp_P4
  SITE 330: note = Tnp_P5
MDPQIRVGIDVGCKAHRVAISDPHGSILEEFDISHTGAGFRDFFRRIDHHRQKLDLPVAVAMEGFNGYARPLDRLIQERGYILYNVNNLKLARFKEVFPGAAKTDPIDTRKILELFHLKDHLPLAKDVLQKVVLAPPVNDKLKRLSRRRRQLVNEKVRVANRLQSDMQAVCPELLTITNNVSNLKFLRFLTYRAELTQLARLRYTTLLAIPSVGQKYARTIQEWQRKASFSTEVEYVGPMIIQDAKRLLELRQQIHALDEVMAELADQSELACRIGSVQGFGKTCIAELAGEIGTTERFAGERSLALYVGMSPLSRDSGQHHGSKRPRSVNHRAKAAMMTAVAHHIRCVPESRTYYDKKRAEGKTHNQAVRSLGRHLVRVIWSMVKNERDYELREVIPSVT

SEQ ID NO: 19769 - protein, 399 aa, unidentified
  source 1..399: note = protein_0ec213a
  REGION 1..134: note = RuvC_domain
  SITE 36: note = RuvC_P2
  SITE 71: note = RuvC_P3
  SITE 73: note = RuvC_P4
  SITE 76: note = RuvC_P5
  REGION 261..348: note = Tnp_domain
  SITE 269: note = Tnp_P1
  SITE 300: note = Tnp_P2
  SITE 308: note = Tnp_P3
  SITE 309: note = Tnp_P4
  SITE 321: note = Tnp_P5
MIEQFRIDHGPAGVAALIERALRLEPDPAEVRVVLETRHGLLVEALIDAGFTVVPVNPDVVARRRGPARKKDDAEDARICCLLALDRHAALKTLVPHGEIGGELRAIGRDDERAARDQRRLLNRLRADLQTTYPAALALAGKDLGAPTVLRLLERWPTQPELAQASHAELVAFARAGRHGWPERFADRVTAALAAPSLPTRDYLVRAKAAGIRLAAVQLLALHEARHGWQARMAELLLGGPRTGRDHTVKDPDPGKAFPGGEIYLSMPGLGDLLAARVAGEIGEHINQFDHPNGLQCYAGSAPVTRRSGKSDFVVARRLAHNHYLGAAVHQWAFCSLLRSGWAREFYDSKIAAGKSHHAALRALSNRWLEVLWHCLTKGVLYDEAVHVANRNRALGHAA

SEQ ID NO: 19770 - protein, 411 aa, unidentified
  source 1..411: note = protein_102077a
  REGION 5..163: note = RuvC_domain
  SITE 8: note = RuvC_P1
  SITE 62: note = RuvC_P2
  SITE 102: note = RuvC_P3
  SITE 104: note = RuvC_P4
  SITE 107: note = RuvC_P5
  REGION 273..373: note = Tnp_domain
  SITE 281: note = Tnp_P1
  SITE 311: note = Tnp_P2
  SITE 319: note = Tnp_P3
  SITE 320: note = Tnp_P4
  SITE 333: note = Tnp_P5
MNPVVGLDVAKGESQVQMFLDKKMPYKSSVKVDHTVDGLEELHSYLLDLERQTGMKPPVVLESTGHYHAPVVQFLEAREYIVIIVNPLVSYRAKSSSLRKTKTDAIDAYHLGELYYKEDLAPQKKRGVQLLNLRHLTRQHENMTGIMIQTKLQFQAVLDQIFPEYKGVFGDLYAEISIKTLQAYPTSESVKEAGVEEIAQFIDTHCKARSFNWALERLEKLIGAAERNPFQSTLYQSLLVSLNMYIDLLQVYHQQLSTLEREIDELAAQLEEYELLQSIPGIGEKSAATIISEIGEIDRFNHPKKLVAFAGLDPSVFESGRFKGTKNHITKRGSARLRHMLYTAVRCSIRDSRKKKTTPETIARNKRLRAFYDLKREEGKPYKVAIIACANKLLHWIYAILKTKTPFQETI

SEQ ID NO: 19771 - protein, 438 aa, unidentified
  source 1..438: note = protein_80a315a
  REGION 16..175: note = RuvC_domain
  SITE 19: note = RuvC_P1
  SITE 74: note = RuvC_P2
  SITE 114: note = RuvC_P3
  SITE 116: note = RuvC_P4
  SITE 119: note = RuvC_P5
  REGION 290..384: note = Tnp_domain
  SITE 298: note = Tnp_P1
  SITE 328: note = Tnp_P2
  SITE 336: note = Tnp_P3
  SITE 337: note = Tnp_P4
  SITE 350: note = Tnp_P5
MSNKFIFNLDDLFISVGIDVGADFSWMSIALPNQQIIGKPYKILHNQMNSLATAVSKIKEAEGLYSLESRIFLESTGIYHYPLFCYLRDKGFNCSVINPIITKNSTNINIRKVHNDRFDSKKAALVGLKPDLKVSLMPSDLALNCRNLCREYYDLMDNRSAYVNKLQGELRMAFPQYLGIFSKITANTSLTLLETYTSPSAFIEADPQEIIDTIKSTARFGVAYAASKYNAIIQAAHDANEFGYILDSNIKRIRLYISFIRKYDEEIKNILDAMHELIDANEETDFVKQIHLVETFKGAGFLSAVTLMGEIGNFSAFSKPKQLFAYFGLDPAVKQSGKFEGTKIQISKRGSAIARRAIHTLTLQSISTSRTGEAKNPVLRDYYLKKCESKPKLVAMGAVSHKVCNMIFAILRDNKPFEIITPQEHIQQYNAAKCDIAA

SEQ ID NO: 19772 - protein, 310 aa, unidentified
  source 1..310: note = protein_c951b3e
  REGION 3..148: note = RuvC_domain
  SITE 9: note = RuvC_P1
  SITE 53: note = RuvC_P2
  SITE 93: note = RuvC_P3
  SITE 95: note = RuvC_P4
  SITE 98: note = RuvC_P5
  REGION 189..273: note = Tnp_domain
  SITE 197: note = Tnp_P1
  SITE 226: note = Tnp_P2
  SITE 234: note = Tnp_P3
  SITE 235: note = Tnp_P4
  SITE 246: note = Tnp_P5
MTHVVCGVDVSSTGLDARIGRSGAFAHFANSPEGIEALAAFCRKHEVALAVMEATGGYERQPFALLWSHGVPAAIVNPRAVRNFAQAMGWLEKTDRIDAGVIAWFAEAKGVEPMAPARDLQARLAALVTRLRQLTDLRTAQSNQRRLVSEPIALASFDELLALIARQIRALEKQIAELIEADPLWQALDKAFRSIKGVADRTVARLMAELPEIGLIPNKAASKLTGLAPLARDSGKAEGRRSVRGGRAGVRATLFVVAEIVRRYDPDFADFHRRLKLAGKPKKVIRVALAHKLLVRLNAKARDARASLLA

SEQ ID NO: 19773 - protein, 363 aa, unidentified
  source 1..363: note = protein_3ff1d88
  REGION 6..147: note = RuvC_domain
  SITE 9: note = RuvC_P1
  SITE 52: note = RuvC_P2
  SITE 87: note = RuvC_P3
  SITE 89: note = RuvC_P4
  SITE 92: note = RuvC_P5
  REGION 211..272: note = Tnp_domain
  SITE 219: note = Tnp_P1
  SITE 249: note = Tnp_P2
  SITE 257: note = Tnp_P3
  SITE 258: note = Tnp_P4
  SITE 270: note = Tnp_P5
MQVTTYGLDLAKRVMQLHWVNLETGEIHRKQLKRRALLEFFANRQPGIVAMEACGSAHYWGRELRKLGHEVRLIAAQFVRPFVKTNKNDAADAAAIWEAVQRPDMRFVAVKSEEQQSVLSLHRMREQLIKMRTMQVNQIRGLLYEFGADLPQGRQRGLKEVPDALADLEKSLSPMLRDTVRQQLKRLEEMDKDIADIEKRLTLWKKGQEAVTRLMAIPGVGLLTATAIIATVGDMKSFRSGREFAAFLGLVPRQSGTGGKVRLLGISKRGGYLSPNIADPWSQGGGELPDQESEPLDRQTAQPTAPQCGRSGTGQQDGQNDLGTTGEKYRIRRPSRCGKSRCVVLDNKIFELQQKELRRLMHD

SEQ ID NO: 19774 - protein, 355 aa, unidentified
  source 1..355: note = protein_affc1c7
  REGION 27..168: note = RuvC_domain
  SITE 30: note = RuvC_P1
  SITE 72: note = RuvC_P2
  SITE 107: note = RuvC_P3
  SITE 109: note = RuvC_P4
  SITE 112: note = RuvC_P5
  REGION 229..323: note = Tnp_domain
  SITE 237: note = Tnp_P1
  SITE 267: note = Tnp_P2
  SITE 275: note = Tnp_P3
  SITE 276: note = Tnp_P4
  SITE 288: note = Tnp_P5
MGWTPPAIGPSMLQQQPARGVHHIQILAIDLGKQSFHIYGITGDGEVVSRKVSRAKLPDAVTKLQPQSVAMEACASSHHWGRVFEELGYRVHLIHPRFVKPFVKGSKNDAVDAEAIFEAANRPTMRFVPLKSVEQQDLQALHRTRDRLIVQRTALINHTRGLLAEYGVVMPVGASRFRRQIDKMIETAELSDLAKNLFLKLAEEYRGLDSKVSALDDMLAEICREDERCKRLTTLPGVGPIVATSLVAAIDDGRHFASGRALSAWIGLVPRQYTTGGKPRLGGIGKRANHYLRRQLIHGARSALLRVAKHDDRRSKWAQELQSRAGHNKTLVAMANKTARMAWAMLRSGENYKMA

SEQ ID NO: 19775 - protein, 311 aa, unidentified
  source 1..311: note = protein_785df2a
  REGION 5..154: note = RuvC_domain
  SITE 8: note = RuvC_P1
  SITE 52: note = RuvC_P2
  SITE 92: note = RuvC_P3
  SITE 94: note = RuvC_P4
  SITE 97: note = RuvC_P5
  REGION 188..272: note = Tnp_domain
  SITE 196: note = Tnp_P1
  SITE 225: note = Tnp_P2
  SITE 233: note = Tnp_P3
  SITE 234: note = Tnp_P4
  SITE 245: note = Tnp_P5
MRNIIGVDISKDRLDVFALADRTYHQFANDQHGIRALIRQLGKLDQPLVVFEATGAYHRRLEASLAKHAVHFHKINPRQSRRFAEATGRLAKTDRVDAAMLARMAAALSLSPQTPKAETHHDLRELLVARRALVKDLATGKAREKRALQPVVRRQITKRLRLAESQIAELEREILDRINDDPELCARFNILLSIPGISEITAFTMLVEMPELGTMSNKQAASLARLAPVSRQSGKWQGKEHIRGGRRELRRALYMPALSAMRFNPDLKTMSETLAARGKPAKVVITAVMRKLIVLSNILVAAGREWSPNQA

SEQ ID NO: 19776 - protein, 273 aa, unidentified
  source 1..273: note = protein_00d89ca
  REGION 2..82: note = RuvC_domain
  SITE 21: note = RuvC_P3
  SITE 23: note = RuvC_P4
  SITE 26: note = RuvC_P5
  REGION 143..229: note = Tnp_domain
  SITE 151: note = Tnp_P1
  SITE 181: note = Tnp_P2
  SITE 189: note = Tnp_P3
  SITE 190: note = Tnp_P4
  SITE 202: note = Tnp_P5
MGHDVRIMPPSYVKGYVKRGKSDALDAEAICEAVGRPTMRFVPVKTVEQQSILMAHRTRSLLVRQRTMAANALRAHLAEYGQVANPGIANLVKLADKAFADEALPAYAHRALEILIRRIAELTEEIGALDQDLKAWHAGNEASRRLAAIPGIGVITATALAATVTDPDQFRSGRQFAAWLGLTPQQHSTGGKTRLGGISKQGDRYLRRLLVVGATAVMRHAKRNPTPMTDWVNGLLEKKPFRLVSVALANKLARIAWALLTRGETYRPYGRPA

SEQ ID NO: 19777 - protein, 319 aa, unidentified
  source 1..319: note = protein_c1b8e51
  REGION 9..151: note = RuvC_domain
  SITE 12: note = RuvC_P1
  SITE 56: note = RuvC_P2
  SITE 96: note = RuvC_P3
  SITE 98: note = RuvC_P4
  SITE 101: note = RuvC_P5
  REGION 192..277: note = Tnp_domain
  SITE 200: note = Tnp_P1
  SITE 229: note = Tnp_P2
  SITE 237: note = Tnp_P3
  SITE 238: note = Tnp_P4
  SITE 249: note = Tnp_P5
MAQVDLVVVGIDVAKDKVDACIRSLSLRQTCPSTAQGQRKLVAWLRKHKVNKAVMEASGGYEREWVRVLHQAGIEVRIVDPKRVRSFALSAGRLAKNDAIDAEMIAWFAETFSEAPSPIHDAAHEELQALVKARKGLLDLKIRLQSQNEHAAPGPVQKAYARILKSLAAEIVKLEAAIAVKIKATPEFAERAEIIESVPGLAETTSATIIAGMPELGQVSNKISPALLGAAPYDDDSGHRRGERHIKGGRRWVRNAIYMPCLGAATQNNPVLKAFYHRLIAKGKEPKVALIACMRKLIVILNTMIARRQKWDPSRYALN

SEQ ID NO: 19778 - protein, 340 aa, unidentified
  source 1..340: note = protein_b97a558
  REGION 6..148: note = RuvC_domain
  SITE 9: note = RuvC_P1
  SITE 52: note = RuvC_P2
  SITE 87: note = RuvC_P3
  SITE 89: note = RuvC_P4
  SITE 92: note = RuvC_P5
  REGION 211..298: note = Tnp_domain
  SITE 219: note = Tnp_P1
  SITE 249: note = Tnp_P2
  SITE 257: note = Tnp_P3
  SITE 258: note = Tnp_P4
  SITE 270: note = Tnp_P5
MQIVRIGLDLAKNVFEVHGVDAYDKAILRKTLRRDAVPQFFAELPPCVVGMEACSGSHYWAKVFADLGHEVRLISPQFVTPYVKSNKNDRNDAEAICEAIGRPSMRFVPPKSSEQLVIQAVHRIRQRLVSDRTRLVNQIRGLLAEHGIVIARDISRLRYALGQIADGADNKLGVMILELVRDVRQELSELDQRIAAYNKRIRDLFRSNEMCQRIGKIEGIGPITATALVAAVGDRTCFKNGRQFAAWLGLVPKQRSSGGKSRLFGISKRGDRYLRTLMIHGARAVLAKASGKTDARSLWIGRMRNRRHPNVVAVALANKNARIVWSVLSGGGEYQPALSV

SEQ ID NO: 19779 - protein, 342 aa, unidentified
  source 1..342: note = protein_b4e018c
  REGION 6..147: note = RuvC_domain
  SITE 9: note = RuvC_P1
  SITE 52: note = RuvC_P2
  SITE 87: note = RuvC_P3
  SITE 89: note = RuvC_P4
  SITE 92: note = RuvC_P5
  REGION 211..294: note = Tnp_domain
  SITE 219: note = Tnp_P1
  SITE 249: note = Tnp_P2
  SITE 257: note = Tnp_P3
  SITE 258: note = Tnp_P4
  SITE 270: note = Tnp_P5
MKIAVLGIDLGKTSCSVVGLDGTGHVVMRRRMHRDSVIKFASGMAPCVVAMEACCGAHHLGRIVRDHGHQVRLMSPEYVRPYVKAQKNDDRDAEAIAEAATRPTMRFVELKSAEQLDMQSLHRVRDRLVGERTALINQLRAVLMERGITVPQGRRKLEQHLAVLLDGEELRLSPRVRSLVEDMRAEWGALDRRIEAFDDEFAARAKTDDAARRLATIPGIGVLNATALAAAVGNAASFARGRDLAAWLGLVPRQMTTGGKPRLMGISKRGNKYLRKLLVHGARGALPSLSASTTPLGKWLKDLLQRAHKNTVIVALANKLARIVWAVLRHGGTYDAAALTVA

SEQ ID NO: 19780 - protein, 422 aa, unidentified
  source 1..422: note = protein_c55feb2
  REGION 19..175: note = RuvC_domain
  SITE 22: note = RuvC_P1
  SITE 72: note = RuvC_P2
  SITE 112: note = RuvC_P3
  SITE 114: note = RuvC_P4
  SITE 117: note = RuvC_P5
  REGION 289..376: note = Tnp_domain
  SITE 297: note = Tnp_P1
  SITE 327: note = Tnp_P2
  SITE 335: note = Tnp_P3
  SITE 336: note = Tnp_P4
  SITE 349: note = Tnp_P5
MLDTMQIQSMEVFIMYNAVGIDVSKGKSTVTIIRPNGVVIRKPFDVIHSVKELRNLTGYIASLDGETRAVCECTGRYHEPVLKAFSEANIFISAVNPKLIKGMGENTLRKIKTDPADSRKIAKYALDNWAELRQYSSMDDTHEQLKALNSQYSFILKQRTAAKANLISLLDNTYPGVNKLFDSPVRDDGSEKWVDYAYSFWHADCVRKIGLKAFTERYNAFCKKHHYCVRKNKAQELFEASKELVTVFPKDSTYKLLIQQQINQVNLLSSQLAAIRKEMNALASTLPEYTTVMGMYGIGETYGPQLIAEIGDITRFHHREALTAYAGVDPGANQSGSRDQKSNKASKIGSSKFRKTLFQIMTTLLQNRPENEPVYQFLDKKRSEGKPYLVYMTAGANKFLRIYYGKVKAHLRELEQDQESAE

SEQ ID NO: 19781 - protein, 343 aa, unidentified
  source 1..343: note = protein_f00384c
  REGION 7..148: note = RuvC_domain
  SITE 10: note = RuvC_P1
  SITE 53: note = RuvC_P2
  SITE 88: note = RuvC_P3
  SITE 90: note = RuvC_P4
  SITE 93: note = RuvC_P5
  REGION 212..299: note = Tnp_domain
  SITE 220: note = Tnp_P1
  SITE 250: note = Tnp_P2
  SITE 258: note = Tnp_P3
  SITE 259: note = Tnp_P4
  SITE 271: note = Tnp_P5
MGEISTIGLDIAKSVFQVHGVDGTGAVVMRKRISRSKLLEFFGGLSPCLVGIEACPSAHYWSRELQVLGHTVKLMPPSYVKAYLKRNKNDANDAAAICEAVTRPSMRFVPIKSERQQCGLMLHRTRQLLIRQRTMLSNAIRGHMAELGVIAAKGRNGTAELLQIIGDLTDDRIPPVARFCLDLLARQYLTLNAEVSSIDKRIHSWHRSCEQSRRLEEIPGVGPIVATALVAEIGDWRAFRSGRSLAAWIGLVPKQHSSGGKERLGSITKQGNRYLRWLLVAGAMAVIRYARQHGTKRAWLTRIMDRRPVKVAAVAFANKIARMAWAIMVHGERYREPKLLLAA

SEQ ID NO: 19782 - protein, 407 aa, unidentified
  source 1..407: note = protein_a42e42d
  REGION 4..160: note = RuvC_domain
  SITE 7: note = RuvC_P1
  SITE 57: note = RuvC_P2
  SITE 97: note = RuvC_P3
  SITE 99: note = RuvC_P4
  SITE 102: note = RuvC_P5
  REGION 269..355: note = Tnp_domain
  SITE 277: note = Tnp_P1
  SITE 308: note = Tnp_P2
  SITE 316: note = Tnp_P3
  SITE 317: note = Tnp_P4
MIFVGVDWAEAHHDVFVQNEDGKRLAGGWLPEGVEGIARFHEMVGAHAEEPEEVVIGIETDRGLFVGALVAAGYQVYAVNPMSTSRYRDRHSTSGAKSDPGDAKVLADMVRTDRHNHRPVAGDSELAEAIKVLARAHQTMIWSRTRQTNFLRSTLREFCPSALVAFDNLNSGDALEVLKVAPTPTLGAGLSRSKISAALRRGGRQRRVDPRAEEIQQALRAPQLQGSALVAAAMGSSVSATVAVIATMNAQVAELAQELNVHFEQHPDAEVVRSLPGLGTILSARVLGKFGDEPNRYASAKSRKDYAGTSPITRASGTKRTVFARHVRNKRLADAVYQWAFTSMNTSPGARAFYDYRRAAGDTHHAALRHLGNRLVGILHGCLASHSTYDESTAWGHRAKIELARAA

SEQ ID NO: 19783 - protein, 438 aa, unidentified
  source 1..438: note = protein_669969b
  REGION 16..175: note = RuvC_domain
  SITE 19: note = RuvC_P1
  SITE 74: note = RuvC_P2
  SITE 114: note = RuvC_P3
  SITE 116: note = RuvC_P4
  SITE 119: note = RuvC_P5
  REGION 290..384: note = Tnp_domain
  SITE 298: note = Tnp_P1
  SITE 328: note = Tnp_P2
  SITE 336: note = Tnp_P3
  SITE 337: note = Tnp_P4
  SITE 350: note = Tnp_P5
MPNNVIFNFDELFISVGIDVGADFSWMSIVLPNQQFVGKPYKILHNSMDSLASAVSKIKEAEEMYSLESRIFLESTGIYHYPLFCYLRDKGFNCSVINPIITKNSTNINIRKVHNDRFDSKKAALVGLKPDLKVSLMPSDLALNCRNLCREYYDLMDSRNAYVNKLIDELRMVFPQYLGIFSKVTIDTSLILLETYTSPSAFINADKQEIIDLIRSTARFGLTYACNKYNAIIQAANDADEFGYILDSNIKRIRLYIGFIRKYDEEINSILESMHELAAANEDTDFVKQIRLIETFKGAGFLSAMSLMGEIGDFSAFSKPKQLFAYFGLDPAVKQSGKFEGTKIQMSKRGSAIARRVIHTLTLQSISASRTGESKNPVLLDYYLKKCESKPKLVAMGAVSHKVCNMIFAILRDSKPFEIITPQEHIKKYNAAKCDVAA

SEQ ID NO: 19784 - protein, 406 aa, unidentified
  source 1..406: note = protein_a9573ac
  REGION 6..164: note = RuvC_domain
  SITE 9: note = RuvC_P1
  SITE 59: note = RuvC_P2
  SITE 101: note = RuvC_P3
  SITE 103: note = RuvC_P4
  SITE 106: note = RuvC_P5
  REGION 278..364: note = Tnp_domain
  SITE 286: note = Tnp_P1
  SITE 316: note = Tnp_P2
  SITE 324: note = Tnp_P3
  SITE 325: note = Tnp_P4
  SITE 338: note = Tnp_P5
MNLNAVGIDVSKRKSTVAVLRPGGKVVVKPFDVPHLSNGFLSLVHLINALDGESRIVMECTGRYYEPVARELSQAGFFVSAVNPQIIRNFQGQDNPLRRVKTDKADSIKIARYALDSWAKLKQYSLMDEIRAQLKTMNRQFDFYTKHKTAMKNNLIGLIDQTYPGENTYFDSPAREDGSQKWVDFLDTYWHVDCVRKMSLNAFVDHYQKWCGRKKYNFSKSKAEEIYGTAKELIPVLPKNDFTKRLIRQAVEQLNAASRTVEQLRSLMNETASQLPEYPIVMMMKGVGPSLGPQLMAEIGDVTRFTHKGAITAFAGVDPGVNESGDYSQKSVHASKHGSPVLRKTLFQVMDVLIKTKPDDAVYLFMDKKRAQGKPYYVYMTAGANKFLRIYYGRVKEYLASLPMSE

SEQ ID NO: 19785 - protein, 326 aa, unidentified
  source 1..326: note = protein_c6f1be6
  REGION 4..161: note = RuvC_domain
  SITE 7: note = RuvC_P1
  SITE 61: note = RuvC_P2
  SITE 101: note = RuvC_P3
  SITE 103: note = RuvC_P4
  SITE 106: note = RuvC_P5
  REGION 201..287: note = Tnp_domain
  SITE 209: note = Tnp_P1
  SITE 238: note = Tnp_P2
  SITE 246: note = Tnp_P3
  SITE 247: note = Tnp_P4
  SITE 260: note = Tnp_P5
MIVIGIDVSKAKLDCLWIRDLVGMKVKSKIQANNPAGHQALLDWAMKQTGEDIGGLHFVMEATGVYHEALAYALYDAGAQVSVINPARIHHYAKSLGSHSKTDKKDSVNIARYGMTQSPQLWVPEREDIRQLKALIARRDAVKQDVQREMNRREKAQVSAVSKEVHTSIETVLAQLEAEKKRLESLIDDHINNHPDLKKDRALLESIPGVGPVISQQMVAVIRSRPFNRARECAAFLGLVPIENESGSTVYFKPRLSKRGDARIRAKLYMAAVVAIRHNPDIRCQYNRLLKRGKSKMSAIGAAMRKLVHICFGVLKHQAPYQPQTV

SEQ ID NO: 19786 - protein, 359 aa, unidentified
  source 1..359: note = protein_a93014d
  REGION 13..160: note = RuvC_domain
  SITE 16: note = RuvC_P1
  SITE 65: note = RuvC_P2
  SITE 101: note = RuvC_P3
  SITE 103: note = RuvC_P4
  SITE 106: note = RuvC_P5
  REGION 234..317: note = Tnp_domain
  SITE 239: note = Tnp_P1
  SITE 270: note = Tnp_P2
  SITE 278: note = Tnp_P3
  SITE 279: note = Tnp_P4
  SITE 290: note = Tnp_P5
MDGNDKAAHSITGGVDTHKDLHVAAVVDDCDRVLDTRSFATTRHGYRQMLAWMRSFGELQRIGIESTGSYGAGLLRYMQTAGIEVLEVTAPDRQDRRKRGKNDDLDAQSAAHAAFAGQRTVTPRSRDGMVESLRVLKACRKTAVNARRIALQMIQNTIIAAPDALRDQLRGMTRMQLIRTLAAWRPDLTAYRDIEAAYRICLKSLARRYLELHDETADLDMMIEAIVNDLAPELIAQNSIGHNSAAQLLLTAGDNPERLKSEASFAALCGVSPVPASSGKTVRHRLNRGGDRAANSALHIIAIGRLRTDERTKAYVSRRVAEGHSKLEAIRMVKRYVAREVFGIIMRRQKDINRTRIAA

SEQ ID NO: 19787 - protein, 298 aa, unidentified
  source 1..298: note = protein_002f21a
  REGION 6..147: note = RuvC_domain
  SITE 9: note = RuvC_P1
  SITE 52: note = RuvC_P2
  SITE 87: note = RuvC_P3
  SITE 89: note = RuvC_P4
  SITE 92: note = RuvC_P5
  REGION 211..295: note = Tnp_domain
  SITE 219: note = Tnp_P1
  SITE 249: note = Tnp_P2
  SITE 257: note = Tnp_P3
  SITE 258: note = Tnp_P4
  SITE 270: note = Tnp_P5
MQISILGVDIGKNSFSVVGVDGQGAVILRRTMRRQTLIDFVEKLPRCVIAMEACCGAHHLGRLFAAAGHEVRLMSPEYVRPYVKAQKNDDRDAEGIAEAASRPTMRFVDLKSQEQLDIQTLHRVRSRLVAERTTLINQLRAILLERGVVFPAGRVKFESALDDLIAGGNDVLSPRIRSLILELRDEWRRLDQKIETLNTEFVALAKQNSAMRRLTSIPGIGVLNATALVAAIGDASSFQHARDLGAWLGLVPRQFTTGGKARLLGITKRGNTYLRTLLVHGARAAMHTLSQSDTPIGQ

SEQ ID NO: 19788 - protein, 345 aa, unidentified
  source 1..345: note = protein_d0b9dc0
  REGION 13..155: note = RuvC_domain
  SITE 16: note = RuvC_P1
  SITE 59: note = RuvC_P2
  SITE 94: note = RuvC_P3
  SITE 96: note = RuvC_P4
  SITE 99: note = RuvC_P5
  REGION 218..309: note = Tnp_domain
  SITE 226: note = Tnp_P1
  SITE 256: note = Tnp_P2
  SITE 264: note = Tnp_P3
  SITE 265: note = Tnp_P4
  SITE 277: note = Tnp_P5
MNEHSKKGQVCTLGVDLSKTSFQLHGVDNHGKVVFRKKLSRSKLLPCIANLPPCVIGIEACGGAHYWCRQFTALGHSVRIIAPQFVKPYVKSNKNDAADAEAICEAIQRPSMRFVPTKSIEQQDIQSIHRVRSQAVARRTAQANQIRGLLIEYGIIIPKGISYVRKHIPLILEERDNGLSDVFRALLSTLYDEMVHLDDRIEALELQLATIAKNHDDCQRLLTIPGVGLLSATALIAAISDVTVFKNGRELAAWLGLVPRQHSTGGKPTLLGISKRGDTYLRTLMIHGGRTVVRVADKHDDRRNRWVKELDNRRGKNISAVAVANKNARIAWAVLSKKESYQAAA

SEQ ID NO: 19789 - protein, 343 aa, unidentified
  source 1..343: note = protein_0be9037
  REGION 5..152: note = RuvC_domain
  SITE 8: note = RuvC_P1
  SITE 55: note = RuvC_P2
  SITE 92: note = RuvC_P3
  SITE 94: note = RuvC_P4
  SITE 97: note = RuvC_P5
  REGION 212..300: note = Tnp_domain
  SITE 220: note = Tnp_P1
  SITE 250: note = Tnp_P2
  SITE 258: note = Tnp_P3
  SITE 259: note = Tnp_P4
  SITE 271: note = Tnp_P5
MDHFAGLDVSVKETSLCIVDDAGRIVREVRVVSEPEALLAALTNPDWHFKRIGLEAGPLSQWLFNVLAEAGLPVICVETRHMRAVLKAQINKTDRNDARGIAQMMRAGLYRPVHVKTLRSQKLRMLLTHRKLLQAKAIAIENDLRATLRNFGLKVGVVGTVKFEARIKELVENLPDLVILVEPLLVVRRVLREQIGVLHRRLLAIVRDDDVCRRLMTVPGVGPVVALTYRATVDVPSRFRNSKAVGAVFGLTPSQHQSGESNRTGGISRCGDEMMRMMLYEAAHIMLVRSTRWSWLKAWAMQIARRRGMKKAIVALARRLAVIMHRIWVDGTEFRWTGEIAAA

SEQ ID NO: 19790 - protein, 339 aa, unidentified
  source 1..339: note = protein_82756d3
  REGION 6..147: note = RuvC_domain
  SITE 9: note = RuvC_P1
  SITE 52: note = RuvC_P2
  SITE 87: note = RuvC_P3
  SITE 89: note = RuvC_P4
  SITE 92: note = RuvC_P5
  REGION 210..299: note = Tnp_domain
  SITE 218: note = Tnp_P1
  SITE 248: note = Tnp_P2
  SITE 256: note = Tnp_P3
  SITE 257: note = Tnp_P4
  SITE 269: note = Tnp_P5
MNFTAVGVDIAKTVFQVHYVDQETGEIVNKPVKRAKFLEHFANRAPCLIGMEACGGAHHWARQLTKMGHQVKLMPAEFVKAFNIRNKNDAADARAIWLAVQQPSKAVAVKTEMQQAMLALHRMRQQLVKFRTMQVNALRGLLTEYGEVMGRGRAALDKSIPEVLARVTQRLPTALIDTLREQWNGLAKLDEQVAEIERRMREWVKEDRAVKAIGEIPGVGLLTATAAVAMIGDAKTFRSGREFAAWAGLVPKQTGSGGKVNLHEISKRGDTYLRTLLIHGARSVITHAKEPGPWVEQMKKRRPANVVIVALANKMARTIWAVLAHDRPYQKGYVSAKPA

SEQ ID NO: 19791 - protein, 366 aa, unidentified
  source 1..366: note = protein_ab8eb82
  REGION 16..161: note = RuvC_domain
  SITE 19: note = RuvC_P1
  SITE 68: note = RuvC_P2
  SITE 104: note = RuvC_P3
  SITE 106: note = RuvC_P4
  SITE 109: note = RuvC_P5
  REGION 236..319: note = Tnp_domain
  SITE 241: note = Tnp_P1
  SITE 272: note = Tnp_P2
  SITE 280: note = Tnp_P3
  SITE 281: note = Tnp_P4
  SITE 292: note = Tnp_P5
MLRTQQEAETGVGVVLGVDTHLDAHVAVALDQLGRRLDAVSVPADARGYEALVGWAEGLGPVVCAGIEGTSSYEAGLARHLSRTGIKVVEVERPKRRHLGRNGKSDPKDAEAAARAVLAGDVAGVPKSGDGLVEMIRALRAARRSAVKARSQAANQLRSLRVTAPDGLRERLRGLSTKRLVAAAVRFRPGALPETPEEATKVALRSVARRHRVLSEEIAELDAQLDRLVAEAAPGMLALLGVGTDHAATLLVAAGDNPQRLQSEASFASLCGASPIEASSGKVMRHRLNRGGNRDANRALHLICVVRMRYDRRTKLYVARRTAEGKSKREIIRCLKRYVAREIYRVLVSGTAPPPIGSPTMAATSM

SEQ ID NO: 19792 - protein, 311 aa, unidentified
  source 1..311: note = protein_b4ce6b2
  REGION 6..148: note = RuvC_domain
  SITE 9: note = RuvC_P1
  SITE 52: note = RuvC_P2
  SITE 87: note = RuvC_P3
  SITE 89: note = RuvC_P4
  SITE 92: note = RuvC_P5
  REGION 211..272: note = Tnp_domain
  SITE 219: note = Tnp_P1
  SITE 249: note = Tnp_P2
  SITE 257: note = Tnp_P3
  SITE 258: note = Tnp_P4
MKVSTLGIDLAKNVFQLHGVDHEGHTILRKKLTRAKFVQFVIQLEPCLIGMEACSSSHYFARLFTRYGHEVKLIPPQYVKPYVKTNKTDAADAEAICEAVTRPNMRFVQIKTEEQQAVLALHTERGILIRERIACANSLRATLAEFGITIAAGQNHLTRELPAILEDGENGLSPFVRTSIYRQSKHIRELEEQVKQVEEALASWYRTQEACQRMAKIPGVGMLTATYVVAAVGNARQFSTAKQFASWLGLTPKEHSSGGKHNWEGSANVEMDISDTCWFTAHAHLPPGSTETARLRRIPGFRDSLSGSTTM

SEQ ID NO: 19793 - protein, 370 aa, unidentified
  source 1..370: note = protein_7b17084
  REGION 32..184: note = RuvC_domain
  SITE 35: note = RuvC_P1
  SITE 83: note = RuvC_P2
  SITE 124: note = RuvC_P3
  SITE 126: note = RuvC_P4
  SITE 129: note = RuvC_P5
  REGION 247..332: note = Tnp_domain
  SITE 255: note = Tnp_P1
  SITE 285: note = Tnp_P2
  SITE 293: note = Tnp_P3
  SITE 294: note = Tnp_P4
  SITE 305: note = Tnp_P5
MARKRREHDQPESGVPTSVSSIAKEGIVFVMIGIDPHKATHTAVAVDDDENVVGEFTLEASNNQVERLTGWSDRFTKREWAVESANGLGYLIGRQLVAAGETVFDVPPVLASRVRLMGSGKSQKNDPNDARSIAIAALRSDRLRVVEPDDHVTVLRLLVKRHRDMARLRNKHCSRLHALLLELEAGGIEGKISVSNASELLDRIGVTDEASRYRILVAGEVVADIARLDATLGSSKKRIAAAVTASGTSLTDIVGIGPIGAATIIGYTKDITRFPTRGHYATYNATAPIEVSSAANTKHRLNLRGNRILNHAIHIAAVTQLRHDTNGRIYYQKKIAEGKTPKEAIRALKRRISDAVYRRLVADRARQRSA

SEQ ID NO: 19794 - protein, 342 aa, unidentified
  source 1..342: note = protein_9403f28
  REGION 4..158: note = RuvC_domain
  SITE 7: note = RuvC_P1
  SITE 57: note = RuvC_P2
  SITE 98: note = RuvC_P3
  SITE 100: note = RuvC_P4
  SITE 103: note = RuvC_P5
  REGION 252..338: note = Tnp_domain
  SITE 260: note = Tnp_P1
  SITE 290: note = Tnp_P2
  SITE 298: note = Tnp_P3
  SITE 299: note = Tnp_P4
  SITE 311: note = Tnp_P5
MLYVGIDIAKNKHDVTALNVPGKTVLKPLTFSNNKAGFELLDLSLRQLNQDCLIALENTGHYAFNLLNFLHEQGYKVYTCNPLLIKEFAKSLSLRKTKTDKKDAHGIALKLLSDPNREQFQHDNRQVELKILARHIHRLKKNSLIGKYNTLVVLISSFLSWIKSLESIQNIPTNLLTRYPNPQKRIEARFDKLIEIKRLTASKIQDILSIAPRSIGTTSPAREFEIIEIIKHYKRLIDKAETCVNDLMAEFNSVITTVTGIGGRLGAVILAEIRNIHAFDNPAQLQAFAGLDSSIYQSGQIDLAGRMIKRGSPHLRWALIQAAKACARFSPAFKAYLKTKLE

SEQ ID NO: 19795 - protein, 342 aa, unidentified
  source 1..342: note = protein_8f31d1c
  REGION 4..159: note = RuvC_domain
  SITE 7: note = RuvC_P1
  SITE 57: note = RuvC_P2
  SITE 98: note = RuvC_P3
  SITE 100: note = RuvC_P4
  SITE 103: note = RuvC_P5
  REGION 252..338: note = Tnp_domain
  SITE 260: note = Tnp_P1
  SITE 290: note = Tnp_P2
  SITE 298: note = Tnp_P3
  SITE 299: note = Tnp_P4
  SITE 311: note = Tnp_P5
MLYVGIDVAKNKHDVTALNVQGKTVLKPLTFSNNKAGFELLDLSLRQLNQDCLIALEDTGHYAFNLLNFLHEQGYKVYTYNPLLIKKFAKSLSLRKTKTDKKDAHGIALKLLSDPNREQFQHNNRQVELKILTRHIHRLKKKQSDWKVQYTRCLDIIFPELDKIVGKHSEYTYQLLTRYPNPQKRIEAGFDKLIEIKRLTASKIQDILSVAPRSIGTTSPAREFEIIEIIKHYKRLIDKAETCVNDLMAEFNSVITTVTGIGGRLGAVILAEIRNIHAFDNPAQLQAFAGLDSSIYQSGQIDLAGRMIKRGSPHLRWALIQAAKACARFSPAFKAYLKTKLE

SEQ ID NO: 19796 - protein, 316 aa, unidentified
  source 1..316: note = protein_51cdf18
  REGION 4..159: note = RuvC_domain
  SITE 7: note = RuvC_P1
  SITE 57: note = RuvC_P2
  SITE 98: note = RuvC_P3
  SITE 100: note = RuvC_P4
  SITE 103: note = RuvC_P5
  REGION 252..316: note = Tnp_domain
  SITE 260: note = Tnp_P1
  SITE 290: note = Tnp_P2
  SITE 298: note = Tnp_P3
  SITE 299: note = Tnp_P4
  SITE 311: note = Tnp_P5
MLYVGIDIAKNKHDVTALNVPGKTVLKPLTFSNNKAGFELLDLSLRQLNQDCLIALEDTGHYAFNLLNFLHEQGYKVYTYTPLLIKEFAKSLSLRKTKTNKKDAHGIALKLLSDPNREQFQHDNRQVELKILARHIHRLKKKQSDWKVQYTRCLDIIFPELDKIVEKHSEYTYQLLTCYPNPQKRLEAGFDKLIEIKRLTASKIQDILSVAPRSIGTTSPAREFEIIKHYKRLIDKAEKAETCVNDLMAEFNSIITTVTGIGNRLGAVILAEIQNIHAFDNPAQLQAFAGLDSSIYQSGQIDLAGRMVKRGSPHLR

SEQ ID NO: 19797 - protein, 339 aa, unidentified
  source 1..339: note = protein_be967fa
  REGION 4..159: note = RuvC_domain
  SITE 7: note = RuvC_P1
  SITE 57: note = RuvC_P2
  SITE 98: note = RuvC_P3
  SITE 100: note = RuvC_P4
  SITE 103: note = RuvC_P5
  REGION 249..335: note = Tnp_domain
  SITE 257: note = Tnp_P1
  SITE 287: note = Tnp_P2
  SITE 295: note = Tnp_P3
  SITE 296: note = Tnp_P4
  SITE 308: note = Tnp_P5
MLYVGIDIAKNKHDVTALNVPGKTVLKPLTFSNNKAGFELLDLSLRQLNQDCLIALENTGHYAFNLLNFLHEQGYKVYTYTPLLIKEFAKSLSLRKTKTNKKDAHGIALKLLSDPNREQFQHDNRQVELKILARHIHRLKKKQSDWKVQYTRCLDIIFPELDKIVEKHSEYTYQLLTCYPNPQKRLEAGFDKLIEIKRLTASKIQDILSVAPRSIGTTSPAREFEIIKHYKRLIDKAETCVNDLMAEFNSVITTVTGIGNRLEAVILAEIRNIHAFDNPAQLQAFAGLDSSIYQSGQIDLAGRMIKRGSPHLRWALIQAAKACPRFSPAFKAYLKTKLE

SEQ ID NO: 19798 - protein, 342 aa, unidentified
  source 1..342: note = protein_8945871
  REGION 4..159: note = RuvC_domain
  SITE 7: note = RuvC_P1
  SITE 57: note = RuvC_P2
  SITE 98: note = RuvC_P3
  SITE 100: note = RuvC_P4
  SITE 103: note = RuvC_P5
  REGION 252..338: note = Tnp_domain
  SITE 260: note = Tnp_P1
  SITE 290: note = Tnp_P2
  SITE 298: note = Tnp_P3
  SITE 299: note = Tnp_P4
  SITE 311: note = Tnp_P5
MPYVGIDVAKNKHDVTALNVQGKTVLKPLTFSNNKAGFELLDLSLRQLNQDCLIALEDTGHYAFNLLNFLHEQGYKVYTYNPLLIKKFAKSLSLRKTKTDKKDAHGIALKLLSDPNREQFQHDNRQVELKILARHIHRLKKKQSDWKVQYTRCLDIIFPELDKIVGKHSEYTYQLLTRYPNPQKRLEAGFDKLIEIKRLTASKIQDILSVAPRSIGTTSPAREFEIIEIIKHYKRLIDKAETCVNDLMAEFNSIITTVTGIGGRLGAVILAEIRNIHAFDNPAQLQAFAGLDSSIYQSGQIDLAGRMIKRGSPHLRWALIQAAKACARFSPAFKAYLKTKLE

SEQ ID NO: 19799 - protein, 313 aa, unidentified
  source 1..313: note = protein_c092f02
  REGION 4..159: note = RuvC_domain
  SITE 7: note = RuvC_P1
  SITE 57: note = RuvC_P2
  SITE 98: note = RuvC_P3
  SITE 100: note = RuvC_P4
  SITE 103: note = RuvC_P5
  REGION 249..313: note = Tnp_domain
  SITE 257: note = Tnp_P1
  SITE 287: note = Tnp_P2
  SITE 295: note = Tnp_P3
  SITE 296: note = Tnp_P4
  SITE 308: note = Tnp_P5
MLYVGIDVAKNKHDVTALNVQGKTVLKPLTFSNNKAGFELLDLSLRQLNQDCLIALEDTGHYAFNLLNFLHEQGYEVYTYTPLLIKEFAKSLSLRKTKTDKKDAHGIALKLLSDPNREQFQHNNRQVELKILTRHIHRLKKKQSDWKVQYTRCLDIIFPELDKIVGKHSEYTYQLLTRYPNPQKRIEAGFDKLIEIKRLTASNSRAFCRALKRSIGTTSPAREFEIIKHYKRLIDKVEKCVNDLMAEFNSVITTVTGIDNRLGAVILAEIRNIHAFDNPAQLQAFAGLDSSIYQSGQIDLAGRMVKRGSPHLR

SEQ ID NO: 19800 - protein, 313 aa, unidentified
  source 1..313: note = protein_af8cf08
  REGION 4..159: note = RuvC_domain
  SITE 7: note = RuvC_P1
  SITE 57: note = RuvC_P2
  SITE 98: note = RuvC_P3
  SITE 100: note = RuvC_P4
  SITE 103: note = RuvC_P5
  REGION 249..313: note = Tnp_domain
  SITE 257: note = Tnp_P1
  SITE 287: note = Tnp_P2
  SITE 295: note = Tnp_P3
  SITE 296: note = Tnp_P4
  SITE 308: note = Tnp_P5
MLYVGIDVAKNKHDVTALNVSGKTVLKPLTFSNNKAGFELLDLSLRQLNQDCLIALEDTGHYAFNLLNFLHEQGYKVYTYTPLLIKEFAKSLSLRKTKTDKKDAHGIALKLLSDPNREQFQHDNRQVELKILARHIHRLKKKQSDWKVQYTRCLDIIFPELDKIVGKHSEYTYQLLTRYPNPQKRLEAGFDKLIEIKRLTASKIQDILSVAPRSIGTTSPAREFEIIEHYKRLIDKAETCVNDLMAEFNSVITTVTGIGGRLGAVILAEIRNIHAFDNPAQLQAFAGLDSSIYQSGQIDLAGRMVKRGSPHLR

SEQ ID NO: 19801 - protein, 351 aa, unidentified
  source 1..351: note = protein_056e914
  REGION 17..167: note = RuvC_domain
  SITE 20: note = RuvC_P1
  SITE 69: note = RuvC_P2
  SITE 105: note = RuvC_P3
  SITE 107: note = RuvC_P4
  SITE 110: note = RuvC_P5
  REGION 232..318: note = Tnp_domain
  SITE 240: note = Tnp_P1
  SITE 271: note = Tnp_P2
  SITE 279: note = Tnp_P3
  SITE 280: note = Tnp_P4
  SITE 291: note = Tnp_P5
MPNAQTESKPSSRIVVGGVDTHADTHTVAVVDQVGRRLGCAVFPASRAGYRALTGWLAGHGEIYAVGVEGTGSYGAGLTRWLTAHQVRVVEVNRPNRAERRRRGKSDPVDAEHAAAAVLANTATTIPKARTGLVESLRLIHATRAGAVKARTAARNSFINTLRSSPDAVREALQPLSRARQLKAAAGYRPQGDDPVATVKRCLRRLAVRITELTAEITAADRDLDRLTQLLAPSMRSRPGFGPETTAQLLITAGDNPERIGSEAALAGLCGVSPVQASSGRTRYHRLNRGGDRQANRALHMIILNRLRHHQPTRAYLAVHSRDGRATPHLRRVLKRYLVREVYQLLSQLQP

SEQ ID NO: 19802 - protein, 354 aa, unidentified
  source 1..354: note = protein_3d220dd
  REGION 12..153: note = RuvC_domain
  SITE 15: note = RuvC_P1
  SITE 58: note = RuvC_P2
  SITE 93: note = RuvC_P3
  SITE 95: note = RuvC_P4
  SITE 98: note = RuvC_P5
  REGION 217..302: note = Tnp_domain
  SITE 225: note = Tnp_P1
  SITE 255: note = Tnp_P2
  SITE 263: note = Tnp_P3
  SITE 264: note = Tnp_P4
  SITE 276: note = Tnp_P5
MAEKCKIAIAVMGIDIGKNSLHVIGLDARGAIALRQKWSRGQVASRLASMAPCLIGMEACVGAHHLSRKLKALGHDARLMPAKYVRPYSKGQKNDFRDAEAIAEAVQRPTMKFVATKTAEQLDLQALHRVRERLVSQRTGIINQIRAFMLERGIAVRQGLRFLRAELPGILASRGDVLSARMVRVIEELTADWRRLDERIEGLSTEIEALARKDTGCERLMSVPGIGPIISSATVAAIGTGDVFSKGRDFAAWLGLVPRQISTGDRTILGKISKRGNRYLRVLFVQAAWVVLIKPQSWERHGLKSWIEAAKKRLHRNVLAIALANKLARIAWAVLAKCRDFEIRRTDDALVRPA

SEQ ID NO: 19803 - protein, 407 aa, unidentified
  source 1..407: note = protein_322dea4
  REGION 24..179: note = RuvC_domain
  SITE 27: note = RuvC_P1
  SITE 78: note = RuvC_P2
  SITE 118: note = RuvC_P3
  SITE 120: note = RuvC_P4
  SITE 123: note = RuvC_P5
  REGION 283..370: note = Tnp_domain
  SITE 291: note = Tnp_P1
  SITE 321: note = Tnp_P2
  SITE 329: note = Tnp_P3
  SITE 330: note = Tnp_P4
  SITE 343: note = Tnp_P5
MMIKLSGPKQLPNIFKGCGPMIYVGIDIAKQKHFAAAMTADGEVLISPFGFTNDAEGFKLFLSKIKSFKKESTLIGLESTSHYAENLICHLFDLGYHISVINPIQTSTLRKTNIRRTKTDKVDCLLIIKSMIVNKPRLYSKTDIDSLRLKSLCRFREKIKKAKAKLKIQLVTFVDIIFPELQYFFKSGIHTNTCYQLLKKHSSPDDIAALHLTYLANLLQKASHGRFGKKEAIALKGLAKSSVGTGNTDVSIQITQSIAQIELLEQQLADIDRIIESIMLEMDSVILTIPGIGFLNGAMILGEIGNISRFSNPSKLLAYAGLDPTVNQSGKFNAKSTKMSKRGSKLLRYALINAAWNVSLNNKTFNDYFNLKRSQGNNHYAALGHVAHKLVRIIFKMLKDNVAFNLD

SEQ ID NO: 19804 - protein, 425 aa, unidentified
  source 1..425: note = protein_6f6072c
  REGION 28..180: note = RuvC_domain
  SITE 31: note = RuvC_P1
  SITE 79: note = RuvC_P2
  SITE 117: note = RuvC_P3
  SITE 119: note = RuvC_P4
  SITE 122: note = RuvC_P5
  REGION 287..373: note = Tnp_domain
  SITE 295: note = Tnp_P1
  SITE 326: note = Tnp_P2
  SITE 334: note = Tnp_P3
  SITE 335: note = Tnp_P4
  SITE 346: note = Tnp_P5
MKSASNTPNDATATDIALPPEPPGGVTAGLDWDRDDHAVSVVDDRGRELTRTTVDHTAAGLRELIAFLSRHGAGEVAIERPDGPVVDALLDAGLTVVVISPNQVKNLRGRYGSVGNKDDRFDAYVLADTLRTDRPRLRALVPDTDATIALRRACRARKDLVNHRVAVANQLRAHLRNVLPAAVGLFQHIDSLISLAFLTRFDTQDKIDWLSAKRLGDWLSKQGYSGKADPAVLHQRILAAPHGACGAHGTAQAHITASYVALLDTLAAQIKALSTQIEAQLYAHADAHIFTSLPRAGRVRAARLLAEIGDCRARFPNPESLTCLAGAAPSTRQSGKSRVVGFRWACGKQLRDAVTDFVADTRLVNPWAADLYDRARARGHDHPHAVRILARAWLHVIWHCWQDHLAYNPDKHRALQKTLAQKGAA

SEQ ID NO: 19805 - protein, 265 aa, unidentified
  source 1..265: note = protein_a90dd7d
  REGION 2..69: note = RuvC_domain
  SITE 9: note = RuvC_P3
  SITE 11: note = RuvC_P4
  SITE 14: note = RuvC_P5
  REGION 133..217: note = Tnp_domain
  SITE 141: note = Tnp_P1
  SITE 171: note = Tnp_P2
  SITE 179: note = Tnp_P3
  SITE 180: note = Tnp_P4
  SITE 192: note = Tnp_P5
MKPFVKSNKNDFVDTEAIAEAVERKNMRFVPIKTDGQLDLQAIHRVRDRLVSRRTAIMNQIRAFLLERGMVFAQKPAKLKAGMTDVLENADNALTPMMRNMIGILWDEWKTVEQQIEDLTDKLEQIAASDADCCRIRQIPGIGPIVATAIVAAIGDGAAFRKGRDFAAWLGLVPRQYSTGGNARLLGISKRGNIYLRKILIHGARAAAMRIKRDRFPIGAWMNALEARAPRNVLVVAMANKLARIAWAVLSTGEDYRPTASMAAA

SEQ ID NO: 19806 - protein, 411 aa, unidentified
  source 1..411: note = protein_58cf69c
  REGION 5..163: note = RuvC_domain
  SITE 8: note = RuvC_P1
  SITE 62: note = RuvC_P2
  SITE 102: note = RuvC_P3
  SITE 104: note = RuvC_P4
  SITE 107: note = RuvC_P5
  REGION 273..373: note = Tnp_domain
  SITE 281: note = Tnp_P1
  SITE 311: note = Tnp_P2
  SITE 319: note = Tnp_P3
  SITE 320: note = Tnp_P4
  SITE 333: note = Tnp_P5
MDPVVGLDVSKGESEVQGFLEKGKPYGKSFSIKHDIEGLEMLLDFLKEIKEVTGQQPPVVLESTGHYHKPVVQYLDERFYLLIIVNPLISHKAKASSLRKVKTDAVDAYRLCELYYKEDLEPYKKRGIRLLNLRNLTRQHSNITEMFVQTKLQFQAVLDQVFPEYRGVFGDLYSIASLAILHEYPSSEDILMVSEEKLGTRLKELYKKGSKKWIDEKVQLLKEAATRNPFQKNLYQSHLLSLDMYINMLLQYKEHLSKLEAEIDTLAKDIEEYKIIQSIPGIGEKIAATIISEIGEIDRFDNPKQLVAFAGIDPEVFEYGKFKATLVRITKRGSSRLRHALYMAVRSGIRDSRKKKTTDEIIPRNKRLREFYDKKRSEGKLFKVAVIACANKLLQWIFALLKNKTTFQDDA

SEQ ID NO: 19807 - protein, 325 aa, unidentified
  source 1..325: note = protein_2880784
  REGION 4..154: note = RuvC_domain
  SITE 7: note = RuvC_P1
  SITE 59: note = RuvC_P2
  SITE 99: note = RuvC_P3
  SITE 101: note = RuvC_P4
  SITE 104: note = RuvC_P5
  REGION 198..284: note = Tnp_domain
  SITE 206: note = Tnp_P1
  SITE 235: note = Tnp_P2
  SITE 243: note = Tnp_P3
  SITE 244: note = Tnp_P4
  SITE 257: note = Tnp_P5
MAHIGIDVSKGKLDLCWLRENGKMKTKVFTNHPKHYPALMDWLTRQTGEQAGDLRVYLEATGIYHEPVTEWLHEVGVQVHVTNPAQVRHYAQALGNSGKTDKKDSQLLARYGLDRQPPRWKPEPAGIRRLRRLASRLETVQQDIQREQNRREKAQFSRDTETVSSIDQVLLALQSEAKRLREEIKDHIDSDGDLQRDQELLKSIPGIGDATSVHLMVLLRGKVFRSARQAAAFVGLVPREWTSGTSVRSRPRLTKKGAPMMRRRLYMAAVVASRHNPMVEALYTRLRQAGKPPMSALGAAMRKLVHIAFGVLHRQTPFQTQPVGG

SEQ ID NO: 19808 - protein, 354 aa, unidentified
  source 1..354: note = protein_861570c
  REGION 12..153: note = RuvC_domain
  SITE 15: note = RuvC_P1
  SITE 58: note = RuvC_P2
  SITE 93: note = RuvC_P3
  SITE 95: note = RuvC_P4
  SITE 98: note = RuvC_P5
  REGION 217..302: note = Tnp_domain
  SITE 225: note = Tnp_P1
  SITE 255: note = Tnp_P2
  SITE 263: note = Tnp_P3
  SITE 264: note = Tnp_P4
  SITE 276: note = Tnp_P5
MIEKLSSVIAVIGIDIGKNSFHVVGLDGRGAIVLRQKWSRGQVETRLSNMPACLIGMEACVGAHHLSRRLKLLGHDARLMPAKYVRPYSKGQKNDFRDAEAIAEAVQRPTMKFVATKTADQLDLQALHRVRERLVSQRTGIINQIRAFLLERGIAVRQGIRFLRAGLPGILATPPDVLSPRMARVIEELADDWRRLDERIEGLSSEIEALARQDSGCERLMSVPGIGPTISSAMVAAIGTGEAFSKGRDFAAWLGLVPRQISTGDRTILGKISKRGNRYLRVLFVQAAWVVLIKPKSWERYGLKAWIEAARKRLHRNVLAIALANKLARIAWSVLAWGRNFEARKTDDAAAQSV

SEQ ID NO: 19809 - protein, 400 aa, unidentified
  source 1..400: note = protein_868acbf
  REGION 10..167: note = RuvC_domain
  SITE 13: note = RuvC_P1
  SITE 65: note = RuvC_P2
  SITE 105: note = RuvC_P3
  SITE 107: note = RuvC_P4
  SITE 110: note = RuvC_P5
  REGION 273..360: note = Tnp_domain
  SITE 281: note = Tnp_P1
  SITE 312: note = Tnp_P2
  SITE 320: note = Tnp_P3
  SITE 321: note = Tnp_P4
  SITE 333: note = Tnp_P5
MNETSFSGFLGIDVSKNKFDAYCIDIKGEKYFYLSCPMDRKGFEKLVSRLEALSIPQESLLIGMESTACYHMNLFSFLLAEGYTAVLINPLLISNFVKMQLRKTKTDKKDALVIAQYLLMHMDTLTQTSISSHVSDLRDLSRQRESLLSQMTALKCDMKRLLTITFPELEKLTGVFTKSALRLLSCFPSAHAIVQADPAEINQLLIDHSRGRNSATTAQAIIQAARSSVGTTSPSRELILKQKTDVLIHLEGHLKELTTMMIELCRSDMGDDIDIMTSLRGIGEKTATNFLVEMGGDIRKFKDHKKLIAMAGLDPAIYQSGKHDGKGRITKRGNRHLRRVIWLMTIRVIQFNDCFRQHYDRRRQDGLPFKKAVLATAHKLLRTIFAMLTQRTTFCYETNS

SEQ ID NO: 19810 - protein, 347 aa, unidentified
  source 1..347: note = protein_56c74a2
  REGION 6..150: note = RuvC_domain
  SITE 9: note = RuvC_P1
  SITE 54: note = RuvC_P2
  SITE 89: note = RuvC_P3
  SITE 91: note = RuvC_P4
  SITE 94: note = RuvC_P5
  REGION 213..298: note = Tnp_domain
  SITE 221: note = Tnp_P1
  SITE 251: note = Tnp_P2
  SITE 259: note = Tnp_P3
  SITE 260: note = Tnp_P4
  SITE 272: note = Tnp_P5
MNIIRVGVDIAKSVFHVHGVDRHDQIQWQGKYSRNKWLDALSRKVPAGAEIGMEACASSHHWARELQKRGYQVRLIAAQFVKPYVKSNKNDRVDAEAICEAMSRPNMRFVAPKTVVQQDIQAAHRIREELVSQRTAKANQIRGLVGEYGIIAPVGILQLRRALPRWLEDAENGLTDSFRILLNGLAEDLQYLDDRIVALDERITESVKQDPVARRLMTLRGVGPLTASALSGALGDGKAFKRGRDFAASLGLTPRQHSTGGKDRLLGISKRGDSYLRKLLIHGARAVLRHADRRDDGLSHWLKGLVSRKHINVATVALANKTARIAWALVSNETAYDDNLAAASVGV

SEQ ID NO: 19811 - protein, 332 aa, unidentified
  source 1..332: note = protein_206cb48
  REGION 1..140: note = RuvC_domain
  SITE 2: note = RuvC_P1
  SITE 45: note = RuvC_P2
  SITE 80: note = RuvC_P3
  SITE 82: note = RuvC_P4
  SITE 85: note = RuvC_P5
  REGION 203..292: note = Tnp_domain
  SITE 211: note = Tnp_P1
  SITE 241: note = Tnp_P2
  SITE 249: note = Tnp_P3
  SITE 250: note = Tnp_P4
  SITE 262: note = Tnp_P5
MDIAKTVFQVHYIDRESGEIVNKPIRRAKFLEHFANRPACQIGMEACGGAHHWARQLTKMGHQVKLMPAEFVKAFNIRNKNDAADARAIWLAVQQPGKSVAVKTEMQQAMLALHRMREQLVKFRTMQINSLRGLLTEYGEVMGKGRAALDKAMPEVLGRVAERLPAVLIDTLREQWSGLTRLDEQVAEIERRMREWVKEDQAVKAISEIPGVGLLTATAAVAMMGDAKAFRSGREFAAWAGLVPKQTGSGGKVDLHGISKRGDSYLRVLLIHGARSVLTHAKEPGPWVEQLRKRRPFNVALVAQANKTARMIWAILAHDRPYRKDYVSVKPA

SEQ ID NO: 19812 - protein, 400 aa, unidentified
  source 1..400: note = protein_1a0d0b4
  REGION 10..164: note = RuvC_domain
  SITE 13: note = RuvC_P1
  SITE 62: note = RuvC_P2
  SITE 102: note = RuvC_P3
  SITE 104: note = RuvC_P4
  SITE 107: note = RuvC_P5
  REGION 270..356: note = Tnp_domain
  SITE 278: note = Tnp_P1
  SITE 308: note = Tnp_P2
  SITE 316: note = Tnp_P3
  SITE 317: note = Tnp_P4
  SITE 329: note = Tnp_P5
MSTAAERIWVGIDAGKSHHWAVAVGIDGEKLFSRKVDNDETAILELIVLACGSAESVTWAVDISGRSSALLLALLVAHAQQVFYIPGRTVHRMSAAYRGEGKTDAKDALVIADTVRMRRDLAPVRTEDDLVTTLQLLTAHRADLIADRVRLINRLRDRLMGISPALERAFDYSAARGGLVLLTEYQTPAAIRRIGVKRLTTWLERRKIRNAATVAATAVGAAQAQHTALPGEKRTAKLVCDIAHQILALDERIKDNDREIRETFRLDDRAEILESLPGMGPILGAEFIAAVGDMSSYTNPDRLAAAAGLAPVPRDSGRRTGNLHRPKRYNRRLRWLFYMSAQTAMMRPGPSRDYYLKKRAEGLLHTQAVLSLARRRINVLWAMLRDNRLFTSTPPVTQTA

SEQ ID NO: 19813 - protein, 410 aa, unidentified
  source 1..410: note = protein_4e34f9c
  REGION 5..161: note = RuvC_domain
  SITE 8: note = RuvC_P1
  SITE 58: note = RuvC_P2
  SITE 98: note = RuvC_P3
  SITE 100: note = RuvC_P4
  SITE 103: note = RuvC_P5
  REGION 275..362: note = Tnp_domain
  SITE 283: note = Tnp_P1
  SITE 313: note = Tnp_P2
  SITE 321: note = Tnp_P3
  SITE 322: note = Tnp_P4
  SITE 335: note = Tnp_P5
MYNAVGIDASKFKSTVTVIQPAGIVIRKPFDVLHTSNELNTLVTYLKSLEGETRAVIECTGRYHEPVVKSLEDAGIFISAVNPKLIKGQKQNSLRKVKSDPADARKIARYALDNWAELRQYSSMDTIREQLKTLNSQFDFFMKQKVVAKANLISLLDNTYPGVNKLFDSPARKDGSEKWGDYAYSFWHVDCVRKIGLKAFTERYEAFCKKHHYNFQKGKPAELFEAAKQLVAVFPKEKSYKLLIHQSIQQLNLASEHIEILRKEMNQLASTLPEYDTVMSIYGVGETYGPQLIAEIGDVSRFTHREAITAFAGVNPGVNESGQFRQRSNRASKNGSTKLRKTLFQIMTTYLQNKPVNEPVYQFLDRKRAEGKPYLVYMTAGANKFLRIYYGKVKECLHNLEQDSLPPEES

SEQ ID NO: 19814 - protein, 348 aa, unidentified
  source 1..348: note = protein_6fac22c
  REGION 13..155: note = RuvC_domain
  SITE 16: note = RuvC_P1
  SITE 59: note = RuvC_P2
  SITE 94: note = RuvC_P3
  SITE 96: note = RuvC_P4
  SITE 99: note = RuvC_P5
  REGION 218..304: note = Tnp_domain
  SITE 226: note = Tnp_P1
  SITE 256: note = Tnp_P2
  SITE 264: note = Tnp_P3
  SITE 265: note = Tnp_P4
  SITE 277: note = Tnp_P5
MRNYSSSKRIKTIGIDLAKSVFHLHGVDALGKVVVRKRLSRSKLIEFMTQISSCLVGMEACGGSHYWARKFSSMGHDTRLISPQFVKPFVKGNKNDAADAEAICDAVQRPNMRFVPIKNIEQQDIQSIHRAREQVVCRRTAQGNQIRGLLMEYGLVISQGRKVLCAHIPDILADADNGLSAIFRELLSGLWEEMIHLEERVAEYDLQIDLLSKQSDVCQRLMTVPGIGPMVATALVASVSDGKAFKSGREMAAWLGLVPRQHSTGGKPRLMGISKRGDTYLRKLLIHGARAALRWTDKKHDKRSVWATSLKERRGQNIAAVALANKTVRTAWVLITRHEEYQMSTVSM

SEQ ID NO: 19815 - protein, 338 aa, unidentified
  source 1..338: note = protein_7117dc2
  REGION 6..152: note = RuvC_domain
  SITE 9: note = RuvC_P1
  SITE 53: note = RuvC_P2
  SITE 91: note = RuvC_P3
  SITE 93: note = RuvC_P4
  SITE 96: note = RuvC_P5
  REGION 211..298: note = Tnp_domain
  SITE 219: note = Tnp_P1
  SITE 249: note = Tnp_P2
  SITE 257: note = Tnp_P3
  SITE 258: note = Tnp_P4
  SITE 270: note = Tnp_P5
MAILTVGIDLAKNVFAVHGVNETGRTELMRPAVPRDKLLALVASLPPCTIGMEACSGAHHWARQFQAQGHTVRLVAPKFVTPYRMSGKRGKNDAADAAAICETVQRPHMRFVPAKSLEQQSQLMVHRARQGFVEQRTATINRIRGLLSEFGIVLPLKASTVRQRAREGLEDLPGYANVVIGDLLSELTHLDERIAQYDLHLKAMARADARARRLMQLSGIGETTATCLLAMIGNGHDFDCGRQFAAWLGLAPGQYSSGGKARLGRITKAGDPYLRSLLVLGARAVLAAARNKTDSVSRWAMALAERRGYWKAVVAIAAKNARMAWAVLHRGEAFALPA

SEQ ID NO: 19816 - protein, 319 aa, unidentified
  source 1..319: note = protein_e378723
  REGION 3..150: note = RuvC_domain
  SITE 6: note = RuvC_P1
  SITE 50: note = RuvC_P2
  SITE 90: note = RuvC_P3
  SITE 92: note = RuvC_P4
  SITE 95: note = RuvC_P5
  REGION 189..273: note = Tnp_domain
  SITE 197: note = Tnp_P1
  SITE 226: note = Tnp_P2
  SITE 234: note = Tnp_P3
  SITE 235: note = Tnp_P4
  SITE 246: note = Tnp_P5
MFVGVDVAKAELVVSIVPSAERFSVENDERGVRTLVERLRAVSPTLIVLEATGGYELLGVAALAAAGLPVVVVNPRQVRDFARATGQLAKTDRIDADLLARFADGVRPAVRAIPDAEAQELDALLTRRRQLLEMLHAERNRTGQVFGQGKRMVKKSLKNHISYLERELRMTDTDLGEMIKASPVWRERDELLQSVPGVGPVLSRTLLADLPELGRLSRREIAKLVGVAPLSRDSGTMRGRRFVQGGRATVRAVLYMAALVATKRNAVIRAFYLRLVAAGKPKKLALVACMRKLLTILNVMVRTAQPWSVNAASDALIPA

SEQ ID NO: 19817 - protein, 335 aa, unidentified
  source 1..335: note = protein_6b2eef2
  REGION 7..149: note = RuvC_domain
  SITE 10: note = RuvC_P1
  SITE 53: note = RuvC_P2
  SITE 88: note = RuvC_P3
  SITE 90: note = RuvC_P4
  SITE 93: note = RuvC_P5
  REGION 209..295: note = Tnp_domain
  SITE 217: note = Tnp_P1
  SITE 247: note = Tnp_P2
  SITE 255: note = Tnp_P3
  SITE 256: note = Tnp_P4
  SITE 268: note = Tnp_P5
MESVTLIGIDLGKHSFHLHGQDRHGKAVFRKKMSRKQLHEFFATLHACIVVMESCAGAHHLARKLAEIGHQVKLVSPQFVKPFVKSNKNDFADAEAICEAASRPSMRFVTPKTESQQTLSVLHRVRESLVRDRTKTINQMHGFLLEFGISLPTGLAVIRRLPAVLAEHALPPYLVSTLERLHAHFKYLDGQVDEIEKEIRLQLADDDLGQRLLSIPGVGPITASVLAAEMGDGQQYGCSRDFAASVGLVPRQYSTGGRANLLGISKRGDKNLRRLLVQCARAYMQRLDRQTGRLADWVRSMLMRRHSNVVACALANKLARTAWALAMHHTAFKAA

SEQ ID NO: 19818 - protein, 343 aa, unidentified
  source 1..343: note = protein_14d2386
  REGION 6..148: note = RuvC_domain
  SITE 9: note = RuvC_P1
  SITE 52: note = RuvC_P2
  SITE 87: note = RuvC_P3
  SITE 89: note = RuvC_P4
  SITE 92: note = RuvC_P5
  REGION 211..298: note = Tnp_domain
  SITE 219: note = Tnp_P1
  SITE 249: note = Tnp_P2
  SITE 257: note = Tnp_P3
  SITE 258: note = Tnp_P4
  SITE 270: note = Tnp_P5
MQVVRIGLDLAKYVFAVHGVDSHGKVIVRKTLRRDAVARFFANLPPCLVGMEASNGAHYWAGVLTDLGHEVRLISPQFVTPYVKSNKNDRNDAEAICEAVGRPSMRFVPPKSVDQLAVQAVHRIRRRLVADRVRLVNQVRGLLSEHGIVIARDITQLRRGLAEIVGDSADGLSELVRSLMRELQVEMAELDHRIASYDRRILDIFRRSEQCQRLGKIEGIGPVTATALIAAVGDRTCFKNGRQFAAWLGLVPKQRSSGGRARLFGISKRGDRYLRTLMIHGARAALGRAGGKQDPRSLWLGKLRQRRHPNVAAVALANKNARIVWAMLSGDTFYERGLSVKAA

SEQ ID NO: 19819 - protein, 344 aa, unidentified
  source 1..344: note = protein_b1211ec
  REGION 4..157: note = RuvC_domain
  SITE 7: note = RuvC_P1
  SITE 55: note = RuvC_P2
  SITE 96: note = RuvC_P3
  SITE 98: note = RuvC_P4
  SITE 101: note = RuvC_P5
  REGION 219..304: note = Tnp_domain
  SITE 227: note = Tnp_P1
  SITE 257: note = Tnp_P2
  SITE 265: note = Tnp_P3
  SITE 266: note = Tnp_P4
  SITE 277: note = Tnp_P5
MVTIGIDPHKSSHTAAALDEAGQLLGELRLPATASTLVRLRRWAEPWPERTWAVEGANGLGRLLAQQLLAAGEIVLDVPATLSARARQLQRGHGRKSDGIDARSVATVALRSADLRRIVGEDHSAVLRLLSTRRDELTGERRRVVNRLHRLLRDLHPGGAGTDLSAKAAASLLAKLRPRSVADLERKAMARGLLVDLRRLDRALAANRARCAAAVTASGSSLPSILGISDVLAAKIIGHTGDVRRFASAQRFASYTGTAPIEVSSGDVVRHRLSRGGNRALNNALHLAARVQVMHPGPGRDHYRRKLAEHKSSSEALRSLKRQLAKVVYRHLVADHVRRLASLS

SEQ ID NO: 19820 - protein, 340 aa, unidentified
  source 1..340: note = protein_951ba8e
  REGION 6..148: note = RuvC_domain
  SITE 9: note = RuvC_P1
  SITE 52: note = RuvC_P2
  SITE 87: note = RuvC_P3
  SITE 89: note = RuvC_P4
  SITE 92: note = RuvC_P5
  REGION 210..299: note = Tnp_domain
  SITE 218: note = Tnp_P1
  SITE 248: note = Tnp_P2
  SITE 256: note = Tnp_P3
  SITE 257: note = Tnp_P4
  SITE 269: note = Tnp_P5
MHATMIGLDIAKTVFQVYGEDAARRPVLRKRLSRAALTGLFAKLPPTVVGIEACGTAHHWARTLTAMGHTVRLIPAAYVRPFVKRNKTDARDAEAICEAMQRPSMRQVPVKTVEQQAGRGLETARDLLVRQHTQLMNSVRGLLAELGIVGAQGRRGFAVLRTRIEAGDPAIHPVLLPALQTILEQWHGTGRAITELEARLVARAKADATMRRLMTVPGIGPLSAHAIVAAIGDGRQFSAARDFAAWVGLTPRQHESGNRRHSGRISRQGDQGVRRLLTLGASAVMRQARAKPQRATAWQRGILARRPVKVAVVAQAAKTARIAWAMLRSGHSYRAAGAAA

SEQ ID NO: 19821 - protein, 345 aa, unidentified
  source 1..345: note = protein_60aeccb
  REGION 1..109: note = RuvC_domain
  SITE 6: note = RuvC_P2
  SITE 46: note = RuvC_P3
  SITE 48: note = RuvC_P4
  SITE 51: note = RuvC_P5
  REGION 217..303: note = Tnp_domain
  SITE 225: note = Tnp_P1
  SITE 255: note = Tnp_P2
  SITE 263: note = Tnp_P3
  SITE 264: note = Tnp_P4
  SITE 276: note = Tnp_P5
MLVIVDQPNTIGALPIAVARDCGCTVAYLPGLAMRKAADLYPGKSKTNARDAFIIAETARAMPHTLRAVDRDSEVLAALKVLSGFDADLTHECTRAINRLRSLLLQIFPALERVFPGTVLTRSLVLELFIKYAGPTGLRVAGRSNVLRWARNHSRKDPVNLVDAIFTALGEQTATVIGTEAVELVIPRVAAQIKELKHQRAIVAEEVEKLLDDFPLSRVLMSMPGVGIKTAATILLTIGDAGTFTSAGHLAAYSGIAPVTRRSGSSIRGEFAARSGNKQLKNALFRSAWIASCHHAASKAYYQKKRDQGKKHNAAVICLARRRCDVIYSMLRNGTLYEEEPAQAA

SEQ ID NO: 19822 - protein, 344 aa, unidentified
  source 1..344: note = protein_0a68efc
  REGION 7..149: note = RuvC_domain
  SITE 10: note = RuvC_P1
  SITE 53: note = RuvC_P2
  SITE 88: note = RuvC_P3
  SITE 90: note = RuvC_P4
  SITE 93: note = RuvC_P5
  REGION 212..304: note = Tnp_domain
  SITE 220: note = Tnp_P1
  SITE 250: note = Tnp_P2
  SITE 258: note = Tnp_P3
  SITE 259: note = Tnp_P4
  SITE 271: note = Tnp_P5
MSKVIMIGLDLAKNLFQVHGVGASGAVVVRRQLRRSQVEKFFSELAPAIVGMEACGGAHHWARMLERLGHEVRLMPASYVKPYVRRNKNDGRDAEGVCEATGRPTMRFVAVKSEEQQAVLVIHSTRALLIRQRTMAANALRAGLSEFGIVAAQGMKGLRTLIEQLRTPSEGVIPEIGRATLLLLARQWEALDVDIRALDRQIERAVRVDEAACRLMEVPSIGPITASAAVAKLPNARVFKTGRDFSAWVGLTPRGHGTGGKHRSGGISKQGDRTLRSLLINGASSYLRQQIARGVKDPWLRDMLARRPYKVVMVALAAKNARIIWALLAKGERYRERAPVPAAA

SEQ ID NO: 19823 - protein, 397 aa, unidentified
  source 1..397: note = protein_3d2a0df
  REGION 9..163: note = RuvC_domain
  SITE 12: note = RuvC_P1
  SITE 60: note = RuvC_P2
  SITE 100: note = RuvC_P3
  SITE 102: note = RuvC_P4
  SITE 105: note = RuvC_P5
  REGION 270..355: note = Tnp_domain
  SITE 278: note = Tnp_P1
  SITE 308: note = Tnp_P2
  SITE 316: note = Tnp_P3
  SITE 317: note = Tnp_P4
  SITE 329: note = Tnp_P5
MDTSYAVFCGIDVGKSEHHAVGLAVDGTRLFDKALPNDEARLRTVFDRLAAYGPVLIVVDQPNTIGALPVTVARSCGHRVAYLPGLSMRRIADLYPGQAKTDARDAFIIADTARTMPHTLRRVDTGDDTLAELGVLIGFDDDLAGEATRVSNRIRGLLTSIHPALERVLGPRVTHPAVLEILSRCGGPAGIRTAGKRKLTAIAVKNAPRMGARLVAEIYTALEAQTVVVPGSAAAETVLPKLADSLKETLQQRKAIGLDVERMLDAHPLSSVLISMPGVGIRTAARILLEVGDGSAFKSAGHLAAYAGIAPVTHRSGTSIRGEHPARSGNRKLKRALFLSAFAALHDPTSRAYYDRKRAEGKKHNAALICLARRRCDVLFAMLKNKTLYQPPAAHAA

SEQ ID NO: 19824 - protein, 405 aa, unidentified
  source 1..405: note = protein_98fd0da
  REGION 4..160: note = RuvC_domain
  SITE 7: note = RuvC_P1
  SITE 57: note = RuvC_P2
  SITE 97: note = RuvC_P3
  SITE 99: note = RuvC_P4
  SITE 102: note = RuvC_P5
  REGION 274..361: note = Tnp_domain
  SITE 282: note = Tnp_P1
  SITE 312: note = Tnp_P2
  SITE 320: note = Tnp_P3
  SITE 321: note = Tnp_P4
  SITE 334: note = Tnp_P5
MNAVGIDVSKGKSTVTIRRPGDVVLMPPCDIPHTQSAINALIEQIKSLDGETKVCMEHTGRYYEPVANWLSDAGIFVSAVNPILIRDFGDDSLRTPKTDKADSKKIACYALDRWAKLKQYGSMDKTRNQLKTMNRQFGFYMDQKTAMKNNLISLLDQTYPGANDFFDSPARSDGSQKWVDFVYTYWHVDCVRGKSLQSFTEHYRKWCKRNGYNFSASKAETIYQSSSDLIAVFPKDDSTKALIRQAVTMLNTASQTVEALRLKMDQTAATLPEYPVVMAMNGVGTSLGPQLMAEIGDVTRFTHREALTAFAGVDPGKNDSGKHNQKSVRTSKKDSPSLRKTLFQIMDGLIKRSPIDDPVYTFMDKKRSEGKPYYVYMTAGANKFLRIYYGRVREYLASLEESKES

SEQ ID NO: 19825 - protein, 343 aa, unidentified
  source 1..343: note = protein_a6117c9
  REGION 6..149: note = RuvC_domain
  SITE 9: note = RuvC_P1
  SITE 54: note = RuvC_P2
  SITE 89: note = RuvC_P3
  SITE 91: note = RuvC_P4
  SITE 94: note = RuvC_P5
  REGION 213..300: note = Tnp_domain
  SITE 221: note = Tnp_P1
  SITE 251: note = Tnp_P2
  SITE 259: note = Tnp_P3
  SITE 260: note = Tnp_P4
  SITE 272: note = Tnp_P5
MKLMRIGVDLAKNVFQIHGVDCHERPVWRQRLPRDRWLQTVLEKIEPGCEIGMESCGGAHHWARQLQARGFQVRLIAPQFVKPYVKSNKNDANDAEAICEAMSRPSMRFVAIKTIEQQDIQATHRIRAGLIEQRTAKANQIRGLVAEYGLVAPKELLMLRRAIPCWLEDADNGLTVRLRRLLNGLWGDLRALDERVGELDSEISAIAASEPSAVRLQQLRGVGPMIATALIAAIGDARQFANGRQLAASLGLTPKQHSSGGKDRLLGISKRGDAYLRTLMIHGARSALRTAKSKDDRLSQWAVRLAERSHPNVAAIALANKTARMAWAMLRNGTDYQPDRAAA

SEQ ID NO: 19826 - protein, 392 aa, unidentified
  source 1..392: note = protein_cdf25cf
  REGION 5..164: note = RuvC_domain
  SITE 8: note = RuvC_P1
  SITE 61: note = RuvC_P2
  SITE 102: note = RuvC_P3
  SITE 104: note = RuvC_P4
  SITE 107: note = RuvC_P5
  REGION 267..354: note = Tnp_domain
  SITE 275: note = Tnp_P1
  SITE 305: note = Tnp_P2
  SITE 313: note = Tnp_P3
  SITE 314: note = Tnp_P4
  SITE 327: note = Tnp_P5
MVVSVGIDVSKDKHDCFIVSSDGEVLADVFTISNTLDGFHYLLQRIQDCTTPKDKIKVGLEATGHYSYNLLGFLLDNGLTTYVLNPLRTNLYRKSFSLRKTKTDRVDARTIASMLLSDVGLKPYTDTAYHNEELKSLTRYRFDKVKERAKLKSSIARLVCILFPELEKLVPSLHIASVYALLEEFPGAKQIAAAHLTRLKALLETVSKGRYKRDVTLEIRNAARNSIGSWMPAKSLELQHTIRLVHELDSEIAEIEKQIQSLMDELDSPITTIPGLGFRMAAMILAEVGDFTRFDSPDKLLAYTGMSPSTYQSGQLKNCYPHMEKRGSRYLRYALYNATKYVCHWDPTFAAYLSKKRAEGKHYNIALSHAAKKLVRLIFAMEKSKQPYCPAA

SEQ ID NO: 19827 - protein, 386 aa, unidentified
  source 1..386: note = protein_316e572
  REGION 39..185: note = RuvC_domain
  SITE 79: note = RuvC_P2
  SITE 118: note = RuvC_P3
  SITE 120: note = RuvC_P4
  SITE 123: note = RuvC_P5
  REGION 241..342: note = Tnp_domain
  SITE 263: note = Tnp_P1
  SITE 292: note = Tnp_P2
  SITE 300: note = Tnp_P3
  SITE 301: note = Tnp_P4
  SITE 313: note = Tnp_P5
MPQLNDLSRSLVILEQDATLIAVIEMGQSNWLVAGIVPGVERSPLKKLAVDESALLKLLNRWREEAEKAGHRIERIAIAFEAGRDGFWLARWLRARGIEAHVIHASSVAVSREHRRAKTDRLDTELLKRAFLGWLRGERDHCKMVAIPTLAQEDAKRPNRERESLVGEQSRIVNRMKAALARLGIRGFNPKLKKAVERLDGLRTPEGEPIPPNTLAELKHDMERRRLVRSQIRDIEGTRLERLKQAPGDGPHVMVRLLARVIGVGVETADMLVQEVLSRNLRDRRAVARYGGLTGSPDESGKKRREKGLARSGNARVRRGMIQLAWRFLMFQKGSALAHWFYARTKNAPQTRKTMIVALARKLLIALWRLAREGAIPEGIVLRPAL

SEQ ID NO: 19828 - protein, 257 aa, unidentified
  source 1..257: note = protein_8ea78fc
  REGION 2..90: note = RuvC_domain
  SITE 34: note = RuvC_P3
  SITE 36: note = RuvC_P4
  SITE 39: note = RuvC_P5
  REGION 134..218: note = Tnp_domain
  SITE 142: note = Tnp_P1
  SITE 171: note = Tnp_P2
  SITE 179: note = Tnp_P3
  SITE 180: note = Tnp_P4
  SITE 191: note = Tnp_P5
MAVVVGLGRQGDCDAAVTPAQIKAFAASRGTRAKTDRIDAELIARFMAFRPDAGRGLPHKKIRFLRALVSKRGQLVETRKRLLAQIKAHGKLGSADMFEAMDGELTDLLDRQIAGLEVQIEQVIAIEESLANTADILRSVPGIGPVASTMLIAEMPELGQITGEQAAALTGLAPIAHDSGAMRGKRAIGGGRRLLRHVMFQAALVASHHNPVLKTFADRLRAAGKPHKVVITAVARKLVTIVNALCKSRQKWTLQTS

SEQ ID NO: 19829 - protein, 377 aa, unidentified
  source 1..377: note = protein_2829f00
  REGION 1..147: note = RuvC_domain
  SITE 42: note = RuvC_P2
  SITE 82: note = RuvC_P3
  SITE 84: note = RuvC_P4
  SITE 87: note = RuvC_P5
  REGION 250..337: note = Tnp_domain
  SITE 258: note = Tnp_P1
  SITE 288: note = Tnp_P2
  SITE 296: note = Tnp_P3
  SITE 297: note = Tnp_P4
  SITE 310: note = Tnp_P5
MDKDTGELIISPTSFANYKEGFDFLVQKLKPYSKSSVLIGMEDTGHYHFALLKYLLDQSFTVALINPKTTDFTRKLQGGITKNDKLDTLTICDVLDTPKRKKQYRITKVDSFDLYEQKQLTRHHHNLKKEINVYTNRLQKCIDVVFPEFNSLFKCKYGTVYMNVLKTFGSAENIASADIRTIRKCFDIKGRGGRISLTAEKLKECAKSSIGISSSAEVIQIKHLISQIELIHDQIAEIDKKIEEFSVQNNSPILSIPGISHFSGTSILAELGEISNYSSARKIIKFAGVAPLHYESSQFTAQHTAITKKGSKYLRKTLYQIILPVINNNPVFKQYYQLKLSQGKGHRCAQGHCVRKLLRIIYHLLTTGQQFDPELLR

SEQ ID NO: 19830 - protein, 299 aa, unidentified
  source 1..299: note = protein_3551122
  REGION 1..63: note = RuvC_domain
  SITE 2: note = RuvC_P3
  SITE 4: note = RuvC_P4
  SITE 7: note = RuvC_P5
  REGION 173..262: note = Tnp_domain
  SITE 181: note = Tnp_P1
  SITE 211: note = Tnp_P2
  SITE 219: note = Tnp_P3
  SITE 220: note = Tnp_P4
  SITE 233: note = Tnp_P5
MKTDKADAFHLGELYYKEDLDSYQKKTEKALNLRLLTRQHSALTESYVDIKLQFQAALDQVFPEFQSVFSDLYGTLSLNTLAHYPTALDIQRAMPQELADGMRQFGARRSKAWFLDKASQLKEAAKRNPFQSPVCHGQLVSLNMYIQMLFQFQQHLSKLKKEIDALAKTFEDYELLKSIPGIGNKIAATIISEIGDINLFQHPKKLVAFAGLDPSVFESGKFKASISHITKRGSSRLRQALYSAVQCGLAKNRNKKLIAYYQRKRNEGKPHKVAVIACANKLVHWIHAILKNKKVFVDL

SEQ ID NO: 19831 - protein, 344 aa, unidentified
  source 1..344: note = protein_62a19e3
  REGION 6..149: note = RuvC_domain
  SITE 9: note = RuvC_P1
  SITE 53: note = RuvC_P2
  SITE 88: note = RuvC_P3
  SITE 90: note = RuvC_P4
  SITE 93: note = RuvC_P5
  REGION 212..297: note = Tnp_domain
  SITE 220: note = Tnp_P1
  SITE 250: note = Tnp_P2
  SITE 258: note = Tnp_P3
  SITE 259: note = Tnp_P4
  SITE 271: note = Tnp_P5
MSIKVVGIDIAKNLFQVCVLSTDGQILSNRKVKRDKILDTIRQLPDRTALAMESCATSHHWGRVFQELGFTVALIPAQHVKPFVGRQKNDANDARAICEAFSRPDIHFVPVKSVEQQDPKAIRSVRKRLVEHRTALANQIRGLAAEYGVVFPLSIKALRSHLPLAIEDAENELSHAMRSLLQTLYCDFINLSDEIDEVTRSITILSQQHPRYEAIKNIPGFGPILTAAIISEVGSGKQFQNGRQFSAWCGLVPKQNSTGGKSSLGALSKNGNRDLITLPIHGARAVVRCRTSSMDPMGAWIRSLVARRGKAKAIVALANKLGRVVWRVLSTDCEYDINRAFKPL

SEQ ID NO: 19832 - protein, 400 aa, unidentified
  source 1..400: note = protein_3f8fd4c
  REGION 11..165: note = RuvC_domain
  SITE 14: note = RuvC_P1
  SITE 62: note = RuvC_P2
  SITE 102: note = RuvC_P3
  SITE 104: note = RuvC_P4
  SITE 107: note = RuvC_P5
  REGION 272..359: note = Tnp_domain
  SITE 280: note = Tnp_P1
  SITE 311: note = Tnp_P2
  SITE 319: note = Tnp_P3
  SITE 320: note = Tnp_P4
  SITE 332: note = Tnp_P5
MMTPDDIDVWVGLDVGKSAHHAHALDHDGNTLYDKPLKQDEKAIRTMLGKLSKHGRVLLVVDQPNTIGSLPLTVARNMGIAVAYLPGTAMRRTAQLLPGDAKTDRRDAHVIAWAALKLPETLRDAGPDDETLAALKLLAGHAEDLSHESTRHVNRLRSLLLQTHPAFERALKGERITRDATLALLERYGGPMGVKRAGIEDVKDWAKSNGLRAGRIIDDMFKAIGEQTVTVPGTLMAETIIPSIAHDIKTIRDRRREVGRQVEKLLEDHPLLTVLTSMPGIGVRTASNILLGIGGDIANFKSSAHLAAYAGISPVTGQSGTSIKGERPSRRGNKRLKNALWQTAFVASTKHPPSVAYYKRKREQGKHHNAAIICLARRRCDVIYSMLKNGTLYQEPALVA

SEQ ID NO: 19833 - protein, 304 aa, unidentified
  source 1..304: note = protein_ae222b4
  REGION 13..154: note = RuvC_domain
  SITE 16: note = RuvC_P1
  SITE 59: note = RuvC_P2
  SITE 94: note = RuvC_P3
  SITE 96: note = RuvC_P4
  SITE 99: note = RuvC_P5
  REGION 218..282: note = Tnp_domain
  SITE 226: note = Tnp_P1
  SITE 256: note = Tnp_P2
  SITE 264: note = Tnp_P3
  SITE 265: note = Tnp_P4
MSRNSTSVAIATIGLDIGKNIFHLVGLDKRGAIALRIKVSRGQVERRLATVPHCLIGLEACSGSHHIGRQLAALGHDVRLLPAQYVKPFLKGHKNDYRDAEAIAEAVQRPTMQFVAIKTPEQMDLLALHRVRSRLVSQRTGVINQIRGFLLERGITARQGPSALRQMLPTVLGSRSDSLSPRVSRLVADLAEDWRRLDERIATVSAEINELAKQDDHCQRLMTVPGIGPLIASAVVAAIGTGGGFKQGRDFGAWLGLVPRQESTGDRTILGRRQQVPEDPIRAGGPCCPGAPPTPGEAGPVALD

SEQ ID NO: 19834 - protein, 346 aa, unidentified
  source 1..346: note = protein_7ff4f53
  REGION 14..156: note = RuvC_domain
  SITE 17: note = RuvC_P1
  SITE 60: note = RuvC_P2
  SITE 95: note = RuvC_P3
  SITE 97: note = RuvC_P4
  SITE 100: note = RuvC_P5
  REGION 218..304: note = Tnp_domain
  SITE 226: note = Tnp_P1
  SITE 256: note = Tnp_P2
  SITE 264: note = Tnp_P3
  SITE 265: note = Tnp_P4
  SITE 277: note = Tnp_P5
MGKIAADLNTITTVGFDLAKHVFQVHAIDAEGRVVITKAIRRKDVLKFFADLPRCVVGLEACGSAHHWARELIRLGHDARLMPPAYVKAYVRRQKNDAADAAAICEAVTRPSMRFVPVRSVENQATLMHHKVRELLVGQRTQLLNALRGHLSEIGIIVAQGLNNARALASLIIEENDIVPAIVRSALEPLVRQLVQLDEEIGQSDRAILAIARSDGMARRLMTVPGIGPITASAFAASVQDVSAFSGPREFAAFLGLTPRQASSGGKERLGRVSKMGNRYLRKLLVVGAHAVLYHRRSSTDALRTWADRLLDTKPFKLVAVAIANKLARIAFAIMRGEASYGKMPA

SEQ ID NO: 19835 - protein, 396 aa, unidentified
  source 1..396: note = protein_75d043f
  REGION 19..167: note = RuvC_domain
  SITE 22: note = RuvC_P1
  SITE 73: note = RuvC_P2
  SITE 106: note = RuvC_P3
  SITE 108: note = RuvC_P4
  SITE 111: note = RuvC_P5
  REGION 234..319: note = Tnp_domain
  SITE 241: note = Tnp_P1
  SITE 271: note = Tnp_P2
  SITE 279: note = Tnp_P3
  SITE 280: note = Tnp_P4
  SITE 292: note = Tnp_P5
MPKTNLQNSNDFTGQNFYVGLDVHKKSWAVTIRSLGIEVGHFTQEPDAAGLHQYLRRNFPGGQYHSAYEAGFCGTGAHEELCKAGIDNMIVHAADVPSTDKQKKNKTDLHDSRAIADHLERGNLHGIYVLSQEQQELRSLFRLRECKVKDTTRANNRLKSFLMYYGIAIPEAISKRGDLTGRALAWLDIELQSAAGTIVLQEYIAELKYQRKQLFQLTKTLREQVMAHDKQIYVNLITIPGMGSITAIGLMTEIGDFRRFDDPDEYSSYLGLYPWEDSSGDCIKTKGMQPRCNSHLRPLLVEASWHAIRKSRNLFAYYSKHAGGKNGKKAIVKVARKLAMIARGVAISGQPYQEDYQKKDNKHEPTKKMKAGRFSSGITEQHINKQPNYGRMSMPG

SEQ ID NO: 19836 - protein, 407 aa, unidentified
  source 1..407: note = protein_540b5e9
  REGION 4..160: note = RuvC_domain
  SITE 7: note = RuvC_P1
  SITE 57: note = RuvC_P2
  SITE 97: note = RuvC_P3
  SITE 99: note = RuvC_P4
  SITE 102: note = RuvC_P5
  REGION 274..361: note = Tnp_domain
  SITE 282: note = Tnp_P1
  SITE 312: note = Tnp_P2
  SITE 320: note = Tnp_P3
  SITE 321: note = Tnp_P4
  SITE 334: note = Tnp_P5
MNSVGIDVSKGKSMVAAMRPGGEVSLVPFEVPHTYAKLENLGYQILGLGEDIRVIMEATGRYHEPVAAALHELGIYVCVLNPIVIKQSGAGSVRKVKSDKKDALKIAKYGLDNWVKLREHTPMDATRQQLKLFSRQYNLYMKTSVALQNNLISLLDKTWPGANDIFDSPTRANGHQKWVDFVAAFWHCDCVCRMSEAAFVERYQKWCKRKGYHFSQVKAEDVYIESLGHCPTLPKNANTKLLITSATNELTAVRKVLMTIKAEVIRLAKQLPEYEIVQTMYGVGEITGSQLMAELGDVRNFANRGSIVAFAGIDPEVNQSGSQQRESNPASKRGSPHLRKTLFLVVEKYLMRSPAEEPVYQFLDKKRAEGKKYYVYMTAAANKFLRIYYARVKAYLNEHCPEQEPLE

SEQ ID NO: 19837 - protein, 412 aa, unidentified
  source 1..412: note = protein_e64dfe0
  REGION 5..164: note = RuvC_domain
  SITE 8: note = RuvC_P1
  SITE 63: note = RuvC_P2
  SITE 103: note = RuvC_P3
  SITE 105: note = RuvC_P4
  SITE 108: note = RuvC_P5
  REGION 274..374: note = Tnp_domain
  SITE 282: note = Tnp_P1
  SITE 312: note = Tnp_P2
  SITE 320: note = Tnp_P3
  SITE 321: note = Tnp_P4
  SITE 334: note = Tnp_P5
MNPVIGLDVSKGESQVQAFLDKGKPYRKSFSIEHNLDGLGNLLEFLQEVEKLADGNQPSVVLESTGHYHTPVIQFLEEQNYVYIIVNPLISHRAKSSSLRKVKTDAVDAYHLCELFYKEELEPYKKRGVQLLNLRNLTRQQESIAEISAKTKLQLHSLLDQVFPEYRGVFGSLYSKVSLLTLLTYPTSEAVLSTSEREITEKIASLCISRSELWAKEKAKKLREAALRNPFQKNLYQSHIFNLEILVKIVLQYQEHLSKIANEIDALAKEIEEYEILQSIPGIGEKIAATIISEIGEIDRFNDAKKLVAFAGVDPSVYSSGKFTASVNRITKRGSCRLRHALYMAVQSGIRDARKKKTTDEIIPRNKRLREFYDKKREEGKPFRVAVIACVNKLLHWIYALLKSRTTFQDIV

SEQ ID NO: 19838 - protein, 340 aa, unidentified
  source 1..340: note = protein_c1a59d6
  REGION 7..148: note = RuvC_domain
  SITE 10: note = RuvC_P1
  SITE 53: note = RuvC_P2
  SITE 88: note = RuvC_P3
  SITE 90: note = RuvC_P4
  SITE 93: note = RuvC_P5
  REGION 212..298: note = Tnp_domain
  SITE 220: note = Tnp_P1
  SITE 250: note = Tnp_P2
  SITE 258: note = Tnp_P3
  SITE 259: note = Tnp_P4
  SITE 271: note = Tnp_P5
MNQSMTIGIDLAKHVFFVAALDGSGKPARRKKLRRHEVLPFLANHPGAVVGMEACSGAHHWAREIRALGHSVQLLPAQHVKAYLRGQKNDYNDALAIAEAVQHGRIRCVEIKTVDQQLDQSLHRLRQALVTEQTGLINRTRALLAEHGVDLPEGKYRFRQTVIAQLEDAENGLPWRLRELLGRQYQLFIALEQELAWYEREIKTKAAESEACQRLMSVPGYGPIVSSAFYGWLGSGQQFRCGRDVAAALGLVPKQYSTGGKTVLGSISKRGDRHLRALLVHGARAVARYAKERDDRLSRWVCSLIERRGYNKAVVALANKLARIGWAVVARGQPYQAVPA

SEQ ID NO: 19839 - protein, 343 aa, unidentified
  source 1..343: note = protein_e87c27a
  REGION 7..149: note = RuvC_domain
  SITE 10: note = RuvC_P1
  SITE 53: note = RuvC_P2
  SITE 88: note = RuvC_P3
  SITE 90: note = RuvC_P4
  SITE 93: note = RuvC_P5
  REGION 212..305: note = Tnp_domain
  SITE 220: note = Tnp_P1
  SITE 250: note = Tnp_P2
  SITE 258: note = Tnp_P3
  SITE 259: note = Tnp_P4
  SITE 271: note = Tnp_P5
MQAVKTIGLDIAKSIFQVHGVDADGQVVIRRKLKRRYVLAFFAKVPSCLIGMEACATSHHWSRELQALGHRVRLMPPAYVRPYVKRQKNDAADAEAICEAVTRANMRFVETKTTEQQSCLVLHRTRHLFIRQQTSVINAIRAHLAEFGIVAPVGRKGLEQLLDVLANSEDKRIPQVARACVAALGAQLHALKAQILEFDRQIMLWHRSHETSKRLDEIPGVGPALATALVASIADPKAFRSGRDFSAWIGLVPKQHSSGGKEKLGSISKPGDRYLRSLFTAGALAVIRYAKIYGTKHRPWLAALLARRPTKVAAIALANKLARMVWAMMTRGERYKEPVALAA

SEQ ID NO: 19840 - protein, 340 aa, unidentified
  source 1..340: note = protein_2f8f168
  REGION 7..148: note = RuvC_domain
  SITE 10: note = RuvC_P1
  SITE 53: note = RuvC_P2
  SITE 88: note = RuvC_P3
  SITE 90: note = RuvC_P4
  SITE 93: note = RuvC_P5
  REGION 212..298: note = Tnp_domain
  SITE 220: note = Tnp_P1
  SITE 250: note = Tnp_P2
  SITE 258: note = Tnp_P3
  SITE 259: note = Tnp_P4
  SITE 271: note = Tnp_P5
MTKFMTIGIDLAKAVFFISVHEPSGKQTHRKKLRRHQVLPFLANHPTAVVGMEACSGAHYWAREISKLGHTVCLLPAQHVKAYLRGQKNDYNDAQAIAEAVQHGRIRCVEIKTIEQQLDQSLHRLRQSLVVEQTGLVNRTRALLAEHGVCLPEGKHRFRKAVAAFLEDAENGLPWRLRELLDRQYQLFLVLEQELAWYEREIRAQAAENEHCQRLMSVPGFGPISSSAFYGWLGNGQQFRCGRNVGAALGLVPKQYSTGGKTLLGGISKRGDKHLRALLVHGARAVARYAKERDDRLSRWVQSLIERRGYNKAVVALANKLARIGWAVIARSEQYRALPA

SEQ ID NO: 19841 - protein, 392 aa, unidentified
  source 1..392: note = protein_6143800
  REGION 11..164: note = RuvC_domain
  SITE 14: note = RuvC_P1
  SITE 62: note = RuvC_P2
  SITE 103: note = RuvC_P3
  SITE 105: note = RuvC_P4
  SITE 108: note = RuvC_P5
  REGION 226..311: note = Tnp_domain
  SITE 234: note = Tnp_P1
  SITE 264: note = Tnp_P2
  SITE 272: note = Tnp_P3
  SITE 273: note = Tnp_P4
  SITE 284: note = Tnp_P5
MEEQRVDRVVIGMDPHKRSVTIEVMRPDESIAAGGRFDTDPAGYTAMLELARAWPKRVWAVEGCNGIGRHVAVRLLADGEQVIDVPPRLSARVRMFATGQGRKTDATDAHSIALVGVRMAGLRPVVDDEQLAVLRVLVDRRRALGEDHTRMVSQLHHLLLELVPGGAKRDLSAAQAKKLLATVRPRDVAGKTRRRVAAELVGDLERVYARKKAANKELSQLLAATGTTLTGLNGIGPSGAARLLVEVGDITRFPDNNHFASWTGTAPIDASSGDHVRHRLSRGGNRQINRVLHIMATVQLRNPTEGRAFFDRTKARGKTSNEAMRLLKRRLSDIVYRTMLADVARQMTSPGGQKGDDSDSSAAGSQPHTSSSDKPLPGPATTHPRTALPSAS

SEQ ID NO: 19842 - protein, 339 aa, unidentified
  source 1..339: note = protein_380b62f
  REGION 7..149: note = RuvC_domain
  SITE 10: note = RuvC_P1
  SITE 53: note = RuvC_P2
  SITE 88: note = RuvC_P3
  SITE 90: note = RuvC_P4
  SITE 93: note = RuvC_P5
  REGION 208..295: note = Tnp_domain
  SITE 216: note = Tnp_P1
  SITE 246: note = Tnp_P2
  SITE 254: note = Tnp_P3
  SITE 255: note = Tnp_P4
  SITE 267: note = Tnp_P5
MEEVTTVGIDLAKNVFSLHGVDEAGKTVLRRTVRRERLVETVAALSPCLIGMEACSGAHEWGRRFQQHGHTVKLMAPKFVAPYRKSDKNDGNDAEAVCEAVSRPSMRFVPVKSTEQQALLAVHRVRQGFVVERTALINRLRGLMSEFGVVLALGSVTVRRQAAQAAEQLPELARGAIGDLLEQLRVLDERIAKYDKQIEAQAGLSEPARRLMQIRGVGPTTALAIVATVGDAREFKNGRQFAAWIGLVPAQHSTGGKSRLGHISKRGDAYLRNLLVQGARSVLQVAGAHQDRISRWALELQQRRGYYRALVAIANKNARIAWALLAKRESVRRAQPNTL

SEQ ID NO: 19843 - protein, 402 aa, unidentified
  source 1..402: note = protein_c9b05cd
  REGION 5..160: note = RuvC_domain
  SITE 8: note = RuvC_P1
  SITE 57: note = RuvC_P2
  SITE 97: note = RuvC_P3
  SITE 99: note = RuvC_P4
  SITE 102: note = RuvC_P5
  REGION 268..354: note = Tnp_domain
  SITE 276: note = Tnp_P1
  SITE 307: note = Tnp_P2
  SITE 315: note = Tnp_P3
  SITE 316: note = Tnp_P4
  SITE 327: note = Tnp_P5
MNFFVGLDWASQAHAVCVLDVAGQVCWQGSVEHSAEGLAELRRRLARFGPPASLPIAIERPSGLVVDTLMDAGHPVVPIHPNALKASRPRYSAAGSKSDPGDAFILGDLLRTDGHRFRPLQPLSDATRALRALVRSRDDLVAARVALANQLRALLDCFWPGAAAIFADVDSPIALAFLSRYPTPHSAERLGEKRLTRFLVQHAYCGRRPVPELLTRLRAAPIAQTGELEAEASGEVVRALIAVLLPLVSQIQQLSAAIAAALPQHPDGPLLQSLPRSGSVNAAQILAELGDDRTRFSTDEQLAAEGGVAPVTHESGKHRAVSFRWACNKRLRQALTTFADNSRHASPWAAAIYAAARRRGCHHPHAIRVLARAWVRVLWRCWQDHRPYDVMLHCAAQRAAAA

SEQ ID NO: 19844 - protein, 342 aa, unidentified
  source 1..342: note = protein_0ce2f77
  REGION 6..148: note = RuvC_domain
  SITE 9: note = RuvC_P1
  SITE 52: note = RuvC_P2
  SITE 87: note = RuvC_P3
  SITE 89: note = RuvC_P4
  SITE 92: note = RuvC_P5
  REGION 211..297: note = Tnp_domain
  SITE 219: note = Tnp_P1
  SITE 249: note = Tnp_P2
  SITE 257: note = Tnp_P3
  SITE 258: note = Tnp_P4
  SITE 270: note = Tnp_P5
MKITTIGIDLAKNVLQVHGVNERGKKVFNKPLRCKQVLPFFTQIPSCLIGLEACASAHHWARQLQALGHTVKLMAPQFVKPYVKTNKNDAADAEAICEAVARPNMRFVPVKNVDQQAILSIHRARQGFVKARTAQGNQIRGLLMEYGITLPQGLSHIAKRLPGILEDGENELPGVFRQLLQRLADHLQGLDRQVQELEVQIQVWHQHNEASRKLAGIPGIGPITASALVASIGDASSFKNGRQLAAWIGLVPRQHSSGGKQVLQGISKRGDAYLRTLLIHGGRSVIRVAAGKTNHTSLWLANLIERRHKNVAAVALANKNARIVWALLTPQREYQSDFMLAA

SEQ ID NO: 19845 - protein, 410 aa, unidentified
  source 1..410: note = protein_a9ef7ff
  REGION 9..165: note = RuvC_domain
  SITE 12: note = RuvC_P1
  SITE 62: note = RuvC_P2
  SITE 102: note = RuvC_P3
  SITE 104: note = RuvC_P4
  SITE 107: note = RuvC_P5
  REGION 280..365: note = Tnp_domain
  SITE 288: note = Tnp_P1
  SITE 318: note = Tnp_P2
  SITE 326: note = Tnp_P3
  SITE 327: note = Tnp_P4
  SITE 340: note = Tnp_P5
MKSAVINAVGVDVSKSKSTVAVRRPGGEIVMYPFDVRHTNSDLKKLVSTLKKLGGDIRVVMEHTSMYWRPIALTLKKAGFFVSAVNAMLIHDFSDNSIRKLKTDRADALKIANYALTFWDTLPLLNDEEETRLLLKMQSRANERITATATVLRNGLIALADQTFAGVNLAFDPNTKNTDGHEKWVDFFLRYWHRDCVCQYFMEVFTESYRGWCKRKNYKFRTATAHKIYIMAQECVATLPKCESTKTLIGQACKSLNAVCEARHNTQLEMQRLAALLPEYEIVMQMEGAGPVTGPALMAEIGDVRRLKNKKALVAFAGIDAPPFQSGAFESKSRHVSKRGSPHLRRTIFLVSNIILTLSNPENAVFCFMGKMLRGKTLLCLYCCRKRKVLAHLLCSRERVPSLSSSSGCL

SEQ ID NO: 19846 - protein, 302 aa, unidentified
  source 1..302: note = protein_d942771
  REGION 13..143: note = RuvC_domain
  SITE 44: note = RuvC_P2
  SITE 84: note = RuvC_P3
  SITE 86: note = RuvC_P4
  SITE 89: note = RuvC_P5
  REGION 179..263: note = Tnp_domain
  SITE 187: note = Tnp_P1
  SITE 216: note = Tnp_P2
  SITE 224: note = Tnp_P3
  SITE 225: note = Tnp_P4
  SITE 236: note = Tnp_P5
MWPRIDWTWPFWKQGSCSQSTTPKPYAALVERLSDNEIGAIGVEASGGYERAVLKALWQAGLPVRRINPHRLRQFARAAGINAKNDRIDARLIARFLATLPVHPVELDPSLQLVIELVTARRQLQAELSRVNNQAEHVRDAALKRLAKRRATRLSADILLLDKRIAQAIAADPALAQRDRLLRSTPSVGPVLSATLIALLPELGRLSNRQITALVGLAPYDHDSGKLKGKRCIWGGREPVRNVLYMAALSAGVHNPVFAAFRQRLRSNGKVAKVAIVAVMRKLITTLNAMVRTNKPWNPASV

SEQ ID NO: 19847 - protein, 348 aa, unidentified
  source 1..348: note = protein_7bce501
  REGION 7..149: note = RuvC_domain
  SITE 10: note = RuvC_P1
  SITE 53: note = RuvC_P2
  SITE 88: note = RuvC_P3
  SITE 90: note = RuvC_P4
  SITE 93: note = RuvC_P5
  REGION 212..298: note = Tnp_domain
  SITE 220: note = Tnp_P1
  SITE 250: note = Tnp_P2
  SITE 258: note = Tnp_P3
  SITE 259: note = Tnp_P4
  SITE 271: note = Tnp_P5
MRNITTIGVDLAKNLFQVHGVDDRGKVVLRRALKRAELASFFARLTPCLIGMEACGGAHFWARKLTELGHTVRLMAPQFVKPYVKTNKNDARDAEAICEAVARPNMRFVPIKTVEQQALLAVHRARQALVSARTAQSNQLRGLLSEFGIVMPKGVAVLERRMPQILEDAENGLPGVSRELFARLYAHFKELSDQMGELERQIKAWHRENSASQRLEAIPGIGPLTASALAASIGDAKAFKNGRQLAAWLGLVPRQCSSGGKDRLLGISKRGDSYLRTLLIHGARSVLIRLNRHADQAEGWLARLVARRNPNIAAVALANKNARIIWALLAHGRDYQAGYVAVPEQAMA

SEQ ID NO: 19848 - protein, 400 aa, unidentified
  source 1..400: note = protein_860e9b5
  REGION 11..166: note = RuvC_domain
  SITE 14: note = RuvC_P1
  SITE 63: note = RuvC_P2
  SITE 103: note = RuvC_P3
  SITE 105: note = RuvC_P4
  SITE 108: note = RuvC_P5
  REGION 273..358: note = Tnp_domain
  SITE 281: note = Tnp_P1
  SITE 311: note = Tnp_P2
  SITE 319: note = Tnp_P3
  SITE 320: note = Tnp_P4
  SITE 332: note = Tnp_P5
MDYTDDAGVFLGLDVGKSAHHGHGLTPAGKKVFDRQLPNSEPKLRAVFDKLTAKFGTVLVIVDQPASIGALPLTVARDAGCKVAYLPGLSMRRIADLYPGEAKTDAKDAAVIADAARTMPHTLRSLELTDEITAELTVLVGFDQDLAAEATRTSNRIRGLLTQFHPSLERVLGPRLDHPAVTWLLERYGSPLALRKAGRRKLVEVIRPKAPRMAQRLIDEVFEALDEQTVVVPGTGTLDLVIPSLARSLAAVHEQRRALETQIGQLLEAHPLSAVLTSIPGVAVRTAATLLVTVGDGTSFPTAAHLASYAGLAPTTKSSGTSIHAEHAPKGGNRQFKRAMFLSAFAALHDPVSRTYYDRCRARGKTHTQALLRLARQRINVLFAMLRDGTFYQPKTPRTA

SEQ ID NO: 19849 - protein, 403 aa, unidentified
  source 1..403: note = protein_da4af12
  REGION 4..160: note = RuvC_domain
  SITE 7: note = RuvC_P1
  SITE 57: note = RuvC_P2
  SITE 97: note = RuvC_P3
  SITE 99: note = RuvC_P4
  SITE 102: note = RuvC_P5
  REGION 269..355: note = Tnp_domain
  SITE 277: note = Tnp_P1
  SITE 308: note = Tnp_P2
  SITE 316: note = Tnp_P3
  SITE 317: note = Tnp_P4
MIFVGIDWAEAHHDVCLVDDAGQVLAKRRVAEGLEGVGKLHALIAEHAEEPASVVVAIETDRGLLVGSLLAAGYQVFAINPLAASRYRDRHATSGAKSDAGDARVLADLVRTDRHQHRPVAGDSELAEAVKILARAHQGLIWSRQRQVNQLRNSLREFYPGALAAFDDLGSADAIAILELASTPSRGRALSRAKIASALRRAGRERNLETKAAQIQTQLRRPQLEAPALVAQAYGHSVAACAAIISQLSQQINALERELAASFETHPDAEIYLSLPGLGRVLGARALAEFGDDRTRFTHPKARKNYAGTAPITKASGTRKVVLARVARNRRLADACYQWAFAAITRSEGARRKYDSLRARGQTHHQALRALGNRLVGVLHGCLTNQQTYLEEVAWRSAIDVAA

SEQ ID NO: 19850 - protein, 341 aa, unidentified
  source 1..341: note = protein_3007d92
  REGION 6..148: note = RuvC_domain
  SITE 9: note = RuvC_P1
  SITE 52: note = RuvC_P2
  SITE 87: note = RuvC_P3
  SITE 89: note = RuvC_P4
  SITE 92: note = RuvC_P5
  REGION 211..304: note = Tnp_domain
  SITE 219: note = Tnp_P1
  SITE 249: note = Tnp_P2
  SITE 257: note = Tnp_P3
  SITE 258: note = Tnp_P4
  SITE 270: note = Tnp_P5
MKLTTIGIDLAKNVFQVHGADDRGRAVLKKQIKRAQMLAFFAKLTPCRIGLEACGSAHYWARKLQALGHTVQLIAPQYVKPFVKRNKNDAADAAAICEAVTRPDMPTVPIKNAEQQAILSVHRARQGFVKARTAQSNQIRGLLAEYGIVLPQGIGHLVRRVPAIIEDGERDLPGSFRLLIQRLLDHLKELDRQVGELEVEIRSWHRQNAASQKLAAIPGLGPLSATAIVASIGDARNFKNGRQLAAWLGIVPRQHSTGGKPVLLGISKRGDAYLRTLLIHGARAVIRAAEHKADADPWLRQLLARRNKNVAAVALANKNARTIWALLAHEREYQADYRMAV

SEQ ID NO: 19851 - protein, 344 aa, unidentified
  source 1..344: note = protein_1e26b49
  REGION 6..146: note = RuvC_domain
  SITE 9: note = RuvC_P1
  SITE 52: note = RuvC_P2
  SITE 87: note = RuvC_P3
  SITE 89: note = RuvC_P4
  SITE 92: note = RuvC_P5
  REGION 211..295: note = Tnp_domain
  SITE 219: note = Tnp_P1
  SITE 249: note = Tnp_P2
  SITE 257: note = Tnp_P3
  SITE 258: note = Tnp_P4
  SITE 270: note = Tnp_P5
MSVHILGVDLGKNFCSVVGVDMAGEVILRRSMRRPKLIDFIAQFPSCIVAMEACCGAHHIGRLLVGQGHEVRLMSPEYVRPYIKAQKNDDRDAEGIAEAASRPTMRFVDLKTQEQLDIQTLHRVRSRLVAERTTLINQLRAILLERGLIFAQGRWRLERAVAALLAESDGSMSDRIFQLIHDLHAEWKVLDGKIEALNGEFVRLARDDDAMRRLTGIPGIGVLNATALVAAVGDASSFRRGRDLSAWLGLVPRQHTTGGQARLLGITKRGNVYLRTLLIHGARAALPSLSRSDTAVGRWLQGMLAKGVHRNVAVVALANKMARVAWALLSKGRRFDAAYLATAL

SEQ ID NO: 19852 - protein, 341 aa, unidentified
  source 1..341: note = protein_77ea6b8
  REGION 7..149: note = RuvC_domain
  SITE 10: note = RuvC_P1
  SITE 53: note = RuvC_P2
  SITE 88: note = RuvC_P3
  SITE 90: note = RuvC_P4
  SITE 93: note = RuvC_P5
  REGION 211..297: note = Tnp_domain
  SITE 219: note = Tnp_P1
  SITE 249: note = Tnp_P2
  SITE 257: note = Tnp_P3
  SITE 258: note = Tnp_P4
  SITE 270: note = Tnp_P5
MGEVSTIGMDLAKNVFQVHGADASGAVLFRRKLRRHQVLAFFAAQPPCMVAIEACGSAHHWAREIGRLGHAVRLIPPAYVKPFVKRQKNDAADAEAICEAAQRPTMRFVAPKSEQTQAAALVFRARDLLVKQRTQIINALRGHLAEFGIVAAKGPARVPQLMLAVEDPAEPIPEIARPVLQMLIETLHRLDEQIAGLDREVAQRAKENETARRLMTIPGVGPVTAVALAALAPPADTFKRGRDFAAWVGLTPLQHSTGGKQKLGATSKMGERTLRRLLIIGASAVVRWVARNGAPAGSWMARMVARKPPMLVRVALANKMARIVWALMARGGVYQAPVVAA

SEQ ID NO: 19853 - protein, 276 aa, unidentified
  source 1..276: note = protein_b9ad2aa
  REGION 14..167: note = RuvC_domain
  SITE 17: note = RuvC_P1
  SITE 65: note = RuvC_P2
  SITE 106: note = RuvC_P3
  SITE 108: note = RuvC_P4
  SITE 111: note = RuvC_P5
  REGION 229..273: note = Tnp_domain
  SITE 237: note = Tnp_P1
  SITE 267: note = Tnp_P2
MPAAASSTPPRVVIAIDPHKSSWTAVAVDNRLQPLAAIRVEVNRDGYRQLRRFAGRWSHAVWAVEGATGLGATLTTRLAADGVDVVDVPAKLARRVRMLSTGHGRKTDQADALSVGIAAHTAARLNTAVVDEAIAALRCLTEHRDDLVRSRTQIVNRLHALLAQLVPAGLPRGLTADSAAAALRSIRPRAVLARTMRQVAVELLGELRRLDRRIAEATATLSAAVAASGTTLTDLHGIGDVTAAKILARSGAVNRFRSESAFASYCGVAPNRSVIR

SEQ ID NO: 19854 - protein, 310 aa, unidentified
  source 1..310: note = protein_19d25d6
  REGION 5..146: note = RuvC_domain
  SITE 8: note = RuvC_P1
  SITE 51: note = RuvC_P2
  SITE 91: note = RuvC_P3
  SITE 93: note = RuvC_P4
  SITE 96: note = RuvC_P5
  REGION 187..271: note = Tnp_domain
  SITE 195: note = Tnp_P1
  SITE 224: note = Tnp_P2
  SITE 232: note = Tnp_P3
  SITE 233: note = Tnp_P4
  SITE 244: note = Tnp_P5
MQDTIGIDISKPVLDAFRLATGEHRQFPNDKPGCKALMRWIGREPARVVFEPTGPYHRVLEQSLTRAGIAIVKVNPRYARRFAEATGELAKTDRIDAALLARMAVVLDLQARPARAEIHHDLRELSVARQALIKDRIAARNREQVAQNALVRRQIKARLGQIEKQIGEIETAMAAIVDADETLQRRREILASIPGIGPITAMALIVEMPELGEMDGKQAASLAGLAPMTRESGGWKGRSRIQGGRASLRCGLYMPALVALRINPDLRRKYQALKEAGKPSKVAIAAIMRKLIVLANALIRDNRKWSPNAT

SEQ ID NO: 19855 - protein, 345 aa, unidentified
  source 1..345: note = protein_6263abf
  REGION 7..148: note = RuvC_domain
  SITE 10: note = RuvC_P1
  SITE 53: note = RuvC_P2
  SITE 88: note = RuvC_P3
  SITE 90: note = RuvC_P4
  SITE 93: note = RuvC_P5
  REGION 211..297: note = Tnp_domain
  SITE 218: note = Tnp_P1
  SITE 248: note = Tnp_P2
  SITE 256: note = Tnp_P3
  SITE 257: note = Tnp_P4
  SITE 269: note = Tnp_P5
MDKIIRIGMDTSKHVFQLHGVNAEEKPVLRKKMRRKEMIDFFTTCPPTLVAIEACGGSHHWARLLTSFGHEVKMIAPQLAKPYVKRNKNDAADAEGLCEAMSRPTMRFVPVKTVEEQAALMLISVRTRLIANRTQLANAIRGYANEFGVSAAKGLAHIPMLLERVQAEKTVPELAQELFMSQAEEYAQLEKNIADVEAKLKAWQRNDERSIRLNTIPGIGPISSALLIMKTPAPELFKSGRQFAAWIGLTPKDHSTGGKLRLGCITRAGDEALRAALVVGATAVIQHARRSGNASRWLTALLKRKPPKVAAVALANKMARMAWKLMVSGETYSARPASVPQGCAA

SEQ ID NO: 19856 - protein, 340 aa, unidentified
  source 1..340: note = protein_edb1c7d
  REGION 7..149: note = RuvC_domain
  SITE 10: note = RuvC_P1
  SITE 53: note = RuvC_P2
  SITE 88: note = RuvC_P3
  SITE 90: note = RuvC_P4
  SITE 93: note = RuvC_P5
  REGION 212..298: note = Tnp_domain
  SITE 220: note = Tnp_P1
  SITE 250: note = Tnp_P2
  SITE 258: note = Tnp_P3
  SITE 259: note = Tnp_P4
  SITE 271: note = Tnp_P5
MKEVITVGLDIAKHFFQVHGVDQKGDTVLRRKLRRSEIISFFDHLPPCLIGVEACATAHHWARVLINLGHEVRLMPASYVKPYVKRQKNDASDAEAICEAVTRPTMRFVPVKSEEQQSVLMLHRARELLVRQRTMLINALRAHLAELGIVMRQGPTGVSTLIGLIEDDEHDLIPAFTRRALTPLVEQLRDLYRRIAELDHEIIQWHRTSELSRRLETIPGVGPVTASALSATIADASLFKSGRQMAAWLGLVPRQNSSGGKERLGRISKQGDPYVRKLLVIGAHAVLRFSRKEGTGPKKWAADLLVRKPYNVVAVALANKMARIAWAIMVSGERFRSIPA

SEQ ID NO: 19857 - protein, 401 aa, unidentified
  source 1..401: note = protein_b185e7d
  REGION 17..173: note = RuvC_domain
  SITE 20: note = RuvC_P1
  SITE 71: note = RuvC_P2
  SITE 111: note = RuvC_P3
  SITE 113: note = RuvC_P4
  SITE 116: note = RuvC_P5
  REGION 277..364: note = Tnp_domain
  SITE 285: note = Tnp_P1
  SITE 315: note = Tnp_P2
  SITE 323: note = Tnp_P3
  SITE 324: note = Tnp_P4
  SITE 337: note = Tnp_P5
MVSDFTKGRYNLMNIFVGIDIAKLNHFAAAVSSDGEIILEPFKFTNDADGFLLLVSKLESFDKSSIIIGLESTAHYGDNLVRYLVAESYQVCVLNPIKTCQVRKNNIRKTKTDKVDTYIIAKTLMMQDSLRFVSFYDLDMMDLKNLARFRQKTIKQRTRLKIQLTTYVDQVFPEIQYFFKSGLHQNAVYALLKEAPSPKKIASMHLTHLANLLKVNSHGHFKKEQAKELRVLAQKSVGANDSAISIQITQTIQQIELLDSQLNKIEAEMADIMQFHDSVIMTIPGIGFINGGMILGEIGDIHRFSNPSKLLAFAGLDPSVYQSGNFQAKTTRMSKRGSRVLRYALVNAAWNVVRSNATFKAYYDAKRAEGRSHYNALGHCSGKLVRIIWKMLTDEVEFNLE

SEQ ID NO: 19858 - protein, 367 aa, unidentified
  source 1..367: note = protein_fabeca0
  REGION 6..147: note = RuvC_domain
  SITE 9: note = RuvC_P1
  SITE 52: note = RuvC_P2
  SITE 87: note = RuvC_P3
  SITE 89: note = RuvC_P4
  SITE 92: note = RuvC_P5
  REGION 211..297: note = Tnp_domain
  SITE 219: note = Tnp_P1
  SITE 249: note = Tnp_P2
  SITE 257: note = Tnp_P3
  SITE 258: note = Tnp_P4
  SITE 270: note = Tnp_P5
MEITIVGLDIAKRVFQLHGVDATGKTVLRRKLQRAEVLTFFKALSPCLVGIEACSTAHYWAREIRELGHEVRLMPPSYVAPYVKRGKTDAADAAAICEAVTRPTMRFVPIKTAEQQAVLMLHRTRDLLVRQRTMLVNALRGHMAELGVIAPQGIARVADLLAVLLGKDTTNVPALARQALCGLAAELEALDRRVKEIEVAIVRWHKDNEASRRLATIPGVGPITASAIVATITDPFQFHSARHLAAWIGLVPRQHSSGGTQRQGGISKQGDRYLRRLLVLGATAVIRHSRSKSTAEAGWLKSLLERRPARLVSVAQANKTARIVWALLVRGEAYRRPAAVPDGHSLKPKEPPSAVATADGVMRAMVA

SEQ ID NO: 19859 - protein, 326 aa, unidentified
  source 1..326: note = protein_4737d4e
  REGION 5..162: note = RuvC_domain
  SITE 8: note = RuvC_P1
  SITE 62: note = RuvC_P2
  SITE 102: note = RuvC_P3
  SITE 104: note = RuvC_P4
  SITE 107: note = RuvC_P5
  REGION 200..285: note = Tnp_domain
  SITE 208: note = Tnp_P1
  SITE 237: note = Tnp_P2
  SITE 245: note = Tnp_P3
  SITE 246: note = Tnp_P4
  SITE 258: note = Tnp_P5
MRVNVGIDVSKDSLDFCLLLNQTKRGRKFRCFKNRKIDYLNINDWLLKQARCPPEEIVITMESTGVYHEAIALYLHTSGFQIIISNPGRAKKFSQSLGLIHKTDKSDSYMLARYGDAQYEHASLWKPDAENIRSIKALVRRLSALEKDRLRESNRLEACIISGSYERVLLSIKRIVHILDDEIRTLNVKLMSCPFMSKNHDLLMSVVGIGKVMSRELVYLFSAKSFSTAKQAAAFVGLTPRLNESGSFKGRTTLSKIGPSRIRSKIFLAAVSAGKYNPDIKAQKKRPLAAGKTKMQALGAAMRKLIQICFGVIKNQTRYQSALTLN

SEQ ID NO: 19860 - protein, 339 aa, unidentified
  source 1..339: note = protein_74ba17a
  REGION 6..147: note = RuvC_domain
  SITE 9: note = RuvC_P1
  SITE 52: note = RuvC_P2
  SITE 87: note = RuvC_P3
  SITE 89: note = RuvC_P4
  SITE 92: note = RuvC_P5
  REGION 210..299: note = Tnp_domain
  SITE 218: note = Tnp_P1
  SITE 248: note = Tnp_P2
  SITE 256: note = Tnp_P3
  SITE 257: note = Tnp_P4
  SITE 269: note = Tnp_P5
MQFMPVGIDIAKSVFQVHYVDAGTGEIVSKAIKRAVLLEFFANRSHCLIGMEACGGAQHWARALTRMGHQVRLMPARFVKAFNIGNKNDAADARAIWLAVQQPGKAVAVKTEAQQAVLALHRMRQQLVKFRTMQINSLRGLLTEYGEVMGRSRAALNKAMPDVLERVADRLPAVLVDTLREQWNGSAALDKQIAEIERRLRQWMQEDQSVKAISEIPGVGLLSATAAVATMGDAKAFKSGREFASWLGLVPKQTGSGGKVQLLGISKRGDTYLRTLLIHGARSVLRHAKEPGPWLDQISKRKPFNVVIVALANKMARTIWALLAHGSRYQKEYVSVRPA

SEQ ID NO: 19861 - protein, 306 aa, unidentified
  source 1..306: note = protein_a32cda1
  REGION 5..163: note = RuvC_domain
  SITE 8: note = RuvC_P1
  SITE 62: note = RuvC_P2
  SITE 102: note = RuvC_P3
  SITE 104: note = RuvC_P4
  SITE 107: note = RuvC_P5
  REGION 273..306: note = Tnp_domain
  SITE 281: note = Tnp_P1
MNPVVGLDISKGESQVQAFLEKGKPYRKSFKISHTVDGLISLVLFLEDVKRESGKKPSIILEATGHYQTPVVHYLEERGYLLIIINPLISYKARGSSLRKVKTDAIDAYLLCELFYKEELEPYKKRGVQLLNLRNLTRQHENITGVMIQTKLQFQAVLEQVFPEYKGVFGDLYSVVSLLTLSEFPSSEDILNASEEVITDKINGLCKSRSSRWAKDKAIQLKGAAEHNPFEKTVYQSHILSLGMYIKMILQYKEHLAKLESEIDALAKDIEEYNIIKSIPGIGEKIAATIISEIGEIDRFNDPKKL

SEQ ID NO: 19862 - protein, 339 aa, unidentified
  source 1..339: note = protein_ab04a24
  REGION 7..149: note = RuvC_domain
  SITE 10: note = RuvC_P1
  SITE 53: note = RuvC_P2
  SITE 88: note = RuvC_P3
  SITE 90: note = RuvC_P4
  SITE 93: note = RuvC_P5
  REGION 209..295: note = Tnp_domain
  SITE 217: note = Tnp_P1
  SITE 247: note = Tnp_P2
  SITE 255: note = Tnp_P3
  SITE 256: note = Tnp_P4
  SITE 268: note = Tnp_P5
MNEVTVIGIDLGKHSFHLHAQDAAGRMVFRKKLSRQQLLRTLANVPCCRVVMEACAGSHWLARQLAGMGHEPRLISPQFVRPFVVGNKNDFGDAQAICEAACRPSMRFVSPRNEAQQTVSAMHRLRERLVRERTATVNQIHGFLLEFGISLPRGAALMSRLPTVLDHETLPPRLVGLVVRLHAQVHYLEEQIRQVVQDLKASLREDDKGRRLLEIPGIGPITASALAVELGDARQFANARQFAASIGLVPRQYSTGGKPTLLGISKRGDRNLRRLLVQCARAVMQHTASRTDALSLWVKTLSTRRHSNVVACALANKLARIAWAVLARGTHYQARALTT

SEQ ID NO: 19863 - protein, 349 aa, unidentified
  source 1..349: note = protein_a890797
  REGION 12..152: note = RuvC_domain
  SITE 15: note = RuvC_P1
  SITE 58: note = RuvC_P2
  SITE 93: note = RuvC_P3
  SITE 95: note = RuvC_P4
  SITE 98: note = RuvC_P5
  REGION 217..302: note = Tnp_domain
  SITE 225: note = Tnp_P1
  SITE 255: note = Tnp_P2
  SITE 263: note = Tnp_P3
  SITE 264: note = Tnp_P4
  SITE 276: note = Tnp_P5
MSHKLNSAIAVIGIDIGKNSFHIVGHDKRGAIMLRQKWSRGQVETRLANLPPCLIGMEACVGAHHLSRKLRMLGHDARLMPAKYVRPYSKGQKNDFRDAEAIAEAVQRPTMKFVATKTAEQLDLQALHRVRERLVSQRTGVINQIRAFLLERGVAVRQGLRFLRAELPRILATPCDVLSPRMVRVIEDLAGDWRRLDERIENLSSEIEVLARRDVGCERLMSVPGIGPIISSAMVAAIGTGDAFTKGRDFAAWLGLVPKQTSTGDRTILGKISKRGNRYLRVLFVQAAWVVLIKPRSWDRHGLKPWLEAAKKRLHHNVLAIALANKLARIAWSVLAHGRTFEASKTQVA

SEQ ID NO: 19864 - protein, 301 aa, unidentified
  source 1..301: note = protein_ae21836
  REGION 6..147: note = RuvC_domain
  SITE 9: note = RuvC_P1
  SITE 52: note = RuvC_P2
  SITE 87: note = RuvC_P3
  SITE 89: note = RuvC_P4
  SITE 92: note = RuvC_P5
  REGION 210..295: note = Tnp_domain
  SITE 218: note = Tnp_P1
  SITE 248: note = Tnp_P2
  SITE 256: note = Tnp_P3
  SITE 257: note = Tnp_P4
  SITE 269: note = Tnp_P5
MKHMTVGADIAKNVMQLHYIDAETGEIVSKPVKRAVFLEHFANRAPCLIGMEACGGSQYWARRLTAMGHEVKLMPGKFVKAFVMGNKNDAVDAKAIWLAVQHAERSVAVKTETQQAVLGLHRMREQLVKFRTMQINGLRGLLTEYGEVMGKGRAALDKAIPSVLERLVDRLPAILIDTLREQWNGLAELDKQIAGIERRLQMWMREDKACKAIAAIPGVGLLTATAAVATMGDAKTFRSGREFAAWIGLVPKQTGSGGKVQLLGISKRGDTYLRKLLIHGARAVLCLTKEPGPWAEGIRKR

SEQ ID NO: 19865 - protein, 404 aa, unidentified
  source 1..404: note = protein_864bf70
  REGION 5..161: note = RuvC_domain
  SITE 8: note = RuvC_P1
  SITE 57: note = RuvC_P2
  SITE 98: note = RuvC_P3
  SITE 100: note = RuvC_P4
  SITE 103: note = RuvC_P5
  REGION 270..356: note = Tnp_domain
  SITE 278: note = Tnp_P1
  SITE 309: note = Tnp_P2
  SITE 317: note = Tnp_P3
  SITE 318: note = Tnp_P4
MRVFVGHDWAEAHHDVLVEDGDGRRLGGGRLPDGLEGISRFHELVAPHIGDPSEVVVATETDRGLFVGALVAAGYTVLAVNPMSTSRYRERHTTSGAKSDPGDARVLAELARTDSHNHRPVAGDTEMAEAVKVLARAHQSLIWTRQRQLNQLRSTLREFYPAALEAFAELGHSDALAVLAVAPTPTLGRQASRSKIASALRRGGRQRRIDERAEQIQTALRTDQLTAPALVSEAMGSTVTALVSIAGELTAQIARIEAEMAESFDQHPDAEIIRSLPGLGMILGARVLAEFGDDPNRYADAKCRKNYAGTSPITRASGKSNAVLARYARNRHLSDACYLWAFATLTCSPGARAFYDQHRAAGDTHSRALRALANRLVGILHGCLRHRTLYDEHTAWGHRSQLAA

SEQ ID NO: 19866 - protein, 411 aa, unidentified
  source 1..411: note = protein_e594217
  REGION 5..164: note = RuvC_domain
  SITE 8: note = RuvC_P1
  SITE 61: note = RuvC_P2
  SITE 101: note = RuvC_P3
  SITE 103: note = RuvC_P4
  SITE 106: note = RuvC_P5
  REGION 272..358: note = Tnp_domain
  SITE 280: note = Tnp_P1
  SITE 311: note = Tnp_P2
  SITE 319: note = Tnp_P3
  SITE 320: note = Tnp_P4
  SITE 331: note = Tnp_P5
MRLFVGDDWAEDHHDVELMDAAGKVLARKRLPEGAAGMTRLHELTGQQLGQDDQDAEVVIGIETDRGPWVAALVAAGYVVYAVNPLQASRYRERHGVSGAKSDTGDAHMLADMVRTDSHQFRAVAGDSPDAGALKVVARAHKTLVWERTRQVQRLRHQLREYFPAALEAFADLDAPDALELLAKAPDPGRAAKLTRAQVSAALKRARRRDIAAKATAIMAALRSAQLGQPPAITAAYAVTARSLIAVITTLNEQVKTLQGQVEADFGRHPDAEIYLSQPGLGPILGARVLGEFGDDPDRYASGKARKNYAATSPLTRASGKKKTVTARFIGNNRLIDALMAQAFAALGASPGARALYDAERARGTEHNAALRKLANRLVGILHGCLKTRTLYDEATAWPHRENLPQSGVAA

SEQ ID NO: 19867 - protein, 409 aa, unidentified
  source 1..409: note = protein_322d01a
  REGION 11..166: note = RuvC_domain
  SITE 14: note = RuvC_P1
  SITE 63: note = RuvC_P2
  SITE 103: note = RuvC_P3
  SITE 105: note = RuvC_P4
  SITE 108: note = RuvC_P5
  REGION 274..360: note = Tnp_domain
  SITE 282: note = Tnp_P1
  SITE 313: note = Tnp_P2
  SITE 321: note = Tnp_P3
  SITE 322: note = Tnp_P4
MSDETPEVVYVGLDWAAVIHAVCVMSAAGKVLAQFTIEHTAEGIASLIARLAKYGDPADVQVGIERPNGRLVDLLLEAGHPVIPVSPNAIKTWREGEVVSGAKSDTGDALVIAEYLRLRHHRLHPVQPYSTQTKALRTVVRTRDDIVELRVAATNQLTALLETYWPGAKEIFADVESPITLAFLRRYPTAASAAHLGDKRLAAFLTKQGYSGRRSSTELLARLRRAPAGTTDPELVRAIGDAVLGMVTILEALNTAGKQLDRSVITHLGEHPDAAIFTSLPRSGQINAAQVLAEWGDSRAAYDSPDAIAALAGVTPVTKASGKQHAVHFRWACNKRFRKAVTTFADNSRHASPWAADIYARARARNHDHPHAVRILARAWIRVIYRCWHNRQPYDPNLHGGAQRLPTAA

SEQ ID NO: 19868 - protein, 341 aa, unidentified
  source 1..341: note = protein_c655f51
  REGION 7..148: note = RuvC_domain
  SITE 10: note = RuvC_P1
  SITE 53: note = RuvC_P2
  SITE 88: note = RuvC_P3
  SITE 90: note = RuvC_P4
  SITE 93: note = RuvC_P5
  REGION 211..296: note = Tnp_domain
  SITE 219: note = Tnp_P1
  SITE 249: note = Tnp_P2
  SITE 257: note = Tnp_P3
  SITE 258: note = Tnp_P4
  SITE 270: note = Tnp_P5
MGEVSTIGIDLAKSVFQVHGADTSGAVMIRKKLRRDDVLAFFSTLPPCTVAMEACASAHYWAREIAALGHDTKLIPPAYVKPFVKRQKNDMADAEAICEAAQRPTMRFVQGKSAEAQASAVVFRTRDLLVRQRTQLINALRGHLTEFGYIVRQGVGHVGKLIDIVGDSASDIPAQARPILVVIAQGLKALQTQIALLDREIASRAKADPVAKRLMTIPGVGPVIATALVALAPAASTFRRGRDFAAWLGLVPRQHSSGGKERLGRTTKMGERSLRRLLIIGASSVTKVAARSPDKAGAWLAGMLARKPRMLITVALANKMARTVWALMAHGGSYRAPAVAV

SEQ ID NO: 19869 - protein, 343 aa, unidentified
  source 1..343: note = protein_2f3bdbb
  REGION 6..148: note = RuvC_domain
  SITE 9: note = RuvC_P1
  SITE 52: note = RuvC_P2
  SITE 87: note = RuvC_P3
  SITE 89: note = RuvC_P4
  SITE 92: note = RuvC_P5
  REGION 211..303: note = Tnp_domain
  SITE 219: note = Tnp_P1
  SITE 249: note = Tnp_P2
  SITE 257: note = Tnp_P3
  SITE 258: note = Tnp_P4
  SITE 270: note = Tnp_P5
MKLTTIGIDLAKNVFQVHGADERGRAVLKKQLKRAQMLPFFANLPPCRIGLEACGSAHYWARKLQALGHTVQLIAPQYVKPFVKRNKNDAADAAAICEAVTRPDMPTVPIKSVEQQAILSVHRARQGFVKARTAQANQIRGLLAEYGIVLPQGMSHVLRRVPEIIEDGERDLPGSFRLLIDRLLDHLKELDRQVGELAAEIQTWHRQDTASQKLARIPGVGPLTASALAASIGDARNFKNGRQLAAWLGIVPRQHSTGGKPTLLGISKRGDAYLRTLLIHGARAVIRTAERKPDADPWLKALLARRNTNVVAVAVALANRNARTIWALLAHDREYQADYRRAA

SEQ ID NO: 19870 - protein, 343 aa, unidentified
  source 1..343: note = protein_aa9898b
  REGION 6..147: note = RuvC_domain
  SITE 9: note = RuvC_P1
  SITE 52: note = RuvC_P2
  SITE 87: note = RuvC_P3
  SITE 89: note = RuvC_P4
  SITE 92: note = RuvC_P5
  REGION 212..298: note = Tnp_domain
  SITE 220: note = Tnp_P1
  SITE 250: note = Tnp_P2
  SITE 258: note = Tnp_P3
  SITE 259: note = Tnp_P4
  SITE 271: note = Tnp_P5
MQVSTIGVDLAKNVFQVHGVDSAGKVVIARQLRRKQVIDFFSKSPACLVGMEACGTAHHWAREVSKLGHTVRLMPPSYVKGYVKRSKNDAADAAAICEAVTRPSMRFVPIKSADQQALLMLHRTRDLLIRQRTQLINALRAHLAEFGLVAATGREGLAQLAAIITDESNREALPSAMKQALQAIVDQLAALELQIGTLDRAIHAHHRANDMSCRLETVPGIGVIGATAIASTVTDPNDFKSGRDFAAWIGLVPRQHSTGGKERLGGISKQGDRYLRRLLVIGATAVVRHARQHPQKHPWVIRLLAKKPAKLVAVAVANKMARIAWAIMAKGGYYRAPELAVAA

SEQ ID NO: 19871 - protein, 387 aa, unidentified
  source 1..387: note = protein_a92dd7e
  REGION 4..159: note = RuvC_domain
  SITE 7: note = RuvC_P1
  SITE 58: note = RuvC_P2
  SITE 98: note = RuvC_P3
  SITE 100: note = RuvC_P4
  SITE 103: note = RuvC_P5
  REGION 263..350: note = Tnp_domain
  SITE 271: note = Tnp_P1
  SITE 301: note = Tnp_P2
  SITE 309: note = Tnp_P3
  SITE 310: note = Tnp_P4
  SITE 323: note = Tnp_P5
MIYLGIDIAKNSHVAAAMTSEGEIILTPFSFTNSAAGFALLKERLDSLPKMPLLVGLESTAHYGENLVYFLCGNGYHVAMINPLQTSAMRKSAIRKTKTDKVDAFVIAKSLMVEGYTELKQTDINLLKLKGLCKTRQNLILMRTRCKIQLGSFVDQLFPELNQFFRAGLHINVSYTLLKAHPRPAEVQSLHLTYLSNLLHKASRGRYTKEDAIRLRELAKISIGTDSPALALQIRQAVSQIELFSAQLEQVESEISSIMNSLASPIMTIPGIGHLNGAMILSCIGNIQRFSSPAKLLAYAGLDPAVIQSGNFNAKSTRMSKRGNSMLRYALINAAHNVVRNNETFALYYRSKIAQGKSHYCALGHTAHKLIRVIFILLTKNIAFDLA

SEQ ID NO: 19872 - protein, 342 aa, unidentified
  source 1..342: note = protein_f03f721
  REGION 7..149: note = RuvC_domain
  SITE 10: note = RuvC_P1
  SITE 53: note = RuvC_P2
  SITE 88: note = RuvC_P3
  SITE 90: note = RuvC_P4
  SITE 93: note = RuvC_P5
  REGION 211..297: note = Tnp_domain
  SITE 219: note = Tnp_P1
  SITE 249: note = Tnp_P2
  SITE 257: note = Tnp_P3
  SITE 258: note = Tnp_P4
  SITE 270: note = Tnp_P5
MDNLHILGIDLGRHTFHCIGHDQYGHEVFRKKFNRAQLLLWLSNLPQTTVAFESCGGAHWLARKCESYGHEAKLIPPQYVKPYVKSNKNDFIDAAAIAEAASRPSMRFAAVKSESAQVISIINRARDAYIKERTATMLRIGGILVEFGLSLPNGHSTMKKLFQWIAEQNQSLPQALLLELKELHEHYLYLTEHVQLQEQKLIKMTSENEIGELLMSIPGVAHITASSCLAEIASPGNFKCGRDMAAWIGLVPRQYSTGGKTTLLGISKRGNKRLRTLFIHCARAVLSKPETTGKCFEPWLSNLRASKPFNVVVVALANKLVRIAWAVMHSHRAFNANKLACQ

SEQ ID NO: 19873 - protein, 404 aa, unidentified
  source 1..404: note = protein_1185ef0
  REGION 9..166: note = RuvC_domain
  SITE 12: note = RuvC_P1
  SITE 65: note = RuvC_P2
  SITE 105: note = RuvC_P3
  SITE 107: note = RuvC_P4
  SITE 110: note = RuvC_P5
  REGION 271..358: note = Tnp_domain
  SITE 279: note = Tnp_P1
  SITE 309: note = Tnp_P2
  SITE 317: note = Tnp_P3
  SITE 318: note = Tnp_P4
  SITE 331: note = Tnp_P5
MGGLFLFYCGIDIAKHNHEASIIDAEGKALLDSISFANTKAGCEKLLALLERLNITKADVIIGMEATGHYWLSTYEYLTERKFEVRVINPIQSEAFRKMYIRQTKNDSKDSFIIAQVMRFGQYSATTLSEENIVAMRQLSRYRLALVDSCGDCKRRVIALLDQVFPEYDKLFSDTFGSTSKELLLKYPTPEDMLSISTRKLTTLLTKASHGRFGESKAKEIRTVAADSFGVGFAKNAFSFQIRQLIEQLMFLENQIEELEEQISYLLHQTNEVITTIPGIGDILGAIILSEIGDIQRFDAPGKLVAFAGLDVKVSQSGEFTGTKQKISKRGSPYLRRAIWLAASRAAFCDPILSDYYQSLKARGKHHLTAVGAVARKLCNIIFTILRENRPYEQTPPKKGSKGI

SEQ ID NO: 19874 - protein, 320 aa, unidentified
  source 1..320: note = protein_37b89e7
  REGION 8..157: note = RuvC_domain
  SITE 11: note = RuvC_P1
  SITE 56: note = RuvC_P2
  SITE 96: note = RuvC_P3
  SITE 98: note = RuvC_P4
  SITE 101: note = RuvC_P5
  REGION 195..279: note = Tnp_domain
  SITE 203: note = Tnp_P1
  SITE 232: note = Tnp_P2
  SITE 240: note = Tnp_P3
  SITE 241: note = Tnp_P4
  SITE 252: note = Tnp_P5
MSVSSVTAGIDVAKAHVDVCVLCSKSDAQRFANDAEGHSALAAFLQPLDVGLVVMESTGGYEAALACALQAAGLPVAVVNPRQARDFAKSMGRLAKTDAVDARVLAELGSVLVRREDLARFVRPVADERQQWLAALVTRRRQLLTMLHSERQRLQITPAKLHASIEAIVASIKAQLDDLEVQMVGHVRQHFGDLDRLLQSAAGIGPVASATMIAELPELGRLNRREIAALVGVAPMANDSGSSKGRRRVQGGRFEIRRVLYMATLTATRYNPAIKAFYERLKAAGKLPKVALVACMRKLLTTLNAMVRTGKPWDKSLHSA

SEQ ID NO: 19875 - protein, 336 aa, unidentified
  source 1..336: note = protein_af5befe
  REGION 4..157: note = RuvC_domain
  SITE 7: note = RuvC_P1
  SITE 60: note = RuvC_P2
  SITE 100: note = RuvC_P3
  SITE 102: note = RuvC_P4
  SITE 105: note = RuvC_P5
  REGION 200..286: note = Tnp_domain
  SITE 208: note = Tnp_P1
  SITE 237: note = Tnp_P2
  SITE 245: note = Tnp_P3
  SITE 246: note = Tnp_P4
  SITE 259: note = Tnp_P5
MFQLGIDVSKKTLDLCLLREGVKGRVKTRKLKNDFNATSTVISWLCKQQCEPTDVHIIMEATGVYHESLAYGLNKAGARVSLANPYRSREFARGMDILTNNDSVDAYMLACYGALKEPEPWVPPPENVRYLSALLRRRDALVTDRSREKNRLEKCRMTDIPPVIAESIDNVLRNLSTEIEHLDDLILTHLDQHAELKKDFDLLTSIKSVGFQLGLNMLVILRGHRFDTAEQVAAFLGVVPVEKSSGTSVRGKPKLSKIGPPEIRAKLYLASLCGLRFNPVMKAMYERLCLCGKAKMCAIGALMRKLVHWCYGVLKTQKPFDAEYLSSDARSAYKAV

SEQ ID NO: 19876 - protein, 350 aa, unidentified
  source 1..350: note = protein_7f360a8
  REGION 6..147: note = RuvC_domain
  SITE 9: note = RuvC_P1
  SITE 52: note = RuvC_P2
  SITE 87: note = RuvC_P3
  SITE 89: note = RuvC_P4
  SITE 92: note = RuvC_P5
  REGION 211..298: note = Tnp_domain
  SITE 219: note = Tnp_P1
  SITE 249: note = Tnp_P2
  SITE 257: note = Tnp_P3
  SITE 258: note = Tnp_P4
  SITE 270: note = Tnp_P5
MELHTIGIDLGKTIFHLVGLNRVGEVVVHKKLSRPQLLRFTANLHVELIGMEACGGAHFLGRALREQGHEVRLIPAQYVKPYVKTNKSDYIDAEAIAEAVGRPTMRFVPIKTDQQLDLQSLHRVRERWVMRRTAVINQTRSLLLERGITLRKGRCHLETALPGIVEDATAKLSSAPRILLTQMKRELDQLVRRIEEADAGIKEVAQQNEACRRLATIPGVGPITATALIAAIGNGAAFHKGREFAAWIGVVPREYSTGGKQKLLGISKRGNAYLRRLFVQGARSVMMHRHKQSSGLSQWLEKLSVHKHHNIALVALANKLARMAWAVLATGQVYRPPLVTHTGSPRLVSI

SEQ ID NO: 19877 - protein, 344 aa, unidentified
  source 1..344: note = protein_45d67e0
  REGION 5..151: note = RuvC_domain
  SITE 8: note = RuvC_P1
  SITE 55: note = RuvC_P2
  SITE 92: note = RuvC_P3
  SITE 94: note = RuvC_P4
  SITE 97: note = RuvC_P5
  REGION 213..300: note = Tnp_domain
  SITE 221: note = Tnp_P1
  SITE 251: note = Tnp_P2
  SITE 259: note = Tnp_P3
  SITE 260: note = Tnp_P4
  SITE 272: note = Tnp_P5
MDYYAGLDVSLRSVAVCVVDADGKHIFERSVACEIEDILVCLRDVPAGQCRVGFESGAMSQYLYFGLQAAGFDVVCMEARQVNAALSAMRNKTDKTDARGIAQVLRSGWYGKVFIKSREAHALRALLSSRKAVQKKCIDLANEVRGLFRVFGLRLPPRVDQGSFDERVRPLIEADPDLSHALLPLLDARAVLYKTYRELDRRVKQAASHDEICLRFMAIPGVGPIAALTFRAAVDDPARFTSSRTVAAHFGLTPRRYQSGEMDNPGRISKAGDRDVRATLYAAANAMMMRSVASSEIKSWGLRLMRRKGRRRALVAVARKLAVIMHRMWADNTEFRHGKMEGIA

SEQ ID NO: 19878 - protein, 343 aa, unidentified
  source 1..343: note = protein_04f7f1e
  REGION 6..150: note = RuvC_domain
  SITE 9: note = RuvC_P1
  SITE 54: note = RuvC_P2
  SITE 89: note = RuvC_P3
  SITE 91: note = RuvC_P4
  SITE 94: note = RuvC_P5
  REGION 213..300: note = Tnp_domain
  SITE 221: note = Tnp_P1
  SITE 251: note = Tnp_P2
  SITE 259: note = Tnp_P3
  SITE 260: note = Tnp_P4
  SITE 272: note = Tnp_P5
MKLMRVGVDLAKSIFQVHGVDRHEQVVWRRKLTRANWLRVFIETVEPGCEVGMEACGGAHHWARVLQAHGYSVKLIAPQFVKPYVKSNKNDANDAEAICEAMSRPNMRFVAVKSVAQQDVQAVHRVRAEVSKQRKAKGNQIRGLVSEYGLVAPKELVHLRAAIPAWLEDGENGLTGRFRRLLNALWHDLRALDQRMIELDREIAQIAAADPVAKRLQRLRGVGPVIATALVATVGDVRQFANGRQLAAALGLTPRQNSSGGKERLLGISKRGDAYLRTLLVHGARSALRTARNKEDRLSRWISRIAETRHHNVAAVALANKTARIAWAMMKNGTDYEPDRAAA

SEQ ID NO: 19879 - protein, 341 aa, unidentified
  source 1..341: note = protein_5c3ccf8
  REGION 7..149: note = RuvC_domain
  SITE 10: note = RuvC_P1
  SITE 53: note = RuvC_P2
  SITE 88: note = RuvC_P3
  SITE 90: note = RuvC_P4
  SITE 93: note = RuvC_P5
  REGION 211..296: note = Tnp_domain
  SITE 219: note = Tnp_P1
  SITE 249: note = Tnp_P2
  SITE 257: note = Tnp_P3
  SITE 258: note = Tnp_P4
  SITE 270: note = Tnp_P5
MSEVRTIGLDLAKTVFQIHGADASGAVVFRKQLRRRQVLEFFARQPHCLVTMEACGSSHFWAREIGRLGHEVRMIPPAYVKPFVKRQKNDMADAEAICEAAQRPTMHFVAVKSEEAQGVAVVLRTRDLLIRQRTQTINALRGHLAEFGEVAPEGSTYAAKLIAIVEDPQTALPQTARASLRFLTAMLSQLNDQIQALDAEIVRRAREDETARRLMTIPGVGPLIASALVASAPPPETFQRGRDFAAWLGLVPRQHSTGGKHRLGSTTKMRERSLRRLLIMGANSVVVWRARKGAAPGSWLAKMLAHKPPMLVRVALANKMARIVWALMAKGEVYRAPVTTA

SEQ ID NO: 19880 - protein, 324 aa, unidentified
  source 1..324: note = protein_f3cddb9
  REGION 6..147: note = RuvC_domain
  SITE 9: note = RuvC_P1
  SITE 52: note = RuvC_P2
  SITE 87: note = RuvC_P3
  SITE 89: note = RuvC_P4
  SITE 92: note = RuvC_P5
  REGION 233..280: note = Tnp_domain
  SITE 240: note = Tnp_P3
  SITE 241: note = Tnp_P4
  SITE 253: note = Tnp_P5
MNVTTIGIDLAKTVFSIHGTNQHGKVVVRKQLNRPKLLAFFAQLPPCLIGMEACSGAHYWARELTKLGHDARIIAPRFVAPYRKSSKNDDNDAEAICEAVGRPNMRFVPIKTEDQQAVLCLHRIRRGLIKERTDQINQIRGLLAEFGLIIPQGRYHARHRIPEILEDAENGLPMLARRLLNNINQRILQLDEDILAYDREIEAMARRDEQAKRLMAIPGIGPQTATAILASAPDPRQYSTGGKPRLGRITKRGDKYLRTLLIHGTRAVIAKLADKSDRLSGWARDLVERRGYKRAAVALAAKNARIIWALLMNQTEFKTQPVAG

SEQ ID NO: 19881 - protein, 389 aa, unidentified
  source 1..389: note = protein_c869008
  REGION 4..163: note = RuvC_domain
  SITE 7: note = RuvC_P1
  SITE 60: note = RuvC_P2
  SITE 101: note = RuvC_P3
  SITE 103: note = RuvC_P4
  SITE 106: note = RuvC_P5
  REGION 266..353: note = Tnp_domain
  SITE 274: note = Tnp_P1
  SITE 304: note = Tnp_P2
  SITE 312: note = Tnp_P3
  SITE 313: note = Tnp_P4
  SITE 326: note = Tnp_P5
MIYVGIDVAKDKHDCCILGPDTEELFPVFTIRNNSDGYGELFHKIESVSKDKSQIKIGLEATGHYSYNILGSLLDHGYHTFVINPLHTNLYRKGQSLRKTKTDKVDARSIAMMLMTNKTLKPYSDISYHNEELKSLTRYRFDKVQERAKLKSSVARLVNILFPELEKLVPSLHMASVYSLLSKLPGASYITECHLTHLKNLLETASKGHYGRDMAITLRNTARDSIGSVIPAKSMELKHTIHLIKVMTEEIDEIEDSIKSIMDTCNSPIMTIPGISYRMGAMILAEIGDFTRFNYADQILAFAGLSPSTYQSGQLDSSYSHMEKRGSRYLRYALFNAAKFVCKWDENFGAYLSKKIGEGKHYNVAIGHATKKLVRTIYRMELTGEAYRR

SEQ ID NO: 19882 - protein, 390 aa, unidentified
  source 1..390: note = protein_9f9cc9e
  REGION 4..163: note = RuvC_domain
  SITE 7: note = RuvC_P1
  SITE 60: note = RuvC_P2
  SITE 101: note = RuvC_P3
  SITE 103: note = RuvC_P4
  SITE 106: note = RuvC_P5
  REGION 267..353: note = Tnp_domain
  SITE 274: note = Tnp_P1
  SITE 304: note = Tnp_P2
  SITE 312: note = Tnp_P3
  SITE 313: note = Tnp_P4
  SITE 326: note = Tnp_P5
MIYVGIDVAKDKHDCCILGPDTEELFPVFTIRNNSDGYGELFHKIESVSKDKSQIKIGLEATGHYSYNILGSLLDHGYHTFVINPLHTNLYRKGQSLRKTKTDKVDARSIAEMLVTDKTLKPYTGTSYHSEELKSLTRYRFELVKERAKLKTSVSRLVNILFPELESLVPTLHMNSVYRLLQELPGAYFIASSNLTHLKALLADASKGHYGREKAIEIRETAKSSIGSLMPAKSMELRQTIRRIDTLTSDIKEVEQSIQKIMDECGSPITTIPGIKYRMGAMILAEIGDFARFSNADQVLAYAGLSPSTYQSGQLISSYARMEKRGSKYLRYALFNAAIYASVWDERFRLYLSKKRAEGKHYYVAISHVIKKLVRTIFRMEITHTSYQPL

SEQ ID NO: 19883 - protein, 321 aa, unidentified
  source 1..321: note = protein_676bdec
  REGION 10..154: note = RuvC_domain
  SITE 13: note = RuvC_P1
  SITE 58: note = RuvC_P2
  SITE 98: note = RuvC_P3
  SITE 100: note = RuvC_P4
  SITE 103: note = RuvC_P5
  REGION 194..279: note = Tnp_domain
  SITE 202: note = Tnp_P1
  SITE 231: note = Tnp_P2
  SITE 239: note = Tnp_P3
  SITE 240: note = Tnp_P4
  SITE 251: note = Tnp_P5
MMAQNDLVVAGIDVSKDKVDACIRSLSLRRTFPASAQGRRQLIAWLRKHKVGKAAVMEASGGYERDWAKALREADIEVRIVDPKRVRSFARSAGRLAKNDVIDAEMIAWFAETFGEARGQVYDAAREKLVQIVHARQGLLDLQTSLQNRGEHAAPEPVQKMQARLLRQIALELAGLEAAIAALIKATAHFAERAEIIESVPGLAETTAAGLIAAMPELGQVSNKAISALLGVAPYDDDSGKRRGERQIKGGRRRVRNLFYMACLGAATRHNPMLKAFYQRLLAKGKEKKVALVACMRKLIVILNTLIARGEKWDASRYAVS

SEQ ID NO: 19884 - protein, 432 aa, unidentified
  source 1..432: note = protein_9592f8c
  REGION 19..171: note = RuvC_domain
  SITE 22: note = RuvC_P1
  SITE 70: note = RuvC_P2
  SITE 108: note = RuvC_P3
  SITE 110: note = RuvC_P4
  SITE 113: note = RuvC_P5
  REGION 279..365: note = Tnp_domain
  SITE 287: note = Tnp_P1
  SITE 318: note = Tnp_P2
  SITE 326: note = Tnp_P3
  SITE 327: note = Tnp_P4
  SITE 338: note = Tnp_P5
MKYALIQVLPDVPAGRVFAGIDWATADHVACVVDMAGRVRDRFSAVHDKAGIAELISRLRGGGVSEVAIERGDGVLVAALLAAGLTVVVIASRQVKSLRSRYGSAGAKDDRFDAFVLAGTLRTDRARLRPLIPDTPATLALRAAVRARKNLVAHRVAACSQLHARLAAAFPAAIGLFSDLGSPISLAFLERFGSQDAAGQLDEQAIAAWLKTISVRGRPAPVSVLCARLRAAPGGATGQDGAALAGVTATLTATVTMLAAQIKTLETVIGVQLAARPDAHIFTSLPRTRALRAARLLAETGDCRARFPDPDSLAGLAGVSPVTRQSGTHISRTFRWAVSRQLRDAVCDFADGSRHASAWAAAIYDAARARGKDHPHAVRILARARIYVIWRCWQAGTACDPARHNALQRVLAARDQASEPAAADAPVPGQGR

SEQ ID NO: 19885 - protein, 339 aa, unidentified
  source 1..339: note = protein_796baad
  REGION 6..147: note = RuvC_domain
  SITE 9: note = RuvC_P1
  SITE 52: note = RuvC_P2
  SITE 87: note = RuvC_P3
  SITE 89: note = RuvC_P4
  SITE 92: note = RuvC_P5
  REGION 210..292: note = Tnp_domain
  SITE 218: note = Tnp_P1
  SITE 248: note = Tnp_P2
  SITE 256: note = Tnp_P3
  SITE 257: note = Tnp_P4
  SITE 269: note = Tnp_P5
MKHTTVGVDIAKNVMQLHYIDAETGEIVNKPVKRAAFLEHFANLAPCLIGMEACGGSQHWARKLMAMGHQVKLMPGKFVKAFVMGNKNDAADAQAIWMAVQHASKSVAVKTETQQAVLGLHRMREQLVKFRTMQINSLRGLLTEYGEVMAKGRAALDKAIPGVLERLFDRLPTILIDTLREQWNGLTELDKQIAQIERRLQAWMKEDKACKAIAAIPGIGLLTATATVATMGDAKTFKSGREFAAWIGLVPRQTGTGGKVQLMGISKRGDMYLRKLLIHGARSVLCLSKEPGGWVQGIKKRRPMNVAVVAQANRMARTIWAILAHDRQYDKDYVSVKPV

SEQ ID NO: 19886 - protein, 410 aa, unidentified
  source 1..410: note = protein_972ac3c
  REGION 6..162: note = RuvC_domain
  SITE 9: note = RuvC_P1
  SITE 58: note = RuvC_P2
  SITE 99: note = RuvC_P3
  SITE 101: note = RuvC_P4
  SITE 104: note = RuvC_P5
  REGION 269..356: note = Tnp_domain
  SITE 277: note = Tnp_P1
  SITE 309: note = Tnp_P2
  SITE 317: note = Tnp_P3
  SITE 318: note = Tnp_P4
  SITE 329: note = Tnp_P5
MQRYYLGVDWADKSHQLYVADESARKIKELEVQQTPEEMAELGCWLDESRSNGLELWAAIEKPHGRIVDFLLDHGVVVYPVNPKALDRARDRFRMSQSKSDCFDAYVLAEFLRTDHAHLRALEPNTAEAQELKILTRDHQRLGRQKTRLLNQIGIKLKEYYPRPLEVFEDLETKIALDFLKAYPTPQALWKLTRRGWKRFAKRDHHLSEARSNELWDKLNKPQLAVPQHVVRAKAKLLLALVGQLEASVKAVNSYNEEVESFFAAMPAAEIAKTLPGAKSGTTVATIWAELGDAQNRWNSFRHLQAEAGAVPVTKSSSKSRVVQFRFACNKHLRHALYWFSFNSLKRSEWAKKYYRDQRAKGHSKHQALRALGAKWLKIIFVMWRDHKLMMKTTTWRTSPDRKCARRHKK

SEQ ID NO: 19887 - protein, 341 aa, unidentified
  source 1..341: note = protein_40a4624
  REGION 7..149: note = RuvC_domain
  SITE 10: note = RuvC_P1
  SITE 53: note = RuvC_P2
  SITE 88: note = RuvC_P3
  SITE 90: note = RuvC_P4
  SITE 93: note = RuvC_P5
  REGION 211..295: note = Tnp_domain
  SITE 219: note = Tnp_P1
  SITE 249: note = Tnp_P2
  SITE 257: note = Tnp_P3
  SITE 258: note = Tnp_P4
  SITE 270: note = Tnp_P5
MENVSTVGLDLAKHVFQAHGADKEGAVIFRKKLRRSQVLPFFEALPPCTVAMEACSGSHYWGREIGKLGHLVKLIAPGYVKPFVKRQKNDVSDAEAISEAAQRPTMRFVAVKSEGAQAAAIVFRTRDLLVRQRTQTINALRGHLTEFGMIIAKGPQHVSKLIAIVEDPVSGLPEAARMILAFLVEQLRSLDERITKLDKEIARRAKEDEVVQRLMTIPGVGVLTATALTALAPSAATFKRGRDFAAWLGLTPLQRSTGGKERLGRTSRMGERTLRRLLIIGASAVASWSVRRGAPAGSWLDRILYRKPPMLVRVALANKIARTAWALLAKGGIYRAPIMAA

SEQ ID NO: 19888 - protein, 292 aa, unidentified
  source 1..292: note = protein_45cb15b
  REGION 1..98: note = RuvC_domain
  SITE 37: note = RuvC_P3
  SITE 39: note = RuvC_P4
  SITE 42: note = RuvC_P5
  REGION 161..245: note = Tnp_domain
  SITE 169: note = Tnp_P1
  SITE 199: note = Tnp_P2
  SITE 207: note = Tnp_P3
  SITE 208: note = Tnp_P4
  SITE 220: note = Tnp_P5
MEACGSAHHWARKLQGFGHSVRLMAPQFVKPYVKANKNDAADAQAICEAVARPHMRFVAIKNVGQQAVLALHRVRQGFVKSRTAQANQIRGLLGEYGLILPQGIAHIAKRVPELIEDASNELPGAFRVLVDRLMDHLKALDQQVAQLEAQIKAWHRENDASRKLEQIPGIGPITASALVASMGEAKNFDNGRQVAAWLGLVPRQHSSGGKPTLLGISKRGDSYLRTLLIHGARSVILAAGRKANLGGWLQELLKRRNPNVAAVALANKNARIAWALLAHQRNYRADYAAAAA

SEQ ID NO: 19889 - protein, 343 aa, unidentified
  source 1..343: note = protein_9881aee
  REGION 6..147: note = RuvC_domain
  SITE 9: note = RuvC_P1
  SITE 52: note = RuvC_P2
  SITE 87: note = RuvC_P3
  SITE 89: note = RuvC_P4
  SITE 92: note = RuvC_P5
  REGION 211..295: note = Tnp_domain
  SITE 219: note = Tnp_P1
  SITE 249: note = Tnp_P2
  SITE 257: note = Tnp_P3
  SITE 258: note = Tnp_P4
  SITE 270: note = Tnp_P5
MSIVILGVDLGKNACSVVGVDAVGAVIVRRSMRRQTLIDFVAKLPACIVAMEACCGAHHLGRVFAAHGHEIRLMSPEYVRPYVKAQKNDDRDAEGIAEAASRPTMRFVELKTQEQLDIQTLHRVRSRLVAERRNLINQLRAIMLERGTIFPVGRRKLELGVDALLTEEGATLSPRVRRLVGELRAEWRDLDTKIEALNAEFIELARNDAAARRLTSIPGVGVLNATALIAAVGNASSFAKARDLGAWLGLVPRQHTTGGKPRLLGISKRGNTYLRTLLIHGARAALPSLSRSDTPLGRWLKAMLERGVHRNAVVVALANKLARIAWAALRKDANFERRYPVAA

SEQ ID NO: 19890 - protein, 334 aa, unidentified
  source 1..334: note = protein_27c2c1a
  REGION 7..149: note = RuvC_domain
  SITE 10: note = RuvC_P1
  SITE 53: note = RuvC_P2
  SITE 88: note = RuvC_P3
  SITE 90: note = RuvC_P4
  SITE 93: note = RuvC_P5
  REGION 209..296: note = Tnp_domain
  SITE 217: note = Tnp_P1
  SITE 247: note = Tnp_P2
  SITE 255: note = Tnp_P3
  SITE 256: note = Tnp_P4
  SITE 268: note = Tnp_P5
MQNITLIGIDLGKYSFHIHCQDKSGKALLRKKFTRTKLMQFLATCPPSVVVMEACAGAHFMARRISDFGHETKLISPQFVRPFVKSNKNDFVDAEAICEAASRPSMRFVQPRTETQQAMRALHRVRESLIRDKVKTTNQIHGFLLEFGISLPIGDAVIKRLSLVLAEHEIPEYLSRLLVRLHTHYFYLVEQIAELESELSQSINADDTAQRIMTIPGVGPITASLLSSQLGDGKQFSCSRDFAASTGLVPRQYSTGGKSTLLGISKRGDKNLRRLLVQCARSFIMRLERKHGKLAEWVREQLNKKHSNVVTCALANKLARIAWAITTQKKEYQA

SEQ ID NO: 19891 - protein, 274 aa, unidentified
  source 1..274: note = protein_70a1396
  REGION 2..76: note = RuvC_domain
  SITE 17: note = RuvC_P3
  SITE 19: note = RuvC_P4
  SITE 22: note = RuvC_P5
  REGION 141..226: note = Tnp_domain
  SITE 149: note = Tnp_P1
  SITE 179: note = Tnp_P2
  SITE 187: note = Tnp_P3
  SITE 188: note = Tnp_P4
  SITE 200: note = Tnp_P5
MRLMSPEYVRPYIKAQKNDDRDAEGIAEAASRPTMRFVDLKSEEQLDIQSLHRVRSRLVAQRTTLINQIRALLLERGLIFAAGRRKLEVALDVLPGDQEANLSPRMHQLIVELRNEWKVLDTKIAALNAEFVSLARHNLAMHRLTTIPGIGVLNATALVAAIGDASSFKHARDLGAWLGLVPRQFTTGGKPRLLGITKRGNNYLRTLLVHGARAAMPVLSQSDTPVGQWLRALVSRGIHRNVAIVALANKLARIAWAILRKERPYEKTFGVAPA

SEQ ID NO: 19892 - protein, 346 aa, unidentified
  source 1..346: note = protein_cab67a3
  REGION 6..148: note = RuvC_domain
  SITE 9: note = RuvC_P1
  SITE 52: note = RuvC_P2
  SITE 87: note = RuvC_P3
  SITE 89: note = RuvC_P4
  SITE 92: note = RuvC_P5
  REGION 211..299: note = Tnp_domain
  SITE 219: note = Tnp_P1
  SITE 249: note = Tnp_P2
  SITE 257: note = Tnp_P3
  SITE 258: note = Tnp_P4
  SITE 270: note = Tnp_P5
MEITTVGLDLAKNVFQVHAISGASKVILRKALRRSQVRRFFEQLDPCLVGIEACATSHYWAREITKLGHEVRLMPPAYVKPYVKRGKTDASDAEAICEAVTRPTMRYVAIKAPEQQAALALHRTRDLVVKQRTQLVNMIRGLLAEFGIEIGRGVEQALKLAKRIASGDVPEIPPLAAKVIAGLARQVLDLQARLGEIEHDLLAWHRSNDVAKRLATIPGIGTVGATALAASVTDPHQFRSGRQFAAWLGLTPLQHSSGGKERLGGISKMGDKYLRRLLVVGMTSLIRRAKYKPEAVDPWLADLLSRKPARLVTVALANKAARVVWAIMVRGGVYRRPADAGVMAPV

SEQ ID NO: 19893 - protein, 399 aa, unidentified
  source 1..399: note = protein_fa1ccb3
  REGION 12..166: note = RuvC_domain
  SITE 15: note = RuvC_P1
  SITE 63: note = RuvC_P2
  SITE 103: note = RuvC_P3
  SITE 105: note = RuvC_P4
  SITE 108: note = RuvC_P5
  REGION 273..357: note = Tnp_domain
  SITE 281: note = Tnp_P1
  SITE 310: note = Tnp_P2
  SITE 318: note = Tnp_P3
  SITE 319: note = Tnp_P4
  SITE 331: note = Tnp_P5
MIQEHHQVEVFVGLDVGKSEHHAVALDRAGKVLFDKALPNDEAKLRTILAELAAHGPVLVVVDQPATIGALPVAVARDAGALVGYLPGLSMRRIADLHPGQAKTDARDALIIAEAARTMPHTLRSIELADEQVAELTMLCGFDDDLRGQITATSNRLRGLLTQIHPALERVLGRHLDHPAVLDLIQTWPTPADLKAAGTKRIAARLTKRAPRLGKRLAEEITAALAEQTVVVAGTSAAGIVLPRLAAQLAELRAQRADVALKVEELVRDHPLHQVLMSMPGNGIRTTARLLTELAGKDFTSAAHLASYAGLAPVTRRSGTSIRGEHPNRAGNKVLKRALFLAAFASLSDPISRRYYDRKRAEGKRHNQALIALARRRCDVLFAMLRDGTLYDAPQPLAA

SEQ ID NO: 19894 - protein, 409 aa, unidentified
  source 1..409: note = protein_4d80ff6
  REGION 4..163: note = RuvC_domain
  SITE 7: note = RuvC_P1
  SITE 60: note = RuvC_P2
  SITE 100: note = RuvC_P3
  SITE 102: note = RuvC_P4
  SITE 105: note = RuvC_P5
  REGION 274..360: note = Tnp_domain
  SITE 282: note = Tnp_P1
  SITE 313: note = Tnp_P2
  SITE 321: note = Tnp_P3
  SITE 322: note = Tnp_P4
MLFVGDDWAEDHHDVEVQDESGRTVKKARLPEGAAGMARFHELAAACLPGDAGPSQVLVCIEAARGPWVRALVAAGYRVYGVNPKQAARHRETLSVSGKKDDGFDAHALADMARTRRHQLRHLVADSDVAEAVRVVARAHQTLIWERTRHMLRLRAALREYFPAALAAFTPLGLTAADTLELLAMAPDPQAAARLGPGQIAAVLASHRRRDVPAKAQAICQALAVPQLGQGDEIITSAYAATVRAEIAVLQALNAEIKTMEAQVEAHFRRHPDAEIYLSQPGLGVILAARVLAEFGDAEGRYATARSRKNYAATSPITRQSGKSKTVHARFVHNDRLVDAVHMQASAALLHDPGSRAYYDELRSRDTGHNAALRQVANRLVGILHGCLKTSTTYHPKTAWAHRNYDLAA

SEQ ID NO: 19895 - protein, 359 aa, unidentified
  source 1..359: note = protein_e64fb9b
  REGION 7..147: note = RuvC_domain
  SITE 10: note = RuvC_P1
  SITE 53: note = RuvC_P2
  SITE 88: note = RuvC_P3
  SITE 90: note = RuvC_P4
  SITE 93: note = RuvC_P5
  REGION 210..294: note = Tnp_domain
  SITE 218: note = Tnp_P1
  SITE 248: note = Tnp_P2
  SITE 256: note = Tnp_P3
  SITE 257: note = Tnp_P4
  SITE 269: note = Tnp_P5
MDQLIRIGVDTSKHIFQLHGVNAVEQPVLRKKLRRREVAGYFAKLAPTVVAIEASTGAHDWARLLSAMGHQVRLIAPQYVKPYVKRGKNDAADAEALCEAMSRPTMRFVLVKTAEQQAALMLAGSRERLIARRTQLGNVIRGYAAEFGLVTAKGTDKIEPLLARLAAAQTVPSLARELFAIHGKEYRQLQAELEVVEAKLMAWHRDDACSRRLAQIPGVGPIGATMLVMKTPDPTSFPSGRHFAAWLGLTPRDHSTAGKTRLGVITRAGDETLRSLLVVGATAVIQQARRGRGHPSPWLVSLLQRKPPKLAAVALANKIARTAWKLMVTGESYNARPAPTTLTRVAVTRSADQSTAMMP

SEQ ID NO: 19896 - protein, 342 aa, unidentified
  source 1..342: note = protein_e30ddc5
  REGION 6..148: note = RuvC_domain
  SITE 9: note = RuvC_P1
  SITE 52: note = RuvC_P2
  SITE 87: note = RuvC_P3
  SITE 89: note = RuvC_P4
  SITE 92: note = RuvC_P5
  REGION 210..296: note = Tnp_domain
  SITE 218: note = Tnp_P1
  SITE 248: note = Tnp_P2
  SITE 256: note = Tnp_P3
  SITE 257: note = Tnp_P4
  SITE 269: note = Tnp_P5
MVDTMIGVDLAKNVFQLHGATMTGELKFRRKLSRGQFLRFMAEEPPALVVLEACGGANFWARELAKIGHEVRLIAPQYVRPFVKRQKNDATDAEAIVIAARQPEMRFVEPKTSEQQARAVLFRSRNRIVRQRTELVNALRATLYEYGQVVPLGIGHIKRIEAILADAEIELPEIVREECHDLLAQIGEKTARIDEKMKKLAGLAGHNGSTRRLQTMPGVGPMIALAVEAFAPAMQSFRRGRDFASWLGLVPKQFSSGGRERLGRVSKAGQADIRRLLIIGAMARVNWASRRPPRVDSWLSRMLARKPRMLVAIALANKMARKIWAMLTKMEDYREPAMAKAV

SEQ ID NO: 19897 - protein, 408 aa, unidentified
  source 1..408: note = protein_56777ce
  REGION 5..165: note = RuvC_domain
  SITE 8: note = RuvC_P1
  SITE 62: note = RuvC_P2
  SITE 102: note = RuvC_P3
  SITE 104: note = RuvC_P4
  SITE 107: note = RuvC_P5
  REGION 274..360: note = Tnp_domain
  SITE 282: note = Tnp_P1
  SITE 313: note = Tnp_P2
  SITE 321: note = Tnp_P3
  SITE 322: note = Tnp_P4
MQLFVGVDWAEDHHDVCVMDTDGQVRSKGRVSNDLAGIAKIHDLIGRAIPAEFDDDPEVIVGIETDRGLLVRALVAVGYRVLAVNPLGVDRYRDRSRVSGAKSDPGDARVLADMVRTDAHQHRAVAADSDLAEAIKLVARSHQSAIWSRRRLANQVRSALREFYPAAQLAFEDLTHSDAVSVLAIAPTPELGKGLSLSKIASALRRGGRQLNVDKKAAAVQAALRTDQLTQPPVVADAYGAIVASLAKVIAAHNTQIAELEEVLEAHFSQHPDADILRSRPGLGVVTGARVLGEFGDDPNRYDTAKGRRNYAGTSPLTVASGTRRVVRARHIRNRRLADALYWWAFNAINRSPGARALYDHRRALGDTHSGALRVVSNRLVAILHGCLRHRTLYDEHTAWAHRNDIAA

SEQ ID NO: 19898 - protein, 343 aa, unidentified
  source 1..343: note = protein_2051b04
  REGION 7..149: note = RuvC_domain
  SITE 10: note = RuvC_P1
  SITE 53: note = RuvC_P2
  SITE 88: note = RuvC_P3
  SITE 90: note = RuvC_P4
  SITE 93: note = RuvC_P5
  REGION 211..295: note = Tnp_domain
  SITE 219: note = Tnp_P1
  SITE 249: note = Tnp_P2
  SITE 257: note = Tnp_P3
  SITE 258: note = Tnp_P4
  SITE 270: note = Tnp_P5
MTKDTMIGVDLAKNVFQLHGASMTGQMQFRKKLSRQGFFKFMAEQPPAVVVMEACGSAHYWAREMTRLGHEVKLIAPHYVKPFVKRQKNDAADAEAIVIAAQRPEMRFVDPKSAEQQSRAILFRARERLVHQRTELVNALRACLYEYGHVVPQGIHQIRRIAEILDAPNSDLPDLMREECRDLLEQIAEKTVRIDARTGKIKAQTAEGDMARRLQTIPGVGPLTALAVEAFAPPMENFRCGRDFAAWLGLVPRQFSSGGKERLGRISKAGQPDIRRLLIIGAMSRLNWLGRKSIPEGSWLARIAARKPRMIVAIALANKMARTIWAMLTKNEDYRVPAQVPAA

SEQ ID NO: 19899 - protein, 340 aa, unidentified
  source 1..340: note = protein_4601f95
  REGION 6..159: note = RuvC_domain
  SITE 9: note = RuvC_P1
  SITE 63: note = RuvC_P2
  SITE 101: note = RuvC_P3
  SITE 103: note = RuvC_P4
  SITE 106: note = RuvC_P5
  REGION 206..293: note = Tnp_domain
  SITE 214: note = Tnp_P1
  SITE 244: note = Tnp_P2
  SITE 252: note = Tnp_P3
  SITE 253: note = Tnp_P4
  SITE 266: note = Tnp_P5
MKKAFIGIDFSKLKFDVAVYLADAKEIVSTNIFENQPSGYQQLIAWLKEVLDFSKSDILFCGEHTGYYSSNLSVYLHESGYDLWLVSGLEIKLSQGIKRKKTDKADSCYIAQYACRFQDKVSLYQPMPAALEEVKDLLSYRERLVELRKILLTSARELKRVRISKSSLYIYDESLAQVRELSKKIKECEKQIEEIIKQDNTLETNYKLMNTVKGIGLVNAALILVTTGNFTLFTDPRKFGCYSGVVPFEHNSGTSVRGKTRVSHIANKKIKSLLTQAARNSVRYDPLLRDYYQRKVAEGKAKALVLNNVRNKLIHRIFAVVRSGQEYDLNYINPLLRQAI

SEQ ID NO: 19900 - protein, 340 aa, unidentified
  source 1..340: note = protein_2939bf6
  REGION 6..148: note = RuvC_domain
  SITE 9: note = RuvC_P1
  SITE 52: note = RuvC_P2
  SITE 87: note = RuvC_P3
  SITE 89: note = RuvC_P4
  SITE 92: note = RuvC_P5
  REGION 208..304: note = Tnp_domain
  SITE 216: note = Tnp_P1
  SITE 246: note = Tnp_P2
  SITE 254: note = Tnp_P3
  SITE 255: note = Tnp_P4
  SITE 267: note = Tnp_P5
MEVSTIGLDIAKQVFQVHGVDARGVMVVGRRLRRGSVLSFFSGLPATLIALEACSTAHYWARELVALGHEVRLVPPRDVKAYVRGNKTDAADAAALCEAVRRVGVSVVPIKSAAQQAVLVLHRARELVVRQRTMAANALRGHLAEFGIVAAQGRAGLHQLMAGLGRLSLPEEARFALELVAAQWRALDEKIVALERRIVAWHKGNEPSRRLAGIPGVGPITATALVASVGDPKAFKTGRHFAAWLGLTPREWSSGLKRRRGGISKRGDGYLRRLLILGAHAVMRQLGRRAMPGPRDPWLSALRQRRPSAVVAVALANKMARIAWVVMARGETYHHRPVAA

SEQ ID NO: 19901 - protein, 343 aa, unidentified
  source 1..343: note = protein_9449d5b
  REGION 7..149: note = RuvC_domain
  SITE 10: note = RuvC_P1
  SITE 53: note = RuvC_P2
  SITE 88: note = RuvC_P3
  SITE 90: note = RuvC_P4
  SITE 93: note = RuvC_P5
  REGION 212..302: note = Tnp_domain
  SITE 220: note = Tnp_P1
  SITE 250: note = Tnp_P2
  SITE 258: note = Tnp_P3
  SITE 259: note = Tnp_P4
  SITE 271: note = Tnp_P5
MQAITTIGLDIAKSVFQVHGVDADGQVVIRRQLKRRYVLAFFQKLPPCLVGIEACASSHHWSRELQSLGHTVRLMPPAYVKPYVKRQKNDAADAEAICEAVTRPTMRFVATKTPEQQSCLMLHRTRHLFIRQQTAVINVIRAHLAEFGIVAPVGRKGVEELLDVVTDSSDKRVPVVARVCLAALGAQLRRLKEQILEFDRMIMAWHRSNETSMRLDAIPGVGPMLATALVASIADPKTFRSGRNFSAWIGLVPKQHSSGGKDRLGSISKQGDRYLRSLFMAGALAVIRYAKIHGAQHRPWLTALLARRPTKVAAIALANKIARMVWAMMARGEQYKEPVALAA

SEQ ID NO: 19902 - protein, 350 aa, unidentified
  source 1..350: note = protein_a239556
  REGION 6..148: note = RuvC_domain
  SITE 9: note = RuvC_P1
  SITE 52: note = RuvC_P2
  SITE 87: note = RuvC_P3
  SITE 89: note = RuvC_P4
  SITE 92: note = RuvC_P5
  REGION 208..291: note = Tnp_domain
  SITE 216: note = Tnp_P1
  SITE 245: note = Tnp_P2
  SITE 253: note = Tnp_P3
  SITE 254: note = Tnp_P4
  SITE 266: note = Tnp_P5
MDAITIGLDIAKSSFQVHGVDASGAVVVRRKLARGKVLEFFRGLPSAVVGIEACGGAQHWARQIAALGHRVRLLPARAVKAYVARQKNDAADAAAICEAAGRAVVREVPVKTVEAQAGLALLRVREVLVKQRTMLVNALRGHLAEFGVVAPRGREGVSALAERLSDPAVPALAQAACAALVAQVKALEAQILALEARLRQRHAADPASQRLAAIPGIGLLGATALALGTEPGRFDSGRDYAASLGAVPRQHSTGGRERLGSISRMGDSRVRGMLTAGASAVLKQLSPREGQPPAALAHSALGAWALRLLARKPWRVVMVALANKLARIAWAVLTRGTAYHPAGRPGPAAA

SEQ ID NO: 19903 - protein, 385 aa, unidentified
  source 1..385: note = protein_3d760d4
  REGION 40..181: note = RuvC_domain
  SITE 43: note = RuvC_P1
  SITE 86: note = RuvC_P2
  SITE 121: note = RuvC_P3
  SITE 123: note = RuvC_P4
  SITE 126: note = RuvC_P5
  REGION 246..337: note = Tnp_domain
  SITE 254: note = Tnp_P1
  SITE 284: note = Tnp_P2
  SITE 292: note = Tnp_P3
  SITE 293: note = Tnp_P4
  SITE 305: note = Tnp_P5
MSKVVKQGDPLEPKRHHCAKVEVSSNHSRDRGSAMNITTYGLDLAKRVFQVHWVEPETGEVKRKVLRRAEVAAFFARRAPGVVAMESCGSAHHWGRLLSGLGHQVRLIAAQFVRPFVKTNKTDAADAEAIWEAAQRPGMRFVALKSEEQQAVLSLHRMRAQLVKIRTMQAFQVRSLLYEFGVVGPKGFRALKVEIGAVLADPAGCPVPELVRVELLSQLQNLSSLSERIDELERRIGGWQRREVECERLAKIPGVGRLTATAVVATVADARSFRSGREFAAFLGLVPRQSGTGGRVKLLGISKRGDPYLRTLLIHGARSVLQMQNRVGRIMDPWLRDVLSRRPKNVAIVALANKMARTIWALMAHGRSFDRNWVTRTAMVAATTY

SEQ ID NO: 19904 - protein, 304 aa, unidentified
  source 1..304: note = protein_8b7bfe5
  REGION 4..146: note = RuvC_domain
  SITE 7: note = RuvC_P1
  SITE 50: note = RuvC_P2
  SITE 90: note = RuvC_P3
  SITE 92: note = RuvC_P4
  SITE 95: note = RuvC_P5
  REGION 182..266: note = Tnp_domain
  SITE 190: note = Tnp_P1
  SITE 219: note = Tnp_P2
  SITE 227: note = Tnp_P3
  SITE 228: note = Tnp_P4
  SITE 239: note = Tnp_P5
MNGIGIDVSKRQLDVGTTDGEILQVRNTAAGFAELEAWLKEHPADQIVLEATGGYEQRVLDFLHKAGRPVVRANALRARRLAQGMGHVAKTDRLDAYALAKMAVLVKLPAYQPLEPWQQRMREFVRARRQAMQALTVARQQQEMVGDRELRRLLQANITRLQTLVARLGKQIGEQVEQQPQLAVMKSMKGVGPALQAVLASHLPELGRISGKAIASLVGVAPMSHDSGTMRGKRSIHGGRAEIRQVLYMAAMSAMRHEPRLRDFYRSLRARGKEGKVAIVAVMRKMLVILNARVRDAESGPIPA

SEQ ID NO: 19905 - protein, 406 aa, unidentified
  source 1..406: note = protein_aab52a9
  REGION 4..160: note = RuvC_domain
  SITE 7: note = RuvC_P1
  SITE 57: note = RuvC_P2
  SITE 97: note = RuvC_P3
  SITE 99: note = RuvC_P4
  SITE 102: note = RuvC_P5
  REGION 269..355: note = Tnp_domain
  SITE 277: note = Tnp_P1
  SITE 308: note = Tnp_P2
  SITE 316: note = Tnp_P3
  SITE 317: note = Tnp_P4
MIFAGVDWAESHHDVFFQDEQGRRLAGGRLPEGVGGIARFHELAAAHAAEPGEVVIGIETDRGLFVAALVAAGYQVFAVNPMSASRYRDRHGASGAKSDPGDAKVLADLVRTDRHNHRPVAGDSDLAQGIRALARAHQSMIWARRRQASQLRSALREFYPGALAAFDDLTSGDALAVLKAAPQPALGAALSRAQITTALRRGGRTRRLPERTAAVQAALRVPQLQPAPALAAAMGAAVAAQAAVITEMNTQIAALERQLTADFEQHPDAEVVRSLPGLGAILGARVLGESGDAPGRYATAKSRKNYAGTSPITRASGTRRAVLARHARNKRLADAIYLWAFSALTASPGARTYYDQRRATGDTHHQALRALGNRLVGILHGCLASHTPYSEETAWAHRVSQHTRAA

SEQ ID NO: 19906 - protein, 340 aa, unidentified
  source 1..340: note = protein_330aeca
  REGION 6..147: note = RuvC_domain
  SITE 9: note = RuvC_P1
  SITE 52: note = RuvC_P2
  SITE 87: note = RuvC_P3
  SITE 89: note = RuvC_P4
  SITE 92: note = RuvC_P5
  REGION 210..297: note = Tnp_domain
  SITE 218: note = Tnp_P1
  SITE 248: note = Tnp_P2
  SITE 256: note = Tnp_P3
  SITE 257: note = Tnp_P4
  SITE 269: note = Tnp_P5
MEIATLGLDLAKSVFQAHGIDRLGKTVLVKRLHRKQMMPFFSKLPPCLIGIEACATAHHWARTLSTMGHEVRLMPPAYVKGYVKRGKSDALDAEAICEAVRRPTMRFVPIKTVEQQGILMAHRTRALLVRQRTMAANALRAHLAEFGLVANPGIAHLLALVDRTFADGHRLPAHARSALEILIRRLTELSEEINALDRELRAWHAQNEASTRLAAIPGIGVTTATALAATVTDPTQFRSGRQFAAWLGLTPQLQSTGGKARLGRISKQGDRYLRRLLVVGATAVIRHAKTKPTRMAAWIRGLLANKPFRVVSVALANKLARIAWVVLTRRERYRPEVLPV

SEQ ID NO: 19907 - protein, 344 aa, unidentified
  source 1..344: note = protein_0ccc814
  REGION 6..147: note = RuvC_domain
  SITE 9: note = RuvC_P1
  SITE 52: note = RuvC_P2
  SITE 87: note = RuvC_P3
  SITE 89: note = RuvC_P4
  SITE 92: note = RuvC_P5
  REGION 211..294: note = Tnp_domain
  SITE 219: note = Tnp_P1
  SITE 249: note = Tnp_P2
  SITE 257: note = Tnp_P3
  SITE 258: note = Tnp_P4
  SITE 270: note = Tnp_P5
MDITILGIDLGKNSCSVVGLDVNGKVTIRRRMRRETVIAFCSKIPTCTVAMEACCGAHHMGRALAAQGHSVRMMSPEYVRPYVKAQKNDDRDAEAIAEAATRPMMRFVQLKSEEQLDMQTLHRVRDQLVGERTSLMNQIRSLLLERGHVIPQGRAKLAAHLGELLDGQSSGLSPRIHTLILDMRERWMALDERIKKFDAEFHEEVDRDALAQRLLTIPGIGPLNATALVAAIGDAGTFTRGRDLAAWLGLVPKQVTTGGKPKLLGITKRGSKYLRKMLIQGARAAMPGLSKTDTAIGAWLRGLLARSHSNVVVVALAAKMARTVWALLRHESIYESKPVVAEPN

SEQ ID NO: 19908 - protein, 353 aa, unidentified
  source 1..353: note = protein_c2765c0
  REGION 4..158: note = RuvC_domain
  SITE 7: note = RuvC_P1
  SITE 56: note = RuvC_P2
  SITE 97: note = RuvC_P3
  SITE 99: note = RuvC_P4
  SITE 102: note = RuvC_P5
  REGION 220..306: note = Tnp_domain
  SITE 228: note = Tnp_P1
  SITE 258: note = Tnp_P2
  SITE 266: note = Tnp_P3
  SITE 267: note = Tnp_P4
  SITE 278: note = Tnp_P5
MIVIGIDPHKSSHTATAIDPATNTDLGSIRIDATVAGYKAMIAWAKAWPERKWALENAEGLGHHLAQWLLVLGEVVLDVPTTATARVRQLSRGGRRKNDRIDAAAAACVAVLQGDARPVDPEGSADVLALLDERRTNLCNSRTRLVNQLHALLRQLLAGGAPTSLTATAASSVLRGFRARSEIDRIRVGLCRDLIADIGRLDDRLTDNGKQMTRALDEHGTSLRGVDGIGPVSAARLIGRTGRASRFATAAAFANYNGTAPVQVASADSNRHRLSRYGDRQLNSALHTIAMVQIRMPASAGRAYYDKKVAEGKSPRAARRSLKRHLSDHVWRIMIADEKRSHRQRAKEPASAA

SEQ ID NO: 19909 - protein, 345 aa, unidentified
  source 1..345: note = protein_d013fc6
  REGION 6..147: note = RuvC_domain
  SITE 9: note = RuvC_P1
  SITE 52: note = RuvC_P2
  SITE 87: note = RuvC_P3
  SITE 89: note = RuvC_P4
  SITE 92: note = RuvC_P5
  REGION 211..298: note = Tnp_domain
  SITE 219: note = Tnp_P1
  SITE 249: note = Tnp_P2
  SITE 257: note = Tnp_P3
  SITE 258: note = Tnp_P4
  SITE 270: note = Tnp_P5
MELHLIGVDLGKTVFHLVGLNLRGEVVVRKQFSRKQLLRFTANLKVDRIGMEACGGSHFLGRALREQGHDVRLMPAQYVKPYVKTNKSDFIDAEAIAEAVGRPNMRFVPIKTDEQLDLQSLHRVRERWVMRRTAIVNQIRGLLLERGITLRKGRRHLDHALPGILEDAETKLSGALRFLLAQLKLELDQLAERMDQADAAIAQGVRQSEACRRLMAIPGVGPVTATAMIASIGNGSAFRKGREFAAWLGLVPREHSTGGKQTLLSISRRGNAYLRRLFIQGARAVLQQKMKQSSALSAWLIQLTARSHPNVVAVALANKLSRMAWAVLARGEAYRTPAAMGVAAV

SEQ ID NO: 19910 - protein, 408 aa, unidentified
  source 1..408: note = protein_aef1e2e
  REGION 4..165: note = RuvC_domain
  SITE 7: note = RuvC_P1
  SITE 62: note = RuvC_P2
  SITE 102: note = RuvC_P3
  SITE 104: note = RuvC_P4
  SITE 107: note = RuvC_P5
  REGION 273..359: note = Tnp_domain
  SITE 281: note = Tnp_P1
  SITE 312: note = Tnp_P2
  SITE 320: note = Tnp_P3
  SITE 321: note = Tnp_P4
MLFVGDDWAEDHHDVEVMDASGRRLAKARLPEGVAGITRLHAMIGQWLGDDTEDVAAQVKIGIETDRGPWVQALIAAGYTVYAVNPLQAARYRERLAVSGAKSDTADAHMLADMVRTDSHQLRPVAGDSAEAEAVKVVTRMHKTLIWERTRAGQRLRHALREYFPAALAAFEDLDAADTLELLAKAPDPASAARLSLAQISAALKRARRRDIAAKAAAIQAVLRAEHLGQPAVVTAAYAVSVRALVALLVTLNEQVKALQGQVEAHFGRHPDAEIILSQPGLGAVLGARVLAEFGDDHARYASAKARKNYAATSPITRASGKKKTVAARFVHNDRLIDALMTQAFTSLQNSRGARAYYDQQRTRGASYNAALRQLANRLVGILHGCLKTGTVYDEATAWPHHLNKAAA

SEQ ID NO: 19911 - protein, 270 aa, unidentified
  source 1..270: note = protein_f6bb993
  REGION 1..74: note = RuvC_domain
  SITE 14: note = RuvC_P3
  SITE 16: note = RuvC_P4
  SITE 19: note = RuvC_P5
  REGION 138..223: note = Tnp_domain
  SITE 146: note = Tnp_P1
  SITE 176: note = Tnp_P2
  SITE 184: note = Tnp_P3
  SITE 185: note = Tnp_P4
  SITE 197: note = Tnp_P5
MPAKYVRPYSKGQKNDFRDAEAIAEAVQRPTMKFVATKTTDQLDLQALHRVRERLVSQRTGIINQIRAFLLERGIAVRQGQRFLRAELPRLLAMPPDVLSPRMAHVIEDLAGDWRRLDQRIEGLSAEIEAIACQDSGCERLMSVPGIGPIISSAMVAAIGTGDAFTKGRDFAAWLGLVPRQMSTGDRTILGKISKRGNRYLRVLFVQAAWVVLIKPQSWERHGLKTWIEAAKKRLHRNVLAIALANKLARIAWSVLARGRGFEASKLQVA

SEQ ID NO: 19912 - protein, 399 aa, unidentified
  source 1..399: note = protein_d830a39
  REGION 10..164: note = RuvC_domain
  SITE 13: note = RuvC_P1
  SITE 61: note = RuvC_P2
  SITE 101: note = RuvC_P3
  SITE 103: note = RuvC_P4
  SITE 106: note = RuvC_P5
  REGION 271..356: note = Tnp_domain
  SITE 279: note = Tnp_P1
  SITE 309: note = Tnp_P2
  SITE 317: note = Tnp_P3
  SITE 318: note = Tnp_P4
  SITE 330: note = Tnp_P5
MDRPDYAVFLGLDVGKEEHHATGLDPAGSRVHDKPLPQAEDKIRDLLQALTEHGRVLVVVDQPASIGALAVAVARALGIDVAYLPGLAMRRIADLHPGNAKTDARDAYIIAEAARSMPHALRRVDTGDEALADLEVIVGYDDDLAGEVTRISNRIRGLLTQVNPGLERVLGPKIQRPAVLELLMRFGGPTGLAAATRRQLIAATKTRAPRTYEALVDAVQQALAEQSVTVPGTRAAEMVLPQLATQLAGLLAQRAAAAAQIEEMLDAHPLAKVLTSMPGIGVRTGARILLEVGDGTSFPTSGHLAAYAGLAPVTRRSGTSIRGEHPSRAGNKQLKRAFFLAAFAALRHPASRAYYDRKRAQGKKHNAALVCLARRRIDVLHAMLKHGTLYDDRSTPAAA

SEQ ID NO: 19913 - protein, 403 aa, unidentified
  source 1..403: note = protein_de75dec
  REGION 15..169: note = RuvC_domain
  SITE 18: note = RuvC_P1
  SITE 66: note = RuvC_P2
  SITE 106: note = RuvC_P3
  SITE 108: note = RuvC_P4
  SITE 111: note = RuvC_P5
  REGION 276..360: note = Tnp_domain
  SITE 284: note = Tnp_P1
  SITE 313: note = Tnp_P2
  SITE 321: note = Tnp_P3
  SITE 322: note = Tnp_P4
  SITE 334: note = Tnp_P5
MSDMITNHADIDVFIGIDVGKHNHHAVALDRDGKQLLSKALPQNETKLRALLDRLRKHGTLLVVVDQPATIGALPVAVAQAESITVAYLPGLAMRRIADLHPGEAKTDARDAAIIAEAARTMPHTLRGIRVADENVAELSMLCGYDDDLAKQATATSNRIRGLLTQIHPELETVIGPHLDHPAMLALLAKYPTPKALRHAGKHRVETLLRKQAPRAWKRWATAIFTALDGQTVVVSGTDAAGLVLPQLATSLAQTRQSRDEVFARIEELVEAHPLFELLTSMPAVGVRTAARILTEVVGKDFESAGHLASYAGLAPVTWRSGTSIRGDHSSRRGNKILKRALFLSAFAALKDPLSRAYYDKKRAEHKKHNQALIALARRRCNVLYAMLRDGAYFHTPEATTAA

SEQ ID NO: 19914 - protein, 366 aa, unidentified
  source 1..366: note = protein_e7c75f1
  REGION 14..165: note = RuvC_domain
  SITE 17: note = RuvC_P1
  SITE 60: note = RuvC_P2
  SITE 95: note = RuvC_P3
  SITE 97: note = RuvC_P4
  SITE 100: note = RuvC_P5
  REGION 232..318: note = Tnp_domain
  SITE 240: note = Tnp_P1
  SITE 270: note = Tnp_P2
  SITE 278: note = Tnp_P3
  SITE 279: note = Tnp_P4
  SITE 291: note = Tnp_P5
MGKSIKNLSSVTTVGLDIAKNVFQVHGVDAKGAAIVARSVRRGQLLKFFASLPPCLVGIEACSSSHHWARSLIELGHQVKLIPPAYVKPYVRRNKNDAVDAAAISRRMRSIRPGEAVGRPSMRFVPVRSVDNQAELMRHRVRELLAGNRTRMLNALRGHLAEVGIVAAQGAQHAYALKRLLADGFDQNGEIVVADCVRRALAPLVHQIDAIDAEIAAIDEEIETLVKADETARRLMTIPGVGPITASAIVATVRETSAFASGREFAAFLGLTPRQSSSGGKERLGRITKMGDRYLRKLLVVGACATLSHRKGHNDALRVWASSLLARKAVKYKFKLTAVALANKVARIVFAILTRGGEYDERPVAA

SEQ ID NO: 19915 - protein, 339 aa, unidentified
  source 1..339: note = protein_208c55a
  REGION 7..153: note = RuvC_domain
  SITE 10: note = RuvC_P1
  SITE 54: note = RuvC_P2
  SITE 92: note = RuvC_P3
  SITE 94: note = RuvC_P4
  SITE 97: note = RuvC_P5
  REGION 212..298: note = Tnp_domain
  SITE 220: note = Tnp_P1
  SITE 250: note = Tnp_P2
  SITE 258: note = Tnp_P3
  SITE 259: note = Tnp_P4
  SITE 271: note = Tnp_P5
MTDIVTIGIDLAKNVFAVHGVDATGKPRLLRPSVPRAKLLELIAALPPCLIGMEACSGAHHWAREFQKFGHTVRLMAPKFVAPYRLSGKRGKNDAADAAAICEAVTRPNMRFVPIKSLEQQGQLMVHRARQGFVEQRTATLNRIRGLLSELGIVLPLKAAVVRREALASLEDLPGWANTVIGDLLSEVTRLDERIAQYDQHITTLARHNTEVKQLMQLPGVGPTTATALLSTIGHGHDFQCGRQLSAWLGLTPGQYSSGGKSRLGHITKAGDPYLRSLLVLGARSVLQTAKNRSDPISRWACALAERRGYWRAVVAIAAKNARMCWAVLNRGEAFRLPA

SEQ ID NO: 19916 - protein, 316 aa, unidentified
  source 1..316: note = protein_156daba
  REGION 2..154: note = RuvC_domain
  SITE 5: note = RuvC_P1
  SITE 52: note = RuvC_P2
  SITE 92: note = RuvC_P3
  SITE 94: note = RuvC_P4
  SITE 97: note = RuvC_P5
  REGION 191..275: note = Tnp_domain
  SITE 199: note = Tnp_P1
  SITE 228: note = Tnp_P2
  SITE 236: note = Tnp_P3
  SITE 237: note = Tnp_P4
  SITE 248: note = Tnp_P5
MVGIDVASKHVEVAAVGAELSAALRQVPNDADGHSALAEALARLKPELVLMEATGGYEAALACALQAAGLRVAVVNPRMTHHFAQAMQKLAKTDRIDAAMLAEFAGVLARRPDCERFIRPLSEPEQQDLAALVTRRRQLVAMQLSERQRLRLARAVTRPSIEALLEAIARQLDDVEAEMAAHVEQHHAQMAKLLQGIAGIGKVATATLIAELPELGRLNRRQICALVGVAPYAKDSGASKGRRRISGGRFELRRALYMATLAATRHNEVIRAFYERLVAAGKLKKVALIACMRKLVTHLNALVRGYLNTQHQVSIA

SEQ ID NO: 19917 - protein, 401 aa, unidentified
  source 1..401: note = protein_ca60319
  REGION 10..158: note = RuvC_domain
  SITE 13: note = RuvC_P1
  SITE 62: note = RuvC_P2
  SITE 98: note = RuvC_P3
  SITE 100: note = RuvC_P4
  SITE 103: note = RuvC_P5
  REGION 228..312: note = Tnp_domain
  SITE 234: note = Tnp_P1
  SITE 265: note = Tnp_P2
  SITE 273: note = Tnp_P3
  SITE 274: note = Tnp_P4
  SITE 285: note = Tnp_P5
MTTPAREVVAGVDTHADTHHAAVIDTVGRRLGDAQFPATGEGYAALAAFLISFGTILRVGVEGTGSYGAGLSRHLRGLGMIVAEVIRPNRQIRRLRGKSDPIDAYAAAQTALAQLDLPTPKTADGQVEAIRQLLVARRGAVKARTAAMSQIKMLLVTAPELIRAKFRGLTDDNLIDGLSRSRPCASDAVTSAAGHALRSLARRHQRLGKEITDLEALLRPLVKAENPALVAAFGIHTVTAAQLLVTAGDNPDRLHHEASFAALCGTNPIPASSGKTTRHRLNRGGDRQANAALHRIALVRMGHDPRTRDYITGQIARGKNTKEAMRCLKRAIAREVFTLLTNPGEVPVVDDLRPLRQARGLTLQTVATHFGTWPSKISSIERGTRRDDTLANAYRNWLNAA

SEQ ID NO: 19918 - protein, 286 aa, unidentified
  source 1..286: note = protein_b9a9f52
  REGION 1..96: note = RuvC_domain
  SITE 33: note = RuvC_P3
  SITE 35: note = RuvC_P4
  SITE 38: note = RuvC_P5
  REGION 203..286: note = Tnp_domain
  SITE 211: note = Tnp_P1
  SITE 241: note = Tnp_P2
  SITE 249: note = Tnp_P3
  SITE 250: note = Tnp_P4
  SITE 262: note = Tnp_P5
MPVAVARAAGHQVAYLPGLAMRRIADLYPGRAKTDARDAFVIADAARSLPHTLHPVDVGDDALAELEVLIGFDDDLAGEATRISNRNRGLLTGIHPALEQAIRPRISHPAVLEILSRCGGPTGIAKAGRRKLTAIAKVHAPRLGDKLVEAIMAALAEQTVTVPGTAAADTVLPRLADSLKAVLLQRKQVAEQVEGILDAHPLAGVLTSMPGIGVRTAARILLEVGDASNFASSAHLAAYASIAPVTRSSGTSIKGEHPARTGNRQLKRAFFLAAFAALSDPTSRAY

SEQ ID NO: 19919 - protein, 342 aa, unidentified
  source 1..342: note = protein_7f5b075
  REGION 7..147: note = RuvC_domain
  SITE 10: note = RuvC_P1
  SITE 53: note = RuvC_P2
  SITE 88: note = RuvC_P3
  SITE 90: note = RuvC_P4
  SITE 93: note = RuvC_P5
  REGION 210..295: note = Tnp_domain
  SITE 218: note = Tnp_P1
  SITE 248: note = Tnp_P2
  SITE 256: note = Tnp_P3
  SITE 257: note = Tnp_P4
  SITE 269: note = Tnp_P5
MREIIRTGMDTSKHIFVLHGVDAAEQPVLRKKLSRKQVLEFFAKLPPTVIGMEACGAAHYWGRELGKLGHEVKLIAPQLVKPYVLRNKNDGRDADGVCEAMGRPRMRFVPVKSAEQQAALMLAGVRDGLIGRRTQLSNAIRGYAAEFGLIAPKGLDKIEPLLARITQDESVPAMARELFAMQGRDYAQLQGELKAVEARLLAWHQANATSRRLAQIPSVGPIIATSLVMKTPDPHAFRSGRLFAAWLGLTPKDHSTAGKTRLGKITRAGDETLRRLLVAGATAVIRQARLGRGHPSRWLVALLRRKPPKLAAVALANKVARIAWKLMATGESYDAARMNAVT

SEQ ID NO: 19920 - protein, 343 aa, unidentified
  source 1..343: note = protein_8611e6e
  REGION 10..151: note = RuvC_domain
  SITE 12: note = RuvC_P1
  SITE 55: note = RuvC_P2
  SITE 90: note = RuvC_P3
  SITE 92: note = RuvC_P4
  SITE 95: note = RuvC_P5
  REGION 211..297: note = Tnp_domain
  SITE 219: note = Tnp_P1
  SITE 249: note = Tnp_P2
  SITE 257: note = Tnp_P3
  SITE 258: note = Tnp_P4
  SITE 270: note = Tnp_P5
MKTANLTLTSVDLGKNCFHFHGQDGSGNKLFSCKVSRTKVFEFIAQLPVCTLAMEACGGAHYMGRFAASCGHEPRLIAAQHVSPFVKSNKNDFADAEAIGEAASRPAMRFVALKTEQQQALCLLNGIRDAFIHDRTATSNRIHAYLLEFGMALQPSFATIRKLPVILEELKAPPLVIRLLQDLHAHFVYLDGRIDALTKEVRSQAAEDDLASRLMTIPCVGPITSSVLAATIGDGKQFKCGRDYAASIGLVPRQHTTGGRPRLLGISKRGNPNERRLAVQCSNTFILHLDRQTGALADWVRKMLVGHHRNVVVCALANKLARIAWALAHTHGIYEARPSVLNA

SEQ ID NO: 19921 - protein, 317 aa, unidentified
  source 1..317: note = protein_6ed271d
  REGION 9..150: note = RuvC_domain
  SITE 12: note = RuvC_P1
  SITE 56: note = RuvC_P2
  SITE 96: note = RuvC_P3
  SITE 98: note = RuvC_P4
  SITE 101: note = RuvC_P5
  REGION 191..276: note = Tnp_domain
  SITE 199: note = Tnp_P1
  SITE 228: note = Tnp_P2
  SITE 236: note = Tnp_P3
  SITE 237: note = Tnp_P4
  SITE 248: note = Tnp_P5
MHQHNMICAGIDTGKRKLDVALTDGRLPLQADNDSAGHTKVSAWLCKHRVKRVGIEASGGYEQAVVAKLRRDGFVVIVFQPAQVRAYAKFHLQRAKNDKIDAALIAVCTAATQKIHSPPDPRLAPFAEHLTLIEQITEDITHVKTRRESCRNDRIRRHWDGEIARLKTLLRTELKALIAAVRQHRDLSMRLDLIASIGGIGLKTAVAILVRMPEIGRVSREQAAALAGLAPYDDDSGDQVGIRHIAGGRERLRKSPYTAALAAAFHWNPQLNIVYRRLIAAGKPHKVALVACARKLLIYANTVVERGTPWTEQPVAI

SEQ ID NO: 19922 - protein, 403 aa, unidentified
  source 1..403: note = protein_046f912
  REGION 4..160: note = RuvC_domain
  SITE 7: note = RuvC_P1
  SITE 57: note = RuvC_P2
  SITE 97: note = RuvC_P3
  SITE 99: note = RuvC_P4
  SITE 102: note = RuvC_P5
  REGION 274..361: note = Tnp_domain
  SITE 282: note = Tnp_P1
  SITE 312: note = Tnp_P2
  SITE 320: note = Tnp_P3
  SITE 321: note = Tnp_P4
  SITE 334: note = Tnp_P5
MNSVGIDISKGRSTIAVMRPFGEVVISPFEVCHTGSELSALAKRLKSLDGETRVVMEATGNYHAPVAKLLHSAGLYVSVVNAKLVHGYGNNDLRRVKTDRKDAVKLANYGLDRWLALPRYTPEEDTRLLLKNCYRQYRQYSKVQTVLKNNLISLLDTVFPNANRLFGSPARADGSEKWVDFVAEFWHCECVSKRSEKAFINQYQKWCRKHGYNFSEEKAHDIYIEAGGHIGVMPMSETAKLLAEQAVSQLRATSAALAALKQEMQSLASQLPEYPVVMDMFGVGPTLGPQLIAEIGDVRRFYSKKALVAFAGIDAPPNDSGDMTGRHKSMSKIGASSLRRTLFLIMSVYLQNSPLDEPVYQFMDKKRAEGKPYRVYMMASANKFLRIYYATVKAYLEALEHIA

SEQ ID NO: 19923 - protein, 266 aa, unidentified
  source 1..266: note = protein_6f25595
  REGION 2..106: note = RuvC_domain
  SITE 7: note = RuvC_P2
  SITE 47: note = RuvC_P3
  SITE 49: note = RuvC_P4
  SITE 52: note = RuvC_P5
  REGION 143..227: note = Tnp_domain
  SITE 151: note = Tnp_P1
  SITE 180: note = Tnp_P2
  SITE 188: note = Tnp_P3
  SITE 189: note = Tnp_P4
  SITE 200: note = Tnp_P5
MERIVYEPTGPYHKAFERFMAANGLPLSKVNPRLARRFAEATGKLAKTDRIDAGLLARYGALLEPRLLQTDTQIHNDLKELHVARLALIKDRTAAKNRSKNLSSPLLKKHNADRLRQIERQVKAVDEAIMVLIGQDAFLKARFDILVSIPGVSQITAFTLLIEMPELGELDEKAVAALSGLAPMSRQSGRWTGRASIAGGRAIVRQALYMPALVACRFNPDLKAKYDQLTATGKAPKVAITAVMRKLIVLANALLRNNRKWTPKPA

SEQ ID NO: 19924 - protein, 351 aa, unidentified
  source 1..351: note = protein_11ef5aa
  REGION 14..155: note = RuvC_domain
  SITE 17: note = RuvC_P1
  SITE 60: note = RuvC_P2
  SITE 95: note = RuvC_P3
  SITE 97: note = RuvC_P4
  SITE 100: note = RuvC_P5
  REGION 219..305: note = Tnp_domain
  SITE 227: note = Tnp_P1
  SITE 257: note = Tnp_P2
  SITE 265: note = Tnp_P3
  SITE 266: note = Tnp_P4
  SITE 278: note = Tnp_P5
MRTSQNTAESINTIGIDVGKNTFHLVGLDKRGAIVLQQKVTRHQLGRRLSNISRCLIGMETCSGTHFIARQLAALGHDVRLIPAQYVKPFLKGHKNDYRDAEAIAEAVQRPTMHFVSIKTPEQMDLLALHRVRSRLVRQRTGVANQIRGFLLERGITVRQGFMPLRKALPEILSSKSDALSPRMINLIGELIQDWRRLDDRIASVSTEIEAIAKRDESCQRLMSVPGVGPIVSSAVVAAIGNGTGFKQGRDFAAWLGLIPKQESTGDRTILGKISKRGNKYVRTLFVQAAHVVLERRPRTARQGLWPWIEQASKRLHRNMLAIALANKLARIAWAVLARGHAYQPRIIANA

SEQ ID NO: 19925 - protein, 402 aa, unidentified
  source 1..402: note = protein_c41dfda
  REGION 5..160: note = RuvC_domain
  SITE 8: note = RuvC_P1
  SITE 57: note = RuvC_P2
  SITE 97: note = RuvC_P3
  SITE 99: note = RuvC_P4
  SITE 102: note = RuvC_P5
  REGION 268..354: note = Tnp_domain
  SITE 276: note = Tnp_P1
  SITE 307: note = Tnp_P2
  SITE 315: note = Tnp_P3
  SITE 316: note = Tnp_P4
  SITE 327: note = Tnp_P5
MNFFVGLDWASQAHAVCVLDATGQVRWQGSVPHSAEGLAELRRQLARFGPPASIPIALERPSGLVVDTLLDAGHPVVPIHPNALKASRPRYSAAGGKSDPGDAFILGDLLRTDGHRFRPLQPLADDTRALRALVRSRDDLVVQRVALANQLRALLDRFWPGAAAIFADIDSPIALAFLSRYPTPHSAERLGEKRLARFLGQHAYCGRRPVPELLARLRSAPLSQTGELEAEASGEIVRALVAVLLPLVAQIQQLSAAIAAALPQHSDGPLLQSLPRSGSVNAAQILAELGDDRTRFPTDEQLAAEAGVAPVTRESGKHRAVSFRWACNKRLRQALTTFADNSRHASPWARATYADARRRGCDHPHAIRILARAWVRVLWRCWQDRRPYDVTLHRAAQRVAAA

SEQ ID NO: 19926 - protein, 371 aa, unidentified
  source 1..371: note = protein_5e5e6ac
  REGION 33..175: note = RuvC_domain
  SITE 36: note = RuvC_P1
  SITE 79: note = RuvC_P2
  SITE 114: note = RuvC_P3
  SITE 116: note = RuvC_P4
  SITE 119: note = RuvC_P5
  REGION 238..322: note = Tnp_domain
  SITE 246: note = Tnp_P1
  SITE 276: note = Tnp_P2
  SITE 284: note = Tnp_P3
  SITE 285: note = Tnp_P4
  SITE 297: note = Tnp_P5
MLSGGTWEDGILPQARSYAISNQTAPECIITTIGIDLGKNTFHLIGMDARGKIVLRRKVSRGQLLPCLANVPACLIGMEACAGAHHVGRQLAALGHDVRLLPAQYVKPFLEGHKNDYRDAEAIAEAAQRPTMRPVPLKSAEQLDLQALHRVRSRLVGQRTAVVNQIRGFLLECGIPVRKGPAGLREALPSLLAQRTDVLSPRMIHLIEDLAGDWRGLDERIDAITRDITALARQDVGCQRLMGIPGVGVITASAMVAAVGTGAAFAKGRDFAAWLGLVPKQISTGGRTILGGLSKRGNRYLRILFVGGAQVLLQRQRHWDGHGFGRWLQAAGTRLHRNVLAAALANKLARIAWGVLSHENGYDPEFAARTA

SEQ ID NO: 19927 - protein, 346 aa, unidentified
  source 1..346: note = protein_9e4eec8
  REGION 7..149: note = RuvC_domain
  SITE 10: note = RuvC_P1
  SITE 53: note = RuvC_P2
  SITE 88: note = RuvC_P3
  SITE 90: note = RuvC_P4
  SITE 93: note = RuvC_P5
  REGION 212..300: note = Tnp_domain
  SITE 220: note = Tnp_P1
  SITE 250: note = Tnp_P2
  SITE 258: note = Tnp_P3
  SITE 259: note = Tnp_P4
  SITE 272: note = Tnp_P5
MSYSTTVGVDLAKNVIQISVVSSRGKELSNRSLTRKKFAEFLGKQEPSLVAFESCATAHYWARAAERYGHKAHIIPAKAVAPFRRGHKTDSNDALAVAEAARRPNIKEAPMKTVEQQGLQAIHRSRELLNQECTALSNHLRGLLMEFGIVIPKGFASLLKAVPEILEDGENELPELYRPTLHRMYSRLLELREDIGAMTKEVERLAKAHPICSKLMALEGIGPIGALLLYATMGSGAAFSGSREFAAYLGLAPKQYSSGGKTNIVGLSKKIGNSRLRSVLILGARAYVYKVNEPKSSKDKWLKANIERNGESRAAIALANKNVRTAWAMVTQGTEYQRRPQLEMAA

SEQ ID NO: 19928 - protein, 339 aa, unidentified
  source 1..339: note = protein_44edb2d
  REGION 6..147: note = RuvC_domain
  SITE 9: note = RuvC_P1
  SITE 52: note = RuvC_P2
  SITE 87: note = RuvC_P3
  SITE 89: note = RuvC_P4
  SITE 92: note = RuvC_P5
  REGION 211..298: note = Tnp_domain
  SITE 219: note = Tnp_P1
  SITE 249: note = Tnp_P2
  SITE 257: note = Tnp_P3
  SITE 258: note = Tnp_P4
  SITE 270: note = Tnp_P5
MKSTTFGLDLAKRVFQLHWVNRETGEICRRQLKRGQVLEFFANREPSVIAMEACGSAHYWARKLAGLGHEVRLIAAQFVRPFVKGNKTDAADAQAIWEAAQRPGMKFVAVKSEGQQGVLVLHRMRAQLVKIRTMQINQLRGLLYEFGADLPPGRQKGVERIPRELDQLEAVLPAMVVQTLRSQLKRLEALDQEIAQIEKRLAAWKKEDKAAKRLMDIPGVGLLTATAAVATIGDARAFKSGREFAAFVGLVPRQSGTGGRVKLLGMSKRGDVYLRTLLIHGARSVLSHDKQREPWLEQLLSRRPFNAVAVALANKTARTIWALLAHERTYQKGYAGSAA

SEQ ID NO: 19929 - protein, 392 aa, unidentified
  source 1..392: note = protein_c47f0d9
  REGION 5..164: note = RuvC_domain
  SITE 8: note = RuvC_P1
  SITE 61: note = RuvC_P2
  SITE 102: note = RuvC_P3
  SITE 104: note = RuvC_P4
  SITE 107: note = RuvC_P5
  REGION 267..354: note = Tnp_domain
  SITE 275: note = Tnp_P1
  SITE 305: note = Tnp_P2
  SITE 313: note = Tnp_P3
  SITE 314: note = Tnp_P4
  SITE 327: note = Tnp_P5
MVVSVGVDVSKDKHDCFIVSSEGEVLADVFTIPNTMDGFHYLLQRIRHCTAPQDKIKVGLEATGHYSYNLLGFLLDNGLTTYVLNPLRTNLYRKSLSLRKTKTDRVDARTIASMLLSDAGLKPYTDTAYHNEELKSLTRYRFDKVKERAKLKSSIARLVCILFPELEKLVPSLHIASVYALLEEFPGAKQVAAAHLTRLKALLETASKGRYKRDMALKIRDAARNSIGSRMPAKSLELQHTIRLIRELDAEIAETEEQIQSILDELHSPITTIPGLGFRMAAMILAEVGDFARFDSPDKLLAYAGMSPSTYQSGQLKNCYPHMEKRGSRYLRYALYNATKYVCHWDPAFADYLAKKRAEGKHYNIAISHAAKKLVRLIFAMEKSRQPYCSAA

SEQ ID NO: 19930 - protein, 341 aa, unidentified
  source 1..341: note = protein_1d34506
  REGION 7..149: note = RuvC_domain
  SITE 10: note = RuvC_P1
  SITE 53: note = RuvC_P2
  SITE 88: note = RuvC_P3
  SITE 90: note = RuvC_P4
  SITE 93: note = RuvC_P5
  REGION 209..295: note = Tnp_domain
  SITE 217: note = Tnp_P1
  SITE 247: note = Tnp_P2
  SITE 255: note = Tnp_P3
  SITE 256: note = Tnp_P4
  SITE 268: note = Tnp_P5
MDSVTLVGIDLGKHSFHLHGQNKQGKAVFRKKVSRKQLVEFFATFHACTVVMEACAGAHYMARRLAGFGHEVKLISPQFVRPFVKSNKNDFVDAEAICEAASRPSMRFVTPKTELQQTLSALHRVRESLVRDRTKTTNQIHGFLLEFGISLPKGKAVITRLPAVLEEHSLPPHLVTTLERLHKHYKYLGEQITAIEKEITQQLAADDLGQRLLSIPGVGPITASVLAAEMGDGKQFGCSRDFAASIGLVPRQYSTGGKSNLLGISKRGDKNLRRLLVQCARSYMQRLERQTGRLADWVRGMLTRRHSNVVACALANKLARTAWALATHYATFNPEPTGGPA

SEQ ID NO: 19931 - protein, 392 aa, unidentified
  source 1..392: note = protein_6c9ea6b
  REGION 6..159: note = RuvC_domain
  SITE 9: note = RuvC_P1
  SITE 57: note = RuvC_P2
  SITE 98: note = RuvC_P3
  SITE 100: note = RuvC_P4
  SITE 103: note = RuvC_P5
  REGION 222..306: note = Tnp_domain
  SITE 229: note = Tnp_P1
  SITE 259: note = Tnp_P2
  SITE 267: note = Tnp_P3
  SITE 268: note = Tnp_P4
  SITE 279: note = Tnp_P5
MVAVMIGIDPHKRSNTAVVLDDKEKVLGRRRFNNDGAGYRELKAFVKAWKQRTWAVEGAGGVGLSLAQRLAMEGELVLDVPAFLSARVRALGGGSGRKTDDSDAYAVAVAGLRGHALQIVRPEGAVAVLKMLSDRRQQLVEQRITAINRLHDVLQDLLPGGASTRLTASKALEILATVNPLRAIERTRKQIAMEHAQDVAELDAKVKAAAKQIGLAVAAQPSRVNEIRGIGAIGTALILGEVGDVRRFRTKHHFASYTGTAPIDVSSGDQDRHRRDRGGNRRLNYALHVAALVQIRHHGPGKAYYLRKRAEGKKSLEAMRCLKRRLSDVVFHALQEDLQLRLEAAGPEGHSGATVQSSASDPTTMVSPSDQSLTGPAAANATPRRTKVKALA

SEQ ID NO: 19932 - protein, 394 aa, unidentified
  source 1..394: note = protein_0ca8a5f
  REGION 4..157: note = RuvC_domain
  SITE 7: note = RuvC_P1
  SITE 58: note = RuvC_P2
  SITE 98: note = RuvC_P3
  SITE 100: note = RuvC_P4
  SITE 103: note = RuvC_P5
  REGION 262..352: note = Tnp_domain
  SITE 270: note = Tnp_P1
  SITE 300: note = Tnp_P2
  SITE 308: note = Tnp_P3
  SITE 309: note = Tnp_P4
  SITE 325: note = Tnp_P5
MPTLGIDIGAYQHAIAVCRDGETEAERPVLRISADRAGFDRLDALVAARGPIERAVLESSGHYWFAIASHLAGRGVPVAVISPVSAKYFAKRRLQRAKSDPADARTLAALAMVDRPRTREPLAGSELREAARFAMTLVQEQARVCQRILRLIDIGFPELREAYEDPSCASAIALLKRAPTARAAAARRTENLAKVRTAGGRAIGPAKAAVIHAAARRTVAPPELDRQIGFEMELLIEQFELLEGQIERAEAHLATVVDSDVVRRLRTIPGVGAATAAALVAEIGDIRRFTDFDQLVAFAGVHAAERSSGTKGVDPETSWHMAKTGDAYLRAALYRMALVGIQHNPVIRAHYLRKRAAGKSKMNALGHCMKKALALVWGVWHGEHDFVVPEGTPS

SEQ ID NO: 19933 - protein, 347 aa, unidentified
  source 1..347: note = protein_68944b8
  REGION 6..148: note = RuvC_domain
  SITE 9: note = RuvC_P1
  SITE 52: note = RuvC_P2
  SITE 87: note = RuvC_P3
  SITE 89: note = RuvC_P4
  SITE 92: note = RuvC_P5
  REGION 211..297: note = Tnp_domain
  SITE 219: note = Tnp_P1
  SITE 249: note = Tnp_P2
  SITE 257: note = Tnp_P3
  SITE 258: note = Tnp_P4
  SITE 270: note = Tnp_P5
MNITTIGLDLAKNVFQVHGVNQQGKAVLRKTLKRADVMTFFAKLLPCLIGMEACGSAHYWARKLAELGHTVKLMAPQFVKPYVKTNKSDARDAEGICEAVGRPSMRFVPVKNVEQQAMLSLHRARQGFVVERTAQANQIRGLLSEFGIVIPKGNRYLEQRLPEILADAQNGLADMTRDLFNRLFNHFRELDRQVKELEEQIKAWHRVNADSQRLQSIPGIGPLTATALIASIGNASAFENARQLAAWLGLVPRQDSSGGKERLLGISKRGDVYLRTLLIHGARSVLLRVKSRTDQSEGWLAQLVKRRNPNIAAVALANKNARIAWALLAHGREYQPGYVSTRAQAAA

SEQ ID NO: 19934 - protein, 310 aa, unidentified
  source 1..310: note = protein_1dcbeb0
  REGION 5..152: note = RuvC_domain
  SITE 8: note = RuvC_P1
  SITE 52: note = RuvC_P2
  SITE 91: note = RuvC_P3
  SITE 93: note = RuvC_P4
  SITE 96: note = RuvC_P5
  REGION 187..271: note = Tnp_domain
  SITE 195: note = Tnp_P1
  SITE 224: note = Tnp_P2
  SITE 232: note = Tnp_P3
  SITE 233: note = Tnp_P4
  SITE 244: note = Tnp_P5
MNDSIGIDISKAFLDVHRLTSGETVQFANSPAGLRALHHWIGSQMPDIVVYEATGVFHRALEGSLSGKLPLVKVNPLQARHFAKARGTRAKTDALDAQMLATMGAALNLSPDEPVDRNQHVLKELQVARTALIKERTRLKNREKTQTLPLLKRQSKVRLDQIARQLTQLEEALLDVLKQSPKKARAFDILCSIPGLGAITAMTILVECPEIGTMTGKQIASLAGLAPMTRQSGQWRGKAFIQGGRKFLRDALYMPALVCARYNPDLRQKYQDMKEAQKPAKVALTCLMRKLIILANALIKQDRKWEPISA

SEQ ID NO: 19935 - protein, 344 aa, unidentified
  source 1..344: note = protein_fea6692
  REGION 5..153: note = RuvC_domain
  SITE 8: note = RuvC_P1
  SITE 55: note = RuvC_P2
  SITE 92: note = RuvC_P3
  SITE 94: note = RuvC_P4
  SITE 97: note = RuvC_P5
  REGION 213..299: note = Tnp_domain
  SITE 221: note = Tnp_P1
  SITE 251: note = Tnp_P2
  SITE 259: note = Tnp_P3
  SITE 260: note = Tnp_P4
  SITE 272: note = Tnp_P5
MEYFAGLDISLRSCALCIVDTNGKVILERELACEVDDISECLSQFQYPIERVGFEAGTMSQHLFFWLTNKRFDVVCMEARQVNAALSAMRNKTDKNDARGIAQVLRTGWFSPVHMKSREAHGLRALLSTRKALLKKTMDLANEARGLLKIFGIRLPRTVKHGSFDGVARPMIEMDDVLAHALVPLLDARVVLYQHFLELDRRVKRAASQDEVCMRLMTVPGVGPIAALTFKGAIDDPARFKRSRTVAAHFGLTPRRYQSGEHDNPGRISKAGDKDVRATLYAAANALLMRTMASSQIKLWGMRMMRTKGRRRAVVAVARKLAVLLHRMWIDGTEFRQDQVGGRV

SEQ ID NO: 19936 - protein, 323 aa, unidentified
  source 1..323: note = protein_812f805
  REGION 7..148: note = RuvC_domain
  SITE 10: note = RuvC_P1
  SITE 53: note = RuvC_P2
  SITE 88: note = RuvC_P3
  SITE 90: note = RuvC_P4
  SITE 93: note = RuvC_P5
  REGION 212..301: note = Tnp_domain
  SITE 220: note = Tnp_P1
  SITE 250: note = Tnp_P2
  SITE 258: note = Tnp_P3
  SITE 259: note = Tnp_P4
  SITE 272: note = Tnp_P5
MHHSTTVGVDLAKNVIQVSVVSPRGKEVLNRSFTRRKFAEFLVKQKSSLVAFESCASAHYWARAAKRHGHEARIIPAKAVAPFRQGHKTDSNDALAVAEAARRPNIKDAPMKTAEQQGLQAVQRSRELLIGECTALSNHLRGILLEFGVAIPQGFASLLRALPEILEDGDNELPDLYRPTLHRMHQRLLELREDIESMTREIDGLVKQRPVCKRLTAIEGIGPIGALSLYAVMGSGKAFTKSREFSAYLGLTPRQYSSGGKTNIVGISKKVGNRRLRSILIQGALAYVYRMKEPRSLKDRWLRDLIERAGLRRAAVALANKNV

SEQ ID NO: 19937 - protein, 349 aa, unidentified
  source 1..349: note = protein_d6c9b77
  REGION 45..187: note = RuvC_domain
  SITE 48: note = RuvC_P1
  SITE 92: note = RuvC_P2
  SITE 132: note = RuvC_P3
  SITE 134: note = RuvC_P4
  SITE 137: note = RuvC_P5
  REGION 228..312: note = Tnp_domain
  SITE 236: note = Tnp_P1
  SITE 265: note = Tnp_P2
  SITE 273: note = Tnp_P3
  SITE 274: note = Tnp_P4
  SITE 285: note = Tnp_P5
MIEPVLEHGAPSAGSIRNPNSRSGRKVSPHSQGRVIEQPSSPSFVGIDVSKDRLDVHILPAGQAFAVARNGEGLDHLVTELRTRAPTLIVLEATGGFEVTVAAVLAGAGLPLAVVNPRQIRDFARATGRLAKTDALDAQIIALFAERIRPEPRPIADAESQVLAELVARRRQVVEMIGMEANRLRQARSPRVRRTIEATRKTLEAQLVELDKDIDDSVRGSPVWRAADDLLTSVPGFGGITARTLIADLPELGRLDRRRIAALVGVAPVNRDSGQMRGHRAIAGGRTAVRNALYMAALSAVRWNPVIKAHYTRIVATGRPKKVALVACMRHLLTILNAIIKTASPWKTA

SEQ ID NO: 19938 - protein, 403 aa, unidentified
  source 1..403: note = protein_e7f5875
  REGION 6..159: note = RuvC_domain
  SITE 9: note = RuvC_P1
  SITE 57: note = RuvC_P2
  SITE 98: note = RuvC_P3
  SITE 100: note = RuvC_P4
  SITE 103: note = RuvC_P5
  REGION 221..306: note = Tnp_domain
  SITE 229: note = Tnp_P1
  SITE 259: note = Tnp_P2
  SITE 267: note = Tnp_P3
  SITE 268: note = Tnp_P4
  SITE 279: note = Tnp_P5
MQQIIIGVDPHKLSATIEVVDKHEQRLGSGRFTTDRAGYAAMRTYAKSWPERMWAVEGANGAGRPLAQRLLEAGEQVVDVPAKLAARVRLFDTGHNRKTDALDAHSIAIVAVRTTTLRVLQVDGELEALRMLTDRREALTRRRVQTVNRLQALLAELLPGQAKKDITPLQAKGMLASVRPRDVAGKTRRSIAAEELAELVAVDTKIKKATAELKSIVLARGSHLMDLHGVGPVVAARVLADVGDISRFADRNRFASWTGTAPLDASSGEQNRHRLSRAGNRRMNHMIHIAAVTQLRLDTEGRAYYRRKRAEGKKPMEAMRCLKRRISDSIYRQLIADQQRPGAAKRGAGPGGHCGASQESSAVDLPPHIDTSDQPLPGPATTTLRPASAPRKTNRRRNLQTTG

SEQ ID NO: 19939 - protein, 408 aa, unidentified
  source 1..408: note = protein_b3f434f
  REGION 5..161: note = RuvC_domain
  SITE 8: note = RuvC_P1
  SITE 60: note = RuvC_P2
  SITE 98: note = RuvC_P3
  SITE 100: note = RuvC_P4
  SITE 103: note = RuvC_P5
  REGION 270..356: note = Tnp_domain
  SITE 278: note = Tnp_P1
  SITE 309: note = Tnp_P2
  SITE 317: note = Tnp_P3
  SITE 318: note = Tnp_P4
MTLFIGDDWAEDHHDIHLMDADGTKLASRRLPEGLAGIRGFHELVAAHAEAPNQVVIGIETDRGLWVEALAAAGYEVFAVNPLAVARYRDRHQVSGAKSDAGDAKLLADLVRTDRHNHRPIAGDTPNVEAIKVLARAHQNLVWSRNRNTNALRSALREYYPAALEAFDSLADRDALAILGRAPTPNDAARLSVAKIRSALKGAGRQRNLDVRALEIQTALRTDQLAGPPEVAAAFGATTRAAVGIIAELNHQIAELEAELATHFEAHPDADIYRSLPGLGVILGARVLGEFGDDPNRYTTVKSRKNYAGTSPLTVASGKKRAVLARHVRNRRLYDAIDQWAFCALTNSPGARAFYDKHRAAGDLHHQALRALGNRLVGILHGCLRHHTTYSEHKAWSHRQTDSDNKAA

SEQ ID NO: 19940 - protein, 405 aa, unidentified
  source 1..405: note = protein_5e236a8
  REGION 4..160: note = RuvC_domain
  SITE 7: note = RuvC_P1
  SITE 56: note = RuvC_P2
  SITE 97: note = RuvC_P3
  SITE 99: note = RuvC_P4
  SITE 102: note = RuvC_P5
  REGION 271..357: note = Tnp_domain
  SITE 279: note = Tnp_P1
  SITE 310: note = Tnp_P2
  SITE 318: note = Tnp_P3
  SITE 319: note = Tnp_P4
MIFVGNDWASDHHDVCVMDETGNVLATRRCAESAAGITALHDLLARFADQPQQVVAGTETEHGMWVDALVAAGYQVYAINPRSVSRYRDRHHVGGTKSDKADAKTLADLVRTDRHNHRLVADDSAEADAIRVMARTHQNLVWARSAQQNVLHAQLHAYYPAALEAFGGDLAHRDTLSVLRRAPTPDQGARLSVAALRSALKKGGRQRNIDARAREIHQALGASGHLTAPPQLVAAYAATVTATVEMLTALNTQIVQLETTLNQSFDTHPDAAIYLSMPGIGETIGARMLGEFGDDPERYATAKSRRNYAGTSPRTIASGKGHVVLARHIRNTRLNDAAMAMAQSALTGSVGARAYYDNLKAQNKTHTQAQRALANRLIGILHGCLAHHTLYDEHTAWGHRANLAA

SEQ ID NO: 19941 - protein, 356 aa, unidentified
  source 1..356: note = protein_73c5f38
  REGION 20..162: note = RuvC_domain
  SITE 23: note = RuvC_P1
  SITE 66: note = RuvC_P2
  SITE 101: note = RuvC_P3
  SITE 103: note = RuvC_P4
  SITE 106: note = RuvC_P5
  REGION 225..310: note = Tnp_domain
  SITE 233: note = Tnp_P1
  SITE 263: note = Tnp_P2
  SITE 271: note = Tnp_P3
  SITE 272: note = Tnp_P4
  SITE 284: note = Tnp_P5
MWDDTFINVSGATNLNVKTIGIDLAKAIFQIHGVNEHGKCLFNKPLKRAQMISFFANLPPCLIGMEACSSAHYWANKLQGLGHTVKLMAPQFVKPYVKTNKNDAADAEAICEAVGRPNMRFVQMKSSEQLAVLALHRARQGFVKARTAQANQLRGLLAEHGIIIPKGIAHIGKHLPEILEECENGLPGTFRQLLERLGAHLKALDRQVQELEVQLQNWHRENAASKKLALIPGIGPITASALIASVGDAKNFKNGRQLAAWLGLVPRQHSSGGKQTLLGISKRGDSYLRTLLIHGARAVLRVAERKAQHAGSWLAGVMGRRNHNVAAVALANKNARIVWALLAQEREYEANYGVVA

SEQ ID NO: 19942 - protein, 313 aa, unidentified
  source 1..313: note = protein_60e63d2
  REGION 8..152: note = RuvC_domain
  SITE 11: note = RuvC_P1
  SITE 53: note = RuvC_P2
  SITE 93: note = RuvC_P3
  SITE 95: note = RuvC_P4
  SITE 98: note = RuvC_P5
  REGION 189..273: note = Tnp_domain
  SITE 197: note = Tnp_P1
  SITE 226: note = Tnp_P2
  SITE 234: note = Tnp_P3
  SITE 235: note = Tnp_P4
  SITE 246: note = Tnp_P5
MIISLRYVGIDVSKHHLDIFDEAVGVPERIANAPHAITELVARWRCDALVVFEATGVYDRELREALRQAGIRFARINPARARDFARACGQLAKTDPIDARMLAAFARAMRPETEAVITPAREALTWLAKRRDQMVLTRSQEKNRRSEAADRAIVSRISRFIDFLDEEIAEIEAEISALIKAEPEISEDAQLMRTVPGVGPVACTQLIAQMPELGRIGPKQAAALAGLAPFNVDSGTCRGKRKIGGGRKRVRDALYMAALNAVRRADPFKVFYARLRQAGKPAKLALIAVARKLLTILNAMMRDRKPYRTAPST

SEQ ID NO: 19943 - protein, 341 aa, unidentified
  source 1..341: note = protein_7c034c3
  REGION 7..149: note = RuvC_domain
  SITE 10: note = RuvC_P1
  SITE 53: note = RuvC_P2
  SITE 88: note = RuvC_P3
  SITE 90: note = RuvC_P4
  SITE 93: note = RuvC_P5
  REGION 209..299: note = Tnp_domain
  SITE 217: note = Tnp_P1
  SITE 247: note = Tnp_P2
  SITE 255: note = Tnp_P3
  SITE 256: note = Tnp_P4
  SITE 268: note = Tnp_P5
MNTVAIVAIDLGKLSFHVHAQNDRGHELYHRKFNRETLMRHLANLAPCTVAMEACGGSHFMARELTRLGHTPKLIPAQFVRPYVKSNKNDFADAAAIGEAATRDQMRFVQPKTEAQQALAMLNSLRDSFIRDRTATMNRIHAYLLEVGISLPPSFKAVRELPIVLDDSTFSPLIKKLLLDLHTHFSYLDDRVKALDKEVHGQAASDDLASRLMSIPCIGPITATALAAELGDGKQFRCGRDYSASVGLVPRQHTTGGKPCLGRISKRGDGNQRRLLIQCARVYLMGLERQSGKLADWVRGLLRAHHPNLVVCAVANKLARIAWAITAHHSEFDAGASAMSA

SEQ ID NO: 19944 - protein, 340 aa, unidentified
  source 1..340: note = protein_6ce2abb
  REGION 5..147: note = RuvC_domain
  SITE 8: note = RuvC_P1
  SITE 51: note = RuvC_P2
  SITE 86: note = RuvC_P3
  SITE 88: note = RuvC_P4
  SITE 91: note = RuvC_P5
  REGION 209..295: note = Tnp_domain
  SITE 217: note = Tnp_P1
  SITE 247: note = Tnp_P2
  SITE 255: note = Tnp_P3
  SITE 256: note = Tnp_P4
  SITE 268: note = Tnp_P5
MDTMIGVDLAKSVFQVHGASMTGQLKFRKKLSRQSFADFMTKQPPAVVVMEACGSAHYWAREMSRLGHEVKLIAPHYVKPFVKRQKNDAADAEAIVIAAQRPEMRFVEAKCTEQQSRAILFRGRERLVHQRTELVNALRACLYEFGHVVPQGIHQLGRIKDILNEPNSDLPELMREECGDLMKQIAEKTVRIDTRTAKIKALAAEADTARRLQTIPGVGPLTALAVEAFAPPMESFRCGRDFAAWLGLVPRQFSSGGEERLGRVSKAGQSDIRRLLIIGAMSRLNWLGRKSIPESSWLARISARKPRMLVAIALANKMARTIWALLTKNEDYRDSAQVAA

SEQ ID NO: 19945 - protein, 344 aa, unidentified
  source 1..344: note = protein_7ea42e7
  REGION 6..148: note = RuvC_domain
  SITE 9: note = RuvC_P1
  SITE 52: note = RuvC_P2
  SITE 87: note = RuvC_P3
  SITE 89: note = RuvC_P4
  SITE 92: note = RuvC_P5
  REGION 211..296: note = Tnp_domain
  SITE 219: note = Tnp_P1
  SITE 249: note = Tnp_P2
  SITE 257: note = Tnp_P3
  SITE 258: note = Tnp_P4
  SITE 270: note = Tnp_P5
MEISTIGLDLAKNVFQIHGVDAKGKAVIRKALRRSQMLPFFEKLQPCLVGIEACGTSHYWARELLKFGHEVRLMPPAYVKPYVKRGKTDAADAEAICEAVTRPTMRFVPVRSEDQQAVLSMHRTRDLFVKQRTQLINMMRGLLAEFGIDIPQGVNRALEKARAIVDGEAPDVPIDAVRIVQRLSQQALDIHAQVREIERDLIEWQRQSDVATRLMTIPGIGPIGATALAASVNDPSEFRSGRQFAAWLGLTPLQKSSGGKERLGHISKMGDRYLRKLLVVGMTAVVRNAKRKPEAVDPNVLALLARKPARVVTVALANKTARIVWAIMARGEVYRERHVPALAA

SEQ ID NO: 19946 - protein, 339 aa, unidentified
  source 1..339: note = protein_dbea998
  REGION 6..148: note = RuvC_domain
  SITE 9: note = RuvC_P1
  SITE 52: note = RuvC_P2
  SITE 87: note = RuvC_P3
  SITE 89: note = RuvC_P4
  SITE 92: note = RuvC_P5
  REGION 211..302: note = Tnp_domain
  SITE 219: note = Tnp_P1
  SITE 249: note = Tnp_P2
  SITE 257: note = Tnp_P3
  SITE 258: note = Tnp_P4
  SITE 270: note = Tnp_P5
MQVTTIGLDLAKNIFQVHGVAENGDVAFNRALRRSQMLPFFARLDPCLVGIEACGTSHHWARELIKLGHNVKLIPPVYVKPYVKRGKSDAVDAAAICEAVTRPTMRFVEVKTPEQQAILAVHRTRDLIVRQRTQTINMLRAQLAEFGVILPQGVGHAIQFAKDYLDGEQPDLPEVAGNVIVELGDQLLFLHGKIQRCSREMIQIAKCEKRVALLQTIPGVGPITASAIVATVGSGKQFNNGREFAAWLGLTPINKSSGGKERLGRISKMGDQYIRRLIYLGMVSRVRQIAKTPEAFDPWFADILARKPTKLAAVAMANKTARIIWAVLTRNEPYKVRAI

SEQ ID NO: 19947 - protein, 347 aa, unidentified
  source 1..347: note = protein_5f1f957
  REGION 7..148: note = RuvC_domain
  SITE 10: note = RuvC_P1
  SITE 53: note = RuvC_P2
  SITE 88: note = RuvC_P3
  SITE 90: note = RuvC_P4
  SITE 93: note = RuvC_P5
  REGION 214..297: note = Tnp_domain
  SITE 222: note = Tnp_P1
  SITE 252: note = Tnp_P2
  SITE 258: note = Tnp_P3
  SITE 259: note = Tnp_P4
  SITE 271: note = Tnp_P5
MAEVSTIGLDIAKAVFHAHGADPRGQMVFSRRLTRAKLLEFFAAQPRCVVALEACGGAHHWAREIASLGHEVKLIPPAYVKPFVKRNKNDAVDAEAICEAAQRPSMRYTAIKTEAQQAAGMVFRTRDLLVRQRTQLINAIRGHLTEFGWVAPKGPSHIDVLASLLEEGEEIGASLPEAARAMFLVMTGQLEQLNEQIKLLDKEIARRAREDEAARRLMTIPGIGPIAATALLALAPPVEGFARGRDFAAWLGLRQHSTGGKERLGAISRMGERTLRRLLIIGSSAVVRQASRRGAPRGSWLEQMLARKPRMLVTVALANKTARIIWAVLMKGEDYREGHRAPVAAAA

SEQ ID NO: 19948 - protein, 409 aa, unidentified
  source 1..409: note = protein_3d15298
  REGION 17..171: note = RuvC_domain
  SITE 20: note = RuvC_P1
  SITE 68: note = RuvC_P2
  SITE 108: note = RuvC_P3
  SITE 110: note = RuvC_P4
  SITE 113: note = RuvC_P5
  REGION 278..363: note = Tnp_domain
  SITE 286: note = Tnp_P1
  SITE 316: note = Tnp_P2
  SITE 324: note = Tnp_P3
  SITE 325: note = Tnp_P4
  SITE 337: note = Tnp_P5
MDFVGDESVNDEYGVFLGLDVGKTDHHAVALDPAGKRLHDAALPNTEAGLRKLFDKLARHGRILAVVDQPASIGALPVAVARACGHQVGYLPGLVMRRLADLHPGTAKTDARDAYVIADAARTLPHTLRRVDTGDDTLAEREMLVGYDDDLAGEVTRIANRIRGLLTQIPPPLERVLGPKVQHPAVLEALSRCGGPAGLRKAGRSKLAEVVEPRAPRMGARLVEQVFTALDAQTVVVPGSTAAETILPRLADSLRELLKQRDQVAMQVEEMLDAHPLSEVLTSMPGIGVRTAARILLEVGDGNAFPTSGHLAAYAGLAPVTRRSGTSICGEHPPKGGSKQLKRALFLSAFAALSDPLSRAYYDRKRAEGKKHNAALICLARRRVDVLHAMLRTHTPYQHKPAEKLALAA

SEQ ID NO: 19949 - protein, 340 aa, unidentified
  source 1..340: note = protein_a49e92c
  REGION 7..149: note = RuvC_domain
  SITE 10: note = RuvC_P1
  SITE 53: note = RuvC_P2
  SITE 88: note = RuvC_P3
  SITE 90: note = RuvC_P4
  SITE 93: note = RuvC_P5
  REGION 212..300: note = Tnp_domain
  SITE 220: note = Tnp_P1
  SITE 250: note = Tnp_P2
  SITE 258: note = Tnp_P3
  SITE 259: note = Tnp_P4
  SITE 271: note = Tnp_P5
MGQVVTIGLDIAKSVFQVHGVDAEGSVVIRQKLTRARLLKFFERLDPSLVGIEACGTAHHWARELIGLGHDVRLMPPSYVKPYVKRQKNDMADAEAICEAVTRPTMRFVPVKSPEQQSVMVLHRTRSILIRQRIQVSNAIRGHMAEFGMAAAVGRQGLQALIAIVDDSSDARVPAEARGCLGMLAAQLRMVNEQILDTDRLIRTNARSTEVGRRLMEIPGVGPLLASALVGTIADPKAFRTGRNLAAWIGLVPRQNSSGGKERLGGITKQGDRYLRQMLVVGALAVVRYAVRNGTRRPWLVQLLARRTPKVAAVALANKTARMVWAIMTSGERYREPLAA

SEQ ID NO: 19950 - protein, 312 aa, unidentified
  source 1..312: note = protein_bf25eab
  REGION 6..177: note = RuvC_domain
  SITE 9: note = RuvC_P1
  SITE 53: note = RuvC_P2
  SITE 93: note = RuvC_P3
  SITE 95: note = RuvC_P4
  SITE 98: note = RuvC_P5
  REGION 189..273: note = Tnp_domain
  SITE 197: note = Tnp_P1
  SITE 226: note = Tnp_P2
  SITE 234: note = Tnp_P3
  SITE 235: note = Tnp_P4
  SITE 246: note = Tnp_P5
MTEIIIGADISKDHIDLYRLSDGDRLRVSNDGKGFAAILGWIGNTPVARVVYEPTGAYHRAFERFMLTRSLPVSKVNPRQARRFAEAIGKLAKTDRADAGMLAQFGMLLNPRLLSPDAASFSELKELHAARLALVKDRTAAKNRGKNITQPLLKRQNTARLKQIEAQLAQVEQAITDHIAIDESLKARFDILVSIPGLSKITAFTLLIEMPELGKLDEKAAGKLAGLAPSDRQSGVWTGRAFIVGGRAIARQALYMPALVATRFNPDLKAKYDTLRKAGKPPKVAITAIMRKLVVLANALLRKQQKWTPKPA

SEQ ID NO: 19951 - protein, 315 aa, unidentified
  source 1..315: note = protein_ad8896b
  REGION 9..151: note = RuvC_domain
  SITE 12: note = RuvC_P1
  SITE 56: note = RuvC_P2
  SITE 96: note = RuvC_P3
  SITE 98: note = RuvC_P4
  SITE 101: note = RuvC_P5
  REGION 192..276: note = Tnp_domain
  SITE 200: note = Tnp_P1
  SITE 229: note = Tnp_P2
  SITE 237: note = Tnp_P3
  SITE 238: note = Tnp_P4
  SITE 249: note = Tnp_P5
MQQLIPQTAGIDIAKDQLDVCLYPDGATRRFTNDPQGHRALIAWLAKYSLQRVVFEPTGAYHRTLERSLARAGLPLAKINPRHARRFAEALGQLAKTDQLDAALLARFGALLEPPTRPVLSPMLDAMKELLVARQALIKDRTAALNRQKIVRSPLWRRHLAQRLRQIAHQLAALEAHLLSLSQDDAALAPRLAILMSIPGIAQATAVSLLVDMPELGSLDQSQVASLAGLAPVARDSGASRGRRTIRGGRAPVRQALYMPALVAARFNPDLKAKYQALLAAGKPAKVALTAIMRKLIILANALLRDQRHWSPKPA

SEQ ID NO: 19952 - protein, 355 aa, unidentified
  source 1..355: note = protein_d2e6c6a
  REGION 10..158: note = RuvC_domain
  SITE 13: note = RuvC_P1
  SITE 62: note = RuvC_P2
  SITE 98: note = RuvC_P3
  SITE 100: note = RuvC_P4
  SITE 103: note = RuvC_P5
  REGION 232..314: note = Tnp_domain
  SITE 236: note = Tnp_P1
  SITE 267: note = Tnp_P2
  SITE 275: note = Tnp_P3
  SITE 276: note = Tnp_P4
  SITE 287: note = Tnp_P5
MTANRACVIGGVDTHGRSHHAAVIDSAGRVLGSAEFEANAAGYRRLLAWMRRHGELAQIGVEGTGTYGAGLTRHLLAEGVPVVEVDRPNRRLRRQRGKSDPIDAEAAARAVLAGTATVPPKDRGGIVESIRALRTARSGAVKARGAALNALKAMIVSAPAELRAALDHLHAVPLVTTCAALRPDQQRLSDPLQATKAALRSLARRIVALDAEITELDAALAQLVHRAAPHTISLLAIGVDHAGQLLVTAGERPERLRSEAAFAHLCGVAPVPASSGQTQRHRLHRGGDRAANRALHLAVVVRLRCCPRTRAYVERRTQEGLSKPEIMRCLKRYLAREVFHTLSADLQELYGLDGI

SEQ ID NO: 19953 - protein, 399 aa, unidentified
  source 1..399: note = protein_5e5d2ed
  REGION 9..163: note = RuvC_domain
  SITE 12: note = RuvC_P1
  SITE 60: note = RuvC_P2
  SITE 100: note = RuvC_P3
  SITE 102: note = RuvC_P4
  SITE 105: note = RuvC_P5
  REGION 270..355: note = Tnp_domain
  SITE 278: note = Tnp_P1
  SITE 308: note = Tnp_P2
  SITE 316: note = Tnp_P3
  SITE 317: note = Tnp_P4
  SITE 329: note = Tnp_P5
MTSSYGVFLGLDVGKGDHHAVALDATGKRLHDGPLPNTEPKLRALFDKLAVHGPLLVVVDQPATIGALPVAVARACGHQVAYLPGLAMRRIADLYPGNAKTDARDAFIIADAARSLPHTLRPVDTGDEALAELEVLVGFDDDLAGEATRLGNRIRGLLTGIHPTLERVLGPRITHPAVLEILSRCGGPTGIRKAGRRKVTAIAATHAPRLGEKLVADIWTALGEQTVTVPGTAAADTVLPRLADSLKTVLQQRNQVATEVEDILDAHPLAGVLTSMPGIGVRTAARILLEVGDASAFKSSAHLAAYAGIAPVTRSSGTSIKGEHPTRNGNRKLKRAFFLAAFAALHDPTSRAYYQRKRDEGKKHNAALICLARRRCDVLYAMLRNGTHYRHPDPAPAAA

SEQ ID NO: 19954 - protein, 400 aa, unidentified
  source 1..400: note = protein_d7b2342
  REGION 6..159: note = RuvC_domain
  SITE 9: note = RuvC_P1
  SITE 57: note = RuvC_P2
  SITE 98: note = RuvC_P3
  SITE 100: note = RuvC_P4
  SITE 103: note = RuvC_P5
  REGION 221..306: note = Tnp_domain
  SITE 229: note = Tnp_P1
  SITE 259: note = Tnp_P2
  SITE 267: note = Tnp_P3
  SITE 268: note = Tnp_P4
  SITE 279: note = Tnp_P5
MVQVFIGVDPHKLSATIEVIDDHEKVLATGRFATGKAGYAAMLRHVGTWPDRVWAVEGSNGAGRPLAQRLLADGEHVVDVPAKLSARARLFDTGHNRKTDAHDAHAVAVVAARTTGLRVLAHDDELEVLRMLVDRREELARQRIQTINRLHRLLSELTPGKAKKDLTALQAKAILASVRPRDLAGKTRRRLAAEQLAELVAVEKKIKASTKELKVVVLARGSTLMDLRGVGPVVAARILADVGDVSRFADRNRFASWTGTAPLDASSGEQIRHRLSRAGNRRANHVLHIAAVSQIRLDTEGRAYYRRKLAAGKTKMEAMRCLKRRISDAVYRQLVADAQVAESQGTSTGPGGHCGATLKSSAVDLPPHIDTSDQPLPGPAEPTLQPRRQGRKKAPLSANR

SEQ ID NO: 19955 - protein, 338 aa, unidentified
  source 1..338: note = protein_d912877
  REGION 6..147: note = RuvC_domain
  SITE 9: note = RuvC_P1
  SITE 52: note = RuvC_P2
  SITE 87: note = RuvC_P3
  SITE 89: note = RuvC_P4
  SITE 92: note = RuvC_P5
  REGION 211..304: note = Tnp_domain
  SITE 219: note = Tnp_P1
  SITE 249: note = Tnp_P2
  SITE 257: note = Tnp_P3
  SITE 258: note = Tnp_P4
  SITE 270: note = Tnp_P5
MSIVILGIDLGKNSCSLVGLDDSGKVVLRRRMRRDSVIAFASKLSPCTMAMEACCGAHHMGRALAALGHEVRLMSPEYVRPYVKAQKNDDRDAEAIAEAATRPTMRFVELKSEEQLDVQTLHRVRDRLVGERTSLTNQIRSLLLERGHTVAQGHAKLRHKLIELLDPDTAAVSRRMAFLLEDMRRRWTELDQRIAAFDAEFATMARTDDRARRLTGIPGIGALNATALVAAVGDAATFSKGRDLAAWLGLVPRQMTTGGKPKLLGITKRGSRYLRKMLIQGARSAMPVVSRGDTTTGRWLRALLARAHPNVAVVALAAKMARIVWALLHHGRNFEAAR

SEQ ID NO: 19956 - protein, 346 aa, unidentified
  source 1..346: note = protein_9580ec0
  REGION 14..156: note = RuvC_domain
  SITE 17: note = RuvC_P1
  SITE 60: note = RuvC_P2
  SITE 95: note = RuvC_P3
  SITE 97: note = RuvC_P4
  SITE 100: note = RuvC_P5
  REGION 218..304: note = Tnp_domain
  SITE 226: note = Tnp_P1
  SITE 256: note = Tnp_P2
  SITE 264: note = Tnp_P3
  SITE 265: note = Tnp_P4
  SITE 277: note = Tnp_P5
MDKAITDLSTVATVGLDLAKHVFQVHAIDDVGHVVTSRALRRKDLMAFFERLPSCLIGMEACGSAHHWARQLMKLGHDVRLMPPAYVKAYVRRQKNDAADAAAICEAVTRPSMRFVPVRSVENQAALMHHKVRELLVAQRTQLLNALRSHLAEIGIIAAQGPNNARALAVLIVEGNDMIPAIVRAALLPVVRRLNELDQEIRQSDQAILALAKADATARRLMSVPGIGPVTASALAASVQDISAFSGPREFAAFLGLTPRQSSSGGKERLGRVSKMGNRYLRKLLVVGAHAVLFHRKRCSDALRSWADRLMETKPFKLVAVATANKLARIAFALMRDGAHYAGTRT

SEQ ID NO: 19957 - protein, 389 aa, unidentified
  source 1..389: note = protein_bb3d9f2
  REGION 12..164: note = RuvC_domain
  SITE 15: note = RuvC_P1
  SITE 61: note = RuvC_P2
  SITE 101: note = RuvC_P3
  SITE 103: note = RuvC_P4
  SITE 106: note = RuvC_P5
  REGION 268..353: note = Tnp_domain
  SITE 276: note = Tnp_P1
  SITE 305: note = Tnp_P2
  SITE 313: note = Tnp_P3
  SITE 314: note = Tnp_P4
  SITE 326: note = Tnp_P5
MGEAIRATVAYLGIDVGKRSHSACGLGEDGEVAFRSDLENRPADIDRLLERAGAGALVVVDQKRNIGALVLARAFAHGNPCAHLPGYAERQARGMFPGIAKTDAIDAEVIARTARGMPGALRPLAEEPEGAASLRILSSQREFAAAARTRAKNRLRATLLEADPALERAVDPSRGWHVAPLAEFGSAAGCSAAGWRRFSAAARRAGAPAAGASAPWESMLASAGSGRALPAGEDVAVRMLAREIAALDADVAELEGLVADSLAGDEVYECLLTVPGIGPKTAAALVTSVDVSMFRGHDELASCCGVAPADSRSGTSVRSTSPQRGGNKQLKNLLIFSCNSLIGTQNRFGRYYDECRARGMRHNKALKAVARKRLKVIYAVMRDAVPYAA

SEQ ID NO: 19958 - protein, 350 aa, unidentified
  source 1..350: note = protein_c4f835f
  REGION 6..148: note = RuvC_domain
  SITE 9: note = RuvC_P1
  SITE 52: note = RuvC_P2
  SITE 87: note = RuvC_P3
  SITE 89: note = RuvC_P4
  SITE 92: note = RuvC_P5
  REGION 211..297: note = Tnp_domain
  SITE 219: note = Tnp_P1
  SITE 249: note = Tnp_P2
  SITE 257: note = Tnp_P3
  SITE 258: note = Tnp_P4
  SITE 270: note = Tnp_P5
MQVITIGIDLAKHVFQVHGVDANDKVVFNKPLRRSQVLPFFAKLAPCLIGMEACASAHYWARELKKLGHDVRLMPAKDVKAYVKRNKNDSVDAAACGEAVRRPTVRTVPVKTPEQQAELMQHRVRDLLVRQRTQAINALRSHLAELGIVAAQGYDGLKVLLAVIADCSDVRLPENARASLSALMAQIASCQAEIGAIEKRLLAQHRKNADSKRLETIPGIGVVGASAIVATVPDASIFKTGRDFAAWIGIVSREDSTGGKQRLGPISKQGDRYLRRILIVGAFAVIKQARAHPEKYPWLTQLLARKPAKVAAVALANKMARIAWAVLTKKEIYRVTSHHRDTCVVGRLKK

SEQ ID NO: 19959 - protein, 404 aa, unidentified
  source 1..404: note = protein_a5c5386
  REGION 4..160: note = RuvC_domain
  SITE 7: note = RuvC_P1
  SITE 59: note = RuvC_P2
  SITE 97: note = RuvC_P3
  SITE 99: note = RuvC_P4
  SITE 102: note = RuvC_P5
  REGION 270..356: note = Tnp_domain
  SITE 278: note = Tnp_P1
  SITE 309: note = Tnp_P2
  SITE 317: note = Tnp_P3
  SITE 318: note = Tnp_P4
MLFVGVDWAEDHHDVCVMAEDGMVLAKRRVPDSVAGIGELHELIAEHAEKDEEVVVGIEIDRGLVVWSLLEAGYEVYAVNPMASARYRDRHATSGAKSDPGDAKVLADLVRTDRHNHRPVAGDSELAEGVKRLARAHQSAIWNRQRQLNALRSSLREYYPGALVAFGGELASTDALAVLEIAPTPELGRGLPRSKIASALRKGGRQRNIERRPEEIQTALRAEYLEAPELIANAHGLVTRSTLTVIATFNAQIAELETALSEHFEQHPDAKVVLSLPGLGTVLGARVLGEFGDDRTRFSEAKSRKNYAGTSPVTKASGHSRVVLARFARNRRLGDACDQWAFCALTHSPGARIYYDQLRARGKTHRQALRQLANRLVGILHVCPERGVLYDELVAWPEDSELAA

SEQ ID NO: 19960 - protein, 400 aa, unidentified
  source 1..400: note = protein_93c2bbd
  REGION 10..164: note = RuvC_domain
  SITE 13: note = RuvC_P1
  SITE 62: note = RuvC_P2
  SITE 102: note = RuvC_P3
  SITE 104: note = RuvC_P4
  SITE 107: note = RuvC_P5
  REGION 270..356: note = Tnp_domain
  SITE 278: note = Tnp_P1
  SITE 308: note = Tnp_P2
  SITE 316: note = Tnp_P3
  SITE 317: note = Tnp_P4
  SITE 329: note = Tnp_P5
MSASHARIWVGIDAGKGHHWAVAVDADGETLFSTKVINGEAQILALVETARERAAEVRWAVDISGRASTLLLALLVAHGQQVVYVPGRTVNRMSGAYKGEGKADAKDARVIADQARMRRDFAPLDTPPELVSVLQVLTHHRADLIADRVRLINRLRDLLVGICPALERAFDYSAAKGPVVMLTEYQTPAALRRIGVKRLSIWLERRKVRGAGTVAAKAVEAAQAQQIALPGEKRAAKLVCDLAHQLLALDERIKDNDREIRETFRTDERAEIIESMPGMGPVLGAEFVAIVGDLSGYRDAGRLASHAGLAPVPRDSGRRTGNMHRPKRYNRRLRWLFYMSAQTAMMRPGPSRDYYLKKRGEGLLHTQALLALARRRVDVLWAMLRDKRLFTSTPPVTQAA

SEQ ID NO: 19961 - protein, 373 aa, unidentified
  source 1..373: note = protein_3d68b05
  REGION 8..154: note = RuvC_domain
  SITE 11: note = RuvC_P1
  SITE 58: note = RuvC_P2
  SITE 95: note = RuvC_P3
  SITE 97: note = RuvC_P4
  SITE 100: note = RuvC_P5
  REGION 227..312: note = Tnp_domain
  SITE 235: note = Tnp_P1
  SITE 265: note = Tnp_P2
  SITE 273: note = Tnp_P3
  SITE 274: note = Tnp_P4
  SITE 286: note = Tnp_P5
MPRYSTAFGMDVHLRSTTVCALDAETGEAVARRFRGNPWGEIAEWMSGFPGPSLAAYESGYLGFAPQRELSGLGVDCVVAAVSKVPRSAADLSSKNDRNDAARMAKAILSHDVTPVWVPSPEIEGLRDLAAAHDAATARLAAAKQRLLAFLARRGYAYGGTTPAGNPRRYWTYDFLRWLDKVRPADDGGIRALAALRNEVEAAAETRDDLLAEYRAAVAAGPLSAEVEALQSIKGCGFALAAAFASEVGDFSRFRSGRQVTSYFGLAPKQRSSADSVRLGGISGAGDALVRRLAVEGSWSYVQASHQPKLMPKGSGVPLEVRMHGRKGSERLLRRREEMLARGMPQAKANAATAAELVRWLWALGAMCREATE

SEQ ID NO: 19962 - protein, 407 aa, unidentified
  source 1..407: note = protein_daa6b70
  REGION 4..160: note = RuvC_domain
  SITE 7: note = RuvC_P1
  SITE 57: note = RuvC_P2
  SITE 97: note = RuvC_P3
  SITE 99: note = RuvC_P4
  SITE 102: note = RuvC_P5
  REGION 269..355: note = Tnp_domain
  SITE 277: note = Tnp_P1
  SITE 308: note = Tnp_P2
  SITE 316: note = Tnp_P3
  SITE 317: note = Tnp_P4
MIFVGVDWAEAHHDVHVQSEDGRRLSGGRLPEGVEGIARFHEMVGVHAQEPDEVVIGMETDRGLFVGALVAAGYQVFAVNPMSTSRYRDRHSTSGAKSDPGDAKVLADMVRTDRHNHRPVAGDSELAEAIKVLARAHQSMIWSRGRQTNFLRSTLREFYPAALVAFDNLTSGDALEVLRVAPTPTLGAGLSRSKIAAALKRGGRLRRVEQRAEEIQEALRTPQLQGSAIVATAMGTSVSATAAVIVTMNVQIAELTKELDAGFEQHPDAEVIRSLPGLGTILSARVLGEFGDEPNRYATAKCRKNYAGTSPITRASGTKRVVLARYARNMRLADAIYQWAFTSLTASPGARTFYDYRRAAGDTHHAALRHLGNRLVGILHGCLIHHTNYDENTAWGHRAEIELARAA

SEQ ID NO: 19963 - protein, 341 aa, unidentified
  source 1..341: note = protein_1a5d881
  REGION 7..148: note = RuvC_domain
  SITE 10: note = RuvC_P1
  SITE 53: note = RuvC_P2
  SITE 88: note = RuvC_P3
  SITE 90: note = RuvC_P4
  SITE 93: note = RuvC_P5
  REGION 209..299: note = Tnp_domain
  SITE 217: note = Tnp_P1
  SITE 247: note = Tnp_P2
  SITE 255: note = Tnp_P3
  SITE 256: note = Tnp_P4
  SITE 268: note = Tnp_P5
MDDATLVGIDLGKHSFHVHGQNGQGKAVFRKKVSRKQLIEFFATFHACTVAMEACAGSHHMARKLAALGHTVKLISPQFVRPFVKSNKNDFVDAEAICEAASRPTMRFVTPKTESQQTLSVLHRVRESIVRDRTRTVNQMHGFLLEFGVSLPVGKSVVKRLPAVLAGHELPPRLIAILERLHEHFKYLDEQIGELDQELARQLADDDVGQRLMSIPGVGPITASALAAEMGDGKQYGCSRDFAASVGLVPRQYSTGGKINLLGISRRGDKNVRRLLVLCARAYMRCLEKRTGRLAEWVRAMLTRRHSNVVACALANKLARTAWAIVARHTTFDAKVASPAA

SEQ ID NO: 19964 - protein, 345 aa, unidentified
  source 1..345: note = protein_8c1d0ee
  REGION 6..148: note = RuvC_domain
  SITE 9: note = RuvC_P1
  SITE 52: note = RuvC_P2
  SITE 87: note = RuvC_P3
  SITE 89: note = RuvC_P4
  SITE 92: note = RuvC_P5
  REGION 210..297: note = Tnp_domain
  SITE 218: note = Tnp_P1
  SITE 248: note = Tnp_P2
  SITE 256: note = Tnp_P3
  SITE 257: note = Tnp_P4
  SITE 269: note = Tnp_P5
MKRITIGLDIAKSVFQVHGEDSSGKIVLQKRLRRSQVLAFFAGLEPALIGIEACGSAHYWGRELRALGHDVRLIPAAYVKPFVRRNKNDARDAAAICTAVGRPDMRFVAIKSVESQASRGLERSRELLVRQHTQLMNSVRSQLAELGIVAAPGRRGFAELSQLVAVSDERIPAMLLSVLSLMLQQIDQLRVASAAIEAKIMAVAKADPAMRRLATIPGIGGLTAHAIVTAIGDGKQFASSRDFAAWCGLTPRGASSGLKRRQGGISRQGDIRLRKLLALGASTIIRSARSRADRATQWQRGILARRPVKVAVLAQAAKTARIAWAVLTAGTTYRQPAAAAQPQPV

SEQ ID NO: 19965 - protein, 250 aa, unidentified
  source 1..250: note = protein_970cf64
  REGION 61..136: note = RuvC_domain
  SITE 76: note = RuvC_P3
  SITE 78: note = RuvC_P4
  SITE 81: note = RuvC_P5
  REGION 172..240: note = Tnp_domain
  SITE 180: note = Tnp_P1
  SITE 209: note = Tnp_P2
  SITE 217: note = Tnp_P3
  SITE 218: note = Tnp_P4
MTKLALRHSHFGREKQKFPASFLKQQAFITGASKRAWLNTGSALHGSIRVRPAGSAKVSDLVAIGSRLIANGRLAKTDRVDAALLAKMGVLLELRADQPKSETLHDLKQLATARLALIKDRTAAKARLAATTHVLPSQQIKRRLKQIERDLSQVTEAIDAIVAADKDLAARAEILTSIPGIAKVTACAILTEMPELGHLSGKKAAALAGLAPISRQSGKWQARNASRAVAPASGAQSICQRLLLHASIQT

SEQ ID NO: 19966 - protein, 345 aa, unidentified
  source 1..345: note = protein_163b31a
  REGION 6..147: note = RuvC_domain
  SITE 9: note = RuvC_P1
  SITE 52: note = RuvC_P2
  SITE 87: note = RuvC_P3
  SITE 89: note = RuvC_P4
  SITE 92: note = RuvC_P5
  REGION 211..297: note = Tnp_domain
  SITE 219: note = Tnp_P1
  SITE 249: note = Tnp_P2
  SITE 257: note = Tnp_P3
  SITE 258: note = Tnp_P4
  SITE 270: note = Tnp_P5
MNITTIGIDLAKNVFQVHGADERGKAVLRKPLKRAQMMGFFVNLPPCLIGMEACGSAHFWARKLTELGHTVKLIAPQFVKPYVKTNKHDAADAEAICEAVTRPNMRFVPIKHAEQQALLGLHRARQGFVHARTAQVNQIRGLLTEFGLVIPQGMRFLAKRVPEILEDAENGLPGASRKLFSRLFEHFRELDRQAKELEAQIQVWHREDMKSRRLQTIPGIGPLTASALVASIGDASAFNNGRQLAAWLGLVPRQHSSGGKEQLLGISKRGDTYLRTLLIHGARAVLRHRHRHADQAEGWLARLAARRHPNIAAVALAHKNARIVWALLARGTAYQANYSKLAAAT

SEQ ID NO: 19967 - protein, 346 aa, unidentified
  source 1..346: note = protein_154c2a1
  REGION 8..147: note = RuvC_domain
  SITE 10: note = RuvC_P1
  SITE 53: note = RuvC_P2
  SITE 88: note = RuvC_P3
  SITE 90: note = RuvC_P4
  SITE 93: note = RuvC_P5
  REGION 210..295: note = Tnp_domain
  SITE 218: note = Tnp_P1
  SITE 248: note = Tnp_P2
  SITE 256: note = Tnp_P3
  SITE 257: note = Tnp_P4
  SITE 269: note = Tnp_P5
MEKITRIFIDTSKQIFQLHGVNAAEVVVLRKAVRRSQMLAVFGKLEPCVVGLEACGASHHWARVLRELGHEVKLIAPQHVKPYVKRNKNDGRDAEGGCEAMSRPTMEFVPVKTAQEQAGLMLLGVRERLVRTRTQLTNAIRGHAAELGLIAPRGLDKIEPLLARIADDESLPALARALFALQAAEHAELVARLKIVEAELVAWHRQNALSRRLAQIPSVGPVGAAMLALKTPDPKAFKSARHFAAWIGLTPKDHSTAGKLRLGRITRAGDEALRSTLVVGATAVIQQARAGRGRPSPWLVALLKRKPPKLAAVALANKVARIAWRMMATGQDYDPSRLTRPLAEAV

SEQ ID NO: 19968 - protein, 330 aa, unidentified
  source 1..330: note = protein_750bdba
  REGION 5..152: note = RuvC_domain
  SITE 8: note = RuvC_P1
  SITE 55: note = RuvC_P2
  SITE 95: note = RuvC_P3
  SITE 97: note = RuvC_P4
  SITE 100: note = RuvC_P5
  REGION 196..283: note = Tnp_domain
  SITE 204: note = Tnp_P1
  SITE 234: note = Tnp_P2
  SITE 242: note = Tnp_P3
  SITE 243: note = Tnp_P4
  SITE 256: note = Tnp_P5
MSVHVGIDIAAKSFDMVSRRDGKPSKVETFQQTPQGHAKVVKRLQALKPACVIMEATGIYYLDLAVTLVEAGLPVAVINPRSFRHFAELKLSGSKTDGLDAALLAEYGERMTPRRWVPPTRTQLALRDLGRQINRLTAARTQAKNRLHALQAKGATLPLLIDDEQEGIEWLDRRIQRLTQAAQSIIAECETLAAHHANMTAAIGIGDATAIALLAELCVLPKTLKAPQVSRYAGLDVRLTQSGTSVNRPARLSKAGNAYLRSALYMPVMSAVRHDPRAKAFYDALVARGKKRIQAQCAVMRKYLTGLWACMQNQTPFDSSLLFSDEHMNA

SEQ ID NO: 19969 - protein, 343 aa, unidentified
  source 1..343: note = protein_bc04d5d
  REGION 6..147: note = RuvC_domain
  SITE 9: note = RuvC_P1
  SITE 52: note = RuvC_P2
  SITE 87: note = RuvC_P3
  SITE 89: note = RuvC_P4
  SITE 92: note = RuvC_P5
  REGION 211..298: note = Tnp_domain
  SITE 219: note = Tnp_P1
  SITE 249: note = Tnp_P2
  SITE 257: note = Tnp_P3
  SITE 258: note = Tnp_P4
  SITE 270: note = Tnp_P5
MDIASIGIDLGKTTFHLVALDRQGTVVVRKKFSRPQLLAYTANLPHSLTGMEACSGAHFLGAALRDQGHDVRLIPAQFVKPFVKSNKNDFIDAEAIAEAVTRKNMRFVPIKTNDQLDLQALHRVRDRLVQRRTAVINQIRGFLLERGIIFAQGRTKLRDHMPGILEDAEPNLTPRLRHLLHHLWQEWKQLQADIEAVSEQIERICAGDAACQRLRQIPGVGPLVATATVAAIGNGAAFHKGREFAAWLGLVPRQHSTGDKAKLGSISKRGNRYLRRLFVHGARAVLLRVRYDTGGFGRWVHQLAARTARNKVIVAIANKLARITWAVLSKGVDYRHAPLGQQM

SEQ ID NO: 19970 - protein, 345 aa, unidentified
  source 1..345: note = protein_d76dd83
  REGION 1..107: note = RuvC_domain
  SITE 3: note = RuvC_P2
  SITE 43: note = RuvC_P3
  SITE 45: note = RuvC_P4
  SITE 48: note = RuvC_P5
  REGION 214..299: note = Tnp_domain
  SITE 222: note = Tnp_P1
  SITE 252: note = Tnp_P2
  SITE 260: note = Tnp_P3
  SITE 261: note = Tnp_P4
  SITE 273: note = Tnp_P5
MIDQPGSIAQLAIAVAACRQVPVAYVPGLVMRRAADLYPGEAKTDRRDAFVIADTARTRRTKVHWLDTGSDELLEQLRVLNGFDIDLAADVTRLTNRLRDLLVSVSPALERAIGSRLHQPGVRALIAKFPTPTALRGAGRARINKTIKGRSPRLADKVTTTIIEALDAQTIVLPAEDALGRVIAEVATELDRLHARRDALAGEIEEVFGAHPFGKLLQTLPGIGPRTGARILAEIGDGSRFADASKLASYAGLVPVTRQSGTSIRGESMSRRGNHRLKNAMFLAAFASLRSPESKAFYDRKRAEGKKHNAALICLARRRTGVILAMLRDQQPYRPPTTPELTEAA

SEQ ID NO: 19971 - protein, 317 aa, unidentified
  source 1..317: note = protein_07cfdc0
  REGION 6..147: note = RuvC_domain
  SITE 9: note = RuvC_P1
  SITE 52: note = RuvC_P2
  SITE 87: note = RuvC_P3
  SITE 89: note = RuvC_P4
  SITE 92: note = RuvC_P5
  REGION 210..298: note = Tnp_domain
  SITE 218: note = Tnp_P1
  SITE 248: note = Tnp_P2
  SITE 256: note = Tnp_P3
  SITE 257: note = Tnp_P4
  SITE 269: note = Tnp_P5
MTHTIVGVDIAKNVMQVHWVDQETGEIVNRPVKRAAFLEYFANRNACLIGMESCSGSQHWARRLIEMGHQVKLMPAKFVKTFNIRNKNDAADARAIWMATQMTSKAVAVKTEAQQAVLALHRMRQQLVKFRTMQINSLRGLLSEYGEVMGVGRTALDKAVAGVLERLAGRLPAILIDTLREQWKGLDDLDRQIGQIERRLREWMKDDQAAKAIAVIPGVGLLTATAAVATMGHAKAFKSGREFAAWLGLVPGQTGSGGKVELLGISKRGDTYLRTLLVHGARSIVYRVKAPGPWVEQMKKRRPLNVVIVAMAINSPG

SEQ ID NO: 19972 - protein, 345 aa, unidentified
  source 1..345: note = protein_d8a0764
  REGION 7..153: note = RuvC_domain
  SITE 10: note = RuvC_P1
  SITE 57: note = RuvC_P2
  SITE 92: note = RuvC_P3
  SITE 94: note = RuvC_P4
  SITE 97: note = RuvC_P5
  REGION 215..302: note = Tnp_domain
  SITE 223: note = Tnp_P1
  SITE 253: note = Tnp_P2
  SITE 261: note = Tnp_P3
  SITE 262: note = Tnp_P4
  SITE 274: note = Tnp_P5
MINATLIGIDLGKHCFFAHAHAHAQDARGTQIWRKKMTRKQLYACLATCPAAVLAMEACAGAHWLGRKGQSYGHQVRLIASQFVRPFVKGNKTDFADAEAICEAASRSTMRFVAVKTAEQQTLLALDRVRESLVRERKATSNQIHAFLLEFGIDLPIGALATTRLPVLLDEPRHALPPTMVALLLRLHQRYARWSQEIVELETQIKQQTLEDEAGQRLLTIPGIGPVTTSSLLAMAGDARAFKCGRDFAASLGLVPRQHLTCGQATLLGISKRGNKQLRSLLVQGARAVMRFAERRTDALGRWLRALLRRRHSNVVACALANKMARIVWAILAKGGEYRAQPAIA

SEQ ID NO: 19973 - protein, 350 aa, unidentified
  source 1..350: note = protein_2ef8b8a
  REGION 6..147: note = RuvC_domain
  SITE 9: note = RuvC_P1
  SITE 52: note = RuvC_P2
  SITE 87: note = RuvC_P3
  SITE 89: note = RuvC_P4
  SITE 92: note = RuvC_P5
  REGION 210..294: note = Tnp_domain
  SITE 218: note = Tnp_P1
  SITE 248: note = Tnp_P2
  SITE 256: note = Tnp_P3
  SITE 257: note = Tnp_P4
  SITE 269: note = Tnp_P5
MKETMIGVDLAKAVFQLHGASMTGELRYRKKLTRMQFQRFMADEAPSVVVMEACGSAHYWARELVKLGHDVKLIAPQYVRPFVKRQKNDSADAEAIVIAAQRPEMRFVAPKSEEQQAKAAMFRARERLVHQRTESVNALRAMLYEFGYAFQKGIGIIKRIEALLEDPNCDLPAVVRCECQDIVEQISEQTIRIDAKTRTAREMAATAATARLLQTMPGVGPITALALEAFAPPMQNFKCGRDFAAWLGLVPRQHSSGGKERLGRVSKAGQADIRRLLIIGAMSRLNWMGRKTIIDGSWLARMLARKPRMLVAIALANKMARGIWAMLTKNENYRDPAQADAALSTCAATT

SEQ ID NO: 19974 - protein, 318 aa, unidentified
  source 1..318: note = protein_7a617da
  REGION 7..156: note = RuvC_domain
  SITE 10: note = RuvC_P1
  SITE 54: note = RuvC_P2
  SITE 94: note = RuvC_P3
  SITE 96: note = RuvC_P4
  SITE 99: note = RuvC_P5
  REGION 193..277: note = Tnp_domain
  SITE 201: note = Tnp_P1
  SITE 230: note = Tnp_P2
  SITE 238: note = Tnp_P3
  SITE 239: note = Tnp_P4
  SITE 250: note = Tnp_P5
MSDSVFIGIDVSSQTLEVASSDQAKTWQLANDASGIAQLVSQISALAPALVVLEATGGYEFEAACALQAAGLAVAVVNPRTARDFARAMGALAKTDALDARMLASFARVLHQHPQRERFVKPLADGELQQLQALVLRRRQLVQMLTAERQRLRLAHVAARPSIERFIEFLKQELGDSDAQVACHVQRHHAELAQVLTSVPGIGSASVAVLLAELPELGKLDRRRIAALVGVAPLNRDSGKMRAQRSIWGGRADVRRTLYMATLVAVRFNPVLKACYERLLAAGKRKKVALVACMRKLLTMLNAIAKHSCAWNPTLHNA

SEQ ID NO: 19975 - protein, 342 aa, unidentified
  source 1..342: note = protein_6b94d47
  REGION 7..149: note = RuvC_domain
  SITE 10: note = RuvC_P1
  SITE 53: note = RuvC_P2
  SITE 88: note = RuvC_P3
  SITE 90: note = RuvC_P4
  SITE 93: note = RuvC_P5
  REGION 212..296: note = Tnp_domain
  SITE 219: note = Tnp_P1
  SITE 249: note = Tnp_P2
  SITE 257: note = Tnp_P3
  SITE 258: note = Tnp_P4
  SITE 270: note = Tnp_P5
MEEVSIIGLDLAKNVFQAHGAAPDGSVVFRRKLTRGQVLKFFAAQPSRTVAMEACAGAHHWARAIGALGHRVRLVAPGYVKPFVKRQKNDTADAEAIVEAALRPTMRFVAPKTEAQQAAAMAFRTRDLLVRQRTQTINALRGHLAEYGVVAPAGSVHIGRLIAVIEGESGVLPRPVVKLAAMLVKQIMTLSEEIGVLEKELRARASSDETIVRLMTIPGIGAITAAAMTTFAPPAETFTKGRDFAAWIGLTPRQHSTGGKERLGRTSKMGQRDLRRLLIIGAVAVVRWAARRGAPKGSWLGRMMAKKPRMLVAVALANRMARVAWALMAKGGVYRDPAVAAA

SEQ ID NO: 19976 - protein, 312 aa, unidentified
  source 1..312: note = protein_cb97cba
  REGION 6..152: note = RuvC_domain
  SITE 9: note = RuvC_P1
  SITE 53: note = RuvC_P2
  SITE 93: note = RuvC_P3
  SITE 95: note = RuvC_P4
  SITE 98: note = RuvC_P5
  REGION 189..273: note = Tnp_domain
  SITE 197: note = Tnp_P1
  SITE 226: note = Tnp_P2
  SITE 234: note = Tnp_P3
  SITE 235: note = Tnp_P4
  SITE 246: note = Tnp_P5
MAKDTIGIDVSKDRLDAFWHSRSEARRLPNTEEGFGQLCDWLGEEEGVLIVFEATGAYHRGLERHLSRAGRPFIKVNPKQARRFAQAIGRLAKTDSVDARMLARMGVVLDLAPQDVEGEDVHDLRELLTARRALVKDQVTAKTRLATAINPLVREQICRRIDDIAADIHALDEVIAQIAKQRGTLEGRIRRLMTIPGIGRLTATTMLIDMPELGYLDSKKITALAGLAPMTQQSGKWQGKERITGGRSSIRRAIYMPALVAIRFNRDLRDKYQQLVSAGKAKKVAITAVMRRMLVLANTLLRDARDWQPERP

SEQ ID NO: 19977 - protein, 412 aa, unidentified
  source 1..412: note = protein_0d43c03
  REGION 4..160: note = RuvC_domain
  SITE 7: note = RuvC_P1
  SITE 57: note = RuvC_P2
  SITE 97: note = RuvC_P3
  SITE 99: note = RuvC_P4
  SITE 102: note = RuvC_P5
  REGION 274..361: note = Tnp_domain
  SITE 282: note = Tnp_P1
  SITE 312: note = Tnp_P2
  SITE 320: note = Tnp_P3
  SITE 321: note = Tnp_P4
  SITE 334: note = Tnp_P5
MNAVGIDVSKGKSMVSVIRAFGELVAKPYEVRHTSSELSELASTLKSLEGETRVVMEHTGRYYEPVAQLLHDAGVFVSAVNPLLIKEYGNNSLRKVKTDKADSLKIARYGLDNWAELRQHTPMDTIRYQLKTMNRQYGLYTKNKTAIKNNLIALLDQTYPGVNALFDSPTRADGSQKWVDFAASFWHVDCVRGMSLSAFTERYRKWCKRHGYNFSAAKAAQIHTEAKEMIAMLPKDALSKVMVQEAITQLNTVSKTVEVFRAEMNRLAKELPEYDVVMGLYGTGKSLGPQLMAEIGDVRRFAHKGSLTAFAGVDPGANQSGTYEAKSTRSSKRGSPELRKTLFVLMTVLLQNAPPDDPVFQFLDKKRAEGKPYYVYMTAGCNKFLRVYYGRVKEYMNTLNESVDMDSTGLSR

SEQ ID NO: 19978 - protein, 345 aa, unidentified
  source 1..345: note = protein_aa4926b
  REGION 19..168: note = RuvC_domain
  SITE 22: note = RuvC_P1
  SITE 69: note = RuvC_P2
  SITE 109: note = RuvC_P3
  SITE 111: note = RuvC_P4
  SITE 114: note = RuvC_P5
  REGION 210..297: note = Tnp_domain
  SITE 218: note = Tnp_P1
  SITE 248: note = Tnp_P2
  SITE 256: note = Tnp_P3
  SITE 257: note = Tnp_P4
  SITE 270: note = Tnp_P5
MTVLNIKKNNHEAKLSLQAGIDVGSEELILVIRKNSKPFNPQKFSNTPADRARLVKKLVKLPGIIVCLEATGIYHFDLSIALHDAGVSLMVVNPKASHNFAKVLMKNSKTDAVDANTLAEYAERMDFVAWTRPSDEKIALRCFSRRINALTHQKAAAKNHLHALTATQATPKAVLRDAKLAITHLQKRIDRLKAEALVLIGKHSELERVLELLTGINGIAETSAIALMGELLLLPPDLSHREWVKFAGLDPRAFDSGKSVHKKTRIAKAGNRYIRAALYMPALSAHQHDPHVGAYFQHLVVDNGKEKMQALCAVMRKLLHAIHGMLKHDKPFDNTRFYAIPAVVG

SEQ ID NO: 19979 - protein, 344 aa, unidentified
  source 1..344: note = protein_bd7cf26
  REGION 7..148: note = RuvC_domain
  SITE 10: note = RuvC_P1
  SITE 53: note = RuvC_P2
  SITE 88: note = RuvC_P3
  SITE 90: note = RuvC_P4
  SITE 93: note = RuvC_P5
  REGION 212..300: note = Tnp_domain
  SITE 220: note = Tnp_P1
  SITE 250: note = Tnp_P2
  SITE 258: note = Tnp_P3
  SITE 259: note = Tnp_P4
  SITE 271: note = Tnp_P5
MESITTVGIDLAKSVFQIHAIDAAGKVVVSRAIRRRDFMAFMNRLPPCLIGMEACASSHHWARQLKAMGHEVRLIPPAYVKAYVRRQKNDAADAAAICEAVTRPSMRFVPVKTEARQAALMMHRTRALLVSQRTALICALRGHLAEFGLVSPSGPRHLTPLLELFASEEDDSLPCQARRALWPLVDQLRSLECQIEGLDRQVLEQHRSDETSQRLATIPGIGPLTASALAASVTDPAMFASGREFAAFLGLAPRQASSGGKERLGPISKMGDRYLRTLLVVGAASVLRHPRTSPSAMKTWAVGLLEKKPFKLAAVALANKMARVAWAIMTRGETFRDGVPAVAD

SEQ ID NO: 19980 - protein, 322 aa, unidentified
  source 1..322: note = protein_902cc66
  REGION 7..149: note = RuvC_domain
  SITE 10: note = RuvC_P1
  SITE 53: note = RuvC_P2
  SITE 88: note = RuvC_P3
  SITE 90: note = RuvC_P4
  SITE 93: note = RuvC_P5
  REGION 212..285: note = Tnp_domain
  SITE 220: note = Tnp_P1
  SITE 250: note = Tnp_P2
  SITE 258: note = Tnp_P3
  SITE 259: note = Tnp_P4
MEAAVTIGLDLGKSVFQVHGVDQRGAVMVQRRLTRARLLAFFAKQPACLVGMEACAAAHHWGRELQKLGHRVKLMPPRYVKPYVKRQKNDAADAEVICEAVTRPNMRFVEIKTCEQQGVLVLHRVRLMLMRQRIALSNAIRGHMAEYGLVAPVGRNGLQGLIEFIADVHDERLPAMARSFLVNLVSQLQLVNEQVLENDRRVRVTARSTDIGRRLMEVPGVGPVLASAIVASVPDPTAFRSGRDLAAWIGLVPKQNSSGGRRSWAASPSRVIAIYSSCWSSARCPSSVTPRSTERGDPGWLHCSPGDHPRSRQSLWPTRWQE

SEQ ID NO: 19981 - protein, 344 aa, unidentified
  source 1..344: note = protein_1f1840e
  REGION 5..149: note = RuvC_domain
  SITE 8: note = RuvC_P1
  SITE 54: note = RuvC_P2
  SITE 90: note = RuvC_P3
  SITE 92: note = RuvC_P4
  SITE 95: note = RuvC_P5
  REGION 210..295: note = Tnp_domain
  SITE 218: note = Tnp_P1
  SITE 248: note = Tnp_P2
  SITE 256: note = Tnp_P3
  SITE 257: note = Tnp_P4
  SITE 269: note = Tnp_P5
MSMYVGMDVHRKRSQVAIVDDLGVPQRNRNLPNDPAKLVSVLGGLPPGTPVAFEAAYGWGWLVELLEELELEPHLVHPSRCKAIAAARLKNDKVDAATLAQLLRADLLPEAWIAPPQIRDLRALLRHRASLVRLSTSCKNRVHAVLADRGIGEDRILWTGPGRAWLASLELPAIPRAIIEDCCGLLDALAPPIARLEQEIAGLAKPDPRVQALMALPGVGRLTAMTLVAEIGDIDRFPTARKLCAWAGLTPAVRNSDRKVRHGHITKQGSVWVRWILQEAAQTAKKSPMFAGAYAQLVRRRGKQIATVAIARRLLARGFHILKEVQTATTTTGEGQTGCARNTA

SEQ ID NO: 19982 - protein, 342 aa, unidentified
  source 1..342: note = protein_a0c96c1
  REGION 7..149: note = RuvC_domain
  SITE 10: note = RuvC_P1
  SITE 53: note = RuvC_P2
  SITE 88: note = RuvC_P3
  SITE 90: note = RuvC_P4
  SITE 93: note = RuvC_P5
  REGION 211..296: note = Tnp_domain
  SITE 219: note = Tnp_P1
  SITE 249: note = Tnp_P2
  SITE 257: note = Tnp_P3
  SITE 258: note = Tnp_P4
  SITE 270: note = Tnp_P5
MSKIVTVGLDVAKNVFQVHGADETGRAVLRRKLRRDHVLSFFSQLPRCIVAMEACGGAHFWGREIGRLGHEVRLISPAYVKPFVKRQKNDAADAEAICEAVTRPTMRFVPVKSEETQGAAMRFRVRELLIRQRTQIINALRGHLAEFGQIVPQGAANVSRLVAIIESPESDLPADAITTLGVLVTVLTNLEAGIGKLDAEIAHRARENEVARRLMTVPGIGPLIATAIAVLAPPPQTFRKARDFAAWLGLTPRQHSTGGKQRLGSTTKMGERSLRRLLIIGANSVIIKRRVHAEARPGTWLGAMLTRKPPLLVRVALANKMARIVWALMVRGGVYQSPAAAA

SEQ ID NO: 19983 - protein, 341 aa, unidentified
  source 1..341: note = protein_cf368de
  REGION 7..148: note = RuvC_domain
  SITE 10: note = RuvC_P1
  SITE 53: note = RuvC_P2
  SITE 88: note = RuvC_P3
  SITE 90: note = RuvC_P4
  SITE 93: note = RuvC_P5
  REGION 210..295: note = Tnp_domain
  SITE 218: note = Tnp_P1
  SITE 248: note = Tnp_P2
  SITE 256: note = Tnp_P3
  SITE 257: note = Tnp_P4
  SITE 269: note = Tnp_P5
MSEVSIIGLDIAKSVFQVHGADASGRAVLRKKISRAKLLPFFASQPSCQVVLEACGGAHHWARELAKLGHEVRLIAPAYVKPFVKRQKNDAADAEAICEAAQRPSMRFVPVKTEAQQAAALVFRARDLLVKQRTQISNAVRGHMTEHGWIAPQGLAHMKKLAALLEDPSAVPESARPVLEIMLDQMAVLSERIAELDREIARRAREDDTARRLMTIPGIGPITATAITALAPPPGTFAKGRYFAAWVGLTPRQHSTGGKQRLGAISKMGERTLRRLLIIGSSAVVLQASRRGAPAGSWLEQMMARKPRMLVTVALANKTARIVWAVLTKNEDYRAPVSVAA

SEQ ID NO: 19984 - protein, 345 aa, unidentified
  source 1..345: note = protein_409f754
  REGION 6..148: note = RuvC_domain
  SITE 9: note = RuvC_P1
  SITE 52: note = RuvC_P2
  SITE 87: note = RuvC_P3
  SITE 89: note = RuvC_P4
  SITE 92: note = RuvC_P5
  REGION 211..297: note = Tnp_domain
  SITE 219: note = Tnp_P1
  SITE 249: note = Tnp_P2
  SITE 257: note = Tnp_P3
  SITE 258: note = Tnp_P4
  SITE 270: note = Tnp_P5
MEITTIGLDLAKNFFQIHGVDGAGRVVVRKALRRSQMLPFFSRLSPCLVGMEACGTSHYWGRELIRMGHQVRLMPPAYVKPYVKRGKTDANDAEAICEAVTRPTMRFVAVKTAEQQAALSIHRARDLLVKQRTQLVNMIRGLLAEFGIDIPRGLERALLKARQIADGEAPDVPAEAIKVVLTLSQQVLEIHVRVREMERDLQRWHRGNEVSQRLATIPGIGPIGASALVASVADPQQFRSGRQFAAWLGLTPLQKSSGGKERLGRITKMGDKYLRKLLIVGMTSLVRRAKYKPEMVDPRLAKWLAHKPVRVATVAMANKAARVVWAIMTGGDTYRAGHVPVLAAQ

SEQ ID NO: 19985 - protein, 393 aa, unidentified
  source 1..393: note = protein_5dc05ec
  REGION 4..157: note = RuvC_domain
  SITE 7: note = RuvC_P1
  SITE 58: note = RuvC_P2
  SITE 98: note = RuvC_P3
  SITE 100: note = RuvC_P4
  SITE 103: note = RuvC_P5
  REGION 263..353: note = Tnp_domain
  SITE 271: note = Tnp_P1
  SITE 301: note = Tnp_P2
  SITE 309: note = Tnp_P3
  SITE 310: note = Tnp_P4
  SITE 326: note = Tnp_P5
MQTIGIDVGKRQHIAAICHQGEREARKAVLRFSTDRAGLGQLEDWLARQGQITRAVLESSGHYHLNLAAALQRQGVPVAVVNPIESKYFGKRRLQRTTSDPADARTRALLAMVDQPEIRDVLTGAELREAARFAMALVDERGRVCQKITRLLELGFPELEQAYDDPTCTSALAVLRQAPTASAVARKRPATLALAARPGGGRAIGAKKAAQIQDLARATIAAPELAAQIGFQMRLRIAQYDLLTAQIAEAEAHLATLLDGELVRRLRTIPGVGPAICATLIAEIGDIRRFERFDQLVAYIGVHPAEKSSGQKGANPETSWRMSKAGNAYLRTALYQLAIVGIRHNPIIRAHYARKRAQGKSKVNAVGHCMKKGLAIVWGVWRSGEDFAAPETP

SEQ ID NO: 19986 - protein, 349 aa, unidentified
  source 1..349: note = protein_d62c74d
  REGION 12..154: note = RuvC_domain
  SITE 15: note = RuvC_P1
  SITE 58: note = RuvC_P2
  SITE 93: note = RuvC_P3
  SITE 95: note = RuvC_P4
  SITE 98: note = RuvC_P5
  REGION 217..302: note = Tnp_domain
  SITE 225: note = Tnp_P1
  SITE 255: note = Tnp_P2
  SITE 263: note = Tnp_P3
  SITE 264: note = Tnp_P4
  SITE 276: note = Tnp_P5
MLRNKPQPAAVFGIDIGKNVFHVVATDAGGRVIQKVKLRRDTLLQFFDAAQRTAVAMEACPGSQWLARKLQQLGHVVRVIPAQFVKPYVKSNKNDIIDAEAIAEAATRPAMRFVEIKLEAQVDIQALHRIRDQKVALRTQLVCQMRAFCLEYGIAIHQGIGKFKADFPRVLTDEGNDLTPMMRRTLRRLFEDFGHVEHRIAEITREIEALAASDERARRLMTVPGIGPLVATAFVASAGNASQFRRAKDLAAWLGLVPREHSTGGKTTLLGISKRGNHYLRRLLIHGARSCVMHLNRTSDRLGSWLTGLEKRMHANKVTVALAAKIARVAGVILTRPGSTYERRLPAFP

SEQ ID NO: 19987 - protein, 340 aa, unidentified
  source 1..340: note = protein_a6a2c9e
  REGION 7..149: note = RuvC_domain
  SITE 10: note = RuvC_P1
  SITE 53: note = RuvC_P2
  SITE 88: note = RuvC_P3
  SITE 90: note = RuvC_P4
  SITE 93: note = RuvC_P5
  REGION 212..298: note = Tnp_domain
  SITE 220: note = Tnp_P1
  SITE 250: note = Tnp_P2
  SITE 258: note = Tnp_P3
  SITE 259: note = Tnp_P4
  SITE 271: note = Tnp_P5
MGEVTTIGLDLAKHVFQVHGVDAEGATVLRKRLRRAQVVAFFSRLPRCVVGMEACGTAHYWARELRALGHEVRLMPAQYVKAYVKRNKNDAADAAAICEAVVRPTMRFVAVKTAEQQAAVLLHRGRERLVRQRTGLVNALRAHLAEFGIIAPQGLRNVGRLIAIVRDEDDARLPDLARQVLAVLAAQIEQLEGAVAAIEKQLMAWHKSNPVSQRLATIPGIGPIIATAIAATVTEPSGFRSGREFAAWLGLVPRQNSTGGKVRLGGISKRGNRYLRRLLINGACANLLRSKATNADPWVIGLRRRRPSLVVAVALANKTARIAWAVMQRKENYQRMAAAA

SEQ ID NO: 19988 - protein, 338 aa, unidentified
  source 1..338: note = protein_bc4ce60
  REGION 6..147: note = RuvC_domain
  SITE 9: note = RuvC_P1
  SITE 52: note = RuvC_P2
  SITE 87: note = RuvC_P3
  SITE 89: note = RuvC_P4
  SITE 92: note = RuvC_P5
  REGION 211..297: note = Tnp_domain
  SITE 219: note = Tnp_P1
  SITE 249: note = Tnp_P2
  SITE 257: note = Tnp_P3
  SITE 258: note = Tnp_P4
  SITE 270: note = Tnp_P5
MKLHAIGIDLGKTVFHVVGLNQAWEVQVRKKFSRTQLLRFTANAQVHLLGMEACAGSHFLGKALREQGHEARLMPAQYIKPFVKTNKSDFIDAEAIAEAVNRPSMRFVPIKTDEQLDMQSLHRVRERWIMRRTSVVNQIRGMLLERGITVRTGRCHLDAALPNILEDGSTSLSGTLRFLLLELKRELEQLAEHIEQAEILIQRAAQQSEACKRLDAIPGIGPLTATALIAAIGNGGAFRKGREFAAWVGLVPREHSTGGKQKLLGISKRGNSYLRKLFVQGARAVLRYRDKQCSGLKHWLAELSSRSHYNIVGVALANKLARMAWAVLASANQRRLGI

SEQ ID NO: 19989 - protein, 338 aa, unidentified
  source 1..338: note = protein_93dbfc3
  REGION 6..152: note = RuvC_domain
  SITE 9: note = RuvC_P1
  SITE 53: note = RuvC_P2
  SITE 91: note = RuvC_P3
  SITE 93: note = RuvC_P4
  SITE 96: note = RuvC_P5
  REGION 212..298: note = Tnp_domain
  SITE 219: note = Tnp_P1
  SITE 249: note = Tnp_P2
  SITE 257: note = Tnp_P3
  SITE 258: note = Tnp_P4
  SITE 270: note = Tnp_P5
MTIIAIGIDLAKNVFAVHGVDETGKAVLVRPSVKRDALVELVAKLPPCVIGMEACSGAHHWARQFQAHGHTVRIIAAKFVAPYRLSGRKGKNDAADAQAICEAVQRPHMRFVPIKSEHAQGQLSIHRVRQGFIETRTATINRIRGLLSEFGVVLPQKAEVVRREAGLRLEALPGWANTAIGDSLSELHHLDERIAEYDRHIEAMAKADDRGVKLMAMPGIGAKTASALLASVGNGHDFKCGRQLAAWLGLVPGQYSSGGKQRLGRITKAGDSYLRTLLILGARAVVAAGKNKTDRLSRWSQNVAERRGYWKAVVAVAAKNARMAWAMLSKGEAFKPLT

SEQ ID NO: 19990 - protein, 341 aa, unidentified
  source 1..341: note = protein_9984ea5
  REGION 7..149: note = RuvC_domain
  SITE 10: note = RuvC_P1
  SITE 53: note = RuvC_P2
  SITE 88: note = RuvC_P3
  SITE 90: note = RuvC_P4
  SITE 93: note = RuvC_P5
  REGION 210..296: note = Tnp_domain
  SITE 218: note = Tnp_P1
  SITE 248: note = Tnp_P2
  SITE 256: note = Tnp_P3
  SITE 257: note = Tnp_P4
  SITE 269: note = Tnp_P5
MKQFIRIGVDLAKNYFQVHAVANEGGPAVTRKLKRSKMHEFFAQIEPCLIGMEACGSAHYWARELETMGHEVLLMPPAYTKPYVKRGKNDAVDAEAICEAASRPGMRFVPIKSADQQATLMLHKTRELLVKQQTMSVNALRSHLSEFGIVVAKGIGRVDELLELAESDTTLPEIAKAAVKILAQHLEGLDKSIDDLEKQIGRVHAHSEMSRLLDQVPGVGKIIASVISASVPDPSVFKSGRDFAAWLGLTPRQNSSGGKQTLGGITKQGNRYVRKSLVLGATSLLRVVGKRKGALRDWVVALLAKKPARLVTVALANKLARIVWAMMKTGERFRAELFAKA

SEQ ID NO: 19991 - protein, 413 aa, unidentified
  source 1..413: note = protein_5921852
  REGION 5..167: note = RuvC_domain
  SITE 8: note = RuvC_P1
  SITE 64: note = RuvC_P2
  SITE 104: note = RuvC_P3
  SITE 106: note = RuvC_P4
  SITE 109: note = RuvC_P5
  REGION 275..361: note = Tnp_domain
  SITE 283: note = Tnp_P1
  SITE 314: note = Tnp_P2
  SITE 322: note = Tnp_P3
  SITE 323: note = Tnp_P4
MRLFAGDDWAEDHHDIELMDVAGRRLAKARLPEGVAGIARLHAMVGEQLGEDAGEDDPGQVAVGIETDRGPWVAALIAAGYTVFAINPLQASRYRERHGVSEAKSDAGDAHVLADMVRTDSHQLRAVAGDSAQAAAVKVVTRTHKTLIWERTRHTQRLRHALRDYFPAALEAFEDLDAPDTLELLARAPDPASAARLTTAQISAALKRARRRDIAGKAQRIQAVLRSAHLGQPAVVTAAYAASSRALIAVLVTLDEQVKILQGQVEAYFGRHPDAEIITSQPGLGLVLGARVLAESGDDPARYASAKARKNYSATSPITRASGKKKAVVARYVHNDRLIDALRTKAFAALNASPGARAYYDCQRARGSAHNPALRQLANRLVGILHGCLKTRTLYDEPTAWPQHVAATEKTAA

SEQ ID NO: 19992 - protein, 338 aa, unidentified
  source 1..338: note = protein_b1984d6
  REGION 7..148: note = RuvC_domain
  SITE 10: note = RuvC_P1
  SITE 53: note = RuvC_P2
  SITE 88: note = RuvC_P3
  SITE 90: note = RuvC_P4
  SITE 93: note = RuvC_P5
  REGION 212..299: note = Tnp_domain
  SITE 220: note = Tnp_P1
  SITE 250: note = Tnp_P2
  SITE 258: note = Tnp_P3
  SITE 259: note = Tnp_P4
  SITE 271: note = Tnp_P5
MSEITTVGLDLAKNVFHAVCLDRHGGEVRKKVLRRARVLEWFANLTPCLVGMEGCAGSHYWARELQALGHEVRLIPAQHVKAYVRGQKNDYNDARAIAEAVVRPGMRFVAIKEQVQQDVQALHRMRAGVVSERTALCNRLRGLLTENGIVLSQGIGRLRRHIPALLEDGENGLSGLFRELLARGYRQLCELDDHIEYYNGLIERGAREREAERRLRTIPGFGPVLASAFHGAVGDGQGYRRGRDVSASLGVVPRQHSSGGKAVLLGISKRGDGYLRSLLVHGARSVVLRAPGKEDRLSRWVQRLVAERGVNKATVALANKLARIGWAVLRHNTVYQPA

SEQ ID NO: 19993 - protein, 347 aa, unidentified
  source 1..347: note = protein_f026421
  REGION 7..149: note = RuvC_domain
  SITE 10: note = RuvC_P1
  SITE 53: note = RuvC_P2
  SITE 88: note = RuvC_P3
  SITE 90: note = RuvC_P4
  SITE 93: note = RuvC_P5
  REGION 212..305: note = Tnp_domain
  SITE 220: note = Tnp_P1
  SITE 250: note = Tnp_P2
  SITE 258: note = Tnp_P3
  SITE 259: note = Tnp_P4
  SITE 271: note = Tnp_P5
MNNVATIGLDLAKQVFQVHGADVEGTPLFNRKLRRNEVLRFFAKLPPCLVGMEACGSAHHWAREIAAFGHDVRLIPAQYVKPFVKRGKTDAADAEAISEAVTRKTMRFVPIKSAEQQASVMVFRTRALLVRQRTQAINALRAHMGELGIIATTGIANIKPLAAIVRDESDARLPPAARFALEEIVDQIDRLAARIEKLEREIIVVAKQDEDMRRLATIPGVGAITAMAIKAFIPDPAGFKSARHFAAWIGLTPKSHSSGGKQRLGRISKMGNSQLRSLLVVGAASILRHVRSDDKTRPWLRELMARRPYKVVSVALASKTARMIWALLVRGGTYRGPTRLAAESVPS

SEQ ID NO: 19994 - protein, 346 aa, unidentified
  source 1..346: note = protein_e04ab21
  REGION 5..153: note = RuvC_domain
  SITE 8: note = RuvC_P1
  SITE 55: note = RuvC_P2
  SITE 93: note = RuvC_P3
  SITE 95: note = RuvC_P4
  SITE 98: note = RuvC_P5
  REGION 213..301: note = Tnp_domain
  SITE 221: note = Tnp_P1
  SITE 251: note = Tnp_P2
  SITE 259: note = Tnp_P3
  SITE 260: note = Tnp_P4
  SITE 272: note = Tnp_P5
MKYYAGLDVSVKETSVCIVDETGKICRERKVVSHPDDLISLLGDPQWHFERVGLEAGPLSQWLYEGLAKAGLPVICIETRHTKSFLKAQQPNKSDRNDARGIAQMMRVHLFKPVHVKTLTSQKRRALLTARKLLQEKAIAIENDIRGLLRNFGLKVGMVGAVQYEERIRELIEGLSDLAVVIEPLLAARRKLREEFAGLDHKVREIVHDDPVCQRLMTVPGIGPIVSLAYVATIDIPDRFRSSRSVGAMIGLTPLLNQSGESKRIGHVTLCGDNMLRGLLYEAAQVLLTRVTKWSWLKAWAMNVAKRRGGRKAIVALARRLAVILHRIWSDGSEFHWTKEAAAIAA

SEQ ID NO: 19995 - protein, 326 aa, unidentified
  source 1..326: note = protein_8c40feb
  REGION 4..155: note = RuvC_domain
  SITE 7: note = RuvC_P1
  SITE 60: note = RuvC_P2
  SITE 100: note = RuvC_P3
  SITE 102: note = RuvC_P4
  SITE 105: note = RuvC_P5
  REGION 200..286: note = Tnp_domain
  SITE 208: note = Tnp_P1
  SITE 237: note = Tnp_P2
  SITE 245: note = Tnp_P3
  SITE 246: note = Tnp_P4
  SITE 259: note = Tnp_P5
MFFIGIDVSKAKLDCSLLLDVASSKRRAKSVANSKAGISELLVWCVKQQVATHELHAILEGTGVYHEQAALALADAGATVSIVNPAQVKDFGRSLGVRTKTDGVDSLVLARFGAMLSPRPWTPPTQEARVLQALLSRREAIAQDLQRERNRLEKADATDTPALIRQSIVTSITFLEQQLAKFQQDIDEHINKYPHLKADRDLLISIPAVGPQVGNHLLVVMHTHQFQSAEQLAAYLGLVPVERQSGTSVLGRPRLSKAGPARIRAILYMAAVVGTQYNPHIKALYQRLQDRGKTKMSALGAAMRKLVHLCFGVLKTRQPYQANYAI

SEQ ID NO: 19996 - protein, 394 aa, unidentified
  source 1..394: note = protein_9d1655e
  REGION 9..150: note = RuvC_domain
  SITE 47: note = RuvC_P2
  SITE 87: note = RuvC_P3
  SITE 89: note = RuvC_P4
  SITE 92: note = RuvC_P5
  REGION 265..351: note = Tnp_domain
  SITE 273: note = Tnp_P1
  SITE 303: note = Tnp_P2
  SITE 311: note = Tnp_P3
  SITE 312: note = Tnp_P4
  SITE 325: note = Tnp_P5
MSYRSDPYIRVTKIVLLPFDVEHTAEGLKKLSTKLRQLDGEIRIVMEHTGMFWRTIAMTLKEAGFYVSVVNAILIHNFSDNSIRKVKTDRADAMKIANYGLTFWIDLQEYAGEDETRQLLKIQSQLYERTATTAWILRNGLISLLDQTFPGANKLFRDESRNSKGHVKWIDFVLRFWHKECVAALSLAAFTDTFQKCCKRTGYKFSASDAERIHAIVRNAVSTLPKNDSTKLLITQATNSLNAIYDSLQAIRTEMDRLASMLPEYELVMGMEGIGKVTGPQLMAEVGDVRRFSHKGALVAYAGVDASPYQSGSFDSKSRHVPKRGSPHLRRVLFVIMSMTLIRANTANPVFCFMDKKRAEGKHFYVYTVAGSAKFLRIYYAKVKEYLNALEETA

SEQ ID NO: 19997 - protein, 263 aa, unidentified
  source 1..263: note = protein_f440047
  REGION 1..65: note = RuvC_domain
  SITE 5: note = RuvC_P3
  SITE 7: note = RuvC_P4
  SITE 10: note = RuvC_P5
  REGION 129..217: note = Tnp_domain
  SITE 137: note = Tnp_P1
  SITE 167: note = Tnp_P2
  SITE 175: note = Tnp_P3
  SITE 176: note = Tnp_P4
  SITE 188: note = Tnp_P5
MKTNKNDYIDAEACSEAVTRPTMRFVPIKTDDQLDLQSLHRVRERWVVRRTAVINQMRGMLLERGITIRKGRHYIEESLPAILEDPDNKLSGALRVLLTQLRMEMQYLHGQIEETDNLIERICGELEQCRRLVAIPGIGPITATATVAAIGNGAAFKKGRGFSAWLGVVPGEHSTGGKQKLTGTSRRGNKYLRKLFVQGAHTVLLQKTKQSSGLSTWLVSLTSRKRKQVATVALANKMARMAWAVLFRGEAYRPPTAPQVIAA

SEQ ID NO: 19998 - protein, 342 aa, unidentified
  source 1..342: note = protein_c036047
  REGION 6..148: note = RuvC_domain
  SITE 9: note = RuvC_P1
  SITE 52: note = RuvC_P2
  SITE 87: note = RuvC_P3
  SITE 89: note = RuvC_P4
  SITE 92: note = RuvC_P5
  REGION 210..296: note = Tnp_domain
  SITE 218: note = Tnp_P1
  SITE 248: note = Tnp_P2
  SITE 256: note = Tnp_P3
  SITE 257: note = Tnp_P4
  SITE 269: note = Tnp_P5
MKDTMIGVDLAKNVFVLHAATMAGEVRYRKKLSRGQFLRFLSEQPPAIVIMEACGSAHYWARELVKVGHEVRLIAPQYIRPFVKRQKNDAADAEAIVIAARQPEMRFVPPKTADQQARAVLFRARERIVRQRTELVNALRAVLYEYGQAIPQGIAHIQRIEAIVERAEIDLPELVREECRDLLAQIDEKTARIKEKAKKLVDLSRQSGIAHRLQTMPGVGPLVALAVEAFAPAMENFRCGRDFAAWLGLVPRQFSSGGKERLGRVSKAGQADIRRLLIIGAMTCVSWAGRKPPVHGSWLSRMLAKKPKMLVAIALANKMARNIWAMLTKQEDYRDPALAIMA

SEQ ID NO: 19999 - protein, 392 aa, unidentified
  source 1..392: note = protein_0574cd6
  REGION 4..163: note = RuvC_domain
  SITE 7: note = RuvC_P1
  SITE 60: note = RuvC_P2
  SITE 101: note = RuvC_P3
  SITE 103: note = RuvC_P4
  SITE 106: note = RuvC_P5
  REGION 266..355: note = Tnp_domain
  SITE 274: note = Tnp_P1
  SITE 304: note = Tnp_P2
  SITE 312: note = Tnp_P3
  SITE 313: note = Tnp_P4
  SITE 328: note = Tnp_P5
MVCVGIDVAKDKHDCFILSSEGEVLADVFTIENNREGFDTLLQQIRSCTGPTDKIKVGLEATGHYSYNILGFLLEKGMPPYLINPLHTNLYRKSLSLRQTKTDRIDARTIATMLMSDVDLKSYTDTAYHNEELKSLTRYRFDKVSERAKLKQSVSRLVVILFPELEKLVPSLHLASVYAMLSQFPSAKQIAQAHLTHFKAVLSEASKGRYEREKAVEIRDAARRSVGSVMPAKSLELRHTICLIQELDKEIEEVEAEIFAILDTVQSPITTIPGMGPRMGAMILAEVGDFSRFDSPDKLLAYAGLSPSTYQSGKLNATGAYAHMEKRGSRYLRYAIFNATKYVCIWDPTFKAYLAQKRAEGKHYNVAISHAAKKLVRLIYAMQRTGKPYLPA

SEQ ID NO: 20000 - protein, 345 aa, unidentified
  source 1..345: note = protein_7548491
  REGION 7..149: note = RuvC_domain
  SITE 10: note = RuvC_P1
  SITE 53: note = RuvC_P2
  SITE 88: note = RuvC_P3
  SITE 90: note = RuvC_P4
  SITE 93: note = RuvC_P5
  REGION 209..297: note = Tnp_domain
  SITE 217: note = Tnp_P1
  SITE 247: note = Tnp_P2
  SITE 255: note = Tnp_P3
  SITE 256: note = Tnp_P4
  SITE 272: note = Tnp_P5
MENIALIGIDLGKNSFHIHCQDRRGKAVYRKKFTRSKVLEFLATCPATTIAMEACGGSHFMARKLAELGHFPKLISQQFVRPFDKTNKNDFVDAEAICEAASRPSIRFVQPRTKSQQAIRALHRVRESLVQGKVKTTNQMHAFLLEFSISVPRGSAVISRLSTILEDSSLPLYLSQLLLKLQQHYHYLVEQIKDLEAQLKRKLDEDEVAKRLLSIPCVGTLTASTISTEIGDGKQYGSRRDFAAAKRLVPRQYNTGGRTDGRTTLLGISKRGNKKIRTVLVQCARGFYTKTGAPVWQIDRLDPGVTVQEKQLCRDLCSGKQAGQNSLGTDSTAANLRGITRNTPI

SEQ ID NO: 20001 - protein, 342 aa, unidentified
  source 1..342: note = protein_40a6deb
  REGION 7..148: note = RuvC_domain
  SITE 10: note = RuvC_P1
  SITE 53: note = RuvC_P2
  SITE 88: note = RuvC_P3
  SITE 90: note = RuvC_P4
  SITE 93: note = RuvC_P5
  REGION 211..296: note = Tnp_domain
  SITE 219: note = Tnp_P1
  SITE 249: note = Tnp_P2
  SITE 257: note = Tnp_P3
  SITE 258: note = Tnp_P4
  SITE 270: note = Tnp_P5
MEEVRIIGLDLAKNVFQAHGAGADGSVVFRRKLSRGQLLKFLSEQPSCVVAMEACASAHHWGRTIGDLGHEVRLIPPAYVKLFVKRQKNDMADAEAIAEAASRPTMRFVAVKSEAQQAAAMAYRTRDLLVRQRTQTINALRAHLAEQGIVAPAGPAHIGRLAAIVEGDDDTLPAAVRDLARLLLGQIADLSEKITGLDVELRRRASVDDTARRLTTIPGVGPITAAAITTFAPPMETFSKGRDFAAWVGLTPRQHSSGGKERLGRTSKMGQRDIRRLLIIGAVAVVRWAARKGAPEGSWLARMLERKPKMLVAVALANRMARTAWALMRKGEDYRDPAMATV

SEQ ID NO: 20002 - protein, 345 aa, unidentified
  source 1..345: note = protein_ec8c29b
  REGION 6..147: note = RuvC_domain
  SITE 9: note = RuvC_P1
  SITE 52: note = RuvC_P2
  SITE 87: note = RuvC_P3
  SITE 89: note = RuvC_P4
  SITE 92: note = RuvC_P5
  REGION 211..298: note = Tnp_domain
  SITE 219: note = Tnp_P1
  SITE 249: note = Tnp_P2
  SITE 257: note = Tnp_P3
  SITE 258: note = Tnp_P4
  SITE 270: note = Tnp_P5
MELHTIGIDLDKTVFHLVGLNLQGEIAVRKKFSRTQLLRFTANIHVELMGMEACGGAHFLGRALREQGHEVRLIPAQYVKPFVKTNKSDYIDAEAIAEAVARPTMRFVPIKTDDQLDMQSLHRVRERWVMRRTAIINQIRGLLLERGISFRNGRRHVEAALPGILEDADAKLSGALRVLLAQLKMDLDQLGMRINEADAVIEKAAHQNDACRRLVAIPGIGPLTATALIAAIGNGGAFCKGREFAAWMGVVPREHSTGGQQKLLGISKRGNSYLRRLFVQGARAVMQQRTKQSSGLSAWLAQLTARTHRNVAAVALANKLARMAWAMLAKNEEYRPPVLADIAAA

SEQ ID NO: 20003 - protein, 347 aa, unidentified
  source 1..347: note = protein_1c127d5
  REGION 6..150: note = RuvC_domain
  SITE 9: note = RuvC_P1
  SITE 55: note = RuvC_P2
  SITE 90: note = RuvC_P3
  SITE 92: note = RuvC_P4
  SITE 95: note = RuvC_P5
  REGION 214..301: note = Tnp_domain
  SITE 222: note = Tnp_P1
  SITE 252: note = Tnp_P2
  SITE 260: note = Tnp_P3
  SITE 261: note = Tnp_P4
  SITE 273: note = Tnp_P5
MEIKRVGVDLAKNVFQVHGVNVHEKPVWKRSLRRGQWLQELQRRVAPGGAEIGMEACAGAHHWGRRLEALGYRVKLIAPQFVKPYVKSNKSDRNDAEAICEAMSRPSMRFVEVKSVEQQDIQAVHRVRAELVKQRTAKVNQIRGLVGEYGLVAPQGVSQVRKALPQWLEDASNGLSDRFRRLLSGLAEDLRGLEGRIEELDEQIEAIVQETPAARRLLALRGVGPTTATALVAALGCGRSFTRGREFAVAMGLTPKHHGTGGKERILGISKRGDAYLRQLLVHGARSAVRAARGKDDPLSRWIRGLLVHKHSNVVTVALANKTARMAWALIRHDVDYDAELAAHPSC

SEQ ID NO: 20004 - protein, 345 aa, unidentified
  source 1..345: note = protein_72cb42b
  REGION 7..149: note = RuvC_domain
  SITE 10: note = RuvC_P1
  SITE 53: note = RuvC_P2
  SITE 88: note = RuvC_P3
  SITE 90: note = RuvC_P4
  SITE 93: note = RuvC_P5
  REGION 213..298: note = Tnp_domain
  SITE 220: note = Tnp_P1
  SITE 250: note = Tnp_P2
  SITE 258: note = Tnp_P3
  SITE 259: note = Tnp_P4
  SITE 271: note = Tnp_P5
MEEMTTVGLDIAKQVFQVHGIASDGRVVVRRSLRRSEVLRFFSKLSRCVVGLEASGGAHHWAREIGVFGHDVRLIPPSYVKPYVKRGKTDAIDAEAICEAVSRPTMRFVPVKTIACQASQMALKSRDLLVRQRTQTINALRGHLAELGIVAAKGLAKADTLAAIVLDDTDERLPMSARKALSVLVDQLRSLTDRIQQLERDIVADVRASQTGCRLTTIPGVGPITAATLQALAPDPAAFASGRHFAAWIGLTPRSNSSGGKERIGRISKMGNPALRSLLVAGATAVIMHARRGRPMSTWLRRLLERRPPKVVAIALASKMARIAWALLAKGGVYNRSLPAMAVTA

SEQ ID NO: 20005 - protein, 337 aa, unidentified
  source 1..337: note = protein_20faa72
  REGION 7..148: note = RuvC_domain
  SITE 10: note = RuvC_P1
  SITE 53: note = RuvC_P2
  SITE 88: note = RuvC_P3
  SITE 90: note = RuvC_P4
  SITE 93: note = RuvC_P5
  REGION 211..297: note = Tnp_domain
  SITE 219: note = Tnp_P1
  SITE 249: note = Tnp_P2
  SITE 257: note = Tnp_P3
  SITE 258: note = Tnp_P4
  SITE 270: note = Tnp_P5
MEEVTTIGLDLAKRVFQVHGADAKGRPVLQKRLRREDVLSFFAKLPPCIVGMEACASSHYWAREIRNLGHDARMIPASYVKPYVARQKNDAADAAAICEAVTRPAVRAAPIKTLAQQAARVVHRTHEILSRQRVSLINAIRSHMAEFGVIAAAGPQHVGSLVERISNSTTPLPDMVRAALSILADQLIALAKQINELEAQMRKHCRKEPEAARLLTIPGIGPITTSAILAGVPDIRGFKSGRDFAAWLGLVPRQNSSGGKERLGRITKMGDRTIRRLLVIGAMSTIRWSRSKENFAESWLGRIIARKPVKLAAVALANKMARIIWAVMTRQETYRAA

SEQ ID NO: 20006 - protein, 349 aa, unidentified
  source 1..349: note = protein_791a840
  REGION 12..153: note = RuvC_domain
  SITE 15: note = RuvC_P1
  SITE 58: note = RuvC_P2
  SITE 93: note = RuvC_P3
  SITE 95: note = RuvC_P4
  SITE 98: note = RuvC_P5
  REGION 217..302: note = Tnp_domain
  SITE 225: note = Tnp_P1
  SITE 255: note = Tnp_P2
  SITE 263: note = Tnp_P3
  SITE 264: note = Tnp_P4
  SITE 276: note = Tnp_P5
MIRNAPKEAAVFGVDLGKNLFHVVGLDERGSVIQRAKFRRDTVLAFFQRAAPTLVGMEACPGSQWFARKLQAFGHEVRIVPAQFVKPFVKSQKNDTIDAEAIAEAVTRPTMRFTQVRTVEQIDMQALHRMRDQLVSSRTRLINQARAFCLEYGIAMRQGVGTFRVDLPRVLADDSNDLSQAMRQMLAEVLDDIGHVDHRISSVTRQIEALADREDRARRLMTIPGIGPMAATALLAAVGDGRQFRRARELAAWLGLTPREHSTGGRTTLLGISKRGNRYVRKLLVHGARSCITHMNRTKDRIGDWLDALESRMHVNKVTVALAAKMARMAWAIIVRPGAIYDRRDPAVA

SEQ ID NO: 20007 - protein, 406 aa, unidentified
  source 1..406: note = protein_dd99d6d
  REGION 6..164: note = RuvC_domain
  SITE 9: note = RuvC_P1
  SITE 59: note = RuvC_P2
  SITE 101: note = RuvC_P3
  SITE 103: note = RuvC_P4
  SITE 106: note = RuvC_P5
  REGION 278..364: note = Tnp_domain
  SITE 286: note = Tnp_P1
  SITE 316: note = Tnp_P2
  SITE 324: note = Tnp_P3
  SITE 325: note = Tnp_P4
  SITE 338: note = Tnp_P5
MNMNAVGIDVSKRKSTIAVLRPGGEVLMKPFDIPHKSADFQTLVNKLKGLDGETRIVMECTGHYYEPVARELAQADFFVSAVNPQIINNFQGQDNPLRKVKTDKADSVKIARYTLDSWANLKQYTLMDELRSQLKTMNRQFDFYTKHKTAMKNNLIALIDQTYPGANTYFDSPARDDGSQKWVDFLDTYWHVDCVRKMSLNAFTDHYQKWCCRRKYNFSKAKAEEIYGAAKELIPVLPKDNFTKCIIKQAVAQVNAASQTAERLRALMNETASKLPEYPVVMAMKGVGPSLGPQLMAEIGDVTRFTHKGAVTAFAGVDPGVNDSGDYSRKSVHASKHGSPVLRKTLFQVMDILIKTKPDDAVYLFMNKKRTEGKPYYVYMTAGANKFLRVYYGKVKEYLSTLPQSN

SEQ ID NO: 20008 - protein, 322 aa, unidentified
  source 1..322: note = protein_c56f9df
  REGION 8..155: note = RuvC_domain
  SITE 11: note = RuvC_P1
  SITE 60: note = RuvC_P2
  SITE 100: note = RuvC_P3
  SITE 102: note = RuvC_P4
  SITE 105: note = RuvC_P5
  REGION 195..281: note = Tnp_domain
  SITE 203: note = Tnp_P1
  SITE 233: note = Tnp_P2
  SITE 241: note = Tnp_P3
  SITE 242: note = Tnp_P4
  SITE 254: note = Tnp_P5
MTQPTFFVGIDVAKAKFDVAVLTPEGKYRSKAFPNNPVGHQHFVDWLNQHGALEAHICLEATGAYGRGLARFLAQQQLLISVVNPAQIHAFGKTELARAKTDKADARLIARYCRMHCPAPWVPPTDEIVVLQALVQRREDLLALQNMESNRLESAEGLARQSIEVHLEFIDQQIQIVRAQIEIHIDNHPGLKKQQELLSSIPGIGDNTATTLLAFLSPLERFHSVKQVVAYAGLNPSIRQSGQWAGKTPIAKAGNALLRKALYLPAVVAKQHNPVIAAFCDRLLLNGKRPMQVVVAAMRKLLHLAFGVLKSGKPFDPKFGIA

SEQ ID NO: 20009 - protein, 345 aa, unidentified
  source 1..345: note = protein_7ab6127
  REGION 12..154: note = RuvC_domain
  SITE 15: note = RuvC_P1
  SITE 58: note = RuvC_P2
  SITE 93: note = RuvC_P3
  SITE 95: note = RuvC_P4
  SITE 98: note = RuvC_P5
  REGION 216..301: note = Tnp_domain
  SITE 224: note = Tnp_P1
  SITE 254: note = Tnp_P2
  SITE 262: note = Tnp_P3
  SITE 263: note = Tnp_P4
  SITE 275: note = Tnp_P5
MGKVHPMRQLTFGVDLAKNVFQVHAVDAAGVIVFQQKLRRGQFLTFFQKIEPSLIGMEACSAAHHWARELMAIGHDVKLMVPAYVKPYVKRGKNDAVDAEAICEAVTRPTMRFVPVKSSQQQSILMVHRSRALMVRQRTMLVNALRAHLAELGIVAPVGLERVADLVQRVFTERRDLPELVYDVVASLVKQIGCLTDEVRILEAKIKAWHRNSPTSRRLATIPGIGIITATALAATISDPSAFKSGRQLAAWLGLTPRSNSSGGKERLGRITKAGDRYLRTLLVVGATAVIRYARQKGGSPLMEWVRKLLQSKSPRLTSVALANKMARMAWAVMAHNTVYRRAIA

SEQ ID NO: 20010 - protein, 342 aa, unidentified
  source 1..342: note = protein_8b54a96
  REGION 4..157: note = RuvC_domain
  SITE 7: note = RuvC_P1
  SITE 55: note = RuvC_P2
  SITE 96: note = RuvC_P3
  SITE 98: note = RuvC_P4
  SITE 101: note = RuvC_P5
  REGION 219..304: note = Tnp_domain
  SITE 227: note = Tnp_P1
  SITE 257: note = Tnp_P2
  SITE 265: note = Tnp_P3
  SITE 266: note = Tnp_P4
  SITE 277: note = Tnp_P5
MTMIGIDPHKPTHTAVAVDGNEHVVDEFQLRASSHQAERLREWADRFAEREWAVESANGLGYLVAQQLVAAGEVVFDVPPVLASRVRVLDTIRSQNNDPNDARSVAIAAMRSDRLARVRPDDHARVLRLLAKRHRDMARLRNKHCTRLHALLLELEPGGISSEITVTKANTLLNGVTVADQVTRHRVMIAHELVDDIARLDVALKASKKRIEAAVVASGTTLTEIVGIGPICAAIIIGYTGDIGRFPTKGHFATYNATAPVDASSGPRPKHRLNQRGNRKLNHAIHIAAIAQLRFDTEGRAYYERKLAEGKSSKDAIRSLKRRISDRVYRHLNIDAQRAATS

SEQ ID NO: 20011 - protein, 336 aa, unidentified
  source 1..336: note = protein_9888471
  REGION 4..155: note = RuvC_domain
  SITE 7: note = RuvC_P1
  SITE 60: note = RuvC_P2
  SITE 100: note = RuvC_P3
  SITE 102: note = RuvC_P4
  SITE 105: note = RuvC_P5
  REGION 200..286: note = Tnp_domain
  SITE 208: note = Tnp_P1
  SITE 237: note = Tnp_P2
  SITE 245: note = Tnp_P3
  SITE 246: note = Tnp_P4
  SITE 259: note = Tnp_P5
MFQLGIDVSKKTLDLCLLREGVKGRVKTRKLKNDFNAASAVINWLCKQHVELTDVHIIMEATGVYHESLAYGLHKAGAMISLANPHLSREFARGMGILTKNDRVDAYMLACYSALKAPDAWIPPPGNIRHLSALLRRRDALVADSTREKNRLEKCRAADTPAVITESIENVLQSLSAELKHLDALIQDHLDQHPELKKNFELLTSIKSVGFQLSLNMLVILRSHHFETAEQADAFLGVVPVEKNSGTSVRGRGRLSKIGPPENRAKLYLASLCGMRFNPTMKAMYERLCQRGKAKMCAIGALMRKLVHWCYGVLKTQKPFDAEYRFSDEHSACKVT

SEQ ID NO: 20012 - protein, 354 aa, unidentified
  source 1..354: note = protein_f44c8ba
  REGION 12..153: note = RuvC_domain
  SITE 15: note = RuvC_P1
  SITE 58: note = RuvC_P2
  SITE 93: note = RuvC_P3
  SITE 95: note = RuvC_P4
  SITE 98: note = RuvC_P5
  REGION 217..302: note = Tnp_domain
  SITE 225: note = Tnp_P1
  SITE 255: note = Tnp_P2
  SITE 263: note = Tnp_P3
  SITE 264: note = Tnp_P4
  SITE 276: note = Tnp_P5
MSQKRNTAIAVIGIDIGKNSFHVVGLDQRGAIVLRQKWSRGQVETRLANIPPCLIGMEACVGAHHLSRRLKGLGHDARLMPAKYVRPYSKGQKNDFRDAEAIAEAVQRPTMRFVATKTAEQLDLQALHRVRERLVSQRTGVINQIRAFLLERGIAVRQGLRFLRAELPDLLATRTEVLSPRMVRVIEDLAGDWRWLDERIESLSTEIAALAHRDAACNRLMTVPGVGPIISSAMVAAIGTGDVFSKGRDFAAWLGLVPKQISTGDRTILGKISRRGNRYLRVLFVQAAWVVLIRPKSWERYGLKPWIEAAKKRLHHNVLAIALANKLARIAWAVLNKERNFECVSMDKMASRPT

SEQ ID NO: 20013 - protein, 284 aa, unidentified
  source 1..284: note = protein_4ff4ab3
  REGION 6..121: note = RuvC_domain
  SITE 21: note = RuvC_P2
  SITE 61: note = RuvC_P3
  SITE 63: note = RuvC_P4
  SITE 66: note = RuvC_P5
  REGION 157..242: note = Tnp_domain
  SITE 165: note = Tnp_P1
  SITE 194: note = Tnp_P2
  SITE 202: note = Tnp_P3
  SITE 203: note = Tnp_P4
  SITE 214: note = Tnp_P5
MIWLSRGLMSPRQKVGKAVMEASGGYERDWAKALRDAKIEVRIVDPKRVRSFAQSAGRLAKNDTIDAEMIAWFAETFDEARGQAYDATREQLHQMVSARQALKDMQAKLENQGEHAMPAAIQRMHARILKTISVELVKLEAAISAMIQATPHFAELAEIIESVPGIGRTTSAALIAAMPELGRANNKIVAALLGVAPYDDDSGRRRGERHIKGGRRRTRNVFYMACLGAATQHNPVLKAFYDRLVAKGKEKKVALIACMRKLISILNIMIERRQKWDASRYAVS

SEQ ID NO: 20014 - protein, 309 aa, unidentified
  source 1..309: note = protein_e9dfc95
  REGION 5..152: note = RuvC_domain
  SITE 8: note = RuvC_P1
  SITE 52: note = RuvC_P2
  SITE 92: note = RuvC_P3
  SITE 94: note = RuvC_P4
  SITE 97: note = RuvC_P5
  REGION 188..272: note = Tnp_domain
  SITE 196: note = Tnp_P1
  SITE 225: note = Tnp_P2
  SITE 233: note = Tnp_P3
  SITE 234: note = Tnp_P4
  SITE 245: note = Tnp_P5
MENVVGIDVSKDRLDVHVLASGESFAVPNDHDGLDALCARLVPTKPDVVAMEATGGYEIVAAGDLSRAGLAVATLNPAQVRAYANALGKRAKTDPIDAAVIAAFVAATKPAIRPLSDTQSQALAALLSRRRQIIAMIVAEEQRLRMALAKEAQKSIKRLLAALRRELGSLDADLDDHIRKSPLWRVREALLTSVPGVGRVTARTLLAEMPELGDLDRREVAALAGVAPWTRQSGKWKGKSFIGGGRSVVRSALFMATLVACRHNPVLKAFRDRLVASGKPKIVAIVASMRKLLTILNAIIRDEKPWQSA

SEQ ID NO: 20015 - protein, 323 aa, unidentified
  source 1..323: note = protein_8316c85
  REGION 12..155: note = RuvC_domain
  SITE 58: note = RuvC_P2
  SITE 98: note = RuvC_P3
  SITE 100: note = RuvC_P4
  SITE 103: note = RuvC_P5
  REGION 196..280: note = Tnp_domain
  SITE 204: note = Tnp_P1
  SITE 233: note = Tnp_P2
  SITE 241: note = Tnp_P3
  SITE 242: note = Tnp_P4
  SITE 253: note = Tnp_P5
MMAEPAEIQSVLGLDVSCNTVTLFDSGTGRCLTIANEADALRAALQPYQGTATLAVCEATGGHEDRLLGVLLELAIPAHRADPAKVKAYIKSFGKRGKNDSIDSRWLSRYGRDRAAMLLRWQPANPTQQKLELLVARRLDLVAMRVQEQNRLKAPRSSLIADNIRAHLCELERHIEALNAEIDTLIGESRDLALRAKSLRSVPGIGPVLVPLLLAVMPELGTLNRRQVASLAGVAPHPKDSGKASWHRSTTGGRRQIRPALFIAALAACRGNSPIATAYKTLLKAAKPKRVALTAIMRKIITIANARVRDALREQNEIMTVPA

SEQ ID NO: 20016 - protein, 400 aa, unidentified
  source 1..400: note = protein_d133af2
  REGION 4..161: note = RuvC_domain
  SITE 7: note = RuvC_P1
  SITE 57: note = RuvC_P2
  SITE 98: note = RuvC_P3
  SITE 100: note = RuvC_P4
  SITE 103: note = RuvC_P5
  REGION 276..364: note = Tnp_domain
  SITE 284: note = Tnp_P1
  SITE 314: note = Tnp_P2
  SITE 322: note = Tnp_P3
  SITE 323: note = Tnp_P4
  SITE 336: note = Tnp_P5
MISVGIDVSKGKSTVCVLKPCGEIVCSPFEMQHVQEDLEGFHNLLQKLDGEIRIVMEATGIYHLPVLTFLHEKEYFISVINPFAMKKYAKDNSIRGAKTDKLDSIMIANYGIEKWFKLQKYEGDEETYAELKLLGRRYRYYMELHVKALQELTHILDYVMPGIKKMFNSWNEANGRDKLSDFVEKFWHFDFITSMSLETFAKEYLVWAKEKKYHRSRSKAEAVYELASSGIPTLSSSTPSTKMLVQEAVSVLRTVDSSLSLILTRMQELVKSLPEYEAVREMGGVGEVLAVKLIAEIGDVRRLHSAKALIAWAGIDPPAYESGQFIGSKRKITKRGSSTLRKVGYEVMRVLKSHPAPKDDAVYNYILKKESEGKSKKHAKIAGLNKFLRIYYARVTAVYQ

SEQ ID NO: 20017 - protein, 405 aa, unidentified
  source 1..405: note = protein_010e660
  REGION 6..162: note = RuvC_domain
  SITE 9: note = RuvC_P1
  SITE 58: note = RuvC_P2
  SITE 99: note = RuvC_P3
  SITE 101: note = RuvC_P4
  SITE 104: note = RuvC_P5
  REGION 271..357: note = Tnp_domain
  SITE 279: note = Tnp_P1
  SITE 310: note = Tnp_P2
  SITE 318: note = Tnp_P3
  SITE 319: note = Tnp_P4
MRQVFVGLDWAEDHHDVFVEDDTGKRLGGGRLPEGVEGLGRFHELVAGRVDDPAEVVVATETDRGLFIGALVAAGYTVLAVNPMSTSRYRERHSTSGAKSDPGDAKVLADLARTDAHNHRPVAGDSELAEAVKVLARAHQTMIWSRQRQTNQLRSTLREFYPAALDAFDELAGRDALAVLAIASTPTAGRLLSRSKIAAALRRGGRQRRIDERAIEIQTALRSEQLQAPALVADAMGATVAALVAVIGEMQTQIERLESELADRFEQHPDAKIIRSLPGLGMTLGARVLAEFGDDPNRYADAKSRKNYSGMSPITRASGKHHVVLARYARNRRLADACYLWAFTAITASPGARHFYDQRRAAGHTHHRALRALANRLVGILHGCLRHHTPYDEHTAWSHRLTIAA

SEQ ID NO: 20018 - protein, 355 aa, unidentified
  source 1..355: note = protein_b6094f1
  REGION 6..148: note = RuvC_domain
  SITE 9: note = RuvC_P1
  SITE 52: note = RuvC_P2
  SITE 87: note = RuvC_P3
  SITE 89: note = RuvC_P4
  SITE 92: note = RuvC_P5
  REGION 211..297: note = Tnp_domain
  SITE 219: note = Tnp_P1
  SITE 249: note = Tnp_P2
  SITE 257: note = Tnp_P3
  SITE 258: note = Tnp_P4
  SITE 270: note = Tnp_P5
MTAHVCGIDLGRQYFHLVGLSKEGHVVLKKRLSRKQLITLTVNMPSCLIGTEACAGAHFLARVLRAQGHDVKLMPAEYVRPFVKSNKNDYVDAEAIAEAVQRPTMRFVPIKNEAQLDLRALHRVRDRWMGRRTAVINQIRGFMLEHGITVSTGPAHLKRQLPTILEDAQNLLSTRMRALLTELRLEWEKLEEQIDAMNREFAQFAAKEEGCRRLLTIPGVGPLTATALVAAIGKGTAFRKARNLAAWLGLVPRQHSTGGATRLMGISKRGSPYLRRLFIHGARAVLASVKREDHRFGDWLDRLQARSPQNVAVVAMANKMARMAWAVLTRDDSHFPLRRLRRYLMFPPGLHVSCL

SEQ ID NO: 20019 - protein, 343 aa, unidentified
  source 1..343: note = protein_91f5e6c
  REGION 7..148: note = RuvC_domain
  SITE 10: note = RuvC_P1
  SITE 53: note = RuvC_P2
  SITE 88: note = RuvC_P3
  SITE 90: note = RuvC_P4
  SITE 93: note = RuvC_P5
  REGION 212..299: note = Tnp_domain
  SITE 220: note = Tnp_P1
  SITE 250: note = Tnp_P2
  SITE 258: note = Tnp_P3
  SITE 259: note = Tnp_P4
  SITE 271: note = Tnp_P5
MSEVTTIGIDLAKTVFQVHGVDTDGAVAFRRQLRRRQVLAFFKKQSPCLVGMEACATAHYWAREIAALGHEVKLMPPHYVKPYVKRNKNDAADAEAICEAVTRPTMRFVAVKSAKQQSILMLHRTRELLVRQRTMLVNAIRAHMVEFGVVARVGLPQVKDLLAVIADKEDERIPPLARTCLEGLARQLLSLERGIVGAERRIHAWHRTNEESRRLETTPGIGPITASALVSSIADPSIFKSGRSMAAWIGLVPRQNSIGGKARMGRISKKGDQYLRWLLVAGAMTVIRHAKRRGTTDPWLAGIIAAKPTKVAAVALANKNARIVWALLRQGATYQKPVTGSVA

SEQ ID NO: 20020 - protein, 303 aa, unidentified
  source 1..303: note = protein_8770a77
  REGION 2..144: note = RuvC_domain
  SITE 45: note = RuvC_P2
  SITE 85: note = RuvC_P3
  SITE 87: note = RuvC_P4
  SITE 90: note = RuvC_P5
  REGION 180..264: note = Tnp_domain
  SITE 188: note = Tnp_P1
  SITE 217: note = Tnp_P2
  SITE 225: note = Tnp_P3
  SITE 226: note = Tnp_P4
  SITE 237: note = Tnp_P5
MWAKERLDVAIRETGELFAVDNDEAGYAALVERLSGRAIAAVGLEASGGYERAVLKALWQKGLPVRRINPHRLRQFARAAGVNAKNDRLDARVIARFLATLPVHPVEFDPSLELVIELVTARRQLQAELSRVNNQLEHVRDAALKRLAKRRATRLSADILLLDKRIAQAIAADHALARRDRLLRSTPSVGPVLSATLIAQLPELGRLSNRRIAALVGLAPYDHDSGKLKGKRCIWGGREPVRNVLYMAALSAGVHNPVFAAFRQRLRAKGKVAKVAIVAVMRKLITTLNAMIRDDKPWNPACV

SEQ ID NO: 20021 - protein, 402 aa, unidentified
  source 1..402: note = protein_3c7118f
  REGION 5..160: note = RuvC_domain
  SITE 8: note = RuvC_P1
  SITE 57: note = RuvC_P2
  SITE 97: note = RuvC_P3
  SITE 99: note = RuvC_P4
  SITE 102: note = RuvC_P5
  REGION 268..354: note = Tnp_domain
  SITE 276: note = Tnp_P1
  SITE 307: note = Tnp_P2
  SITE 315: note = Tnp_P3
  SITE 316: note = Tnp_P4
MRFSVGIDWASAAHAVCILDQTGRVHWQGAVPHTADGLADLLARLRRFRRRGSLRVALERPSGLLVDTLLDAGLEVVPIHPNALKASRPRYSAAGAKSDPGDAFILADLLRTDGHRFRPLHPPSDDTRALRALVRGRDDLVAQRIALANQLRALLERFWPGAAAIFADVDSPIALAFLARYPTPDSAARLGEQRLAQFLGQHAYCGRRPVAELLARLRRAPTSQVGAAEADASGDVVRALIAVLSPLVAHLQQLSAAIAAALAQHPDGPLVQSLPRSGAVNAAQILAELGDDRARFPTDEQFAAEAGLAPVTHASGQHRAVVFRWACNKRLRRAVTTFADNSRHASRWAALVYQRARARGCRHQHAIRILARAWARILWRCWQDRTPYHVGRHRAAQALAAA

SEQ ID NO: 20022 - protein, 414 aa, unidentified
  source 1..414: note = protein_14d9e61
  REGION 6..167: note = RuvC_domain
  SITE 9: note = RuvC_P1
  SITE 64: note = RuvC_P2
  SITE 104: note = RuvC_P3
  SITE 106: note = RuvC_P4
  SITE 109: note = RuvC_P5
  REGION 277..363: note = Tnp_domain
  SITE 285: note = Tnp_P1
  SITE 316: note = Tnp_P2
  SITE 324: note = Tnp_P3
  SITE 325: note = Tnp_P4
MTVLFVGDDWAADHHDVELMDQAGRTLARARLSEGAAGMAKLHALIGEHADVADGEDDLEVRIGIETDHGPWVTALAAAGYVVFAVNPLQAARYRERHVVSGAKSDTGDGHILADMVRTDAHQLRPVADDTDEAQAVKIVARAHKTLIWERNRQAARLRYQLRDFFPGALDAYGGLGLDSADVLELLGKAPDPAAAAKLTTAQVSAALKRAHRRHVAGKTTMIRAALRAPQLTQPAQVTGASAAVVRALAAVIVTLNQQITVLQGQVEAYFLAHPDAEIVLSQPGLGQILGARVLGEFGDDPARYASAKARKNYAATSPITRQSGKRKTVMARYVHNDRLRDALGRQAYSALTASPGARAYYDQLRARGIEHDPALRQLANRLVGILHGCLKTRTLYDEATAWPQNDRQYPSVA

SEQ ID NO: 20023 - protein, 377 aa, unidentified
  source 1..377: note = protein_14d7e78
  REGION 7..154: note = RuvC_domain
  SITE 10: note = RuvC_P1
  SITE 58: note = RuvC_P2
  SITE 94: note = RuvC_P3
  SITE 96: note = RuvC_P4
  SITE 99: note = RuvC_P5
  REGION 222..311: note = Tnp_domain
  SITE 230: note = Tnp_P1
  SITE 260: note = Tnp_P2
  SITE 268: note = Tnp_P3
  SITE 269: note = Tnp_P4
  SITE 281: note = Tnp_P5
MKNTRFVGLDVHAATIAVAVAEAGGEVGSLGTIPNEPDAVRRLMKRLGPAEQLRVCYEAGPCGYTLYWHLVRLGVACQVIAPTLVPVKAGDRVKTDRRDAERLARGLRSGDLTPVWVPDAAHEALRDLVRAREAAKKDQLRARHRLQKFLLRHGQRPPAGTTAWTDTYHRWITTLRFEQPAQDATRLDYLTEVDHAQARIVRLDQALAEAVQTAPASMRAVIAALQTLRGIAQVAAATIVAEVGRVARFARARQLMGYSGAVASEHSSGSQIRRGHITKTGNGHLRRIVVEAAWAYRHRPAIGKKLRQRQAGQSEAIKAIAWKAQHRLHQRYRRLTGRGKPPQQVVTAVARELLGFIWAIGVAVERQQAEAGRPAVA

SEQ ID NO: 20024 - protein, 337 aa, unidentified
  source 1..337: note = protein_b37cf40
  REGION 6..147: note = RuvC_domain
  SITE 9: note = RuvC_P1
  SITE 52: note = RuvC_P2
  SITE 87: note = RuvC_P3
  SITE 89: note = RuvC_P4
  SITE 92: note = RuvC_P5
  REGION 210..295: note = Tnp_domain
  SITE 218: note = Tnp_P1
  SITE 248: note = Tnp_P2
  SITE 256: note = Tnp_P3
  SITE 257: note = Tnp_P4
  SITE 269: note = Tnp_P5
MRIIRIGLDTSKHVLQVHGVDENEQPVLRRQLRRSEVEKFFAKLAPSRIGLEACGASHHWARVLRGLGHEAVLLPPQYVKPYVKRGKNDQIDAAAICEAMSRPGMRFVPIKTAERQAALMVLRVRDLLIKQRTMLCNAIRGHAAEFGVVAAKGPARISELLQRAHGEAAGVPALAREMLSLLANHLDALEARLKALETQLVAWHRQDPVSQCLATQPGIGPIGAVSFALKVTDPKGFRSARHFAAWLGLTPKEHATGGRRRPGRISRQGDETLRRLLVLGATARIRFAKAGRASPWLINLLARRPNKLAAVALANKMARILWAMMMSGETYRHPQQA

SEQ ID NO: 20025 - protein, 416 aa, unidentified
  source 1..416: note = protein_7057e54
  REGION 9..155: note = RuvC_domain
  SITE 12: note = RuvC_P1
  SITE 58: note = RuvC_P2
  SITE 95: note = RuvC_P3
  SITE 97: note = RuvC_P4
  SITE 100: note = RuvC_P5
  REGION 252..339: note = Tnp_domain
  SITE 260: note = Tnp_P1
  SITE 291: note = Tnp_P2
  SITE 299: note = Tnp_P3
  SITE 300: note = Tnp_P4
  SITE 311: note = Tnp_P5
MDTMYERCCGLDIHKKTIEACFRSGKKKTHMSFGTTSAELRKLTMWLVENDCQSVAMESTGSYWKPIFNILELSGTDMEIIVVNARHMKNVPGRKTDVHDAEWIAELLQYGLLRPSFIPDREQRELRELSRYRKSLVEERAREINRLQKMLEGGNIKLTSVVSEVTGYSSRRLLDRLLRSDEPMTEEVISELVHTSLVGKSKELEIALDGLLSELQKELLIKVLDHIDDMSRRIADLDDFCRKQMKKYEDALDKLDEIPGIARRTAETILIETGLDMSRFPTAKHFARWAGLAPGNNESAGKRSSGRTTKGNPTLKSTLIQSAKVAARKKDSFFKARYQKIAARRGANRASVAVAHSMLIAIYHILKSGERFKDLGEDYYNQFNKEKKKKYYLKKLTKLGVNLKEATLSISIQAAT

SEQ ID NO: 20026 - protein, 406 aa, unidentified
  source 1..406: note = protein_c6823e9
  REGION 10..164: note = RuvC_domain
  SITE 13: note = RuvC_P1
  SITE 61: note = RuvC_P2
  SITE 101: note = RuvC_P3
  SITE 103: note = RuvC_P4
  SITE 106: note = RuvC_P5
  REGION 272..358: note = Tnp_domain
  SITE 280: note = Tnp_P1
  SITE 310: note = Tnp_P2
  SITE 318: note = Tnp_P3
  SITE 319: note = Tnp_P4
  SITE 331: note = Tnp_P5
MEDTIYDIYLGLDVGKTAHHGVAMTIDGTTVYDKALPQDEASLTEVFNKLTQHGDVLLIVDQPNTIGALPVAVARANGCGVAYLPGLAMRKAADLYPGQAKTDPRDAFIIANTARTMPHTLRVVDRDDEVLSALKMLSGLDDDIARDCTRTINRLRSILVQIYPSLERVFAGEMLQRTFVLDLMIHYGGPTKLKKSGKKRVLTWSRKHAKKDPEALVDDIFQALDAQTVTVPGTDAAEVAIGMLATNIKALKAQRESIAGQVEEMLDDFPLAEVLMSMPGVGIKTAANILLAVGDCSDFPDAAHLAAYAGIAPVTRRSGTSIRGEFPARSGNKRLKNALFRSAWVASTCHEASKLYYERKRAEGKRHNAAVMCLARRRCNVIFAMLTRGEFFRELPARTSQEVAVA

SEQ ID NO: 20027 - protein, 412 aa, unidentified
  source 1..412: note = protein_ed88cae
  REGION 9..159: note = RuvC_domain
  SITE 12: note = RuvC_P1
  SITE 63: note = RuvC_P2
  SITE 98: note = RuvC_P3
  SITE 100: note = RuvC_P4
  SITE 103: note = RuvC_P5
  REGION 253..340: note = Tnp_domain
  SITE 261: note = Tnp_P1
  SITE 292: note = Tnp_P2
  SITE 300: note = Tnp_P3
  SITE 301: note = Tnp_P4
  SITE 312: note = Tnp_P5
MEVLHPRCAGMDVSKKDVKVCVRLASPGRKTVQDTTTWSSMSGDILRLRDYLIAEQVTCVVMEATGDYWKPFYYLLEDAPFEVMLVNAHDAKNLPGRKTDVSDAAWLAQLAAHGLLRASFVPPEPIRRLRDLTRTRTAITRERGREIQRLEKVLEDAGIKLSVVVSDINGVSSRFMLQALVKGERDPAVLAELSVKQLRRKIPALTQALQGRFTDHHAFLVELHLDFITEHTTRIDALTERIEKVMAPFQAKRDLICTIPGISTTTADVIIAETGGQMAQFPTPGHLASWAGVCPGQHQSAGRVKNVKTRPGNRHLKGALGATALSIASHKGTFLNAKYRRLVRSRGKPKAIVALEHTLLTVVWIMLTDNVVYDEPGPDYHQQRHPERTKNRAIYDLHKLGYDVTITPHGAA

SEQ ID NO: 20028 - protein, 337 aa, unidentified
  source 1..337: note = protein_17e7f82
  REGION 7..148: note = RuvC_domain
  SITE 10: note = RuvC_P1
  SITE 53: note = RuvC_P2
  SITE 88: note = RuvC_P3
  SITE 90: note = RuvC_P4
  SITE 93: note = RuvC_P5
  REGION 211..297: note = Tnp_domain
  SITE 219: note = Tnp_P1
  SITE 249: note = Tnp_P2
  SITE 257: note = Tnp_P3
  SITE 258: note = Tnp_P4
  SITE 270: note = Tnp_P5
MNEVTTIGLDLAKRVFQVHGADAKGRPVLQKKLRREEVLSFFAKLPPCVVGMEACASSHHWAREIRALGHDARMIPASYVKPYVARQKNDAADAAAICEAVTRPAVRTAPIKSLTQQALRVLHRTHELLSRQRVSLINAIRSHMAEFGVIAPAGPQHVGSLIERISDPKTPIPDAVRAPLGILVDEYVALNARINALEAEMRKSCREEPESARLLSIPGVGPITVSAILAGVPNIRGFRSGRDFAAWLGLVPRQNSSGGKERLGRITKMGDRTIRRLLVIGAMSTIRWSRSKQNFAQSWLGRIIARKPIKLAAVALANKMARIIWAVMTREETYRPA

SEQ ID NO: 20029 - protein, 342 aa, unidentified
  source 1..342: note = protein_32f11ad
  REGION 6..148: note = RuvC_domain
  SITE 9: note = RuvC_P1
  SITE 52: note = RuvC_P2
  SITE 87: note = RuvC_P3
  SITE 89: note = RuvC_P4
  SITE 92: note = RuvC_P5
  REGION 210..295: note = Tnp_domain
  SITE 218: note = Tnp_P1
  SITE 248: note = Tnp_P2
  SITE 256: note = Tnp_P3
  SITE 257: note = Tnp_P4
  SITE 269: note = Tnp_P5
MKDTMIGVDLAKRVFQLHGASPAGQVKFRKKLTREQFWRFMSDQPACVVVFEACGSASYWAREMEKLGHEVRLIAAQYVRPFVKRQKNDAADAEAIVIAAQRPEMRFVSPKSEDQQARAVLFRSRERLVHQRTELVNALRAVLYEYGHVFPVGMIQLKRMQALVEDSDCDLPALVIAECQDLLEQIAEKSERIDARMKTLKTVAAETQTARRLQSMPGVGPLTALAVEAFAPDMGQFKRGRDFAAWLGLVPRQYSSGGKERLGRVSKTGQSDIRRLLIIGAMSRLSWLGRRIISEGSWLAKMLARKPKMLVAIALANKMARQLWAMLTKNEDYRDPAHVAVA

SEQ ID NO: 20030 - protein, 321 aa, unidentified
  source 1..321: note = protein_c101ad9
  REGION 5..152: note = RuvC_domain
  SITE 8: note = RuvC_P1
  SITE 55: note = RuvC_P2
  SITE 92: note = RuvC_P3
  SITE 94: note = RuvC_P4
  SITE 97: note = RuvC_P5
  REGION 188..276: note = Tnp_domain
  SITE 196: note = Tnp_P1
  SITE 226: note = Tnp_P2
  SITE 234: note = Tnp_P3
  SITE 235: note = Tnp_P4
  SITE 247: note = Tnp_P5
MSYYVGLDVSVKETSVCIVNDAGKICRETKIPSYPDDLVRLLNDPAMPATRIGLEAGPLSQWLFSGMAEAGLPVVCIETRHTKAYLKAQVNKSDRNDARGIAQMMRVNLFRPVHVKTLTSQKRRALLTARKLLQEKAVAIENDIRGLLRNFGLKVGIVSVIKFGERIRELVDGISQGKYSIVKGDPVCRRLMTVPGVGPVVALAFKATIDIPARFRNSKAVGPSLGLTPRLHQSGEDHRVGRVSLCGDAMMRTLLYEAAQVLLTVVKKWSWLKAWAMNVAKRRGRQRATVALARRLAVIMHRIWIDGSEFRWAREDTPAVM

SEQ ID NO: 20031 - protein, 339 aa, unidentified
  source 1..339: note = protein_911636f
  REGION 6..147: note = RuvC_domain
  SITE 9: note = RuvC_P1
  SITE 52: note = RuvC_P2
  SITE 87: note = RuvC_P3
  SITE 89: note = RuvC_P4
  SITE 92: note = RuvC_P5
  REGION 210..293: note = Tnp_domain
  SITE 218: note = Tnp_P1
  SITE 248: note = Tnp_P2
  SITE 256: note = Tnp_P3
  SITE 257: note = Tnp_P4
  SITE 269: note = Tnp_P5
MKHTTVGVDIAKNVMQLHYIDAETGEIVNKPVKRAAFLEHFANLTPRLIGMEACGGSQHWARKLIAMGHQVKLMPGKFVKAFAMGNKNDATDARAIWLAVQHAGKAVAVKTETQQAVLGLHRMREQLVKFRTMQVNSLRGLLTEYGEVMAKGRAALDKAIPSVLERLVDRLPSILIDTLREQWNGLSELDRQIAEIERRLQAWQREDKACKAIVAIPGVGLLTATAAVATMGDAKTFRSGREFAAWIGLVPRQTGTGGKVQLLGISKRGDTYLRKLLIHGARSVLCLAKEPGLWAEGIKKRRPLNVAVVAQANRMARTIWAILAHDRQYDKDYVSVKPV

SEQ ID NO: 20032 - protein, 339 aa, unidentified
  source 1..339: note = protein_52bbb0e
  REGION 6..147: note = RuvC_domain
  SITE 9: note = RuvC_P1
  SITE 52: note = RuvC_P2
  SITE 87: note = RuvC_P3
  SITE 89: note = RuvC_P4
  SITE 92: note = RuvC_P5
  REGION 210..298: note = Tnp_domain
  SITE 218: note = Tnp_P1
  SITE 248: note = Tnp_P2
  SITE 256: note = Tnp_P3
  SITE 257: note = Tnp_P4
  SITE 269: note = Tnp_P5
MKLMPVGIDIAKNVFQVHYIDQETGEIVNKPIKRAQFLEHFANHARCLIGMEACGGAHHWARQLAKLGHEVRLIPAEYVKAFNVRNKNGAADAKAIWHAVQQPGKPVSVKTEMQQAMLALHRMREQLVKFRTMRINGLRGLLTEYGEVMSRGRAQLDREIPAAFARIAERLPAALVDTLREQWNGLAKLDQQIAEIERRMRDWKKEDAAVRAISEIPGVGLLTATAAVAMMGDPKAFRSGREFAAWAGLVPKQTGSGGKVNLHGISKRGDTYLRTLLIHGARSVLTHAKDPGPWVDQIKKRRPMNVTVVALANKIARTIWAVLARGKAYEKGYVSVRPA

SEQ ID NO: 20033 - protein, 343 aa, unidentified
  source 1..343: note = protein_b9f9220
  REGION 6..147: note = RuvC_domain
  SITE 9: note = RuvC_P1
  SITE 52: note = RuvC_P2
  SITE 87: note = RuvC_P3
  SITE 89: note = RuvC_P4
  SITE 92: note = RuvC_P5
  REGION 211..297: note = Tnp_domain
  SITE 219: note = Tnp_P1
  SITE 249: note = Tnp_P2
  SITE 257: note = Tnp_P3
  SITE 258: note = Tnp_P4
  SITE 270: note = Tnp_P5
MTISLLGIDIAKNTFQLHGADNSGKAVHKKRMARRELAAHVANLSPCTIVMEACGGANYWARVFQRSGHSVKLISPQFVKPFVKTNKNDANDAQAIVEAASRPSMNFVPIKQVEQQDIQSIHRIRTRIVKNRTALINEIRGLCLEYGVVLIPGAARVKSSLCVAIADGDNELTPSSRESFQSLYEELVDVEARVKYLNTKIRQLCRQNESCQRILKIPGIGELTATAIVAAVPDPGEFRNGRHMSAWLGLVPRQSSSGDKQVLLGISKRGDRYLRTLLIHGARSVLSHYKDLDNDYNRWVGRKKAALSHNKAAVALANKNTRIIWSMLSSGEEFNYGVQTAAA

SEQ ID NO: 20034 - protein, 346 aa, unidentified
  source 1..346: note = protein_17da502
  REGION 5..152: note = RuvC_domain
  SITE 8: note = RuvC_P1
  SITE 55: note = RuvC_P2
  SITE 92: note = RuvC_P3
  SITE 94: note = RuvC_P4
  SITE 97: note = RuvC_P5
  REGION 212..299: note = Tnp_domain
  SITE 220: note = Tnp_P1
  SITE 250: note = Tnp_P2
  SITE 258: note = Tnp_P3
  SITE 259: note = Tnp_P4
  SITE 271: note = Tnp_P5
MEHYVGIDVSLELSSLCVLDPTGKVIREAKVASEPAALVTFLRGLDLMIVRVGLEAGPLSQWLYDGLLEANLSPVLLETRHVKAALSAMAIKTDRRDARGIAQLLRMGWYRPVHRKSVPSQEIRALLAARKQMQIKAMDLEQTMRGLLRGFGLKVGEVSRGKLAARLRELVAGHAMLERIVEPMLAAREALWREFVKLHREVLTIVKEDEVCRRLMTVPGVGAVVSLTYRSGVDDPARFVKSKSVGAFFGLTPKRYQSGEIDVSGGITKVGDAAVRTALHDAANVLLSRATRFSTLKRWAMEVAKRRGMRRAKVALARKLATVLHRMWADGTDFVWGKDPAVAAAV

SEQ ID NO: 20035 - protein, 344 aa, unidentified
  source 1..344: note = protein_7437d39
  REGION 6..149: note = RuvC_domain
  SITE 9: note = RuvC_P1
  SITE 53: note = RuvC_P2
  SITE 88: note = RuvC_P3
  SITE 90: note = RuvC_P4
  SITE 93: note = RuvC_P5
  REGION 211..296: note = Tnp_domain
  SITE 219: note = Tnp_P1
  SITE 249: note = Tnp_P2
  SITE 257: note = Tnp_P3
  SITE 258: note = Tnp_P4
  SITE 270: note = Tnp_P5
MKDMIIGVDLAKAVFQLHGAAAVDGRPLFRKKLSRGQFLRFMSQHPEAVVVMEACGSAHYWSRELMQLGHKVLLIPPQYVRPFVKRQKNDAADAEAIVIAARQPEMRFVSPKTEEQQARAALFRARERLVHQRTELVNALRALLYEFGHVFPAGMGQIGRIAAVLDADEGTLPLLVSEECRDLLQQIAEKTVRIDARTQKAHRLAEDAETAKRLQTLPGVGPITALAFEAFAPDMRTFRRGRDFAAWLGLVPRQHSSGGKERLGQITKAGQADIRRLLIIGAMSRLNRLGRSRIPQGSWLERMLARKPRMLVAIALANKMARAMWAMMTKQEDYRIPGPSAAAP

SEQ ID NO: 20036 - protein, 387 aa, unidentified
  source 1..387: note = protein_29e2a89
  REGION 6..159: note = RuvC_domain
  SITE 9: note = RuvC_P1
  SITE 57: note = RuvC_P2
  SITE 98: note = RuvC_P3
  SITE 100: note = RuvC_P4
  SITE 103: note = RuvC_P5
  REGION 222..306: note = Tnp_domain
  SITE 229: note = Tnp_P1
  SITE 259: note = Tnp_P2
  SITE 267: note = Tnp_P3
  SITE 268: note = Tnp_P4
  SITE 279: note = Tnp_P5
MARVIIGMDPHKRSATIEIVNDREEILAQGRFGTDRDGYRAMLKLGRQHKDRIWAVEGCNGIGRHLAQRLVADGEIVVDVPAKLSARVRVFDTGQGRKTDPVDAHSVAVAALRSKGLQQVAVDDATVALRLLVDRRDGLGQARTDLLNRIHKLLLELSPGGAKKFLSAPQARALLNTIRPRDLVGRTRRRLACELVTELVQVDKKIKTANKELTELVAATGSGLQELNGIGPSGAARLIGDVGDISRFATRGHFASWNGTAPLDASSGDQTRHRLSRAGNRRINRALHIMAVVQLRHDTEGRAYYRRKLAAGKTSMEAMRCLKRRLSDIVYKQMVKDAAAVRTGPGGHLGATLQSSAADPIPMVSTSEQSLPGPANTHPRTRLLTSH

SEQ ID NO: 20037 - protein, 416 aa, unidentified
  source 1..416: note = protein_49a63cd
  REGION 4..160: note = RuvC_domain
  SITE 7: note = RuvC_P1
  SITE 57: note = RuvC_P2
  SITE 97: note = RuvC_P3
  SITE 99: note = RuvC_P4
  SITE 102: note = RuvC_P5
  REGION 274..361: note = Tnp_domain
  SITE 282: note = Tnp_P1
  SITE 312: note = Tnp_P2
  SITE 320: note = Tnp_P3
  SITE 321: note = Tnp_P4
  SITE 334: note = Tnp_P5
MNAAGIDVSSRKSTVAVLRPFGEVVKVPFEVGHSAEALLDLARQLKTLDGETRVVMEHTGRYYEPVANVLHEAGLYVSAVNPLLIREYGGNSLRRVKTDKADAVKIARYALDNWADLRDYTPMDTIRYDLKTLNRQFQLASKQKTATANNLIALQEQSFPGIRKCFDSPVRRDGTQKWVDFTYAFWHVDCVRRHSLNAFSERYRKWCKRHGYIFKQSNAEEVYTLAKSAVVLVSSSETTKLLVQEAANQLTSISRSVETYRAEMNRLASLLPEYPVVMELYGVGESLGPQLMAEIGDVRRFEQKKSLIAFAGVDPMPNQSGDKNVRSNRSSKRGSPYLRKTLFNIMGIYLRCSPAEEPVYQFLDRKRAEGKPFYVYMTAGANKFLRRYYAKVRDYLATLDDLPPVDMDSTGLNQTN

SEQ ID NO: 20038 - protein, 357 aa, unidentified
  source 1..357: note = protein_e1ca850
  REGION 14..156: note = RuvC_domain
  SITE 17: note = RuvC_P1
  SITE 60: note = RuvC_P2
  SITE 95: note = RuvC_P3
  SITE 97: note = RuvC_P4
  SITE 100: note = RuvC_P5
  REGION 223..310: note = Tnp_domain
  SITE 231: note = Tnp_P1
  SITE 261: note = Tnp_P2
  SITE 269: note = Tnp_P3
  SITE 270: note = Tnp_P4
  SITE 282: note = Tnp_P5
MGKSNIDLSSVTRIGLDLAKNIFQVHAVNVNGGVIVARSVRRGRLLAFLGTFPRCLVAMEACSSAHHWGRAFIELGFEVRLIPPAHVKPYVRRNKNDAADAAAICEAVGRPNQRYVPVRSVNNQAQLMRHRTRELLVGQRTQLLNALRGHLAEVGVIAPQGTQNAYSLKRLLAHEADENGEIVVPECVRGALVSLCRQIDALDEEIEAIDKQIATQVKADPTARRLTSIPGIGPITASAILATVQDANTFASGREFAAFLGLTPRQNSSGGKERLGSITKMGDRYLRKLLVVGACAVLFHRKGHNDALRRWADQLVARKSGPSGFKLVAVALANKIARIVFALLTRGGDYNDRPIAA

SEQ ID NO: 20039 - protein, 341 aa, unidentified
  source 1..341: note = protein_91a38b7
  REGION 6..147: note = RuvC_domain
  SITE 9: note = RuvC_P1
  SITE 52: note = RuvC_P2
  SITE 87: note = RuvC_P3
  SITE 89: note = RuvC_P4
  SITE 92: note = RuvC_P5
  REGION 210..298: note = Tnp_domain
  SITE 218: note = Tnp_P1
  SITE 248: note = Tnp_P2
  SITE 256: note = Tnp_P3
  SITE 257: note = Tnp_P4
  SITE 270: note = Tnp_P5
MQAIRFGVDLAKQVIQIHGVDSEGKVVVQRQLKRSQVLAFFAKQPPALIGMEACGSAHFWARELMKLGHEVRLMPPTYVKPYVKRNKNDARDAEACCEAVGRPTMRFVPVKTVAQQCARAIHRSRDLLVGQRSQLSNCIRGLLYEMGLVAAKGAGGIKALLERIEAGEAAIPPALSAALKPLAAQWRGLDEAIHGLDNEIVTQVRADKAARRLMAIPGVGPITAHAVIAAVGDGRQFASARDFTAWVGLTRKNHDTGGRQSLSGHISKAGDRGLRRLLVLGASAWLRHVRARPEKGSAWIKGVLARRPVRVAVVAQAAKTARILWAVLTSGQDYRAPAGAQ

SEQ ID NO: 20040 - protein, 324 aa, unidentified
  source 1..324: note = protein_6d9f5dd
  REGION 4..154: note = RuvC_domain
  SITE 7: note = RuvC_P1
  SITE 59: note = RuvC_P2
  SITE 99: note = RuvC_P3
  SITE 101: note = RuvC_P4
  SITE 104: note = RuvC_P5
  REGION 199..285: note = Tnp_domain
  SITE 207: note = Tnp_P1
  SITE 236: note = Tnp_P2
  SITE 244: note = Tnp_P3
  SITE 245: note = Tnp_P4
  SITE 258: note = Tnp_P5
MFFLGIDVSKAKLDCLLLMDNGTTRKTKVVPNTAAGVQTLLDWCIKHGAQPEQTHAVLEPTGQYHEPAATALHDAAMNVSLINPAQVRNFADALAVRSKTDGIDSYVLARYGQARKPTLWHPAPMHARQLRALLARREALVKDLLRELNRQEKTQFSSPPALVESSIDKAIAFLREEIKRLDRAIDEHIDRHPDLKADRDLLISIPAIGPQAANAILSIMHNRRIDSAEGLAAYLGLIPVHRQSGTSLNGRPCLSKAGPPRVRATLYMAAIVGTRFNPHVQALYARLLLAGKSKMSALGAAMRKLAHLCFGVLKTRSPYRPDYC

SEQ ID NO: 20041 - protein, 341 aa, unidentified
  source 1..341: note = protein_9d607c2
  REGION 7..149: note = RuvC_domain
  SITE 10: note = RuvC_P1
  SITE 53: note = RuvC_P2
  SITE 88: note = RuvC_P3
  SITE 90: note = RuvC_P4
  SITE 93: note = RuvC_P5
  REGION 211..295: note = Tnp_domain
  SITE 219: note = Tnp_P1
  SITE 249: note = Tnp_P2
  SITE 257: note = Tnp_P3
  SITE 258: note = Tnp_P4
  SITE 270: note = Tnp_P5
MQDVHIIGLDIAKNSFHAHAAAVDGTALFSKALPRGRVLNVLGKLQPCIVALEACAGAHHWGREITALGHEVRLIPPQYVKPYVKRQKNDASDAEAIAEAASRPSMRFVAVKSPEQQGQAMVLKVRDLLTAQRTQTINALRGHLSEHGIVSPKGPQHLPRLEDEMNARKDILPHTVISVCRVLFVLISSLSERIEALSLQLKQVSKQDDVAKRLMTMPGVGPVTAVSLSVLAPPPGTFSKGRDFAAWIGLAPRQHSTGGKTKLGRTSKMGQRDLRRLLIIGAMSTIQSAERRGGAPEGSWLARMLARKPKMLVAVALANKMARIAWVLMTRGGAYETPARA

SEQ ID NO: 20042 - protein, 339 aa, unidentified
  source 1..339: note = protein_1c678cd
  REGION 6..147: note = RuvC_domain
  SITE 9: note = RuvC_P1
  SITE 52: note = RuvC_P2
  SITE 87: note = RuvC_P3
  SITE 89: note = RuvC_P4
  SITE 92: note = RuvC_P5
  REGION 210..299: note = Tnp_domain
  SITE 218: note = Tnp_P1
  SITE 248: note = Tnp_P2
  SITE 256: note = Tnp_P3
  SITE 257: note = Tnp_P4
  SITE 269: note = Tnp_P5
MNSMAVGVDIAKNVFQVHYVDQASGEIVNKAIKRAKFLEHFANRERCVIGMEACGGAHHWARALKRMGHEVRLMPAEFVKAFNIRNKNDAADARAIWLAVQQPGKPIAVKTEMQQAMLALHRMREQLVKFRTMQINGLRGLLTEYGEVMSKGRAALDKEIPAALGRIAERLPAALIDTLREQWNGLARLDEQIAEIERRMRDWKKEDRAVQAISEIPGVGLLTATAAVAMMGDPKAFRSGREFAAWAGLVPKQTGSGGKVNLHGISKRGDTYLRTLLIHGARSVLTHVKKPGPWVEQIKKRRPANVVIVALANKMARTIWAVLAHERAYRKDYVSMKPA

SEQ ID NO: 20043 - protein, 372 aa, unidentified
  source 1..372: note = protein_8d997e6
  REGION 32..172: note = RuvC_domain
  SITE 35: note = RuvC_P1
  SITE 78: note = RuvC_P2
  SITE 113: note = RuvC_P3
  SITE 115: note = RuvC_P4
  SITE 118: note = RuvC_P5
  REGION 235..321: note = Tnp_domain
  SITE 243: note = Tnp_P1
  SITE 273: note = Tnp_P2
  SITE 281: note = Tnp_P3
  SITE 282: note = Tnp_P4
  SITE 294: note = Tnp_P5
MVWTAPYGIDCARMRLLKSQTREPSVNQIIRIGMDTSKHFFQLHGVDAAEQPVLRRKLRRKEMVAFFAKLAPTVIGMEACGASHYWARELRKLGHEVKLIAPQHVKPYIKRNKNDGRDAEGLCEAMSRPTMRFVPVKTEEQQAALMLAGLREQMVARRTQLSNMIRGYAAEFGITAAKGLDKIEPLLADIAASQTLPVLARDLFVMHGREYAQLQAELKKIEARLMAWHRSNADSQRLAQIPGIGPIGATALVMKAPDPRLFPSGRQFAAWIGLTPKDHSTAGKTRLGTITRAGDERLRSVLVAGATAVIQQASRGRGRASPWLLALLARKSSPKLAAIALANKIARIAWKLLVTGASYHAGGKPTASAHAA

SEQ ID NO: 20044 - protein, 342 aa, unidentified
  source 1..342: note = protein_bd89fe4
  REGION 6..148: note = RuvC_domain
  SITE 9: note = RuvC_P1
  SITE 52: note = RuvC_P2
  SITE 87: note = RuvC_P3
  SITE 89: note = RuvC_P4
  SITE 92: note = RuvC_P5
  REGION 211..297: note = Tnp_domain
  SITE 219: note = Tnp_P1
  SITE 249: note = Tnp_P2
  SITE 257: note = Tnp_P3
  SITE 258: note = Tnp_P4
  SITE 270: note = Tnp_P5
MKITTVGLDLAKNIFQIHAIDCDGTVVVKRALRRAQVLTFFKQTPPCLGGMEACGTSHFWAREVAKFGHEVRLMPPSYVKPYVKRGKTDANDAEAICEAVTRPTMRFVTAKSEQQQAALALHRTRDLLVKQRTQLVNMIRSLLAEFGIEMARGLHHALELAGRIAGGTAPNVPELAVRIITGLAGQIRDLQIRLTALEKELLAWHRTNVLSQQLSTIPGIGIISASALAASVTDPSRFRSGRQFAASLGLTPLQNSSGGKERMGRISRMGDRYLRRLLVVGMTSLVRRARTKPSAVDPRILTLLARKPARVATVAMANRAARVAWSIMTRGETYRAPAGLVA

SEQ ID NO: 20045 - protein, 342 aa, unidentified
  source 1..342: note = protein_a1c93cf
  REGION 7..148: note = RuvC_domain
  SITE 10: note = RuvC_P1
  SITE 53: note = RuvC_P2
  SITE 88: note = RuvC_P3
  SITE 90: note = RuvC_P4
  SITE 93: note = RuvC_P5
  REGION 211..295: note = Tnp_domain
  SITE 219: note = Tnp_P1
  SITE 249: note = Tnp_P2
  SITE 257: note = Tnp_P3
  SITE 258: note = Tnp_P4
  SITE 270: note = Tnp_P5
METVTIIGVDLAKNSFQLHGASTDGSVVFRKKLTRPQFRQFMADHPPCIVAMEACGSAHYWARQMVRFGHQPRLLSPGYVKPFVKRHKNDAADAEAIVEAAHRPTMRFVEPKTEGQQSRTIVFRTREQLVNQRTELVNALRAYLYELGYVVPQGIGHLRRLAEIVEDENTELPDLVREICRDLLNRIAGMTARLETLKKTIDALSREAETSHRLQTMPGVGPIAALAIETFAPPMETFKRGRDFAAWLGLVPLQKSTGGKQRLGKISKMGQRDIRRLLILGAMAVVRWASQKGVPEGSWLARMIAKKPRMLVAIALANKMARGIWAMMTKCENYRNPVMVAA

SEQ ID NO: 20046 - protein, 316 aa, unidentified
  source 1..316: note = protein_4e57ff5
  REGION 8..156: note = RuvC_domain
  SITE 11: note = RuvC_P1
  SITE 53: note = RuvC_P2
  SITE 93: note = RuvC_P3
  SITE 95: note = RuvC_P4
  SITE 98: note = RuvC_P5
  REGION 188..272: note = Tnp_domain
  SITE 196: note = Tnp_P1
  SITE 225: note = Tnp_P2
  SITE 233: note = Tnp_P3
  SITE 234: note = Tnp_P4
  SITE 246: note = Tnp_P5
MTSQVPVIGIDVAKESLSLCDTRSGEVFELANDVRTIKAWLKTLPPCCAIAIEATSTYHMDVATLAHARGHRIYVINGFRLSNYRKGIGGRNKDDRSDALLLARYLTHEQAQLEPWQPPSKAYCRLQTLLHRRAALVRSAISLRQSFSQDRSLAKALKPVLKQMATLESRLEKEIQQALREAGLMEQSKRCQAIEGIGPLTAAALNLAFLRGRFRNSDAFIAFIGLDVRLKESGRYSGRRKLTKQGDPEIRRLLHNAAMAAARTQRWQALYQSYLARGLKKIEALTILARKLARIAFALMQSQTSYQPPKQEPSLT

SEQ ID NO: 20047 - protein, 410 aa, unidentified
  source 1..410: note = protein_9f4f370
  REGION 6..169: note = RuvC_domain
  SITE 9: note = RuvC_P1
  SITE 63: note = RuvC_P2
  SITE 109: note = RuvC_P3
  SITE 111: note = RuvC_P4
  SITE 114: note = RuvC_P5
  REGION 282..368: note = Tnp_domain
  SITE 289: note = Tnp_P1
  SITE 319: note = Tnp_P2
  SITE 327: note = Tnp_P3
  SITE 328: note = Tnp_P4
  SITE 341: note = Tnp_P5
MNTLYVGIDVSSKNNVIYLMKPDGSKHSNFKVANSLNGSKELVKRIISALNSLELTSLSIGLEATSVYGDNLVYFLREDGSIATYDKQIHVLNPKQVKKFKDSYNDLPKNDYIDSFVIADCLRFGRINKEAYLDDYRYKALQNLTRARYFAVQNLTKEKQRFLNYLFMKYSSMTQEKVFSRKYGTTAFAVYEEFESAEQLAEMDLHDLTEFIKEKGKNRFSDPDAVAKAIQKAARGSYRLPKTINDSVNQVLSISISSMRALEAQIKEFDKAIEEQVKLIPNTLQSIPGIGPVYSAGIIAEVGDINRFKNQASMAKYAGLAWSQYQSGDFEAEHTHLIQSGNRFLKYYLCEGAWSHVCCDTEYKRFYDIKYKEVNRNQHKRALALTARKFARLVYSMLKTNQLYKAPVSK

SEQ ID NO: 20048 - protein, 331 aa, unidentified
  source 1..331: note = protein_1cb2511
  REGION 8..157: note = RuvC_domain
  SITE 11: note = RuvC_P1
  SITE 62: note = RuvC_P2
  SITE 100: note = RuvC_P3
  SITE 102: note = RuvC_P4
  SITE 105: note = RuvC_P5
  REGION 204..291: note = Tnp_domain
  SITE 212: note = Tnp_P1
  SITE 242: note = Tnp_P2
  SITE 250: note = Tnp_P3
  SITE 251: note = Tnp_P4
  SITE 264: note = Tnp_P5
MNKFNHFVGIDISKEYFDVTLFNGLTTLEHNQFNNSKKGVDELIDWIKGLKASLENTLICMEHTGIYKNFLVDILSINKCNLWIEMPLRITKSSGVQKGKNDKIDSQRIAMYAHRFQDKAMLFSGSKIVLDKLHALSKQRGMYLTYKSAIQKRLKEQKVFDKEIYNVLCENDNKIINLYEKLIEDIDKQLENLIKEDQEVLEVYQFATSVKGIGPRTAIALICYTKNFTTFNTPRELASYCGVVPFQHTSGKSIRGKNKVHFMANKDLKRLLHLCAVSCIQSDPEIKTFYERKQDEGKHKMSILNSIRNKLVHRICACVRNRKMYVERQIA

SEQ ID NO: 20049 - protein, 406 aa, unidentified
  source 1..406: note = protein_8dcd2b8
  REGION 4..160: note = RuvC_domain
  SITE 7: note = RuvC_P1
  SITE 57: note = RuvC_P2
  SITE 97: note = RuvC_P3
  SITE 99: note = RuvC_P4
  SITE 102: note = RuvC_P5
  REGION 275..362: note = Tnp_domain
  SITE 283: note = Tnp_P1
  SITE 313: note = Tnp_P2
  SITE 321: note = Tnp_P3
  SITE 322: note = Tnp_P4
  SITE 335: note = Tnp_P5
MNAVGIDVSKGKSTVAILRPFGEVVAAPYDVSHTDSELDRLAKVIKKLPGETRVVMEATGVYYEPVARRLHEHGIFVSVVNPVLISDYGDNTLRKAKTDKKDAVKIASYALNTWLDLVEYKPEEDRRRSLKSLNRQVKKVIKVNTMLKSNLISLTDTAFPGINKLFTSQERASDGHLKWVDFVAKFPHRDTVAKLSLNAFKKKYKSWCEKNKYHYQDSKAEEVHAHARKCVAGVSAEETFCLMITKAAEFVNAACENENALKKEMDRLASTLPEYEVVMGMYGVGKSTGPQLMAEIGDTRRFRNRRAITAFFGYDTEPDDSGQHISKSRPITKKGSPSLRRTLFVIMKTLVTKKPVDNPVYAFLDKKRSEGKHYYSYMTAAAAKFLRIYYAKVNEVLNEKGASVCT

SEQ ID NO: 20050 - protein, 320 aa, unidentified
  source 1..320: note = protein_51445fa
  REGION 8..156: note = RuvC_domain
  SITE 11: note = RuvC_P1
  SITE 53: note = RuvC_P2
  SITE 93: note = RuvC_P3
  SITE 95: note = RuvC_P4
  SITE 98: note = RuvC_P5
  REGION 189..274: note = Tnp_domain
  SITE 197: note = Tnp_P1
  SITE 226: note = Tnp_P2
  SITE 234: note = Tnp_P3
  SITE 235: note = Tnp_P4
  SITE 247: note = Tnp_P5
MNQVSTDIGVDVSKDELVVATYGQGPVVCLANRPAAIQRWLKELPPGCRIGMEATSTYHVHLAERAYAAGHCVYVFNPRQIARYLGSLRQRGKTDLLDARGIARFVHNETDQAHPFVPPTAEQRGIASLVRRRHLLVKQRAALLQSSHGEPWLQQALQPLLAEYRKLLSTLDVELERLLAQTPRLAEQRRLLQSIMGIGPLVSIALSQHLSQTDYRRSDALVAAFGLDPRPRESGCYQGSRKLSKQGHPEYRRLLYLAAQGACRAGLWQSERAAWLACGLSKTAVNCIIARKLLRIAFAVWRSGIPFDRNRIGQQACGRT

SEQ ID NO: 20051 - protein, 397 aa, unidentified
  source 1..397: note = protein_4f4c3ef
  REGION 4..160: note = RuvC_domain
  SITE 7: note = RuvC_P1
  SITE 57: note = RuvC_P2
  SITE 97: note = RuvC_P3
  SITE 99: note = RuvC_P4
  SITE 102: note = RuvC_P5
  REGION 274..361: note = Tnp_domain
  SITE 282: note = Tnp_P1
  SITE 312: note = Tnp_P2
  SITE 320: note = Tnp_P3
  SITE 321: note = Tnp_P4
  SITE 334: note = Tnp_P5
MIAVGIDISKNKSTVAILNSDCSIRAKPFDMSHNQTEMNAFVKYLKNLSEPLIILMEYTGHYHYPVLKKLQDEGFQVCLVNPYQMKKFGDVEIHKTKTDKKDAIRIATFALEKSYMLKPYSSLDQKYEDLKFLSRQYNQRISYLTKAKVQLLNLLDETMPGITSLLKLSSRHPERCALLLFIKRYGSYDTIIKMGKRSFLSTYATLMKKTKDRYAPKKGLSIFELAHDSITTRGDNIYTLSAQEQLVDLVSASQNAADEVITQMQNIAETIPEYKILRAMYGVGDRLGPVILAEIGDIRRFHSGKALNSFAGNDAPPYQSGQFVSTNRHISKRGSPILRKACYEVMQTLKASKPQTDPIYLFMVKKEQEGKPFKVAKMAGVNKFLRIYYARAMELYQ

SEQ ID NO: 20052 - protein, 316 aa, unidentified
  source 1..316: note = protein_dc03ed0
  REGION 7..152: note = RuvC_domain
  SITE 10: note = RuvC_P1
  SITE 54: note = RuvC_P2
  SITE 94: note = RuvC_P3
  SITE 96: note = RuvC_P4
  SITE 99: note = RuvC_P5
  REGION 190..274: note = Tnp_domain
  SITE 198: note = Tnp_P1
  SITE 227: note = Tnp_P2
  SITE 235: note = Tnp_P3
  SITE 236: note = Tnp_P4
  SITE 247: note = Tnp_P5
MSEPVYVGIDVAKRTFEVATTGQAQTFSLGNDEAGHAQLCQLLAPLSPRLVLLEATGGYEQDLALALSAAGLRVSVINPRQARDFARCMGKLAKTDRIDAQALRGFAALLDAQGHEPRMLADEQQRELTALVVRRRQLVAMLVAERQRLALAHPKAKPSILQIMATIAEQLNDLDGQLKEHVLAHHADLAALLTSVKGVGPTTASTLLAQLPELGQLNRKQITSLVGLAPINRDSGTLRGQRHIFGARADVRRVLFVAALVGTRFNPVLKAFYARLLAAGKPKKVALLACMHKLLVILNAIARTKSPWRNELAEAV

SEQ ID NO: 20053 - protein, 344 aa, unidentified
  source 1..344: note = protein_6e4aa44
  REGION 6..148: note = RuvC_domain
  SITE 9: note = RuvC_P1
  SITE 52: note = RuvC_P2
  SITE 87: note = RuvC_P3
  SITE 89: note = RuvC_P4
  SITE 92: note = RuvC_P5
  REGION 211..297: note = Tnp_domain
  SITE 219: note = Tnp_P1
  SITE 249: note = Tnp_P2
  SITE 257: note = Tnp_P3
  SITE 258: note = Tnp_P4
  SITE 270: note = Tnp_P5
MNITTIGFDIAKNVFQVHGVDTNGKIAFRKQLKRVQVLAFFANLSPCLIGLEACGGAHYWARELLKLGHDARLISPQFVKPYVKGNKNDANDAEAICEAVGRPSMRFVPIKNIEQQDIQMLHRVRSGLVKERTAQANRLRGLLSEYGIVIGLGLTQLRKRLPEILEDAENNLTMAARQIFADLQQQLIELDKQVSIYGEKILILHRSSEVSKTLGAVPGIGPITATALLASLGDGKAFDKARQVPAWLGLVPKQDSSGGKPKLLGISKRGDTYLRTLLIHGARSVVKAAAKKDDALSCWINSLVKRRNANIAAVAVANKNARIVWALLTRTESYQASASASANT

SEQ ID NO: 20054 - protein, 391 aa, unidentified
  source 1..391: note = protein_1cfdd96
  REGION 4..162: note = RuvC_domain
  SITE 7: note = RuvC_P1
  SITE 61: note = RuvC_P2
  SITE 101: note = RuvC_P3
  SITE 103: note = RuvC_P4
  SITE 106: note = RuvC_P5
  REGION 268..354: note = Tnp_domain
  SITE 275: note = Tnp_P1
  SITE 305: note = Tnp_P2
  SITE 313: note = Tnp_P3
  SITE 314: note = Tnp_P4
  SITE 327: note = Tnp_P5
MFYIGVDIAKKAHEVCFMDENGDVLDGNSFKIPNTLSGLDKLQKMLDKYKLSSDNSIVGMEATGHYWLVLYSWFLDNGFEVKVINPIVTDGYRNMLIRKVKNDSVDSAIVADVIRFGKYHETPVASEDVLSLKQLCRFRSSQIQTIGDLKRKVIALVDQVFPEYEGLFTDMFGNTSIEVLREYTTPEELASVSTRKLSNMLASNSHGRFGKEKALELKAVASNSIGIKFATDAFAFQIRQILEQIDFVQEQLKEIEEEINSYMESLGSPITTIPGIGPVYGASILAEIGDIHRFPTGKQLVSYAGLDASVHDSGELKGTETHISKRGSAFLRRAIWGAAFIASHSDPELAAYYQRLRARGKHHSVAVVAVARKLCYIIFAVLSEDRPYEVR

SEQ ID NO: 20055 - protein, 318 aa, unidentified
  source 1..318: note = protein_c4e984c
  REGION 8..148: note = RuvC_domain
  SITE 11: note = RuvC_P1
  SITE 55: note = RuvC_P2
  SITE 95: note = RuvC_P3
  SITE 97: note = RuvC_P4
  SITE 100: note = RuvC_P5
  REGION 191..276: note = Tnp_domain
  SITE 199: note = Tnp_P1
  SITE 228: note = Tnp_P2
  SITE 236: note = Tnp_P3
  SITE 237: note = Tnp_P4
  SITE 248: note = Tnp_P5
MPQKTRFVGLDVAKSKVDACIRSEGLRMSAPSTPEGRAELVAWVRANRVGRAVMEASGGYERGWAEALRAAGVEVRIVDPKRVRHFAKAAGRLAKNDPIDADTIARFAEAFPDGEAQPHDPARDEIDRLVAARTALKDVEDRIKQQGEHGPPPIVAKALAAIAKTTRAELRRLEAAIAAKIKANPGFARRAEIVTSVPGLAGQTAAGVIAWLPELGRIRNEAAAALIGAAPYDDDSGGRKGQRHIKGGRRKLRNLLFMPVMGAATQHNPVLKAYYQRLRARGKEAKVALIACMRKLIVILNTMLARDETWDPPARAGA

SEQ ID NO: 20056 - protein, 392 aa, unidentified
  source 1..392: note = protein_ab948b9
  REGION 5..164: note = RuvC_domain
  SITE 8: note = RuvC_P1
  SITE 61: note = RuvC_P2
  SITE 102: note = RuvC_P3
  SITE 104: note = RuvC_P4
  SITE 107: note = RuvC_P5
  REGION 267..354: note = Tnp_domain
  SITE 275: note = Tnp_P1
  SITE 305: note = Tnp_P2
  SITE 313: note = Tnp_P3
  SITE 314: note = Tnp_P4
  SITE 327: note = Tnp_P5
MVISVGIDVSKDKHDCFIVSSEGEVLADAFTIPNTLDGFHCLLQRIQDCTAPQDKIKVGLEATGHYSYNLLGFLLDNGLATYVLNPLRTNLYRKSLSLRKTKTDRVDARTIASMLLSDVGLKPYTNTAYHNEELKSLTRYRFDKVRERAKLKSSIARLVCILFPELETLVPSLHIASVYALLDEFPGAKQIGAAHLTRLKALLETASKGRYKRDMAVTIRDAARNSIGSRMPAKSLELQHTIHLIRELDTEIHEIEAEIETIMNEIQSPITTIPGIGCRMGAMILAEAGDLSRFDSPDKLLAYAGMSPSTYQSGQLKNCYPHMEKRGSRYLRYALYNATKYVCHWDPTFADYLAKKRAEGKHYNIAISHAAKKLVRLIFAMEKSRQPYCPAT

SEQ ID NO: 20057 - protein, 400 aa, unidentified
  source 1..400: note = protein_20035fc
  REGION 12..167: note = RuvC_domain
  SITE 15: note = RuvC_P1
  SITE 65: note = RuvC_P2
  SITE 105: note = RuvC_P3
  SITE 107: note = RuvC_P4
  SITE 110: note = RuvC_P5
  REGION 273..360: note = Tnp_domain
  SITE 281: note = Tnp_P1
  SITE 312: note = Tnp_P2
  SITE 320: note = Tnp_P3
  SITE 321: note = Tnp_P4
  SITE 333: note = Tnp_P5
MTGLKDNVGSFVGIDISKDKFDACGITGEEANLFQFSATMDRKGFEKLKGHLGAISVSSVLIGMESTASYHVNLFSYLVSEGYRVILINPLLISNYVKMQLRKTKTDKKDAVVIAQFLLANGATLNQRVTPSLISDLRDLSRQRESLVDEMTSLKIEIKQLLNITFPELEHMVGIFTKSIIKLLQQYPSAFALRDADLNQLSQTLITDSYGHKKEEFAKKLIKAALSSIGTNSPAKEIIIKQKIGFFLHLEEALQEITTILVDMARKLMEEDINIMTSIKGIGDKTAANFLVEMGGDINQFERSGKIIAMAGLDPAVYQSGKHEGKGRITKRGNRHLRKIIWMMTTKAIQYSEIFKDYYLKRRKEGLPYKKAVLATAHKLIRVIYAMLTQRTTFCPQVNS

SEQ ID NO: 20058 - protein, 345 aa, unidentified
  source 1..345: note = protein_91ffd11
  REGION 6..147: note = RuvC_domain
  SITE 9: note = RuvC_P1
  SITE 52: note = RuvC_P2
  SITE 87: note = RuvC_P3
  SITE 89: note = RuvC_P4
  SITE 92: note = RuvC_P5
  REGION 210..298: note = Tnp_domain
  SITE 218: note = Tnp_P1
  SITE 248: note = Tnp_P2
  SITE 256: note = Tnp_P3
  SITE 257: note = Tnp_P4
  SITE 269: note = Tnp_P5
MKLTPVGIDIAKAVFQVHYVDSATGEIVNKPIKRAKFLEHFANREPCLIGMEACGGAHHWARQLTKMGHKVRLIPAQFAKAFNIRNKNDSADARAIWLAVQQPGKPVAIKTEAQQAVLALHRMRQQLVKFRTMQINSLGGLLTEYGEVMAKGRAALDKAIPAVLAKVAERLPAVLIDTLREQWNGLAKLDGQIAEIERRLRQWMKEDKSVNAIAEIPGVGVLIATAAVATVGDAKTFKSGREFAACIGIVPKQSGSGGKVNLLSISKRGDTYLRTLLIHGARSVLYHAKDPSPWVEQITKRRPANVVIVALANKMARMIWAILAHDRSYKKDYVSVKSAATVATT

SEQ ID NO: 20059 - protein, 305 aa, unidentified
  source 1..305: note = protein_dc7d0f9
  REGION 5..154: note = RuvC_domain
  SITE 8: note = RuvC_P1
  SITE 52: note = RuvC_P2
  SITE 92: note = RuvC_P3
  SITE 94: note = RuvC_P4
  SITE 97: note = RuvC_P5
  REGION 186..270: note = Tnp_domain
  SITE 194: note = Tnp_P1
  SITE 223: note = Tnp_P2
  SITE 231: note = Tnp_P3
  SITE 232: note = Tnp_P4
  SITE 243: note = Tnp_P5
MISWVGIDISKSNLVVWVQPQGEGFDLPNTSEGFVELIERLSQYEVDRVLLEATGGYECKVMAALQGANFKVLRINPRRARAFAVAMGKNAKTDPIDAAVLADFAEVLHASRDKIISPEREALRELIQLREQFVQQRDDNKRRLQQVQLPAVTVAIKGLVHYLQVQIKQLDKTIHQSMHELDAEKAERLISVKGIGTVATASLLVYLPELGALDRREVAALAGIAPYNDDSGNHSGKRQIYGGRARVRRALYLSCWVVIRHQPDFKARYDALRERGKSAKVALIACMRILLIRLNAMLRDGTEWR

SEQ ID NO: 20060 - protein, 408 aa, unidentified
  source 1..408: note = protein_b6df760
  REGION 4..160: note = RuvC_domain
  SITE 7: note = RuvC_P1
  SITE 57: note = RuvC_P2
  SITE 97: note = RuvC_P3
  SITE 99: note = RuvC_P4
  SITE 102: note = RuvC_P5
  REGION 274..361: note = Tnp_domain
  SITE 282: note = Tnp_P1
  SITE 312: note = Tnp_P2
  SITE 320: note = Tnp_P3
  SITE 321: note = Tnp_P4
  SITE 334: note = Tnp_P5
MNAVGIDVSKGKSMVAALRPMGEVALLPQEFLHTEVGLEQMAYAIIALGEDTRVIMEATGRYHEPVAAALHEYGIYVCVLNPLFIKQSGGGSIRKVKTDKADAMKIAKYGLDNWVDLREYTPMDTVRQQLKLCSRQYNLYMKTVVSLQNNLISLADKTFPGVNELFSSPERADGHQKWVDFVMTFWHCDCVCRVSEKAFTERYQKWCKRKGYHYSAEKALDIYAGSCGHFTTLPKNDNTKLLITTAAQQLLAGKMTLAALRAEMARLARQLPEYDTVHAMYGVGEITAAQLMAEIGDVRRFPRRSSIVGFAGVDPAVNQSGKHAAQSTPTTKRGSPHLRKTLYQIVCTYLRKAPEDEPVYQFLDKKRAEGKPYFVYMTAAQNKFLRIYYARVKECLEDFDAQQNSAQS

SEQ ID NO: 20061 - protein, 408 aa, unidentified
  source 1..408: note = protein_14158f2
  REGION 5..161: note = RuvC_domain
  SITE 8: note = RuvC_P1
  SITE 60: note = RuvC_P2
  SITE 98: note = RuvC_P3
  SITE 100: note = RuvC_P4
  SITE 103: note = RuvC_P5
  REGION 270..356: note = Tnp_domain
  SITE 278: note = Tnp_P1
  SITE 309: note = Tnp_P2
  SITE 317: note = Tnp_P3
  SITE 318: note = Tnp_P4
MAILVGDDWAEDHHDVYVMDETGSRLASRRLPEGLEGIRGFHELVADLVNDPSEVVVGIETDRGLWVQALTAAGYQVYAINPMAVSRYRDRHNLAGAKSDAGDAKVLADLVRTDRHNHRPIAGDSPDAEALKVLARAHQNLVWARNRHTNQLRNALREYYPAALAAFTDLADRDTLAVLDRAPTPEVGARLSIAQIRAVLKRGGRQRNLDRRATEIQQALRASQLTAPQPVVAAFAATTKAAVGIIVELNRQIGELETVQADRFEQHPDADIYLSLPGLGGVLGARVLGEFGDDPDRYANPKSRKNYAGTSPITIASGRKKAVLARHVRNRRLYHAIDQWAFCSLTTSPGCRAFYDQHRAAGELHHQALRALANRLVGNLHGCLKHRTTYNEHTAWGHRQPTLNDAAA

SEQ ID NO: 20062 - protein, 337 aa, unidentified
  source 1..337: note = protein_31fa650
  REGION 7..149: note = RuvC_domain
  SITE 10: note = RuvC_P1
  SITE 53: note = RuvC_P2
  SITE 88: note = RuvC_P3
  SITE 90: note = RuvC_P4
  SITE 93: note = RuvC_P5
  REGION 209..294: note = Tnp_domain
  SITE 217: note = Tnp_P1
  SITE 247: note = Tnp_P2
  SITE 255: note = Tnp_P3
  SITE 256: note = Tnp_P4
  SITE 268: note = Tnp_P5
MDEIITIGIDLAKSVFQLHGVDAKGRPSLRRQLRRSQVLEFFQRQPACLIGMEACASAHYWARELIKLGHEVRLMQPSYVKGYVKRGKTDAADAEAICEAVSRPSMRFVPVKSEDTQALLMTHKAREFLVRQQTQIVNAIRAHLGEFGIVVPKGVHNVERLITACDGAGLPAPARKALNLLADQLVDTQKKIEALTADIRADARANDAAQRLQTIPGVGPITASALVSALPDIAEFKSGRDLSAWLGLTPRPHSTGGRERLGRISKMGNRYLRRLLYLGAIAQVSARRRGEPGEDWLWKIIQRKKPKQAAIALANRMARTAYAVMKNQTEFRAATAA

SEQ ID NO: 20063 - protein, 339 aa, unidentified
  source 1..339: note = protein_2a80871
  REGION 6..147: note = RuvC_domain
  SITE 9: note = RuvC_P1
  SITE 52: note = RuvC_P2
  SITE 87: note = RuvC_P3
  SITE 89: note = RuvC_P4
  SITE 92: note = RuvC_P5
  REGION 210..298: note = Tnp_domain
  SITE 218: note = Tnp_P1
  SITE 248: note = Tnp_P2
  SITE 256: note = Tnp_P3
  SITE 257: note = Tnp_P4
  SITE 269: note = Tnp_P5
MKYTPVGVDIAKHLIQVHFINEHTGEVVDKQLRNKALLTFFSNREPCLIGMEACGGSQYWARELEKLGHKVRLMQGRFVKAFVMGNKNDVMDARAIWMAVQQPGKGIAVKTEEQQSVLVLHRSRRQLVKFRTAQINALHGTLLEFGETLHKGRAAIDRELPAALDRMKSTLPPYLITVLEEQYNRLNELDMLIEGLEKQLISVARQSETCKRLMEIPGVGPLIATAAVATMGEASAFKSGREFAAYVGLVPKQTGSGGKVRLLGISKRGDTYLRTLFIHGARSVSLVAKEPSPWITELKKRRPASVAIVAMANKLARTVWAIAAHERQYDKNHVSIRPY

SEQ ID NO: 20064 - protein, 387 aa, unidentified
  source 1..387: note = protein_4d900c8
  REGION 33..185: note = RuvC_domain
  SITE 82: note = RuvC_P2
  SITE 120: note = RuvC_P3
  SITE 122: note = RuvC_P4
  SITE 125: note = RuvC_P5
  REGION 256..341: note = Tnp_domain
  SITE 264: note = Tnp_P1
  SITE 293: note = Tnp_P2
  SITE 301: note = Tnp_P3
  SITE 302: note = Tnp_P4
  SITE 314: note = Tnp_P5
MHDDAPRPARAAIRTDLGAVFVSMELSRSNWLVTSLSPGAGEKMSKHSVAASDVAGLRERFARLKQKALARTGQDFPIIVIQEAGLDGFWIHRVLESEGIESHVVDAASILTSRRRRRAKTDKIDGETLVRTLLAYKRGEPRVCSMVKAPTPEEEDRRRICRERKILVAERIEHVNRIKGLLFAQGIFDYQPLRRNRRERLEVLKTGDGRPVPPRLKVQISRELDRLENVLTQLEAVETERDALIEQASQDASAPAAMLTQLKGIGPEFAAILWSEGLFRSFDNRRQVAAYAGLAPTPWQSGSVDREQGVSKAGNPRLRTAMIQLAWLWLRHQPGSALSCWFHERVKRNGGRLRKTTIVALARKLLIALWKYATTGVVIEGALAKAA

SEQ ID NO: 20065 - protein, 354 aa, unidentified
  source 1..354: note = protein_291e39f
  REGION 4..158: note = RuvC_domain
  SITE 7: note = RuvC_P1
  SITE 57: note = RuvC_P2
  SITE 97: note = RuvC_P3
  SITE 99: note = RuvC_P4
  SITE 102: note = RuvC_P5
  REGION 221..307: note = Tnp_domain
  SITE 229: note = Tnp_P1
  SITE 259: note = Tnp_P2
  SITE 267: note = Tnp_P3
  SITE 268: note = Tnp_P4
  SITE 279: note = Tnp_P5
MIVIGADVHKRTHTFVAVDAVGKQLGSTVVPATTAGHRTAMQWAHTRFGTEVLWAIEDCRNMSARLERDLLGADQKVVRVAPRLMAEHRRTGRERGKSDPIDALAVARAAAREPDLPVASHDALSYEMKALVDYRDCLVRERTSKINRVLWRVHQLDPEHHIKKGGMKLKKHQKALQTWLTTQGSGVDARLAGKEVAAIYDLTVEINEVEREITKKVSDAVPTLLAMPGCGALSAAKLLGESADITRFPGEAQFARHAGIAPVPVWSANPGRHRLTRSGNRQLNAAIHRIALTQARMPDTLGHAYYERKQADGKTPREAMRCLKRRLTRVVYNHLTTDHHARTHKADNPTAAAA

SEQ ID NO: 20066 - protein, 341 aa, unidentified
  source 1..341: note = protein_2760735
  REGION 8..150: note = RuvC_domain
  SITE 11: note = RuvC_P1
  SITE 54: note = RuvC_P2
  SITE 89: note = RuvC_P3
  SITE 91: note = RuvC_P4
  SITE 94: note = RuvC_P5
  REGION 213..302: note = Tnp_domain
  SITE 221: note = Tnp_P1
  SITE 251: note = Tnp_P2
  SITE 259: note = Tnp_P3
  SITE 260: note = Tnp_P4
  SITE 272: note = Tnp_P5
MNGSKNVVGIDIAKRVFQLHWIDMESGEIVSLQLKREKFLEHFANRQSCLIGMEACGGAQHWARKLTAMGHQVKLLPGKAVKPFVIGNKNDRQDARAIWSAVQQPHVKAVAIKTEEQQAILALHRMRSQLVKFRTAQINGLRGLLTEYGEVMPQGKAGVRKGIAEALARLSDRLPAMVIDTLREQWARIGKMDEEITTIEQRIKLWLKNDDACRRIAEIPGVGPLTATAAVAIMGDAKTFKSGREFAAFAGLVPRQVGTGGRVKLLGISKRGDTYLRTLLIHGARSVLTHAKEPGPWVTELSQRRPLNVAVVALANKMARTIWAMLAHERTYQKEFVSQPV

SEQ ID NO: 20067 - protein, 316 aa, unidentified
  source 1..316: note = protein_2a4e311
  REGION 2..122: note = RuvC_domain
  SITE 27: note = RuvC_P2
  SITE 62: note = RuvC_P3
  SITE 64: note = RuvC_P4
  SITE 67: note = RuvC_P5
  REGION 186..272: note = Tnp_domain
  SITE 194: note = Tnp_P1
  SITE 224: note = Tnp_P2
  SITE 232: note = Tnp_P3
  SITE 233: note = Tnp_P4
  SITE 245: note = Tnp_P5
MKRRLKRHQWLEVLLDKTEPACVIGMEACASAHHWGRELQSRGYTVRLIPPQFVKPYVKSNKNDARDAEAICEAMSRPNMRFVTVKTVEQQDIQATHRVREDLKVRRTAKGNQIRGLAAEYGLVAPKSLSSLRAAIPGWLEDAENGLTHYFRSLLQGLWEDLLILDDRMCEMDKTIKRLAKENEDCVRLEQIRGIGPKISTAMIATVGDARQYHKSRQMAAAIGITPRQHSSGDKHRLLGISKRGDVYLRTLMIHGARSAVAAAKHKDDPLSRWVNGIANRSHPNVAAVALANKNARMAWAMLRNKTDYDPDFAVR

SEQ ID NO: 20068 - protein, 344 aa, unidentified
  source 1..344: note = protein_7e218d2
  REGION 6..148: note = RuvC_domain
  SITE 9: note = RuvC_P1
  SITE 52: note = RuvC_P2
  SITE 87: note = RuvC_P3
  SITE 89: note = RuvC_P4
  SITE 92: note = RuvC_P5
  REGION 211..300: note = Tnp_domain
  SITE 219: note = Tnp_P1
  SITE 249: note = Tnp_P2
  SITE 257: note = Tnp_P3
  SITE 258: note = Tnp_P4
  SITE 270: note = Tnp_P5
MNITTVGLDLAKNVFQVHGIDDEGKVIVCKTLRRRQMIPFFTKLEPCLVGIEACGTSHHWARQLSALGHAVKLMPPVYVKPYVKRGKTDAADAEAICEAVQRPTMRFVAIKSPEQQSVLFLHRTRDLMIRQRTQVINMIRAQLAEFGITLAKGIQHILKIIPQLVDGKVPDVPALAIKILSTLATQVEDLQVLICSLDKELKVWFQGSRVARRLETIPGIGLITATALAATVADPHQFTSGRQFSAWIGLTPKSNSSGGKERLGHISKMGDQYLRRLLVNGMTSQLRWIRSNPGSHRWAANLLTKKTPKLVAVAMANKAARIAWAVMVRDEIYRKPQMTTGEFV

SEQ ID NO: 20069 - protein, 409 aa, unidentified
  source 1..409: note = protein_3db2479
  REGION 6..165: note = RuvC_domain
  SITE 9: note = RuvC_P1
  SITE 62: note = RuvC_P2
  SITE 102: note = RuvC_P3
  SITE 104: note = RuvC_P4
  SITE 107: note = RuvC_P5
  REGION 275..361: note = Tnp_domain
  SITE 283: note = Tnp_P1
  SITE 314: note = Tnp_P2
  SITE 322: note = Tnp_P3
  SITE 323: note = Tnp_P4
MAVLFVGDDWAEDHHDVEVQDEDGRILRRARLPEGIAGIAKFGEIAATFLDDGDQPEQVLVCIEVDRGPWVNALIAAGYRVFGVDPKQAHRYREILASSGAKSDKGDAHALAEMMRTRRHQLRESGGDSEIADAVKVVARAHQTMIWERTRHLLRLRAALREYFPAILLVCSALDLDLSSRPILGLLAKAPTPARAAKLTKSQIMPLLKGRRNKEAKAIEIQQILREQHLGQPDRVTDAYAASVRASVAVLDVVIEQIAELAKEVDAHFSQHPDHEIYLSQPGMGPTLGPRVLAEFGDDPHRFRHSKARKNYAGTSPITIQSGKSRIVSARFVHNDRLVDALMAQAHAAFMHDEGARAYYRRQRAREVEHNAALRQVANRLVGILHGCLARGIPYDPDTAWKDQTPAAA

SEQ ID NO: 20070 - protein, 339 aa, unidentified
  source 1..339: note = protein_ba62864
  REGION 6..147: note = RuvC_domain
  SITE 9: note = RuvC_P1
  SITE 52: note = RuvC_P2
  SITE 87: note = RuvC_P3
  SITE 89: note = RuvC_P4
  SITE 92: note = RuvC_P5
  REGION 210..299: note = Tnp_domain
  SITE 218: note = Tnp_P1
  SITE 248: note = Tnp_P2
  SITE 256: note = Tnp_P3
  SITE 257: note = Tnp_P4
  SITE 269: note = Tnp_P5
MNSMAVGVDIAKQVFQVHYIDQETGEIVNKPIRRARFLEHFANRAKCRIGMEACGGAHHWARQLIQMGHEVRLMPAEFVKAFNIRNKNDAADAKAIWLAVQQPGKPVAVKTEMQQAMLALHRMREQLVKFRTMQINGLRGLLTEYGEVMSRGRAKLDGEIPTVLGRLAERLPAALIDTLREQWNGLAKLDEQIAGIERRMREWKKEDRAVKAISEIPGVGLLTGTAAVAMMGEAKAFKSGREFAAWAGLVPKQTGSGGKVSLHGISKRGDTYLRTLLIHGARSVLSHAKDPGPWVEQMKKRRPTNVIVVALANKIARTIWAVLAHDRQYQKGYVSVKPV

SEQ ID NO: 20071 - protein, 416 aa, unidentified
  source 1..416: note = protein_d91dee8
  REGION 12..167: note = RuvC_domain
  SITE 15: note = RuvC_P1
  SITE 64: note = RuvC_P2
  SITE 104: note = RuvC_P3
  SITE 106: note = RuvC_P4
  SITE 109: note = RuvC_P5
  REGION 275..361: note = Tnp_domain
  SITE 283: note = Tnp_P1
  SITE 314: note = Tnp_P2
  SITE 322: note = Tnp_P3
  SITE 323: note = Tnp_P4
MSFALPEALFFTGIDWAAETHAVCVMDAGGKIVAGFTIEHSADGIALLVRRLARYGEAGGMPVAIERPNGRLVDLLLDAGHPVVPVSPNAIKAWRDGEVLSGAKSDAGDAAVIAEYLRLRAHKLTAADPYSDETLALRTVVRTRGDMVEMRVAATNQLSALLDAHWPGAKAIFADVESPISLEFLTRYPTPAAAAHLGEKRMAAFCLKHGYSGRRPAAELLARLRAAPAGTSRESLTEALRDAVLAAIGVITALNASVKNLDRSVAAHLGEHPDGKIFTSLPRSGQVNAAQVLAEWGDCRQAYAGPDSVAALAGCTPVTKESGKHRAVHFRWACNKRFRAAITTFADNSRHASPWAAKVYDDARASGKDHPHAIRILARAWIRVIWRCWLDGVPYDPATHGAAAALTEQSAKQIAA

SEQ ID NO: 20072 - protein, 312 aa, unidentified
  source 1..312: note = protein_d888c17
  REGION 6..149: note = RuvC_domain
  SITE 9: note = RuvC_P1
  SITE 53: note = RuvC_P2
  SITE 93: note = RuvC_P3
  SITE 95: note = RuvC_P4
  SITE 98: note = RuvC_P5
  REGION 189..273: note = Tnp_domain
  SITE 197: note = Tnp_P1
  SITE 226: note = Tnp_P2
  SITE 234: note = Tnp_P3
  SITE 235: note = Tnp_P4
  SITE 246: note = Tnp_P5
MHEITIGADISKDHIDLHRLPGGERLRITNDRKGFAAILRWIGDMPVERIVYEPTGAYHKAFERVMLTHGLPLSKVNPRQARRFADAIGTLAKTDRVDAEMLARFGLLLSPRLLHPNTASFGELKELHAARLALVKDRTAAKNRGKNINQPLLKRQNLARLKQIETQLAQVEQAIAARIAGDESLRARFDILVSIPGLSKITAFTLLIEMPELGELDEKAAGKLSGLAPVDRQSGRWTGRAFIAGGRAIVRQALYMPALVAIRFNPDLKAKYDELKKAGKASKVAITAIMRKLVVLANALLRKQQKWTPKSA

SEQ ID NO: 20073 - protein, 341 aa, unidentified
  source 1..341: note = protein_bf3690d
  REGION 7..149: note = RuvC_domain
  SITE 10: note = RuvC_P1
  SITE 53: note = RuvC_P2
  SITE 88: note = RuvC_P3
  SITE 90: note = RuvC_P4
  SITE 93: note = RuvC_P5
  REGION 211..296: note = Tnp_domain
  SITE 219: note = Tnp_P1
  SITE 249: note = Tnp_P2
  SITE 257: note = Tnp_P3
  SITE 258: note = Tnp_P4
  SITE 270: note = Tnp_P5
MGEASTIGLDIAKNVFQAHGVDADGHVVFRKRLVRAKVLEFFARQAPCFVALEACGGAHHWARELGKLGHTVRLIPPAYVKPFVKRQKSDVADAEAICEAAQRPSMRFVPVKTDTQQANALVFRTRDLLVRQRTQCINALRGHLTEYGHVVPKGTDHVDQLIALVKDETSSIPQAARDILQVLIDSIEVLGKQINDLDAQIGRRAKDDPVARRLMTIPGIGPIAATAITALVPAPEGFRAGRDFAAWLGLTPLQKSTGGKQKLGAISKMGERTIRRLLILGASAVVRWAVHRGAAPGSWLAQMLARKPRMLVTTALANKTARIVWALLVRGGTYKAPAVAA

SEQ ID NO: 20074 - protein, 310 aa, unidentified
  source 1..310: note = protein_cd4b26a
  REGION 7..149: note = RuvC_domain
  SITE 10: note = RuvC_P1
  SITE 53: note = RuvC_P2
  SITE 88: note = RuvC_P3
  SITE 90: note = RuvC_P4
  SITE 93: note = RuvC_P5
  REGION 211..284: note = Tnp_domain
  SITE 219: note = Tnp_P1
  SITE 249: note = Tnp_P2
  SITE 257: note = Tnp_P3
  SITE 258: note = Tnp_P4
MGEVSTVGIDLAKSVFQVHGSDPSGAVIFRKKLRRDQVLSFFWTLPRCVVAMEACASAHYWAREIAAVGHDTRLIPPAYVKPFVKRQKNDMADTEAICEAAQRPTMRFVQGKSAEAQASGVIFRTRDLLVRQRTQLINALRGHLTEFGYIVRQGVGHVGKLVELVADPASDIPPVARPVLTVITQSLQALQSQIALLDREIAHRAKTDPVANRLMTIPGVGPVIATALVALAPAASTFRRGRDFAAWLGLVPRQHSSGGKERLGRTTRWASVACGGFLLSAQVRLRRLRRVTTIKPTHGWPACWLASRAC

SEQ ID NO: 20075 - protein, 339 aa, unidentified
  source 1..339: note = protein_713ae99
  REGION 14..163: note = RuvC_domain
  SITE 17: note = RuvC_P1
  SITE 65: note = RuvC_P2
  SITE 105: note = RuvC_P3
  SITE 107: note = RuvC_P4
  SITE 110: note = RuvC_P5
  REGION 206..293: note = Tnp_domain
  SITE 214: note = Tnp_P1
  SITE 244: note = Tnp_P2
  SITE 252: note = Tnp_P3
  SITE 253: note = Tnp_P4
  SITE 266: note = Tnp_P5
MSKPIQSQKSMVYCGIDVSAATLAVAVQQQDQRFEERIFDNTASGHKTLIRWLHKRKARVRVSLEATGIYSLDLALALDKAEGIEVAVLNPKLIHRFAQTLRRSKTDSADAQVLAEYSARMPFTPWSAPGLSGLQLRSISRHIQSLVVEYARQNNRLHAAEKSALTPRCVVQDLKRSMASLQLRLARLRSAAIELVRRDKAMQESFELLIGMPGIAAISALQLLGELAPLSPEMSARQWVAHSGLDPSHRESGTSVHKPSRISRAGNRHLRRALHMPALVAVRHDPHLKAFYESLLGRHKAKMQALIAVERKLLHAIYGIFKTRMPYDGNKLFPHMQIA

SEQ ID NO: 20076 - protein, 429 aa, unidentified
  source 1..429: note = protein_ad85eeb
  REGION 20..181: note = RuvC_domain
  SITE 23: note = RuvC_P1
  SITE 79: note = RuvC_P2
  SITE 120: note = RuvC_P3
  SITE 122: note = RuvC_P4
  SITE 125: note = RuvC_P5
  REGION 288..376: note = Tnp_domain
  SITE 296: note = Tnp_P1
  SITE 326: note = Tnp_P2
  SITE 334: note = Tnp_P3
  SITE 335: note = Tnp_P4
  SITE 347: note = Tnp_P5
MNYNTQNAKIASITEKTLIVGIDVGSETHYARAFNWRNYEYSKKPFAFSNDEAGFASFKAWMNDMAEKHGMETIIPGMEPTGHYWLNLGAYLQEQGMKPVHVNPHHVKKSKELDDNNPSKNDRKDPKTIAGLVNEGRFSYPYIPTGIYAEIRNLSNLRIQTQEEITRIKNRIARWFSIYFPEIKDVYRNPDAVSGLMVIKQAPLPCDIKELGVNGVNKIWRDARLKGAGIKRATTLVTAAEHSIGNTEAPRSARKEIRNLLNDYETYKNRMDELMQEIKETLSEIPYIDKLMEINGIGIKTVSCFIAEVGDIGRFDNPKQVQKLAGYAIVADSSGKHNGESRISHRGRKRLRYALYEAAISVIGKNKEFKEIHSYYRTREKNPLKKMQSVIAVACKLIRIFYTILTKGVDYDSQKMLNDIVRPEIQLAA

SEQ ID NO: 20077 - protein, 310 aa, unidentified
  source 1..310: note = protein_c62782f
  REGION 1..82: note = RuvC_domain
  SITE 21: note = RuvC_P3
  SITE 23: note = RuvC_P4
  SITE 26: note = RuvC_P5
  REGION 184..270: note = Tnp_domain
  SITE 192: note = Tnp_P1
  SITE 222: note = Tnp_P2
  SITE 230: note = Tnp_P3
  SITE 231: note = Tnp_P4
  SITE 243: note = Tnp_P5
MEFNPLLINRFVRSKSLRKTKTDSIDALMIAQYLMTVEYKPYPPSFYTLERLKSLTRFRDNLIRQRSKQLVELTNILDKVFPEFKPFFKGRFSATALYILSHYASPEKISNMNSKSYEPLRHLSRGRFSMVDFVELKTLVRNTVGSTCDYLLQEMEITIDIYNQLQSKVEEIELQIHDCVLGLDPSMLTIPGIGVASAAVILSEFGDLSKFNSPSKLLSFAGMEPGYFQSGTSESTGKMVKHGSSHLRYAMMNCAQTVINNEPTFAAYYAKKRAEGKKHRVALTHVAKKLLQVIYTLQTKELSYNPDFVR

SEQ ID NO: 20078 - protein, 343 aa, unidentified
  source 1..343: note = protein_7589d8f
  REGION 6..148: note = RuvC_domain
  SITE 9: note = RuvC_P1
  SITE 52: note = RuvC_P2
  SITE 87: note = RuvC_P3
  SITE 89: note = RuvC_P4
  SITE 92: note = RuvC_P5
  REGION 212..296: note = Tnp_domain
  SITE 220: note = Tnp_P1
  SITE 250: note = Tnp_P2
  SITE 258: note = Tnp_P3
  SITE 259: note = Tnp_P4
  SITE 271: note = Tnp_P5
MEASTIGLDIAKNVFHAHGADERGAMVFSRKLTRAKLLEFFAGQSACVVALEACGGAHHWARQLQEMGHEVRLIPPAYVKPFVKRNKNDAIDAEAICEAAQRPGMRFVAVKSEEQQAAGLVFRTRDLAVRQRTQLINAIRGHLAEYGWVAPTGRAHMAMLADLLEEEEMTSTLPEAARPMFKLMVDMLAELDRQIAVLDREIARRAKEDEAARRLMTIPGIGPVAATAILALAPPIETFRKGRDFAAWLGLAPRQHSTGGKQRLGSISKMGERTIRRLLIIGGSSMVRQATRFGAPAGSWLERMLARKPRMLVSVARANKMARMVWALLTKKEDYRAPAAVAA

SEQ ID NO: 20079 - protein, 339 aa, unidentified
  source 1..339: note = protein_f288cb8
  REGION 7..149: note = RuvC_domain
  SITE 10: note = RuvC_P1
  SITE 53: note = RuvC_P2
  SITE 88: note = RuvC_P3
  SITE 90: note = RuvC_P4
  SITE 93: note = RuvC_P5
  REGION 209..296: note = Tnp_domain
  SITE 217: note = Tnp_P1
  SITE 247: note = Tnp_P2
  SITE 255: note = Tnp_P3
  SITE 256: note = Tnp_P4
  SITE 268: note = Tnp_P5
MQNVTLIGIDLGKHSFHLHGQDRSGHAIFRKKFTRTGLLAFLATCPPCSVVMEACAGAHCLARQLTSFGHQAKLISPQFVRPFVKSNKNDFIDAEAICEAASRPAMRFVTPKTEHQQTLAAMHRVRESLVRDKVKTTNQMHGFLLEFGVSLPKGEAVIKRLSTVLAKQVLPAPLVQLLMRLQAHYGYLRQQIVELEQALEAHLEQDEAAQNLLTIPGVGPITASLLHCELGDGKHYASGRDFAAAVGLVLRQYSTGGKATLMGISKRGDKNLRRLLVQCARVFMMTLEKRQGRLAEWVRALLTRRHSNVVACALANKLARIAWSLSYRREAYQVTGVNV

SEQ ID NO: 20080 - protein, 345 aa, unidentified
  source 1..345: note = protein_7b32eab
  REGION 5..152: note = RuvC_domain
  SITE 8: note = RuvC_P1
  SITE 55: note = RuvC_P2
  SITE 92: note = RuvC_P3
  SITE 94: note = RuvC_P4
  SITE 97: note = RuvC_P5
  REGION 212..327: note = Tnp_domain
  SITE 220: note = Tnp_P1
  SITE 250: note = Tnp_P2
  SITE 258: note = Tnp_P3
  SITE 259: note = Tnp_P4
  SITE 271: note = Tnp_P5
MEHFAGLDVSVKETSICIVDDTGKIVREVKVASEPEALLPVLTNPAYCFKRIGLEAGPLSQWLFSALAEAGLPAICVETRHMRAALKAQINKTNRNDARGIAQMMRSGLYRSVHVKTLRSQKLRMLLTHRKLLQSKAIAIENDLRATLRNFGLKVGVVETVKFEARIKELVEKVSDLALLVEPLLIVRRVLREQIGILHRRLLAIVRDDDVCRRLMTIPGVGPVVALTYRATVDVPARFRNSKAVGAVFGLTPSKHQSGEADRTGGISRCGDEMMRAMLYEAAHILLVRTTKWSWLKAWAMSIARRRGLKKAVVALARRLAVIMHRIWVDGTEFRWTREQAVAAA

SEQ ID NO: 20081 - protein, 294 aa, unidentified
  source 1..294: note = protein_f61d8cb
  REGION 2..97: note = RuvC_domain
  SITE 37: note = RuvC_P3
  SITE 39: note = RuvC_P4
  SITE 42: note = RuvC_P5
  REGION 157..237: note = Tnp_domain
  SITE 165: note = Tnp_P1
  SITE 195: note = Tnp_P2
  SITE 203: note = Tnp_P3
  SITE 204: note = Tnp_P4
  SITE 216: note = Tnp_P5
MLRAHYWARLFRQYGHEPRLMAAKFVSPYRMAGKSGKNDAADAQAICEAVRRPHMRFVPVKDESQQAMQCLHRTRQGFIEEKTATYNRLRGLISEFGVIAPQSADALRHMVSVQKSSLPLQVQQCVDDLMEHVDRIEANITEYDRILSHIAKTDHRSQRLMELKGVGPTTACALVASIGNAHDFKNGRQLAAWLGLTPSQYSSGGKSKLGRITKAGDSYLRTLLVQGLVQCLLAPGKGLTHSAVGFVCWLSAEGTGGLLWPSPPKMRGCVGHHYITVMISGCTQSTKARSCITI

SEQ ID NO: 20082 - protein, 401 aa, unidentified
  source 1..401: note = protein_a67e9cf
  REGION 6..161: note = RuvC_domain
  SITE 8: note = RuvC_P1
  SITE 60: note = RuvC_P2
  SITE 99: note = RuvC_P3
  SITE 101: note = RuvC_P4
  SITE 104: note = RuvC_P5
  REGION 272..361: note = Tnp_domain
  SITE 280: note = Tnp_P1
  SITE 310: note = Tnp_P2
  SITE 318: note = Tnp_P3
  SITE 319: note = Tnp_P4
  SITE 332: note = Tnp_P5
MKYVLVLDVAKSKSMFMLSSDVGEVLLEPTEYIHNKSDFERIDSYISKLNIKDNLTVIMEATSIYHKAPERFFKENNYHVIVFNPLIGKEITNTIRKTKTDKQDCIKLTNLFWKGSIPDRNYTEDEIYTKLNELSRQYYHLDEGLTRHKNRYKELLHLCFPEFELCFKYGKIYDLTALNFIKEFPHAYIIKDKRVDALAYNMANTNDRHLNYYKRKANIIKEYAINSYPGVSENSKDVDNLKQLANIIIEIAKQKEIIKEQMIELAKQTKNFECINSLFGIGELSASLIIAELKDITRFNNIKQINASCGLDPTIVQSGKSIDYHGPISKRGNRYARKILFNCSRNIVTLSAKCDKENPIYVYYQKKKQEGKHYYACLTACSTKLIRIIYALCMNNSTQQN

SEQ ID NO: 20083 - protein, 339 aa, unidentified
  source 1..339: note = protein_6d147c7
  REGION 6..147: note = RuvC_domain
  SITE 9: note = RuvC_P1
  SITE 52: note = RuvC_P2
  SITE 87: note = RuvC_P3
  SITE 89: note = RuvC_P4
  SITE 92: note = RuvC_P5
  REGION 210..298: note = Tnp_domain
  SITE 218: note = Tnp_P1
  SITE 248: note = Tnp_P2
  SITE 256: note = Tnp_P3
  SITE 257: note = Tnp_P4
  SITE 269: note = Tnp_P5
MNSMAVGVDIAKHVFQVHYVDHETGEVVNKPIKRAKFLEHFVNRPQCLIGMEACGGAHHWARQLLQMGHEVRLMPAEFVKAFNVRNKNDAADAKAIWLAVQQPGKPVAVKTEMQQAMLALHRMREQLVKFRTMQVNGLRGLLTEYGEVMNRGRAKLDAQIPAAFGRLAERLPAVLVDTLREQWNELAKLDERISEIERRMREWKKEDRSVKAISEIPGVGLLTATAAVAIMGDPKAFQSGREFAAWTGLVPRQTGSGGKVNLHGISKRGDTYLRTLLIHGARSVLTHAKEPGEWIERIKKRRPANVVVVALANKMARTIWAVLAHDRPYRKDYVSVKPV

SEQ ID NO: 20084 - protein, 417 aa, unidentified
  source 1..417: note = protein_3a48183
  REGION 18..170: note = RuvC_domain
  SITE 21: note = RuvC_P1
  SITE 69: note = RuvC_P2
  SITE 107: note = RuvC_P3
  SITE 109: note = RuvC_P4
  SITE 112: note = RuvC_P5
  REGION 277..363: note = Tnp_domain
  SITE 285: note = Tnp_P1
  SITE 316: note = Tnp_P2
  SITE 324: note = Tnp_P3
  SITE 325: note = Tnp_P4
MQSARNTLPEEPPGDVTCGIDWARDDHAVSVVNARGREIHRCSVEHSATGLREMLAALARHGAREAAIERPDGPVVDALLEAGITVVVISPNQIKNLRGRYGSAGNKDDRFDACVLAGTLRTDRARLAPLTPDSPATVSLRRACRARKDLVSHRVAVANQLRAHLRSAFPGGAGLFAEIDSPVSLRFLARFSTQDRADWLSPRRLAAWLASAGYSGRTDPAVLHARLTAAPHGATGDDGAAQAHVTAALLAVLTTLVEQIKALSQQIGEQLALHADAHIFTSLPRSGTVRAARLLAEIGDCRARFPTPQALACLAGAAPSTRQSGKIRAVSFRWSCDKQLRDAVTDFAGDSRHASPWAADLYNRACARGHDHPHAVRILARAWLYVIWHCWQDHTAYDPARHKALQTLLNQDQRTAA

SEQ ID NO: 20085 - protein, 349 aa, unidentified
  source 1..349: note = protein_cdfb9f8
  REGION 11..152: note = RuvC_domain
  SITE 14: note = RuvC_P1
  SITE 57: note = RuvC_P2
  SITE 92: note = RuvC_P3
  SITE 94: note = RuvC_P4
  SITE 97: note = RuvC_P5
  REGION 216..302: note = Tnp_domain
  SITE 224: note = Tnp_P1
  SITE 254: note = Tnp_P2
  SITE 262: note = Tnp_P3
  SITE 263: note = Tnp_P4
  SITE 275: note = Tnp_P5
MSRKQSNPTVIGIDIGKNNFHLIGLDDAGEIVMRRKLSRRQLAERLVNLPTCLIGMEACVGAHHLCRRLLALGHDARIMPAQYVKPYLRGQKNDYRDAEAIAEAVQRPRMRFVTLKSVEQLDLQSMHRVRSRRVRHRTSIINQIRTFLLERGIPVRQGARFLIAALPEILAQHSDLLSPRMEQILMDLCDELHRLDGRLKSITEEIEAIAEANEACQRLMTVPGVGPVISSAMVAAVGDGAAFDRGRDFAAFLGLVPKQMSTGGETILGRISKRGNTYLRTLFIRGAKIILMHSKNWPKHRFGPWLEAASKRMHKNVLAVALANKLARIAWSVLRHGDDYDPKGAFTAA

SEQ ID NO: 20086 - protein, 345 aa, unidentified
  source 1..345: note = protein_150d1f4
  REGION 6..147: note = RuvC_domain
  SITE 9: note = RuvC_P1
  SITE 52: note = RuvC_P2
  SITE 87: note = RuvC_P3
  SITE 89: note = RuvC_P4
  SITE 92: note = RuvC_P5
  REGION 211..306: note = Tnp_domain
  SITE 219: note = Tnp_P1
  SITE 249: note = Tnp_P2
  SITE 257: note = Tnp_P3
  SITE 258: note = Tnp_P4
  SITE 270: note = Tnp_P5
MNVTTVGIDLAKNVFQVHGVNEHGKPVLTKQLKRHQMATFFANLPACLVGMEACASAHFWARKLQAFGHTVRLMAPQFVKPYVKTNKNDVADAEAICEAVARPNMRFVPVKNMDQQVVLALHRARQGFVRARTAQANQIRGLLGEFGLVIPRGITSIAPHVPQLIEDASNELPGSFRLLIQRLTDHLKELDRQVEELEKQIKAWHHINDASRRLAEIPGIGPITASALVASVGDGKCFSNARQLAAWLGLVPRQHSSGGKPTLQGISKRGDTYLRTLMVHGARAVVRYVANKYDASSSWLRRLLTRRHTNVAVVAVANRNARIAWALLTQGSTFRSDYAPSKAGA

SEQ ID NO: 20087 - protein, 344 aa, unidentified
  source 1..344: note = protein_06dfae3
  REGION 6..148: note = RuvC_domain
  SITE 9: note = RuvC_P1
  SITE 52: note = RuvC_P2
  SITE 87: note = RuvC_P3
  SITE 89: note = RuvC_P4
  SITE 92: note = RuvC_P5
  REGION 211..297: note = Tnp_domain
  SITE 219: note = Tnp_P1
  SITE 249: note = Tnp_P2
  SITE 257: note = Tnp_P3
  SITE 258: note = Tnp_P4
  SITE 270: note = Tnp_P5
MNITRIGLDLAKSVFQVHGVDRQERSIAKRKLSRGQVRGYFEKLSPCLIGMEACASAHYWAREFGRMGHRVKLIAPQFVKPYVKSQKNDANDAEAICEAVGRPSMRFVAIKTVEQQDIQAIHRIRSELIRQRTAKANQIRGLLAEYGIVVPVGIGALRRALPALQEDTENGLSGVFRRLLSGLREDLESFDARVAALDEEIEITARDEPTAQRLQSIPGIGPIGATALVAAVGDARQFERGRDMAAYFGLTPGQHSSGGKEQLLGISKRGDSYLRTLLIQGARAVLKTAGRKTDPRSCWVMNIAARRHKNVAAVALANKNARIAWALLTHGDRYDARHGMAAAA

SEQ ID NO: 20088 - protein, 386 aa, unidentified
  source 1..386: note = protein_a776579
  REGION 41..184: note = RuvC_domain
  SITE 79: note = RuvC_P2
  SITE 118: note = RuvC_P3
  SITE 120: note = RuvC_P4
  SITE 123: note = RuvC_P5
  REGION 255..343: note = Tnp_domain
  SITE 263: note = Tnp_P1
  SITE 292: note = Tnp_P2
  SITE 300: note = Tnp_P3
  SITE 301: note = Tnp_P4
  SITE 313: note = Tnp_P5
MQKLNDLSRSLTALEPNGTLIAVIEMSLSSWLVAGIVPGVERQPLKKLEVDESALLNLLNRWREEAKKAGHQIERIAVAFEAGRDGFWLARWLRARNIEVHVIHASSVAVSREHRRAKTDRLDTELLKRAFLGWLRGERNHCKMVAIPTIKDEDAKRPNRERESLVGEQNRITNRMKATLIRLGIRGFNPKLKKAAERLEGLRTPEGEPILPNTLAELRRDMVRRRLVSDQIRQIEDARLDRLEHAPGDGPHAMVHLLARVMGVGIETADMLVHEVLSRNLRDRRAVARYAGLTGSPDESGTKRREKGLARSGNARVRRGMIQLAWRFLMFQKESALAQWFRARTENARGTRKTMIVALARKLLIALWRLVREGIVPEGIVLRPAQ

SEQ ID NO: 20089 - protein, 326 aa, unidentified
  source 1..326: note = protein_3cdb967
  REGION 6..159: note = RuvC_domain
  SITE 9: note = RuvC_P1
  SITE 57: note = RuvC_P2
  SITE 95: note = RuvC_P3
  SITE 97: note = RuvC_P4
  SITE 100: note = RuvC_P5
  REGION 200..287: note = Tnp_domain
  SITE 208: note = Tnp_P1
  SITE 238: note = Tnp_P2
  SITE 246: note = Tnp_P3
  SITE 247: note = Tnp_P4
  SITE 260: note = Tnp_P5
MKNLISGIDISKDTLDYCSLSTEKVEVITRGVLDNEKKAIEKWLKSHDQKNTVFALEHTGHYGATLINCLHKNGYVFYLINPLELKKSLGIDRGKSDAKDAYRIAEYAITNKHKLEPYQLPKENLGRLKALITARERYVKMSVQVQNSLKANEILNQSIDVKVLIKEEKKQYKSIQKSIRNIENEMQKIIEADQELKSSYKKMTAVIGVGPVIAIKCIAETDNFLKFDDPRKFSCHCGLAPFPYQSGTSIKGRTKTHFLRDKSLKAVLTKRAISAIQHDPQLKTYYNRKIKEGKHHMSVINAVANKLVLRIFAVVKRDEPFVKLAA

SEQ ID NO: 20090 - protein, 390 aa, unidentified
  source 1..390: note = protein_9d49414
  REGION 4..163: note = RuvC_domain
  SITE 7: note = RuvC_P1
  SITE 60: note = RuvC_P2
  SITE 101: note = RuvC_P3
  SITE 103: note = RuvC_P4
  SITE 106: note = RuvC_P5
  REGION 266..352: note = Tnp_domain
  SITE 274: note = Tnp_P1
  SITE 304: note = Tnp_P2
  SITE 312: note = Tnp_P3
  SITE 313: note = Tnp_P4
  SITE 326: note = Tnp_P5
MIYVGIDVAKDKHDCCILDSNGQRMYPIFTISNDKAGFDELFSKIRSVTRFKKKTKVGLEATGHYSNNLLAALVDKGFPTYVINPLHTNLFRKGQSLRKTKTDKADASSIAMMLLTDRTLKPYSDTSYHNEELKSLTRYRFDKVHERSKLKTSLSRLVTILFPELEKLVPTLHMASVYALLIEFPGASFIASSHLTHLKNVLCNASRGRYGRDKAIEIRNAAITSIGTVMDAKSMELKHTIQLIQVLDEEIKEIEASIKKIMDASHTPIMTIPGISYRMGAMILSEIGDFSRFDNADKILAYAGLSPSTYQSGQLDSSHSRMEKRGSRYLRYALFNAAKFVCKWDESFGSYLGKKLSEGKHYNVAVSHATKKLVRTIYRMEINKEAYTPH

SEQ ID NO: 20091 - protein, 389 aa, unidentified
  source 1..389: note = protein_515f66c
  REGION 7..160: note = RuvC_domain
  SITE 10: note = RuvC_P1
  SITE 58: note = RuvC_P2
  SITE 99: note = RuvC_P3
  SITE 101: note = RuvC_P4
  SITE 104: note = RuvC_P5
  REGION 222..307: note = Tnp_domain
  SITE 230: note = Tnp_P1
  SITE 260: note = Tnp_P2
  SITE 268: note = Tnp_P3
  SITE 269: note = Tnp_P4
  SITE 280: note = Tnp_P5
MDEHVIIGMDPHKRTVTIEVMDAHEHIHGHRQFTTDTAGFAEMLVFAQEWPQRTWAVEGCNGIGHHVAERLLLAGEQVVDVPAKLSARMRMFATGQGRKTDDTDAHSIALVGVRIAGLQPVVSDEQVEVLRLLVDRRRRLGQEHTAKVCQLHQVLLDLIPGGAPKSLSAAQARRILAGIRPKDVVGKTRKRVALELVEDLERIYARKKAANKELVGLVRETRSALLDLHGIGPSGAARLLVEVGDITRFPDKGHFASWTETAPVDVSSGDHPHHRLSRGGNRQINRVLHMMGVVQLRNPTEGRAYYDRKRAEGKSPNEAMRALKRRLSDIVYRTLLNDYVARAGAGSGGHRGASTGSSAAGSQPHASTSEKSLPEPAAPNPRTRLPLAS

SEQ ID NO: 20092 - protein, 352 aa, unidentified
  source 1..352: note = protein_2d25dc5
  REGION 6..147: note = RuvC_domain
  SITE 9: note = RuvC_P1
  SITE 52: note = RuvC_P2
  SITE 87: note = RuvC_P3
  SITE 89: note = RuvC_P4
  SITE 92: note = RuvC_P5
  REGION 211..298: note = Tnp_domain
  SITE 219: note = Tnp_P1
  SITE 249: note = Tnp_P2
  SITE 257: note = Tnp_P3
  SITE 258: note = Tnp_P4
  SITE 270: note = Tnp_P5
MEIATVGIDLGKTVFHLVGLNAAGEIVVRKKFSRAQLLRFTGNLKVGLMGMEACAGSHFLGRALRQQGHEVRLMPAQYVKPYVKTNKNDYIDAEAIAEAVSRSRMRFVPIKSDEQLDMQSLHRARERWVRTRTALLNQTRGLLLERGITIRKGRRHAEEALPTILQDAEANLTGTMRQLLARLMSELKQLGVQISEIDALIAGKADDHEACQRLMAIPGIGPITATAIVSAVGNGAEFRKGRGFSAWLGLTPAEYSTGGKQKLLGISKRGNGYLRKLLVHGARSIMQCREQQSPALRAWLGELVSRCHPNVATIALANKMARMAWALLAKGETYRPALLTSGLDAAAPQLVA

SEQ ID NO: 20093 - protein, 351 aa, unidentified
  source 1..351: note = protein_5ccae1a
  REGION 1..68: note = RuvC_domain
  SITE 42: note = RuvC_P2
  REGION 228..310: note = Tnp_domain
  SITE 236: note = Tnp_P1
  SITE 266: note = Tnp_P2
  SITE 274: note = Tnp_P3
  SITE 275: note = Tnp_P4
  SITE 283: note = Tnp_P5
MTLLDPDGAVLLSRKVANDEREIVQVIADCAAAARHVQWAVDLTTVEAALLLSVLWANEQPVRYLSGRIADQSRMRRDLPVLRPGDDLIAELRKLTRRRADLVAGRTQTINRLRQQLTAVCGALERAADIASHRGWAILLARYQRPKAIRRAGVDRLTALLADAGVRNAATIAEAGVTAAKSQTVRLPGEDMAAEMVAALAKEVMDLDTRIKQADTAIEDRFRRHHLADVIVSTPGFGYRLGAELLAAIGDLDLISSADHLAAYAGLAPVANDSGKLHPPSRYNRRLRRAMYMSAVTSMRCHPESRAYYDRAEGKRPIQAVICLARRRTNVLWALIRDNRTWQDEPPAITA

SEQ ID NO: 20094 - protein, 398 aa, unidentified
  source 1..398: note = protein_33d31eb
  REGION 6..159: note = RuvC_domain
  SITE 9: note = RuvC_P1
  SITE 57: note = RuvC_P2
  SITE 98: note = RuvC_P3
  SITE 100: note = RuvC_P4
  SITE 103: note = RuvC_P5
  REGION 221..306: note = Tnp_domain
  SITE 229: note = Tnp_P1
  SITE 259: note = Tnp_P2
  SITE 267: note = Tnp_P3
  SITE 268: note = Tnp_P4
  SITE 279: note = Tnp_P5
MAQVFIGVDPHKLSATIEVVDDREKVLTTGRFSTDKAGYAAMRKQVSAWPERVWAVEGSNGAGRPLAQRLLSDGERVVDVPAKLSARARLFDTGHNRKTDAHDAHAVAVVAVRTQGLRVLAYDDELEVLRMLADRREELTRQRIQTVNRLHRLLSELTPGKAKKDITALQAKAILASVRPRDLAGKTRRRLAAEQLAELVATEKKIKASTKELKAAVLARGSTLMDLRGVGPVVAARILADVGDVSRFADRNRFASWTGTAPLDASSGEQIRHRLSRAGNRKINHMIHIAAASQIRLDTEGRVYYRRKLTAGKTRMEAMRCLKRRISDAVYRQLVADARASETGPGGHCGASLTSSAVDLPPHIDTSDQPLPGPANPTLPPTPRPRKTSARTHAMMAG

SEQ ID NO: 20095 - protein, 320 aa, unidentified
  source 1..320: note = protein_c833f1d
  REGION 10..157: note = RuvC_domain
  SITE 13: note = RuvC_P1
  SITE 57: note = RuvC_P2
  SITE 97: note = RuvC_P3
  SITE 99: note = RuvC_P4
  SITE 102: note = RuvC_P5
  REGION 193..278: note = Tnp_domain
  SITE 201: note = Tnp_P1
  SITE 230: note = Tnp_P2
  SITE 238: note = Tnp_P3
  SITE 239: note = Tnp_P4
  SITE 250: note = Tnp_P5
MMAQNSRVVVGIDVAKGKVDGCIRSLSQRQTFPSSAQGRRKLIAWLRKQKVDRAVMEASGGYERDWAKALREACFEVRIVDPKRVRNFARSAGRLAKNDVIDAEMIGWFAETFEDAPSQTHDAAREELAALVKARKAVIDLRTRLQSQNEHAVPGAVQKAHARVLKGLDAEIAKLEDAIVVTVKATPAFAVRAEIIESVPGLAGMASAVLIAGLPELGTVREEVAAALLGAAPYDDDSGKRRGERHIKGGRRWVRNALYMPCLGAATQNNPVLKAFYQRLIAKGKEPKVALIACMRKLIVILNTMIARGEKWDSSRYALR

SEQ ID NO: 20096 - protein, 369 aa, unidentified
  source 1..369: note = protein_4292c26
  REGION 7..149: note = RuvC_domain
  SITE 10: note = RuvC_P1
  SITE 53: note = RuvC_P2
  SITE 88: note = RuvC_P3
  SITE 90: note = RuvC_P4
  SITE 93: note = RuvC_P5
  REGION 212..297: note = Tnp_domain
  SITE 220: note = Tnp_P1
  SITE 250: note = Tnp_P2
  SITE 258: note = Tnp_P3
  SITE 259: note = Tnp_P4
  SITE 271: note = Tnp_P5
MKEVTTIGLDLAKAVFQVHGVDAAGAVTLRRAVRRRQVVAFFAKLPPCLIGMEACATAHYWAREITKLGHDVRLIPPAYAKAYVRRNKNDPADAKAICEAVSRPSMRFVAIKTEVQQAAAGIHKVREMLVKQRTMLINALRGLMAEFGIVVAEGPHHVGELVAILADPADRRIPTPLHEGLLAIVETLRGLERRIEIVEKQIVGWGRGNQTCRHLITIPGYGPILSSAMAALAVDPAAFTSGRHFSASLGLVPRQDGTGGKVKLGPISKRGNGYLRRLLVNGAMSVLCSKRAKEDPWLVRLLETKERKVAACALANKMARIGWAVMMRQEDFRNRRHDQPCPDLGEPGTVLTAVKTAARAPAAVAFGQS

SEQ ID NO: 20097 - protein, 342 aa, unidentified
  source 1..342: note = protein_591543f
  REGION 7..148: note = RuvC_domain
  SITE 10: note = RuvC_P1
  SITE 53: note = RuvC_P2
  SITE 88: note = RuvC_P3
  SITE 90: note = RuvC_P4
  SITE 93: note = RuvC_P5
  REGION 211..296: note = Tnp_domain
  SITE 219: note = Tnp_P1
  SITE 249: note = Tnp_P2
  SITE 257: note = Tnp_P3
  SITE 258: note = Tnp_P4
  SITE 270: note = Tnp_P5
MEEVSIIGVDLAKNVFQLHGASADGSVVYRKKLSRPQFARFMADHPACKVAMEACPSAHHWARELTRNGHRVRLIAPHYVKPFLKRQKNDAADAEAIVEAALRPTMRFVEPKTVEQQARAVAFRTREQLVKQRTEAVNALRSHLYEFGYIAPVGIGYIPRLAQVVADPDAGIPDLARDICRMLLEQIAQLTDRINTLKARIAAMSNEAEMPRRLQTMPGVGPITALAVETFAPPMEQFRRGRDFAAWLGLVPRQHSSGGKQKLGKTSKMGQRDIRRLLVIGATAVIRWASRRGAPTGSWLARMLERKPIPVVAVALANKMARGIWAMLSRDEDYRGPVLIGA

SEQ ID NO: 20098 - protein, 403 aa, unidentified
  source 1..403: note = protein_19d3a00
  REGION 6..158: note = RuvC_domain
  SITE 9: note = RuvC_P1
  SITE 57: note = RuvC_P2
  SITE 95: note = RuvC_P3
  SITE 97: note = RuvC_P4
  SITE 100: note = RuvC_P5
  REGION 266..352: note = Tnp_domain
  SITE 274: note = Tnp_P1
  SITE 305: note = Tnp_P2
  SITE 313: note = Tnp_P3
  SITE 314: note = Tnp_P4
  SITE 325: note = Tnp_P5
MGTFFAGLDWASQSHAVCIIDAQGSVRERLEVAHNAAGLAELLRRLKHWHCPPVAIERPSGLVVDTLVEAGIVVVPIHPNAVKATRPRYRSHGAKSDASDAYLLADLLRTDGHRFKPLSPQGDEIRALRTLVRGRDDLVATRVQLANQLRSLLESFWPGAGVVFTDVDSPIALAFIERYPTAESAARLGPKRMAAFCAQHAYCGRRSPEELLQRLHEAPAPVCGELEMDAKGELVRCLVRTLMRLVEQIRLLSARIEHHVAASDDGRILMSVPRAGRICAAQILAELGSVRERFDTDAQLAAEAGVAPVTYASGKSKAVAFRWACNHRLRAALTCLADNSRHANAWAAEVYAKARARGCDHPHAVRILCRAWVRVIWRAWVERKPYDPAHHGAMQNMLRTVGG

SEQ ID NO: 20099 - protein, 311 aa, unidentified
  source 1..311: note = protein_69157d6
  REGION 6..154: note = RuvC_domain
  SITE 9: note = RuvC_P1
  SITE 53: note = RuvC_P2
  SITE 92: note = RuvC_P3
  SITE 94: note = RuvC_P4
  SITE 97: note = RuvC_P5
  REGION 188..272: note = Tnp_domain
  SITE 196: note = Tnp_P1
  SITE 225: note = Tnp_P2
  SITE 233: note = Tnp_P3
  SITE 234: note = Tnp_P4
  SITE 245: note = Tnp_P5
MTDDSIGIDISKDSLDVHRLSDGGTATFPNSPRGFRTLSTWLGCDIPTRVVFEATGPYHRGLERALSGKFPLVKVNPLQARRFAQACGTRVKTDAVDARMLASFGSALSLEPDQPVDGEQFDLRELFTARAGLVKDRTRLLNRLQTQTLALVKQQTKARIDQLTRQLKALQHDINKRLHECPSRARANTILRSIPGIGEVAASTILIEMPEIGKLRKKKSASLTGLAPMTQQSGKWHGKARIQGGRKPLRDALYMPALVATKHNPDMRKKYKAMVEQGKPKKVALTANMRKLIELANALVKADREWLPNGA

SEQ ID NO: 20100 - protein, 406 aa, unidentified
  source 1..406: note = protein_afbffa3
  REGION 4..160: note = RuvC_domain
  SITE 7: note = RuvC_P1
  SITE 57: note = RuvC_P2
  SITE 97: note = RuvC_P3
  SITE 99: note = RuvC_P4
  SITE 102: note = RuvC_P5
  REGION 269..355: note = Tnp_domain
  SITE 277: note = Tnp_P1
  SITE 308: note = Tnp_P2
  SITE 316: note = Tnp_P3
  SITE 317: note = Tnp_P4
MIFVGDDWAEDHHDIHVMDADGKRLTSRRLPEGLAGISGFHDVIASYAQAPAEVVVGIETDRGLWVSALAAAGYTVYAVNPLAAARYRDRHHVSGAKSDAGDAKLLADLVRTDRHNHRTIAGDSTSAEAIKVLARGHQNLIWSRNRQTNALRSSLREYYPAALEAFDSLHHGDAVAVLSRAASPAEASHLSAATIRSILKKAGRQRNIESRAEEIRVALRTDHLTAPPPVAAAFAATTRSAVALIAELNRQIVDLEAQLTRHFETHPDAAIYLSLPGIGVILGARVLGEFGDDVARYTNAKSRKNYAGTSPLTVASGKKRAVLARHIRNRRLYDAIDQWAFCALNQSPGARAFYDHHRAAGDLHHQALRALGNRLVGLLHGCLRHHTEYDEHTAWAHRTGQQPAAA

SEQ ID NO: 20101 - protein, 343 aa, unidentified
  source 1..343: note = protein_a515834
  REGION 5..152: note = RuvC_domain
  SITE 8: note = RuvC_P1
  SITE 55: note = RuvC_P2
  SITE 92: note = RuvC_P3
  SITE 94: note = RuvC_P4
  SITE 97: note = RuvC_P5
  REGION 212..300: note = Tnp_domain
  SITE 220: note = Tnp_P1
  SITE 250: note = Tnp_P2
  SITE 258: note = Tnp_P3
  SITE 259: note = Tnp_P4
  SITE 271: note = Tnp_P5
MDYFAGLDVSVKETSVCIVDDAGKIVREARVASEPEALLQVLTNTIYRFKRVGLEAGPLSQWLYSVLAEAGLPVICVETRHMRAVLKAQINKTDRNDARGMAQMMRAGLYRPVHVKTLRSQKLRVLLTHRKLLQSKAIAIENELRASLRNFGLKVGMIGTMKFEARIRELVERLPDLAVLVEPLLIVRRVIREQLGILHRRLLAIVRDDDVCRRLMTIPGVGPVVALTYRVTVDVPARFRKSKAVGAVFGLTPAKYQSGENDRTGAISRCGDEMMRIMLYEAAQSMLVRTAKWSWLKAWAMKIARHRGMKKAIVALARRLAVIMHRMWVDGTEFRWTRELPVA

SEQ ID NO: 20102 - protein, 404 aa, unidentified
  source 1..404: note = protein_7ad4216
  REGION 9..161: note = RuvC_domain
  SITE 12: note = RuvC_P1
  SITE 60: note = RuvC_P2
  SITE 98: note = RuvC_P3
  SITE 100: note = RuvC_P4
  SITE 103: note = RuvC_P5
  REGION 268..354: note = Tnp_domain
  SITE 276: note = Tnp_P1
  SITE 307: note = Tnp_P2
  SITE 315: note = Tnp_P3
  SITE 316: note = Tnp_P4
MDDPTTGYTGVDWATDAHAVCVVDGQGRVVVEFDVAHSAEGLADLCRRVLRGGARRVAIERPDGPVVAALLAAGLEVVVVASRWVKALRERYGSAGNKSDRSDAYVLADCLRTDGHRWRSLEPDSPATVTLRAHVRARKDLVETRVAVANQLRAHLRVVFPGAVGLFSDIDSPISLRFLERFPSASRAAWLSEKRLGSWLRANGYCGRKAPAELYARLSAAPAGVGGDDGDARGAVAAAYVVVLKALRTQIDELNTRLDELLDAHPDAEIFRSLPRCATIRAATLLAEIGDCRARFPDAESLSCLAGVAPSTRASGRHRAVTFRFSSDKKLSDALCDFAGDSWRGNAWAEQRYRQLRAAGKTHPHAERILARSWAHVIWRCWQDHTPYDPARHGSYARLHEEAA

SEQ ID NO: 20103 - protein, 357 aa, unidentified
  source 1..357: note = protein_704875d
  REGION 7..153: note = RuvC_domain
  SITE 10: note = RuvC_P1
  SITE 54: note = RuvC_P2
  SITE 92: note = RuvC_P3
  SITE 94: note = RuvC_P4
  SITE 97: note = RuvC_P5
  REGION 216..301: note = Tnp_domain
  SITE 224: note = Tnp_P1
  SITE 254: note = Tnp_P2
  SITE 262: note = Tnp_P3
  SITE 263: note = Tnp_P4
  SITE 275: note = Tnp_P5
MRKIIRVGVDLAKNVIQVHAVDEHGTVVVARALRREKFITWCVQLPAGCLIAMEACSGAHHWCRKLQALGFDARMIPAQFVAPYRIQGNSGKNDANDAAAVCEAASRAHMHFVTPKTVEQQGMLSVHRLREGIKEERTALINRIRGLLAEFGIVVPQSPDVLRSQLQELLEDASNEIASLARLVLQRAQQHWQELDEHMRWCDERIAAHHQSDERVQRAAQLMGVGPVTASALIATVGDFNQFKNGAQLGAWLGLVPKQNSSGGVARLGGITKRGDIYLRTLLIQGAKAVVLTGKQCTNNPIGQWAQSLRQRSNWYKAVVALANKNARILWAIMTRGENFDACHVSTKHVRMPRPAI

SEQ ID NO: 20104 - protein, 341 aa, unidentified
  source 1..341: note = protein_e5d889c
  REGION 5..152: note = RuvC_domain
  SITE 8: note = RuvC_P1
  SITE 55: note = RuvC_P2
  SITE 92: note = RuvC_P3
  SITE 94: note = RuvC_P4
  SITE 97: note = RuvC_P5
  REGION 209..301: note = Tnp_domain
  SITE 217: note = Tnp_P1
  SITE 247: note = Tnp_P2
  SITE 255: note = Tnp_P3
  SITE 256: note = Tnp_P4
  SITE 268: note = Tnp_P5
MEHYAGLDVSLELTSVCIVDAQGGIVHETKVPSEPEALVRYFTMSKLSITHIALEAGPLSQWIHAGLVAAGFETVLLETRHVKAALSAMTVKTDRRDARGIAQLLRLGWYRPVHAKSVGGQEVRSLLTARKLMQAKLLDVECSIRGVLRGFGLKVGPTSRGRFAMRVAELVESSRPSLARCSPPGLRSRPSSSASIVRCFSLVRDDPVCRQLMSVPGVGAIVAITFKSGVDDPSRFKHSRDVGPHFGLTPRKYQSGELNVTGSITKVGDRMVHTALCEAASAMLTRTVRFSGLKAWAMAVAKRRGTRKARVALARKLGVVLHRIWIDGSSFRWSNAETAIA

SEQ ID NO: 20105 - protein, 343 aa, unidentified
  source 1..343: note = protein_3999b33
  REGION 7..148: note = RuvC_domain
  SITE 10: note = RuvC_P1
  SITE 53: note = RuvC_P2
  SITE 88: note = RuvC_P3
  SITE 90: note = RuvC_P4
  SITE 93: note = RuvC_P5
  REGION 212..301: note = Tnp_domain
  SITE 220: note = Tnp_P1
  SITE 250: note = Tnp_P2
  SITE 258: note = Tnp_P3
  SITE 259: note = Tnp_P4
  SITE 271: note = Tnp_P5
MQAITTIGLDIAKSVFQVHGVDADGQVVVRRQLKRRYVLAFFEKLAPCLIGIEACASSHHWSRQLRALGHTVRLMPPSYVKPYVKRQKNDATDAEAICEAVGRANMRFVPTKTPEQQSGLVLHRTRHLFIRQQTSVINAIRSHCAEFGIVAPVGRQGVEELLNVIANANDEQIPEIARACLSALGDQLHRIKAQILEFDRMIGAWHRSCEASRRLDEIPGVGPALATALVASIADPRTFRSGRDFSAWIGLVPKQSSSGGKPRLGSISKQGDRYLRGLFTAGALAVIRYAKTHRIGHRPWLTALLARRPTKVAAIALANKIARIAWAMMARGEHYREPVALAA

SEQ ID NO: 20106 - protein, 364 aa, unidentified
  source 1..364: note = protein_493019c
  REGION 29..170: note = RuvC_domain
  SITE 32: note = RuvC_P1
  SITE 75: note = RuvC_P2
  SITE 110: note = RuvC_P3
  SITE 112: note = RuvC_P4
  SITE 115: note = RuvC_P5
  REGION 233..324: note = Tnp_domain
  SITE 241: note = Tnp_P1
  SITE 271: note = Tnp_P2
  SITE 279: note = Tnp_P3
  SITE 280: note = Tnp_P4
  SITE 292: note = Tnp_P5
MDGPPLTTGAGWRRTEEKLTIIKTPVAVLGIDLGKNSCSLAGLDASGAVALRRRMTREGVIVFVAKLPACVVAMEACCGAHFLGRTFQAQGHEVRLMSPEYVQPYVKAQKTDDRDAEAIAEATTRPTMRLVTLKTEAQLDLQVLHRARQRLVTSRTRLTNQLRAVLLERGIILPKRRASLVQRLDELMNGELPISVRAVRLLGDLRDEWASLDRRIKSYDDELAALTRDDAQARALATIPGIGVINATALLAAVDDGSAFARGRDLAAWLGLTPRQHSTGGKTRLLGVSKRGNKYIRVQLIHGARAAMAHFVRQATPTGEWVRRLVARAHPNVVVVALAAKLARTAWAVLRHGRSFDRQTPVAA

SEQ ID NO: 20107 - protein, 344 aa, unidentified
  source 1..344: note = protein_a4b981c
  REGION 5..153: note = RuvC_domain
  SITE 8: note = RuvC_P1
  SITE 54: note = RuvC_P2
  SITE 92: note = RuvC_P3
  SITE 94: note = RuvC_P4
  SITE 97: note = RuvC_P5
  REGION 213..300: note = Tnp_domain
  SITE 221: note = Tnp_P1
  SITE 251: note = Tnp_P2
  SITE 259: note = Tnp_P3
  SITE 260: note = Tnp_P4
  SITE 272: note = Tnp_P5
MEYFAGIDVSLRSCALCIVDGKGKVLLERELPCEISDITNCLAEFAHPIERVGFEAGTLSQHLYFGLTTEGFDVACMEARQVNAALSAMRNKTNKNDARGIAQVLRTGWFSPVHMKSRKAHGVRALLSTRKALLKKTMDLANEVRGLLKIFGIRLPMTVKYGSFDGVVRPLIEMDDVLAHALVPLLDARVVLYQHFLELDRRVKRAASHDEVCMRLMTVPGVGPIASLTFKAAVDDPTRFKRSRTVGAHFGLTPRRYQSGEHDNPGRISKAGDRDVRATLYAAANAFLMRTMAGSQIKSWGMRLMRTKGRRRAVVAVARKLAVLLHRMWVDGTEFRQDPVGGKA

SEQ ID NO: 20108 - protein, 345 aa, unidentified
  source 1..345: note = protein_33a7cbd
  REGION 1..106: note = RuvC_domain
  SITE 3: note = RuvC_P2
  SITE 43: note = RuvC_P3
  SITE 45: note = RuvC_P4
  SITE 48: note = RuvC_P5
  REGION 214..299: note = Tnp_domain
  SITE 221: note = Tnp_P1
  SITE 251: note = Tnp_P2
  SITE 259: note = Tnp_P3
  SITE 260: note = Tnp_P4
  SITE 272: note = Tnp_P5
MVDQPASGAQLLLSLAATNGIPVAYVTGLQMGRAADLYAGSAKTDPLDAWVLADFARRNADRLTWLQVTDDLLVELRILNGRDVDLATDATRTINRCRDALTAISPALERAVGSMLGHAGIRDTLAKWPTPTALRGARKARIRNRVAKRSPRLAAKATEEIWEALDAQSLTLPGEEAWGRVIADLSSDLDRVIAHREQLATEIETVFMTHPLGMVLVTLCGFGPRTGARTLAEIGDPQRFTDGGRLAAYAGLAPVDRRSGRSINSSSQSRAGNHRLKNAVFLAAFVAAQHDPTAKAYYQRKRAEGKKHNAAVICLARKRCDIILAMLKNATPYQQPAHENLPQAA

SEQ ID NO: 20109 - protein, 346 aa, unidentified
  source 1..346: note = protein_374544f
  REGION 6..149: note = RuvC_domain
  SITE 9: note = RuvC_P1
  SITE 54: note = RuvC_P2
  SITE 89: note = RuvC_P3
  SITE 91: note = RuvC_P4
  SITE 94: note = RuvC_P5
  REGION 213..304: note = Tnp_domain
  SITE 221: note = Tnp_P1
  SITE 251: note = Tnp_P2
  SITE 259: note = Tnp_P3
  SITE 260: note = Tnp_P4
  SITE 272: note = Tnp_P5
MNITRVGVDIAKSVFHVHGVDRHDQVQWQGKYTREKWLNAVSKRVPAGAEIGMEACASSHFWARALQARGYRVKLIAAQFVTPYVKSNKNDRVDAEAICEAMGRPSMRFVAVKSVAQQDTQAAHRIREELVRQRTAKANQIRGLVGEYGLVAPVGIGQLRAALPRWLEAADNGLTDAFRVLLAGLAEDLRHLDERIATVTASLERQAKTDPVAKRLMTLQGIGPLTATALAGALGDGKSFRRGRDFAASLGLTPRQHSTGGRDRLLGISKRGDSYLRKLLVHGARSVLRHVGTKDDGLSQWVRHLAEHKHANVAVVALANKTARIAWAVTRHETAYDASLASRLSA

SEQ ID NO: 20110 - protein, 336 aa, unidentified
  source 1..336: note = protein_4a3726e
  REGION 6..148: note = RuvC_domain
  SITE 9: note = RuvC_P1
  SITE 52: note = RuvC_P2
  SITE 87: note = RuvC_P3
  SITE 89: note = RuvC_P4
  SITE 92: note = RuvC_P5
  REGION 211..297: note = Tnp_domain
  SITE 219: note = Tnp_P1
  SITE 249: note = Tnp_P2
  SITE 257: note = Tnp_P3
  SITE 258: note = Tnp_P4
  SITE 270: note = Tnp_P5
MESTTIAIDLTKRVFQIHYVDPQTGAIYSKALKRAQLVPFFANRPACRVVMEACGSAHHWARTLARLGHDVRLIAAQFVRPFVKSNKNDAADAAAIWEAAQRPGMRFVAVKTEDQQAMLTMHRIRQQLVRIRVMHINQLRGLLYEFGIVLPQGRRPSIEAAKASLTSLADQFPVMLTESLQDQLSRLRTLDEQIELLERRIQEWRRNGDACRRISEIPGVGVLTATAAVSVIGQAKSFRSGREFAAYLGLVPRQNSSGGKTKLGGISKRGDVYLRTLLIHGARAVISSSRHLPERLRLMLTRRPTNVVAVALANKMARTIWALLAYGRTYQASPQQ

SEQ ID NO: 20111 - protein, 324 aa, unidentified
  source 1..324: note = protein_9470f98
  REGION 20..164: note = RuvC_domain
  SITE 23: note = RuvC_P1
  SITE 67: note = RuvC_P2
  SITE 107: note = RuvC_P3
  SITE 109: note = RuvC_P4
  SITE 112: note = RuvC_P5
  REGION 199..284: note = Tnp_domain
  SITE 207: note = Tnp_P1
  SITE 236: note = Tnp_P2
  SITE 244: note = Tnp_P3
  SITE 245: note = Tnp_P4
  SITE 256: note = Tnp_P5
MVEVLSLPIVLWSEAMSIHVGIDTGKSMLDVGFYPDKRCERFANTAEGHRALLLALAPLDVPHIAIEATGGYERGIVDALAQAGYCVTRLASHRATAFARAMGSFAKSDALDAQVLARMAAHITPQPYEVPAAERAELAELVRCRLQMVSQRDDNKRRLLQTRLATAQRALRGMIEAASMQIRELDRCIATATKAADPASRLREVPGIGPVAEATLIAYLPELGRLTRQQIAALVGVAPYIDQSGCRNGARRVRAGRWIVRRAMYMATWAAIRTKGSALGERYRALRARGKVAKVALVACMRCLITAINAMVRDQTGWRQPAAA

SEQ ID NO: 20112 - protein, 353 aa, unidentified
  source 1..353: note = protein_73b0e7a
  REGION 15..161: note = RuvC_domain
  SITE 18: note = RuvC_P1
  SITE 68: note = RuvC_P2
  SITE 104: note = RuvC_P3
  SITE 106: note = RuvC_P4
  SITE 109: note = RuvC_P5
  REGION 233..318: note = Tnp_domain
  SITE 240: note = Tnp_P1
  SITE 270: note = Tnp_P2
  SITE 278: note = Tnp_P3
  SITE 279: note = Tnp_P4
  SITE 291: note = Tnp_P5
MTSLTDLREVVDVVIGVDTHVHTHSAAAVDARTGGVLGEVTVEATADGYTQLAAFAEEHAMLRAWAIEGTGGHGAGLARHLARRDELVVELDRPERARRRNGAKSDPLDAIRAAREALSRARLGTPRGGGDRQALSVLLAARRSAVEAGTDAQRQLFSLVIAAPEPVRARFRGLKLPAMLRTAAALRVHPSWDTETTVTVITLRSLARRARALSQEAAGHEKTILGIVRSWRPDLLEQPGIGPIVAATVLCAWSHPGRIHSEAAFAMLAGAAPIPANSGQVTTRHRLNRYGDRQLNRALNTIALSRIRYDQATREYVARRTTEGKTGREIKRCLKRYIAREIFRTLEHPPATT

SEQ ID NO: 20113 - protein, 310 aa, unidentified
  source 1..310: note = protein_be38277
  REGION 8..148: note = RuvC_domain
  SITE 11: note = RuvC_P1
  SITE 53: note = RuvC_P2
  SITE 93: note = RuvC_P3
  SITE 95: note = RuvC_P4
  SITE 98: note = RuvC_P5
  REGION 189..273: note = Tnp_domain
  SITE 197: note = Tnp_P1
  SITE 226: note = Tnp_P2
  SITE 234: note = Tnp_P3
  SITE 235: note = Tnp_P4
  SITE 246: note = Tnp_P5
MTLSPVCVGIDVSKTHLDIYDAIEGHRRVANVGPHIAELSRSLQERGCFVVFEATGHYDAALRRGLEEAGVAHARVNPERARDFARAIGRRAKTDAVDARMLAELGSRLAPEQREAADRTREQLAFRHKRRDQLVDMRQQEKVRRSECPDPAAVADIERHIAWLDEEIAAVEAGIRAMIDADAALRESERRLRSVPGVGPVTTVTLLALMPELGRRSPKTIAALAGLAPFNDDSGARRGKRAIRGGRRRVRRALYMAALSASRSKSRLGDFARALQKTGKPPKVVLIAVARKILVILNAITRENGSYAAA

SEQ ID NO: 20114 - protein, 403 aa, unidentified
  source 1..403: note = protein_d60840f
  REGION 3..161: note = RuvC_domain
  SITE 6: note = RuvC_P1
  SITE 58: note = RuvC_P2
  SITE 98: note = RuvC_P3
  SITE 100: note = RuvC_P4
  SITE 103: note = RuvC_P5
  REGION 268..355: note = Tnp_domain
  SITE 276: note = Tnp_P1
  SITE 307: note = Tnp_P2
  SITE 315: note = Tnp_P3
  SITE 316: note = Tnp_P4
  SITE 327: note = Tnp_P5
MFCGWDWGSTVHGVCLIDDKGVVVKRWMVQHTEDQLRNVFDELAQLVERGDVGQVPIAIERGEGLVVGLIAGAGHPVWMVEPAAFKAARPRWGSAGAKSDLGDAFMLADYARTDGHRLRRIEPVERATRELAALVRARTALVEARTAASNQLWAILAEHWPGAAVVFQKLTSQITLAFLTDYPTPQTAALLGEGRMGQFCRRHSYRGGKTPAELVRRLRAAPASANPIAPTILEAIVRGSTAQIRLLNTEITHLEGDIADALAAHPKTPLLQTLPRVATVSLAALIAEIGPLLERCENPEQVAALCGAAPVTRASGKSRTVGFRYTANKPARVAITSFADNSRHSSAWAGDAYRRARARGARHPHAVRILARSWIRVIWACWTTDTTYDPSRHRSERLIAAAT

SEQ ID NO: 20115 - protein, 413 aa, unidentified
  source 1..413: note = protein_fa1edda
  REGION 14..166: note = RuvC_domain
  SITE 17: note = RuvC_P1
  SITE 65: note = RuvC_P2
  SITE 103: note = RuvC_P3
  SITE 105: note = RuvC_P4
  SITE 108: note = RuvC_P5
  REGION 273..359: note = Tnp_domain
  SITE 281: note = Tnp_P1
  SITE 312: note = Tnp_P2
  SITE 320: note = Tnp_P3
  SITE 321: note = Tnp_P4
  SITE 332: note = Tnp_P5
MSVTPEAGSARVCAGLDWAKDDHAVCIIDADGQVLHRFTIEHTAAGLKQLVRRLLAAGVEEIGIERGDGPVVQALLQAELIVLVISPNQVKNLRSRYGSAGNKDDRFDAYVLADVVRTDRRRLTPLTRSSTATRALRSSVRARRDLLAHRVAVANQLRAHLQSVFPGAAGLFASIDSTISLAFIERYPTQAKADWLSPTRLGRWLSSMGYSGRTSPDVMHARLLAAPRGTTDTDAEVHAHTTLAFVAVLHVLTTQIDTLEDTISNQLHIHPDAHIVTSLPRSGMLRAARLLAEIGDARGRFPTADSLTCLAGVAPSTRQSGKVKAVTFRWSADHQLRDALCDFAGDSRHANPWAADQYNRARARGHNHPHAVRILARAWANIIWKCWQDGVAYDPARHNALQRVLHEHAAKAA

SEQ ID NO: 20116 - protein, 345 aa, unidentified
  source 1..345: note = protein_5131cd7
  REGION 6..148: note = RuvC_domain
  SITE 9: note = RuvC_P1
  SITE 52: note = RuvC_P2
  SITE 87: note = RuvC_P3
  SITE 89: note = RuvC_P4
  SITE 92: note = RuvC_P5
  REGION 212..298: note = Tnp_domain
  SITE 220: note = Tnp_P1
  SITE 250: note = Tnp_P2
  SITE 258: note = Tnp_P3
  SITE 259: note = Tnp_P4
  SITE 271: note = Tnp_P5
MEITTIGLDVAKNVFQVHGIDAAGKVVVRKALRRAQLLPFFRKLSPCLVGIEACGTSHHWARELIGLGHEVRLMPPAYVKPYVKRGKNDAVDAEAICEAVTRPTMRFVAVKSREQQSALSLHRARSLLVGQRTQLVNIMRSMLAEFGIAIPEGLEKALSMARQIVEGEVDTGLPVEATMVVAMLSQQVIDTHVRLREIDKSLGALQRSDDLARRLSTIPGIGPVGATAFAASVTDPHQFRSGRQFAAWLGLTPLQKSSGGKDRLGRITKMGDKYLRKLLVIGATALVRYAKYKPDTADPRLLAWLAKKPVRVATVAMANKMARVIWALMTRGETYQARHNPMLAG

SEQ ID NO: 20117 - protein, 347 aa, unidentified
  source 1..347: note = protein_1d1859f
  REGION 7..149: note = RuvC_domain
  SITE 10: note = RuvC_P1
  SITE 53: note = RuvC_P2
  SITE 88: note = RuvC_P3
  SITE 90: note = RuvC_P4
  SITE 93: note = RuvC_P5
  REGION 212..305: note = Tnp_domain
  SITE 220: note = Tnp_P1
  SITE 250: note = Tnp_P2
  SITE 258: note = Tnp_P3
  SITE 259: note = Tnp_P4
  SITE 271: note = Tnp_P5
MKEVTTIGLDLAKQVFQVHGSDAEGTPLFNRKLRRGEVVRFFAKLPPCLVGMEACGSAHHWAREISAFGHDVRLIPAQYVKPFVKRGKTDAADAEAISEAVTRKTMRFVPIKSAEQQASVMVFRARALLVRQRTQAINALRAHMGELGIIATVGIANVKPLAAIVRDESDPRLPPAARFALEEIVDQVDRLAVRIEKLEREMIAVAKQDEDMRRLATIPGVGAITAMAIKAFIPDPAGFKSARHFAAWIGLTPKSHSTGGKQRLGRISKMGNSQLRSLLVVGAASTLRHVRSDDKARPWLRELLARRPFKVVSVALANKTARMIWALLTRGGIYRGPTRLQAGSIPA

SEQ ID NO: 20118 - protein, 343 aa, unidentified
  source 1..343: note = protein_80799b2
  REGION 5..152: note = RuvC_domain
  SITE 8: note = RuvC_P1
  SITE 55: note = RuvC_P2
  SITE 92: note = RuvC_P3
  SITE 94: note = RuvC_P4
  SITE 97: note = RuvC_P5
  REGION 212..300: note = Tnp_domain
  SITE 220: note = Tnp_P1
  SITE 250: note = Tnp_P2
  SITE 258: note = Tnp_P3
  SITE 259: note = Tnp_P4
  SITE 271: note = Tnp_P5
MEHSAGLDVSVKETSVCIVDDTGKIVREVKVASEPDALLAVLTNPAYHFKRIGLEAGPLSQWLFSALAEAGLPVICVETRHMRAALKAQINKTDRNDARGIAQMMRAGLYRPVHVKTLRSQKLRMLLTHRKLLQSKAIAIENDLRATLRNFGLKVGTVGTVKFEARIKELVENLPDLVVLVEPLLIVRRALREQIAILHRRLLIIVRGDDVCRRLMTVPGVGPVVALTYRATVDVPARFRNSKAVGAVFGLTPSKYQSGEVDRTGAISRCGDDMMRVMLYEAAHIMLVRATKWSWLKAWAMQIARRRGLKKAIVALARRLAVIMHRIWVDGTEFRWTREAAAA

SEQ ID NO: 20119 - protein, 356 aa, unidentified
  source 1..356: note = protein_367246b
  REGION 14..162: note = RuvC_domain
  SITE 17: note = RuvC_P1
  SITE 66: note = RuvC_P2
  SITE 102: note = RuvC_P3
  SITE 104: note = RuvC_P4
  SITE 107: note = RuvC_P5
  REGION 232..318: note = Tnp_domain
  SITE 240: note = Tnp_P1
  SITE 271: note = Tnp_P2
  SITE 279: note = Tnp_P3
  SITE 280: note = Tnp_P4
  SITE 291: note = Tnp_P5
MPKRTSNRTRVVIGGVDTHGRTHHAAVIDQQGRLLGDREFPADRGGYQQLLGWLGRHGQLEAVGVEGSGSYGAGLTRLLLDRGVKVVEVDRPDRRTRRQRGKSDPIDAEAAARAVLAGVATAPAKRRDGIVEAIRALRAARSGAIKARTAAINQLKGLLVTAPASVREGLDALPRAALVAACARLRPDEATLDDPVQGVKAALRAVACRIHQLDEELSLADQRLATLVRRAAPRLLKLHAIGVDHAGQLLTTAGQRPERLRGEAAFAHLCGVAPIPASSGATHRHRLHRGGDRDANRALHLAVVVRMRWCPRTRGYAERRTTEGLSKPEILRCVKRYLAREVYHALVADFEALHAT

SEQ ID NO: 20120 - protein, 347 aa, unidentified
  source 1..347: note = protein_896fac5
  REGION 7..147: note = RuvC_domain
  SITE 10: note = RuvC_P1
  SITE 53: note = RuvC_P2
  SITE 88: note = RuvC_P3
  SITE 90: note = RuvC_P4
  SITE 93: note = RuvC_P5
  REGION 210..305: note = Tnp_domain
  SITE 218: note = Tnp_P1
  SITE 248: note = Tnp_P2
  SITE 256: note = Tnp_P3
  SITE 257: note = Tnp_P4
  SITE 269: note = Tnp_P5
MEEITRIGMDTSKHVFQLHGVGATEEPVLRKKLRRKEMIAFFGKLPPTVVAIEACGGSHHWARLLQSFGHEVKLIPPQYVKPYVKRGKNDAADAEALCEAMSRPTMRFVPVKSAESQAALMLIGVRERLIRNRTQLANAIRGYAAEFGLSAAQGICKVEHLLERIATDETLPELARDLFALHAREYRQLQGEIAKVEARLMAWHRADECSRRLAKIPGVGPIGASLLVMKMPAPEGFRSGRHFAAWLGLTPKDHSTAGKIRLGGITRAGDETLRSVLVAGATALLRHVREGRGKNASPWLRELLKRKPPKLVAVALANKIARVAWKLMVTGGQYRADTAQPLHARAV

SEQ ID NO: 20121 - protein, 354 aa, unidentified
  source 1..354: note = protein_2e69dd6
  REGION 6..148: note = RuvC_domain
  SITE 9: note = RuvC_P1
  SITE 52: note = RuvC_P2
  SITE 87: note = RuvC_P3
  SITE 89: note = RuvC_P4
  SITE 92: note = RuvC_P5
  REGION 210..297: note = Tnp_domain
  SITE 218: note = Tnp_P1
  SITE 248: note = Tnp_P2
  SITE 256: note = Tnp_P3
  SITE 257: note = Tnp_P4
  SITE 269: note = Tnp_P5
MQITTIGLDLAKHWFQVHGVDANGHVVVRRRLRRSGVIAYFRSLEPCLVGMEACATAHYWARELSALGHTVKLMPPAYVKAYVKRNKNDATDAEAICEAVARPSMRFVPVKGAEQQSVLMLHRARSLLVRQRTMLVNALRAHMAEFGIIAPQGRRHVEILRQTIAHQQERLPELARSILQTIADQLNDTMERVREIEVRLVRLHRQNPISQLLATVPGVGIMSASAIAATTSNPTLFRSGREFAAWLGMTPRQNSSGGKDRLGRTSKRGDKYIRSLLIAGAVAVLRHARNRPARDGEWVRALLARKPTKVAAVALANKTARIVWAVMMRGDGYQAKAVLGQPAEWPSAHFSMRG

SEQ ID NO: 20122 - protein, 311 aa, unidentified
  source 1..311: note = protein_eb2fae5
  REGION 10..154: note = RuvC_domain
  SITE 13: note = RuvC_P1
  SITE 56: note = RuvC_P2
  SITE 96: note = RuvC_P3
  SITE 98: note = RuvC_P4
  SITE 101: note = RuvC_P5
  REGION 196..280: note = Tnp_domain
  SITE 204: note = Tnp_P1
  SITE 233: note = Tnp_P2
  SITE 241: note = Tnp_P3
  SITE 242: note = Tnp_P4
  SITE 253: note = Tnp_P5
MDNLSHGRVIGIDVSRDWLDVHCLPDGHRCKVPNAPAGHAAVADLARDRDAVVCFESTGGQEWQLWAVLETEGVAARQVPPAQVKAFAQSRGTRAKTDRIDAELIARFFAFRPEAGRSLPAEKLRLLRALTTKRAQLVEMRKRLLAQIRAHQKLGTAVMFEDVDTELKQRIDSLIKELEDRITLAIASDERLSETAGLLRSIPGIGPVASSMLVAEMPEIGTITGEEAAALTGLAPVAHDSGTLRGKRAIAGGRRALRHVMFQAALVAAHHNPSLKSFAERLRKAGKPHKVIITAVARKLVTIANALCKNR

SEQ ID NO: 20123 - protein, 334 aa, unidentified
  source 1..334: note = protein_2a34e3d
  REGION 10..158: note = RuvC_domain
  SITE 13: note = RuvC_P1
  SITE 60: note = RuvC_P2
  SITE 100: note = RuvC_P3
  SITE 102: note = RuvC_P4
  SITE 105: note = RuvC_P5
  REGION 202..288: note = Tnp_domain
  SITE 209: note = Tnp_P1
  SITE 239: note = Tnp_P2
  SITE 247: note = Tnp_P3
  SITE 248: note = Tnp_P4
  SITE 261: note = Tnp_P5
MSVPVEPLLLALDVGAKRHAFAWELKNHREVGEIANDLTTLRPFLKGLIAHAGSVRLLVEATGIYYLDLALLADQLGIEVSVINPKAGHNFAKALSQRNKTDRLDAEMLLEFLKRMPFQAWQAPSLARLELRHYGRHLVQLTEESTAIRNRLHALSSTHASPAYLKADLKRAITSLQTRIERIRTRALTLIRADAWIQERFEAVITVIGVADVSAVSLLSELLVLPPSLSARACASHAGLDPLIFESGTSVHKPARISRHGNKYLRRALFYPAMAAGLHDPRAAEFKARLLSKGKKKMQANVAIMRKMLTAIWAIIKNPQPYDGKKLYSCEQIA

SEQ ID NO: 20124 - protein, 343 aa, unidentified
  source 1..343: note = protein_71c5ca8
  REGION 6..148: note = RuvC_domain
  SITE 9: note = RuvC_P1
  SITE 52: note = RuvC_P2
  SITE 87: note = RuvC_P3
  SITE 89: note = RuvC_P4
  SITE 92: note = RuvC_P5
  REGION 211..299: note = Tnp_domain
  SITE 219: note = Tnp_P1
  SITE 249: note = Tnp_P2
  SITE 257: note = Tnp_P3
  SITE 258: note = Tnp_P4
  SITE 270: note = Tnp_P5
MQIVRIGLDLAKYVFEVHGVDSRGKAVVRKTLRRDAVSHFFANLPPCLVGVEASNGAHYWAKVLTDLGHEVRLISPQFVTPYVKSNKNDRNDAEAICEAVGRPSMRFVPPKSADQLAVQAIHRIRRRLVADRVRLVNQIRGLLSEHGIVIARDISQLRRRLADIVGRSDDGLSELVRSLMRDLQTEMVDLDLRITSYDRRIREIFRNSEPCQRLGKIEGIGPVTATALIAAVGDRSCFKNGRQFAAWLGLVPKQRSSGGRTRLYGISKRGDRYLRTLLIHGARAALGRAGGKQDPRSLWLNKLRQRRHPNIAAVALANKNARIVWAMLAGDTSYEPAPTVKAT

SEQ ID NO: 20125 - protein, 322 aa, unidentified
  source 1..322: note = protein_62e13b9
  REGION 4..153: note = RuvC_domain
  SITE 7: note = RuvC_P1
  SITE 57: note = RuvC_P2
  SITE 97: note = RuvC_P3
  SITE 99: note = RuvC_P4
  SITE 102: note = RuvC_P5
  REGION 194..280: note = Tnp_domain
  SITE 202: note = Tnp_P1
  SITE 232: note = Tnp_P2
  SITE 240: note = Tnp_P3
  SITE 241: note = Tnp_P4
  SITE 253: note = Tnp_P5
MAVIGVDIAKRSFDLAVLQSNGKHRTKGRLSNDPSGFAVFADWLQQHAEPGAWIVMEATGTYHEALAEHFHALGYRIAVLNPAQIARYAQSQLQRSKTDKLDAKLIATYGQRHEDSLRAWHPEPVSIRTLRALTRRLEDLQSLRQMELNRLEVSPEKVQNSIQAVVQRLDEQIAWTLEQIKRHIDDDPDLSGKRDLLVSIDGIADKTAALILAELGDIGRFADARAVTAFAGLNPRLQESGLYRGHTGISRMGSVRLRSALYLPAVVALTYNPAIKAQAERLKTRGKKGKQTVCAAMRKLLTIAYGVLKSGKPFDPALAIAH

SEQ ID NO: 20126 - protein, 320 aa, unidentified
  source 1..320: note = protein_578cab9
  REGION 10..150: note = RuvC_domain
  SITE 13: note = RuvC_P1
  SITE 55: note = RuvC_P2
  SITE 95: note = RuvC_P3
  SITE 97: note = RuvC_P4
  SITE 100: note = RuvC_P5
  REGION 190..276: note = Tnp_domain
  SITE 198: note = Tnp_P1
  SITE 227: note = Tnp_P2
  SITE 235: note = Tnp_P3
  SITE 236: note = Tnp_P4
  SITE 248: note = Tnp_P5
MTILTSQTVVGVDVAKAEVLVYRADLQTTQAIPNNRTALKRWLKTLPAQSGIAVEATNIYHLDTVELAHELGHQVYVVDGYRLSHYRRGVGQRAKNDPCDARLLARYLAHEQGGLRAWSPPPKAYKALQSLLHRRAALIKARVSLAQSWADEPRLEEELKCLMETFKHSDLAIQKKLRDLSKEAGVAENIERCKAIEGVGVLTATGFATAFLRGEFKDSNAFIAFLGMDLRVNDSGKKTGSRSLTKKGDPEIRRLAHNSAMAACRSATWKPFYEGYLARGFKKTQALVILARKLARVAFALMKNQSEYQPNRPLQGCPAT

SEQ ID NO: 20127 - protein, 317 aa, unidentified
  source 1..317: note = protein_9afdd14
  REGION 7..153: note = RuvC_domain
  SITE 10: note = RuvC_P1
  SITE 58: note = RuvC_P2
  SITE 98: note = RuvC_P3
  SITE 100: note = RuvC_P4
  SITE 103: note = RuvC_P5
  REGION 193..277: note = Tnp_domain
  SITE 201: note = Tnp_P1
  SITE 230: note = Tnp_P2
  SITE 238: note = Tnp_P3
  SITE 239: note = Tnp_P4
  SITE 250: note = Tnp_P5
MDIKLAIGIDVSKRTLDIDVVPQGGPRQFSNDEKGIALLVEHLTELNVNGEVDRVVMEATGGYETPVSMALAAAGLPVVVINARQIRDFAKACGILAKTDRLDARVIARFAQQIRPPVRPLPDEMQREFADLLDRRSQLVVMRAQEKTRLDKAPAVAQKSLKEHIAWLDARIKSTDLDMTHRLRTSEAWKNKVDLLDSMPGVGKVTIFTLLGRLPELGTLNRQQIAALVGLAPFNDDSGRRRGQRYIRGGRADVRKALFMAAVTAMQHNPAITEFYERMRAAGKPFKVAIVGCMRKLLTILNVMVKTGRPWQNNRPA

SEQ ID NO: 20128 - protein, 316 aa, unidentified
  source 1..316: note = protein_766d6b7
  REGION 7..152: note = RuvC_domain
  SITE 10: note = RuvC_P1
  SITE 54: note = RuvC_P2
  SITE 94: note = RuvC_P3
  SITE 96: note = RuvC_P4
  SITE 99: note = RuvC_P5
  REGION 190..274: note = Tnp_domain
  SITE 198: note = Tnp_P1
  SITE 227: note = Tnp_P2
  SITE 235: note = Tnp_P3
  SITE 236: note = Tnp_P4
  SITE 247: note = Tnp_P5
MSEPVYVGIDIAKASFEVAASGETQTLSLGNDEAGHAELCQVLVPLAPRLILLEATGGHEQGLALALAAAGLRVSVINPRQARDFARCMGKLAKTDRIDAQVLRGFAELLEAQGHEPRALADEQQRELTAMVVRRRQLVAMLVAERQRLALAHPKAKASILVIMDAIAAQLHDIDGELREHVRAHHADLARLLTSVKGVGPTTASTLLAQLPELGKLNRKQITSLVGLAPVNRDSGTLRGQRHIFGGRADVRRVLYVAALVGTRFNPVLKAFYASLLATGKPKKVALVACMHKLLVILNAIARTRQPWRDDFAAAV

SEQ ID NO: 20129 - protein, 293 aa, unidentified
  source 1..293: note = protein_2fb7d9a
  REGION 20..98: note = RuvC_domain
  SITE 37: note = RuvC_P3
  SITE 39: note = RuvC_P4
  SITE 42: note = RuvC_P5
  REGION 160..246: note = Tnp_domain
  SITE 168: note = Tnp_P1
  SITE 198: note = Tnp_P2
  SITE 206: note = Tnp_P3
  SITE 207: note = Tnp_P4
  SITE 218: note = Tnp_P5
MIVIGIDPHKSSHTATAVDPATNTARIRQLSRGGRRKNDRIDAAAAACVAVLQGDARPVDPEGPTDILALLDERRTNMSHSRTRLVNQLHALLRQLFAGGAPTSLTAASATTLLRGFRARSGVDRTRVGLCRDLIADIRRLDDQLAANEKQMAHTLDEHGTPLREVDGTGAVTAARLIGRTGRASRFPTAAAYANYNGSAPVQIASADTDRHRLSRYGDRQLNSALYTVAMVQTRMPASAGRAYYDKKIDEGKPPAAARRALKRHLSDHVWRIMLADEKRRYRRNEADTASAA

SEQ ID NO: 20130 - protein, 340 aa, unidentified
  source 1..340: note = protein_2333df3
  REGION 7..147: note = RuvC_domain
  SITE 10: note = RuvC_P1
  SITE 53: note = RuvC_P2
  SITE 88: note = RuvC_P3
  SITE 90: note = RuvC_P4
  SITE 93: note = RuvC_P5
  REGION 212..298: note = Tnp_domain
  SITE 220: note = Tnp_P1
  SITE 250: note = Tnp_P2
  SITE 258: note = Tnp_P3
  SITE 259: note = Tnp_P4
  SITE 271: note = Tnp_P5
MTQSSTITIDLAKTVFQVAFFNKFGVLKSNEKMTERKMLSFIVNHPEAIICMEACSSAHYYGRKFEGQGHKVKLIPPHIVAKYRAGNKNDANDALAIYEALKRPNIYSVAVKSISQQDLASLLKLRKGYIKQRTQVSNRARGLGAEYGVKLPEGITSLKKRLPDILEDDGNQLTPASRFILADLLEEVHRLDSKIKHATAQLVELAKSIPECELLTSLPGVQWITASALYARLGNGSEYKYGRNASASVGLVPSHSGSGGKNKLYGITKRGDKYLRSLVTHGARAVVSNIRDKQDKLSCWIRALSSKHHFNKITIAVANKLVRMALAMLKSATPYRADLA

SEQ ID NO: 20131 - protein, 345 aa, unidentified
  source 1..345: note = protein_71f5f78
  REGION 6..148: note = RuvC_domain
  SITE 9: note = RuvC_P1
  SITE 52: note = RuvC_P2
  SITE 87: note = RuvC_P3
  SITE 89: note = RuvC_P4
  SITE 92: note = RuvC_P5
  REGION 212..299: note = Tnp_domain
  SITE 220: note = Tnp_P1
  SITE 250: note = Tnp_P2
  SITE 258: note = Tnp_P3
  SITE 259: note = Tnp_P4
  SITE 271: note = Tnp_P5
MQITTVGLDLAKRIFQVHAVDASGDVVVRKTLRRSQVLPFFTKLPPCLIGMEACGTSHHWARELTELGHEVRLMPPSYVKPYVKRGKNDAVDAEAICEAVTRPTMRFVVMKSAEQQAALSLHRTRNLLVKQRTQLVNMIRGLLAEFGIDIPEGLERALKLARQIAAKKSTLDVPAMALQILCLLCEQVLDTHARLQTIDRSILAQQRTNEVARRLSTIPGIGPIGATALAASVADPSQFRSGREFAAWLGLTPSQNSSGGKDRLGHITKMGDRYLRKLLVIGATSLIRRARHKPDAADPRLLALLARKPARVASVAMANKMARVVWAIMARGETYQARHAPNLAA

SEQ ID NO: 20132 - protein, 342 aa, unidentified
  source 1..342: note = protein_50ebc94
  REGION 6..148: note = RuvC_domain
  SITE 9: note = RuvC_P1
  SITE 52: note = RuvC_P2
  SITE 87: note = RuvC_P3
  SITE 89: note = RuvC_P4
  SITE 92: note = RuvC_P5
  REGION 211..298: note = Tnp_domain
  SITE 219: note = Tnp_P1
  SITE 249: note = Tnp_P2
  SITE 257: note = Tnp_P3
  SITE 258: note = Tnp_P4
  SITE 270: note = Tnp_P5
MQITTIGIDLAKTVFQLHAVDADGATFIRKRLRRAEVLSFFADLDPCLIGMEACATSHHWARELTKFGHTVKLMPPAYVKPYVKRGKNDATDAEAICEAASRPNMRFVPVKSADQQAVLMLHRTRALLIRQQTMLANAFRAHLAEFGIVVAQGIRHVRALIERVFGEDPIDLPALARIALRPLVAQLMELRLNIKMIEKELLAWHRTSQESRRLETIPGVGFITATAIAATVTDPSHFRSSREFSAWLGLTPRQNSSGGKDRLGRVSKMGNGYLRSLIVVGATAMIRYAREKGAVSARWINALLEKKPARLVSVAVANKTARIAWALLVRKEDYRVPVPVAA

SEQ ID NO: 20133 - protein, 391 aa, unidentified
  source 1..391: note = protein_3571ec8
  REGION 4..157: note = RuvC_domain
  SITE 7: note = RuvC_P1
  SITE 56: note = RuvC_P2
  SITE 96: note = RuvC_P3
  SITE 98: note = RuvC_P4
  SITE 101: note = RuvC_P5
  REGION 261..348: note = Tnp_domain
  SITE 269: note = Tnp_P1
  SITE 299: note = Tnp_P2
  SITE 307: note = Tnp_P3
  SITE 308: note = Tnp_P4
  SITE 321: note = Tnp_P5
MRFVGIDIGAERHMVASIDEQSTVLQRPTAFREDAEGYQQLIGLLGPPAGTLIVMEATGHYWQNLFAMLAAEGFVIALINPLRTRRFAEEDLVRTKTDAIDALGLARFGQQKRPPATLLPDVATRDLRELVRLRARFLQDFGDRTRQLHRVVDLSFPEFTRYVVQLDSPRATALLQAFPTAAAVRTASERQIASIRGGQRPVGRELARALKSAARTSVGHHDTEVYARQVRFFCEDLDLLRRRLGNLERDIEHLLAAHQVGQLLTTIEGIGPQTAAKLVAELGDPAAFRSAGALAAYVGAIPGLRQSGNQTWDRAGLTRVGHAKLRAALWMPTLVAVRRNPWLRAYYQRLRARGKLPKVALMAAMRKLLIAIYTVAKHRRPFIPIITMTTP

SEQ ID NO: 20134 - protein, 315 aa, unidentified
  source 1..315: note = protein_e753e87
  REGION 12..162: note = RuvC_domain
  SITE 15: note = RuvC_P1
  SITE 57: note = RuvC_P2
  SITE 97: note = RuvC_P3
  SITE 99: note = RuvC_P4
  SITE 102: note = RuvC_P5
  REGION 192..277: note = Tnp_domain
  SITE 200: note = Tnp_P1
  SITE 229: note = Tnp_P2
  SITE 237: note = Tnp_P3
  SITE 238: note = Tnp_P4
  SITE 250: note = Tnp_P5
MAMLVPVSKPIVGVDVAKNELVIYQAERDLLETIANTKAAIKKWLKALPGTVTIAIEATNIYHVLFADLAYEAGCDIYMIGGYELSHYRKGVNVRAKTDALDARLLARYLKNEAEELHPWTPPSPLYRQLLSLFRRRAALVQARTSLVQSWANEPLLKTSFAAQVRSMQRLEALVEKMIKDLLEKAGLMGQLKRCMKVEGIGFLTAARLLATFQRGEFRGCDAFIAFLGMDLRVSKSGQKDGRRSLTKRGDSEARRLLHNAAMSASRTATWKPLYEELRARGFSTTQALVILARKLARVVFALLKNQSEYQSKVA

SEQ ID NO: 20135 - protein, 305 aa, unidentified
  source 1..305: note = protein_2c73608
  REGION 11..148: note = RuvC_domain
  SITE 48: note = RuvC_P2
  SITE 88: note = RuvC_P3
  SITE 90: note = RuvC_P4
  SITE 93: note = RuvC_P5
  REGION 184..268: note = Tnp_domain
  SITE 192: note = Tnp_P1
  SITE 221: note = Tnp_P2
  SITE 229: note = Tnp_P3
  SITE 230: note = Tnp_P4
  SITE 241: note = Tnp_P5
MGSTFRKSALDVAILPQEEVFAVGNDHAGIDELAERLKGIGVDAIALEATGGFEMLAVAGLSAAGLTVLVVDPAQVRAYAHAIGRRAKTDPIDAAVIAAFVLATKPEIRPLRDAETQALSELVARRRQIVQMVVAEENRLRMALAKQAQKSIKRLLKALRRELESLDADLDSHIRKSPVWRVREALLTSVPGVGATTARTLLAELPELGSLDRRQIASLAGLAPWTRQSGKWKGKSFIGGGRGKVRAVLFMAALVASRYNPDLKAFRDRLVAAGKPKIVATVATMRKLLTILNAIIRDGRPWQNA

SEQ ID NO: 20136 - protein, 343 aa, unidentified
  source 1..343: note = protein_3741bca
  REGION 5..153: note = RuvC_domain
  SITE 8: note = RuvC_P1
  SITE 55: note = RuvC_P2
  SITE 92: note = RuvC_P3
  SITE 94: note = RuvC_P4
  SITE 97: note = RuvC_P5
  REGION 212..300: note = Tnp_domain
  SITE 220: note = Tnp_P1
  SITE 250: note = Tnp_P2
  SITE 258: note = Tnp_P3
  SITE 259: note = Tnp_P4
  SITE 271: note = Tnp_P5
MEHYAGIDVSLKESSVCVVDAKGKVVREVKVASEPEALVECFDELELLVVRIGLEAGPLSQWLHAALVAAGHEVVLLETRHVKAALSAMTVKTDRKDARGIAQLLRMGWYRPVHAKSAASQDSRALLVGRKLLQSKLLDVELSIRGILRGYGLKVGEVSRGRFEARIRELIAGHVTLSMVIGGMLAARATLWSEFTKLHREMLKIARGDKICRRLMSTPGVGALVALTYRSAVDDPARFGKSSTVGAYFGLTPKKYQSGETDRDGGVTKVGDAMVRTALFEAAHIMLTRATRFSSLKRWALDVAQCRGMKRAKVALARKLGVVLHRMWVDATDFRWGAVPMAA

SEQ ID NO: 20137 - protein, 344 aa, unidentified
  source 1..344: note = protein_e516c8e
  REGION 6..147: note = RuvC_domain
  SITE 9: note = RuvC_P1
  SITE 52: note = RuvC_P2
  SITE 87: note = RuvC_P3
  SITE 89: note = RuvC_P4
  SITE 92: note = RuvC_P5
  REGION 211..297: note = Tnp_domain
  SITE 219: note = Tnp_P1
  SITE 249: note = Tnp_P2
  SITE 257: note = Tnp_P3
  SITE 258: note = Tnp_P4
  SITE 270: note = Tnp_P5
MKLTTVGIDLAKNVFQIHGVDERGKALVRKKVSRDQMATWFARLEPCLIGMEACGSAHHWARKLQAMGHTVKLMAPQFVKPYVKSNKNDAADAEAICEAVTRPNMRFVPIKNTEQQAALSIHRARQGFVKARTAQGNQIRGLLAEFGLIVPQGIAHIVTRVPELIEDATNELTAPFRQLIDRLIEHFKELDRQVKELEVQIKVWHRDNALSRKLEEIPGIGPITASALVATVGNATSFEDGRQMAAWLGLVPKQNSSGGKQLLLGISKRGDVYLRTLLIHGARSVVRMAQAKIAAGIAQPSWLHKLLERKHANVAAVALANKNARIVWALLAHGREYEAGYAMA

SEQ ID NO: 20138 - protein, 350 aa, unidentified
  source 1..350: note = protein_34cc0a8
  REGION 12..159: note = RuvC_domain
  SITE 15: note = RuvC_P1
  SITE 65: note = RuvC_P2
  SITE 101: note = RuvC_P3
  SITE 103: note = RuvC_P4
  SITE 106: note = RuvC_P5
  REGION 231..315: note = Tnp_domain
  SITE 237: note = Tnp_P1
  SITE 267: note = Tnp_P2
  SITE 275: note = Tnp_P3
  SITE 276: note = Tnp_P4
  SITE 288: note = Tnp_P5
MDSLSEIVDVVIGVDTHVASHSAAVVSAHTGAVLAEITVEATPEGYEELVEFANEHSGLRAWSIEGTGGHGAGLARHLAKNDELVVELDRPVRQKRRNGAKSDPLDAIRAAREALSRTKLGTPRSTGERQALSVLLAARSSAVGAAKVAQQQLFSLVIAAPEQLRSKLRGEGTLAMARTASRFRLQTHWDLETRTTAAVLRDLAQRALELRVEADRHEKAILAIVRAWRPEMLERKGVGPIVAATVLCAWSHPGRVRSEAAFAMLGGVAPIPANSGQVTARFRLNPYGDRQLNRAFHTVVLSRLRWDEETKAYVKRRTAEGKTPREIKRCLKRYVARELFRLLENEPSRT

SEQ ID NO: 20139 - protein, 340 aa, unidentified
  source 1..340: note = protein_4a8b27b
  REGION 7..149: note = RuvC_domain
  SITE 10: note = RuvC_P1
  SITE 53: note = RuvC_P2
  SITE 88: note = RuvC_P3
  SITE 90: note = RuvC_P4
  SITE 93: note = RuvC_P5
  REGION 209..291: note = Tnp_domain
  SITE 217: note = Tnp_P1
  SITE 247: note = Tnp_P2
  SITE 255: note = Tnp_P3
  SITE 256: note = Tnp_P4
  SITE 268: note = Tnp_P5
MEEVSVVGVDLVKQFFQVHGATADGRVLFRKKLSRSQFPKFIAGLRPCVVAMEACGTAHYWGREFASMGDDVRLIPPVYVKAFVKRQKNDVADAEAVAEAAMRPTMRTVSVKTSEQQARAMLFRTRDLLVGQRTQMVNALRGHLAQHGIIVGKGLGNVERLATLIAADDLPELVRTMGRLYLSQITQLHEEIDQIDRRIAAEAKQSDIVRRLQKVPGIGPICAMAITAFAPPMEAFRSGRDFAAWLGLVPRQHSSGGKQKLGRTSKMGQRDIRRLLIIGAMSVVHWKGRGGGGPGSWLSNMLGRKPRMLVAIAMANKLSRIVWAMLWRNQEYRDPSGAVC

SEQ ID NO: 20140 - protein, 423 aa, unidentified
  source 1..423: note = protein_e381e03
  REGION 6..159: note = RuvC_domain
  SITE 9: note = RuvC_P1
  SITE 57: note = RuvC_P2
  SITE 98: note = RuvC_P3
  SITE 100: note = RuvC_P4
  SITE 103: note = RuvC_P5
  REGION 222..307: note = Tnp_domain
  SITE 229: note = Tnp_P1
  SITE 259: note = Tnp_P2
  SITE 267: note = Tnp_P3
  SITE 268: note = Tnp_P4
  SITE 279: note = Tnp_P5
MAGVMIGIDPHKGSHTAFVIDGREKPLGQLRVRASCEQAEALLGWAGRWRQRTWAIEGARGLGQLLAQQLLAAGERVLDVPPKLTARVRLLESGQINKTDENDARAVAIAALRARQLPQLTVEDQTIVMRVWARRYHDLGRLRTQAVCRLHTVLCELVPGGVRKQLRTSQAIAVVDSITAESPVAQAKLELAHDLVADLQRLDAQRREVKRRVSRAVAAAPTSITEVYGVGPIVAACVLGYVRDIRRFPSRDRFASYNGTAPIEVSSGDRKIYRLSRRGNRQLNHAIHIAAVSQISHRGSEGHAYYQRKRAKGMTGKCALRALKRKISDTLYERMLHDIRPRKDPGGHSGNDAASSAAGSHPDGPALRTSHSRATANSKTATTNQRPLTSPPAPDKRRTSRSGTGVKLQPRPRPRRGRGQERA

SEQ ID NO: 20141 - protein, 339 aa, unidentified
  source 1..339: note = protein_c7f8717
  REGION 6..148: note = RuvC_domain
  SITE 9: note = RuvC_P1
  SITE 52: note = RuvC_P2
  SITE 87: note = RuvC_P3
  SITE 89: note = RuvC_P4
  SITE 92: note = RuvC_P5
  REGION 211..298: note = Tnp_domain
  SITE 219: note = Tnp_P1
  SITE 249: note = Tnp_P2
  SITE 257: note = Tnp_P3
  SITE 258: note = Tnp_P4
  SITE 270: note = Tnp_P5
MNRIVVGVDIAKRVFQLHWVEPETGEIVALQLKREKFLEHFANRRSCLIGMEACGGSQHWARSLQKLGHEVKLLSGRMVKPFVVGNKNDAADARGIWMAVQQPGIKAVAVKSEEQQAVLALHRMREQLVKFRTAQINGLRGLLTEYGEVMPQGRAGIKRDIPSALGRLADRLPAMVIETLREQYARLAEFDERISQIERRLRQWQREDSATQRIAQIPGVGLLSATAAIATMGDARAFKSGRQFAAWLGLVPQQTGTGGRVRLLGISKRGDKYLRTLLIHGARSVLTHSQSPPEWLSELVKRRPKNVAVVAMANKMARTIWALTAHERAYQSGYVSQPA

SEQ ID NO: 20142 - protein, 337 aa, unidentified
  source 1..337: note = protein_49ead00
  REGION 24..171: note = RuvC_domain
  SITE 27: note = RuvC_P1
  SITE 76: note = RuvC_P2
  SITE 116: note = RuvC_P3
  SITE 118: note = RuvC_P4
  SITE 121: note = RuvC_P5
  REGION 211..285: note = Tnp_domain
  SITE 219: note = Tnp_P1
  SITE 249: note = Tnp_P2
  SITE 257: note = Tnp_P3
  SITE 258: note = Tnp_P4
  SITE 271: note = Tnp_P5
MDRLSPVTRICKVGFTMENELHFIGIDVAKAKLDVDILRPDGRHRCKKFDNTLSGHEALVRWLRGHDVNRAHVCMESTSTYMEDAAAHLSDAGYTVSIINPALSKAFAQSEGLRSKTDKVDARMLAHFCREKRPSAWEAPHPTERALKALVLRHQALTEMQTQEKNRRETAPEVQLASIDILLGCLSAELARIEKQIKDLTDNDPDMKRRRKLLNSIPGIGEKTAAVLLAYTGLRLKFGTARQFAAYAGLTPVQHESGSSVMRASRMSKAGAGSTAQGVIHASVIGAVPYGVGKSVQEKAGRERKAGKSHHRGDDAKAGAGGLWSTEVRKGVRCVTA

SEQ ID NO: 20143 - protein, 337 aa, unidentified
  source 1..337: note = protein_431b306
  REGION 14..165: note = RuvC_domain
  SITE 17: note = RuvC_P1
  SITE 65: note = RuvC_P2
  SITE 103: note = RuvC_P3
  SITE 105: note = RuvC_P4
  SITE 108: note = RuvC_P5
  REGION 208..295: note = Tnp_domain
  SITE 216: note = Tnp_P1
  SITE 246: note = Tnp_P2
  SITE 254: note = Tnp_P3
  SITE 255: note = Tnp_P4
  SITE 268: note = Tnp_P5
MKKIKELKQFSESVGIDVSKLTLDVFLYNRKKHRQFLNNPKGFILMQKWIKSEVSCESDLIYCFEHTGWYCILLSHFLHEQSLFYCCINPLELKRSMGFKRGKTDKTDSFEIARFAWLRKEELDPSVPMSMKLIELQRLMSVREQFVKQSTALKNLEKGLLVTIENRTSDIGLKVIRQSIEQLEQQVGKVEKAMEELIKTEPDMKTNYQLSKSVKGVGKILGIQMLLHTHNFTRFEQWRQFSAYCGLVPYPFQSGTSINGRRKIHAISDVKMKSLLSMSAISAIQHDSELKLYYQKRVEEGKPKMVVLNIIRNKIVSRIFAAVKRGTPFVELSKFAA

SEQ ID NO: 20144 - protein, 336 aa, unidentified
  source 1..336: note = protein_aebf3df
  REGION 5..145: note = RuvC_domain
  SITE 8: note = RuvC_P1
  SITE 51: note = RuvC_P2
  SITE 86: note = RuvC_P3
  SITE 88: note = RuvC_P4
  SITE 91: note = RuvC_P5
  REGION 211..292: note = Tnp_domain
  SITE 218: note = Tnp_P1
  SITE 244: note = Tnp_P2
  SITE 252: note = Tnp_P3
  SITE 253: note = Tnp_P4
  SITE 265: note = Tnp_P5
MEQIIGIDLAKRVFQVNIVSAQGEKKANKMITREKLTAFIVQQPPSRIVMEACGSANYWSRQFRQYGHEVKQISPQYVAPFRMGSKNDKNDAAAIVEADSRPGMRYVPEKSIEQQDIQCLHRVRQRLMKNKTALINQIRGLGLEYGIAIPEGAHKIMAHLPEHLEDAENELTTLSRELFHEMLQELQDNQQRIKTLDLRLALISQQNEDTLRLKSIPGIGPLGASALTVALGDSADWHFASYLGLVPKEHSSGGKVRLLGITKRGDGYLRGLLIHGARSVVYRVINLPEERCGGLQRWLKGIIARSGVNKAVVALANKNARIAWALINQKTEYIVK

SEQ ID NO: 20145 - protein, 323 aa, unidentified
  source 1..323: note = protein_e4604bf
  REGION 9..131: note = RuvC_domain
  SITE 36: note = RuvC_P2
  SITE 71: note = RuvC_P3
  SITE 73: note = RuvC_P4
  SITE 76: note = RuvC_P5
  REGION 194..281: note = Tnp_domain
  SITE 202: note = Tnp_P1
  SITE 232: note = Tnp_P2
  SITE 240: note = Tnp_P3
  SITE 241: note = Tnp_P4
  SITE 253: note = Tnp_P5
MHYVDRETGGIVNKAIKRAKFLEFFANRAACLIGMEACGGAHHWARQLTQMGHEVRLMPAEFVKAFNIRNKNDAADARAIWLAVQQPGKPVAVKTEMQQAMVALHRMREQLVKFRTMQVNGLRGLLTEYGEVMSKGRAKLDKEIPAVLGRIAERLPAALIDTLREQWNGLAKLDEQIAEIERRMREWKKEDKAVKAISEIPGVGLLTATAAVAMMGDPKAFSSGREFAAWAGLVPKQTGSGGKVNLHGISKRGDMYLRTLLIHGARSVLTHAKEPGEWIEQMKKRRPPNVVIVALANKMARTIWAVLAHDRPYQKGYVSVKPA

SEQ ID NO: 20146 - protein, 311 aa, unidentified
  source 1..311: note = protein_cc5a125
  REGION 5..151: note = RuvC_domain
  SITE 8: note = RuvC_P1
  SITE 52: note = RuvC_P2
  SITE 92: note = RuvC_P3
  SITE 94: note = RuvC_P4
  SITE 97: note = RuvC_P5
  REGION 188..272: note = Tnp_domain
  SITE 196: note = Tnp_P1
  SITE 225: note = Tnp_P2
  SITE 233: note = Tnp_P3
  SITE 234: note = Tnp_P4
  SITE 245: note = Tnp_P5
MQDIIGIDISKDRLDAFRLSDRKHKGFGNDKAGFKNLLRWIGNPEGLRIVYEPTGPYHRAMEEALARAGHALVKVNPRQARRFAEATGTQAKTDRVDAMLLARMGLALDLPPRPVRGELMNELRELHVARLALIKDRTATGNRTDKAVIGLIRRQAKARLAIIEKQLVEIDETIAARIADDPELAGRLDILTSIPGIGAVTACMLLIEMPELGTLEPKQAASLAGLAPFTRRSGKWKGKEMIRGGRATLRSAIFMPALVAIRFNAALKCKYRQLIESGKAPKVAITAVMRKLVLLANALLRDGRKWVDRPA

SEQ ID NO: 20147 - protein, 344 aa, unidentified
  source 1..344: note = protein_176febc
  REGION 6..146: note = RuvC_domain
  SITE 9: note = RuvC_P1
  SITE 52: note = RuvC_P2
  SITE 87: note = RuvC_P3
  SITE 89: note = RuvC_P4
  SITE 92: note = RuvC_P5
  REGION 211..295: note = Tnp_domain
  SITE 219: note = Tnp_P1
  SITE 249: note = Tnp_P2
  SITE 257: note = Tnp_P3
  SITE 258: note = Tnp_P4
  SITE 270: note = Tnp_P5
MTIMMLGIDLGKNSCSVAGLDSDGKVVLRRRMQTKTVVSLASKLAPCTVAMEACCGAHYLGRLLAAQGHDVRLMSPEYVRPYVKAQKNDDRDAEAIAEAATRPTMRFVELKSQAQLDVQSLHRARSRLVGARTTLINQLRAILLERGTTIAQRRRTLERAVDVLLADPDFMTGSRIRRLLSDMRQEWIDLDRRIEALDREFVELARDNAAARRLTSIPGIGALNATALVAAVGDGATFAKARDLGAWLGLVPRQHTTGGKPRLLGISKRGNKYLRTLLIHGARAALPSLARSPTLLGAWLRNLLARRHRNTVVVALANKLARIVWVALRQSATFGVGQAAVATT

SEQ ID NO: 20148 - protein, 413 aa, unidentified
  source 1..413: note = protein_bdb3f06
  REGION 22..176: note = RuvC_domain
  SITE 25: note = RuvC_P1
  SITE 73: note = RuvC_P2
  SITE 113: note = RuvC_P3
  SITE 115: note = RuvC_P4
  SITE 118: note = RuvC_P5
  REGION 283..368: note = Tnp_domain
  SITE 291: note = Tnp_P1
  SITE 321: note = Tnp_P2
  SITE 329: note = Tnp_P3
  SITE 330: note = Tnp_P4
  SITE 342: note = Tnp_P5
MSPTTGERMLPSENHPTPTVFAGLDVGKSFHHLCALTADGKRVYDRKVDNDEIELRTVLTQLLQRGPVLLVVDQPAGIGALPLAVARDLGVDVAYLPGLAMRRIADLHPGQSKTDARDAYVIADAARTLPHTLRRASVSDATLAELTVLLGYDDDLANETTRLTNRARDLLMNISPALERALGPRITHPAVRALITQFPTPELLRAADPDHVAALLRANAPRIHTTIHTEVTQALGAQTVVIPGTTAAGRVLTSIIRQLDATLTERTQLLTELENGLDAHPLGKVLTSMPGVGVRTALKLLTIIGDGAAFPTAGHLAAYAGLAPVTRRSGTSIRGESPSRRGNRALKSALFLSAFAALKDPASRAYYDKKRAEGKRHNAALICLSRRRVDVLHAMLRTGQRYRSPTPNTARAA

SEQ ID NO: 20149 - protein, 340 aa, unidentified
  source 1..340: note = protein_8178a31
  REGION 7..149: note = RuvC_domain
  SITE 10: note = RuvC_P1
  SITE 53: note = RuvC_P2
  SITE 88: note = RuvC_P3
  SITE 90: note = RuvC_P4
  SITE 93: note = RuvC_P5
  REGION 211..298: note = Tnp_domain
  SITE 219: note = Tnp_P1
  SITE 249: note = Tnp_P2
  SITE 257: note = Tnp_P3
  SITE 258: note = Tnp_P4
  SITE 270: note = Tnp_P5
MKEVTIIGIDLAKRSFQLHGAGSDGTVAFRRKLSRGKLLGFLALQPRCVVAIEACASAHYWGREIEQLGHDVRLVPPIYVKPFVKRQKNDAADAAAICEAASRPTMRFVAVKSAKQQSRGMLFRTRDLLVRQRTQTINALRGHLAEFGIVAPQGPAHVGKLALALEDPGSGLPEAVRELATILLEQIARLSAKVDGLGKKLQASARQDEEAMRLMTVPGIGPVCAMALQAFAPPMDSFRRGRDFAAWLGLVPRQHTTGGKPRLGKISRMGQRDLRRLLITGAMMVVRHAARRGETADPWLAGMLARKPRMLVAVALANRMARIVWALETRKETYRVPAAA

SEQ ID NO: 20150 - protein, 343 aa, unidentified
  source 1..343: note = protein_2681a36
  REGION 6..148: note = RuvC_domain
  SITE 9: note = RuvC_P1
  SITE 52: note = RuvC_P2
  SITE 87: note = RuvC_P3
  SITE 89: note = RuvC_P4
  SITE 92: note = RuvC_P5
  REGION 211..299: note = Tnp_domain
  SITE 219: note = Tnp_P1
  SITE 249: note = Tnp_P2
  SITE 257: note = Tnp_P3
  SITE 258: note = Tnp_P4
  SITE 270: note = Tnp_P5
MEIITIGLDLAKHVFQVHAIDADGKAIVRKAFRRSQLAPFFAALPPCLIGIEACGTAHYWARQLSEMGHEVRLMPPAYVKPYVKRGKNDANDAEAICEAVTRPTMRFVPIKSVEQQAALAMHRARALLVRQRTQLVNAIRGLLAEFGVEIASGVEQALKLAQRFVDGEAIDATAAASGVISLLSQQALDVQAKIGVLEREILIWHRGNETSLRLATAPGIGPIVASAIVASVGDPGQFSSGRQFAAWLGLTPRIASTGGKERLGRVTKMGDKYLRRLLFLGMMSIVRRAKQKPEAHPHAARLLARKPTRLAAVAMANKTARVIWAMMARSEDYRCDRDTICAA

SEQ ID NO: 20151 - protein, 407 aa, unidentified
  source 1..407: note = protein_77dfd89
  REGION 4..160: note = RuvC_domain
  SITE 7: note = RuvC_P1
  SITE 59: note = RuvC_P2
  SITE 97: note = RuvC_P3
  SITE 99: note = RuvC_P4
  SITE 102: note = RuvC_P5
  REGION 269..355: note = Tnp_domain
  SITE 277: note = Tnp_P1
  SITE 308: note = Tnp_P2
  SITE 316: note = Tnp_P3
  SITE 317: note = Tnp_P4
MLFVGDDWAEAHHDVCLMNDAGEVLARRRVSEGLAGIGVLHELVADHAEDPNDVVIGIETDRGLWVQALVAAGYQLYAINPLAVARYRDRHHVAGAKSDAGDAKVLADLVRTDRHNHRPIAGDSDEVGAIKVLARAHQNLIWSRTRQTNAMRSALREYYPAALVAFDDLASNDCLAVLAKAPTPQAGARLSIGQISAALKRGGRQRNIDRRSREIQHALRADQLTTSEMISDAFAATTTAAVSVIAELNRQIAKLEHTLTQRFEQHPDADIYRSLPGLGVILGARALGEFGDDPERYATAKSRKNYAGTSPLTVASGKKRAVLARHVRNRRLYDAIDHWAFCAISASPGFRAFYDHRRARGDLHHQALRALGNRLVGILHGCLQTRPHYDEHTAWAHRTHTPDNIAA

SEQ ID NO: 20152 - protein, 404 aa, unidentified
  source 1..404: note = protein_3d93709
  REGION 4..157: note = RuvC_domain
  SITE 7: note = RuvC_P1
  SITE 57: note = RuvC_P2
  SITE 94: note = RuvC_P3
  SITE 96: note = RuvC_P4
  SITE 99: note = RuvC_P5
  REGION 284..371: note = Tnp_domain
  SITE 292: note = Tnp_P1
  SITE 323: note = Tnp_P2
  SITE 331: note = Tnp_P3
  SITE 332: note = Tnp_P4
  SITE 344: note = Tnp_P5
MLGVGVDWAEAFHDVALGRPSEGVIAQFRIDHSPAGVARLVARCLELEPDPAEVRVVLETRHGLLVEALADAGFSVLPVNPDLVARRRGPAKKKDDAEDARICCLMALDSYLELRKLIPHGQIGAELRAIARDDERAARDERRIGNRLRADLLAVFPAAIDIADGDLGAAVFLKLLQRWPSAQALAQAPRQELENFARQARHGWPGKFADKVIAALAEPRLAVRPELARAKAGTIALAAGQLLLLRDQRRAWERRMGELLLGAPRTGRDKTPKDPDPGKAFPGGEIYLSMPGLGDRLAARIAGEIGEHFEQFNTPNALQCYGGQAPVTRRSGRSEFTIARRLAYNRHLGTAVSQWAFCSLQQSAWAREFYDAKIAAGDNHHSALRKLGNRWLEVLWHCLDKGVL

SEQ ID NO: 20153 - protein, 345 aa, unidentified
  source 1..345: note = protein_a29df3c
  REGION 6..147: note = RuvC_domain
  SITE 9: note = RuvC_P1
  SITE 52: note = RuvC_P2
  SITE 87: note = RuvC_P3
  SITE 89: note = RuvC_P4
  SITE 92: note = RuvC_P5
  REGION 212..297: note = Tnp_domain
  SITE 219: note = Tnp_P1
  SITE 249: note = Tnp_P2
  SITE 257: note = Tnp_P3
  SITE 258: note = Tnp_P4
  SITE 270: note = Tnp_P5
MNITTVGIDLAKNVFQVHGVDARGKVVLRRQLRREQVVRFFVKLPPCLVGMESCASAHHWGRTLERFGHSVRLMAPQFVKPYVKANKNDVADAEAICEAVGRPNMRFVPIKSIEQQGILSVHRVRQGFVKARTAQANQIRGLLGEFGLVIRKGICHVARCVPGLLEDASNELPLALRQLIDRLTRHLKDLDQQVREFERQIIAWHRGSELSCKLEKIPGIGPLAATALVASIADARSFNNGRQVSAWLGLVPRQNSSGGKSTLLGISKRGDVYLRTLLIHGARSAILAAKRQRENKNVWLANLLNRRHHNIAAVALANKNVRTVWALLAHGRDFKPDYVPVRATA

SEQ ID NO: 20154 - protein, 283 aa, unidentified
  source 1..283: note = protein_be8f4cb
  REGION 1..136: note = RuvC_domain
  SITE 43: note = RuvC_P2
  SITE 81: note = RuvC_P3
  SITE 83: note = RuvC_P4
  SITE 86: note = RuvC_P5
  REGION 181..267: note = Tnp_domain
  SITE 189: note = Tnp_P1
  SITE 218: note = Tnp_P2
  SITE 226: note = Tnp_P3
  SITE 227: note = Tnp_P4
  SITE 240: note = Tnp_P5
MLTAEADKCKTKVVVNTAAGVQALLAWCAKHGAQPAQLHAILEPTGLYHEQAATALPQVRVSLVNPAQARDFAKALALRSKNDALDSYVLARYGQTLSPALWHPAPLHARQLRALLTRREALSKDLLRELNRKEKSQFSPSAPLVDGSIDKAIAFLREQIKQIERAIDQHIDNHPDLKQDCELLNSIPAIGPQAGNAILAVMHNRHIDSAQSLAAYLGVVPVQRQSGSSLNSCARLSKAGPSQVRATLYMAALVGTRHNPTSAPFTSACSKQEKAKRPRWARP

SEQ ID NO: 20155 - protein, 323 aa, unidentified
  source 1..323: note = protein_d61f085
  REGION 5..155: note = RuvC_domain
  SITE 8: note = RuvC_P1
  SITE 58: note = RuvC_P2
  SITE 98: note = RuvC_P3
  SITE 100: note = RuvC_P4
  SITE 103: note = RuvC_P5
  REGION 195..281: note = Tnp_domain
  SITE 203: note = Tnp_P1
  SITE 233: note = Tnp_P2
  SITE 241: note = Tnp_P3
  SITE 242: note = Tnp_P4
  SITE 254: note = Tnp_P5
MSSFVGVDVAKNTFDIATHLPNGKHKTKAKLPNDAKGFKEFEVWLTKQVEPSALIVMEATSVYHLELAEFVYNKGYRVCVVNPATTHAYAGSELRRIKTDKSDAKLIADFAREKNEKLKLWAPEPLKYRQLKAMVRRLDDLQEMEQMERNRLEVSDEKVKASINSVLRHIEKEIAETHKAIKKHIDDDPDMRQMRDLIVTIDGIGQKTIERLLAELGDLRKYDDPRKLVAAAGLNPKLHDSGQLKGRSTISKIGSVRVRAGLYMPGLVALQHNEAIKAMKDRLKANGKAPKQIICAAMRKLLHFVYGVLKSGQPYDPKLALAR

SEQ ID NO: 20156 - protein, 431 aa, unidentified
  source 1..431: note = protein_e4bb1f9
  REGION 30..183: note = RuvC_domain
  SITE 33: note = RuvC_P1
  SITE 82: note = RuvC_P2
  SITE 120: note = RuvC_P3
  SITE 122: note = RuvC_P4
  SITE 125: note = RuvC_P5
  REGION 290..376: note = Tnp_domain
  SITE 298: note = Tnp_P1
  SITE 329: note = Tnp_P2
  SITE 337: note = Tnp_P3
  SITE 338: note = Tnp_P4
  SITE 349: note = Tnp_P5
MNKHAPNSLIRTSDPGPTSLPPVPPGGLTAGLDWAQDDHVLCVVDFATGKVRDRLELPHASDGLTALVRRLAKLGCAEVAIERPDDPVVDALLEEGLTVVVISPNQVKNLRSRYGSAGNKDDRFDAYVLADKLRTDRARLRVLVPDSPATLTLRATVRARKDLVGTRVGVANQLRAHLNNVFPAATVLFADTDSPISPAFLARFTHQGLADWLSPERLAHWLQAVGYCGRTTSEQLHARLLAAPRGLTGDDGLARAHITLAYLATLQTLREQITALEQQIREQLAAHTDSHIFTSLPRSGTVRAARLLAEIGDCRARFPTPASLARLAGVAPSTRASGKSRHVGFRWACDKQLRDAVCDFAGDSRRANPWAQDLYAQARARGHDHAVHVLARAWLYVIWHCWQNSTAYDPTQHHALQRVLTHQNKITPGAA

SEQ ID NO: 20157 - protein, 373 aa, unidentified
  source 1..373: note = protein_648209d
  REGION 6..170: note = RuvC_domain
  SITE 9: note = RuvC_P1
  SITE 63: note = RuvC_P2
  SITE 109: note = RuvC_P3
  SITE 111: note = RuvC_P4
  SITE 114: note = RuvC_P5
  REGION 282..367: note = Tnp_domain
  SITE 289: note = Tnp_P1
  SITE 319: note = Tnp_P2
  SITE 327: note = Tnp_P3
  SITE 328: note = Tnp_P4
  SITE 341: note = Tnp_P5
MNPLYVGIDVSSKTNVVYLMKPDGSKISNFSVANSLDGSKKLVKIILSALEKHSLDNVIIGLEATSIYGDNLVYFLREDCSLSKHLTKIHILNPKQVKKFKDAYNDLSKNDFVDSFVIADCLRFGRINKEVYLSDYRYAALKTLTRARFYAVQNLVKEKQRLINIIFKKYSSLTQNKVFSDRFGTTALAVYTEFDSVDTLVNMGLHELTEFIQKKGKNRFSDPDSVAKAIQKAARSSYRLPKTVNDSVNQVLSISINSIKSIEAQIKDLEKAIAEQMDLIPNTLTSINGIGPVYSAGIIAEIGDINRFDNQAALAKYAGLVWKQHQSGDFESENTHLIHSGNRILKYYLCEATFSLVRCDQSTIASITSNSMR

SEQ ID NO: 20158 - protein, 343 aa, unidentified
  source 1..343: note = protein_0e66052
  REGION 5..151: note = RuvC_domain
  SITE 8: note = RuvC_P1
  SITE 53: note = RuvC_P2
  SITE 91: note = RuvC_P3
  SITE 93: note = RuvC_P4
  SITE 96: note = RuvC_P5
  REGION 211..297: note = Tnp_domain
  SITE 219: note = Tnp_P1
  SITE 249: note = Tnp_P2
  SITE 257: note = Tnp_P3
  SITE 258: note = Tnp_P4
  SITE 270: note = Tnp_P5
MDQYIGLDVSLKDTAISVREDGKRIWRGRCPSDPKLLAEMIRKNAPHARRVVFETGPLSTWFYHVLTTEGVPAICIEARHAQKVLNETLNKTDANDADGLAQLADAGFYKAVRVKSFDAMMARALVAAREQLLNISTQPGNQIRGLMKTFGLIIPKGAGRVFDGNVRRLLEGNDGLAKIILPLLEAWYDMRNRVAGLDRQLLTVARESQATKLLMTIPGIGAITAVSYVTAVEDPENFRTSRSVGAWLGLTTRRYQSGEVDYDGHISRRGDNRLRGLLYEAATALLTRTNPRTESSLKSWGLKLRERLGFKRAAVAVARKLAVIMHSMLKTGEVFNASAGATV

SEQ ID NO: 20159 - protein, 392 aa, unidentified
  source 1..392: note = protein_4c8879b
  REGION 4..163: note = RuvC_domain
  SITE 7: note = RuvC_P1
  SITE 60: note = RuvC_P2
  SITE 101: note = RuvC_P3
  SITE 103: note = RuvC_P4
  SITE 106: note = RuvC_P5
  REGION 268..353: note = Tnp_domain
  SITE 274: note = Tnp_P1
  SITE 304: note = Tnp_P2
  SITE 312: note = Tnp_P3
  SITE 313: note = Tnp_P4
  SITE 326: note = Tnp_P5
MIIVAVDVAKDEHDCFITNSDGEVLFDPFVIRNDQNGFDDLFEKIRLVADSLQNVKVGLEATGHYHLNLLSYLLDKGLPTCLINPLQTSLFRKSLSFRKTKTDTIDARAIARLLMSDRALQPYSLTSYQNEELKSLTRYRADKVRERAKLKSSLSRLVVILFPELEKLVPTLHMATVYDLLHEFPGASSVASAHLTRLSHLFSDASKGRYGKEEAVRIRDAARHSIGAVFPSKSLELRHTIDHIRFLNDEIDEIEAQIFVFLEKNPPKMLDIPGMGPRMAAVIVAEIGDFKRFSSPDKLLAYAGLSPTTYQSGQLTSTYAKMEKRGSRYLRFALFNATKYVCVWDPTFRAYLAKKRSEGKHYNVAISHAAKKLVRLIYHLETTGETYISKAC

SEQ ID NO: 20160 - protein, 345 aa, unidentified
  source 1..345: note = protein_ce54d11
  REGION 6..147: note = RuvC_domain
  SITE 9: note = RuvC_P1
  SITE 52: note = RuvC_P2
  SITE 87: note = RuvC_P3
  SITE 89: note = RuvC_P4
  SITE 92: note = RuvC_P5
  REGION 211..312: note = Tnp_domain
  SITE 219: note = Tnp_P1
  SITE 249: note = Tnp_P2
  SITE 257: note = Tnp_P3
  SITE 258: note = Tnp_P4
  SITE 270: note = Tnp_P5
MNASTVGLDIGKRYFQIHAVDEVGTVVQRKTVTRGRLLQQFRKMEPALVGIEACATGHYWARQLKAMGHDARLIPPTYVKPYVRRQKSDAADAAAICEAVSRPSMRFVPIKSADQQAFRSLTRVRERLKSQKTATVNAVRGHLAEFGLVNKEGKDGLARLKACMQQADENALPATAKEALQPLIAIIEELDAKIAALNKKIEREHRANEVSRRLETIPGIGPITASTFRGAIPDPGFFKSGREFAAFIGLVPKQHSTGGKTRLGRISKQGDQRLRSLLVCDAASILRSLERDPEKMKRNQWIAQLLATKPRKKVIVAIANKMARNIWAVMTKGVTYQPASGFLSA

SEQ ID NO: 20161 - protein, 339 aa, unidentified
  source 1..339: note = protein_55d22e2
  REGION 7..148: note = RuvC_domain
  SITE 10: note = RuvC_P1
  SITE 53: note = RuvC_P2
  SITE 88: note = RuvC_P3
  SITE 90: note = RuvC_P4
  SITE 93: note = RuvC_P5
  REGION 209..295: note = Tnp_domain
  SITE 217: note = Tnp_P1
  SITE 247: note = Tnp_P2
  SITE 255: note = Tnp_P3
  SITE 256: note = Tnp_P4
  SITE 268: note = Tnp_P5
MTKVITIGLDLGKNVFQVHGVDASGAAVLRRRLRRGEVLRFFAKLEPATVGIEACATAHHWGRALAALGHTVRLMPARYVKAYVKRQKNDASDAAAICEAVTRPTMHFVPVKTMEQQAALMLHRARDLLIRQRTMLVNALRGHLAEFGLVRARGAKALGELVALIGSADVPAEAQAALRPLVSQLEASEAQIAALDGVIREWHQSNDVSCRLATVPGIGPLTASAIAASVPDAGAFANARQFAAWLGLVPRQNTTGGKPRLGGISKQGNAYIRRLLIIGAQSVLRWARPTRPTPWLLALLARRPRKVAAVALANKMARIAWALLARGERYRHQILPAAA

SEQ ID NO: 20162 - protein, 352 aa, unidentified
  source 1..352: note = protein_9c007da
  REGION 9..153: note = RuvC_domain
  SITE 12: note = RuvC_P1
  SITE 57: note = RuvC_P2
  SITE 92: note = RuvC_P3
  SITE 94: note = RuvC_P4
  SITE 97: note = RuvC_P5
  REGION 218..304: note = Tnp_domain
  SITE 226: note = Tnp_P1
  SITE 256: note = Tnp_P2
  SITE 264: note = Tnp_P3
  SITE 265: note = Tnp_P4
  SITE 277: note = Tnp_P5
MGEAITYRIGFDVAKNVFQVHGVKTEAGERIAFVRRLKRAQVEPFFAKLPRSLIGMEACGSAHYWARLARSHGHAVRLMPPAYVKAYVKRNKTDAHDAAAICEAVARPHMRFVAVKSEQDQAMVMLHRVRASFVEKRTAAANQLRAVFAEMGIVAPVGGRGLSELLALVETQAEPFVRLPAALRLVLAELARQWRSVDATVRKMEVEIAASVKRSARAMRLTAVPGIGPMGASAIDCLLPDPQAFKSGRDFAAWNGLTPREDSSGKSVRRGPITKKGDGYLRRILVLGATAHLARVRRGQIKGASPWVLKMAAHPKRKLAAVALANRTARIAWAMLARNQDYRAPAAVLQAA

SEQ ID NO: 20163 - protein, 408 aa, unidentified
  source 1..408: note = protein_4f7f223
  REGION 13..167: note = RuvC_domain
  SITE 16: note = RuvC_P1
  SITE 64: note = RuvC_P2
  SITE 104: note = RuvC_P3
  SITE 106: note = RuvC_P4
  SITE 109: note = RuvC_P5
  REGION 274..359: note = Tnp_domain
  SITE 282: note = Tnp_P1
  SITE 312: note = Tnp_P2
  SITE 320: note = Tnp_P3
  SITE 321: note = Tnp_P4
  SITE 333: note = Tnp_P5
MSEPDNTGFEVFCGLDVGKSVHHACALDRTGKRLHDKPLPNDEAALTEVFIRLAAHGRMLVVVDQPASIGALAVAVARSLGIEVAYLPGLAMRRIADLHPGQSKTDARDAHVIADAARTMPHTLRRVGTDDETLAELTVLAGYDDDLAAQSTRLTNRLRDALLHVHPALERLLGPRMDRGGVLDLLVAAPTPQALRDLGEAGIAAAMRPRSPRLATTLPAAILAALDAQTVVVPGTAAFGRVIAGVAAQLREVRVERDTLAAELEALLEAHPLAGVLTSMPGLGFRTALKILTIVGDGAAFPTAAHLAAYAGLAPVTRRSGSSIKGETRSQRGNHALKSALFLSAFASLADPVSRAYYDRKRAGGKRHNAALICLARRRTDVIYAMLRDRRPYAPPSVPTLPPVAAAA

SEQ ID NO: 20164 - protein, 400 aa, unidentified
  source 1..400: note = protein_4b63c4a
  REGION 4..160: note = RuvC_domain
  SITE 7: note = RuvC_P1
  SITE 57: note = RuvC_P2
  SITE 97: note = RuvC_P3
  SITE 99: note = RuvC_P4
  SITE 102: note = RuvC_P5
  REGION 275..362: note = Tnp_domain
  SITE 283: note = Tnp_P1
  SITE 313: note = Tnp_P2
  SITE 321: note = Tnp_P3
  SITE 322: note = Tnp_P4
  SITE 335: note = Tnp_P5
MNAVGIDVSKGKSTVAVLRPFGEVAASPFDVIHNDSDLKQLAELIKALPGESKVVMEYTGTYFEPIAQFLHNNGIFVSVVNALLVHDYGGNSLRKVKTDKKDALKLASYALDRWTELDEYIPADEQRKTLKLLNRQYNQSIKIQTMMKNNLISLTDSVFPGINKLFTSPERQSDGHEKWVDFLKAFPHKDCVAKLYLSVFKTKYKSWCSRNKYKYSESKAEEIHAYAKSVIAVLPMNDSAKLLVTQAVSQLNTILETLSSIRDEMNRIASSLPEYDTVMSMFGVGKVYGPQLIAEIGDTRRFRNRRAVTAFAGLDAPPYQSGQLDVSSRHISKRGSAALRKVLFQITEVYILNKPEDEPVYQFIDKKRSEGKHYYSYRIAAANKFLRIYFAKVNQVLISQ

SEQ ID NO: 20165 - protein, 342 aa, unidentified
  source 1..342: note = protein_18f4ffb
  REGION 6..148: note = RuvC_domain
  SITE 9: note = RuvC_P1
  SITE 52: note = RuvC_P2
  SITE 87: note = RuvC_P3
  SITE 89: note = RuvC_P4
  SITE 92: note = RuvC_P5
  REGION 210..295: note = Tnp_domain
  SITE 218: note = Tnp_P1
  SITE 248: note = Tnp_P2
  SITE 256: note = Tnp_P3
  SITE 257: note = Tnp_P4
  SITE 269: note = Tnp_P5
MKDMMIGVDLAKTVFQVHGALQTGEVQFRKKLTRKQFVSFLANLEPCLVIFEACGGAHFWAREMEALGHEAKLIAPQYVRPFVKRQKNDAADAEAIVIAARQPEMRFVAVKTAEQQSRAAVFRGRERLVHQRTEDVNALRALLYEHGHVFPVGIRSLGRMASLLEDETSDLPALIRDECKELLAQIAEKTARVLERNKKLSTLASQSDRVRRLQTMPGVGPITAIAVEAFGPDMAQFKTGRNFAAWLGLVPRQHSSGGKERLGRMTKAGQADIRRLLIIGAMSRLNWLGVRSVTEGSWLSRMLARKPKMLVAIALANKMARQIWAMLTKHEDYKDPELAGLA

SEQ ID NO: 20166 - protein, 406 aa, unidentified
  source 1..406: note = protein_8ad747e
  REGION 12..167: note = RuvC_domain
  SITE 15: note = RuvC_P1
  SITE 64: note = RuvC_P2
  SITE 104: note = RuvC_P3
  SITE 106: note = RuvC_P4
  SITE 109: note = RuvC_P5
  REGION 275..360: note = Tnp_domain
  SITE 282: note = Tnp_P1
  SITE 312: note = Tnp_P2
  SITE 320: note = Tnp_P3
  SITE 321: note = Tnp_P4
  SITE 333: note = Tnp_P5
MAPAVTEIDVFVGIDMAKQDHYAQAISRDGTELFKRPVLNDETAIVKLIDDARARGARVAMVVDQPASGAQLLLSLAAAHGVPVAYVTGLQMRRAADLYAGAAKTDPIDAWVLADFARRNADRLTWLQVTDDLLVELRILNGSDVDLATDATRTINRCRDAMTAISPALERAIGSRLGHAGVRDALTRWPTPTALRAAGQARIRTRIAKRSPRLAAKATEDIWEALDAQTVTLPGEDAWGRVITDLCSDLDRIITRREQLATEIETVFMTHPLGMVLVTLCGFGPRTGARTLAEIGDPQRFANGGRLAAYAGLAPVDRRSGRSINSSSQSRAGNHRLKNAMFLAAFVAAQHDPAAKAYYQRKRAEGKKHNAAVICLARKRCDIILAMLKNATPYQQPTHENLLQAA

SEQ ID NO: 20167 - protein, 344 aa, unidentified
  source 1..344: note = protein_edce7b9
  REGION 7..148: note = RuvC_domain
  SITE 10: note = RuvC_P1
  SITE 53: note = RuvC_P2
  SITE 88: note = RuvC_P3
  SITE 90: note = RuvC_P4
  SITE 93: note = RuvC_P5
  REGION 213..297: note = Tnp_domain
  SITE 221: note = Tnp_P1
  SITE 251: note = Tnp_P2
  SITE 259: note = Tnp_P3
  SITE 260: note = Tnp_P4
  SITE 272: note = Tnp_P5
MSQVITIGLDIAKNVFHAHGADERGAMVFSRKLTRGKLLDFFAGQPTCVVALEACGGAHHWARELQAMGHEVRLIPPAYVKPFVKRHKNDAIDAEAICEAAQRPGMRFVAVKSEEQQAAGLVFRTRDLVVRQRTQLINAIRGHLAEYGWVAPRGTAHMTMLADLLEDEEMTSTLPEAARPMFKLMVDLLGELGKQIAALDREIARRAKEDEAARRLMTIPGIGPIAATAIIALAPPLETFRKGRDFAAWLGLAPRQHSTGGKQRLGSISKMGERTIRRLLIIGGSSMVRQASRHGAPAGSWLERMLARKPRMLVSVALANKMARMVWALLTKKEDYRAPAAVAA

SEQ ID NO: 20168 - protein, 461 aa, unidentified
  source 1..461: note = protein_92723c4
  REGION 24..170: note = RuvC_domain
  SITE 27: note = RuvC_P1
  SITE 74: note = RuvC_P2
  SITE 109: note = RuvC_P3
  SITE 111: note = RuvC_P4
  SITE 114: note = RuvC_P5
  REGION 303..388: note = Tnp_domain
  SITE 309: note = Tnp_P1
  SITE 341: note = Tnp_P2
  SITE 349: note = Tnp_P3
  SITE 350: note = Tnp_P4
  SITE 361: note = Tnp_P5
MAKKAKKVKTAKGAELRIVNPDAAGIDIADGIMQVCVPADRSKDNNRAFGAYTSDLHAISAWLRECGIKTVAMESTGVYWIPLFCRLQEDGMDVVLTNARDVKNITERKTDESDAEWLMLLHQYGLLKASFQPHNDAKRMRTLTRHLDTLSREASSIVLRMQKAMQQMNIKLTLVLSDITGKSGIRIIEAILAGERDPKKLADLADIQCKTPKEEIAKALEGNWEEDLLFVLRQNYDTFKHFCAQLDRCDTELEKLMENYRTEVAGTGRPSYSPTKKRRDYHKRKRNVGFDVERKAYDMWGVNVFEIPGISHLTALGLMSELGHDFTRKFPSSKQFCCWCNIAPNTKISGGKRISSHVPHRRNNVGLIFRSIASSLANAKNQLGNFYRRIRSRAGGKAAVIATAHKVAEIFFAMVANQTTYNPEKVGIDEKVLLEKRIARYKRELERITGMHIEIGNACVP

SEQ ID NO: 20169 - protein, 348 aa, unidentified
  source 1..348: note = protein_998dd1d
  REGION 7..147: note = RuvC_domain
  SITE 10: note = RuvC_P1
  SITE 53: note = RuvC_P2
  SITE 88: note = RuvC_P3
  SITE 90: note = RuvC_P4
  SITE 93: note = RuvC_P5
  REGION 212..274: note = Tnp_domain
  SITE 220: note = Tnp_P1
  SITE 250: note = Tnp_P2
  SITE 258: note = Tnp_P3
  SITE 259: note = Tnp_P4
  SITE 271: note = Tnp_P5
MTEMMTIGLDLAKSVFHVHGADGTGRPVLRKRLRRGQVLSFFGSLPRCLVGLEACASAHHWARELRALGHDVRLIPPQYVKPYVKTNKNDAADAEAICEALMRPTMRFAAVKSADQQAVLMLHRSRELLVRQRTMLINALRGHCGEFGIVAAQGPHKVAALMAVIADPDNHRLPPLARQALILLVSQLCATQERIAELEKELTGWHRCCEASRRLVTIPGVGIITATALVATVGDATAFRSARQFAAWLGLVPRQQSSGGKDRLGRISSAATATSDGFSSTAPGRYWPGPGAANRRSRTGSRLSLRAGRPMLCWLPWPTRLPASSGPCSADTKTICRTGCQPLELPPG

SEQ ID NO: 20170 - protein, 415 aa, unidentified
  source 1..415: note = protein_7013da5
  REGION 19..175: note = RuvC_domain
  SITE 22: note = RuvC_P1
  SITE 72: note = RuvC_P2
  SITE 112: note = RuvC_P3
  SITE 114: note = RuvC_P4
  SITE 117: note = RuvC_P5
  REGION 290..377: note = Tnp_domain
  SITE 298: note = Tnp_P1
  SITE 328: note = Tnp_P2
  SITE 336: note = Tnp_P3
  SITE 337: note = Tnp_P4
  SITE 350: note = Tnp_P5
MVANLKMIERRKTREMNAVGIDVSKGKSTVVVMRPFGEVVAEPFEVSHTDAELSKLACFLGELPGETRIVMEYTGNYWQPIAKALHDVGLFVCVVNALLIYKYGNNSIRKGKTDKLDAVKIANYCLDRWANLERYTPADQIRQILKTCRRQYDQYIKLKVNLKNNLISLLDGTFPGVNTLFKSAPRDTDGHEKWVDFAENFWHRECVCMKSEKAFTNQYRKWCAKTGYRFSVEKAVAIYAHASSQVNTLPMSDAIKLLVTHAAVQLNTIIKTISTIQHQMLTLASQLPEYPIVMRMFGVGPVLGPQLMAEIGDVRRFDRKQSLVAFAGVDAPPCQSGTFDSKNRHISKRGSPRLRKTLFQVMSTLIQHAPADDPVFQFLDRKRQEGKHYYVYMTAAANKFLRIYYGTVTAYLETL

SEQ ID NO: 20171 - protein, 406 aa, unidentified
  source 1..406: note = protein_2711832
  REGION 4..163: note = RuvC_domain
  SITE 7: note = RuvC_P1
  SITE 60: note = RuvC_P2
  SITE 100: note = RuvC_P3
  SITE 102: note = RuvC_P4
  SITE 105: note = RuvC_P5
  REGION 272..358: note = Tnp_domain
  SITE 280: note = Tnp_P1
  SITE 311: note = Tnp_P2
  SITE 319: note = Tnp_P3
  SITE 320: note = Tnp_P4
MLFVGDDWAEFHHDVELVDEAGEVVARRRLPEGVAGIATLHALVGDHLGEDGEPEQVLVGIETERGPWVQALLAAGYVVYAINPLQVARYRERHGTSGAKSDPGDAHVLAEIVRLDRAHHRPVAGDSAVAEHVKIAARAHQTMIWTRQRNTNTIRSMLREYYPAALAAFDDLASRDALAVLAAAPTPEQGRRLTPGRVETLLRRAGRQRNLATRAAQIVAALRTEQLPARPGVTDAYAAAVSALIAVTSEMVRQIAVLEEQVKAGFGRHPDAEIYLSQPGLGPILAARVLAEFGDDPHRYADARARKNYSGMSPITKASGTRRVVLARYARNRRLADALYQQAFAALTTSTGARAHYDRQRARGATHSQALRALANRLVGTLHGCLSHHTHYDEDIAWPTTEPLAA

SEQ ID NO: 20172 - protein, 344 aa, unidentified
  source 1..344: note = protein_8ea02dd
  REGION 9..150: note = RuvC_domain
  SITE 12: note = RuvC_P1
  SITE 55: note = RuvC_P2
  SITE 90: note = RuvC_P3
  SITE 92: note = RuvC_P4
  SITE 95: note = RuvC_P5
  REGION 213..297: note = Tnp_domain
  SITE 221: note = Tnp_P1
  SITE 251: note = Tnp_P2
  SITE 259: note = Tnp_P3
  SITE 260: note = Tnp_P4
  SITE 272: note = Tnp_P5
MSEQIIAVLGIDLGKNSVSLTGLDATGAVIVRKRTTRDGAIKFTAKLPSCVVAMEACCGAHFMARIMVGQGHTIRLMSPEYVKPYVKTQKNDDRDAEAIAEAATRPTMRFVTQKTEAQLDLQTLHRVRERMVIARTALTNQLRTILLERGLTFPRGRKTLMRRLNQLPAELNGLGARRQQLVTDIHAESAELDKRIEALNDELAEVARRDESARRLATIPGVGVINATALVAAIGDGSAFAKGRDLPAWLGLVPRQHTTGGKTKLLGISKRGNQYLRRQLIHGARSVLLRLKETQTPLGHWLNTLLGRVHPNIAVVALASKLARIAWALLRHRTDFDRRAFAGA

SEQ ID NO: 20173 - protein, 403 aa, unidentified
  source 1..403: note = protein_9b2def4
  REGION 6..159: note = RuvC_domain
  SITE 9: note = RuvC_P1
  SITE 57: note = RuvC_P2
  SITE 98: note = RuvC_P3
  SITE 100: note = RuvC_P4
  SITE 103: note = RuvC_P5
  REGION 221..306: note = Tnp_domain
  SITE 229: note = Tnp_P1
  SITE 259: note = Tnp_P2
  SITE 267: note = Tnp_P3
  SITE 268: note = Tnp_P4
  SITE 279: note = Tnp_P5
MAKVFIGVDPHKLSATIEVVDEHESVLGKGRFATDKAGYAAMRKHVAAYRERVWAVEGSNGAGRPLAQRLLADGEPVVDVPAKLSARARALDTGHNRKTDAHDAHAVAVVAVRTKDLRVLAYDEQLEALRMLVDRRQELTRQRVQTINRLQRLLSELTPGKRKKDLTPLQAKRILASVRPRDIAGKVRKRLALEQLTDLVALDQKIKALSKELKAMVKASGSSLMDLSGVGPIVAARVLADVGDVARFADRNRFASWTGTAPIAASSGEIVRHRLSRAGNRRMNHMIHIAATTQIRLHTPGRAYYLRKLAAGKTRAEAMRCLKRRISDALYRQLIADANAATRAAAETGPGGHRGASHESSAAGSHPHTGTSDQPLPGPAQVTLPAPIPARKTSADRPLEPAS

SEQ ID NO: 20174 - protein, 258 aa, unidentified
  source 1..258: note = protein_a32fb7a
  REGION 1..104: note = RuvC_domain
  SITE 5: note = RuvC_P2
  SITE 45: note = RuvC_P3
  SITE 47: note = RuvC_P4
  SITE 50: note = RuvC_P5
  REGION 141..225: note = Tnp_domain
  SITE 149: note = Tnp_P1
  SITE 178: note = Tnp_P2
  SITE 186: note = Tnp_P3
  SITE 187: note = Tnp_P4
  SITE 198: note = Tnp_P5
MIVLEATGGFETTVAAALASAGLPLSVVNPRQIRDFARALGRLAKTDAIDAKVIALFAERMKPEARPISSPQAQKLGELVARRRQVVEMIGMEANRKRRVADKRLIKKIERHIGFLEKELADIDADIDAAVRATPAWRETEDLLTSVPGVGPVIARTIIADLPELGSLDRRKLAALVGVAPFNRDSGAWRGKRMISGGRTGVRNVMYMAALVAIRWNPTIKATYERLLKNGKPKKLAIVACIRQLLTILNAIIRTKLK

SEQ ID NO: 20175 - protein, 387 aa, unidentified
  source 1..387: note = protein_22c4c10
  REGION 6..159: note = RuvC_domain
  SITE 9: note = RuvC_P1
  SITE 57: note = RuvC_P2
  SITE 98: note = RuvC_P3
  SITE 100: note = RuvC_P4
  SITE 103: note = RuvC_P5
  REGION 221..306: note = Tnp_domain
  SITE 229: note = Tnp_P1
  SITE 259: note = Tnp_P2
  SITE 267: note = Tnp_P3
  SITE 268: note = Tnp_P4
  SITE 279: note = Tnp_P5
MAQVIIGVDPHKRSATIEIINAREKTLGQGRFGTDRDGYQAMLAAGRRHKDRLWAVEGCNGIGRHVAQRLVADGETVVDVPAKLSARARVFATGQGRKTDPVDARSVAVVALRAEGLRQVVTDDTTVALRLLVDRRDQLGRARTDVVCRLHQLLLELVPGGAKKDLSAQQARVLLGTVRPRDVVGKTRRRLAAELIGELVVIDKKIKTAKQELTNLVNDTGSRLMNLTGIGPSGAARLIGDIADIARFASRAHFASWNGTAPIDASSGDQQRHRLSRAGNRRINRALHIMAIVQLRRDTEGRRYYRRRLAAGKTPMEALRALKRRLSDIVYRQMVADAKLVRTGPRGHAGATLQSSAADPNPEIDTSEKSLPGSATPQPRTTLAAAS

SEQ ID NO: 20176 - protein, 351 aa, unidentified
  source 1..351: note = protein_67d080b
  REGION 12..152: note = RuvC_domain
  SITE 15: note = RuvC_P1
  SITE 58: note = RuvC_P2
  SITE 93: note = RuvC_P3
  SITE 95: note = RuvC_P4
  SITE 98: note = RuvC_P5
  REGION 217..302: note = Tnp_domain
  SITE 225: note = Tnp_P1
  SITE 255: note = Tnp_P2
  SITE 263: note = Tnp_P3
  SITE 264: note = Tnp_P4
  SITE 276: note = Tnp_P5
MSQNLNSAVAVIGIDIGKNSFHIVGLDARGAIVLRQKWSRGQIEARLANMPSCLVGMEACVGAHHLSRKLKALGHDARLMPAKYVRPYSKGQKNDFRDAEAIAEAVQRPTMKFVATKTADQLDLQALHRVRERLVSQRTGIINQIRAFLLERGVAVRQGLRFLRAELSRLLATPPDVLSPRMVRIIEGLAADWRRLDERIDHLSDEITALARQDAGCERLVSVPGIGPIISSAMVAAIGTGDAFSKGRDFAAWLGLVPKQISTGDRTILGKISKRGNRYLRVLFVQAAWVVLIKPQSWERHGLKPWIEAAKKRLHRNVLAIALANKLARIAWSVLARGRSFEARPTMASAA

SEQ ID NO: 20177 - protein, 346 aa, unidentified
  source 1..346: note = protein_9d13bf5
  REGION 6..149: note = RuvC_domain
  SITE 9: note = RuvC_P1
  SITE 54: note = RuvC_P2
  SITE 89: note = RuvC_P3
  SITE 91: note = RuvC_P4
  SITE 94: note = RuvC_P5
  REGION 213..300: note = Tnp_domain
  SITE 221: note = Tnp_P1
  SITE 251: note = Tnp_P2
  SITE 259: note = Tnp_P3
  SITE 260: note = Tnp_P4
  SITE 272: note = Tnp_P5
MKLSRIGVDLAKNVYQLHGVDRHGKTLWKRRLRRGQWLQALLDETASGCEIGMEACTGAHHWARELQSRGYIVRLIAPQFVKPYVKSNKNDANDAEAICEAMSRPNMRFVTVKSVEQQDIQATHRVRSEIKDQRNAKANQIRGLVAEYGLVAPLTLLALRKAIPCWLEDAENGLTDHFRSLLHGLWGDLLALEDRMTELNKAIQKIADSNEVTQRLQQLRGVGPLVATALVATVGTGEQFKKGRQMAAALGLTPRQYSSGDKQRLLGISKRGDVYLRTILIHGARAVVSQAKHREDRLSQWVTSISKRSHPNVAAVALANKTARMAWAMLRNDTDYNPDFAIGSVG

SEQ ID NO: 20178 - protein, 341 aa, unidentified
  source 1..341: note = protein_91a8532
  REGION 7..148: note = RuvC_domain
  SITE 10: note = RuvC_P1
  SITE 53: note = RuvC_P2
  SITE 88: note = RuvC_P3
  SITE 90: note = RuvC_P4
  SITE 93: note = RuvC_P5
  REGION 211..296: note = Tnp_domain
  SITE 219: note = Tnp_P1
  SITE 249: note = Tnp_P2
  SITE 257: note = Tnp_P3
  SITE 258: note = Tnp_P4
  SITE 270: note = Tnp_P5
MQEVTTIGLDIAKQIFHAHGADASGAMVFSRRITRAKLMQFFASQPRCVVAMEACAGAHHWGRELQRLGHDVRLIPPAYVKPFVKRQKNDAADAHAICEAAQRPTMRFVPVKSEAQQASAAVFRARDLLVRQRTQLLNAVRGLLAEHGWVAPKGLFHASAMFAKIEDPSCALPASARDVFLVMIASVRALDERIHLLDREIAKRAREDETARRLMTIPGVGPITATALIALAPAPESFRKGRDFAAWVGLTPLQRSTGGKAKLGAITRMGERTLRRLLVVGASAVVLQASRRGAPRGSWLEQMMARKPRMLVTVALANKTARIVWAVLARGEGYRAPAVAA

SEQ ID NO: 20179 - protein, 409 aa, unidentified
  source 1..409: note = protein_490b814
  REGION 5..164: note = RuvC_domain
  SITE 8: note = RuvC_P1
  SITE 61: note = RuvC_P2
  SITE 101: note = RuvC_P3
  SITE 103: note = RuvC_P4
  SITE 106: note = RuvC_P5
  REGION 272..358: note = Tnp_domain
  SITE 280: note = Tnp_P1
  SITE 311: note = Tnp_P2
  SITE 319: note = Tnp_P3
  SITE 320: note = Tnp_P4
MVLFVGDDWAEDHHDVEVMDSTGRRLARARLAEGVAGIARLHAMVGEQLGDEVDQTEVLVGIETDRGPWVAALIAAGYTVYAINPLSVARYRERHSVSGAKSDPADAHTLADMVRTDAHQLRPVAGDSAEAEAVKVVSRAHKSLIWERTRHTQRLRHALREYFPAALEAFEDLDAPDALELLTKAPDPVAATTLTLAQIRAALKRARRRNIDDKAERIQAVLRAEHLGQAEVITAAYAATTRSAAAVLATLNEQVKALEGQVDAHFGRHPDAEIILSQPGLGPILGARVLAEFGDDPDRYATAKNRKNYAGTSPITRASGKKKVVAARFVHNDRLIDALISQAFAALNTSPGARSYYDQQRARGADHNPALRQLANRLVGILHGCLKTRTLYDEATAWSHHTKKLATAA

SEQ ID NO: 20180 - protein, 364 aa, unidentified
  source 1..364: note = protein_24004a8
  REGION 8..152: note = RuvC_domain
  SITE 11: note = RuvC_P1
  SITE 57: note = RuvC_P2
  SITE 93: note = RuvC_P3
  SITE 95: note = RuvC_P4
  SITE 98: note = RuvC_P5
  REGION 220..306: note = Tnp_domain
  SITE 228: note = Tnp_P1
  SITE 258: note = Tnp_P2
  SITE 266: note = Tnp_P3
  SITE 267: note = Tnp_P4
  SITE 279: note = Tnp_P5
MSDGICFAGLDVHARKTAAAAIQLGSGEVWKAQLAGSPSAAIEWLQTLPGPVRAVYEAGPTGFGLARAARAAGLEVMVCARGAIPRQPGARIKTDVRDALKLARLHAAGQLRAVTVPSVPLEALRDLVRAREDLRGDLMAARHRIGKLLLRRGLIYDGPGHPWESPRHAAWLSAIDVGDPLARVVLGEYLACHDGLLARRARLDALIGELADDPRWAALVGRLRCMRGVDTLTAVGLIAEIGDFAAFAHAKQLASFLGLVPTESSSGEKRKQGSITKAGSSHARRLLIEAAWHYRRRPAVSLTLRRRQDGQPPAAIEAAWRAQLRLSARWAHLDARRAKRRTTVAVAVARELACFVWEIARQPD

SEQ ID NO: 20181 - protein, 391 aa, unidentified
  source 1..391: note = protein_41180da
  REGION 10..154: note = RuvC_domain
  SITE 50: note = RuvC_P2
  SITE 91: note = RuvC_P3
  SITE 93: note = RuvC_P4
  SITE 96: note = RuvC_P5
  REGION 260..346: note = Tnp_domain
  SITE 268: note = Tnp_P1
  SITE 298: note = Tnp_P2
  SITE 306: note = Tnp_P3
  SITE 307: note = Tnp_P4
  SITE 319: note = Tnp_P5
MSVKSITGYVWSTTAGRWCCRARLVNDEQPIRELVAEIDELAERVLWAVDLTTVYAALLLTVLADAGKTVRYLAGRAVWQASATYRGGEAKTDAKDARVIADQSRMRGQDLPVLHPNDDLISELRMLTGHRADLVADRTRTINRLRQQLVAVCPALERAAQLSQDRGWVVLLARYQRPKAIRQSGVSRLTKVLTDAGVRNAASIAGAAVAAVKTQTVRLPGEEVAAGLVADLAREVIALDDRIKTTDADIEGRFRRHPLAEVITSMPGMGFRLGAELLAAVGDPALIGSADQLAAWAGLAPVSRDSRKRTGRLHTPKRYSRRLRRVMYMSALTAIRCDPDSKAYYQRKRDEGKRPIPATICLARRRTNVLYALIRDNRTWQPESPPNIAAA

SEQ ID NO: 20182 - protein, 335 aa, unidentified
  source 1..335: note = protein_60dd69e
  REGION 5..129: note = RuvC_domain
  SITE 8: note = RuvC_P1
  SITE 50: note = RuvC_P2
  SITE 90: note = RuvC_P3
  SITE 92: note = RuvC_P4
  SITE 95: note = RuvC_P5
  REGION 202..287: note = Tnp_domain
  SITE 210: note = Tnp_P1
  SITE 240: note = Tnp_P2
  SITE 248: note = Tnp_P3
  SITE 249: note = Tnp_P4
  SITE 261: note = Tnp_P5
MKQYAGIDVSLEYSSVCVVDADGRVVREGKVPSEPGALIAWFSDCGVALERIGLEAGPLSQWLHAGMMGLTVELIETRHVRAAFKTMPVKTDKKDARGIAQLMRLGWFRAVQCKSLPAQEMRAQGKLHDIEMSIRGILRGFGLKVGPTTRRAYAARISELVEGHPTLEAIAASLLKVRDALAGEFAGFERKLRVMARQDDNARRLMTMPGVGVLVALTFVSAVDVPERFRSSRAVGPHFGLTPKKYQSGETDYSGRISKVGDAGVRTALYEAANVILTRPVKGSDLKSWALAVAKRAGPRKARVALARKLAVVLHHMLRNGTDFIPRRAVAVMTA

SEQ ID NO: 20183 - protein, 275 aa, unidentified
  source 1..275: note = protein_5075ccb
  REGION 3..120: note = RuvC_domain
  SITE 25: note = RuvC_P2
  SITE 60: note = RuvC_P3
  SITE 62: note = RuvC_P4
  SITE 65: note = RuvC_P5
  REGION 183..260: note = Tnp_domain
  SITE 191: note = Tnp_P1
  SITE 221: note = Tnp_P2
MRRKFNQKQLILFTANLQTCLIGMEACSGAHFLGRALREQGHDVKLIPAQFVKPFVKSNQNDFLDAEAIAEAVDRQNMRFVPIKTDDQLDLQAMHRVRDRLVARRTSVINQLRAFLLERGMVFAKTPAKLKLAVPEILENNANLTLRMRNLVSLLWNEWKDLERQIVAMNVEVEQIASSDPACQRLRQIPGIGPLVATTIVAAIGNGAAFHKGREFSSLAGTCAATALDRRQGQTLRPQQARQQLSEEAACAWCPIRRPPRQARTIAVRSLAQRS

SEQ ID NO: 20184 - protein, 334 aa, unidentified
  source 1..334: note = protein_ba2268e
  REGION 7..149: note = RuvC_domain
  SITE 10: note = RuvC_P1
  SITE 53: note = RuvC_P2
  SITE 88: note = RuvC_P3
  SITE 90: note = RuvC_P4
  SITE 93: note = RuvC_P5
  REGION 209..305: note = Tnp_domain
  SITE 217: note = Tnp_P1
  SITE 247: note = Tnp_P2
  SITE 255: note = Tnp_P3
  SITE 256: note = Tnp_P4
  SITE 268: note = Tnp_P5
MQNVTLIGIDLGKNSFHIHCQEKHGNPLLRKKFSRTQLTQFLATCQPCIVAMESCAGAHFMARHISQLGHQVKLISPQFVRPFVKSNKNDFIDAEAICEAASRPSMRFVTPRTEDQQAMSALHRVRDSLVRERVKTTNQMHAFLLEFGVSMPRGIAVIRRLAVVLEEHELPPYLARLLTRLHQHYGYLCEQIEEVEKELKNHIADDETAQRLLSIPGVGPVTASLLATKLGDGKNYASSRDFAASTGLAPRQYSTGGKSTLMGISKRGDKNLRRLLVQCARVYMQRLEYQSGRLAEWVQRQLTRHHSNVVACALANKLARIAWAVTTQQTVFCK

SEQ ID NO: 20185 - protein, 349 aa, unidentified
  source 1..349: note = protein_5e7e24c
  REGION 8..153: note = RuvC_domain
  SITE 11: note = RuvC_P1
  SITE 57: note = RuvC_P2
  SITE 93: note = RuvC_P3
  SITE 95: note = RuvC_P4
  SITE 98: note = RuvC_P5
  REGION 221..309: note = Tnp_domain
  SITE 229: note = Tnp_P1
  SITE 258: note = Tnp_P2
  SITE 266: note = Tnp_P3
  SITE 267: note = Tnp_P4
  SITE 279: note = Tnp_P5
MFTERTSVGLDVHARSIVAAALDGQTSELHQARLTPSFEHVRSWLATLPGPVAVAYEAGPTGFGLYRDLTAAGIRCEVVAPSKLQRPVGDRVKTDVRDSIHLARLLRLGETTSVCIPTVAQEAARDLVRAREDCRGDLMRARHRLSKLLLRHGLVYDGGTAWTGAHDRWLRTVAASALTGAATRVAFDADYEHVLTMKARRDRLDVAIVAMAGDSEFTPIERRMSCLRGVSTLTAFALTVEIGDWDRFTGNSIGSFVGLVPSEYSSGMSRVQGAITKTGNTHARRLLVEAAWHHRARYHVGAVMRERWEQAPAAARVRGDEGNRRLHQRWVNFLDRRKRPVIAKRRHRA

SEQ ID NO: 20186 - protein, 341 aa, unidentified
  source 1..341: note = protein_64c4222
  REGION 6..148: note = RuvC_domain
  SITE 9: note = RuvC_P1
  SITE 52: note = RuvC_P2
  SITE 87: note = RuvC_P3
  SITE 89: note = RuvC_P4
  SITE 92: note = RuvC_P5
  REGION 210..295: note = Tnp_domain
  SITE 218: note = Tnp_P1
  SITE 248: note = Tnp_P2
  SITE 256: note = Tnp_P3
  SITE 257: note = Tnp_P4
  SITE 269: note = Tnp_P5
MKDTMIGVDLAKRVFQLHGATMTGEVKFRKKLSREQFCAFMAKQPAALVVFEACGSASYWAREMAALGHEVRLIAPQYVRPFVKRQKNDAADAEAIVIAARQAEMRFVVPKTADQQARAVLFRSRERLVHQRTELVNALRAVLYEYGHVFPIGLCHVKRIAAVVEDPGCDLPALVIAECQDLLAQIAEKSERIETKTKALKALAAETDTARRLQTTPGVGPLTALAVEAFAPDMAQFKSGRDFVAWLGLVPRQHSSGGKARLGRISKAGQSDIRRLLIIGAMSRITGRARHKVPAESWLGRKLATKPKMLIGIALANKMARQFWAMLTKNEDYRDPALARA

SEQ ID NO: 20187 - protein, 344 aa, unidentified
  source 1..344: note = protein_b3b7ce2
  REGION 6..148: note = RuvC_domain
  SITE 9: note = RuvC_P1
  SITE 52: note = RuvC_P2
  SITE 87: note = RuvC_P3
  SITE 89: note = RuvC_P4
  SITE 92: note = RuvC_P5
  REGION 211..296: note = Tnp_domain
  SITE 219: note = Tnp_P1
  SITE 249: note = Tnp_P2
  SITE 257: note = Tnp_P3
  SITE 258: note = Tnp_P4
  SITE 270: note = Tnp_P5
MEITIIGVDLAKNVFQVHGVNDRGMAVLRKQLRRDQVAAFFANLPACLVGMEACGGAHHWARKLQALGHTVKLMAPQFIKPYVKSNKNDAADAEAICEAVGRPTMRFVPIKNIEQQTVLALHRVRQGFVKARTAQANQIRGLLGEYGLIVPQGIGHIATRVPDLLEDAGNELPGTFRQLIHRLLEHLKQLQRQVAEIEGQIKAWHRSSEASRRLEKVPGIGLLTATALVATVGDAKNFDNGRQLAAWLGLVPRQYSSGGKSTLLGMSKRGDAYLRTLLIHGARSVIYRAGQRAPVDSWLVKLIRRRNANVAAVALANKTARITWALLARDREFRPDYTTVAATA

SEQ ID NO: 20188 - protein, 283 aa, unidentified
  source 1..283: note = protein_56d754c
  REGION 10..98: note = RuvC_domain
  SITE 37: note = RuvC_P3
  SITE 39: note = RuvC_P4
  SITE 42: note = RuvC_P5
  REGION 157..244: note = Tnp_domain
  SITE 165: note = Tnp_P1
  SITE 195: note = Tnp_P2
  SITE 203: note = Tnp_P3
  SITE 204: note = Tnp_P4
  SITE 216: note = Tnp_P5
MEAGSGAHEWARRFQAFGHTVRLMAAKFVTPYRRSGKNDGNDAEAICEAVTRPGMRFVPIKSAEQQAVLTVHRVRQGFVEERTSTINRIRGLLAEFGVVLPLRSVTIRRQAREAAETLPHIARRAIEDLCAHLRELDARVLAYDREIGQQARQSEPARRLMRIRGVGPLSALAIVATVESARDFRSGRQFAAWLGLTPKQHSSGGRSRLGSITKRGDAYLRTLLVLGARSVLHTAMRHKDRISRWVLSLQARRGYHRALVAIANKNARIAWALLSRNQELRTA

SEQ ID NO: 20189 - protein, 339 aa, unidentified
  source 1..339: note = protein_870158a
  REGION 7..149: note = RuvC_domain
  SITE 10: note = RuvC_P1
  SITE 53: note = RuvC_P2
  SITE 88: note = RuvC_P3
  SITE 90: note = RuvC_P4
  SITE 93: note = RuvC_P5
  REGION 212..297: note = Tnp_domain
  SITE 220: note = Tnp_P1
  SITE 250: note = Tnp_P2
  SITE 258: note = Tnp_P3
  SITE 259: note = Tnp_P4
  SITE 271: note = Tnp_P5
MSEVITIGLDLAKNVFQVHGVDAEGVVVIQRQLRRSQVLPFFKKLGPCLVGMEACATAHHWARQLMGLGHEVKLMPPNYVKAYVKRGKNDAADAAAICEAVTRPTMRFASVKDTEQQGILMVHRTRELLVRQRTMAVNALRAHMAEFGIVAPVGVPQVKKLLAIINDPDDARLPPVARSCLEALARQFLSLDAEINAAEKHIHAWHRSNETSRRLETIPGIGRITASALSASVSDPSVFRSGRELAAWIGLVPKQNSTGGKQRLGRISKQGDPYLRWLLVAGALSVIRQAERRGTASPWLAGIIARKPTKVAAVALANKNARIVWSILMGGEGYRPATA

SEQ ID NO: 20190 - protein, 309 aa, unidentified
  source 1..309: note = protein_4a640fa
  REGION 7..148: note = RuvC_domain
  SITE 10: note = RuvC_P1
  SITE 53: note = RuvC_P2
  SITE 93: note = RuvC_P3
  SITE 95: note = RuvC_P4
  SITE 98: note = RuvC_P5
  REGION 188..272: note = Tnp_domain
  SITE 196: note = Tnp_P1
  SITE 225: note = Tnp_P2
  SITE 233: note = Tnp_P3
  SITE 234: note = Tnp_P4
  SITE 245: note = Tnp_P5
MIHPVFIGCDVAKAHLDLFDNQTQKHVRISNTSDAIATWLASLAERDVTVILEATGRYDRLLCAALEDAERPYCRVNPARARDFAKALGLLAKTDVIDARMLALMGQTLSPPVSMPLDASRRQLADLHGRRDQLVAMRQQERVRLKGADPSQHASLQSHIAWLDAEIIRIEKACREHVQADQTMSEQNNRLRSIPGIGPVIAFTLLAHMPELGSRSPKAMAALAGLAPFNADSGTQRGKRHIRGGRKRVRDALYIAAFVAYRMKTPFAKTAQTMMAKGKPPKVMLIAIARKILITANALIRDKTMFNPT

SEQ ID NO: 20191 - protein, 316 aa, unidentified
  source 1..316: note = protein_8bb1a01
  REGION 8..152: note = RuvC_domain
  SITE 11: note = RuvC_P1
  SITE 55: note = RuvC_P2
  SITE 95: note = RuvC_P3
  SITE 97: note = RuvC_P4
  SITE 100: note = RuvC_P5
  REGION 190..274: note = Tnp_domain
  SITE 198: note = Tnp_P1
  SITE 227: note = Tnp_P2
  SITE 235: note = Tnp_P3
  SITE 236: note = Tnp_P4
  SITE 247: note = Tnp_P5
MEVAPIFVGIDVSKARLDIALRPSGARESIPNEEASILALVERLRAIQLTLIVLEATGGVERPVVHALAGAELPVIVVNPRQVRDFAKATGQLAKTDSIDADILARFAEAVRPALRPLPDRATEELRALVARRRQLTEMIVAERNRLSGAARPLRKRIKAHIRWLEAELEGVDSELDQSIRQSPIWHEQEDLLKSVPGIGPVVSRTLLAELPELGRLNRKQIAALVGVAPLNWDSGTLRGRRAIWGGRACVRAALYMAALVASRRNPAIREFYRRLRAAGKAPKVALTACMRKLLAILNAMIKHRVRWSPVMAKTH

SEQ ID NO: 20192 - protein, 346 aa, unidentified
  source 1..346: note = protein_1093e9a
  REGION 7..148: note = RuvC_domain
  SITE 10: note = RuvC_P1
  SITE 53: note = RuvC_P2
  SITE 88: note = RuvC_P3
  SITE 90: note = RuvC_P4
  SITE 93: note = RuvC_P5
  REGION 212..300: note = Tnp_domain
  SITE 220: note = Tnp_P1
  SITE 250: note = Tnp_P2
  SITE 258: note = Tnp_P3
  SITE 259: note = Tnp_P4
  SITE 272: note = Tnp_P5
MKYSTTVGVDLAKNVIQVSVVSPRGKELLNRSLTRRKFAEFLGKQKPSLVAFEACATSHHWARTAKRHGHFARIIPAKAVAPFRQGHKTDSNDALAVAEAARRPNIKDAPMKSIDQQGLQAIQRSRDLLVQESTALSNHLRGLLMEFGVVIPQGFAALRRMLPEILEDGANEVPDLYRPTLHRLYGRFVELRDDIQSMNVEVKELVKQHPACKRLTALEGVGPISAVLLYASLGTGEAFSGSREFAAYLGLTPRQFSSGGKTNIVGLSKKIGNCRLRSVLIQGARAYVHKLKEPKTSKDRWLVDLIERAGHGKAAVALANKNVRTAWAMLTQGTDYQRRPQLNVAA

SEQ ID NO: 20193 - protein, 335 aa, unidentified
  source 1..335: note = protein_a2b9f76
  REGION 2..142: note = RuvC_domain
  SITE 5: note = RuvC_P1
  SITE 48: note = RuvC_P2
  SITE 83: note = RuvC_P3
  SITE 85: note = RuvC_P4
  SITE 88: note = RuvC_P5
  REGION 206..292: note = Tnp_domain
  SITE 214: note = Tnp_P1
  SITE 244: note = Tnp_P2
  SITE 252: note = Tnp_P3
  SITE 253: note = Tnp_P4
  SITE 265: note = Tnp_P5
MFAIDIAKSVLQVAGADASGRLVFNKALRRGQVLAFFARQAPAVIGMEACGSAHYWARELKALGHEVRLIPAQYVKPFVKRNKNDARDAEAILEAMQRPTMRFVTVKSVEQQCDRAVHSARDLLVRQSTQLINAVRGLAYEMGIASAKGAAGMTCLLQLIDHADSRIPPALLPMLEALAAQWRALKAQIDRLDRHLQALARANPQARRLMTIPGVGPVTAHAVVAAIGDGRQFRTARDFAAWVGLTPRGFGTGGRQRTGRISRAGDDALRRLLVLGAASWLRQVKAKPEKGSAWFKGVLARRPVRVAVVALAAKNARIVWAVLTSGHDYRAPAAA

SEQ ID NO: 20194 - protein, 377 aa, unidentified
  source 1..377: note = protein_3b1df6e
  REGION 7..154: note = RuvC_domain
  SITE 10: note = RuvC_P1
  SITE 58: note = RuvC_P2
  SITE 94: note = RuvC_P3
  SITE 96: note = RuvC_P4
  SITE 99: note = RuvC_P5
  REGION 222..308: note = Tnp_domain
  SITE 230: note = Tnp_P1
  SITE 260: note = Tnp_P2
  SITE 268: note = Tnp_P3
  SITE 269: note = Tnp_P4
  SITE 281: note = Tnp_P5
MKNVRFVGLDVHAETIAVAVAETGGEVRSLGTIPNRRESVGRLIRKLGKPEQLRVCYEAGPTGYVLYWQLSELGVKCEVVAPTLIPVKAGDRVKTDRRDAEKLARCYRSGDLTAVWVPDAAHEALRDLVRARLAGKRDQLRARNRLSKFLLRHGRRAPAGASAWSTKYLVWVKSLRFEQSAQQLTLEDYLHEVEHAAERIARLERSIDAAIETLPVKMRAVIEALQSLRGIAQISAVSIMAELGEVSRFERARQLMGYSGAVSWEDSSGERVHRGSISKAGNAHLRRIVVEAAWSYRHRPAIGKTLAARQRRSSAPVTELAWKAQHRLHQRYVRLIARGKCKQHAVTAVARELLGFIWAIGIAVERTHTPPEMQRAA

SEQ ID NO: 20195 - protein, 339 aa, unidentified
  source 1..339: note = protein_93d1cd0
  REGION 6..148: note = RuvC_domain
  SITE 9: note = RuvC_P1
  SITE 52: note = RuvC_P2
  SITE 87: note = RuvC_P3
  SITE 89: note = RuvC_P4
  SITE 92: note = RuvC_P5
  REGION 211..302: note = Tnp_domain
  SITE 219: note = Tnp_P1
  SITE 249: note = Tnp_P2
  SITE 257: note = Tnp_P3
  SITE 258: note = Tnp_P4
  SITE 270: note = Tnp_P5
MEVTTIGLDLAKNVFQVHGINEHGEVAFNRALRRAQVLAFFERLDPCLIGIEACGTSHHWARELIKLGHNVKLIPPAYVKPYVKRGKSDAVDAAAICEAVTRPTMRFVEVKTPEQQAILAVHRTRDLIVRQRTQTINMLRAQLAEFGIILPQGVYHPLRFAKDCANGEQPDLPNDAREVVADLCDQLLFLHSKILRHSRHMTQIAKCEKRVALLRTIPGVGPITASAIVATVGSGEQFNNGREFAAWLGLTPLNKSSGGKERLGHISKMGDQYIRRLLVLGMTSRIRSIRSEPEKFDPWFADILSRKPSRVAAIAMANKTARMIWAVLIRNEPYKVRTV

SEQ ID NO: 20196 - protein, 347 aa, unidentified
  source 1..347: note = protein_1fd09aa
  REGION 7..147: note = RuvC_domain
  SITE 10: note = RuvC_P1
  SITE 53: note = RuvC_P2
  SITE 88: note = RuvC_P3
  SITE 90: note = RuvC_P4
  SITE 93: note = RuvC_P5
  REGION 210..302: note = Tnp_domain
  SITE 218: note = Tnp_P1
  SITE 248: note = Tnp_P2
  SITE 256: note = Tnp_P3
  SITE 257: note = Tnp_P4
  SITE 269: note = Tnp_P5
MEYITRIGMDTSKHLFQLHGVDAEENVVLRRQVRRSQMLTFFQKLPPTVIGIEACGASHHWARMLQSLGHEVRLLPPQYVKPYVKRNKNDAADAAAVCEAMSRPHMRFVPVKTKDNQAVLMLLGVRERLLRVRTQLSNAIRGYAAEFGLTVGRGISRLEHLFERIAGDTSLPALARELFSLHAQEYRDLQMRIAEIEDRLDDWRHENEKVRRLTKVPGIGPIGASLLVMKTPDPECFRSGRDFAAWIGLTPKDHSSGGKRRLGGITHAGDEALRSVLVAGATNLIRYARLGRGQVSPWLAALIKRKPPMLAAVALANKMARIAWKLLVSGEAYAQSSNSRQLSAQPG

SEQ ID NO: 20197 - protein, 398 aa, unidentified
  source 1..398: note = protein_e2a00e8
  REGION 4..160: note = RuvC_domain
  SITE 7: note = RuvC_P1
  SITE 57: note = RuvC_P2
  SITE 97: note = RuvC_P3
  SITE 99: note = RuvC_P4
  SITE 102: note = RuvC_P5
  REGION 271..357: note = Tnp_domain
  SITE 279: note = Tnp_P1
  SITE 309: note = Tnp_P2
  SITE 317: note = Tnp_P3
  SITE 318: note = Tnp_P4
  SITE 331: note = Tnp_P5
MLSIGIDVSKGKSTVCGMKPGGEIVYTPFEVQHTREGMSELVSLLRGSGEEVRVVLESTGSYHCPVVAALLENGIFVSVVNSLRMKRFCSQSIRRVKTDQIDAMQIALYGLAYWQELQPTRLPENTYRELQLLARQYYQMTSMLIKAKVDFNALCDQVLPGMQELMSDHAGRHKLSDFVLRYRHTTHILEMGETRFRKDYCKWAEKKGYRNRERMAALIFATAQNGIPVLPNAPSTQIVITEAIRVLHTVEASRDAILTQMQALAKTLPEYSLVREMPCIGDTLAPRLIAEIGDVRRFHSKRALIAYAGIDAPPYQSGKFSANNRHISKRGNRYLRKTGYEVMQSYVMHKPANDPIFTFIEKKRSEGKSGKLAMVAGLNKFLRVYYGKVTELYRSLPQ

SEQ ID NO: 20198 - protein, 394 aa, unidentified
  source 1..394: note = protein_51c656f
  REGION 4..157: note = RuvC_domain
  SITE 7: note = RuvC_P1
  SITE 56: note = RuvC_P2
  SITE 96: note = RuvC_P3
  SITE 98: note = RuvC_P4
  SITE 101: note = RuvC_P5
  REGION 262..349: note = Tnp_domain
  SITE 270: note = Tnp_P1
  SITE 300: note = Tnp_P2
  SITE 308: note = Tnp_P3
  SITE 309: note = Tnp_P4
  SITE 322: note = Tnp_P5
MRFAGIDIASETHVLAIVDADGAVEVTATPFGEDAAGYAKALALLGDPRELLIAMEATGHYWKNLFATLSAAGHAIALINPLRTHRFAGEDLVRTKTDALDALGIARFAAQKRPPALHLPDAVADELRELVRLRERLVQDFGDRVRQLHRLVDLGFPEFTRYVRTLESELAGAILRDYPTAAAFRGVSVRRLAALRYDGRHRVGLELARTLIEAARRSVGQHHSAPYRIQVRYACDDLDVLRRRLRDLDRDLEGKLREHEVGRLLTTIDGIGPNTAARIIAAVGDPASFHSAAALAAYVGTIPRLRQSGKRQPARAPLTPIGNAALRAALWMPTLTAVRNNPWLRAHYERLRTRGKLPKVALVACMHKLLFAIYSVAKHRRAFIPQLAAPGTVQ

SEQ ID NO: 20199 - protein, 346 aa, unidentified
  source 1..346: note = protein_3a0d9ec
  REGION 7..148: note = RuvC_domain
  SITE 10: note = RuvC_P1
  SITE 53: note = RuvC_P2
  SITE 88: note = RuvC_P3
  SITE 90: note = RuvC_P4
  SITE 93: note = RuvC_P5
  REGION 210..303: note = Tnp_domain
  SITE 218: note = Tnp_P1
  SITE 248: note = Tnp_P2
  SITE 256: note = Tnp_P3
  SITE 257: note = Tnp_P4
  SITE 269: note = Tnp_P5
MSDIIRIGVDTSKSVFQLHGVDAAELPVLRKKLRRRDMLAFFRRLPATKVGMEACGGTHYWARELTALGHEVKLLPPQHVKPYVRRGKNDRNDADAICEAMSRPRMSFVAIKSADQQAAQMLMTTRERLIASRTQLINTIRGHAAEFGLTAAKGPAHVAPLLLRIAEDKTVPELAKELFALHGQELNRLKIELREIEAKLKVWHRQNELSRRLAEVDAIGPIGGCLLAIKAPDPQVFRCGRDFAAWMGLTPKDHSTAGKMRFGAITRAGDEALRRTLVVGATSVIKQVSKGKGDPSPWLRDLVARKPPKLAAVALANKVARIAWKLMVGGERYDAARAGVVSPTAS

SEQ ID NO: 20200 - protein, 411 aa, unidentified
  source 1..411: note = protein_8cb5bf1
  REGION 5..164: note = RuvC_domain
  SITE 8: note = RuvC_P1
  SITE 61: note = RuvC_P2
  SITE 101: note = RuvC_P3
  SITE 103: note = RuvC_P4
  SITE 106: note = RuvC_P5
  REGION 272..358: note = Tnp_domain
  SITE 280: note = Tnp_P1
  SITE 311: note = Tnp_P2
  SITE 319: note = Tnp_P3
  SITE 320: note = Tnp_P4
MRLFVGDDWAEDHHDVEVMDPAGRVLARKRLPEGVAGMARLHELIGQHLGVDAEDAEVVIGIETDRGPWVAALVAAGYTVYAVNPLQASRYRERHGVSGAKSDRGDSHMLTDMVRTDSHQLRAVAGDSPDAGAVKVVARAHKTLIWERTRQVQRLRHQLREYFPAALAAFEDLDAADTLELLAKAPDPARAVRLTRAQVSAALKRARRRDITGKATAILAALRSAQLGQPPAITAAYAHTVRSLIAVITTLNEQVKTLQGQVEADFGQHPDAEIYLSQPGLGSILGARVLGEFGDDPDRYASGKARKNYAATSPITRASGKKKVVAARFIRNDRLTDALMAQAFTAISASPGARALYDAERARGKEHNPALRKLASRLVGILHGCLKTRTLYDEATAWSHRQNLPQSSVAA

SEQ ID NO: 20201 - protein, 342 aa, unidentified
  source 1..342: note = protein_c4eeee7
  REGION 6..148: note = RuvC_domain
  SITE 9: note = RuvC_P1
  SITE 52: note = RuvC_P2
  SITE 87: note = RuvC_P3
  SITE 89: note = RuvC_P4
  SITE 92: note = RuvC_P5
  REGION 210..293: note = Tnp_domain
  SITE 218: note = Tnp_P1
  SITE 248: note = Tnp_P2
  SITE 256: note = Tnp_P3
  SITE 257: note = Tnp_P4
  SITE 269: note = Tnp_P5
MKNMMIGVDLAKAVFQVHGALRTGEVQFRKKLTRKQFPAFMAQQEPSMVIFEACGSAHFWAREMEALGHEVKLIAPQYVHPFVKRQKNDAADAEAIVIAARQPEMRFVEPKTVEQQSCAAVFRARERLVHQRTADVNALRALLYEHGHVFPIGMSHLARMTAFVQDETGDLHALIREECLDLLVQIAEKTARIIARTTKLKALAAQSDRARRLQTMPGVGPLTAVAVEAFGPDMADFKTGRNFAAWLGLVPRQHSSGGKERLGRMTKAGQADIRRLLIIGAMSRLNWLGQRTIVEGSWLSRMLMRKPKMLVAIALANKMARQIWAMLTKNKDYRDPAMAVVA

SEQ ID NO: 20202 - protein, 369 aa, unidentified
  source 1..369: note = protein_49beff1
  REGION 32..174: note = RuvC_domain
  SITE 35: note = RuvC_P1
  SITE 78: note = RuvC_P2
  SITE 113: note = RuvC_P3
  SITE 115: note = RuvC_P4
  SITE 118: note = RuvC_P5
  REGION 237..322: note = Tnp_domain
  SITE 245: note = Tnp_P1
  SITE 275: note = Tnp_P2
  SITE 283: note = Tnp_P3
  SITE 284: note = Tnp_P4
  SITE 296: note = Tnp_P5
MVRLVLLPQNAAFGQEDCLMAERNKPKEAAVFGVDIGKNVFHVVGIDASGAPIQRASFRRDTLLQFFERAKPTVVGMEACPGSQWLARKIMAFGHRVRIVPARFVKPYVKSNKNDIIDAEAIAEAVSRPTMRFVEVRSPEQIDLQALHRVRDRMVAQRTRLVCQMRAFCLEYGIAMHQGVGRFKADLPKVLANEENDLTPAMRRLLASLFEDVRQLEARISEISREIEATAAADDTARRLMTIPGIGPLAATALLAAAGKGAQFKKARDMAAWLGLTPREHSTGGKTTLLGISKRGNAYLRRLLIHGSRSCLLHLDRSRDRLGGWLERLQSRMHNNKAVVALAAKVARIAWVIMTTPGATYEKRGPAAA

SEQ ID NO: 20203 - protein, 441 aa, unidentified
  source 1..441: note = protein_7acd090
  REGION 9..152: note = RuvC_domain
  SITE 12: note = RuvC_P1
  SITE 57: note = RuvC_P2
  SITE 92: note = RuvC_P3
  SITE 94: note = RuvC_P4
  SITE 97: note = RuvC_P5
  REGION 285..371: note = Tnp_domain
  SITE 291: note = Tnp_P1
  SITE 323: note = Tnp_P2
  SITE 331: note = Tnp_P3
  SITE 332: note = Tnp_P4
  SITE 343: note = Tnp_P5
MEIINPNAAGIDIGSRSHFVAINQDLSDVREFGVYAEDMKELLKWLLENDVKTVAMESTGSYWQNLFTELQNSAIEVILTNGKFTKNIQGKKTDVLDCMWIQKLHTLGLLRGSFLPDLQTEHLRTLVRHRGNLIDTTSKASKRMAQNMRLMNLRLDVVVKDIVGLTGLRIINAICNGQTSSEELAKLRHGNCKKSEEEIAKALQSNNRQDYLFVLKQELQKYQDAQRLILECDMEIKKLLDEFINQDDVKKSLCIDKKVHKRINKNTPKNLDLNLISYQYFDGIDLYAIEGFSHGTVLTLMSELGENGILKFQNAQHFTSWLRLAPNNKVSGGRILSSRTPKGSNRLKIALRQAANSIGNLKDTHLSNFFNRIAYRKGRAVAVSATARKVATILWNMLYKKQQYNPPTVYEYLDQKRKRKVSELQKQIANLDARMSKIRPA

SEQ ID NO: 20204 - protein, 344 aa, unidentified
  source 1..344: note = protein_b5f9c51
  REGION 7..149: note = RuvC_domain
  SITE 10: note = RuvC_P1
  SITE 53: note = RuvC_P2
  SITE 88: note = RuvC_P3
  SITE 90: note = RuvC_P4
  SITE 93: note = RuvC_P5
  REGION 212..299: note = Tnp_domain
  SITE 220: note = Tnp_P1
  SITE 250: note = Tnp_P2
  SITE 258: note = Tnp_P3
  SITE 259: note = Tnp_P4
  SITE 271: note = Tnp_P5
MGEVITIGLDTAKSVFQVHGVDAGGAVVIRKKVSRAKVLEFFSSLPPSLVGIEACPTAHHWSRKLQAQGHTVRLMPPSYVKAYVKRSKNDANDAAAICEAVTRPSMRFVPTKSEQQQSALMLHRSRQLLVRQRTMLSNAIRGHLAELGIISAKGRNGTAELIEILTNEKDDRIPAAARLSLTILARQYAAITTEIGAIEKHIHAWHRSCEESRRLEEVPGVGPIVATALVAEIGDWTAFSSGRSLAAWIGLVPRQHSTGGKERLGRISKQGNRHLRWLLVCGAMAVIRYARRHGTKRPWLIRLMGRRPTKVAAVALANKIARIAWATMVRGERFKEMKLLSAAA

SEQ ID NO: 20205 - protein, 298 aa, unidentified
  source 1..298: note = protein_88f2d22
  REGION 1..103: note = RuvC_domain
  SITE 2: note = RuvC_P2
  SITE 43: note = RuvC_P3
  SITE 45: note = RuvC_P4
  SITE 48: note = RuvC_P5
  REGION 166..252: note = Tnp_domain
  SITE 174: note = Tnp_P1
  SITE 204: note = Tnp_P2
  SITE 212: note = Tnp_P3
  SITE 213: note = Tnp_P4
  SITE 224: note = Tnp_P5
MENADGLGRHLARWLIARGETVLDVPTTATARVRELSRGGRRKNDRIDAAAAACVAALQGEGRLVVPDEHSDALQMLDVRRNNLSASRTRTVNQLHALLRELLAGGAPTGLSANTAAAALRGCRAQTLSGRVRVGLCKDLIADIRRLDRQLATNQADIDQLLVEHGTRLRTIDGIGPVLAARLIGRTGLATRFATAAAYATYNGTAPVEIASADRRIHRLSRDGDRQLNAALHTIAMVQVRMPGSAGRAYYDRKVAAGSSHRAAMRCLKRHLSNTIWRIMIADEAHRRRHPADCSSAA

SEQ ID NO: 20206 - protein, 355 aa, unidentified
  source 1..355: note = protein_35bf270
  REGION 6..147: note = RuvC_domain
  SITE 9: note = RuvC_P1
  SITE 52: note = RuvC_P2
  SITE 87: note = RuvC_P3
  SITE 89: note = RuvC_P4
  SITE 92: note = RuvC_P5
  REGION 211..297: note = Tnp_domain
  SITE 219: note = Tnp_P1
  SITE 249: note = Tnp_P2
  SITE 257: note = Tnp_P3
  SITE 258: note = Tnp_P4
  SITE 270: note = Tnp_P5
MQISTIGIDIGKNSVHFVGFDARGGIVVRRRCSRTQLIRAPANVPPCLVGMEACCGAHHLGHILVAQGHDVRLIPPPYVKPFVKSHKNDLLDAEAIGEAVQRPTMRFVPLKTMEQLDLQAIHRLRTRLVARRTAVINQMRGFLLERGVTFPLGREALVKRFPEVLDNPALGLSVRFCRLLQQLRDEWRLMDDDIENVDQEILSLARDDEACDRLMQVPGIGPLTATALVAAVGNGAAFAKGRDLAAWLGLVPRQHSTGGKTVLRGTSKRGNAYLRCLFIHGARSVCRHHHQKLHRLGRWLTSLEARAHPNVVASRSRTNWCERPGLSCSETPTTTGGSSRMRDAWSLRAAAHWRP

SEQ ID NO: 20207 - protein, 325 aa, unidentified
  source 1..325: note = protein_97e5e3a
  REGION 6..157: note = RuvC_domain
  SITE 9: note = RuvC_P1
  SITE 59: note = RuvC_P2
  SITE 99: note = RuvC_P3
  SITE 101: note = RuvC_P4
  SITE 104: note = RuvC_P5
  REGION 198..284: note = Tnp_domain
  SITE 206: note = Tnp_P1
  SITE 236: note = Tnp_P2
  SITE 244: note = Tnp_P3
  SITE 245: note = Tnp_P4
  SITE 257: note = Tnp_P5
MTPSMVGVDIAKATFDVATPLEAKGKYRTKGKVPNTPAGFALLADWLAQHAPEAGVCMEATGIYHEALAIFLVEHGVIIYVINPAQVAAYAKSELSRTKTDRTDAKLLARFALAQQHAANLRPWVPPTPAQRRLRALIHRLNDLEGMRQMERNRLDVSDPSVNPSISQLIETLDAQIADLKKAIHNHIDSDPDLRRDSDLLASIPGIGELTAAFVLGCVGDLRRFDDPRKLDAFAGMNPAVRESGKWKGQSRLSKIGHALLRAKLYMPAMTAIRHNVAVRALFERLVARGKPRKLALGAAMRKLLHIAWGVIHSATPFDPKVALA

SEQ ID NO: 20208 - protein, 408 aa, unidentified
  source 1..408: note = protein_301eead
  REGION 4..163: note = RuvC_domain
  SITE 7: note = RuvC_P1
  SITE 60: note = RuvC_P2
  SITE 100: note = RuvC_P3
  SITE 102: note = RuvC_P4
  SITE 105: note = RuvC_P5
  REGION 273..359: note = Tnp_domain
  SITE 281: note = Tnp_P1
  SITE 312: note = Tnp_P2
  SITE 320: note = Tnp_P3
  SITE 321: note = Tnp_P4
MLFVGDDWAEDHHDVEVQDEHGRAIRTVRLPEGVDGMTRFHELVARFLPEHAKPSDVLVCIETDRGPWVRALAAAGYQVYGVNPKQAARHREGMSLSGAKSDKADAHTLADMVRTRRHQLRQVAADSDIAEAVKVVARAHQTLIWERTRHTLRLRAALRDYFPAALQAYQVLTLTGADTLELLAKAPTPAAAAKLTVTQISAALKKARRHDVAAKAAAIQQALRTEHLGQSDVVAGAYGATVRATVAVLQTLNTEIRTLDGQVEAHFGQHPDAEVYLSQPGIGVILGARVLAEFGDAPQRYADAKSRKNYAGTAPITRQSGKSKTVHARFIHNDRLVDALHMQAGVAILHDPGVRAYYDELRGREIGHNAALRQVGNRLVGILHGCLKTSSSYNQTTAWSHRTKSAAA

SEQ ID NO: 20209 - protein, 272 aa, unidentified
  source 1..272: note = protein_8d97995
  REGION 1..108: note = RuvC_domain
  SITE 5: note = RuvC_P2
  SITE 45: note = RuvC_P3
  SITE 47: note = RuvC_P4
  SITE 50: note = RuvC_P5
  REGION 216..272: note = Tnp_domain
  SITE 224: note = Tnp_P1
  SITE 255: note = Tnp_P2
  SITE 263: note = Tnp_P3
  SITE 264: note = Tnp_P4
MVKVGIETDRGPWVAALAAAGYEVFAINPMSVARYRERHSTSGAKSDAADAHLLAEIVRVDRAHHRPLAGDTAEGEAIKLTARAHQSLVWDRTRHMLRLRSALRDFFPAALKAFRDLDAPDTLELLARAPGPDQATRLTKTRIEAALKQARRHYVAAKATELAAILAEDQLRQPPAIQSAYEAVVSSEVAIIVALNTQIDQLGTVVAAHFGQHPDAEIYTSQPGLGTILAARVLGEFGEDPHRYSDAKARKNYAGTSPITRASGTRKIVLAR

SEQ ID NO: 20210 - protein, 370 aa, unidentified
  source 1..370: note = protein_a56776c
  REGION 7..147: note = RuvC_domain
  SITE 10: note = RuvC_P1
  SITE 53: note = RuvC_P2
  SITE 88: note = RuvC_P3
  SITE 90: note = RuvC_P4
  SITE 93: note = RuvC_P5
  REGION 210..295: note = Tnp_domain
  SITE 218: note = Tnp_P1
  SITE 248: note = Tnp_P2
  SITE 256: note = Tnp_P3
  SITE 257: note = Tnp_P4
  SITE 269: note = Tnp_P5
MNKIIRIGIDTSKSVFVLHGVDAAEQPVLRRKLRRGQVLEFFAKLEPTKIGIEACGAAHQWARELTALGHEAVLLPPQYVKPYVKRNKNDAADAEAICEAMSRPTMRFVPVKTAEQQAALMLAGRRDGLIRRRTQLSNTIRGYAAEFGLIAAKGLDKIEPLLTRIAADQNLPELARELFADYGRDYAELGKQVAKIEAKLKAWHKNNELSRRLAELPTIGPIGASMLVMKVTDPHAFGVGRNFSAWIGLTPKDHSTAGKMRLGVITRAGDEALRSVLVAGATAVIQQVRKGRGHPSPWLLELLKRKPPKLAAVALANKIARIAWKLMVSGERYDPQRAAGRFVPPTGRIAPRSPRQGRFAPPAGVAVGQP

SEQ ID NO: 20211 - protein, 353 aa, unidentified
  source 1..353: note = protein_ee9f636
  REGION 4..158: note = RuvC_domain
  SITE 7: note = RuvC_P1
  SITE 56: note = RuvC_P2
  SITE 97: note = RuvC_P3
  SITE 99: note = RuvC_P4
  SITE 102: note = RuvC_P5
  REGION 220..306: note = Tnp_domain
  SITE 228: note = Tnp_P1
  SITE 258: note = Tnp_P2
  SITE 266: note = Tnp_P3
  SITE 267: note = Tnp_P4
  SITE 278: note = Tnp_P5
MIVIGIDPHKSTHTATAVDPATNTDLGSIRIDATLTGYKKLIAWAKSWPQRQWAVENAYGLGHHLAQWLLVLGEVTLDVPTTATARVRGLSRGGRRKNDRIDAAAAACVAAAQGDARPVDPEGPTDILSLLDERRTNLSGSRTRIVNQLHALLRQLLAGGAPTSLTAAAATALLRGFRARSEVDRVRVGLCRDLIADVRRLDDQLAANEKQMTHALDEHGTRLREVDGIGAVTAARLIGRTGRPDRFPTAAAFANYNGSAPVQIASADTDRHRLSRYGDRQLNSALYTVAVVQIRMPASAGRAYYDKKIAEGRKPAAARRALKRHLSDHVWRIMLADEKLRLRPERNQSARAA

SEQ ID NO: 20212 - protein, 340 aa, unidentified
  source 1..340: note = protein_6d046c7
  REGION 6..147: note = RuvC_domain
  SITE 9: note = RuvC_P1
  SITE 52: note = RuvC_P2
  SITE 87: note = RuvC_P3
  SITE 89: note = RuvC_P4
  SITE 92: note = RuvC_P5
  REGION 211..298: note = Tnp_domain
  SITE 219: note = Tnp_P1
  SITE 249: note = Tnp_P2
  SITE 257: note = Tnp_P3
  SITE 258: note = Tnp_P4
  SITE 270: note = Tnp_P5
MKITTIGIDLAKDVFQVHGVDEHGNVTVKRQLKRKEMIEFFTQQKPCLVGMEACGGAHFWARRLTSLGHTVKLMAPQFVKPYVKGNKHDAADAEAICEAVTRPTMRFVPIKTTDQQSILAVHRVRQGMIKARTAQANQIRGLLAEFGLVLPIGIANLFLRVPTLLDEAKDTMPGVFRELILRLLTYMKELSRHIDDLEIQIHRWHRASEASRNLEKIPGIGPVTASALIASIGDARNFKNGRQLAAWLGLVPKQHSSGGKTKLQGISKRGDSYLRTLLIHGARAVVKNVERNPDRHVWLRKLMARSHTNIATVALANKNARIVWALLAHEQTFQSDYVRT

SEQ ID NO: 20213 - protein, 351 aa, unidentified
  source 1..351: note = protein_22bbece
  REGION 10..158: note = RuvC_domain
  SITE 13: note = RuvC_P1
  SITE 62: note = RuvC_P2
  SITE 98: note = RuvC_P3
  SITE 100: note = RuvC_P4
  SITE 103: note = RuvC_P5
  REGION 232..314: note = Tnp_domain
  SITE 267: note = Tnp_P2
  SITE 275: note = Tnp_P3
  SITE 276: note = Tnp_P4
  SITE 287: note = Tnp_P5
MAAKKRSVIGGVDTHRDTHHAAIIDSTGGLLDDAEFPATTAGYADLLAWMRSFGRLTAVGIEGTGSYGAGLARYLTSKKVPVVEVDRPDRRARRNQGKSDPIDAIAAARATLAGTAMGTPKTRTGPVEAIRSLRVARRGAVKARTAAINQMRGLVAAAPEALRAQLTKVSVATLVSRCAALAYDPARLHEPEHATAAALAGLARRVTALTEEIAILDRQVTPIVAKAAPRTSALFRVGPEVAAQLLTTAGDNADRLHSEAALAHLCGAAPIPASSGRVRRHRLHRGGDRGANPALHTIALCRMRYDQRTQAYVHRRITEGLSKQEILRCLKRYIVRDVYTALAADFAALTT

SEQ ID NO: 20214 - protein, 346 aa, unidentified
  source 1..346: note = protein_5b23924
  REGION 10..152: note = RuvC_domain
  SITE 13: note = RuvC_P1
  SITE 56: note = RuvC_P2
  SITE 91: note = RuvC_P3
  SITE 93: note = RuvC_P4
  SITE 96: note = RuvC_P5
  REGION 214..298: note = Tnp_domain
  SITE 222: note = Tnp_P1
  SITE 252: note = Tnp_P2
  SITE 260: note = Tnp_P3
  SITE 261: note = Tnp_P4
  SITE 273: note = Tnp_P5
MATVTKDIMIGVDLAKNVFQLHAASMTGQPKFRKKLLRQSFPRFMAEQPPAVVVMEACGSAHYWAREMIRLGHEVKLIAPQYVKPFVKRQKNDAADAEAIVIAAQRPEMRFVQPKSAEQQGRAILFRARERLIRQRTELVNALRACLYEYGHVVPQGIHQIGRIEEILDAPHSDLPDLMREECRELLEQVAEKSVRINARTGKIKALAAEDDTARRLQTIPGIGPLTALAVEAFAPPMENFRRGRDFAAWLGLVPRQFSSGGKERLGRISNAGQADIRRLLIIGAMSRLNWLGRKSIPEGSWLARMVARKPRMLVAIALANKMARTVWAMLTKNEDYRDPVQVVAA

SEQ ID NO: 20215 - protein, 391 aa, unidentified
  source 1..391: note = protein_225f309
  REGION 4..163: note = RuvC_domain
  SITE 7: note = RuvC_P1
  SITE 60: note = RuvC_P2
  SITE 101: note = RuvC_P3
  SITE 103: note = RuvC_P4
  SITE 106: note = RuvC_P5
  REGION 266..353: note = Tnp_domain
  SITE 274: note = Tnp_P1
  SITE 304: note = Tnp_P2
  SITE 312: note = Tnp_P3
  SITE 313: note = Tnp_P4
  SITE 326: note = Tnp_P5
MIYVGIDVAKDKHDCFITNSDGDVLFKSFTITNNREGFESLFQRIESVSDDLTKVKVGLEATGHYSYNLLGFLLDKGLTTFVINPLHTNLYRKSLSLRQTKTDKVDARTIASMIMSDVNLKSYSDTSYHNEELKSLTRYRFDKVQERAKLKTSVSRLVNILFPELEKLVPVLHIASVYAMLYEFPSSSDIASAHLTRLTNLLSETSKGRYDKDTAVLFREAARASIGSHMPAKSLELKHTIKLIQELTVEIDEIESEIKSIMDNIHSPILSIPGINYRMGAMIVAEIGDFSRFDSPDKILAYAGLSPSTYQSGQLDNCYSHMEKRGSRYLRYALFNATKYVCIWDSNFATYLAKKRAEGKHYNVAISHAAKKLVRVIYQLEKSGQTYNKAA

SEQ ID NO: 20216 - protein, 386 aa, unidentified
  source 1..386: note = protein_483e47f
  REGION 5..158: note = RuvC_domain
  SITE 8: note = RuvC_P1
  SITE 56: note = RuvC_P2
  SITE 97: note = RuvC_P3
  SITE 99: note = RuvC_P4
  SITE 102: note = RuvC_P5
  REGION 220..305: note = Tnp_domain
  SITE 228: note = Tnp_P1
  SITE 258: note = Tnp_P2
  SITE 266: note = Tnp_P3
  SITE 267: note = Tnp_P4
  SITE 278: note = Tnp_P5
MTVIIGMDPHKRSATIEAIDPTGRILATGRYATDTAGYTDMLTAAQQFTKRVWAVEGCNGIGRHLAHRLVHDGETVIDVPAKLSAQVRVFATGNGRKTDPVDAHSVALAALHAPNLRRVTADPELVALGMLADRRDELGRARTETLCRLHRLLLELIPGGAKQFLSARQARELAVTVTPSDAAARVRLRLIMEMIEDLETIDRKTRAADKELCQLVADRGSTLMELHGIGPSSAARLLADAGDVHRFRDRDRFASWNGTAPLDASSGDQQRHRLSRAGNRKINRVLHIMAIVQLRNRTTGRVYYDARKAGGKTSMEALRALKRRLSNVVYARMLADQRRREWAGPGGQSGTATDSSATGSNPHTDPSDKPHPGPAIQANPASTPTP

SEQ ID NO: 20217 - protein, 412 aa, unidentified
  source 1..412: note = protein_3d64fec
  REGION 4..170: note = RuvC_domain
  SITE 7: note = RuvC_P1
  SITE 67: note = RuvC_P2
  SITE 107: note = RuvC_P3
  SITE 109: note = RuvC_P4
  SITE 112: note = RuvC_P5
  REGION 278..364: note = Tnp_domain
  SITE 286: note = Tnp_P1
  SITE 317: note = Tnp_P2
  SITE 325: note = Tnp_P3
  SITE 326: note = Tnp_P4
MLFVGDDWAEDHHDVEVVDDQGSVLARRRLPEGFDGIAALHALIATHLPEEWADLEPGRAQALVKVGIETDRGPWVAALVAAGYEVFAINPLSVARYRERHSTSGAKSDAADAHLLAEIVRLDRHHHRPVAGDSEDAEAIKLVARTHQSLIWDRTRHLLRMRAALRDFFPAALEAFPDLDAPDVLELLAKAADPTRAARLTRGQIAGALRRAHRRDVEAKADRIHQILHAEQLHRSATVESAYAAIVTGQVAILQTLNAQITELGAVVADHFGRHPDAEIYASQPGLGVVLGARVLGEFGDDPDRYADSKARKNYAGTSPITKASGNRKVVLARYARNRRLADALQQWALGAMRGSPGARAYYLALRDRGINHHAALRQLANRLVGILHGCLKTRTSYNEHTAWDHHIHTAA

SEQ ID NO: 20218 - protein, 389 aa, unidentified
  source 1..389: note = protein_080ba4b
  REGION 4..157: note = RuvC_domain
  SITE 7: note = RuvC_P1
  SITE 56: note = RuvC_P2
  SITE 96: note = RuvC_P3
  SITE 98: note = RuvC_P4
  SITE 101: note = RuvC_P5
  REGION 262..349: note = Tnp_domain
  SITE 270: note = Tnp_P1
  SITE 300: note = Tnp_P2
  SITE 308: note = Tnp_P3
  SITE 309: note = Tnp_P4
  SITE 322: note = Tnp_P5
MRFAGIDIASEKHVVAIVNADGAVELKATVFTEDAAGYEKVLALLGTPNEVLIAMEATGHFWKNLFAVLAAAGHAIALVNPLRTHRFAGVDLERTKTDAIDAMGIARFAAEKRPAVTALPDALAEELRELVHLRDRLLQDFGDRVRQLHRLVDLGFPEFTRYVRTLDSELAVAILRDYPTAAAFRGVSVRRLAALRYDGRHQVGLDLARTLIEAARRSVGQHHSATYRLQIRYACDDLNVLRHRLRDIDRDIGGKLREHEIGRLLTTIDGIGTNTAACVIAEVGDPAHFRSGSALAAYVGAIPALKQSGKRQFARGAMTPIGNARLRAALWMPTLSAVRNNPWLRAYYQRLRARGKLPKVALVACMRKLLLAIYSVAKHRRPFTVEVSP

SEQ ID NO: 20219 - protein, 342 aa, unidentified
  source 1..342: note = protein_007871a
  REGION 7..148: note = RuvC_domain
  SITE 10: note = RuvC_P1
  SITE 53: note = RuvC_P2
  SITE 88: note = RuvC_P3
  SITE 90: note = RuvC_P4
  SITE 93: note = RuvC_P5
  REGION 211..296: note = Tnp_domain
  SITE 219: note = Tnp_P1
  SITE 249: note = Tnp_P2
  SITE 257: note = Tnp_P3
  SITE 258: note = Tnp_P4
  SITE 270: note = Tnp_P5
MNEASIIGLDLAKNIFQAHGAAGDGSVLFRRKLSRAQLLDFLSKQPPCIVAMEACASAHHWGRAIGSLGHEVRLIPPAYVKPFVKRQKNDMADAEAIAEAASRPTMRFVAVKSEEQQAAMMAYRTRDLLVRQRTQTINALRAHLAEQGIVAPVGPAHVGRLAAVINGDDGALPAVVRDLAQLLLDQIAGLSEKVANLDAELRRRASTDDTARRLTTIPGIGPITAAAITTFAPPMETFKKGRDFAAWVGLTPRQHSSGGKERLGRTSKMGQRDIRRLLIVGAVAVVRWAARKGAPEGSWLARMLERKPKMLVAVALANRMARTAWALMRKAEDYRDPAMATA

SEQ ID NO: 20220 - protein, 342 aa, unidentified
  source 1..342: note = protein_9eae5e1
  REGION 7..149: note = RuvC_domain
  SITE 10: note = RuvC_P1
  SITE 53: note = RuvC_P2
  SITE 88: note = RuvC_P3
  SITE 90: note = RuvC_P4
  SITE 93: note = RuvC_P5
  REGION 211..296: note = Tnp_domain
  SITE 219: note = Tnp_P1
  SITE 249: note = Tnp_P2
  SITE 257: note = Tnp_P3
  SITE 258: note = Tnp_P4
  SITE 270: note = Tnp_P5
MSEITTVGLDLAKNVFQAHGADASGRAVLRKKLRRDQVLDFFGRLPPCVVAMEACGGAHFWGREIGKLGHEVRLIPPAYVKPFVKRQKNDAADAEAICEAALRPTMRFVPVKSEETQGAAMVFRIRELLIRQRTQAINALRGHLGEFGQVVPQGAANAARLIAIVEDADSGLPADAIATLTVLVAALSHLEAEIGKLDVEIEARARKNEVARRLMTVPGIGPLIATAIAVLAPPPETFRKARDFAAWLGLTPRQHSTGGKQRLGATTKMGERSLRRLLIIGANSVIIKRHVHAAARPGTWLGGMLTRKPPMLVRVALANKMARIVWALMARGGVYKSPATAA

SEQ ID NO: 20221 - protein, 340 aa, unidentified
  source 1..340: note = protein_ee61864
  REGION 5..151: note = RuvC_domain
  SITE 8: note = RuvC_P1
  SITE 53: note = RuvC_P2
  SITE 91: note = RuvC_P3
  SITE 93: note = RuvC_P4
  SITE 96: note = RuvC_P5
  REGION 211..297: note = Tnp_domain
  SITE 219: note = Tnp_P1
  SITE 249: note = Tnp_P2
  SITE 257: note = Tnp_P3
  SITE 258: note = Tnp_P4
  SITE 270: note = Tnp_P5
MSEYIGLDVSLKETAISVRRGGKRIWRGKCPSDPSLVADVLRKRAPAAKRVVFETGPLSVWFYHALSAEGLPAICIDARHAKAALDMAPNKTDANDADGLAHLAEVGFYREVRVKGYDSMLSRTLVAARSRLVKITTELSNQIRGLMKTFGLIIPRSKGGKFEADVQRLLADQEELGRIVLPLLEAWLSMRARAAELGQQLVANARHNDACQLLMSIPGVGTITATSFIGAIEYTSNFKTSRAVGAWLGLTTRRYQSGEVDYDGHISRRGDPHLRGLLYEAAVVILTRRADSSLRTWGLKLRDKIGFKRAAVAVARKLAVIMHAMLKSGELFNREEAAMA

SEQ ID NO: 20222 - protein, 396 aa, unidentified
  source 1..396: note = protein_d63c97f
  REGION 9..163: note = RuvC_domain
  SITE 12: note = RuvC_P1
  SITE 60: note = RuvC_P2
  SITE 100: note = RuvC_P3
  SITE 102: note = RuvC_P4
  SITE 105: note = RuvC_P5
  REGION 270..355: note = Tnp_domain
  SITE 278: note = Tnp_P1
  SITE 308: note = Tnp_P2
  SITE 316: note = Tnp_P3
  SITE 317: note = Tnp_P4
  SITE 329: note = Tnp_P5
MHGDYQVFLGLDVGKDGHHAVALNRDGKRLHDATLVNTEAKLRQVFDKLARHGRVLVVVDQPASIGALPVAVARACGHQVAYLPGLAMRRIADLHPGSAKTDARDAYVIADAARTLPHTLRRVDVGDEALAELEVLVGFDDDLAGEATRLTNRIRGLLTQIHPALERALGKNIQHKAVLELLSRCGGPAGLRKAGRRKLTSIANKNAPRMGERLVERVMAALDEQTVIVPGTAAAETNLPRLADSLRDVLQQRDQVADEVDRMLDAHPLAEVLTSMPGIGVRTAARILLEVGDGSSFATPGHLAAYAGLAPVTRRSGSSIRGEHPARGGNKQLKRAFFLAAFAALADPVSRAYYDRKRAQGKKHNAALICLARRRCDVLFAMLRDKSPYQPRPAAA

SEQ ID NO: 20223 - protein, 346 aa, unidentified
  source 1..346: note = protein_ab20978
  REGION 5..152: note = RuvC_domain
  SITE 8: note = RuvC_P1
  SITE 55: note = RuvC_P2
  SITE 92: note = RuvC_P3
  SITE 94: note = RuvC_P4
  SITE 97: note = RuvC_P5
  REGION 212..300: note = Tnp_domain
  SITE 220: note = Tnp_P1
  SITE 250: note = Tnp_P2
  SITE 258: note = Tnp_P3
  SITE 259: note = Tnp_P4
  SITE 271: note = Tnp_P5
MKHYAGLDVSVKETAVCIVNETGEICREVKVVSHPDDLTAVLKDSAWNFDRIGLEAGPLSQWLFEGLAKAGLPLICIETRHTKAFLKAQPNKSDRIDARGIAQMMRVNLFRPVHVKTMTSQKRRALLTARKLLQEKAIAIENDIRGLLRNFGLKVGMVGAVKFEQRIRELVDGMPDLAEIIEPLLDARSKLRRNSAALHRKLLVIVRNDQVCRRLMSIPGVGPVVALAYTATIDIPARFRNSKAVGPILGLTPVLHESGESRRIGRISLCGDGMMRTLLYEAAQVLLTNVRKWSWLKAWAMNVAKRRGRQKAVVALARRLAVIMHRMWSDGTQFRWTRKEIMPVAV

SEQ ID NO: 20224 - protein, 300 aa, unidentified
  source 1..300: note = protein_5855b0d
  REGION 4..144: note = RuvC_domain
  SITE 46: note = RuvC_P2
  SITE 86: note = RuvC_P3
  SITE 88: note = RuvC_P4
  SITE 91: note = RuvC_P5
  REGION 180..264: note = Tnp_domain
  SITE 188: note = Tnp_P1
  SITE 217: note = Tnp_P2
  SITE 225: note = Tnp_P3
  SITE 226: note = Tnp_P4
  SITE 237: note = Tnp_P5
MRYRKHHLDLFDEASGTSLRIANTSPAIAAWLSGLADPAGSLIAFEATGPYDATLRRALEQAGLRFVRLNPARARDFARATGRLAKTDAIDARMLAAMARSLALEPDAPVEPARNALAQLHKRRDQLVAIRAAERVRLSEGQDQGGSLARHLAWLDDEIDTLERLISDALCANEALARTQALLRSAPGVGHVTATTLIALMPELGHVSPKAIAALAGLAPFNNDSGRHRGKRSIRGGRSRVRSALYMAALAAKRTCQRFKAFYDAILERSAAAKVALIAVARKLLTILNAMIKTNTAFQP

SEQ ID NO: 20225 - protein, 343 aa, unidentified
  source 1..343: note = protein_523f729
  REGION 7..149: note = RuvC_domain
  SITE 10: note = RuvC_P1
  SITE 53: note = RuvC_P2
  SITE 88: note = RuvC_P3
  SITE 90: note = RuvC_P4
  SITE 93: note = RuvC_P5
  REGION 211..301: note = Tnp_domain
  SITE 219: note = Tnp_P1
  SITE 249: note = Tnp_P2
  SITE 257: note = Tnp_P3
  SITE 258: note = Tnp_P4
  SITE 270: note = Tnp_P5
MGEISMIGLDLAKNVFQVHGVDASGAVVVRRQLRRGQVEKFFAQLPACTVGLEACGSAHHWARVIGRYGHQVRLMPPAYVKPYVKRNKNDGRDAEAICEAVNRPTMRFVPVKSVEQQATLAVHTARALLVRQRTMLANSLRAALSELGIVAAQGIKGLRELMVKLEAPNQEIPEMMRGALLMLAQHWQALDVDERALEQQIAKAARSDREARRLMEVPCVGPIIASTVLAKVPDATVFRSGRDFAAWIGLTGRDHGTGGRHRPGRISKQGDRTLRALLINGASAYLRHQRVRGVSNPWLRGLLARRPYKVVMVALAAKTARILWAMLVKGEPYRDRASAPAAA

SEQ ID NO: 20226 - protein, 314 aa, unidentified
  source 1..314: note = protein_7357500
  REGION 7..151: note = RuvC_domain
  SITE 10: note = RuvC_P1
  SITE 53: note = RuvC_P2
  SITE 93: note = RuvC_P3
  SITE 95: note = RuvC_P4
  SITE 98: note = RuvC_P5
  REGION 189..273: note = Tnp_domain
  SITE 197: note = Tnp_P1
  SITE 226: note = Tnp_P2
  SITE 234: note = Tnp_P3
  SITE 235: note = Tnp_P4
  SITE 246: note = Tnp_P5
MSQPLFVGIDVAKDTVEVACSDASSHSFTNNEAGHAKLLRWLARKSITLIVLEATGGYEQACAVALAAAGLPVSVLNPRQARDFARAMGKLAKTDRIDAAVLAEFAAVLHARGHQPRPLASMEQRELAALVARRRQLVVMLVAERQRLGVAHSRAKPSIQAVIELLLKQLADIDDDLQRTLKERHADLSGLLQSVKGVGPTTASTLIAELPELGLLTRKQITSLVGLAPLNRDSGTLRGQRHIFGGRASVRRVLYVAALVATRFNPAIKDCYTRLVAAGKPKKVALVACMRKLLITLNAIARTKTPWRKDFASA

SEQ ID NO: 20227 - protein, 341 aa, unidentified
  source 1..341: note = protein_f6bf4fd
  REGION 7..148: note = RuvC_domain
  SITE 10: note = RuvC_P1
  SITE 53: note = RuvC_P2
  SITE 88: note = RuvC_P3
  SITE 90: note = RuvC_P4
  SITE 93: note = RuvC_P5
  REGION 209..294: note = Tnp_domain
  SITE 217: note = Tnp_P1
  SITE 247: note = Tnp_P2
  SITE 255: note = Tnp_P3
  SITE 256: note = Tnp_P4
  SITE 268: note = Tnp_P5
MDTISLIGIDLGKHCFHLHAQSASGRTVLRKKLTRKQMFTLLSNVPSCTVAMEACAGAHWVARRLQALGHQARLISPQYVKPFLQGNKNDFADAQAICEAASRPSMRFVSPHNETQQMISALHRVREALVRDRTGTVNQIHAFLLEFGVSLPKGAAVIRRLPGVLAAYDLPPQLVALLERLQAHFKYLDEQVRQIESELIRQLREDERSQRLLEIPGIGPITASVLATELGDVRQFACARQFAASIGLVPRQYSTGGKPTLLGISKRGDKNLRRLLVQCARTVMLQIERRTDRLGIWVRGLLTRRHSNVVACALANKLARIAWAILAKGTHYQGEQAVAAA

SEQ ID NO: 20228 - protein, 344 aa, unidentified
  source 1..344: note = protein_2de6584
  REGION 6..147: note = RuvC_domain
  SITE 9: note = RuvC_P1
  SITE 52: note = RuvC_P2
  SITE 87: note = RuvC_P3
  SITE 89: note = RuvC_P4
  SITE 92: note = RuvC_P5
  REGION 212..297: note = Tnp_domain
  SITE 219: note = Tnp_P1
  SITE 249: note = Tnp_P2
  SITE 257: note = Tnp_P3
  SITE 258: note = Tnp_P4
  SITE 270: note = Tnp_P5
MKITTIGIDLAKNVFQAHGVNEHGKTEKKRQLKRGQVAEFFANLPPCLIGMEACGSAHYWARKLERFGHTVKLIAPQFVKPYVKTNKNDAADAEAICEAVARPNMRFVPIKNVEQQAVLSLHRVRQGFVKARTAQANQIRGLLGEFGVIIPQGITNIAKRVPELIEDASNDLPGSFRLLVQRLMDHLKELDKQVDELEVQIKAWHRVSAASCKLEKIPGIGPITASALVASIGNAKNFDDGRQLAAWLGLVPKQRSTGGKSKLLGISKRGDSYLRTLLIHGARSVILSASKKVDKGGWLRKLMERRNPNVAAVALANKNARIVWALLANEREFRSDYTPARAVA

SEQ ID NO: 20229 - protein, 399 aa, unidentified
  source 1..399: note = protein_a8c8330
  REGION 6..159: note = RuvC_domain
  SITE 9: note = RuvC_P1
  SITE 57: note = RuvC_P2
  SITE 98: note = RuvC_P3
  SITE 100: note = RuvC_P4
  SITE 103: note = RuvC_P5
  REGION 221..306: note = Tnp_domain
  SITE 229: note = Tnp_P1
  SITE 259: note = Tnp_P2
  SITE 267: note = Tnp_P3
  SITE 268: note = Tnp_P4
  SITE 279: note = Tnp_P5
MKQVVIGVDSHKLSATIEVVDQQEQLLGSGRFTTDQAGYAAMRAYAKAWPDRVWAVEGANGAGRPLAQRLLEAGEHVVDVPAKLAARVRLFDTGHNRKTDAHDAHAVAVVAVRTRNLRVLKVDGALEAMRMLADRREALTRRRVQTVCRLQALLAELLPGQVKRDITTGQAKAMLATVRPRDIAGKTRRRIAAEELAELIAVEAKIKKATAELRAMVLARDSRLMDIHGVGAVVAARILADVGDVARFADRNRFASWTGTAPLDASSGEQNRHRLSRAGNRRVNHMIHIAAVTQVRLDTEGRAYYRRKRAAGKKPQEALRCLKRRISDAIYKQLVKDAVRAGGADPGGHCGASQESSAVDLPPRIDTSDQPLPDPQTRRYAAPPSTRKSPAAGPFASTG

SEQ ID NO: 20230 - protein, 347 aa, unidentified
  source 1..347: note = protein_7df7028
  REGION 6..147: note = RuvC_domain
  SITE 9: note = RuvC_P1
  SITE 52: note = RuvC_P2
  SITE 87: note = RuvC_P3
  SITE 89: note = RuvC_P4
  SITE 92: note = RuvC_P5
  REGION 211..299: note = Tnp_domain
  SITE 219: note = Tnp_P1
  SITE 249: note = Tnp_P2
  SITE 257: note = Tnp_P3
  SITE 258: note = Tnp_P4
  SITE 270: note = Tnp_P5
MNITQVGIDLAKIVFQVHGVDARGKVALRKQLKRPQLIAFFSQLSPCLIGMEACGSAHYWARRLSALGHTVKLIAPQFVKPYVKTNKNDAADGEAICEAVGRPNMRFVPMKNTEQQALLGLHRARQGFVTERAAQANPIRGLLAEFGLVIPVGIRCLARKLPEILEDAENGLLGASRALFARLFEHLRALDRQVDELEREINAWHREDTASQRLQAIPGIGPLTASALVASVGDAKLFHNGRQFAAWLGLVPRQSCTGGKTTLLGISKRGDMYLRTLLIHGARSVLRHLKRHPDRADGWLARVAARRNPNIAAVALANKNARTVWALLAHGRDYQAEYRSVNATAAA

SEQ ID NO: 20231 - protein, 340 aa, unidentified
  source 1..340: note = protein_967c37d
  REGION 7..149: note = RuvC_domain
  SITE 10: note = RuvC_P1
  SITE 53: note = RuvC_P2
  SITE 88: note = RuvC_P3
  SITE 90: note = RuvC_P4
  SITE 93: note = RuvC_P5
  REGION 212..301: note = Tnp_domain
  SITE 220: note = Tnp_P1
  SITE 250: note = Tnp_P2
  SITE 258: note = Tnp_P3
  SITE 259: note = Tnp_P4
  SITE 271: note = Tnp_P5
MGTVTIIGLDIAKSVFQVHGVDAQGEAAVRRRLTRGRLLKFFAGLPPCLIGIEACSSSHYWARELVALGHEVKLMPAQYVKPYVKRGKNDAADAEAICEAVTRPTMRFVGIKTPEQQSAMMLHRVRLILNRQRTQLSNAMRAHLAEFGIIAPAGRNGLERLLDVIADPDDLRLPADARLCLEMLVSQLRMVKEQILENDRRILAQARETDVGRRLMEIPGVGPLLASAFVATITDPAVFKSGRNLAAWIGLVPRQNSSGSIMRLGGISKAGNRYLRQMLIVGAMAVIRQAMRYGDKYPWLSQLLARSKAKVAAVALANRNARTIWAMMMSGEHYRNPVAA

SEQ ID NO: 20232 - protein, 273 aa, unidentified
  source 1..273: note = protein_75d64ad
  REGION 2..81: note = RuvC_domain
  SITE 21: note = RuvC_P3
  SITE 23: note = RuvC_P4
  SITE 26: note = RuvC_P5
  REGION 144..233: note = Tnp_domain
  SITE 152: note = Tnp_P1
  SITE 182: note = Tnp_P2
  SITE 190: note = Tnp_P3
  SITE 191: note = Tnp_P4
  SITE 203: note = Tnp_P5
MGHEVRLMPAEFVKAFNIRNKSDAADAKAIWLAVRQPGKPVAVKTEMQQAMLTLHRMREQLVKFRTMQSNGLRGLLTEYGEVMSRGRAKLDGEIPAVLGRLAERLPVALIATLREHWNELARLDGQIAEIERRMRAWQKENRAVKAISEIPGVGLLTATAAVAMMGDAKAFRSGREFAAWAGLVPEQTGSGGKVNLHGISKRGDTYLRTLLIHGARSVLTHAKDPGPWVEQMKKRRPMNVIVVALANKMARTIWAVLAHDRQYQKGYVSVRPV

SEQ ID NO: 20233 - protein, 323 aa, unidentified
  source 1..323: note = protein_cf9b509
  REGION 1..94: note = RuvC_domain
  SITE 31: note = RuvC_P3
  SITE 33: note = RuvC_P4
  SITE 36: note = RuvC_P5
  REGION 198..281: note = Tnp_domain
  SITE 205: note = Tnp_P1
  SITE 234: note = Tnp_P2
  SITE 242: note = Tnp_P3
  SITE 243: note = Tnp_P4
  SITE 255: note = Tnp_P5
MAVARDEGVLVAYLPGLAMRRIADLHAGEAKTDARDAAIIAEAARSMPHTLRSLRLADEPLAELTMLCGLDDDLAAQITQTSNRIRGLLTQIHPALERVLGPRLDHPAVLDLLERYPSPAELASASERSLANRLTKLAPRMGKSLAAEIVQALSEQAVIVPGTQAATIVMPRLAQQLASSRKQREEVECMVHAHPLWPVLTSVPGVGVRTAARLLTEVAHKAFASAAHLAAYAGLAPVTRRSGSSIRGEHPSRRGNKVPKRALFLSAFAALRDPISRDYYARKVQQGKRHNQALIALARRRCDVLFAMLRDGTLYQPKPASTA

SEQ ID NO: 20234 - protein, 400 aa, unidentified
  source 1..400: note = protein_2144f1a
  REGION 11..166: note = RuvC_domain
  SITE 14: note = RuvC_P1
  SITE 63: note = RuvC_P2
  SITE 103: note = RuvC_P3
  SITE 105: note = RuvC_P4
  SITE 108: note = RuvC_P5
  REGION 273..358: note = Tnp_domain
  SITE 281: note = Tnp_P1
  SITE 311: note = Tnp_P2
  SITE 319: note = Tnp_P3
  SITE 320: note = Tnp_P4
  SITE 332: note = Tnp_P5
MAESDEIGAFVGLDVGKGEHHARALTPNGKKVLDKRLPNSEPKLRAIIDKLQAKHGTVLVVVDQPASIGALPLALARDAGCRVAYLPGLTMRRLADLYPGEAKTDARDAAVIADAARTMPHTLRDLAPDDDTVAALSMLCGHDDDLATEATRVRNRLRGLLTQIHPALERVLGPRLDHPAVLKLLSDHGTPASLRHTGYDGLVELLRPHAPRMADRLASDILTALEEQSVVVAGTEAAGVVIPNLAASLRTVIEQRRTLETEIETLLEAHPLSTVLTSMPGIGVRTASRILIDVGDASQFPTAAHLAAYAGLAPATRSSGSSIRGEQPARRGNKQLKRAFFLAAFASLNHPPSRAYYRKKTAQGKHHNQALLCLARRRCDVLYSMLKNGTLYQHPPPTPP

SEQ ID NO: 20235 - protein, 341 aa, unidentified
  source 1..341: note = protein_f1771e0
  REGION 6..147: note = RuvC_domain
  SITE 9: note = RuvC_P1
  SITE 52: note = RuvC_P2
  SITE 87: note = RuvC_P3
  SITE 89: note = RuvC_P4
  SITE 92: note = RuvC_P5
  REGION 211..295: note = Tnp_domain
  SITE 219: note = Tnp_P1
  SITE 249: note = Tnp_P2
  SITE 257: note = Tnp_P3
  SITE 258: note = Tnp_P4
  SITE 270: note = Tnp_P5
MQIRSIGIDLGKTTFHLVGLGERGKIVIRKKLSRKQLLAFTANLPPTLIGLEACSGSHFLGRALSQQGHEVRLIPAQFVKPFVKSNKNDYLDAEAIAEAVERENMRFVPIKTDDQLDLQALHRVRERLVSRRTAVINQVRAFLLERGITFRKGPATLRRQMPEILENADAQVSPRMRNLLATLWQEWKQLEEQIDCLRADIETICIADPACQRLRQIPGVGPLVATAVVAAIGNGAAFHKGREFAAWLGLIPKQYSTGGKAKLLGISKRGNPYLRKMFIHGARAAVLRLKRDGSLLGAWMNGLEARAPRNVLIVAMANKLARITWAVLSSGEPYRAATLAA

SEQ ID NO: 20236 - protein, 349 aa, unidentified
  source 1..349: note = protein_6e29179
  REGION 12..153: note = RuvC_domain
  SITE 15: note = RuvC_P1
  SITE 58: note = RuvC_P2
  SITE 93: note = RuvC_P3
  SITE 95: note = RuvC_P4
  SITE 98: note = RuvC_P5
  REGION 217..303: note = Tnp_domain
  SITE 225: note = Tnp_P1
  SITE 255: note = Tnp_P2
  SITE 263: note = Tnp_P3
  SITE 264: note = Tnp_P4
  SITE 276: note = Tnp_P5
MRINPKPEAAVYGIDLGKKVFHLVALDAGGRPIQRAKFTRDTLLRFFASATAARVGMEACPGSQWLARKLIELGHDACIIPAKFVKPYVKSNKTDVVDAEAIAEAVTRPTMRFVQVRTPEQIDLQALHRIRDRLIRSRTALINQARAFCLEYGLAMRTGAGVFHIDIRRHLDCTENDLTDTMRAMLRDLLDDLDHLEGRIAEISKAIEATAHTDEVARRLMTVPGIGPLGATALMAAAGNGLQFRKARDMAAWLGLVPAEHSTGGKQTLRGISKRGNGYVRRLLIHGARSCFLHLDREKHALGRWLRALEGRTHRNKAVVALANKITRIAWAILTRPGQLYLRSKGAAA

SEQ ID NO: 20237 - protein, 345 aa, unidentified
  source 1..345: note = protein_d889734
  REGION 5..152: note = RuvC_domain
  SITE 8: note = RuvC_P1
  SITE 55: note = RuvC_P2
  SITE 92: note = RuvC_P3
  SITE 94: note = RuvC_P4
  SITE 97: note = RuvC_P5
  REGION 212..318: note = Tnp_domain
  SITE 220: note = Tnp_P1
  SITE 250: note = Tnp_P2
  SITE 258: note = Tnp_P3
  SITE 259: note = Tnp_P4
  SITE 271: note = Tnp_P5
MNYYAGIDVSLKESCVCVLDAGGKVIRETKVASEPEAIIAWFAQLGLAMELIGLEAGPLSQWLFAAMKQAGLAVELLETRHVRNALKTMTVKTDRKDARGIAELVRIGWFRPVHCKSISAQETRAILTARKLVDTKLHDVEMSLRGILRGFGLKVDKTTATSFAARIRELVDGHPTLQGLVDALLSIREVLLREFKGFEKRVRTMARHNEQAKLLMSTTGVGAIISLTYAAAIDDPARFESSKVVGAHYGMTPKKYQSGQTDYNGRISKIGDASVRRALWQAAHVILTRSVKDSALKTWGLSVAKRKGMAKAKVALARKLAVVMHRMLVDGKSFDPALPKQAAAA

SEQ ID NO: 20238 - protein, 340 aa, unidentified
  source 1..340: note = protein_1a195d6
  REGION 7..148: note = RuvC_domain
  SITE 10: note = RuvC_P1
  SITE 52: note = RuvC_P2
  SITE 87: note = RuvC_P3
  SITE 89: note = RuvC_P4
  SITE 92: note = RuvC_P5
  REGION 211..283: note = Tnp_domain
  SITE 219: note = Tnp_P1
  SITE 249: note = Tnp_P2
MQAVITIGLDIAKSVFQVHGIDAEGKVLIRRKLKRYVLAFFEKLPPCLVGIEACATSHHWSRELKTLGHTVRLMPPAYVKPYVKRQKNDATDAEAICEAVTRANMRFVETKTPEQQSCLMLHRTRQLFIRQQTSVINATRAHMAEFGIIAAVGRKGVQQLLAIATDASDQRVPERARACVAALGAQLRALKAQILEFDRRIMVWHRSNETSRRLDELPGVGPALATALVASVADPKAFRSGQSFSAWIGLCRSSTRAVARTSSAVSASRAIAICAACSPPERCRDPLRQDPWHKASALVGGTAGALTKVAAIALANKLARMAWAMMARNERYKEPVALAA

SEQ ID NO: 20239 - protein, 273 aa, unidentified
  source 1..273: note = protein_cf96d18
  REGION 5..152: note = RuvC_domain
  SITE 8: note = RuvC_P1
  SITE 55: note = RuvC_P2
  SITE 92: note = RuvC_P3
  SITE 94: note = RuvC_P4
  SITE 97: note = RuvC_P5
  REGION 212..267: note = Tnp_domain
  SITE 220: note = Tnp_P1
  SITE 250: note = Tnp_P2
  SITE 258: note = Tnp_P3
  SITE 259: note = Tnp_P4
MKHFIGLDVAVKHTAVCIVDESGRICREVKVVSHPDDLLAVLKDPALNTERVGLEAGPLSQWLFEELASVGLPAICIETRHVKAFLKAQPNKTDRNDARGIAQMMRFNLYRPVHVKTLTSQKGRALLTARKLLQGKAIAIENDIRGLLRNFGLKVGVVGTVKFEERTRELVEGMPDLEEIMEPLLAARRGLRAEFARLHKKVLMIARNDTTCRRLMTVPGVGLVVALAYAATIDIPQRFRNSKAVGPILGLTPKLNEPGKASALDAYPYARTA

SEQ ID NO: 20240 - protein, 320 aa, unidentified
  source 1..320: note = protein_ab6f453
  REGION 6..147: note = RuvC_domain
  SITE 52: note = RuvC_P2
  SITE 92: note = RuvC_P3
  SITE 94: note = RuvC_P4
  SITE 97: note = RuvC_P5
  REGION 187..270: note = Tnp_domain
  SITE 195: note = Tnp_P1
  SITE 224: note = Tnp_P2
  SITE 232: note = Tnp_P3
  SITE 233: note = Tnp_P4
  SITE 245: note = Tnp_P5
MSDRYAVGIDADSRTLVVARHGTKGSIRIANSASAINKWLSRQPAKSRIGVEATNRYHELVVHAAQKAGHAVFVLNPRDIKHYAKGVACRGKTDSGDAQVIARYIAKEADNLHEHVARSPEQERLHVLLQQRDSLVRSKAKLNLSLGVGASESALFGGIFSGLKEAIAMLDQQIQQLCRSGQQRDLYRRIMTIPGIGPTVAAFVTHHITRWPLANSDAWVACTGLDPRPNESGARIGRRRLSKRGNASLRQILYMAAMGLTRSKGGKPLYLAIRERGHSSTASFNILARKLAKIAWGVFKSGRDFDPAMLKVGQACFQQA

SEQ ID NO: 20241 - protein, 337 aa, unidentified
  source 1..337: note = protein_9d9be55
  REGION 6..147: note = RuvC_domain
  SITE 9: note = RuvC_P1
  SITE 52: note = RuvC_P2
  SITE 87: note = RuvC_P3
  SITE 89: note = RuvC_P4
  SITE 92: note = RuvC_P5
  REGION 210..296: note = Tnp_domain
  SITE 218: note = Tnp_P1
  SITE 248: note = Tnp_P2
  SITE 256: note = Tnp_P3
  SITE 257: note = Tnp_P4
  SITE 269: note = Tnp_P5
MMIIRIGLDTSKHVFQVHGVDESEQAVLRRQVRRSEMAKFFGKLAPARIGLEACGASHHWARVLRGLGHAVVLIAPQYVKPYVKRGKNDAIDAAAICEAMSRPGMRFVPIKSAEQQAGLMVLKVRDLLVKKRTMLINAIRGHAAEFGVTAAKGPVKVAELLQRADAEAAGVPALAREMLGVLSRQLDALDAQLKALEIRLMALHKADPVSQCLATQPGIGPIGAVSFSLKVSDPKAFRSGRHFAAALGITPREHSTAGRHRPGRISRQGDESLRRLLVLGAMAQIRFAKPGRTSPWLLNLLARKPKKLAAIALANKMARTVWAMMVSGETYRQPKAA

SEQ ID NO: 20242 - protein, 313 aa, unidentified
  source 1..313: note = protein_0be0f00
  REGION 1..84: note = RuvC_domain
  SITE 23: note = RuvC_P3
  SITE 25: note = RuvC_P4
  SITE 28: note = RuvC_P5
  REGION 146..231: note = Tnp_domain
  SITE 154: note = Tnp_P1
  SITE 184: note = Tnp_P2
  SITE 192: note = Tnp_P3
  SITE 193: note = Tnp_P4
  SITE 204: note = Tnp_P5
MVVDVPAKMSARVRVFATGQGRKTDATDAHSIALVGVRMAGLRPVLADEQAELLRMCVDRRASLGREHTRKVCQLHRLLLELIPGGAKRSLSAAPAKELLKTVRPTTTVGKVRKAHAAELVADLATIYARSKAADKELKALVKTTGTTLLDLHGIGPSGAARLLAEVGDVTRFPDRNHFASWNGTAPIDASSGDHTRHRLSRKGNRAINRVLHIMAVVQLRNATEGRVYYDLKKAAGKTSMEAMRCLKRRLSDLVYKALLDDLAEHATTGPGGHSGDDSDSSATGSQPAAGSSDKPLPGPATTKPRTTLPAAS

SEQ ID NO: 20243 - protein, 411 aa, unidentified
  source 1..411: note = protein_c30d462
  REGION 4..165: note = RuvC_domain
  SITE 7: note = RuvC_P1
  SITE 62: note = RuvC_P2
  SITE 102: note = RuvC_P3
  SITE 104: note = RuvC_P4
  SITE 107: note = RuvC_P5
  REGION 273..359: note = Tnp_domain
  SITE 281: note = Tnp_P1
  SITE 312: note = Tnp_P2
  SITE 320: note = Tnp_P3
  SITE 321: note = Tnp_P4
MLFVGDDWAEDHHDVELMDASGRRLAKVRLPEGVAGMARLHAMIGERLGEDADEFADQVVVGIETDRGPWVQALIAAGYRVFGINPLQASRYRERHGVSGAKSDAGDAHMLADMVRTDSHQLRQVAADSADAAAVKVVARAHKTLIWERTRHMQRLRHALRDYFPAALEAFEDLTAADTLELLAKAPDPASAARLSTAQIGAALKRARRRAIPEKTARIQAALRAAHLGQPDVVASAYAATVRSAVAVMAVLNEQIKILQGQVEAHFGAHPAAEIILSQPGLGPILGARVLAEFGDAPGRYADAKSRKNYAGTSPITRASGKKKTVIARYIHNDRLVDALAVQAFAALQASAGARAYYDQLRARDVSHFAALRQLGNRLVGVLHGCLKTGTLYDEATAWSHHSTEAEAIAA

SEQ ID NO: 20244 - protein, 413 aa, unidentified
  source 1..413: note = protein_35a934e
  REGION 14..166: note = RuvC_domain
  SITE 17: note = RuvC_P1
  SITE 65: note = RuvC_P2
  SITE 103: note = RuvC_P3
  SITE 105: note = RuvC_P4
  SITE 108: note = RuvC_P5
  REGION 273..359: note = Tnp_domain
  SITE 281: note = Tnp_P1
  SITE 312: note = Tnp_P2
  SITE 320: note = Tnp_P3
  SITE 321: note = Tnp_P4
  SITE 332: note = Tnp_P5
MSLPSTPGPARVCAGLDWAKDDHAVCIIDPDGQVLDRFVIEHTATGLKQLIGRLLKASVVEIGIERGDGPVVEALLAAELVVLVISPNQVKNLRSRYGSAGNKDDRFDAYVLADVVRTDRRRLTPLTRSTPTTRALRTTVRARRDLVQHRVAAKNQLRAHLQIVLPGVVGLFAALDSAISLAFLERFTTQTQADWLTPARFGAWLSKQGYSDKVDPQVLHQRLLAAPRGTTEADAPTHAAVTLAFVATLRALNAQITVLADSITDQLNIHPDAHIVTSLPRSGTLRAARLLAEIGDARGRFPTADSLACLAGVAPSTRQSGKVKAVTFRWSADHQLRDALCDFADGSRHANPWAADLYTRARTRGHDHPHAVRILGRAWADIIWRCWQDHTPYDTDRHKALQRILNEHTPHAA

SEQ ID NO: 20245 - protein, 357 aa, unidentified
  source 1..357: note = protein_1ee7960
  REGION 14..156: note = RuvC_domain
  SITE 17: note = RuvC_P1
  SITE 60: note = RuvC_P2
  SITE 95: note = RuvC_P3
  SITE 97: note = RuvC_P4
  SITE 100: note = RuvC_P5
  REGION 223..309: note = Tnp_domain
  SITE 231: note = Tnp_P1
  SITE 261: note = Tnp_P2
  SITE 269: note = Tnp_P3
  SITE 270: note = Tnp_P4
  SITE 282: note = Tnp_P5
MGKSIKNLSSVTVVGLDIAKNVFQLHGVDAAGAVVVARSVRRGQLLKVFASLPRCRVGMEACSSAHHWARALSGLGHEVKLIPPAYVKPYVRRNKNDAVDAAAICEAAARPSMRFVAVRSLDNQAGLMRHRARELLAGNRTRMLNALRGNLAEIGVVAAQGVQHAYALERLLADGSDDDGEVVVPDCVRRALAPLVRQIDAVDAEIAAIDKEIAALVKADETARRLTTIPGVGPITASAIVATVRDVGAFSSGREFAAFLGLTPRQSSSGGKARLGRITKMGDRYLRKLLVVGACATLSHRKGHTDASRVWASSLIERKAVRYKFKLTAVALANKVARIVFAMLTRGGEYDERTIAA

SEQ ID NO: 20246 - protein, 339 aa, unidentified
  source 1..339: note = protein_fb0009b
  REGION 6..147: note = RuvC_domain
  SITE 9: note = RuvC_P1
  SITE 52: note = RuvC_P2
  SITE 87: note = RuvC_P3
  SITE 89: note = RuvC_P4
  SITE 92: note = RuvC_P5
  REGION 209..293: note = Tnp_domain
  SITE 217: note = Tnp_P1
  SITE 246: note = Tnp_P2
  SITE 254: note = Tnp_P3
  SITE 255: note = Tnp_P4
  SITE 267: note = Tnp_P5
MELKRVSIDTSKHVFTIHGVDQTEHPVLRREIRRTQFETFFAKLGPTEVALEACAGSHHWGRLLSRLGHRVKLIPPQYVKPFVKRSKNDRNDAEAIGEAASRPAMRTVPVKTTEEQAATIIVKHREMLVAQRTQAINALRGHAAEFGIIAAKGCPNVAALLTVLAADEAIPVAARTMFGEMGQHVGDLDGKIAALDRRLLDQHKVNPVSQLLAAIPGVGPITAITMALTVDPGHFESGRHLAAWLGLTPREHSTAGKHRPGKISKAGNERLRQLLVVGAMSVIRFAKPGRQSASGWLLQLLERKPRKLAAVALANKMARIIWAMMARGEAYRRQPVTAA

SEQ ID NO: 20247 - protein, 404 aa, unidentified
  source 1..404: note = protein_dfb6164
  REGION 20..165: note = RuvC_domain
  SITE 23: note = RuvC_P1
  SITE 71: note = RuvC_P2
  SITE 111: note = RuvC_P3
  SITE 113: note = RuvC_P4
  SITE 116: note = RuvC_P5
  REGION 278..362: note = Tnp_domain
  SITE 286: note = Tnp_P1
  SITE 315: note = Tnp_P2
  SITE 323: note = Tnp_P3
  SITE 324: note = Tnp_P4
  SITE 336: note = Tnp_P5
MLLLEGNCVIKNHAEVDVFLGVDVGKGEHHAVALDRTGRKLYDKALPNDEAKMKAVIEKLAKHGAILFIVDQPATIGALPVAVAQAAGVTVGYLPGLAMRRIADLHPGEAKTDARDAYIIAEAARTMPHTLRSIQVADEQVAELSMLCGFDDDRQTDHRNLQPVARAAHPDPPRPRTGPGPRRITRQCSTCSARGPPGSPETAGRKRVGAAETARPRMYARLTEEIFDALDQQTVTVVGTNAAAVVVPQLAGMLGDLRASRETLHARVEALVEAHPLHSVLSSIPAVGIRTEARILTEIVGKEFATAGHLASYAGLSPVTWRSGSSIRGDHSSRRGNKILKRALFLSAFAALKDPLSRAYYDRKRAQGKKHNQALIALARRRCDVIFAMLRDGTLYEAQTPAAA

SEQ ID NO: 20248 - protein, 313 aa, unidentified
  source 1..313: note = protein_88d7078
  REGION 1..94: note = RuvC_domain
  SITE 34: note = RuvC_P3
  SITE 36: note = RuvC_P4
  SITE 39: note = RuvC_P5
  REGION 154..242: note = Tnp_domain
  SITE 162: note = Tnp_P1
  SITE 192: note = Tnp_P2
  SITE 200: note = Tnp_P3
  SITE 201: note = Tnp_P4
  SITE 213: note = Tnp_P5
MSQWLFEGLACAGLPVICIETRHVKAFLKAQPNKTDRNDARGIAQMMRVNLYRPVHVKTLTSQKRRALLTARKLLQGKAIAIENDIRGLLRNFGLKVGVVGTVKFEERICELVEGIPDLEEIMEPLLAARRKLRAEFARLHKKVLTIARSDATCRRLMTVPGVGPVVALAYAATIDIPQRFRSSKAVGPILGLTPKLNESGESKRVGCISLCGDGMMRTLLYEAAQTLMTRVTKWSWLKAWAMNVAKRQSNCRARTSPGSRHASHVAGRHRVPLDEGNHGVSHLIQKAGKERDRVPLAGGRTSFAGRWMRRVR

SEQ ID NO: 20249 - protein, 397 aa, unidentified
  source 1..397: note = protein_007da4e
  REGION 6..160: note = RuvC_domain
  SITE 9: note = RuvC_P1
  SITE 58: note = RuvC_P2
  SITE 98: note = RuvC_P3
  SITE 100: note = RuvC_P4
  SITE 103: note = RuvC_P5
  REGION 265..353: note = Tnp_domain
  SITE 274: note = Tnp_P1
  SITE 305: note = Tnp_P2
  SITE 313: note = Tnp_P3
  SITE 314: note = Tnp_P4
  SITE 326: note = Tnp_P5
MRAIWAGIDAGKAHHHCVVIDDTGKRLLSRRVANDELELLQLLADVLALGDQVTWGIDLADGGAALVIELLLNHGQHALYIPGMAVNRASEGYRGDGKTDAKDAAIIADQARIRRDPQPLRPGDELITELKVLTGHRRDLVDDRTRTVNRLRGHLTGIFPALERALDLTNAGPLVLLAGYQTPAALRRTGARRLETWLRNRKVRGAAQLAADALAAAGSQHTSVTGEKPTAQLAQTLARDVTRLNQQVADIDKVIEARFREHAHAEVVASMPGGIGPLLGAEFLAATGGDLSAFATPDRLAGFAGVAPAPRDSGKISGNLHRPKRYSRGLQRVFYTSALISIRCCEESRRFYDRKRAEGKRHTQAVLALARRRVNVLWALLRDGRCYEPLPPVTAAA

SEQ ID NO: 20250 - protein, 361 aa, unidentified
  source 1..361: note = protein_78faaff
  REGION 14..161: note = RuvC_domain
  SITE 16: note = RuvC_P1
  SITE 65: note = RuvC_P2
  SITE 101: note = RuvC_P3
  SITE 103: note = RuvC_P4
  SITE 106: note = RuvC_P5
  REGION 230..316: note = Tnp_domain
  SITE 238: note = Tnp_P1
  SITE 269: note = Tnp_P2
  SITE 277: note = Tnp_P3
  SITE 278: note = Tnp_P4
  SITE 289: note = Tnp_P5
MTSMTHDGPQITGGVDTHGLAHHAAVIDGIGRHLAGREFPATIRGYRDLLDWMRGHGAVTAIGVEGTGAYGAELARVLTAAGVTVVDVDRPDRKTRRLKGKSDPIDAYAAATAVLSGRATGIPKSRDGVVEAVRVLRIARRSAVKARTQAMNQIRGLLVSAPAMLREQVAGLERATLIRTLARLRPGDDLSRPLAATRASLRRLARRHQTLDAEIAELDMEIVPLVKQAAPALLELFGVGPETAGQLLASAGDNPERMRSEGAFAHLAGVAPIPASSGRTHRHRLNRGGDRAANNALHTIVLTRMRYHERTRAYVERRTREGLNKKDIMRCLKRFVAREIYRALTTTPTEPITQTDLAPAA

SEQ ID NO: 20251 - protein, 309 aa, unidentified
  source 1..309: note = protein_db5ecd8
  REGION 6..147: note = RuvC_domain
  SITE 9: note = RuvC_P1
  SITE 52: note = RuvC_P2
  SITE 87: note = RuvC_P3
  SITE 89: note = RuvC_P4
  SITE 92: note = RuvC_P5
  REGION 211..294: note = Tnp_domain
  SITE 219: note = Tnp_P1
  SITE 249: note = Tnp_P2
  SITE 257: note = Tnp_P3
  SITE 258: note = Tnp_P4
  SITE 270: note = Tnp_P5
MQIAVLGIDLGKNSCSVVGLDAGGRVLMRRRLHRDGIAKLAAGMPGCVVAMEACCGAHHLGRRLREQGHEVRLMSPEYVRPYVKAQKNDDRDAEAIAEAATRPAMRFVELKSEAQLDMQSLHRARDRLVGERTALINQLRAILLERGITVPQGRRKLELFLEALLVEDQAALSPRTRLLVEDQRAEWRELDRRILAFDEEFALHARTDEAARLLTTIPGIGPLNATALVAAVGKAETFGRGRDLAAWLGLVPRQMTTGGKPKLLGISKRGNAYLRKMLIHGARAALPSLSTAETPLGDWLRGDYGPERT

SEQ ID NO: 20252 - protein, 406 aa, unidentified
  source 1..406: note = protein_eeab081
  REGION 11..165: note = RuvC_domain
  SITE 14: note = RuvC_P1
  SITE 62: note = RuvC_P2
  SITE 102: note = RuvC_P3
  SITE 104: note = RuvC_P4
  SITE 107: note = RuvC_P5
  REGION 272..358: note = Tnp_domain
  SITE 280: note = Tnp_P1
  SITE 310: note = Tnp_P2
  SITE 318: note = Tnp_P3
  SITE 319: note = Tnp_P4
  SITE 331: note = Tnp_P5
MSENTGFDIWCGLDVGKQAHHACALEAAGKRVFDKALPQDQKRLEELFTGLQSHGRVLVIVDQPNTIGALPIAVARSMGITVAYLPGLAMRRAADLYPGNAKTDAKDAFVIADAARTMPHTLRRVDAGEETLAELKVLVGFDEDLAAEATRLSNRIRGLLTQIHPALERVVGPRLTTKQGLAVIEQLGGPQGIAGVTRSKLLRVISKAYPRGAQAFADAITTALGEQTVIVADTAAAEQVLPKLAASLRQVLDQRAELAVQVEKVVDAHPLAEVLTSMPGVGVRTAGRILLDVGDASAFPTAGHLAAYAGLAPVTRRSGTSIRGEFPARSGNKHLKRALFLSAFAALKSDPTSRAYYDRKRAQGKKHNAALICLSRRRCDVLFAMIKNQEPYRAPAPTPSPMPLAA

SEQ ID NO: 20253 - protein, 407 aa, unidentified
  source 1..407: note = protein_965b8cb
  REGION 4..162: note = RuvC_domain
  SITE 7: note = RuvC_P1
  SITE 60: note = RuvC_P2
  SITE 101: note = RuvC_P3
  SITE 103: note = RuvC_P4
  SITE 106: note = RuvC_P5
  REGION 268..355: note = Tnp_domain
  SITE 276: note = Tnp_P1
  SITE 306: note = Tnp_P2
  SITE 314: note = Tnp_P3
  SITE 315: note = Tnp_P4
  SITE 328: note = Tnp_P5
MVYVGIDVAKRSHVLSAVGADGETVIGSFKFANADAGFKKLADRLAKAGIEPGSSLFCMEATGHYWVALFDFLSSRGFDAAVVNPIQTDAFRDVWTIRKVKTDALDAAMIADLARYKRYEPSALGDEATDELRALARYRMSLVERSTMLKNRATAILDRVFPELDGLFAGSFSQTQRALLKHAATPRQVLSTDVRTLARILGEASNGHCGRAKAEQLKAAAKSSVGVGFGSDTLAFELRMLMEELDFVRGRIDEVEAELARLLDATAGRWLLTVPGIGPALAATIAGEIGDANRFAGPGQLMAYAGMDPTRSESGETVASDGSMSKRGSAVLRWALMQAADCARRYDPYFGECYAKKKSEGKHHYVALSCVARKLMGVCLALMKEGRPYEPAPPARHRPGHLKEADS

SEQ ID NO: 20254 - protein, 404 aa, unidentified
  source 1..404: note = protein_9229c7a
  REGION 5..161: note = RuvC_domain
  SITE 8: note = RuvC_P1
  SITE 58: note = RuvC_P2
  SITE 98: note = RuvC_P3
  SITE 100: note = RuvC_P4
  SITE 103: note = RuvC_P5
  REGION 275..362: note = Tnp_domain
  SITE 283: note = Tnp_P1
  SITE 313: note = Tnp_P2
  SITE 321: note = Tnp_P3
  SITE 322: note = Tnp_P4
  SITE 335: note = Tnp_P5
MNNVAGVDVSKGKSMVSVLRPFGEVVAKPFAVRHTGSELKELADYLKSLDGETRVVMEHTGRYYEPVAQFLCDEGIFVSAVNPKLIKDYGNNSLRKVKTDAADSRKIARYGLDNWVELRQHTPMDTIRYQLKTLNRQQGLYSKTKTMMKNNLIALLDQTYPGVNALFDSPAREDGSQKWVDFAASFWHVDSVRSLGLSAFTERYRKWCKRHGYNFSESKAAEVHAGAQDLIAMLPKDALTKLLVQQAIDSLNAISKSVEQLKSEMRMLAAQLPEYPVVMAMHGVGDSLGPQLMAEIGDVTRFVHRGSITSFAGVDPGANQSGTFEAKSVRTSKSGPPELRKALFLVMDCLLKTMPQDDPVYQFMDKKRAEGKPYLVYMTAGANKFLRIYYGRVKEYLASLETVD

SEQ ID NO: 20255 - protein, 410 aa, unidentified
  source 1..410: note = protein_6e3ae4a
  REGION 7..169: note = RuvC_domain
  SITE 10: note = RuvC_P1
  SITE 64: note = RuvC_P2
  SITE 110: note = RuvC_P3
  SITE 112: note = RuvC_P4
  SITE 115: note = RuvC_P5
  REGION 283..369: note = Tnp_domain
  SITE 290: note = Tnp_P1
  SITE 320: note = Tnp_P2
  SITE 328: note = Tnp_P3
  SITE 329: note = Tnp_P4
  SITE 342: note = Tnp_P5
MVNQLFVGIDVGSRDNAVYIMLPDGSKHSSFSVQNNLGGAMTLSMRVVSALREQGVNDVLLGLEATSVYGDNLVCFLREDGALAQFNRKIHVLNPKQVKKFKDTYSDLPKNDAVDAFVIADNLRFGRISTAVYMDDYRYKALQNLTRARFFAVQSLTREKQRFMNYLFMKCSGLAQEKTFSNNYGAAALALFEEFETPDDIANMDLDKLTAFISEKGKNRSPDPEKIAEAVQAAARGSYRLPKTVNDSVNQVLSISVSSIRAMQAQIKALDKEIERQVVNIPNTLTSVPGIGAVFSAGIIAEIGDINRFPDHPALAKYAGLVWTQHQSGTFEAQHSRLIKSGNRFLKYYLCEAANSLVRCDTEYRRYYDLKYKEVNKYQHKRALALTARKLVRLVFRLLKDNRLYIPSAS

SEQ ID NO: 20256 - protein, 349 aa, unidentified
  source 1..349: note = protein_126bd8f
  REGION 7..148: note = RuvC_domain
  SITE 10: note = RuvC_P1
  SITE 53: note = RuvC_P2
  SITE 88: note = RuvC_P3
  SITE 90: note = RuvC_P4
  SITE 93: note = RuvC_P5
  REGION 212..298: note = Tnp_domain
  SITE 220: note = Tnp_P1
  SITE 250: note = Tnp_P2
  SITE 258: note = Tnp_P3
  SITE 259: note = Tnp_P4
  SITE 271: note = Tnp_P5
MGEVSTIGVDIAKSVFQVHGVDADGAVVIRKRVGRAKVIEFFANLPSCLIGMEACATAHQWARELKKLGHDVRLMPPTYVKAYVKRGKNDAADAAAICEGVTRPSMRFVPIKSVEQQSALMLHRTRDLLIRQRTQLINALRAHLAELGLVAAKGHEGLQQLVMAVTESSDKRLPSNARFACQSLVAQLYALQTQINGLDKRIIQAHRANADSKRLEAIPGFGVILSTAVVATMTDPRAFRTGREFAAWIGLVPRQNSTGGKERLGSISKQGDRYLRRLFVLGAISIVGTARTRPDKYPWVTELLGRRPAKVAAVALANKMARTAWAVLAKGETYRTPTRSSSAAIAAIA

SEQ ID NO: 20257 - protein, 410 aa, unidentified
  source 1..410: note = protein_2bb55be
  REGION 5..163: note = RuvC_domain
  SITE 8: note = RuvC_P1
  SITE 60: note = RuvC_P2
  SITE 100: note = RuvC_P3
  SITE 102: note = RuvC_P4
  SITE 105: note = RuvC_P5
  REGION 271..357: note = Tnp_domain
  SITE 279: note = Tnp_P1
  SITE 310: note = Tnp_P2
  SITE 318: note = Tnp_P3
  SITE 319: note = Tnp_P4
MRLFVGDDWAEDHHDVELMDAAGRVLARRRLPEGVAGMARLHELIGEQLGDDLGAEVVIGIETDRGPWVAALVAAGYTVFGVNPLLASRFRERHGVSGAKSDAADAHMLADMVRTDSHQLRAVAGDSAGAEALKLLARTHKTMIWERTRQVQRARHLLREYFPAALEAFDDLDAPDALELLGRAPDPARAARLTRAQVSAALRRAGRYRIADRAEAITAALRSEQLGQPPALTAAYAAALRALIAVIITLNEQVMILQEQVEADFGRHPDAEIYRSQPGMGAILGARALGEFGDDPNRYATGKARKNYAATSPLTRASGKKKTVIARFIRNERLTDALRAQAFAALTGSPGARALYDAERARGTDHNAALRKLANRLVGILHGCLKTRTLYDEATAWPNHGKTPQTRFAA

SEQ ID NO: 20258 - protein, 341 aa, unidentified
  source 1..341: note = protein_c72c8c1
  REGION 6..149: note = RuvC_domain
  SITE 9: note = RuvC_P1
  SITE 54: note = RuvC_P2
  SITE 89: note = RuvC_P3
  SITE 91: note = RuvC_P4
  SITE 94: note = RuvC_P5
  REGION 213..300: note = Tnp_domain
  SITE 221: note = Tnp_P1
  SITE 251: note = Tnp_P2
  SITE 259: note = Tnp_P3
  SITE 260: note = Tnp_P4
  SITE 272: note = Tnp_P5
MKLIRVGVDLAKNVFQLHGVDRSERVIWRWRLRRENWIEVLCEQLEPGAEVGMEACGGAHHWARLLQRLGYKVKLIAPQFVKPYVKSNKNDAADAEAICEAMDRPGMRFVPVKTVEQQDIQALHRVRASLVEQRGAKANQIRGLVAEYGLVAPRELLHLRRALPCWLVDENNGLTARFRSLLQGLREELIALDARIVELDHEIERLAQAEPAAKRLMQLRGVGPIIATAMLATVGDARQFSNGRQMSASLGLTPKQCSSGGKERLLGISKRGDAYLRSLLIHGARAVIRTARAKDDPLSKWVIRLADRSHPNVAAAALANKTTRIAWAMLSREANYQPAMS

SEQ ID NO: 20259 - protein, 315 aa, unidentified
  source 1..315: note = protein_33f55c6
  REGION 9..151: note = RuvC_domain
  SITE 12: note = RuvC_P1
  SITE 56: note = RuvC_P2
  SITE 96: note = RuvC_P3
  SITE 98: note = RuvC_P4
  SITE 101: note = RuvC_P5
  REGION 192..276: note = Tnp_domain
  SITE 200: note = Tnp_P1
  SITE 229: note = Tnp_P2
  SITE 237: note = Tnp_P3
  SITE 238: note = Tnp_P4
  SITE 249: note = Tnp_P5
MTATIAQTVGVDISKLTLDVYLHPQATARQFPNTTAGITALLTWLGQTAVHRVIFEPTGAYHRSLERQLGNAAIPMVKVNPLQARRFAEAIGQRAKTDAVDAAMLARFGALDALQTRPVVSQTLSDMKELLVARRGLVKDRVATTNRNHVHRAPLLKRLADQRLRQVERQIAAIDAALRALCRADAELKARLDILVSIPGIGEATALTMLIEMPELGTIDNKCVASLAGLAPIARDSGQHSGKRFIRAGRAHLRQALYMPALVAIRFNADMKAKYQALVAAGKPPKVAITAVMRKLAILANALLREQRNWTPKLA

SEQ ID NO: 20260 - protein, 343 aa, unidentified
  source 1..343: note = protein_475097c
  REGION 7..149: note = RuvC_domain
  SITE 10: note = RuvC_P1
  SITE 53: note = RuvC_P2
  SITE 88: note = RuvC_P3
  SITE 90: note = RuvC_P4
  SITE 93: note = RuvC_P5
  REGION 211..295: note = Tnp_domain
  SITE 219: note = Tnp_P1
  SITE 249: note = Tnp_P2
  SITE 257: note = Tnp_P3
  SITE 258: note = Tnp_P4
  SITE 270: note = Tnp_P5
MTENIMIGVDLAKQVFQLHGATMTGHVRFRKKLSRAQFVRFMTDHAPALVVMEACSSAHHWARELDQLGHEVRLIAPQYVRPFIKRQKNDAADAEAIVIAAQRPEMRFVEPKSEQQQARSMLFRGRERLVRQRTELMNALRSNLYEYGYVAPQGATHLNRIAEIVEDPDTILPEIAREECRDLIEQIAEKTARIEARMKKIKAMASETDMARRLQTMPGVGPLTAMAVEAFAPDMSHFRSGRDFAAWLGLVPRQHSSGGKERLGRVSKAGQADIRRLLIIGAMSRLNWMGRRSIAPGSWLARMMAKKPRLLVAVALANKMARAIWAMLTRNEDYRAPAQVAPA

SEQ ID NO: 20261 - protein, 340 aa, unidentified
  source 1..340: note = protein_5df75b1
  REGION 7..149: note = RuvC_domain
  SITE 10: note = RuvC_P1
  SITE 53: note = RuvC_P2
  SITE 88: note = RuvC_P3
  SITE 90: note = RuvC_P4
  SITE 93: note = RuvC_P5
  REGION 212..297: note = Tnp_domain
  SITE 220: note = Tnp_P1
  SITE 250: note = Tnp_P2
  SITE 258: note = Tnp_P3
  SITE 259: note = Tnp_P4
  SITE 271: note = Tnp_P5
MSEITTIGLDLAKHVFQVHGIDAEGTTVVRKRLRRGQVLAFFSRIPRCLVGLEACATAHYWARELTALGHEVRLMPAQYVKAYIRRNKHDAADAEAICEAVQRPTMRFVPVKTTEQQATQLLHRGREQLVRQRTMLVNALRAHLAEFGMVAAQGLRNVGELIAIVRDDGDTRLPGVARQVLQVLANQIEQIETAVAGLERQLLAWHKANPVSQRLASIPGIGPIIATAIATTVADPKVFRSGREFAAWLGLVPRQNSTGGKTRLGGITKRGNRYLRRLLINGASANLLRSKATKADPWVIGLRRRRPPLVVAVALANKTARIAWAVMLRERQYQPRAVAA

SEQ ID NO: 20262 - protein, 355 aa, unidentified
  source 1..355: note = protein_07f6110
  REGION 12..167: note = RuvC_domain
  SITE 15: note = RuvC_P1
  SITE 68: note = RuvC_P2
  SITE 104: note = RuvC_P3
  SITE 106: note = RuvC_P4
  SITE 109: note = RuvC_P5
  REGION 233..318: note = Tnp_domain
  SITE 241: note = Tnp_P1
  SITE 271: note = Tnp_P2
  SITE 279: note = Tnp_P3
  SITE 280: note = Tnp_P4
  SITE 291: note = Tnp_P5
MTIVANTFAYVIGADTHSKTHTLAVLDARTGARIDTSTFPTTPAGLSRAVAWIGRRTSGQADVLVAIEGVGSYGARLARSCQNTGYRVVESFPTPARERRGRGKSDEIDAELIARSVLGVDADKLRDPRQDAGVRAALRVLIGARDLLNIERTRSINALTALLRTVDLGIDARTPISKKQTGLIGSWRTRQEDVATATARREAIRLAKRVAACDEELAVNRDEITALVAASDDAALLDEPGIGAINAAVIIAAWSHPGRVRSEAAFAALAGVSPVPASSGSTTRHRLNRGGDRRLNRALSSIALTRMSHHPPTRAYLERRRAEGRTTKEIRHSLKRYIARQLYRRLTHENGLDRT

SEQ ID NO: 20263 - protein, 407 aa, unidentified
  source 1..407: note = protein_aaac4a7
  REGION 6..159: note = RuvC_domain
  SITE 9: note = RuvC_P1
  SITE 57: note = RuvC_P2
  SITE 98: note = RuvC_P3
  SITE 100: note = RuvC_P4
  SITE 103: note = RuvC_P5
  REGION 221..306: note = Tnp_domain
  SITE 229: note = Tnp_P1
  SITE 259: note = Tnp_P2
  SITE 267: note = Tnp_P3
  SITE 268: note = Tnp_P4
  SITE 279: note = Tnp_P5
MARVFIGVDPHKVSATIEVVDGRETVLATGRFGTDKAGYAAMRKQVAAWPERTWAVEGSNGAGRSLAHRLLADGERVVDVPAKLSARARLFDTGHNRKTDAHDAHAVAAVAVRTKVLRVLSYDEQLEVLRMLVDRREELTRTRVQAVNRLHRLLAELKPGKAKEDITALQAKAILASVRPRDVVGKTRKMLALEQLAEMVVLDKKIKASTKELKILVLARGSTLMDLTGVGPVVAARILADVGDVARFTDRNRFASWTGTAPLDASSGEQIRHRLSRAGNRKANHVIHIAAACQIRLDTSGRAYYRRKLAAGKKPLEAMRCLKRRISDALYRQLVADAKATANAGVDPGVQAGPGGHRGASHASSAAGSHPHTDTSDQPLPGPAPTTLPAREPRRKTTPARPLQPAS

SEQ ID NO: 20264 - protein, 396 aa, unidentified
  source 1..396: note = protein_8c729aa
  REGION 6..160: note = RuvC_domain
  SITE 9: note = RuvC_P1
  SITE 58: note = RuvC_P2
  SITE 98: note = RuvC_P3
  SITE 100: note = RuvC_P4
  SITE 103: note = RuvC_P5
  REGION 266..352: note = Tnp_domain
  SITE 273: note = Tnp_P1
  SITE 304: note = Tnp_P2
  SITE 312: note = Tnp_P3
  SITE 313: note = Tnp_P4
  SITE 325: note = Tnp_P5
MAAIWAGIDADKTHHHCVAIDESGRRLLSRRVANDEPELLELLADVLAFGDEVTWGIDLADGGAALAIAILLNHDQPVHYISGRAIHRASESYRGEGKTDAKDAAVIADQVRVRRDLHPLRAADDTITDLKILTGRRMDLVADRTRTVNRLRAQLTGVFPGLERALDLTNTGPLILLTGYQTPAAIRRIGTKRLETWLRNRHVARADRLAEIAVQAAERQHTSLPGEKLAAQLVHTLARDVMGLNQQVAELDKDIEAKFRDHHAFDVITSMPGLGVILGAEFLAATGGDMTIFGTADRLAGFGGVAPVPRDSGKISGNLRRPQRYNRRLQRVFYISALFSIRHCDESRQFYDRKRTEGKRHTQAVLALARRRVNVLWALLRDGRCYELTPPGALAA

SEQ ID NO: 20265 - protein, 328 aa, unidentified
  source 1..328: note = protein_b003f5b
  REGION 4..154: note = RuvC_domain
  SITE 7: note = RuvC_P1
  SITE 59: note = RuvC_P2
  SITE 99: note = RuvC_P3
  SITE 101: note = RuvC_P4
  SITE 104: note = RuvC_P5
  REGION 199..285: note = Tnp_domain
  SITE 207: note = Tnp_P1
  SITE 236: note = Tnp_P2
  SITE 244: note = Tnp_P3
  SITE 245: note = Tnp_P4
  SITE 258: note = Tnp_P5
MFYIGSDVSKARLDCYLLSVDQAKGKSKVVSNDAKGCAELVAWLAKHGVLPASAHIVMEGTGVYHERAALTLHEAGLVVSIVNPAQIRDFAKGLAIRTKTDGVDSMVLARYGALVKPPRWQPPPVTVRQLQSLLARREAVAQDLQRERNRQEKSEVALEAALVHESLHDSIAFLEQQLVKLQREIDDHIDRYPDLKGDLALLQSIPAVGPQVSRTMLAVIHSHSFRSAEQLAAFLGLVPIERQSGSSLSGRARLSKAGPARVRATLYMAAVVAIRHNPHVRALYDRLLLRGKSKMAALGAAMRKIVHLCFGVIHTQQPYSASWSPATA

SEQ ID NO: 20266 - protein, 405 aa, unidentified
  source 1..405: note = protein_9eb2338
  REGION 6..162: note = RuvC_domain
  SITE 9: note = RuvC_P1
  SITE 59: note = RuvC_P2
  SITE 99: note = RuvC_P3
  SITE 101: note = RuvC_P4
  SITE 104: note = RuvC_P5
  REGION 271..357: note = Tnp_domain
  SITE 279: note = Tnp_P1
  SITE 310: note = Tnp_P2
  SITE 318: note = Tnp_P3
  SITE 319: note = Tnp_P4
MARVFVGHDWAEAHHDVCVEDEQGRRLERARLPEGVEGVARFHALVADHVDDPADVVIASETDRGLFVGALVAAGYTMLAVNPMSTSRYRERHSTSGAKSDPGDAWVLAELARVDGHNHRSVAGDSDLAEAVKLLARAHQSMIWARQRQLNQLRSTLREFYPAALVAFDELGSNDALAVLAIAPTPTLGRSLSRSKIAAALRRGGRQRRIDARAAEIQNALRSEQLEAPALVANAMGATATAIVAVAVEMTAQINRLETQLAEHFEQHPDAKIIRSLPGLGMTLGARVLGEFGDDPNRYADAKCRKNYAGTSPITKAPGTRRVVLARYARNRRLADACYMWAFTATNASPGARAFYDQRRAAGDTHHRALRALANRLVGILHGCLHHGTVYDEHTAWGHREQIAA

SEQ ID NO: 20267 - protein, 350 aa, unidentified
  source 1..350: note = protein_225511e
  REGION 7..149: note = RuvC_domain
  SITE 10: note = RuvC_P1
  SITE 53: note = RuvC_P2
  SITE 88: note = RuvC_P3
  SITE 90: note = RuvC_P4
  SITE 93: note = RuvC_P5
  REGION 212..301: note = Tnp_domain
  SITE 220: note = Tnp_P1
  SITE 250: note = Tnp_P2
  SITE 258: note = Tnp_P3
  SITE 259: note = Tnp_P4
  SITE 271: note = Tnp_P5
MKKITTLGVDLAKNVFQLHGVDPAGKMALRREVRRAQLMQTIAQLEPCLIGIEACGGAHYWARRFAEHGHQVRMMSPQFVKPYRKSDKNDRNDAEAICEAVTRPSMRFVAVKSVEQQDMLTLHRVREGLMKERVALINRIRRSLSEYGIVISKNVCNLRSEPPGILEDAENELTVMARQIFNELYEDLGAREERIAQLERSIRALGSRHDVVRRLETIPGVGFLSASALFATVGDAKQYQNGRQLAASIGLVPRQSSSGGRQRLFGITKRGDKYLRKLLVHGARSIATRAERKPQPQDRWLNELRERRGKPRSYVAQANNTARIAWAIMARGEVYRAPAATLESAVAVAA

SEQ ID NO: 20268 - protein, 326 aa, unidentified
  source 1..326: note = protein_4666120
  REGION 4..155: note = RuvC_domain
  SITE 7: note = RuvC_P1
  SITE 60: note = RuvC_P2
  SITE 100: note = RuvC_P3
  SITE 102: note = RuvC_P4
  SITE 105: note = RuvC_P5
  REGION 200..286: note = Tnp_domain
  SITE 208: note = Tnp_P1
  SITE 237: note = Tnp_P2
  SITE 245: note = Tnp_P3
  SITE 246: note = Tnp_P4
  SITE 259: note = Tnp_P5
MFFIGIDVSKAKLDCCLSLDVEGTKRRAKSVPNSKPGILGLLAWCAKHQLAAQDLHAIMEGTGVYHEQAALALTDAGVTVSIVNPAQAKDFGHSLGIRTKTDGVDSLVLARFGALLNPRPWTPPAKEARVLQALLSRREAIAQDLRRERNRLEKADATDTPASIRQSIVDAIIFLEKQLAKLQQDIDNHIRKCPKLKADRDLLVSIPAVGPRVGNHLLAVIHNHHFQSAGQLAAYLGLVPIERQSGSSILGRPRLSKAGPARIRAVLYMAAVVATKHNPHIKALYQRLQERGKSKMSALGAAMRKLVHLCFGVLKTRQPYQANYAF

SEQ ID NO: 20269 - protein, 343 aa, unidentified
  source 1..343: note = protein_3db55d3
  REGION 6..148: note = RuvC_domain
  SITE 9: note = RuvC_P1
  SITE 52: note = RuvC_P2
  SITE 87: note = RuvC_P3
  SITE 89: note = RuvC_P4
  SITE 92: note = RuvC_P5
  REGION 211..296: note = Tnp_domain
  SITE 219: note = Tnp_P1
  SITE 249: note = Tnp_P2
  SITE 257: note = Tnp_P3
  SITE 258: note = Tnp_P4
  SITE 270: note = Tnp_P5
MKITTVGLDLAKNVFQVHAIASTGEVVVRRSLRRAQVIPFFTKLPPCLIGMEACGTSHHWARELVALGHEVRLMPPAYVKPYVKRGKSDAGDAEAICEAVTRPTMRFVPIKSVEQQAALALHRTRDLLVRQRTQLVNMIRGLLAEFGIDIPRGITHALAFVRRAVAGDAHEVPDLAAKVIGALAGQAIEVQGRIRQLERDLLAWYRSNDLARRIATVPGVGLLGATALAATVTDPTHFRSGRQFAAWLGLTPLNNSSGGKERLGRISKMGDQYLRRLLVTGMTSLVRSNRHRPGSIDPRMNALLARKPVRLVTVAMANRAARAIWAIMVRGEVYRAPVVNVVA

SEQ ID NO: 20270 - protein, 263 aa, unidentified
  source 1..263: note = protein_e934ec8
  REGION 1..69: note = RuvC_domain
  SITE 9: note = RuvC_P3
  SITE 11: note = RuvC_P4
  SITE 14: note = RuvC_P5
  REGION 133..218: note = Tnp_domain
  SITE 141: note = Tnp_P1
  SITE 171: note = Tnp_P2
  SITE 179: note = Tnp_P3
  SITE 180: note = Tnp_P4
  SITE 192: note = Tnp_P5
MKPYVKSNKNDANDAEAICEAMSRPSMRFVAIKTVEQQDIQAAHRIRAGLIEQRTAKANQVRGLVAEYGLIAPKELCSLRRAIPCWLEDADNGLTLRFRHLLDGLWRDLRMLDERVKELDSEISGIAANEPNAQSLQQLRGVGPIIATALVAAIGDARQFANGRQFAASLGLTPRQHSSGGKDRLLGISKRGDVYLRTLMIHGARSVLRTAPSKDDWLSQWVIRLAERSHTNVAAIALANKTARMAWAMLRNGTDYQPERAAA

SEQ ID NO: 20271 - protein, 406 aa, unidentified
  source 1..406: note = protein_63f78de
  REGION 4..161: note = RuvC_domain
  SITE 7: note = RuvC_P1
  SITE 60: note = RuvC_P2
  SITE 100: note = RuvC_P3
  SITE 102: note = RuvC_P4
  SITE 105: note = RuvC_P5
  REGION 276..363: note = Tnp_domain
  SITE 284: note = Tnp_P1
  SITE 315: note = Tnp_P2
  SITE 323: note = Tnp_P3
  SITE 324: note = Tnp_P4
  SITE 336: note = Tnp_P5
MNYLGIDVSKANARYVLIDNDGEQATKGFTLTNDQKSFTQIIERFKELKLTTDTLLIGIEATGIWWENLYCFLTEQKFKVIVLNPHQTNKFREALRYKAKTDDIDACVIAGLLRSGKYAASYIPEETIQVLREIVKLRHQLVTNRQNFERQAQSLLGLLFPEYQKTAIKNPFTVASLAILKAYPTAKHLAEAKPKNIEKIVRSIVGNNFNIAEIKTLIETAQNSIYSGRAKDARGLNLNILLTHVETLQHSIAQLDKRMDDILSPQDPDDALSFPGANLLSIPGIGPKTLAAFLSIAGSDGSAYPDGKSIFGYIGFFPKIYESGETRHDNIISSRGPNYARRAFYIASVACLKHNDEFKALYDRKISQGKSAKQALICVAKKLIHLCLSMLKSGESYNPSRVFMPV

SEQ ID NO: 20272 - protein, 323 aa, unidentified
  source 1..323: note = protein_a9f6a0b
  REGION 5..155: note = RuvC_domain
  SITE 8: note = RuvC_P1
  SITE 58: note = RuvC_P2
  SITE 98: note = RuvC_P3
  SITE 100: note = RuvC_P4
  SITE 103: note = RuvC_P5
  REGION 195..281: note = Tnp_domain
  SITE 203: note = Tnp_P1
  SITE 233: note = Tnp_P2
  SITE 241: note = Tnp_P3
  SITE 242: note = Tnp_P4
  SITE 254: note = Tnp_P5
MAAVVGVDIAKRTFDLAILQPNGKHRTKSKLSNDKAGFAVFADWLQRHAEPGAWIVMEATGIYHEALAEHFHELGYRIAVLNPAQIARYAQSQLQRSKTDKLDAKLIATYGQLHVEHLRAWQPEPASVRQLRALTRRLEDLQSLRQMELNRLDVSSSTVQSSIQAVLQRLDEQIAWTLEQIKRHIDDDPDLRGKRDLLVSINGIAEKTAALIMAELGDIERFTDARAVTAFAGLDPRLQESGVARGHSGISRTGSARLRTALYLPAVVALTYNPAIKAQAERLRARGKRGKQTVCAAMRKLLCIAYGVLKSRKPFDLALAIAR

SEQ ID NO: 20273 - protein, 405 aa, unidentified
  source 1..405: note = protein_6e431b0
  REGION 5..161: note = RuvC_domain
  SITE 8: note = RuvC_P1
  SITE 58: note = RuvC_P2
  SITE 98: note = RuvC_P3
  SITE 100: note = RuvC_P4
  SITE 103: note = RuvC_P5
  REGION 271..357: note = Tnp_domain
  SITE 279: note = Tnp_P1
  SITE 310: note = Tnp_P2
  SITE 318: note = Tnp_P3
  SITE 319: note = Tnp_P4
MGIYVGIDWAEAHDDIAVLDETGTVLAKRRIAEGLEGVGQLHALLADHAAEPSQVAIGIETDRGLLVGALLAAGYQVYAINPLAASRYRDRHGTSGAKSDPGDAKVLADLVRTDRHNHRRVAGDSELAASLQVLARAHQNLIWSRQRLANQLRNNLREYYPAALVAFGSDLANPLPLGVLDAAPTPAMGRTLSQSKLAAILRRAGRERGVAEKAAAIQAQLRAPQLAAPALVGEAYGKSVASTVRILRGMNAELASLEAELAPSFEKHPDAEIYRSLPGLGIVLGARVLSEFGDDRTRFAHPKARKNYAGSSPITKASGTRRVVLARMARNRRLADACHLWAFCALTGSAGARHYYRVLRQRGKTHHQALRALANRLVGILHGCLDHRQTYREEIAWPRSLTVAA

SEQ ID NO: 20274 - protein, 404 aa, unidentified
  source 1..404: note = protein_6830bc6
  REGION 4..160: note = RuvC_domain
  SITE 7: note = RuvC_P1
  SITE 57: note = RuvC_P2
  SITE 97: note = RuvC_P3
  SITE 99: note = RuvC_P4
  SITE 102: note = RuvC_P5
  REGION 270..356: note = Tnp_domain
  SITE 278: note = Tnp_P1
  SITE 309: note = Tnp_P2
  SITE 317: note = Tnp_P3
  SITE 318: note = Tnp_P4
MIFVGVDWAEAHHDVCVLDDQGAVLGRRRVSDGVAGVAELHALLAEHAEDPSDVAVGIELDRGLLVGALVTVGYEVYAVNPMASARYRERHGVSGAKSDRGDAKVLADLVRTDRHNHRRIAGDSELVEAVKVVARAHQSAIWSRQRHLNSLRSALREYYPAALIAFGTDLASSDATSVLAIAPTPEQGRLLSRSKIASALRRGGRQRNVDARAAEIQAALRSEQLAAPGRLSAAYGVVARSTVAVIVSQTREIAALEEALGEGFDEHPDAKIVRSLPGLGTVLGARVLGEFGDDRTRFATAKCRKNFAGSAPITKASGRSHVVLARHARPRRLADALDQWAFCSLTHSPGARRYHDQLRARNKTHRQALRQLANRWVGILHTCLERNELYHEHLAWGHHLPVAA

SEQ ID NO: 20275 - protein, 353 aa, unidentified
  source 1..353: note = protein_a614e31
  REGION 4..158: note = RuvC_domain
  SITE 7: note = RuvC_P1
  SITE 56: note = RuvC_P2
  SITE 97: note = RuvC_P3
  SITE 99: note = RuvC_P4
  SITE 102: note = RuvC_P5
  REGION 220..306: note = Tnp_domain
  SITE 228: note = Tnp_P1
  SITE 258: note = Tnp_P2
  SITE 266: note = Tnp_P3
  SITE 267: note = Tnp_P4
  SITE 278: note = Tnp_P5
MIIIGIDPHKSTHTATAVDPATNSDIGSLRIEASLTEYQRLIVWAKAWPQRTWAIENADGLGHHLALWLLAHGEVVLDIPTTATARIRELSRGGRRKNDRIDAAAAASVAALQGDARQVYPETITDALALLDERRVNLSHSRTRAVNQLHALLRELMAGGAPTSLTPAKAATTLRGFRPRTSPDRIRVELAKELIADFRRFDEQLKANAAKIVVLLDEHGTTLREIDGIGTVLAARLLGRTGPASRFASAAAYANYTGTAPIQIASADSSRHRLSRYGDRQLNSALHTIAMVQVRMPASAGRVYYDKKIAEGKSPRCATRALKRHLAGHLWRLMYIDETRIPRALSGVAANAS

SEQ ID NO: 20276 - protein, 361 aa, unidentified
  source 1..361: note = protein_9a9e9b2
  REGION 31..171: note = RuvC_domain
  SITE 34: note = RuvC_P1
  SITE 77: note = RuvC_P2
  SITE 112: note = RuvC_P3
  SITE 114: note = RuvC_P4
  SITE 117: note = RuvC_P5
  REGION 236..324: note = Tnp_domain
  SITE 244: note = Tnp_P1
  SITE 274: note = Tnp_P2
  SITE 282: note = Tnp_P3
  SITE 283: note = Tnp_P4
  SITE 295: note = Tnp_P5
MDAPCTGVECAKMEVLLTPQQGTPMSEITVIGLDLAKHVFQVHGADPDGRPVLRKRLRRGQVLEFFASLSPCLIGMEACAGSHYWGRELQALGHEVRLIPPQYVKPYVKTNKNDATDAEAISEALTRPTMRFTAVKSAEQQSVLMLHRTRELLVRQRTMLVNALRGHCGEFGIVAAQGLSRAGDLIKRIEDPADTALPDLARQALQCLTSQIRAIQEQIALIEKKLLAWHSSCEASRRLAEIPGVGLITATAVVASVGNATQFRSARQFAAWLGLVPQQHSSGGKERLGHISKRGDGYIRRLLVHGARAHLSWSRRKKQIRSAWLTGLLARRPTNVALLAMANKTARIAWATLSRAKDIRK

SEQ ID NO: 20277 - protein, 347 aa, unidentified
  source 1..347: note = protein_645d7a8
  REGION 7..148: note = RuvC_domain
  SITE 10: note = RuvC_P1
  SITE 53: note = RuvC_P2
  SITE 88: note = RuvC_P3
  SITE 90: note = RuvC_P4
  SITE 93: note = RuvC_P5
  REGION 210..295: note = Tnp_domain
  SITE 218: note = Tnp_P1
  SITE 247: note = Tnp_P2
  SITE 255: note = Tnp_P3
  SITE 256: note = Tnp_P4
  SITE 268: note = Tnp_P5
MTELKLIAMDTSKHVFSLHGVNERGEVVLRRELRRQQLTAFFQKLPPTEIVLEACGSSHHWGRTLAALGHRVRLIAPQYVKPFVKRGKNDRIDAEAISEAALRPNMRFVPVKSAEAQADAMILSVRELLVKQHTQLVNALRGHASEFGVIAAKGTGHVEGLLERIAADPAVPAPAQAMFVELGERIAELRTRRAELDRKLAALHKANPLSQQLAAVPGIGPIGALTLALTVDASQFHSGRHFAAWLGLTPRQNSTGGKPRLGGISRQGNERLRQLLVLGATSVVRLTKPDYRHANAWLLALLQRRPRKLAAVAPAFAGAGCLANKMARVVWAMMTSGEAYRPQPAAG

SEQ ID NO: 20278 - protein, 399 aa, unidentified
  source 1..399: note = protein_4752046
  REGION 11..166: note = RuvC_domain
  SITE 14: note = RuvC_P1
  SITE 63: note = RuvC_P2
  SITE 103: note = RuvC_P3
  SITE 105: note = RuvC_P4
  SITE 108: note = RuvC_P5
  REGION 273..358: note = Tnp_domain
  SITE 281: note = Tnp_P1
  SITE 311: note = Tnp_P2
  SITE 319: note = Tnp_P3
  SITE 320: note = Tnp_P4
  SITE 332: note = Tnp_P5
MYDTSGIGVFLGLDVGKGEHHGHGLTPAGKKVFDKQLPNSEPRLRQVFDKLKAKFGTVLVIVDQPANIGALPLTVARDCGCEVAYLPGLAMRRLADTYEGEAKTDARDAFVIADVARTNPRTLRQITVTDQTEAELAMLVGFDDDLAGESTRTSNRLRGLLAQIHPSLERVLGKRIRHPAVLELLSRYGSPQQLHQAGGDQIAAVLKPKAPRMAARLAAEITTALAEQTVVVPGTTAAEVIVPSLARQLAEILTQRDALEGRLAALLEAHPLHRLLTSMPGVGVRIAATVLITIGDGRTFPDADHLASYAGLSPATKSSGSSIKGEHAPKRGNRQLKRAMFLSAFAALHDPASRDYYDRHRNSGKTHTQALLRLARRRITVLFAMLRDGCLYESRPASA

SEQ ID NO: 20279 - protein, 401 aa, unidentified
  source 1..401: note = protein_1aa33ae
  REGION 7..172: note = RuvC_domain
  SITE 10: note = RuvC_P1
  SITE 63: note = RuvC_P2
  SITE 103: note = RuvC_P3
  SITE 105: note = RuvC_P4
  SITE 108: note = RuvC_P5
  REGION 272..357: note = Tnp_domain
  SITE 280: note = Tnp_P1
  SITE 310: note = Tnp_P2
  SITE 318: note = Tnp_P3
  SITE 319: note = Tnp_P4
  SITE 330: note = Tnp_P5
MEPHLCVGIDVGYRAHRVGIAHPDGTILDEFDISHDQAGFGEFFRRVEGYRRELSLPVAVAMEGFNGYARPLDRLVHEKGYRLFNVNNLKLARFKEVFPGAAKTDPIDTRKILELFRLKDQLPLAKAAIQEVVMAPAVNGKLKRLSRRRRHLVDEKMRVLARMQTDLQAVCPELLALTHSADNLWFLRFLTLRDDLRQLARLRHSTVLQIPGVGQKYSRVILEWRKKACFSNEVEYVGPMIIEDAARVLELRKQIQALDEAMAELAAQSEIARRLASIPGFGKTSIAELAGEIGTLERFSSEASLALYVGMCPLTHQSGQMYKTRVPRQVNTRCKAAMMTAVARHIACVPESRVYYDRKRAEGKTHNQAIRALGRHLVRVIWAILRDGRDYEIREDLHPMT

SEQ ID NO: 20280 - protein, 279 aa, unidentified
  source 1..279: note = protein_3cfa6d6
  REGION 6..149: note = RuvC_domain
  SITE 9: note = RuvC_P1
  SITE 54: note = RuvC_P2
  SITE 89: note = RuvC_P3
  SITE 91: note = RuvC_P4
  SITE 94: note = RuvC_P5
  REGION 213..276: note = Tnp_domain
  SITE 221: note = Tnp_P1
  SITE 251: note = Tnp_P2
  SITE 259: note = Tnp_P3
  SITE 260: note = Tnp_P4
  SITE 272: note = Tnp_P5
MKLTRVGVDLAKQVFQVHGVDRAERAVWCQRLKRNRWIGELERHVEPGSEIGMEACGGAHHWARLLQSKGYVVKLIAPQFVKPYVKSNKNDANDAQAICEAMSRPSMRYVAVKTVEQQDIQAVHRIRASLIGERTAKANQLRGLVYEYGLVAPREIASLRRAVPAWLEDATNGLSARFRALLAGLYRDLQGLDERVHELDRQIAVIVRENEAVRRIEQLRGIGPLTASALVAMVGDGRQFKNGRHLAVALGLTPRQHGSGGKEKLLGISKRATNTSGRC

SEQ ID NO: 20281 - protein, 315 aa, unidentified
  source 1..315: note = protein_72684df
  REGION 11..156: note = RuvC_domain
  SITE 14: note = RuvC_P1
  SITE 58: note = RuvC_P2
  SITE 98: note = RuvC_P3
  SITE 100: note = RuvC_P4
  SITE 103: note = RuvC_P5
  REGION 193..277: note = Tnp_domain
  SITE 201: note = Tnp_P1
  SITE 230: note = Tnp_P2
  SITE 238: note = Tnp_P3
  SITE 239: note = Tnp_P4
  SITE 250: note = Tnp_P5
MERCERSTKIGGIDVGKKQLDAAVHGGGEQFQAANDAAGWEALAAWLKERGVGRVGLEATAGYERGVRGRLEAAGLEVVVHQPLEVRLFARLKRLRAKTDRIDAALIAAATAQVDTVRAAQDLRLVELAERMTAYEQISDLTAQLKTSMEHVTLPDLAASLDEQIESLKQLKARLAREIFTRIKAFEDLVARWRLLQSLPGVGPIVAASLVIRMPELGALQRGQPASLIGVAPFDRQSGQWRGQSFIGGGRSRPRRMLYLAAIAAKRFDPGFKAFADRLLAVGKPPKLAIVAVMRKLIEAANLVLARQQPWMRQA

SEQ ID NO: 20282 - protein, 358 aa, unidentified
  source 1..358: note = protein_420b5c0
  REGION 10..163: note = RuvC_domain
  SITE 13: note = RuvC_P1
  SITE 61: note = RuvC_P2
  SITE 102: note = RuvC_P3
  SITE 104: note = RuvC_P4
  SITE 107: note = RuvC_P5
  REGION 225..310: note = Tnp_domain
  SITE 233: note = Tnp_P1
  SITE 263: note = Tnp_P2
  SITE 271: note = Tnp_P3
  SITE 272: note = Tnp_P4
  SITE 283: note = Tnp_P5
MSSTAEPVVIGMDPHKRSATIEVMTGDERVVGGHRFGTDRDGYSAMLSFATQWPDRVWAIEGCRGIGRHIALRLLGEGEQVVDVPPKLSARARLFATGQGRKTDATDAHSVALVGTRMSGLRPVIDDQELTVLRILVDRRRSLGDDHTRMVSQLHQLLLELIPGGAKKDLSAAQAKALLAKVRPKDAAGKARRRVAAELIADLERVYQRKRAANKELKALVAATGTTLMDLHGVGPSGAARLLVEVGDITRFPNRDHFASWNGTAPIDASSGDQVRHRLSRAGNRQINRVLHIMATVQLRNPTEGRDYFDRKKATGKTSMEAMRCLKRRLSDIVYRHLVDDAITHALTGPGRATGKRL

SEQ ID NO: 20283 - protein, 342 aa, unidentified
  source 1..342: note = protein_49b0ef7
  REGION 6..148: note = RuvC_domain
  SITE 9: note = RuvC_P1
  SITE 52: note = RuvC_P2
  SITE 87: note = RuvC_P3
  SITE 89: note = RuvC_P4
  SITE 92: note = RuvC_P5
  REGION 210..294: note = Tnp_domain
  SITE 218: note = Tnp_P1
  SITE 248: note = Tnp_P2
  SITE 256: note = Tnp_P3
  SITE 257: note = Tnp_P4
  SITE 269: note = Tnp_P5
MKDTMIGVDLAKNVFQVHGALRTGEVQFRKKLTRKQFPVFMAQQEPCTVILEACCGAHYWARQMEALGHEVKLIAPQYTRPFVKRQKNDAADAEAIVIAARQPEMRFVAPKTVEQQSRAAVFRGRERLVHQRTADVNALRALLHEHGHVFPIGTRYLDRMRALVEDEASDLPALIREECQDMLVQIAEKTARITERTTKLKVLAARSDRARRLQTMPGVGPLTAVAVEAFGPDMAAFKTGRDFAAWLGLVPRQHSSGGKERLGRMTKAGQADIRRLLIVGAMSRLNWLGQRTITEGSWLSRMLARKPKMLVAIALANKMARQIWAMLTKNEDYKDPALAGAT

SEQ ID NO: 20284 - protein, 401 aa, unidentified
  source 1..401: note = protein_253007f
  REGION 13..167: note = RuvC_domain
  SITE 16: note = RuvC_P1
  SITE 64: note = RuvC_P2
  SITE 104: note = RuvC_P3
  SITE 106: note = RuvC_P4
  SITE 109: note = RuvC_P5
  REGION 274..359: note = Tnp_domain
  SITE 282: note = Tnp_P1
  SITE 312: note = Tnp_P2
  SITE 320: note = Tnp_P3
  SITE 321: note = Tnp_P4
  SITE 333: note = Tnp_P5
MHGLPDRTYAVYLGLDVGKENHHATALAPDGKRLHDKPLPQDEDKLRALYEHLATHGPVLVVVDQPASIGALPVAVARAAGVAIAYLPGLAMRRIADLHPGNAKTDARDAYVIAEAARTMPHTLRRVDMNDDALADLEVIVGFDDDLAGEVTRVTNRLHGLLTQIHPALERALGPRLHHKAVLELLTRFGGPSGLRAAGRRRLTTIAKPRAPRSYERIIDAIMTALDAQTVTVPGTKAAEVVIPKLAAQLANLLEQRAAVAEQVEEILDAHPLAPVLTSMPGVGVRTAARILLEVGDGSAFPTAGHLAAYSGLAPVTRRSGSSIRGEHPSRSGNKNLKRAFFLSAFASLSDPTSRAYYDRKRAQGKKHNAALICLARRRCDVLFAMLRDGTTYQARAATAA

SEQ ID NO: 20285 - protein, 406 aa, unidentified
  source 1..406: note = protein_6dd6f88
  REGION 4..160: note = RuvC_domain
  SITE 7: note = RuvC_P1
  SITE 57: note = RuvC_P2
  SITE 97: note = RuvC_P3
  SITE 99: note = RuvC_P4
  SITE 102: note = RuvC_P5
  REGION 269..355: note = Tnp_domain
  SITE 277: note = Tnp_P1
  SITE 308: note = Tnp_P2
  SITE 316: note = Tnp_P3
  SITE 317: note = Tnp_P4
MIFVGVDWAEAHHDVYVEDADGTRLGGGRLPEGVEGIARFHDLVGDHVEEPSEVIVGIETDRGLFVTALVAAGYEVFAVNPMSTSRYRDRHSTSGAKSDPGDAKVLADMVRTDRHNHRPVAADSETVQVVKVLARAHQTMVWSRRRQTNLLRSTLREFYPAALVAFDDLASGDALEVLRMAPTPELGRTLSLSKIAAALRRGGRQRRIEERAAEVQSALRSEQLAAPAAVSSAMGASVAAGVAVIATMVTQTRSLAEELEAGFEQHPDAEVVRSLPGLGTILGARVLGEFGDEPNRYCNAKSRKNYAGTSPITRASGTKRVVLARYARNHRLADAIYLWAFAALSASPGARTLYDTRRAAGDTHHAALRALGNRLVGILHGCLEHHSIYNETIAWGHRTTPLADVA

SEQ ID NO: 20286 - protein, 344 aa, unidentified
  source 1..344: note = protein_f418739
  REGION 6..147: note = RuvC_domain
  SITE 9: note = RuvC_P1
  SITE 52: note = RuvC_P2
  SITE 87: note = RuvC_P3
  SITE 89: note = RuvC_P4
  SITE 92: note = RuvC_P5
  REGION 211..296: note = Tnp_domain
  SITE 219: note = Tnp_P1
  SITE 249: note = Tnp_P2
  SITE 257: note = Tnp_P3
  SITE 258: note = Tnp_P4
  SITE 270: note = Tnp_P5
MKITTVGIDLAKNVFQVHGIDEHGKAVLKKQLRRDQMAAFFVNLPPCLIGMEACGSAHHWGRKLQSMGHKVRLMAPQFVKPYVKTNKNDAADAEAICEAVGRPNMRFVPVKNVEQQAVLALHRVRQGFVRARTAQANQIRGLLGELGLIVPQGIGHIATRVPELIEDGANELPGAFRLLIQRLLDHLKELDRQVEELEDKIHAWHRSSDLSRKLAMIPGIGPITASALVASIGDAKNFDGGRQVAAWLGLVPRQHSSGGKSNLLGMSKRGDTYLRTLLIHGARSVIYRVSQRPDTCSWISSVVIRRNKNVAAVALANKNARIAWASLAHDRQFDAGYVRSAVVA

SEQ ID NO: 20287 - protein, 345 aa, unidentified
  source 1..345: note = protein_3c1781f
  REGION 5..152: note = RuvC_domain
  SITE 8: note = RuvC_P1
  SITE 55: note = RuvC_P2
  SITE 92: note = RuvC_P3
  SITE 94: note = RuvC_P4
  SITE 97: note = RuvC_P5
  REGION 212..300: note = Tnp_domain
  SITE 220: note = Tnp_P1
  SITE 250: note = Tnp_P2
  SITE 258: note = Tnp_P3
  SITE 259: note = Tnp_P4
  SITE 271: note = Tnp_P5
MKYYAGLDVSVKETSVCIVDETGAICREIKVLSHPEDLVQALKSSSWQFVRIGLEAGPLSQWLFSGLAEAGLPAICIETRHAKAFLKAQVNKTDRNDARGIAQMMRVNLFRPVHVKTLASQRRRALLTARKLLQEKAIDIENDIRGLLRNFGLKVGIVGTAGFDDRIRELVDGMPDLGEIMKPLLAARQKLRETFMELHRKLLSIVRGDETCRRLMTIPGVGPVTSLAFTSTIDVPARFSNSRSVGPALGLTPVLNQSGESHRVGRVSLCGDGMMRTLLYEAAQVLLSRVKKWSWLKAWAMNVARRRGRQKAIVALARRLAVIMHRMWSDGAEFRWTRESMPAAA

SEQ ID NO: 20288 - protein, 395 aa, unidentified
  source 1..395: note = protein_b025712
  REGION 18..175: note = RuvC_domain
  SITE 21: note = RuvC_P1
  SITE 73: note = RuvC_P2
  SITE 113: note = RuvC_P3
  SITE 115: note = RuvC_P4
  SITE 118: note = RuvC_P5
  REGION 281..368: note = Tnp_domain
  SITE 289: note = Tnp_P1
  SITE 320: note = Tnp_P2
  SITE 328: note = Tnp_P3
  SITE 329: note = Tnp_P4
  SITE 341: note = Tnp_P5
MMGGGADMDKTQQFRWFLGIDVSKETFDACCINRKGERLFSLSTSMNRKGFEELIKPFSSLSIPQESLLVGMESTACYHINLYSFLVSSGYTVIVMNPLLISNFVKLQLRKTKTDKKDAYVITQFLLLNRDSLSQTIVSSDISDLRDLSRQRESLVDQMSSTKSEIKRLLTITFPELEHIAGVFTKSMLRLLCQYPSAASMRQVKRSKIAKILIPGSYGKQTDASVDRIVKAAQVSVGTASPTKEILLKQKASILIQLEEYLQELTEVLMELCQAKIQEDMDILTSMKGIGEKTAMNFLIEMGGDIKQFESHKKLIAMAGLDPALYQSGKMDRKGRISKRGNRHLRRVIWLMTTKVIQFNGRFKQYYMKRIKDGLPYKMAVLATAHQGNVRNVDE

SEQ ID NO: 20289 - protein, 417 aa, unidentified
  source 1..417: note = protein_54ff6e0
  REGION 18..170: note = RuvC_domain
  SITE 21: note = RuvC_P1
  SITE 69: note = RuvC_P2
  SITE 107: note = RuvC_P3
  SITE 109: note = RuvC_P4
  SITE 112: note = RuvC_P5
  REGION 277..363: note = Tnp_domain
  SITE 285: note = Tnp_P1
  SITE 316: note = Tnp_P2
  SITE 324: note = Tnp_P3
  SITE 325: note = Tnp_P4
  SITE 336: note = Tnp_P5
MSVTAEPTPTRAQSRVCAGVDWAKDDHVVCIVDADGEAIDRYSVNHTAAGLRRMVARLLAAGVVEVGIERPDGPVIDALLAAGLTVLVIAPAQVKNLRSRYGSAGNKDDRFDAYVLADVVRTDRRRLTPLTRSTPAAQALRSSVRARRDLVEHRVAAANQLRAHLQIVFPGVVDLFADLDSAISLAFLERFPTQTKADWLTVERLAAWLKKVSYSGRTDPAILHARLLAAPRGTTGPEAGFHAQTTLAFAAVLRTLNTQIAVLANSIAAQLDIHPDAHIVTSLPRAGTVRAARLLAEIGDARGRFPTADALACLAGVAPSTRQSGKVKAVTFRWGADKELRDALCDFAADSRHANPWAAQLYNNARARNHDHPHATRILARAWVDIIWRCWQNHLAYNPHQHRALQRVLNEHATQAA

SEQ ID NO: 20290 - protein, 387 aa, unidentified
  source 1..387: note = protein_006c6c6
  REGION 6..159: note = RuvC_domain
  SITE 9: note = RuvC_P1
  SITE 57: note = RuvC_P2
  SITE 98: note = RuvC_P3
  SITE 100: note = RuvC_P4
  SITE 103: note = RuvC_P5
  REGION 221..306: note = Tnp_domain
  SITE 229: note = Tnp_P1
  SITE 259: note = Tnp_P2
  SITE 267: note = Tnp_P3
  SITE 268: note = Tnp_P4
  SITE 279: note = Tnp_P5
MRRVIIGMDPHKRSATIEVIDDREKVLAQGRFGTDTVGYQAMLKVGRTYPDRTWAVEGCNGIGRHIAQRLVADGETVLDVPAKLSARARVFATGQGRKTDPVDAHSVAVVALRTNGLRQVAVDDTTVALRLLVDRRDGLGRARTETISRLHHLLLELVPGGAKKYLSAPQARALLNTVRPRDIVGRTRRQLASELITELAVIDKKIKAANAQLTELVTTTGSSLQELNGIGPSGAARLLGDIGDITRFASRGHFASWNGTAPLDASSGDQERHRLSRAGNRRINRVLHIMAIVQLRNDTEGRAYYRRKLAAGKTPMEAIRALKRRLSDLVYKQMIRDANAARTGPGGQAGAALQSSAADPIPKVSSSEQSLPGPADTHPRTLLLAAS

SEQ ID NO: 20291 - protein, 408 aa, unidentified
  source 1..408: note = protein_ec806fa
  REGION 5..164: note = RuvC_domain
  SITE 8: note = RuvC_P1
  SITE 61: note = RuvC_P2
  SITE 101: note = RuvC_P3
  SITE 103: note = RuvC_P4
  SITE 106: note = RuvC_P5
  REGION 272..358: note = Tnp_domain
  SITE 280: note = Tnp_P1
  SITE 311: note = Tnp_P2
  SITE 319: note = Tnp_P3
  SITE 320: note = Tnp_P4
MRLFVGDDWAEDHHDVEVMNEAGKVLAKRRLPEGAAGIAQLHGLIGAHLGEEPDEAQVIVGIETDRGPWVAALAAAGYLVFPVNPLQAARFRDRHGVSGAKSDAGDAHALADMVRTDSHQLRPAAGDTPEAGGIKVLARTHKTMIWERTREVQRLRNQLREYFPAALEAFEDLDAPDTLELLSKAPEPARAARLTRAQVSAVLKRAGRRNITGRTTAILAALRGEQLGQPPALTAAYAAATRALTAVISALNEQVEGLEQQVKNHFGRHPDAEIILSQPGLGLVLGARVLAEFGDDPRRYADGKARRNYAATSPLTRASGKKKTVTARYVHNSRLVDALNAQAFSALKASPGARAFYDQQRTKGHGHNDALRRLANRLVGILHGCLKARTLYDEDTAWAHRQQTQQAA

SEQ ID NO: 20292 - protein, 296 aa, unidentified
  source 1..296: note = protein_4576b6f
  REGION 2..49: note = RuvC_domain
  REGION 157..243: note = Tnp_domain
  SITE 165: note = Tnp_P1
  SITE 196: note = Tnp_P2
  SITE 204: note = Tnp_P3
  SITE 205: note = Tnp_P4
MDLAELRRLEPDSPMVAELKTLTRDQDTLIQTQTRLVNQLTACLKEYYPAALQLFTKLQQRSTLLFLQTYPTPAAAASASVAELTATLRAGKHTNPRRVAPKLFEELHRPQLVASEIIVRAKSRLMISLVKQLLVVLEEIATYDKAIRTLFLRHNDQELWSSLPGAGKRLAPRLLAEWGDDRSRYANANSVQALAGTAPVPYESGNYAKAHKRFACLKPLRNALHQFAWQSTQQEAWARDYYQRKRAQGKTHSMAIRALANVWVRIIYAMWVSRTSYQTATFEAAQQAHAPRQHVA

SEQ ID NO: 20293 - protein, 325 aa, unidentified
  source 1..325: note = protein_dadf0c0
  REGION 20..168: note = RuvC_domain
  SITE 23: note = RuvC_P1
  SITE 66: note = RuvC_P2
  SITE 106: note = RuvC_P3
  SITE 108: note = RuvC_P4
  SITE 111: note = RuvC_P5
  REGION 203..286: note = Tnp_domain
  SITE 210: note = Tnp_P1
  SITE 239: note = Tnp_P2
  SITE 247: note = Tnp_P3
  SITE 248: note = Tnp_P4
  SITE 259: note = Tnp_P5
MRVVPRMTSRGVEKMEDHSIGVDISKDWLDAHRLNDGANGRFANDAKGHKALIAWMGGDVVRIVYEPTGAYHRRFEECMTKAGLPLVKVNPRRAHRFFDVAGQIAKTDRLDAEMLARMGALLSLKPRPQASPQLNELRELHVARQALVKDRTAAKNRARNVSLALLKSQSAERLKQIERAIEAIDAEIVRRIEADDVMAANFVILISIPGISDITATALIVEMPELGTLEPNEAAALLGVAPVTRQSGKWRGRAFIRGGRATLRQALYLPALVATRFNPDLAAKYAQLRGSGKPPKLAIVAIMRKLIILANALIRSQRNWQPNPA

SEQ ID NO: 20294 - protein, 407 aa, unidentified
  source 1..407: note = protein_a53b56b
  REGION 15..169: note = RuvC_domain
  SITE 18: note = RuvC_P1
  SITE 66: note = RuvC_P2
  SITE 106: note = RuvC_P3
  SITE 108: note = RuvC_P4
  SITE 111: note = RuvC_P5
  REGION 276..361: note = Tnp_domain
  SITE 284: note = Tnp_P1
  SITE 314: note = Tnp_P2
  SITE 322: note = Tnp_P3
  SITE 323: note = Tnp_P4
  SITE 335: note = Tnp_P5
MSNSDPDPMPFAVFCGLDVGKSEHHACALDTTGKRLYDRSLPNDEAALRAVFERLAERGRVLVVVDQPASIGALAVAVARELGIEVAYLPGLAMRRIADLHPGQSKTDARDAHVIADAARTMPHTLRRIRGDDETLAELAVLAGYDDDLAGQSTRLTNRLRDALLHVHPALERLLGPRLDRAGVLDLLAVAPTPATLGELGADGMAEVMAPRSPRLARTLPAQIRTALAAQSLVVAGTAAFARVITGVAGQLRDAHDERADLAAELEARLEAHPLGPVLTTMPGVGVRTAIKLLTIVGDGSAFPTAAHLAAYAGLAPVTRRSGSSIKGETRSQRGNHALQSALFLSAFAALGDPESRAYYDRKRAAGKRHNAALICLARRRTDVIYAMLRDRQPYRAPARAPEPIAA

SEQ ID NO: 20295 - protein, 320 aa, unidentified
  source 1..320: note = protein_75ba03f
  REGION 5..152: note = RuvC_domain
  SITE 8: note = RuvC_P1
  SITE 55: note = RuvC_P2
  SITE 92: note = RuvC_P3
  SITE 94: note = RuvC_P4
  SITE 97: note = RuvC_P5
  REGION 212..299: note = Tnp_domain
  SITE 220: note = Tnp_P1
  SITE 250: note = Tnp_P2
  SITE 258: note = Tnp_P3
  SITE 259: note = Tnp_P4
  SITE 271: note = Tnp_P5
MDHFAGLDVSVKETSVCIVDDMGKIVREVRVASEPEALLQVLSDPAYHLKRIGLEASPLSQWLFSALAEAGLPVICVETRHMRAMLKAQINKTDRNDARGIAQMMRAGLYRSVHVKTLRSQKLRMLLTHRKLLQSKAIAIDNDLRGTLRNFGLKVGVVGTVRFEARIKELVVDLPDLAVLVEPLLIVRRVLREQLSILHRRLLAVVRDDEVCRRLMTVPGVGPVVALTYRATIDVPARFRNSKAVGAVLGLTPSKYQSGEINRTGAISRCGDEMMRVMLYEAAQSMLNTNKWSWLKAWAMKIAKHRGKKRRSWRWRAGWP

SEQ ID NO: 20296 - protein, 344 aa, unidentified
  source 1..344: note = protein_9608dd3
  REGION 6..148: note = RuvC_domain
  SITE 9: note = RuvC_P1
  SITE 52: note = RuvC_P2
  SITE 87: note = RuvC_P3
  SITE 89: note = RuvC_P4
  SITE 92: note = RuvC_P5
  REGION 211..298: note = Tnp_domain
  SITE 219: note = Tnp_P1
  SITE 249: note = Tnp_P2
  SITE 257: note = Tnp_P3
  SITE 258: note = Tnp_P4
  SITE 270: note = Tnp_P5
MKITTIGIDLAKNIFQIHGVDTHGKVALRKQLKRAEMSPYFANLPPCLIGMEACGSAHHWARKLEGFGHTVKLMAPQFVKPYVKTNKNDMADAEAICEAVARPNMRFVSIKTIEQQAILSVHRARQGFVKARTAQANQIRGLLSEFGIVIPQGIHSVMKQIPEILEDGENELPGTFRHLIARLTDNLKEMDSQVDELEKQINLWHRQNEASRKLADIPGIGPITASAIVATVGKAQEFKNGRQLAAWMGLVPRQKSSGGKQNLLGISKRGDTYLRTLLIHGARSVIHHASNKNEAESWLSKLVNRRNKNIAAVGLANKNARIIWALLAHDRLFRLDYTAAAAAV

SEQ ID NO: 20297 - protein, 294 aa, unidentified
  source 1..294: note = protein_9a29c5f
  REGION 4..140: note = RuvC_domain
  SITE 39: note = RuvC_P2
  SITE 79: note = RuvC_P3
  SITE 81: note = RuvC_P4
  SITE 84: note = RuvC_P5
  REGION 175..259: note = Tnp_domain
  SITE 183: note = Tnp_P1
  SITE 212: note = Tnp_P2
  SITE 220: note = Tnp_P3
  SITE 221: note = Tnp_P4
  SITE 232: note = Tnp_P5
MARLFDEASGHSQRIDNQADAIAAYVAGLHPDRDFVVMEATGVHDRLLRHALAKAGIAFSRHNPAHTHHYAKSTRRRAKTDRLDARMLSSYGRRYHPEAEPVPREEGEHLQSLARHRDHLVEMRAKLKKLRSEAFDAVVIDDLEDMIASCDTRIKAIESRLAEAIRQSEETARDNALMVSVPGVSKVTAFSLLAHLPELGLRSPKSIAALAGLAPFDNKSGKLNRRSQIQGGRSRVRRALYMAALGAIRACERFRDFYTAIAARSGSKKLAIIAVARKLLVVLNAIIRDKKAFA

SEQ ID NO: 20298 - protein, 369 aa, unidentified
  source 1..369: note = protein_48fa54d
  REGION 35..177: note = RuvC_domain
  SITE 38: note = RuvC_P1
  SITE 81: note = RuvC_P2
  SITE 116: note = RuvC_P3
  SITE 118: note = RuvC_P4
  SITE 121: note = RuvC_P5
  REGION 240..326: note = Tnp_domain
  SITE 248: note = Tnp_P1
  SITE 278: note = Tnp_P2
  SITE 286: note = Tnp_P3
  SITE 287: note = Tnp_P4
  SITE 299: note = Tnp_P5
MGWTPPPDNGIDVPEWKCQQPLKPEGASTMKITTIGLDLAKNVFQVHGVNEHGKAVLRKQLRRDQVAAFFANLPACLVGIEACASAHHWARKLQSMGHTVKLMAPQFVKPYVKSNKNDAADAEAICEAVSRPSMRFVPIKNIEQQAVLALHRARQGFVKARTAQANQIRGLLGEYGLIVPQGIHYIADRVPALIEDAAVELPGAFRLLISRLLDHLKVLHQQVDEIEAQIKAWHRANDASRRLEKVPGIGPLTASALVATVGDAKNFDNGRQFAAWLGLVPRQHSSGGKANLLGMSKRGDAYLRTMLIHGARSVIFRSTQRADTESWLFKLTTRRNKNIAAVALANKTARTIWALLVHDREFRPGYAAA

SEQ ID NO: 20299 - protein, 338 aa, unidentified
  source 1..338: note = protein_b9e02d0
  REGION 7..149: note = RuvC_domain
  SITE 10: note = RuvC_P1
  SITE 53: note = RuvC_P2
  SITE 88: note = RuvC_P3
  SITE 90: note = RuvC_P4
  SITE 93: note = RuvC_P5
  REGION 212..298: note = Tnp_domain
  SITE 220: note = Tnp_P1
  SITE 250: note = Tnp_P2
  SITE 258: note = Tnp_P3
  SITE 259: note = Tnp_P4
  SITE 271: note = Tnp_P5
MTHITTIGLDLAKNVFHLVGCNSHGKVIIKKRLRRVQLTRFIVNLSPCLIGMEACSGAHHWARQFRAMGHQCKLMPAQYVKAFVRGNKNDYNDALGISEAVRQPEMRFVAIKTEAQQDTQALYRLREQRIKERTGLGNQLRGLLAEHGIVVGRGINVLRRQLPELLGATDNGLSPLFRELLNQGYQQLQQLDKHIIDYTKILTRLNQQNEACQRLQTIPGFGPINASVFASVVGNGSAYRCGRDVSASLGIVPGQHSTGGKNTLLGISKRGDSYLRCLLIHGARAVVIQAATKTDRLSLWINRIRAERGYNKATVALANKMARMGWAILRNNTTYQIA

SEQ ID NO: 20300 - protein, 343 aa, unidentified
  source 1..343: note = protein_21eb556
  REGION 7..149: note = RuvC_domain
  SITE 10: note = RuvC_P1
  SITE 53: note = RuvC_P2
  SITE 88: note = RuvC_P3
  SITE 90: note = RuvC_P4
  SITE 93: note = RuvC_P5
  REGION 212..303: note = Tnp_domain
  SITE 220: note = Tnp_P1
  SITE 250: note = Tnp_P2
  SITE 258: note = Tnp_P3
  SITE 259: note = Tnp_P4
  SITE 271: note = Tnp_P5
MQAITTIGLDIAKSVFQVHGIDAEGNVIVRRQLKRRYVLTFFQKLPPCLVGIEACASSHHWSRELQALGHTVRLMPPAYVKPYVKRHKNDATDAEAICEAVTRPNMRFVATKTPEQQSCLTLHRTRHLFIRQQTSVINAIRAHLAEFGIVAPIGRLGVEQLLGVVSDASDKRLPDVARACVAALGAQLQRLKVQILEFDRMIRAWHRSSEASRRLDDIPGVGPALATALVASVADPKMFRSGRDFSAWIGLVPKQNSSGGKDRLGNISKRGDRYLRSLFTTGALAVIRYAKIHGTKHRPWLTALLTRRPTKVAAIALANKIARMAWAMMARGERYKEPAALAA

SEQ ID NO: 20301 - protein, 347 aa, unidentified
  source 1..347: note = protein_c442036
  REGION 7..147: note = RuvC_domain
  SITE 10: note = RuvC_P1
  SITE 53: note = RuvC_P2
  SITE 88: note = RuvC_P3
  SITE 90: note = RuvC_P4
  SITE 93: note = RuvC_P5
  REGION 210..296: note = Tnp_domain
  SITE 218: note = Tnp_P1
  SITE 248: note = Tnp_P2
  SITE 256: note = Tnp_P3
  SITE 257: note = Tnp_P4
  SITE 269: note = Tnp_P5
MEQIIRIGMDTSKHVFQLHGVSAAELPILRKKMRRREMVDFFAKCPPTVIGIEACAASHHWARLLRGFGHEVKLIAPQLVKPYVKRGKNDAADAEALCEAMSRPTMRFVPVKSVDQQAALMLVGLRERAVTAQTQIANTIRGYAAEFGLTAAQGMSHIPLLLERMMINDSISALARELFASLAEEFAQLGERLKEVEAKVMAWYRNNERCRRLAKIPGVGPIGAILLVMKAPAPEQFSSGRQFAAWIGLTPKDHSTAGKVRLGVITRAGDETLRKTLVVGATSSLRQVRAGRGRNASSWLVELLKRKPPKLAAIALANKVARIAWKMMVTGEDYKGDAARPALACAT

SEQ ID NO: 20302 - protein, 324 aa, unidentified
  source 1..324: note = protein_c23587f
  REGION 4..152: note = RuvC_domain
  SITE 7: note = RuvC_P1
  SITE 58: note = RuvC_P2
  SITE 98: note = RuvC_P3
  SITE 100: note = RuvC_P4
  SITE 103: note = RuvC_P5
  REGION 198..284: note = Tnp_domain
  SITE 206: note = Tnp_P1
  SITE 235: note = Tnp_P2
  SITE 243: note = Tnp_P3
  SITE 244: note = Tnp_P4
  SITE 257: note = Tnp_P5
MFYLGIDVAKKTLDCMLLDTSTGKLKSKGGISNTAAGFVQLLNWLAEKNAVAPHVVMEPTGLYHEAAALALADAGLIVSLVNPAQLRAFAQGLGVKNKTDKEDSAVLARFGAAQNPAPWQPPSPSARRLKALLARRDAVADDLQRECNRKEANDFSSTPEAVSDSIAESIAFLKAELKRLEKMIAKHINDDPDLRKKKELLETIPGVGRRVSTHMTTLFAGRTFERAEQLAAYLGLVPVVWESGSSVRGRPHMSKAGPAYVRKVLYMPAVVARSCNPHIKALNERLLAKGKSKMAAIGAAMRKLVHLCFGVIHSGKPYNPNFAM

SEQ ID NO: 20303 - protein, 318 aa, unidentified
  source 1..318: note = protein_ad3e9cf
  REGION 7..155: note = RuvC_domain
  SITE 10: note = RuvC_P1
  SITE 54: note = RuvC_P2
  SITE 94: note = RuvC_P3
  SITE 96: note = RuvC_P4
  SITE 99: note = RuvC_P5
  REGION 193..277: note = Tnp_domain
  SITE 201: note = Tnp_P1
  SITE 230: note = Tnp_P2
  SITE 238: note = Tnp_P3
  SITE 239: note = Tnp_P4
  SITE 250: note = Tnp_P5
MSDSVFVGIDVSSQTLEVASSAAAKTWQVSNDAVGIEQLTAQLSSRQPALVVLEATGGYEFEAACALQASGLAVAVVNPRTARDFARAMGALAKTDALDARMLAAFARVLHQHPERERFVKPLADAELQRLQALVLRRRQLVQMITSERQRMRVSHAAARPSIERVIEFLKTELGDSDADVAAHVGQHHATLAQALASVPGIGAASVAVLLAELPELGKLDRRRIAALVGVAPLNRDSGQMRGQRSIWGGRADVRRTLYMATLTAVRHNAPLKAHYERLLAVGKRKKVALVACMRKLLTMLNAIAKNGSSWDPSLHQA

SEQ ID NO: 20304 - protein, 404 aa, unidentified
  source 1..404: note = protein_edab886
  REGION 4..160: note = RuvC_domain
  SITE 7: note = RuvC_P1
  SITE 57: note = RuvC_P2
  SITE 97: note = RuvC_P3
  SITE 99: note = RuvC_P4
  SITE 102: note = RuvC_P5
  REGION 270..356: note = Tnp_domain
  SITE 278: note = Tnp_P1
  SITE 309: note = Tnp_P2
  SITE 317: note = Tnp_P3
  SITE 318: note = Tnp_P4
MIFVGIDWSETHHDACVLDVDGRVLAKGRVPEGVDGVGKLHEMMGAHAEDPSEVVVGIELDRGLLVGALVAAGYAVHAINPLSVDRYRDRHRTSGAKSDPGDAKVLADLVRTDRHLHRGVAGDTELAEAMKVLARAHQSLIWSRQRQLNQLRNALREFYPAALEAFGTDLASTDALAVLEVAPTPAEGQALSTTRIVAALKRGGRRRRITERAEEIKAALRSSQLEAPAVLARAYGDVVRSIVRIVAEMTAQIESLAGQLEASFEVHPDAEILRSLPGLGVVLGARVLAEFGDDPFRYGDPKARKNYAGTSPITKASGRSKVALARFARNRRLADALQMWAFCSLTSSPGARRYYDAHRAKGHTHQRALRSLANRWVGILHGCLHHRERYSEATAWPATIEDAA

SEQ ID NO: 20305 - protein, 401 aa, unidentified
  source 1..401: note = protein_5823292
  REGION 10..164: note = RuvC_domain
  SITE 13: note = RuvC_P1
  SITE 62: note = RuvC_P2
  SITE 102: note = RuvC_P3
  SITE 104: note = RuvC_P4
  SITE 107: note = RuvC_P5
  REGION 270..356: note = Tnp_domain
  SITE 278: note = Tnp_P1
  SITE 308: note = Tnp_P2
  SITE 316: note = Tnp_P3
  SITE 317: note = Tnp_P4
  SITE 329: note = Tnp_P5
MAAQREMAWAGIDVGKTHHWACVVNADGKPLLSVKIPNDETEIVAFLANAGALASHLVWAVDIIGAPSALLLALLARAGQSVRYASGRVVAAMSAAYVGEGKTDAKDAYVIAETARLRGDLAVIDADTDLVRNLAVLTAHRADLIADRVRMINRLRDLMTSVFPSLERAFDYSSHKGALVLLTGYASPDRIRRVGQTRLAGWLRNRNVRRSADVAARAITAAKAQSIVLPGQELTASIIAELAGGILALDERLKALDAQIAETFAEHPQAAIVQSMPGFGPFLGASLLVGTGDLRAFSSAGHLAAAAGLVPVPNDSGRRTGNLHRPLRYSRPLRHVFYLSAQTSMMRAGPNRDYYLKKRARGATHSQAIIALARRRVDVLWALLRENRTWTTTPPALAQAT

SEQ ID NO: 20306 - protein, 316 aa, unidentified
  source 1..316: note = protein_8e12f5a
  REGION 7..152: note = RuvC_domain
  SITE 10: note = RuvC_P1
  SITE 54: note = RuvC_P2
  SITE 94: note = RuvC_P3
  SITE 96: note = RuvC_P4
  SITE 99: note = RuvC_P5
  REGION 190..274: note = Tnp_domain
  SITE 198: note = Tnp_P1
  SITE 227: note = Tnp_P2
  SITE 235: note = Tnp_P3
  SITE 236: note = Tnp_P4
  SITE 247: note = Tnp_P5
MSELVYVGIDVAKSSFEVAVTGEVQTLRLGNDEAGYTELCQVLGPLAPRLVLLEATGGYEQDLALALAAAGLRVSVINPRQARDFARCVGKLAKTDRIDALALRDFAAMLDAQGHEPRALADEQQRELTALVTRRRQLVAMLVAERQRLSVAHPKAKRSILQIMDAIAAQLHNVDGELRDHIRAHHADLAALLTSVKGVGPTTASTLLAQLPELGQLNRKQITSLVGLAPMNRDSGTLRGQRHIFGGRADVRRVLYVAALVGTRFNPVLKAFYAKLVAGGKPKKVALVACMHKLLVILNAIARTRSPWSNEIAMVV

SEQ ID NO: 20307 - protein, 343 aa, unidentified
  source 1..343: note = protein_a1f741c
  REGION 6..147: note = RuvC_domain
  SITE 9: note = RuvC_P1
  SITE 52: note = RuvC_P2
  SITE 87: note = RuvC_P3
  SITE 89: note = RuvC_P4
  SITE 92: note = RuvC_P5
  REGION 211..294: note = Tnp_domain
  SITE 219: note = Tnp_P1
  SITE 249: note = Tnp_P2
  SITE 257: note = Tnp_P3
  SITE 258: note = Tnp_P4
  SITE 270: note = Tnp_P5
MSIAILGVDLGKTSCSMVGVDGRGTVVMRRSLRRQTLIDYVARLPACIVAMEACCGAHHLGRLFAARGHEVRLMSPEYVRPYVKAQKNDDRDAEGIAEAASRPTMRFVELKSQEQLDIQTLHRARSRLVAERTGLINQLRAIMLERGVIFPVGRRKLEQGVDGLLAKGDGTLSPRMSRLIAQMRAEWRELDAKIEALNGEFVEMARSDAAMRRLTTIPGVGVLNATALVAAVGDASSFGKARDLGAWLGLVPRQHTTGGKPRLLGISKRGNTYLRTLLIHGARAALPSLSQGDTPLGRWLKAMIERGVHRNVVVVALANKLARVAWATLRKEASFERGYPVAV

SEQ ID NO: 20308 - protein, 375 aa, unidentified
  source 1..375: note = protein_5eca986
  REGION 7..148: note = RuvC_domain
  SITE 10: note = RuvC_P1
  SITE 53: note = RuvC_P2
  SITE 88: note = RuvC_P3
  SITE 90: note = RuvC_P4
  SITE 93: note = RuvC_P5
  REGION 210..294: note = Tnp_domain
  SITE 218: note = Tnp_P1
  SITE 248: note = Tnp_P2
  SITE 256: note = Tnp_P3
  SITE 257: note = Tnp_P4
  SITE 269: note = Tnp_P5
MEKLIRIGMDTSKSVFQLHGVDAMERPALVKKLHRRQVIAFFKKQPRLKVGLEACGGAHHWGRELGALGHDVFLIPPQHAKAYLRRGKHDAADADAICEAMSRPRTRFVPVKTAEQQAAQMLAGVRDQLIRRRTQLSNTIRGHATEFGLIAPTGLAKIEPLLVHIATEESVPALARELFEVLAEDYRAVGLRIAKVDAKLMAFHRQDEVSRRLAQVPAIGPIGATLLSIKVPDAKLFRSGRDFAAWIGLTPKNHSTAGKTRLGAITRAGDAKLRSVLVVGAMAVIQQLKRRKEPPPSWLGELLKRKPAKLAAVALANKTARIAWKLMVTGERYDPRPNPATVARCSAPSRPLRAADRGGQGPALTAPALRAPAYP

SEQ ID NO: 20309 - protein, 304 aa, unidentified
  source 1..304: note = protein_fd7dfca
  REGION 4..147: note = RuvC_domain
  SITE 7: note = RuvC_P1
  SITE 50: note = RuvC_P2
  SITE 90: note = RuvC_P3
  SITE 92: note = RuvC_P4
  SITE 95: note = RuvC_P5
  REGION 182..266: note = Tnp_domain
  SITE 190: note = Tnp_P1
  SITE 219: note = Tnp_P2
  SITE 227: note = Tnp_P3
  SITE 228: note = Tnp_P4
  SITE 239: note = Tnp_P5
MNGIGIDVSKRQLDVGTTNRETLQVTNSPSGFAELDAWLKKHPSNQIVLEATGGYEQPVLDFLHRAGHRVVRANALRARKLAQGLGQAAKTDRLDAYALAQMAALVELPAYQPLGPWQRKLREFVRARRQVMQALTVARQQQEMVGDRELRRLLQANITRLQTLAERLGKQIAEQVAQQPELTVLKSMKGVGPVLQAVLASYLPELGHISGKAIASLVGVAPMSHDSGTMRGKRSTHGGRAEIRQVLYMASMSAMQHEPRLRDFYRSLRARGKEAKVAIVAVMRKMLVILNARVRDAQRGSTPA

SEQ ID NO: 20310 - protein, 343 aa, unidentified
  source 1..343: note = protein_a8ff684
  REGION 6..150: note = RuvC_domain
  SITE 9: note = RuvC_P1
  SITE 54: note = RuvC_P2
  SITE 89: note = RuvC_P3
  SITE 91: note = RuvC_P4
  SITE 94: note = RuvC_P5
  REGION 213..300: note = Tnp_domain
  SITE 221: note = Tnp_P1
  SITE 251: note = Tnp_P2
  SITE 259: note = Tnp_P3
  SITE 260: note = Tnp_P4
  SITE 272: note = Tnp_P5
MKLIRVGVDLAKNVFQLHGVDRDERPVWRRRLSRAEWLKALQETLEPGCEIGMEACAGSHHWARLLEAKGYRVKLIAPQFMKPYVKSNKNDANDAEAICEAMSRPSMRFVTVKSVEQQDIQAAHRIRSGLIEARTAKTNQIRGLVSEYGLVAPKQIASLRTGIPDWLEDAENGLTARFRRLLHGLWQDLQALDTRIGELDREIQQIARSVPAAQRLQQLRGVGPMIATALVAAVGRGEQFANGRQMAAALGLTPRQQSSGGRERLLGISKRGDSYLRMLLIQGARSALQTAGNKTDRLSKWITSLCARSHPNVATVALANKTVRIAWALLSRESDYQIDYVAA

SEQ ID NO: 20311 - protein, 347 aa, unidentified
  source 1..347: note = protein_d6ce14d
  REGION 7..147: note = RuvC_domain
  SITE 10: note = RuvC_P1
  SITE 53: note = RuvC_P2
  SITE 88: note = RuvC_P3
  SITE 90: note = RuvC_P4
  SITE 93: note = RuvC_P5
  REGION 210..297: note = Tnp_domain
  SITE 218: note = Tnp_P1
  SITE 248: note = Tnp_P2
  SITE 256: note = Tnp_P3
  SITE 257: note = Tnp_P4
  SITE 269: note = Tnp_P5
MDKIIRIGMDTSKHVFQLHGVNAAEQPVLRKKMRRKEMVDFFAKYPPTVIAIEACGASHHWARLLEGFGHEVKLIAPQLAKPYVKRGKNDAADAEALCEAMSRPTMRFVPVKSAEQQAALMLVGMRERAVATRTQLANTIRGYAAEFGVTAAKGLCHIPRLLDRIMADETIPALARDLFASLAAEFAQLKERLKGIEAKLMTWYRSDECCRRLATIPGVGPIGAVLLVMKAPAPELFTSGRQFAAWMGLTPRDHSTAGKVRPGVITRAGDEMLRKTLVVGATSLLRQVRAGKGRNASPWLIDLLRRKPPKLVAVALANKIARIAWKMMMSGEAYKNTIARPVVACAA

SEQ ID NO: 20312 - protein, 312 aa, unidentified
  source 1..312: note = protein_b94165d
  REGION 6..151: note = RuvC_domain
  SITE 9: note = RuvC_P1
  SITE 53: note = RuvC_P2
  SITE 93: note = RuvC_P3
  SITE 95: note = RuvC_P4
  SITE 98: note = RuvC_P5
  REGION 189..273: note = Tnp_domain
  SITE 197: note = Tnp_P1
  SITE 226: note = Tnp_P2
  SITE 234: note = Tnp_P3
  SITE 235: note = Tnp_P4
  SITE 246: note = Tnp_P5
MTDITIGADISKDHVDLHMLPEGRTLKVANDRKGFAAILKWIGSKAVQRIVYEPTGPYHKAFERFMVVQGLPLSKVNPRLARRFCEATGRLAKTDRIDACLLVRYGALLETRILQANTQVLNDLKELHTARLALIKDRTAAKNRAKTLSSPLLKKHNVDRLRQIEHQITAIDGAITALIAKDPSLKARFDILVSIPGVSQITGFTLLIDMPELGQIDEKAAAALAGLAPMNRQSGRWTGRAFITGGRAIVRKALYMPALVASRFNEDLKAKYDQLKAAGKPPKVAITAIMRKLIVLANALLRKNQKWTPKHP

SEQ ID NO: 20313 - protein, 405 aa, unidentified
  source 1..405: note = protein_c102438
  REGION 6..162: note = RuvC_domain
  SITE 9: note = RuvC_P1
  SITE 59: note = RuvC_P2
  SITE 99: note = RuvC_P3
  SITE 101: note = RuvC_P4
  SITE 104: note = RuvC_P5
  REGION 277..364: note = Tnp_domain
  SITE 285: note = Tnp_P1
  SITE 315: note = Tnp_P2
  SITE 323: note = Tnp_P3
  SITE 324: note = Tnp_P4
  SITE 337: note = Tnp_P5
MKMNAVGIDVSKGKSTVAILRPQGLVVASPYNVPHTGSDLKELTRAIKKLRGETRVVMEATGNYYEPIARFLHEQGIFVSVVNPMLVSDFGGNTLRRPKTDKKDAVKLALYALTYWLDLKQYEPQEDLRKSLKMLNRQYQFAVKQQTMLNNNLISQLDLTFPGINKLFTSPAKEQDGHLKWVDFVSEFPHCDCVAKLTPSVFKKKYCRWCEKSGYHYRGSKADEIHAFAREAVSAVPASDAIALIIKQAASILNAALENAAALHHEMKHIAEMLPEYETVMSMYGVGDKTGPQLMAEIGDTRRFHSRRAITAYFGYDSENDDSGQHISKSNPITKKGNSALRRTLFMIMIALIQNQPEDNPVYQFLDKKRSEGKHYYCYMTAAANKFLRIYYAKVNEVLNALPTG

SEQ ID NO: 20314 - protein, 346 aa, unidentified
  source 1..346: note = protein_858f280
  REGION 6..147: note = RuvC_domain
  SITE 9: note = RuvC_P1
  SITE 52: note = RuvC_P2
  SITE 87: note = RuvC_P3
  SITE 89: note = RuvC_P4
  SITE 92: note = RuvC_P5
  REGION 211..296: note = Tnp_domain
  SITE 219: note = Tnp_P1
  SITE 249: note = Tnp_P2
  SITE 257: note = Tnp_P3
  SITE 258: note = Tnp_P4
  SITE 270: note = Tnp_P5
MKITTAGIDLAKNVLQVHGVDEHGRAVLKKQLKREQMAVFFANLPPCLIGMEACGSAHHWARKLQGYGHTVRLMAAQFVKPYVKTNKNDAADAEAICEAVRRPNMRFVPIKNVEQQAVLSLHRVRQSFVKARTAQGNQIRGLLAEFGLIIPVGMANIAKRVPELIEDASNELPGSFRLLIDRLMDHLKELDRQVSELEAQIVVWHRGNAASSRLQKLPGIGPITASALVASLGDAKNFDSGRQVAAWLGLVPRQHSSGGKNVLLGMSKRGDAYLRTLLIHGARSVIQAAQRKSEPDTGSWLHKLLARRNANVAAVALANKNARRVWALLAHGREFRANYVPEMACR

SEQ ID NO: 20315 - protein, 358 aa, unidentified
  source 1..358: note = protein_0736085
  REGION 17..165: note = RuvC_domain
  SITE 20: note = RuvC_P1
  SITE 69: note = RuvC_P2
  SITE 105: note = RuvC_P3
  SITE 107: note = RuvC_P4
  SITE 110: note = RuvC_P5
  REGION 235..323: note = Tnp_domain
  SITE 243: note = Tnp_P1
  SITE 274: note = Tnp_P2
  SITE 282: note = Tnp_P3
  SITE 283: note = Tnp_P4
  SITE 296: note = Tnp_P5
MMTTNHATPQDPTPVVAGVDTHQRTHHAVVLTETGVLLADREFPVSRAGYAALVDWVAGHGPITAIGVESTGSYGAGLTVHLLAAGIEVIEVNRPDKTTRARRGKSDVIDAESAARAVLNGTATARPKVKTGVVEAIRVIKVPRDRAVKDRTAAYGQLRDLITTAPAVIHDELIGCTARQRVTRAAGYRPDGARLADPVQATKHALRMIARRIQALDAEITAADKTLRVLTRQAAPSVMAMPQVGVQTTAQLVITAGQNIERMHSEAAFAALCGVSPIPASSGHTSSGRVRLNRGGDRQANSALYMVIIGRLRRDPDTQAYFHRRTSEHKTRAETIRCLKRHLARTIYRNLKTDLMTT

SEQ ID NO: 20316 - protein, 273 aa, unidentified
  source 1..273: note = protein_aa33d62
  REGION 6..153: note = RuvC_domain
  SITE 9: note = RuvC_P1
  SITE 53: note = RuvC_P2
  SITE 93: note = RuvC_P3
  SITE 95: note = RuvC_P4
  SITE 98: note = RuvC_P5
  REGION 188..251: note = Tnp_domain
  SITE 195: note = Tnp_P1
  SITE 224: note = Tnp_P2
  SITE 234: note = Tnp_P3
  SITE 235: note = Tnp_P4
MAKDTIGIDVSKDSLDAFWHSRTEACCLPNTPEGFRQLYDWLANEEDFLIVFEATGAYPRGLEWYLSLAELPFIKVNPKQARRFAQAIGRLAKTDSVDARMLARMGVVLDLAPQVVEGEDVHDLRELLTARRALVKDQVTAKTRLATALDPLAREQLGRRIEDIGADIQALDEVIAQIAKQRGEERICRLMTILGIGRLTATTMLIDMPELGQLDGKKITALAGLAPMSSNRESGRARRGSPGVGHQFGARSTCPHLSPSASTGTFTTSISNY

SEQ ID NO: 20317 - protein, 411 aa, unidentified
  source 1..411: note = protein_d746b46
  REGION 9..165: note = RuvC_domain
  SITE 12: note = RuvC_P1
  SITE 62: note = RuvC_P2
  SITE 102: note = RuvC_P3
  SITE 104: note = RuvC_P4
  SITE 107: note = RuvC_P5
  REGION 280..367: note = Tnp_domain
  SITE 288: note = Tnp_P1
  SITE 318: note = Tnp_P2
  SITE 326: note = Tnp_P3
  SITE 327: note = Tnp_P4
  SITE 340: note = Tnp_P5
MEAAVITAVGIDVSKSKSTVAVRRPGGEIVLRPCEIHHTNSDLKKLASTLKKLEGDIRIVMEHTSTYWRPIALTLKEAGFFVSVVNAMLIHDFSDNTIRKLKTDRADALKIANYALTFWDTLPPFNNEEETRLLLKMQSRANERITATATALRNGLIALADQTFPGVNIAFDPNTKNANGHEKWVDFFLRYWHKDCVCQYSMEAFTESYRGWCKRKNYKFRTDTAHKIYLLAQEGMATLPKCESTKMLITQACKSLNAVCEAKQSTQLEMQRLAAMLPEYEVVVQMEGAGPITGPALMAEIGDVRRFKNKKALVAFAGIDAPPFQSGAFESKSRHVSKRGSPHLRRTIFIISNIILTRSNPENAVYCFMDKKRSEGKHYYVYTVAGSAKFLRVYYARVTEFLRSQPSSDAC

SEQ ID NO: 20318 - protein, 332 aa, unidentified
  source 1..332: note = protein_e71aca7
  REGION 12..168: note = RuvC_domain
  SITE 15: note = RuvC_P1
  SITE 67: note = RuvC_P2
  SITE 107: note = RuvC_P3
  SITE 109: note = RuvC_P4
  SITE 112: note = RuvC_P5
  REGION 207..293: note = Tnp_domain
  SITE 215: note = Tnp_P1
  SITE 244: note = Tnp_P2
  SITE 252: note = Tnp_P3
  SITE 253: note = Tnp_P4
  SITE 266: note = Tnp_P5
MNKASIQEMNTIGIDVSKAKIDCAWLREEGKLKFKVFPNTLLGCNDLIKWSLKNTGLEINQLHFIMEATGIYHEQLAMQLYNADTMVSVANPAQVKFYAQGLGVRTKNDKKDSAVLARYGLKETPKLWQPEPVEIRTLKALIARLDGIEKDLQREKNREEKAIISKAPDEVLNSVKQMIGLLETEQKRLDKLIEEHINKHKNLKENKALLKSIPGVGKVVATRMLMLMGSREFKSASQCAAYLGLVPVERLSGTSVKGRSRLSKAGNPAIRAKLYMAAVVATRYNPDIQAQYERLTKKGKSKMSALGAAMRKLVQICFGVLKHQKPYQPQVG

SEQ ID NO: 20319 - protein, 340 aa, unidentified
  source 1..340: note = protein_f8d96e6
  REGION 6..147: note = RuvC_domain
  SITE 9: note = RuvC_P1
  SITE 52: note = RuvC_P2
  SITE 87: note = RuvC_P3
  SITE 89: note = RuvC_P4
  SITE 92: note = RuvC_P5
  REGION 210..297: note = Tnp_domain
  SITE 218: note = Tnp_P1
  SITE 248: note = Tnp_P2
  SITE 256: note = Tnp_P3
  SITE 257: note = Tnp_P4
  SITE 269: note = Tnp_P5
MNIKRIGLDLAKNIFQIHAVDHHEQVVLRQALRRDAMTAFFTRLSPCLIGIEACGSSHYWARELTRMGHSVRIIPPQFVKPYLKGNKNDANDAGAICEAISRPGMRFVAMKNERQQTLQAEHRVRARLIRERTALSNEIRGFLGEFGLVLPVGINRLRKALPEILSEQDKWDDRFMRLLCELAEELKGLDERVAHHDSWLQQTAREDIRVKRLLAIEGMGPVVASALVAAVGDARQFRNGREMAAYLGLVPRQHSSGGKERLGHISKRGDSYVRTLLIHGARSVLKACKEKTDRRSEWLKALAERRNRNIATVALANKNARIAWSILSREEDYHGLQAAG

SEQ ID NO: 20320 - protein, 411 aa, unidentified
  source 1..411: note = protein_8dcb241
  REGION 11..166: note = RuvC_domain
  SITE 14: note = RuvC_P1
  SITE 66: note = RuvC_P2
  SITE 103: note = RuvC_P3
  SITE 105: note = RuvC_P4
  SITE 108: note = RuvC_P5
  REGION 274..360: note = Tnp_domain
  SITE 282: note = Tnp_P1
  SITE 313: note = Tnp_P2
  SITE 321: note = Tnp_P3
  SITE 322: note = Tnp_P4
MQRGTFLRWYAGIDWADTHHDALVIDEKGGQVASLRVDHTPQGMSKLNTFLEQIIGTAPKEQMACIIETTHGLLIAHLLEAGWPVYPVNPRTVDRRRSASGAKTDTIDAYLLAKTGRADLADLHRLTPDSEKVRELKQLTRDQDALIQMQTRLVNQLTACLKAYYPVGLELFTKLQQKSTLVFLQTYPTPQAAMAASGEQIEHVLRAAKHSNPSLVAAQIVERLQQPHLQADVVTTHTKSRLMVALVSQLLPLIAQIAQYNKEIATLFLTHEDHEIFASLPRAGKRLAPRRLSEIGDDRTRYQDASSLQALGGTSPVLFQSGMYSKAHRRLGCIKPLRNALHQFAWQTTQSEPWAMRYYQRKRAEGKSHTVAVRALANVWVRIIFAMWLHHRCYETATFEHAQQQHARPAA

SEQ ID NO: 20321 - protein, 403 aa, unidentified
  source 1..403: note = protein_aca997d
  REGION 4..160: note = RuvC_domain
  SITE 7: note = RuvC_P1
  SITE 57: note = RuvC_P2
  SITE 97: note = RuvC_P3
  SITE 99: note = RuvC_P4
  SITE 102: note = RuvC_P5
  REGION 269..355: note = Tnp_domain
  SITE 277: note = Tnp_P1
  SITE 308: note = Tnp_P2
  SITE 316: note = Tnp_P3
  SITE 317: note = Tnp_P4
MVYVGVDWAEAHHDICVVDEEGHVLAKRRVPEGLEGVGKLHALVAEHAEDPASVVIGIETDRGLLVGSLVAAGYQVYAINPLASSRYRDRHATSGAKSDSGDARVLADLVRTDRHKHRPLAGDSNLAEAVQVLARAHQGLVWTRQRQANQLRNALREFYPGALAAFDDLDAADTVAILERAPTPVRGRALSQAKIISALRQGGRARNLEAKAAQIQAQLRQPQLEAPTLIAEAYGHSVAAIVAVIKQLNLQIAALEQELAANFEMHPDAEIYLSLPGLGLVLGARAMAEFGDDRTRFLNPKARKNYAGTAPITKASGTRKVVLARVARNRRLADACYQWAFSALTRSEGARHRYDVLRARGQTHHQALRALGNRLVSILHGCLTNRQIYSEHLAWLHQSELAA

SEQ ID NO: 20322 - protein, 345 aa, unidentified
  source 1..345: note = protein_db64b5d
  REGION 5..152: note = RuvC_domain
  SITE 8: note = RuvC_P1
  SITE 55: note = RuvC_P2
  SITE 92: note = RuvC_P3
  SITE 94: note = RuvC_P4
  SITE 97: note = RuvC_P5
  REGION 212..300: note = Tnp_domain
  SITE 220: note = Tnp_P1
  SITE 250: note = Tnp_P2
  SITE 258: note = Tnp_P3
  SITE 259: note = Tnp_P4
  SITE 271: note = Tnp_P5
MKYYAGLDVSVKETSVCIIDEVGKICREVKVPSHPDDLIRVLQDPAWQLTRVGLEAGPLSQWLFSGLAEAGLPTICIETRHTKAFLKAQVNKSDRNDARGIAQMMRVNLFRPVHVKTLTSQKRRVLLSARKLLQEKAVAFENDIRGLLRNFGLKVGAVGAVKFEERIRELVEDVPEIRDIIEPLLAARRKLREEFVKLHRKLLSIVRGDEVCQRLMTIPGVGPVVSLAFRATIDVPARFSNSKAVGPALGLTPVLNQSGESRRVGRVSLCGDGMMRTLLYEAAQCLLTRVTKWSWLKAWAMNVAKRRGCQKAVVALSRRLAVIMHRMWSNGTEFRWTRESLPAVA

SEQ ID NO: 20323 - protein, 354 aa, unidentified
  source 1..354: note = protein_0d0933b
  REGION 12..152: note = RuvC_domain
  SITE 15: note = RuvC_P1
  SITE 58: note = RuvC_P2
  SITE 93: note = RuvC_P3
  SITE 95: note = RuvC_P4
  SITE 98: note = RuvC_P5
  REGION 217..302: note = Tnp_domain
  SITE 225: note = Tnp_P1
  SITE 255: note = Tnp_P2
  SITE 263: note = Tnp_P3
  SITE 264: note = Tnp_P4
  SITE 276: note = Tnp_P5
MPKSASTQIAVIGIDIGKNSFHVVGHDKRGSIVLRQKWSRGQIEARLANLPPCLIGMEACVGAHHLARKLAALGHDARLMPAKYVRPYAKGQKNDFNDAEAIVEAVQRPTMKFVATKTADQLDLQALHRVRERLVSQRTGIINQIRAFILERGIAVRQGVRFLRAELPIILASRTDVLSPRMLRVIEDLAGDWRRLDERIDNLSREIETIARQDAGCDRLMSVPGIGPIISSAVVAAIGSGDVFSKGRDFAAWLGLVPKQISTGDRTILGKISKRGNRYLRVLFVQAAWVVLVKPMSWERHGLKSWIEAAKKRLHHNVLAIALANKLARIAWAVLARGRGFEVTRTIDGSTQPA

SEQ ID NO: 20324 - protein, 337 aa, unidentified
  source 1..337: note = protein_989a3d0
  REGION 6..147: note = RuvC_domain
  SITE 9: note = RuvC_P1
  SITE 51: note = RuvC_P2
  SITE 86: note = RuvC_P3
  SITE 88: note = RuvC_P4
  SITE 91: note = RuvC_P5
  REGION 210..296: note = Tnp_domain
  SITE 218: note = Tnp_P1
  SITE 248: note = Tnp_P2
  SITE 256: note = Tnp_P3
  SITE 257: note = Tnp_P4
  SITE 269: note = Tnp_P5
MNNSVIGLDIAKNIFHMYSIGVDNKVIKKKLKRAEMLAFFATYQTSLIGIEACGGAHYWARELAKLGHEVILLNARYVKNFVVGNKNDYNDAQAIFDAVTRPNKRVVAVKTVEQQDIQLIHKIRQGYIDKRTALVNQIRGLLSESGIVIHQGINQVRKELPFILEDAENKLTPISRELFAEQYEELTKLDEKIKQQDQRITRLCANNEKAKRFLDVTGVGPMTASIVAADIGEGKGYVSSRDYAASLGVVPKQHSSGDKQVYLGISKRGNRYIRTLLIHGARAVLKNCTNKTDALSIWLQGLIERRGFNKAAVALANKNARILWSMAVTGKAYEVKA

SEQ ID NO: 20325 - protein, 342 aa, unidentified
  source 1..342: note = protein_4f604b0
  REGION 6..147: note = RuvC_domain
  SITE 9: note = RuvC_P1
  SITE 52: note = RuvC_P2
  SITE 87: note = RuvC_P3
  SITE 89: note = RuvC_P4
  SITE 92: note = RuvC_P5
  REGION 210..294: note = Tnp_domain
  SITE 218: note = Tnp_P1
  SITE 248: note = Tnp_P2
  SITE 256: note = Tnp_P3
  SITE 257: note = Tnp_P4
  SITE 269: note = Tnp_P5
MKDTMIGVDLAKSVYQLHGATMTGEIKFRKKLSRLQFCRFMADQSPAIVVLEASGSAHYWARELGKLGHEVKLIAPQYVRPFVKRQKNDAADAEAIVIAAQRPEMRFVVPKTEDQQARAVLFRFRERLVHQRTEQMNALRAILYEQGHSFPIGIVQLKRIKDLLDDPASNLPDLVREECQDLVAVIAEQTARIDAKTSKIKTLSSKTDVARRLQTIPGVGPLTALAVEAFAPAMENFKRGRDFAAWLGIVPRQHSSGGKARLGRVSKAGQADIRRLLIIGAMTRLNWLGQKTIQPGSWLARMLERKPKMLVAIALANKMARTIWAMLTREEDYRNPEQSAAA

SEQ ID NO: 20326 - protein, 347 aa, unidentified
  source 1..347: note = protein_e028faf
  REGION 17..173: note = RuvC_domain
  SITE 20: note = RuvC_P1
  SITE 76: note = RuvC_P2
  SITE 116: note = RuvC_P3
  SITE 118: note = RuvC_P4
  SITE 121: note = RuvC_P5
  REGION 218..304: note = Tnp_domain
  SITE 226: note = Tnp_P1
  SITE 256: note = Tnp_P2
  SITE 264: note = Tnp_P3
  SITE 265: note = Tnp_P4
  SITE 277: note = Tnp_P5
MRPKLLMENDYILRQCVGIDVSKETLVVTMCMFSFAEEAHYSDVKTFKNNKTGFNQLVKWSRKEAYTDKPLRYVMEATGVYHEELANHLVKIGCTVIIMMPNKAREFAIWEGMISKNDTIDSRALALVGCVKRSMRPWQPSKEIYHELRAMTRFAQDTKKLRLALKNHLEALEHSHQAEKSIVKHYEAMVSYLDKRLKMNLKNMKEKVASDEALNKKVENIITAPSLGFTSVITVIAETNGFALIQNRKQLTSYAGFDVKDNQSGNVKGTSRISKKGNSRIRAILYMPAVQAQLRSRHLKEAYDRIVQKHPDKKMIAVTAMERRLLLLIYALWKSDKPYDEDHDKKK

SEQ ID NO: 20327 - protein, 325 aa, unidentified
  source 1..325: note = protein_c06de9f
  REGION 4..149: note = RuvC_domain
  SITE 7: note = RuvC_P1
  SITE 52: note = RuvC_P2
  SITE 92: note = RuvC_P3
  SITE 94: note = RuvC_P4
  SITE 97: note = RuvC_P5
  REGION 191..278: note = Tnp_domain
  SITE 199: note = Tnp_P1
  SITE 229: note = Tnp_P2
  SITE 237: note = Tnp_P3
  SITE 238: note = Tnp_P4
  SITE 251: note = Tnp_P5
MTYIGIDISKAVFVAAFPSGSGYRTETFTNDTKGIRKFIGKLSADTHHCVMEATGNYCFLLLYLLDHAGIKASLVNPKKIKNYSRVMMSVTKTDDMDARLIADFGEKMKPAPYKLPSESLMLLKQKKTVIRQLQKQLIATKNLQSSLEPLPVKDKRCLASLKQTVAFLDKQIKHLEAELVQTAESVFDKQLKALTSIKGIGVTLATALIIATGGFTYFDNAKQLSRYIGICPTIEQSGSSINIRGHINRNGDENLRSMLYVAAWSASQHNKACKECYQRLRQRGKSGKLAMVAVANKLVRQAFAVATSNTSYIDGFVSTKPAATV

SEQ ID NO: 20328 - protein, 276 aa, unidentified
  source 1..276: note = protein_62b7ffa
  REGION 7..140: note = RuvC_domain
  SITE 10: note = RuvC_P1
  SITE 59: note = RuvC_P2
  SITE 99: note = RuvC_P3
  SITE 101: note = RuvC_P4
  SITE 104: note = RuvC_P5
  REGION 144..230: note = Tnp_domain
  SITE 152: note = Tnp_P1
  SITE 182: note = Tnp_P2
  SITE 190: note = Tnp_P3
  SITE 191: note = Tnp_P4
  SITE 203: note = Tnp_P5
MPYFYVIGMDVGKYFHHACVLDIDGTQVLSKRINQNEQSLRTLFSTYSANDHKVLVVVDQPNNNGRLTVAVAPDIGIDVRYLPGLAMRQLSRIQAGNAKTDIRDAYIIAHAGKNLPESLRSVDRVEKAFCQLKVLNGVDDIPHTQILLSMPGIGPKAAAQILMTVGNLSAFPTPGHLASYAGLSPRTRQSGTSIMSNSLNRTGNKKLKNAPCQSSFASIRFHERSRQFFERKRKEGKRHNAAVVALARRRINVLYAMMRNHEYYRDPAPAKEAAAA

SEQ ID NO: 20329 - protein, 344 aa, unidentified
  source 1..344: note = protein_eb3914d
  REGION 6..147: note = RuvC_domain
  SITE 9: note = RuvC_P1
  SITE 52: note = RuvC_P2
  SITE 87: note = RuvC_P3
  SITE 89: note = RuvC_P4
  SITE 92: note = RuvC_P5
  REGION 211..298: note = Tnp_domain
  SITE 219: note = Tnp_P1
  SITE 249: note = Tnp_P2
  SITE 257: note = Tnp_P3
  SITE 258: note = Tnp_P4
  SITE 270: note = Tnp_P5
MDVTRVGIDLAKQVFQVHGVSNRGAVLIRKQLKRAEAAKFFATLPPCLVGMEACASAHHWARTIQAHGHTVKLMAPQFVKPYVKSHKNDAADAAAICEAVSRPSMRFVPIKNIEQQSVLALHRVRQGFIKARTAQANQIRGLLGEFGLVVPQGIGYITQRVPALLERAAGDLPGAFRQLIGRLLEHLRLLSLQVTDIDEQVKAWHRSTEASRRLEKIPGIGPITASALVATVGDAKNFDSGRQLAAWLGLVPRQHSSGGKPMLLGMSKRGDPYLRTMLIHGARSVIYRATQKANPQNWAFRVTARRNKNVAAVALANKNARIVWALLAHDREFQGGYSSAAAAM

SEQ ID NO: 20330 - protein, 310 aa, unidentified
  source 1..310: note = protein_61148c0
  REGION 8..155: note = RuvC_domain
  SITE 11: note = RuvC_P1
  SITE 53: note = RuvC_P2
  SITE 93: note = RuvC_P3
  SITE 95: note = RuvC_P4
  SITE 98: note = RuvC_P5
  REGION 188..272: note = Tnp_domain
  SITE 196: note = Tnp_P1
  SITE 225: note = Tnp_P2
  SITE 233: note = Tnp_P3
  SITE 234: note = Tnp_P4
  SITE 246: note = Tnp_P5
MTSQVTVIGIDVAKETLSLCDARTGEVFELPNEARAIKAWLKTLPSHCAIAIEATGIYHVLVASLAHARKHRIYLINGFRLSNYRKGIGGRNKDDRSDAQLLARYLSHEQAQLEPWQPPSKVYCRLQALLHRRAVLVRNVTSLRQSFSQDPMLARALKPVLKRMAVLEQRLETQIQLVLEEAGLKEQSKRCQAIEGIGPLTAAALILAFLRGHFRNSDAFIAFLGLDVRLKESGRYSGRRKLTKQGDPEIRRLLHNAAMAAARTKRWRELYQGYLARGLKTTEALTVLARKLARIAFALMQTQTTYQPRG

SEQ ID NO: 20331 - protein, 383 aa, unidentified
  source 1..383: note = protein_0234e45
  REGION 5..150: note = RuvC_domain
  SITE 8: note = RuvC_P1
  SITE 55: note = RuvC_P2
  SITE 89: note = RuvC_P3
  SITE 91: note = RuvC_P4
  SITE 94: note = RuvC_P5
  REGION 247..333: note = Tnp_domain
  SITE 255: note = Tnp_P1
  SITE 286: note = Tnp_P2
  SITE 294: note = Tnp_P3
  SITE 295: note = Tnp_P4
  SITE 306: note = Tnp_P5
MKSVCGLDVHKDSVYLCILSEFGELIEKVFGVLTYELEEMRDLMLHHHVVEVSMESTSVYWIPIWRVLFPHFKLNLANPYFIKQLPGRKSDVKDAQWIAECTMKELVRSSFVPPEIIQQLRQYDRRIFDLNEEIVRKLSKLDAVLQRCNIRLSNYVSNVDSKSYKAVVRAISQGITDPEELVKLIHGRIIKHHGMDVITASLKGVVSLAEIDMISQLRDELDMAEAHKEKCQARMLEICEREFPEELKRLQTIPGIKERAATSLIAEIGTDMNKFETANHLASWSGLKPRNDESNKKIKSRSITHGNVYLRKTIIECAWAASRTKDCFFSRFSFHQTQVRKKNKMKVLVAVARKMLIAVWHVLHDNTIYIDFTTDRKTSRTKG

SEQ ID NO: 20332 - protein, 341 aa, unidentified
  source 1..341: note = protein_874af79
  REGION 10..163: note = RuvC_domain
  SITE 13: note = RuvC_P1
  SITE 65: note = RuvC_P2
  SITE 105: note = RuvC_P3
  SITE 107: note = RuvC_P4
  SITE 110: note = RuvC_P5
  REGION 206..293: note = Tnp_domain
  SITE 214: note = Tnp_P1
  SITE 244: note = Tnp_P2
  SITE 252: note = Tnp_P3
  SITE 253: note = Tnp_P4
  SITE 266: note = Tnp_P5
MTDASPSLFVGIDIAAKTLAAAWLRPGEAVSRPITLAQSPHGFATLHERLGQTGCPPPETHVVMEATGSYWIALATTLVHMGYRVSVINPAQAHHFAKALLKRAKTDAIDAQTLAQLAALLQPALWAPPPTVYYEVQQRLAQRDALLDVQRQLMNQLHALLFAPLVVASVKARMEELIETLGQQIRALDAEVREALAADAAWAASAARLQSIKCVGLITAAWLLVTTLNFTICPTPEAAVAYAGLAPNPYESGTSVRGRRRIGHTGNGRMRTALYLATLSAAQHNPVIKAFYERMRAARKPAKVARCAAARKLLHIAWAVVRNEEDFDPAYAQRHVQPLAA

SEQ ID NO: 20333 - protein, 340 aa, unidentified
  source 1..340: note = protein_7ddb49a
  REGION 5..151: note = RuvC_domain
  SITE 8: note = RuvC_P1
  SITE 54: note = RuvC_P2
  SITE 91: note = RuvC_P3
  SITE 93: note = RuvC_P4
  SITE 96: note = RuvC_P5
  REGION 211..297: note = Tnp_domain
  SITE 219: note = Tnp_P1
  SITE 249: note = Tnp_P2
  SITE 257: note = Tnp_P3
  SITE 258: note = Tnp_P4
  SITE 270: note = Tnp_P5
MTEYIGLDVSMKETAVSIRREGERIWRGKCASDPTIIAELVRKRAPGAKRIVFETGPLSVWFYHSLRSAGLPAVCIDARHAKAALDMAANKTDANDADGLAHLAEAGFFREVRVKGFDSMLTRTLVAARTRLDRITVDLSNQIRGIMKTFGLLVPAGKGTTFEKNVRGLLVDHKELAPIVLPMLEAWRGIRIRAAELGRQLVADARQSQACRALMSIPGIGVITATSFVSAIEDPNNFKKSRSVAAWIDLTTRRYQSGEIDYDGHISRRGDRHLRGLLYEAAAVILTRCSTESSLRTWGLKLRERIGFKRAAVAVARKLAIMHTMLKTGELFNPSAGAAA

SEQ ID NO: 20334 - protein, 402 aa, unidentified
  source 1..402: note = protein_0a96117
  REGION 14..168: note = RuvC_domain
  SITE 17: note = RuvC_P1
  SITE 65: note = RuvC_P2
  SITE 105: note = RuvC_P3
  SITE 107: note = RuvC_P4
  SITE 110: note = RuvC_P5
  REGION 275..360: note = Tnp_domain
  SITE 283: note = Tnp_P1
  SITE 313: note = Tnp_P2
  SITE 321: note = Tnp_P3
  SITE 322: note = Tnp_P4
  SITE 334: note = Tnp_P5
MEEPSADHGYAVFLGLDVGKGEHHATALDPDGRRVHDKPLPQDEHALGGLFEQLSEHGPVLVVVDQPASIGALPVTVARDVGVDVAYLPGLAMRRIADLHPGNAKTDARDAYVIAEAARSMPHALRRVDTGDEALADLEVIVGFDDDLAAEVTRVTNRIHGLLTQIHPALERAIGGKLHHKAILELLRRFGGPTGLRQAGKRRIAAAVRARAPRSHHAIVEAIMSALDEQSVTVPGTRATELVLPQLADQLTSLLAQREQAATQVEGMLDAHPLAAVLTSMPGIGVRTGARILLEVGDGSSFPTPGHLAAYAGLAPVTRRSGSSIRGEHPSRAGNKNLKRAMFLAAFAALSDPTSRAYYDRKRAQGKKHNAALICLARRRCDVIYAMLRDGTPYQPRPATAA

SEQ ID NO: 20335 - protein, 325 aa, unidentified
  source 1..325: note = protein_732f200
  REGION 11..163: note = RuvC_domain
  SITE 14: note = RuvC_P1
  SITE 58: note = RuvC_P2
  SITE 98: note = RuvC_P3
  SITE 100: note = RuvC_P4
  SITE 103: note = RuvC_P5
  REGION 197..281: note = Tnp_domain
  SITE 205: note = Tnp_P1
  SITE 234: note = Tnp_P2
  SITE 242: note = Tnp_P3
  SITE 243: note = Tnp_P4
  SITE 254: note = Tnp_P5
MADESRESVYVGIDVSKDSLEVSLGDKGASMRFGNDDQGISAMLDWLAGQSVAVVLMEATGGLEKRCAQRLYLAGLTVVVANPRQAHEFAKSLGYLAKTDGIDAKALSHFARTLHNSERFEKSLFKLAAAHQEQLQALVTRRAQLVQMRVAETNRLAQAHALSTKSIQAVIKILDKQIKALDEDIGGRLKQHFAQKLKLLEGFKGIGQGTKAVLMAALPQLGQLNRREISKLVGVAPLNHDSGKMRGKRSIWGGRSDVRSSLYMAALSSVRFDPVIREFYQRLRAAGKPAKVALVACMRKMLAILNAVIKSNTAWEQRCPQPGAV

SEQ ID NO: 20336 - protein, 411 aa, unidentified
  source 1..411: note = protein_3e0667f
  REGION 5..163: note = RuvC_domain
  SITE 8: note = RuvC_P1
  SITE 62: note = RuvC_P2
  SITE 102: note = RuvC_P3
  SITE 104: note = RuvC_P4
  SITE 107: note = RuvC_P5
  REGION 273..373: note = Tnp_domain
  SITE 281: note = Tnp_P1
  SITE 311: note = Tnp_P2
  SITE 319: note = Tnp_P3
  SITE 320: note = Tnp_P4
  SITE 333: note = Tnp_P5
MNPVIGLDVAKGESQIQAFLDKGEPYRKSFSILHNVKELNKFLDFLKEIESLAGGKPSVILESTGHYHTPIIQFLEEQQYMYIIVNPLIAHRAKSSSLRKVKTDAIDAYNLCELYYKEELEPSKKRGIRLLNLRNLTRQHETISSVAAQTKLQLQSILDQVFPEYRGVFGNLYSKVSLQVLLIFPTSKSVLSVTGPVLADKIASLYKSRSDKWAKEKAKKLRDAAIRNPFQNNLYQSHIINLEIMINIVLQYQEHLSKLAAEIDALAKEVEEYELIQSIPGIGEKIAATIISEIGEIERFNHPKKLVAFTGVDPSVYSSGKFTASVNRITKRGSSRLRQALFMAVQCGIRDARKKKTSVEIIPRNKRLREFYDKKRDEGKPFRVAIIACVNKLLHWIFAMLKSNTTFLDIA

SEQ ID NO: 20337 - protein, 392 aa, unidentified
  source 1..392: note = protein_6298827
  REGION 5..163: note = RuvC_domain
  SITE 8: note = RuvC_P1
  SITE 62: note = RuvC_P2
  SITE 102: note = RuvC_P3
  SITE 104: note = RuvC_P4
  SITE 107: note = RuvC_P5
  REGION 267..356: note = Tnp_domain
  SITE 275: note = Tnp_P1
  SITE 305: note = Tnp_P2
  SITE 313: note = Tnp_P3
  SITE 314: note = Tnp_P4
  SITE 327: note = Tnp_P5
MEPVIGIDVAKGSSVVQAFVKRNEPYGAAIHVLHEACGFEQLGELLSELEARTEMSPIVILEATGHYHRALVSYLDRSGYIYYMVNPLQSKRAKGTQLRKVKTDALDAWHLAEMYYRGDVKPHRIWEDTYTELQHLTRQHEFVTGMFVQAKLNSRALLEQVFPAYEQVFSDVFSATSLTVLARCLEGDTEDWSEVIQGSTRRARSQRWVHEKAMKLEEVLVHWRETRRSLSQSQALLGMVSLLLKMNEQLAELEEHMEEMASHLPEVGLVRSIPGIGTKLAAAIVAEMGDVRQFSDAKQLVAFAGLDPGIFSSGKFTATSTRITKRGSKRLRRSLYLAVQCGMRKNANARIRSYYEKKRKEGKPYKVVVIACANKLLHHIFAILQKGQPYQV

SEQ ID NO: 20338 - protein, 401 aa, unidentified
  source 1..401: note = protein_96584c2
  REGION 10..165: note = RuvC_domain
  SITE 13: note = RuvC_P1
  SITE 62: note = RuvC_P2
  SITE 102: note = RuvC_P3
  SITE 104: note = RuvC_P4
  SITE 107: note = RuvC_P5
  REGION 271..357: note = Tnp_domain
  SITE 279: note = Tnp_P1
  SITE 309: note = Tnp_P2
  SITE 317: note = Tnp_P3
  SITE 318: note = Tnp_P4
  SITE 330: note = Tnp_P5
MSAVHERIWVGVDAGKGHHWAVAVDTDGEILFSTKVVNDESQILHLIDAAREKAGEIRWAVDISGRASTLLLALLIGRGQHVVYVPGRTVNRMSGAYQGEGKTDAKDGRVIADQARTRPKGFTRLHTPPELVSTLQLLTNYRADLIADRVRLINRLRDLLVGICPALERAFDYSAAKGPVVMLTEYQTPAALRRIGVKRLTTWLERRKVRGADVVAAKAVEAAQSQMTELPGEKRAAKLVCDLAHQLLALDERIKDNDREIRETFRTDERAEIIESMPGMGPVLGAEFVAIVGDLSGYLDAGRLASHAGLAPVPRDSGRRTGNYHRPKRYNRRLRWLFYMSAQTAMMRPGPSRDYYLKKRGEGLIHTQALLALARRRVDVLWAMLRDKRLFTPAPPVTQTA

SEQ ID NO: 20339 - protein, 386 aa, unidentified
  source 1..386: note = protein_bceed1e
  REGION 41..184: note = RuvC_domain
  SITE 79: note = RuvC_P2
  SITE 118: note = RuvC_P3
  SITE 120: note = RuvC_P4
  SITE 123: note = RuvC_P5
  REGION 255..342: note = Tnp_domain
  SITE 263: note = Tnp_P1
  SITE 292: note = Tnp_P2
  SITE 300: note = Tnp_P3
  SITE 301: note = Tnp_P4
  SITE 313: note = Tnp_P5
MQKLNDLSRSLTALEQDGTLIAVIEMSLSSWLVGGIVPGVERQPLKKLAVDESSLLKLLHRWREEAEKAGHRITRIAVAFEAGRDGFWLARWLKASGIETHVIHAASVAVSREHRRAKTDRLDTELLKRAFLGWLRGERDHCKMVAIPTIKDEDAKRPNREHESLVGEQSRIVNRMKAALIRLGIRGFNPKLRKAATRLEELRTPENEPIPPNTLAELRRDMERRRLVRDQLRQIEAVRVERLEHAPCDGPHAMVRLLARVIGVGLETADMLVHEVLARNMRDRRAVARYAGLTGSPEESGRKRREKGLARSGNGRVRRGMVQLAWRFLMYQKDSALVQWYRARTEKARGTRKPMIVALARKLLIALWRLVRQGVVPDGVVLRPAQ

SEQ ID NO: 20340 - protein, 341 aa, unidentified
  source 1..341: note = protein_d5bf094
  REGION 7..149: note = RuvC_domain
  SITE 10: note = RuvC_P1
  SITE 53: note = RuvC_P2
  SITE 88: note = RuvC_P3
  SITE 90: note = RuvC_P4
  SITE 93: note = RuvC_P5
  REGION 209..296: note = Tnp_domain
  SITE 217: note = Tnp_P1
  SITE 247: note = Tnp_P2
  SITE 255: note = Tnp_P3
  SITE 256: note = Tnp_P4
  SITE 268: note = Tnp_P5
MQDATLVGIDLGKHSFHLHGQDRRGKAVFRKKVGRKQLFEFFATFHTCTVVMESCAGAHYMARKLAGFGHQVKLISPQFVRPFVKSNKNDFVDAEAICEAASRPAMRFVTPKTESQQTLSALHRLRDSLVRDRVKASNQMHGFLLEFGISLPIGNAVITRLPAVLAEHALPPRLVAILERLHSHFKYLTEQIGEIDKEMGRQLADDEVGQRLLTIPGIGPITASVLAAEMGDGKQYGCSRDFAASVGLVPRQYSTGGRANLLGISKRGDKNIRRLLVQCARAYMQRLDRQIGRLAEWVRLMLTRRHSNVVACALANKLARTAWALATHNTTFDAGSTITPA

SEQ ID NO: 20341 - protein, 411 aa, unidentified
  source 1..411: note = protein_0a6791a
  REGION 4..170: note = RuvC_domain
  SITE 7: note = RuvC_P1
  SITE 67: note = RuvC_P2
  SITE 107: note = RuvC_P3
  SITE 109: note = RuvC_P4
  SITE 112: note = RuvC_P5
  REGION 279..364: note = Tnp_domain
  SITE 286: note = Tnp_P1
  SITE 317: note = Tnp_P2
  SITE 325: note = Tnp_P3
  SITE 326: note = Tnp_P4
MLFLGDDWAEDHHDVELVDGNGGKVVRKRLPEGLEGVTRLHALIAEHMPADWADLDPADAAAQVRIGIETDRGPWVQALLAAGYQVYAINPMSVARYRERHSTSGAKSDAGDAHVLAEIVRLDHAHHRPVAGDSAEAEAMKLVARTHQTLIWDRSRQMLRLRSALREFFPAALDAFDDLTAPDVLELLGRAPDPTRAARLSRSQIAAALRRANRRNIDTKAADLQQRLRAGQLRQPDAVQAAYAAIVTAQVRLIAALNAEVEQLGRVVADHFGRHRDADHYLSRPGLGVVLGARVLGEFGDDPHRFTDAKARKNYAGTSPITRASGTRKVVLARYARNRRLGDAVHQWAFCSLKGSPGARAYYDTLRARGTGHQAALRQLGNRLVGILHGCLKTGAAYDETTAWAHLHPSS

SEQ ID NO: 20342 - protein, 411 aa, unidentified
  source 1..411: note = protein_298794c
  REGION 5..164: note = RuvC_domain
  SITE 8: note = RuvC_P1
  SITE 61: note = RuvC_P2
  SITE 101: note = RuvC_P3
  SITE 103: note = RuvC_P4
  SITE 106: note = RuvC_P5
  REGION 272..358: note = Tnp_domain
  SITE 280: note = Tnp_P1
  SITE 311: note = Tnp_P2
  SITE 319: note = Tnp_P3
  SITE 320: note = Tnp_P4
MRLFVGDDWAEDHHDVELMDERGRVLARGRLPEGVAGMARLHELIGGQLGEGADDAEVVIGTETDRGPWVGALVAAGYTVYGVNPLQASRYRERHGVSGAKSDRGDAHMLTDMVRTDSHQLRAVAGDSPGAEAVKVVARTHKTLIWERNRQVQRLRHQLREYFPAALAAFDDLDAPDALELLGKAPDPVKAAKLTRAQVSAALKRARRRDIPGKATVILTALRSAQLGQPPAVTSAYAATVRSLVAVITVLNEQVKTLQGQVEADFGRHPDTEIYRSQPGLGPILGARVLGEFGDAPDRYASGKARKNYGGTSPITRASGKRKIVAARFIRNNRLSDALMAQAFAALGASPGARALYDAERARGTGHNPALRKVANRLVGILHGCLKTRTLYDEATAWPHREKTPQSDIAA

SEQ ID NO: 20343 - protein, 340 aa, unidentified
  source 1..340: note = protein_b2e3a27
  REGION 6..147: note = RuvC_domain
  SITE 9: note = RuvC_P1
  SITE 52: note = RuvC_P2
  SITE 87: note = RuvC_P3
  SITE 89: note = RuvC_P4
  SITE 92: note = RuvC_P5
  REGION 211..297: note = Tnp_domain
  SITE 219: note = Tnp_P1
  SITE 249: note = Tnp_P2
  SITE 257: note = Tnp_P3
  SITE 258: note = Tnp_P4
  SITE 270: note = Tnp_P5
MKTITIGILLAKSVFQIHGVDAEGCVTIKRNLRRTEVLKSFEALAPCLVGMEACAMAHFWAREISALGHDVWLMPPSYVKANLRRQKNDAADAEAICEAVTRPSMRFVPMKSAERQGVLMLHRTRDLLVRQRTMLINAIRGHCAEFGMIAPQGARRSADLIERVRQADGSLLPDLARSALLMLAGQLDALAAQIHAIERQLMVWHRQDEASQRLATIPGVGIITATALAASVTDPSLFQSGREFAAFLGLVPRQNSSGGKDRLGRISKMGDGYLRKLLVVRATSVIRCAADNATTIGAWVRSLMEHKPSRVVTVAMANKTARIVWAVLARGEVYRAPATS

SEQ ID NO: 20344 - protein, 391 aa, unidentified
  source 1..391: note = protein_fc5309c
  REGION 9..162: note = RuvC_domain
  SITE 12: note = RuvC_P1
  SITE 60: note = RuvC_P2
  SITE 101: note = RuvC_P3
  SITE 103: note = RuvC_P4
  SITE 106: note = RuvC_P5
  REGION 224..309: note = Tnp_domain
  SITE 232: note = Tnp_P1
  SITE 262: note = Tnp_P2
  SITE 270: note = Tnp_P3
  SITE 271: note = Tnp_P4
  SITE 282: note = Tnp_P5
MGEHSRVVIGMDPHKRSVTVEVMVADETIVGHGRFGTDVAGFAQLVGFAAQWPDRVWAIEGCEGIGRHVAQRLLAAGEQVVDVPAKLSARMRMFATGQGRKTDDTDAHSIALVGVRIAGLHPVVADEQLDMLRLLVDRRRRLGEDHTRMTCQLHQLLLELVPGGAKKNLSAAQARKILAGVRPSDEVGKLRKRVALELVVDLERIYLRKKQANKELVALLKSTRTGLLDLHGIGPSGAARLLVEVGDVTRFPNRGHFASWTGTAPIDVSSGDKQHHRLSRGGNRQINRVLHIMAVVQLRNPTEGRAYYDRKVAAGKSPNEAMRCLKRRLSDIVYRAMLDDYVATRATGPGGHRGASLQSSAAGSHPHTSTSDQSLPGPVTRKPTTRLPKAS

SEQ ID NO: 20345 - protein, 374 aa, unidentified
  source 1..374: note = protein_9ef9c8e
  REGION 32..172: note = RuvC_domain
  SITE 35: note = RuvC_P1
  SITE 78: note = RuvC_P2
  SITE 113: note = RuvC_P3
  SITE 115: note = RuvC_P4
  SITE 118: note = RuvC_P5
  REGION 237..322: note = Tnp_domain
  SITE 245: note = Tnp_P1
  SITE 275: note = Tnp_P2
  SITE 283: note = Tnp_P3
  SITE 284: note = Tnp_P4
  SITE 296: note = Tnp_P5
MLLPRQRFMLAKGTKDKEHAMSQTLKSAIAVIGIDIGKNSFHVVGHDERGAIVLRQKWSRGQVEARFANLSPCLVGMEACVGAHHLSRKLNSLGHDARLMPAKYVRPYSKGQKNDFRDAEAIAEAVQRPTMKFVATKTADQLDLQALHRVRERLVSQRTGIINQIRAFLLERGVAVRQGLRFLRAELPRILATPPDVLSPRMLRIIEDLAGDWRRLDERVEGLSKEIEAIARQDAGCERLMSVPGIGPIISSAMVAAIGAGDVFTKGRDFAAWLGLVPKQISTGDRTILGKISKRGNRYLRVLFVQAAWVVLIKPQSWERHGLKSWIEAAKKRLHRNVLAIALANKLARIAWSVLAHGRSFEASKLAAAVTQPA

SEQ ID NO: 20346 - protein, 400 aa, unidentified
  source 1..400: note = protein_5b2b783
  REGION 7..162: note = RuvC_domain
  SITE 10: note = RuvC_P1
  SITE 59: note = RuvC_P2
  SITE 99: note = RuvC_P3
  SITE 101: note = RuvC_P4
  SITE 104: note = RuvC_P5
  REGION 269..354: note = Tnp_domain
  SITE 277: note = Tnp_P1
  SITE 306: note = Tnp_P2
  SITE 314: note = Tnp_P3
  SITE 315: note = Tnp_P4
  SITE 327: note = Tnp_P5
MEHQLYLGIDVGKTAHHATGLSAEGTVVHDKSLPQSEPKIRELLQDLAATHGPVLVVVDQPKTIGALVIAVAQDLGIEVAYLPGLTMRRVADLHPGQAKTDARDAFIIANTARTMAHTLRGITLTEEDIAELSMLCGFDDDLASQITQVRNRLRGFLTQIHPALERVLGPRLAHPGVIALLARHSSPARLKTAGRGHVRALLKKHAPRLAEKLTEEIFTALAEQTVIVTGTSAAEKIIGRLADQLAQLGAQRVEIETEILTVVDAHPLTQVLTSMPGVGVRTAARLLTEVVGKDFKDAGHLASYAGIAPVTRRSGTSIRGESPSRRGNKVLKRALFLSAFASLSASPASRAYYDRKRAEGKRHNQAVIALARRRTDVLYAMLRDGSFYQEPTPPTVALAA

SEQ ID NO: 20347 - protein, 386 aa, unidentified
  source 1..386: note = protein_f5629cb
  REGION 5..158: note = RuvC_domain
  SITE 8: note = RuvC_P1
  SITE 56: note = RuvC_P2
  SITE 97: note = RuvC_P3
  SITE 99: note = RuvC_P4
  SITE 102: note = RuvC_P5
  REGION 220..305: note = Tnp_domain
  SITE 228: note = Tnp_P1
  SITE 258: note = Tnp_P2
  SITE 266: note = Tnp_P3
  SITE 267: note = Tnp_P4
  SITE 278: note = Tnp_P5
MTVIIGMDPHKRSATIEVIDHDSKVLAIGRYDTDTAGYTEMRTAVEDFPDRVWAIEGCDGIGRHLAHRLVHDGETVIDVPAKLSAQVRVFATGNGRKTDPVDAHSVALAALRAPNLRRIQADPELEALGMLVDRRDELGRARTELINRIHRLLLELVPGGAKRWLSARQARALAEELTPTGPAARLRLRVVLELISDLEVVDARIKAANKELRQLVTATGSTLMELPGTGPTGAARLLSDVGDIHRFATRDRFASWNGTAPLDASSGDQKRHRLSRAGNRKVNRVLHIMAVVQQCGYGDGRAYVTQRKAEGKTHKEALRALKRRLSNVAYARMLADQRRREKASPGGQSGASADSCATGLTPHAGSSDKPQPGSAAHQLSELRTAP

SEQ ID NO: 20348 - protein, 344 aa, unidentified
  source 1..344: note = protein_48e4814
  REGION 6..148: note = RuvC_domain
  SITE 9: note = RuvC_P1
  SITE 52: note = RuvC_P2
  SITE 87: note = RuvC_P3
  SITE 89: note = RuvC_P4
  SITE 92: note = RuvC_P5
  REGION 211..297: note = Tnp_domain
  SITE 219: note = Tnp_P1
  SITE 249: note = Tnp_P2
  SITE 257: note = Tnp_P3
  SITE 258: note = Tnp_P4
  SITE 270: note = Tnp_P5
MEISTIGLDLAKSVFQVHGVDAEGKVVVRKALRRAQVLPFFAKLPPCLVGMEACGTAHHWARELARLGHDVRQMPPAYVKPYVKRGKTDAADAEAICEAVTRPTMRFVPVKSPEQQAALSMHRARDLLVKQRTQLVNMMRGLLAEFGIDIPQGLCRALERARKIVDGEAPAVPAEAAKIVGRLSQQALDTHAQLREVDLDLLAWQRANDTARRLMSVPGIGPIGATALAASVTDPSQFRSGREFAAWLGLTPRQHSSGGKERLGRITKMGDKYLRTLLVVGMTSLIKRVKRKPETADPRLVALLARKPVRVATVAMANQTARVVWAIMARGETYRAGHQPRLAA

SEQ ID NO: 20349 - protein, 345 aa, unidentified
  source 1..345: note = protein_6861cb3
  REGION 1..107: note = RuvC_domain
  SITE 4: note = RuvC_P2
  SITE 44: note = RuvC_P3
  SITE 46: note = RuvC_P4
  SITE 49: note = RuvC_P5
  REGION 216..302: note = Tnp_domain
  SITE 224: note = Tnp_P1
  SITE 254: note = Tnp_P2
  SITE 262: note = Tnp_P3
  SITE 263: note = Tnp_P4
  SITE 275: note = Tnp_P5
MVVDQPNTIGALPIAVARDVGCVVGYLPGLAMRKAADLHPGRSKTDRRDAFIIADTAHTMPHTLRAVDRDNEVLSALKMLSGFDDDIAKDATRTINRLRSVLTQIYPSFERALVGSIITRPLILDMLIHYGGPTKLKKADDYHQVLGWMSTRAKKDPTKLVDTIFDGLKAQTVTVPGTAAAEIVIPQLAATIKALLEQRNSIAEQVEELLEEFPLHQVLMSMPGIGIKTAANILLAMGDCSDFRSAGHLAAYAGIAPVTRRSGTSIRGEFPARSGNKRLKNALFYSAFASIRFHEPSKTYYERKRAEGKRHNAAIMCLARRRCNVIYAMLTRAEFFREVPARAAV

SEQ ID NO: 20350 - protein, 271 aa, unidentified
  source 1..271: note = protein_6b5d8cf
  REGION 2..74: note = RuvC_domain
  SITE 14: note = RuvC_P3
  SITE 16: note = RuvC_P4
  SITE 19: note = RuvC_P5
  REGION 139..224: note = Tnp_domain
  SITE 146: note = Tnp_P1
  SITE 176: note = Tnp_P2
  SITE 184: note = Tnp_P3
  SITE 185: note = Tnp_P4
  SITE 197: note = Tnp_P5
MAPQFVKPYVKTNKNDMADAEAICEAVSRPNMRFVPIKNLEQQAVLSLHRVRQSFVRARTAQANQIRGLLGEFGRVIPQGIGYIKTQVPELIEDASHELPGPFRLLVQRLLDHLKELDRQVSELEGQIQSWHRNDTASCKLAQIPGIGPITASALAASIGDAKNFKSGRQVAAWLGLVTKQHSSGGKQNLLGISKRGDSYLRSLLIHGARSVIYYASQKPQLHPWINGVVNRRNKNVAAVALANKNARIVWALLAHERQYEVNFSYLKAAA

SEQ ID NO: 20351 - DNA, 50 bp, unidentified
  source 1..50: mol_type = unassigned DNA; note = target_IS621
gccgggtaataccaccatcaggcctacagatgagctcgccccaacgaggc

SEQ ID NO: 20352 - DNA, 50 bp, unidentified
  source 1..50: mol_type = unassigned DNA; note = target_IS621_161642
gcgatgctgcgcatctgtccgggctaccggcccgcagacggcggtgaacc

SEQ ID NO: 20353 - DNA, 50 bp, unidentified
  source 1..50: mol_type = unassigned DNA; note = target_IS621_127209
gtggtggcttcgccttacccggcctacaaaacatgcttcagactataagc

SEQ ID NO: 20354 - DNA, 50 bp, unidentified
  source 1..50: mol_type = unassigned DNA; note = target_IS621_55201
cctgatagctgcgcttatcaggcctacagacgacaccgcacacgtaggct

SEQ ID NO: 20355 - DNA, 50 bp, unidentified
  source 1..50: mol_type = unassigned DNA; note = target_IS621_145219
gacgctggcgcgccttatcatgcctacactactgcaatatattgaatttt

SEQ ID NO: 20356 - DNA, 50 bp, unidentified
  source 1..50: mol_type = unassigned DNA; note = target_IS621_23122
tgatggcgctgcgcttatcaggcctacagcgaaaacgtaggccgcgccat

SEQ ID NO: 20357 - DNA, 50 bp, unidentified
  source 1..50: mol_type = unassigned DNA; note = target_ISAar41-192
gagtaggccgcgcagcggccgtatcgagacgaccccaccgcgcccctcgg

SEQ ID NO: 20358 - DNA, 50 bp, unidentified
  source 1..50: mol_type = unassigned DNA; note = target_ISAar41-39
cgccagatgccacccaccgttaatctgacagaccccgacgatcaggtcag

SEQ ID NO: 20359 - DNA, 50 bp, unidentified
  source 1..50: mol_type = unassigned DNA; note = target_ISAar41
cgcttgttcggctgtccactaattcaggctaaccccagccaggaataggt

SEQ ID NO: 20360 - DNA, 50 bp, unidentified
  source 1..50: mol_type = unassigned DNA; note = target_ISAar41-74
gccactggccgttccgctactggtcagaccccgatttcttacagacccgc

SEQ ID NO: 20361 - DNA, 50 bp, unidentified
  source 1..50: mol_type = unassigned DNA; note = target_ISAar41-12
aaaccagccatactaagccttgatccaccgatttggtttggggttgatac

SEQ ID NO: 20362 - DNA, 50 bp, unidentified
  source 1..50: mol_type = unassigned DNA; note = target_ISAar18
cccaatctcggtggcaacaccccccggatcattggttagacaggggcaag

SEQ ID NO: 20363 - DNA, 50 bp, unidentified
  source 1..50: mol_type = unassigned DNA; note = target_ISAar41-86
cagggcagactggtctagagccatcgtgtgatgtgtctttctgtgaggaa

SEQ ID NO: 20364 - DNA, 50 bp, unidentified
  source 1..50: mol_type = unassigned DNA; note = target_ISAar41-36
ctgcggtagccaacccgcgcatatcagtctgaccgcgccgtcgccaacga

SEQ ID NO: 20365 - DNA, 50 bp, unidentified
  source 1..50: mol_type = unassigned DNA; note = target_ISAar29
ggctggactcgctccaccctgacacgtagaccgcgttagaagagtatttc

SEQ ID NO: 20366 - DNA, 50 bp, unidentified
  source 1..50: mol_type = unassigned DNA; note = target_ISAar29-423
gacggccgccagaacgtgacaaaacgtaccgtcccccgtcacgtggcgta

SEQ ID NO: 20367 - DNA, 50 bp, unidentified
  source 1..50: mol_type = unassigned DNA; note = target_ISAar29-364
tcgacgcgctcacgcgtgaacaaacgacggctcggcgtgctcacgcgtga

SEQ ID NO: 20368 - DNA, 50 bp, unidentified
  source 1..50: mol_type = unassigned DNA; note = target_ISAar41-54
catgacggagaaatcatggaaattcttgctgcgtatgatctgaccggatc

SEQ ID NO: 20369 - DNA, 50 bp, unidentified
  source 1..50: mol_type = unassigned DNA; note = target_locus59881
ggttttccggaggccgtttcgtttgagtcacgcggccatggctgattcat

SEQ ID NO: 20370 - DNA, 50 bp, unidentified
  source 1..50: mol_type = unassigned DNA; note = target_locus163322
cgaccggtgttcaccccataacagacacgaaggcgatcaaactgcgcgac

SEQ ID NO: 20371 - DNA, 50 bp, unidentified
  source 1..50: mol_type = unassigned DNA; note = target_locus136201
taaccggacattatcagacggagcgtgcaggatggatgagaaagaagtga

SEQ ID NO: 20372 - DNA, 50 bp, unidentified
  source 1..50: mol_type = unassigned DNA; note = target_locus153600
ggcgcttgacgcgcctgtccgggctaccaaaccgcacgaacttgtagccg

SEQ ID NO: 20373 - DNA, 50 bp, unidentified
  source 1..50: mol_type = unassigned DNA; note = target_locus200162
gcttgagccttcctgcttatgctgagtgtccggtcgaaagtgggggcagt

SEQ ID NO: 20374 - DNA, 50 bp, unidentified
  source 1..50: mol_type = unassigned DNA; note = target_locus238387
cagggtgtagcatgtgtagcgctacgctacaaaatagagctttatcgatt

SEQ ID NO: 20375 - DNA, 50 bp, unidentified
  source 1..50: mol_type = unassigned DNA; note = target_locus36182
cgctaccgatgaatgaccgcttttggcacaaatgcgaagtgccgactgcg

SEQ ID NO: 20376 - DNA, 50 bp, unidentified
  source 1..50: mol_type = unassigned DNA; note = target_locus6338
gtctcggccgctcctccaaagcagacattcagcgcaacggctgccacgtg

SEQ ID NO: 20377 - DNA, 50 bp, unidentified
  source 1..50: mol_type = unassigned DNA; note = target_locus229727
gagatgagtttttgacggctgtaagcgctaacgggtgaccctaagccctg

SEQ ID NO: 20378 - DNA, 50 bp, unidentified
  source 1..50: mol_type = unassigned DNA; note = target_locus189474
tcctgtacaaaaaatagccttaacgtacaataattttcgatatccaaact

SEQ ID NO: 20379 - DNA, 50 bp, unidentified
  source 1..50: mol_type = unassigned DNA; note = target_locus40696
aagtcatgttaatcaataagaggaatcgattatatgaaggtgtgggtaat

SEQ ID NO: 20380 - DNA, 50 bp, unidentified
  source 1..50: mol_type = unassigned DNA; note = target_locus196678
ctgggcgatcttccaatcgatatttccgttttgagaacaaattcaccttc

SEQ ID NO: 20381 - DNA, 50 bp, unidentified
  source 1..50: mol_type = unassigned DNA; note = target_locus137473
aacattgtcgcggatttcttctgtggttgccgtccgttatgcaagagttt

SEQ ID NO: 20382 - DNA, 50 bp, unidentified
  source 1..50: mol_type = unassigned DNA; note = target_locus101259
cggagtggccacgctgaaagagctcactgaacgcttctcaccctgggctt

SEQ ID NO: 20383 - DNA, 50 bp, unidentified
  source 1..50: mol_type = unassigned DNA; note = target_locus78905
ggctcgccacccgccgtgagattccgccacggttctcgagacccgccgcg

SEQ ID NO: 20384 - DNA, 50 bp, unidentified
  source 1..50: mol_type = unassigned DNA; note = target_locus71993
tacggctcaagccgatttagtctgacaatgccctcggtacgctttcgcgc

SEQ ID NO: 20385 - DNA, 50 bp, unidentified
  source 1..50: mol_type = unassigned DNA; note = target_locus95399
tttcaccttacctatccccagccctgctaagccatacctgctttcagcca

SEQ ID NO: 20386 - DNA, 50 bp, unidentified
  source 1..50: mol_type = unassigned DNA; note = target_locus79791
ctggtgaggtgggaccggtggggatttcatctgaacagcgggcaacaggc

SEQ ID NO: 20387 - DNA, 50 bp, unidentified
  source 1..50: mol_type = unassigned DNA; note = target_locus108084
caaaaagccagatcactggtaagcgtacagcgagaaccgtattgacgaac

SEQ ID NO: 20388 - DNA, 50 bp, unidentified
  source 1..50: mol_type = unassigned DNA; note = target_locus241619
taaaaatgaataaagacgacacactatggaaaggaatactcgaaaatatc

SEQ ID NO: 20389 - DNA, 50 bp, unidentified
  source 1..50: mol_type = unassigned DNA; note = target_locus38909
ccagctgggatggaaatcgcatcctataatcgtcatgagaaggctccttc

SEQ ID NO: 20390 - DNA, 50 bp, unidentified
  source 1..50: mol_type = unassigned DNA; note = target_locus107523
agtaggcccagtcggcccgaagctgcgattttggccaactcgaagaacat

SEQ ID NO: 20391 - DNA, 50 bp, unidentified
  source 1..50: mol_type = unassigned DNA; note = target_locus31809
gtgggccttcagcccacgggcttgacccgtggggccagcaggcgataggc

SEQ ID NO: 20392 - DNA, 50 bp, unidentified
  source 1..50: mol_type = unassigned DNA; note = target_locus144529
gtccccaggatggaggtcaggccgcgtcgaatgcttgctggatcagcggc

SEQ ID NO: 20393 - DNA, 50 bp, unidentified
  source 1..50: mol_type = unassigned DNA; note = target_locus65581
tgaaccgacccctcaccctaaccctctcccacagggagagcagctgtgtt

SEQ ID NO: 20394 - DNA, 50 bp, unidentified
  source 1..50: mol_type = unassigned DNA; note = target_locus206026
cccacaattcgcttgcaggcaagctcccacagcggcttcgtgatctggtc

SEQ ID NO: 20395 - DNA, 50 bp, unidentified
  source 1..50: mol_type = unassigned DNA; note = target_locus9882
cacacgtcccgaaggcccgaagctgcgatttttgccacgagaacgttgtg

SEQ ID NO: 20396 - DNA, 50 bp, unidentified
  source 1..50: mol_type = unassigned DNA; note = target_locus146556
cgtacctcgagatcagcccctggacgctgtggaaaaaacgctcggtgtgg

SEQ ID NO: 20397 - DNA, 50 bp, unidentified
  source 1..50: mol_type = unassigned DNA; note = target_locus222797
agcacaatctgctgtcgacaacttggcaatacccaggccggtcaaagaag

SEQ ID NO: 20398 - DNA, 50 bp, unidentified
  source 1..50: mol_type = unassigned DNA; note = target_locus11380
gaacatgaacattcatgttctttttatgccggaaaggagcagaaatgaaa

SEQ ID NO: 20399 - DNA, 50 bp, unidentified
  source 1..50: mol_type = unassigned DNA; note = target_locus102412
gcattaatgtatggtgcgttaaacgtacaataatttcgaatatccaaact

SEQ ID NO: 20400 - DNA, 50 bp, unidentified
  source 1..50: mol_type = unassigned DNA; note = target_locus67572
ggtggcggggctgttcatcttgaagcacatgcatgacctatcggacgagg

SEQ ID NO: 20401 - DNA, 50 bp, unidentified
  source 1..50: mol_type = unassigned DNA; note = target_locus153144
cttgcgtcacctcgctaggctcgctcattccttcggtagtattgcgtctc

SEQ ID NO: 20402 - DNA, 50 bp, unidentified
  source 1..50: mol_type = unassigned DNA; note = target_locus20607
cttacgaaccaatggattcccgctttcgcgggaatgacgatatcgagcgg

SEQ ID NO: 20403 - DNA, 50 bp, unidentified
  source 1..50: mol_type = unassigned DNA; note = target_locus22609
attccacccctcgaattgtcattccagcgaaggctggaacctcctaaact

SEQ ID NO: 20404 - DNA, 50 bp, unidentified
  source 1..50: mol_type = unassigned DNA; note = target_locus111069
ctctaattgaactaaagcattagtttagttgtatagctcttcactgtttt

SEQ ID NO: 20405 - DNA, 50 bp, unidentified
  source 1..50: mol_type = unassigned DNA; note = target_locus123581
attttcccgacgcgagacgcgtcgcccccattagtgctcgcgtttggtgc

SEQ ID NO: 20406 - DNA, 50 bp, unidentified
  source 1..50: mol_type = unassigned DNA; note = target_locus39063
aacgctttacggagagggctttgttgaataaatcgaacttttgctgagtt

SEQ ID NO: 20407 - DNA, 50 bp, unidentified
  source 1..50: mol_type = unassigned DNA; note = target_locus165043
ggatgcgcttacgcttatccggcctacaaatcgtgcctgaaccgtaggcc

SEQ ID NO: 20408 - DNA, 50 bp, unidentified
  source 1..50: mol_type = unassigned DNA; note = target_locus187447
gaaaggtcaaaaaataaccttaacgtacaataattttcgatatccaaact

SEQ ID NO: 20409 - DNA, 50 bp, unidentified
  source 1..50: mol_type = unassigned DNA; note = target_locus82201
ggctgagggcgcgtcttacaaggatgttacctcgcgcccgacccggtagc

SEQ ID NO: 20410 - DNA, 50 bp, unidentified
  source 1..50: mol_type = unassigned DNA; note = target_locus21613
ggtaccgatgatgaggtcgccttcccaatgcccgggaacagcacggtctt

SEQ ID NO: 20411 - DNA, 50 bp, unidentified
  source 1..50: mol_type = unassigned DNA; note = target_locus66768
ttgtgctcaaaaaacgagcttaacgtacaataattttcgatatccaaact

SEQ ID NO: 20412 - DNA, 50 bp, unidentified
  source 1..50: mol_type = unassigned DNA; note = target_locus177259
aaaacaggcttaacgtaggatatttccgttttctgaggcgacccccacat

SEQ ID NO: 20413 - DNA, 50 bp, unidentified
  source 1..50: mol_type = unassigned DNA; note = target_locus47056
ttttaaatttcctcccccatcatctgttgaattactgccggttattggca

SEQ ID NO: 20414 - DNA, 50 bp, unidentified
  source 1..50: mol_type = unassigned DNA; note = target_locus31940
ttcatgcaccaataagtcccccccccggagagtaaagtaatgcagctaat

SEQ ID NO: 20415 - DNA, 50 bp, unidentified
  source 1..50: mol_type = unassigned DNA; note = target_locus65800
cctttctgcttttctttttcttcctgtttttgtttcatattccggtggtt

SEQ ID NO: 20416 - DNA, 50 bp, unidentified
  source 1..50: mol_type = unassigned DNA; note = target_locus181296
gccgaaaacggtggcttcttcagcgtagccttatcggatgccggggcacg

SEQ ID NO: 20417 - DNA, 50 bp, unidentified
  source 1..50: mol_type = unassigned DNA; note = target_IS1000B
tgggaagaggtctgcctaggtcgcaatccccttacggggctcaatccctt

SEQ ID NO: 20418 - DNA, 50 bp, unidentified
  source 1..50: mol_type = unassigned DNA; note = target_IS1111A
gaacaaggcgaaagtaaagtagcccgtatgaagcgaagcgaaatacggga

SEQ ID NO: 20419 - DNA, 50 bp, unidentified
  source 1..50: mol_type = unassigned DNA; note = target_IS1328
aataatttatatgtatggggtggttttttgtggcgaattagttttactga

SEQ ID NO: 20420 - DNA, 50 bp, unidentified
  source 1..50: mol_type = unassigned DNA; note = target_IS1383
gcccaagtgtaagaacccttgtcagcatttcctagagtcaaagtcagagt

SEQ ID NO: 20421 - DNA, 50 bp, unidentified
  source 1..50: mol_type = unassigned DNA; note = target_IS1492
aacctgacagacagagcgcttagcgtacgtaaggctgctcgggagtctgg

SEQ ID NO: 20422 - DNA, 50 bp, unidentified
  source 1..50: mol_type = unassigned DNA; note = target_IS2112
atgctgctgcggtcatggtgtcctcgcttcgctggtgaaagtgtgtggtc

SEQ ID NO: 20423 - DNA, 50 bp, unidentified
  source 1..50: mol_type = unassigned DNA; note = target_IS5708
gccagctcaaaaaacaggcttaacgggaagcccttatagtaggataattt

SEQ ID NO: 20424 - DNA, 50 bp, unidentified
  source 1..50: mol_type = unassigned DNA; note = target_IS884
tatcaatctgctgcaaaaggacgaattacccctacctggacaacaaccgg

SEQ ID NO: 20425 - DNA, 50 bp, unidentified
  source 1..50: mol_type = unassigned DNA; note = target_IS900
gtcgcggtcttgcaccatgacgatctccttgcactccccgttggcgcccg

SEQ ID NO: 20426 - DNA, 50 bp, unidentified
  source 1..50: mol_type = unassigned DNA; note = target_IS902
accagtccctgcatctggcgtcctttccgtcctagcgtcgtgtctccggc

SEQ ID NO: 20427 - DNA, 50 bp, unidentified
  source 1..50: mol_type = unassigned DNA; note = target_ISAar2
ccagcgcaccagccgagagccgcccacccccctttcccggcctcgccggc

SEQ ID NO: 20428 - DNA, 50 bp, unidentified
  source 1..50: mol_type = unassigned DNA; note = target_ISAeca3
gaccccctgccttggcagggggtctttttttgggcagatgagcgggtgaa

SEQ ID NO: 20429 - DNA, 50 bp, unidentified
  source 1..50: mol_type = unassigned DNA; note = target_ISAfe1
gatccccctccgctgccggtagagagtgctggggactgtttggcacaagg

SEQ ID NO: 20430 - DNA, 50 bp, unidentified
  source 1..50: mol_type = unassigned DNA; note = target_ISAli16
aacggtctgcgaccgccgcacccctcatcccaacccgcggatcggcaaaa

SEQ ID NO: 20431 - DNA, 50 bp, unidentified
  source 1..50: mol_type = unassigned DNA; note = target_ISArsp5
taccgccgctcggccgatcagcccccccccacgcgccgtcccatgaactg

SEQ ID NO: 20432 - DNA, 50 bp, unidentified
  source 1..50: mol_type = unassigned DNA; note = target_ISAs16
gtcgcaacgagaagatggtcgaagtgttaacaggggctgagcgtcgtcga

SEQ ID NO: 20433 - DNA, 50 bp, unidentified
  source 1..50: mol_type = unassigned DNA; note = target_ISAs24
gcgccgccggttatgccggcggcttttttatgtctgcaaaagtagagtgc

SEQ ID NO: 20434 - DNA, 50 bp, unidentified
  source 1..50: mol_type = unassigned DNA; note = target_ISAtu1
cgatcgaccgctgtcttcatattatcgtagatgccgcgagcagggacgcc

SEQ ID NO: 20435 - DNA, 50 bp, unidentified
  source 1..50: mol_type = unassigned DNA; note = target_ISAve1
cgtatgtcagcgccataaataaactgaatgcccttggtctgccggttaga

SEQ ID NO: 20436 - DNA, 50 bp, unidentified
  source 1..50: mol_type = unassigned DNA; note = target_ISAzs4
taacggagaacactgagatgagatggtttcttcgacggtcaacgctgctc

SEQ ID NO: 20437 - DNA, 50 bp, unidentified
  source 1..50: mol_type = unassigned DNA; note = target_ISAzvi2
cgtcgacgacgcgccggcgaaggtcgcactgtatgcccgagccattctgg

SEQ ID NO: 20438 - DNA, 50 bp, unidentified
  source 1..50: mol_type = unassigned DNA; note = target_ISAzvi4
ctcctggcaaagtacgcggcggctttttacgatggccaactcctcggact

SEQ ID NO: 20439 - DNA, 50 bp, unidentified
  source 1..50: mol_type = unassigned DNA; note = target_ISBcen1
acgaaccgcctgcattcaggcggtttttattggtcggcgtgatttacgcg

SEQ ID NO: 20440 - DNA, 50 bp, unidentified
  source 1..50: mol_type = unassigned DNA; note = target_ISBcen2
cctcgatcttcgcgagccaggggtttttggcagtgccgccctggtcagca

SEQ ID NO: 20441 - DNA, 50 bp, unidentified
  source 1..50: mol_type = unassigned DNA; note = target_ISBcen3
tcctgtgactactacgacctctgctgacttctcgctccggctcaatgccg

SEQ ID NO: 20442 - DNA, 50 bp, unidentified
  source 1..50: mol_type = unassigned DNA; note = target_ISBcen4
gcgagttgcaacggatgctcggcaagaagaccatggagaatgagattctc

SEQ ID NO: 20443 - DNA, 50 bp, unidentified
  source 1..50: mol_type = unassigned DNA; note = target_ISBcen5
atccttcgttacatgtaacaggagaggccacaatggcagctaccacttcc

SEQ ID NO: 20444 - DNA, 50 bp, unidentified
  source 1..50: mol_type = unassigned DNA; note = target_ISBcen8
cggggcgcgatcggccggccgcgctcagtcgctgttgaacgtcaaaccgc

SEQ ID NO: 20445 - DNA, 50 bp, unidentified
  source 1..50: mol_type = unassigned DNA; note = target_ISBdi11
agcgatgccgtgagggggcgtccacacctccgtcgggcaactcgaggccg

SEQ ID NO: 20446 - DNA, 50 bp, unidentified
  source 1..50: mol_type = unassigned DNA; note = target_ISBfun1
attgaaattagatttcgaattagagcgtgttaggtactttggataatggg

SEQ ID NO: 20447 - DNA, 50 bp, unidentified
  source 1..50: mol_type = unassigned DNA; note = target_ISBj18
cgaactcaggactggataaaacttgggggcaaggtcatctctgaagagcg

SEQ ID NO: 20448 - DNA, 50 bp, unidentified
  source 1..50: mol_type = unassigned DNA; note = target_ISBj19
gctgcggcacatgagtccgcttctggcccatcagcgaagtggcgacacct

SEQ ID NO: 20449 - DNA, 50 bp, unidentified
  source 1..50: mol_type = unassigned DNA; note = target_ISBj4
agacgcgatgcgcacgaagtccgctcggggtcaaaagcagcggtgcacgt

SEQ ID NO: 20450 - DNA, 50 bp, unidentified
  source 1..50: mol_type = unassigned DNA; note = target_ISBma3
ccgcttcgccgcaaccttccgccccaccccccccaaaagaaaatgcgccg

SEQ ID NO: 20451 - DNA, 50 bp, unidentified
  source 1..50: mol_type = unassigned DNA; note = target_ISBmu9
ggggtcggacggcgcgccgcgcgctcagtcgccgaccgaaatcgtcagcg

SEQ ID NO: 20452 - DNA, 50 bp, unidentified
  source 1..50: mol_type = unassigned DNA; note = target_ISBth13
gaaattccatacgattacacctcctttcttcacaaaatgaagaaagggca

SEQ ID NO: 20453 - DNA, 50 bp, unidentified
  source 1..50: mol_type = unassigned DNA; note = target_ISC1190
tctactgtcttgtggcttatctcctccttcgttaggttcagtagtgatgc

SEQ ID NO: 20454 - DNA, 50 bp, unidentified
  source 1..50: mol_type = unassigned DNA; note = target_ISCaa14
ttttaattgagcttatagcacacatatgtaaatttggtattgttaaatta

SEQ ID NO: 20455 - DNA, 50 bp, unidentified
  source 1..50: mol_type = unassigned DNA; note = target_ISCARN26
tctccccagtgaatttccccgccctcagccctggcgcgctgctcgatggc

SEQ ID NO: 20456 - DNA, 50 bp, unidentified
  source 1..50: mol_type = unassigned DNA; note = target_ISCARN36
ctgtattgagccgctcctcgggattgagttgagggttggtgctgggcagg

SEQ ID NO: 20457 - DNA, 50 bp, unidentified
  source 1..50: mol_type = unassigned DNA; note = target_ISCro4
tgatgacgctgcgcttatcaggcctacggaccggaagaatctgtaggccg

SEQ ID NO: 20458 - DNA, 50 bp, unidentified
  source 1..50: mol_type = unassigned DNA; note = target_ISCro5
ctacaacagcaccttccccaggccggataaggcgtagccgccatccggca

SEQ ID NO: 20459 - DNA, 50 bp, unidentified
  source 1..50: mol_type = unassigned DNA; note = target_ISCth7
cttgtttttcataagcaacctccttttaaattttaatttttaatttaatt

SEQ ID NO: 20460 - DNA, 50 bp, unidentified
  source 1..50: mol_type = unassigned DNA; note = target_ISEc11
cccgcgtaaaccaatcagtgaaaatactgtaaataaagccctgagggtga

SEQ ID NO: 20461 - DNA, 50 bp, unidentified
  source 1..50: mol_type = unassigned DNA; note = target_ISEch1
atcgcacgcacgacaaggagaggctcaaacgccgcctctccttgaccact

SEQ ID NO: 20462 - DNA, 50 bp, unidentified
  source 1..50: mol_type = unassigned DNA; note = target_ISEch4
ccggtgcctgtgtccccccggggtttttatgcctggcgaaacgtcgtcta

SEQ ID NO: 20463 - DNA, 50 bp, unidentified
  source 1..50: mol_type = unassigned DNA; note = target_ISEnfa110
aactgccatagcgttgttcgctcctttcactgtgaatttgaccgctgcat

SEQ ID NO: 20464 - DNA, 50 bp, unidentified
  source 1..50: mol_type = unassigned DNA; note = target_ISFnu4
cttagttttttgcatatttttccttctccctaaataattaattattttat

SEQ ID NO: 20465 - DNA, 50 bp, unidentified
  source 1..50: mol_type = unassigned DNA; note = target_ISFop3
gaatcctatggtcaagccataggatgacagaatgtactacttttatgcct

SEQ ID NO: 20466 - DNA, 50 bp, unidentified
  source 1..50: mol_type = unassigned DNA; note = target_ISGpa2
aagcggacacacgcagtgtgtccctacatctgaaaataccgtttctagag

SEQ ID NO: 20467 - DNA, 50 bp, unidentified
  source 1..50: mol_type = unassigned DNA; note = target_ISHaha5
cgagtcttcaactatccggccctttagctgaagatctatcttattaaggt

SEQ ID NO: 20468 - DNA, 50 bp, unidentified
  source 1..50: mol_type = unassigned DNA; note = target_ISHar3
aaatctttccagcgagtgttgatttgcatcgaaaactgacccacttagcc

SEQ ID NO: 20469 - DNA, 50 bp, unidentified
  source 1..50: mol_type = unassigned DNA; note = target_ISHar6
taaaaaccgcaacgaatcgtgcggttttttttcatcttgccatttactgt

SEQ ID NO: 20470 - DNA, 50 bp, unidentified
  source 1..50: mol_type = unassigned DNA; note = target_ISHne5
gtttggcgcatccttcgacttcgctcaggatgagcgttgtatggtttggt

SEQ ID NO: 20471 - DNA, 50 bp, unidentified
  source 1..50: mol_type = unassigned DNA; note = target_ISKpn2
gaccagcgaatttcttcttccagttgtaaaaagtggcctcagaaataccc

SEQ ID NO: 20472 - DNA, 50 bp, unidentified
  source 1..50: mol_type = unassigned DNA; note = target_ISKpn42
gcaacagcagtgagactgccttcctgatattgcttacgccacaggaacag

SEQ ID NO: 20473 - DNA, 50 bp, unidentified
  source 1..50: mol_type = unassigned DNA; note = target_ISKrh6
ccgggtcccaaccccggttctcccccccccatctccccgcgccggttccc

SEQ ID NO: 20474 - DNA, 50 bp, unidentified
  source 1..50: mol_type = unassigned DNA; note = target_ISMahy7
cctgatgtcaatctgatgtctaacgctgagcttagcggcgccacgacagt

SEQ ID NO: 20475 - DNA, 50 bp, unidentified
  source 1..50: mol_type = unassigned DNA; note = target_ISMch6
ggatgccttgctgcatcactcggaccagggctcgcaatacacgagcgaag

SEQ ID NO: 20476 - DNA, 50 bp, unidentified
  source 1..50: mol_type = unassigned DNA; note = target_ISMlo1
tcccgcagaccgtggtccagacctgcatcgtgcacctgatccgccatctg

SEQ ID NO: 20477 - DNA, 50 bp, unidentified
  source 1..50: mol_type = unassigned DNA; note = target_ISMlo2
gtcgacgttaggccgccgcatgatggggtcagtagggcgaggcgtctcaa

SEQ ID NO: 20478 - DNA, 50 bp, unidentified
  source 1..50: mol_type = unassigned DNA; note = target_ISMlu12
ggcgttcgtccccaccgtcccccccaccccccccacgacgacggccgccc

SEQ ID NO: 20479 - DNA, 50 bp, unidentified
  source 1..50: mol_type = unassigned DNA; note = target_ISMno14
ttcagatgaaatgcggttttcacacagcctccacccgagccggaactcgc

SEQ ID NO: 20480 - DNA, 50 bp, unidentified
  source 1..50: mol_type = unassigned DNA; note = target_ISMno26
cgaacgccggcttgggcggggcttgtcgcaaacgcgaacgggcccgcgtt

SEQ ID NO: 20481 - DNA, 50 bp, unidentified
  source 1..50: mol_type = unassigned DNA; note = target_ISMpa1
tgttggtggacgccagcgccagctagccgccgagcgtcacgctagcgtga

SEQ ID NO: 20482 - DNA, 50 bp, unidentified
  source 1..50: mol_type = unassigned DNA; note = target_ISMtsp7
agaagacgctttcggccatggcgttgtcgtgagcatctccgaccgagccc

SEQ ID NO: 20483 - DNA, 50 bp, unidentified
  source 1..50: mol_type = unassigned DNA; note = target_ISMysp1
attcttgtagacgcaagtcgtcctttcgacgattggtgaaagggcatcaa

SEQ ID NO: 20484 - DNA, 50 bp, unidentified
  source 1..50: mol_type = unassigned DNA; note = target_ISOt5
gccagttaaagttgataatattcctataggtattgcaatgtttgcttctc

SEQ ID NO: 20485 - DNA, 50 bp, unidentified
  source 1..50: mol_type = unassigned DNA; note = target_ISPa11
aaccctcgacatgtccccgtagggcgaataaccgctcgcggttatccgcc

SEQ ID NO: 20486 - DNA, 50 bp, unidentified
  source 1..50: mol_type = unassigned DNA; note = target_ISPa49
ccatgccgggcgagcgcacggaggactactgatgggcctttttcaaaccc

SEQ ID NO: 20487 - DNA, 50 bp, unidentified
  source 1..50: mol_type = unassigned DNA; note = target_ISPa62
cgccgcgaagcggcgtcggcttgaacgaattgttagacattatttgccga

SEQ ID NO: 20488 - DNA, 50 bp, unidentified
  source 1..50: mol_type = unassigned DNA; note = target_ISPath1
cgcaaacgccccttccacggggcgtttttcattggctcgcgaacatcatg

SEQ ID NO: 20489 - DNA, 50 bp, unidentified
  source 1..50: mol_type = unassigned DNA; note = target_ISPfa1
actcgcgatagagaaagaaaggaaagccgaaaatgaaagtcgccgtttta

SEQ ID NO: 20490 - DNA, 50 bp, unidentified
  source 1..50: mol_type = unassigned DNA; note = target_ISPfa2
caatgcacccatccatcacaggagacatcatgggacgactgactacccac

SEQ ID NO: 20491 - DNA, 50 bp, unidentified
  source 1..50: mol_type = unassigned DNA; note = target_ISPfl1
ccaacctgttcatggccgccacccttcgtttggtagcgaaagggtgaagc

SEQ ID NO: 20492 - DNA, 50 bp, unidentified
  source 1..50: mol_type = unassigned DNA; note = target_ISPpr8
taatgatcatatatttaactagaatggtattactatggcttttaggcaca

SEQ ID NO: 20493 - DNA, 50 bp, unidentified
  source 1..50: mol_type = unassigned DNA; note = target_ISPpu10
caccgtattcgcgggtaaacccgctcctaccccaatcctgtgggagcggc

SEQ ID NO: 20494 - DNA, 50 bp, unidentified
  source 1..50: mol_type = unassigned DNA; note = target_ISPpu31
atcgaaagtcctgcctgcgtagcccggatgcaatccgggactgacacccg

SEQ ID NO: 20495 - DNA, 50 bp, unidentified
  source 1..50: mol_type = unassigned DNA; note = target_ISPpu9
ccggccctttcgcgggtgaacccgcgaagaggccggcccagccagcagag

SEQ ID NO: 20496 - DNA, 50 bp, unidentified
  source 1..50: mol_type = unassigned DNA; note = target_ISPsy7
gtcgggccggaaacggagccgggatttgcctactttggtccctcaaagta

SEQ ID NO: 20497 - DNA, 50 bp, unidentified
  source 1..50: mol_type = unassigned DNA; note = target_ISPye16
gcgcttcacggcgggcgtcaccatttttttgcaaccaggtccttcatcgc

SEQ ID NO: 20498 - DNA, 50 bp, unidentified
  source 1..50: mol_type = unassigned DNA; note = target_ISPye47
ccatcgccaccctcctgcagacctgcaagatgaacaacgtcgatcctacg

SEQ ID NO: 20499 - DNA, 50 bp, unidentified
  source 1..50: mol_type = unassigned DNA; note = target_ISPye59
gcgcatatttcgctgcggcggagctcgaccgcccgttccgcaaatgatcg

SEQ ID NO: 20500 - DNA, 50 bp, unidentified
  source 1..50: mol_type = unassigned DNA; note = target_ISRel7
gcgctggcgggggcacggtgacctgccactgaactttcatccagcggcga

SEQ ID NO: 20501 - DNA, 50 bp, unidentified
  source 1..50: mol_type = unassigned DNA; note = target_ISRfsp2
atcctcctctgcgaacgctgcgcctctgcggtgacataccctttttacag

SEQ ID NO: 20502 - DNA, 50 bp, unidentified
  source 1..50: mol_type = unassigned DNA; note = target_ISRhosp8
attcaggtgccgaaaccgcggccccccccggttgccgccgtagctcctcg

SEQ ID NO: 20503 - DNA, 50 bp, unidentified
  source 1..50: mol_type = unassigned DNA; note = target_ISRhru3
cgataaaagggataaaaggggtcagacccccgttaagggggttccccttt

SEQ ID NO: 20504 - DNA, 50 bp, unidentified
  source 1..50: mol_type = unassigned DNA; note = target_ISRsp4
cgcgcccttggatcagcgcaccatgtgggcctacatcttcggggccgtct

SEQ ID NO: 20505 - DNA, 50 bp, unidentified
  source 1..50: mol_type = unassigned DNA; note = target_ISSam1
tagcaccacggctcggcctgcccccacccccctgccggtcctgacctgcc

SEQ ID NO: 20506 - DNA, 50 bp, unidentified
  source 1..50: mol_type = unassigned DNA; note = target_ISShes7
ggatgccgccgagcatacatggatgtactcgctgtgtgtcactggaatga

SEQ ID NO: 20507 - DNA, 50 bp, unidentified
  source 1..50: mol_type = unassigned DNA; note = target_ISShsp1
aaacatcctcgaagccgctgccatggaactgctggtcgccggacacgatc

SEQ ID NO: 20508 - DNA, 50 bp, unidentified
  source 1..50: mol_type = unassigned DNA; note = target_ISSlo1
cgccgccgtgaagcccacacggatgtgctccaacaacttccgtgtttaac

SEQ ID NO: 20509 - DNA, 50 bp, unidentified
  source 1..50: mol_type = unassigned DNA; note = target_ISSm3
cgtggtgtacccatgcgctcctcctatgctcgaactatagggcaggatcg

SEQ ID NO: 20510 - DNA, 50 bp, unidentified
  source 1..50: mol_type = unassigned DNA; note = target_ISSod14
gttgattaagaaaaagatatggctgtcctctcttttgtcttggcggcatg

SEQ ID NO: 20511 - DNA, 50 bp, unidentified
  source 1..50: mol_type = unassigned DNA; note = target_ISSod19
ggtcatgctcgatttgttcatggatggcaattgcaatgccgatggttaca

SEQ ID NO: 20512 - DNA, 50 bp, unidentified
  source 1..50: mol_type = unassigned DNA; note = target_ISSpe2
aagcttcgcgctgaaccacatggatggtgaatgcagaaaatgtccggaac

SEQ ID NO: 20513 - DNA, 50 bp, unidentified
  source 1..50: mol_type = unassigned DNA; note = target_ISSpe4
aggttccaccaattatcccgtgtagatacggctgcgggcttcggtttcag

SEQ ID NO: 20514 - DNA, 50 bp, unidentified
  source 1..50: mol_type = unassigned DNA; note = target_ISSph14
gaccgggcctgatgcccggtccctttttttgctttcggggagatcccacc

SEQ ID NO: 20515 - DNA, 50 bp, unidentified
  source 1..50: mol_type = unassigned DNA; note = target_ISSphsp16
tgctgcacagtttgctgcacacttgaggctgctatggctacaaaaaaatt

SEQ ID NO: 20516 - DNA, 50 bp, unidentified
  source 1..50: mol_type = unassigned DNA; note = target_ISSpi6
gatttagcctttttgttgaaggctttttatgcacatattttcttagaata

SEQ ID NO: 20517 - DNA, 50 bp, unidentified
  source 1..50: mol_type = unassigned DNA; note = target_ISSpu22
atgccgtcgtcgagccctcatggatgagtttatggcgtgtcactggaatg

SEQ ID NO: 20518 - DNA, 50 bp, unidentified
  source 1..50: mol_type = unassigned DNA; note = target_ISStma4
acggcagtcgagcaagctcgactctactcaaggtccgcagtagatccacg

SEQ ID NO: 20519 - DNA, 50 bp, unidentified
  source 1..50: mol_type = unassigned DNA; note = target_ISStma6
tgccatccacgcatggcgtggatctactggaaatgccgcatccacggagg

SEQ ID NO: 20520 - DNA, 50 bp, unidentified
  source 1..50: mol_type = unassigned DNA; note = target_ISStma7
ccgcatggatgcggctgccaagcctacatggaggtatttacggcgtcccc

SEQ ID NO: 20521 - DNA, 50 bp, unidentified
  source 1..50: mol_type = unassigned DNA; note = target_ISStma8
cgccatggatggcgcctacgagcctacaaggacgtacttgcggcgtgtcc

SEQ ID NO: 20522 - DNA, 50 bp, unidentified
  source 1..50: mol_type = unassigned DNA; note = target_ISSto5
atagaatccttcatactgacctcctccacactcccggaagcttcagactc

SEQ ID NO: 20523 - DNA, 50 bp, unidentified
  source 1..50: mol_type = unassigned DNA; note = target_ISVpa1
tttagactccttgctctaacgcattctgtccaaaaacgtttcacaagcga

SEQ ID NO: 20524 - DNA, 50 bp, unidentified
  source 1..50: mol_type = unassigned DNA; note = target_ISWen2
ttgtaaaattctgcaacaatttcttttttctacttagtttgggttatgca

SEQ ID NO: 20525 - DNA, 50 bp, unidentified
  source 1..50: mol_type = unassigned DNA; note = target_ISWpi12
tacacctgcaccaactccaaaatatggaatgcagagcatttctccgacgt

SEQ ID NO: 20526 - DNA, 50 bp, unidentified
  source 1..50: mol_type = unassigned DNA; note = target_ISXne4
tatcacctggtctctttcacggagagcataaaaaagcgtgggtcactaca

SEQ ID NO: 20527 - DNA, 50 bp, unidentified
  source 1..50: mol_type = unassigned DNA; note = target_001fad1
  misc_feature 1..22: note = LF
  misc_feature 23..25: note = Core
  misc_feature 26..50: note = RF
tcaactgcaccgaatatgagtcagatccaaatttgcacgccggatcacag

SEQ ID NO: 20528 - DNA, 50 bp, unidentified
  source 1..50: mol_type = unassigned DNA; note = target_0020f6d
  misc_feature 1..23: note = LF
  misc_feature 24..25: note = Core
  misc_feature 26..50: note = RF
caggtcgctcgtgttcgacgcggctcagcggtcggtgaagcgaaggtgcc

SEQ ID NO: 20529 - DNA, 50 bp, unidentified
  source 1..50: mol_type = unassigned DNA; note = target_0021d87
  misc_feature 1..24: note = LF
  misc_feature 25: note = Core
  misc_feature 26..50: note = RF
tcaggactgatccaaaggcataacttccggattgcccgtggtccgcgcgg

SEQ ID NO: 20530 - DNA, 50 bp, unidentified
  source 1..50: mol_type = unassigned DNA; note = target_0024046
  misc_feature 1..24: note = LF
  misc_feature 25: note = Core
  misc_feature 26..50: note = RF
cagcggacggtgttccctctaacgtaaagctaaggggctgcgcgcttttg

SEQ ID NO: 20531 - DNA, 50 bp, unidentified
  source 1..50: mol_type = unassigned DNA; note = target_002e543
  misc_feature 1..23: note = LF
  misc_feature 24..25: note = Core
  misc_feature 26..50: note = RF
gtcgaggtgtttccgcccaccacctgaccccgcctgctcgctctgcgtgc

SEQ ID NO: 20532 - DNA, 50 bp, unidentified
  source 1..50: mol_type = unassigned DNA; note = target_002f21a
  misc_feature 1..24: note = LF
  misc_feature 25: note = Core
  misc_feature 26..50: note = RF
taattcgccgctctgtctgttgatttccactgagagctgacccggcgggg

SEQ ID NO: 20533 - DNA, 50 bp, unidentified
  source 1..50: mol_type = unassigned DNA; note = target_0041c38
  misc_feature 1..23: note = LF
  misc_feature 24..25: note = Core
  misc_feature 26..50: note = RF
ctgcggtgcggcccgtcagaccggactttcgcggcacccgcgaaatctca

SEQ ID NO: 20534 - DNA, 50 bp, unidentified
  source 1..50: mol_type = unassigned DNA; note = target_0046f74
  misc_feature 1..22: note = LF
  misc_feature 23..25: note = Core
  misc_feature 26..50: note = RF
gtgaatgaacacggttgttctccttttctcgtatttcagcgcatgtgaac

SEQ ID NO: 20535 - DNA, 50 bp, unidentified
  source 1..50: mol_type = unassigned DNA; note = target_004eae7
  misc_feature 1..22: note = LF
  misc_feature 23..25: note = Core
  misc_feature 26..50: note = RF
gcaaggcaaaaaccggcagtagaaaggttcctgcgggcttgctcgcgtgg

SEQ ID NO: 20536 - DNA, 50 bp, unidentified
  source 1..50: mol_type = unassigned DNA; note = target_0053ab9
  misc_feature 1..23: note = LF
  misc_feature 24..25: note = Core
  misc_feature 26..50: note = RF
cgcgaagtgcgggaattgaggttcccccgacaacgatgttgagttggtgt

SEQ ID NO: 20537 - DNA, 50 bp, unidentified
  source 1..50: mol_type = unassigned DNA; note = target_006c6c6
  misc_feature 1..24: note = LF
  misc_feature 25: note = Core
  misc_feature 26..50: note = RF
tcgtctccagcgcgctgtcagcggcatgagcggatgctgagcttccacgc

SEQ ID NO: 20538 - DNA, 50 bp, unidentified
  source 1..50: mol_type = unassigned DNA; note = target_00743d6
  misc_feature 1..23: note = LF
  misc_feature 24..25: note = Core
  misc_feature 26..50: note = RF
gctgggccgatggaccctcagccctgacacattcagaccgccggcccgga

SEQ ID NO: 20539 - DNA, 50 bp, unidentified
  source 1..50: mol_type = unassigned DNA; note = target_0074fd6
  misc_feature 1..23: note = LF
  misc_feature 24..25: note = Core
  misc_feature 26..50: note = RF
gcaacaccggacgaaaacaagcctagtatccaacgatccaactccggggc

SEQ ID NO: 20540 - DNA, 50 bp, unidentified
  source 1..50: mol_type = unassigned DNA; note = target_0078451
  misc_feature 1..23: note = LF
  misc_feature 24..25: note = Core
  misc_feature 26..50: note = RF
cagccgccggagaccgggcagggtggaaagccgaccgtccggcgtagagc

SEQ ID NO: 20541 - DNA, 50 bp, unidentified
  source 1..50: mol_type = unassigned DNA; note = target_007871a
  misc_feature 1..23: note = LF
  misc_feature 24..25: note = Core
  misc_feature 26..50: note = RF
ccaacacatgggaattccgtaagcgttcgctggacaacactgacggctta

SEQ ID NO: 20542 - DNA, 50 bp, unidentified
  source 1..50: mol_type = unassigned DNA; note = target_0079ae6
  misc_feature 1..24: note = LF
  misc_feature 25: note = Core
  misc_feature 26..50: note = RF
cgacgacgtgacgcggatacgtgccgttcggggatgcgtgatcaacctct

SEQ ID NO: 20543 - DNA, 50 bp, unidentified
  source 1..50: mol_type = unassigned DNA; note = target_007b3fc
  misc_feature 1..24: note = LF
  misc_feature 25: note = Core
  misc_feature 26..50: note = RF
atggtcttaaactatcctgcccgttagcttaactgaaagacagcccacta

SEQ ID NO: 20544 - DNA, 50 bp, unidentified
  source 1..50: mol_type = unassigned DNA; note = target_007da4e
  misc_feature 1..23: note = LF
  misc_feature 24..25: note = Core
  misc_feature 26..50: note = RF
gctcaacaacctcgattcagaggtcgtagtagagctcgaagtcgtgcacg

SEQ ID NO: 20545 - DNA, 50 bp, unidentified
  source 1..50: mol_type = unassigned DNA; note = target_00809fb
  misc_feature 1..23: note = LF
  misc_feature 24..25: note = Core
  misc_feature 26..50: note = RF
aagtcttccattataataacctccttatttattatctatttccactcatt

SEQ ID NO: 20546 - DNA, 50 bp, unidentified
  source 1..50: mol_type = unassigned DNA; note = target_0080dc3
  misc_feature 1..23: note = LF
  misc_feature 24..25: note = Core
  misc_feature 26..50: note = RF
caatgtgattttccaggtactgaagtacgatgtcttcggtgatggcgccg

SEQ ID NO: 20547 - DNA, 50 bp, unidentified
  source 1..50: mol_type = unassigned DNA; note = target_0085a3d
  misc_feature 1..23: note = LF
  misc_feature 24..25: note = Core
  misc_feature 26..50: note = RF
ggtaccggtggtgtgctcatgccgccacctgctcgggggccggtgcggtg

SEQ ID NO: 20548 - DNA, 50 bp, unidentified
  source 1..50: mol_type = unassigned DNA; note = target_00860ff
  misc_feature 1..23: note = LF
  misc_feature 24..25: note = Core
  misc_feature 26..50: note = RF
ttgtcatcatcgttgaaatactcctttcattgttgtcgttgttgccattc

SEQ ID NO: 20549 - DNA, 50 bp, unidentified
  source 1..50: mol_type = unassigned DNA; note = target_009a237
  misc_feature 1..23: note = LF
  misc_feature 24..25: note = Core
  misc_feature 26..50: note = RF
gtccgccgcgtcagaaatgaacttacctgaaaccccattttgcggggaac

SEQ ID NO: 20550 - DNA, 50 bp, unidentified
  source 1..50: mol_type = unassigned DNA; note = target_009dd87
  misc_feature 1..24: note = LF
  misc_feature 25: note = Core
  misc_feature 26..50: note = RF
actcgtcagttctacaagagtaactgacgagtggacggtgatttcctcgc

SEQ ID NO: 20551 - DNA, 50 bp, unidentified
  source 1..50: mol_type = unassigned DNA; note = target_009e4ae
  misc_feature 1..22: note = LF
  misc_feature 23..25: note = Core
  misc_feature 26..50: note = RF
atacagccgatagtttcgagtcagactcttaacttgagatgatctgcctt

SEQ ID NO: 20552 - DNA, 50 bp, unidentified
  source 1..50: mol_type = unassigned DNA; note = target_00a0078
  misc_feature 1..24: note = LF
  misc_feature 25: note = Core
  misc_feature 26..50: note = RF
caaccccggatgcctgcctgccggcaggcaggagttcaggatgacttaga

SEQ ID NO: 20553 - DNA, 50 bp, unidentified
  source 1..50: mol_type = unassigned DNA; note = target_00bd0de
  misc_feature 1..21: note = LF
  misc_feature 22..25: note = Core
  misc_feature 26..50: note = RF
cacgccacgaagacgggttcgctcatggtgtcagcaccaccttgagtgcg

SEQ ID NO: 20554 - DNA, 50 bp, unidentified
  source 1..50: mol_type = unassigned DNA; note = target_00bee42
  misc_feature 1..22: note = LF
  misc_feature 23..25: note = Core
  misc_feature 26..50: note = RF
agaagaagcataattgcttctttttttgtgaaaagacttgtaaaaacttt

SEQ ID NO: 20555 - DNA, 50 bp, unidentified
  source 1..50: mol_type = unassigned DNA; note = target_00c55a3
  misc_feature 1..22: note = LF
  misc_feature 23..25: note = Core
  misc_feature 26..50: note = RF
tccttttctgccgattcacctcctttgctgttttcacaaaccatgctaaa

SEQ ID NO: 20556 - DNA, 50 bp, unidentified
  source 1..50: mol_type = unassigned DNA; note = target_00d89ca
  misc_feature 1..22: note = LF
  misc_feature 23..25: note = Core
  misc_feature 26..50: note = RF
ggacgaatgcaggacccgttgttgaaccagagcctcgatttcctcggttg

SEQ ID NO: 20557 - DNA, 50 bp, unidentified
  source 1..50: mol_type = unassigned DNA; note = target_00db659
  misc_feature 1..23: note = LF
  misc_feature 24..25: note = Core
  misc_feature 26..50: note = RF
tcgacttcgatcacgcccgcggcctgaaacgtgaccaggtcatgcatctg

SEQ ID NO: 20558 - DNA, 50 bp, unidentified
  source 1..50: mol_type = unassigned DNA; note = target_00e1564
  misc_feature 1..23: note = LF
  misc_feature 24..25: note = Core
  misc_feature 26..50: note = RF
tgtcgggcgaacggcgccccctcccccggggggggggcgcgtggccatgc

SEQ ID NO: 20559 - DNA, 50 bp, unidentified
  source 1..50: mol_type = unassigned DNA; note = target_00f1c69
  misc_feature 1..23: note = LF
  misc_feature 24..25: note = Core
  misc_feature 26..50: note = RF
aaatctctcgcgctacacccatcctacggcgcgtcgcgaagctcctgttg

SEQ ID NO: 20560 - DNA, 50 bp, unidentified
  source 1..50: mol_type = unassigned DNA; note = target_00f8b27
  misc_feature 1..24: note = LF
  misc_feature 25: note = Core
  misc_feature 26..50: note = RF
ctcggcttgcactatctttgcaccatgaaaaagttattggctctcacaat

SEQ ID NO: 20561 - DNA, 50 bp, unidentified
  source 1..50: mol_type = unassigned DNA; note = target_00ff113
  misc_feature 1..24: note = LF
  misc_feature 25: note = Core
  misc_feature 26..50: note = RF
gttgtcatgtcaatccggtttctttttttgaggcggtcaacatttactcg

SEQ ID NO: 20562 - DNA, 50 bp, unidentified
  source 1..50: mol_type = unassigned DNA; note = target_0107d72
  misc_feature 1..22: note = LF
  misc_feature 23..25: note = Core
  misc_feature 26..50: note = RF
gtcatttttaaattttaatatcctttccataccactcttgtaggatcata

SEQ ID NO: 20563 - DNA, 50 bp, unidentified
  source 1..50: mol_type = unassigned DNA; note = target_010e660
  misc_feature 1..23: note = LF
  misc_feature 24..25: note = Core
  misc_feature 26..50: note = RF
cccccacacgtctgcgggcgatgctagctcggtgtgcaggctggagccgt

SEQ ID NO: 20564 - DNA, 50 bp, unidentified
  source 1..50: mol_type = unassigned DNA; note = target_01103c4
  misc_feature 1..22: note = LF
  misc_feature 23..25: note = Core
  misc_feature 26..50: note = RF
gaaagcatcttatagccacccccttcttcgatttattggcagatttttcg

SEQ ID NO: 20565 - DNA, 50 bp, unidentified
  source 1..50: mol_type = unassigned DNA; note = target_0117f5e
  misc_feature 1..22: note = LF
  misc_feature 23..25: note = Core
  misc_feature 26..50: note = RF
cagagaccatgtcacattggcctgacagcaccgcctgacagcaccgcgcg

SEQ ID NO: 20566 - DNA, 50 bp, unidentified
  source 1..50: mol_type = unassigned DNA; note = target_0118d1a
  misc_feature 1..22: note = LF
  misc_feature 23..25: note = Core
  misc_feature 26..50: note = RF
tcatttgacttgatttcctttcctttcttttatgaatggttgatgtcaga

SEQ ID NO: 20567 - DNA, 50 bp, unidentified
  source 1..50: mol_type = unassigned DNA; note = target_0122ddb
  misc_feature 1..24: note = LF
  misc_feature 25: note = Core
  misc_feature 26..50: note = RF
atttccccttttccagatcggcagcggaccttgattcggtagtaaggaaa

SEQ ID NO: 20568 - DNA, 50 bp, unidentified
  source 1..50: mol_type = unassigned DNA; note = target_01556e5
  misc_feature 1..23: note = LF
  misc_feature 24..25: note = Core
  misc_feature 26..50: note = RF
tcagaacaagagcagtccgaaatcgaacgctaagggcgaacggaatgaga

SEQ ID NO: 20569 - DNA, 50 bp, unidentified
  source 1..50: mol_type = unassigned DNA; note = target_015a4e1
  misc_feature 1..23: note = LF
  misc_feature 24..25: note = Core
  misc_feature 26..50: note = RF
aatcgccgctcgagaccagtcaggaacaaccatggaaatattgcgcgcgg

SEQ ID NO: 20570 - DNA, 50 bp, unidentified
  source 1..50: mol_type = unassigned DNA; note = target_016d258
  misc_feature 1..24: note = LF
  misc_feature 25: note = Core
  misc_feature 26..50: note = RF
ccagtgacctgtgccacacataacgccagcaataaacggcgccctgacaa

SEQ ID NO: 20571 - DNA, 50 bp, unidentified
  source 1..50: mol_type = unassigned DNA; note = target_0172b2d
  misc_feature 1..23: note = LF
  misc_feature 24..25: note = Core
  misc_feature 26..50: note = RF
cgaaaccgattgaagtgaacgcgctctaggcccccacgcttagagccatt

SEQ ID NO: 20572 - DNA, 50 bp, unidentified
  source 1..50: mol_type = unassigned DNA; note = target_0174494
  misc_feature 1..23: note = LF
  misc_feature 24..25: note = Core
  misc_feature 26..50: note = RF
gactaattttgcgataaaaatccctcctattttccttactcagactctga

SEQ ID NO: 20573 - DNA, 50 bp, unidentified
  source 1..50: mol_type = unassigned DNA; note = target_017daa5
  misc_feature 1..24: note = LF
  misc_feature 25: note = Core
  misc_feature 26..50: note = RF
aaaaagcccgggcaagtcccgggcttttttctgcgcggtatcttcaggcc

SEQ ID NO: 20574 - DNA, 50 bp, unidentified
  source 1..50: mol_type = unassigned DNA; note = target_017f72e
  misc_feature 1..23: note = LF
  misc_feature 24..25: note = Core
  misc_feature 26..50: note = RF
acaaatatggaagcttggacacactaataaaactaataaatataaattat

SEQ ID NO: 20575 - DNA, 50 bp, unidentified
  source 1..50: mol_type = unassigned DNA; note = target_0182188
  misc_feature 1..23: note = LF
  misc_feature 24..25: note = Core
  misc_feature 26..50: note = RF
gtcctccccatccgcgatcacgctttttgagcaggcggttctcgagggtg

SEQ ID NO: 20576 - DNA, 50 bp, unidentified
  source 1..50: mol_type = unassigned DNA; note = target_01874bf
  misc_feature 1..21: note = LF
  misc_feature 22..25: note = Core
  misc_feature 26..50: note = RF
gctgagtgttcaacggtcgcccttggggggcggacaagttcgcgcttttc

SEQ ID NO: 20577 - DNA, 50 bp, unidentified
  source 1..50: mol_type = unassigned DNA; note = target_018b4fd
  misc_feature 1..23: note = LF
  misc_feature 24..25: note = Core
  misc_feature 26..50: note = RF
ctatcgcgccgagggcggcgctcctacatgtcattaattatcaggcgtta

SEQ ID NO: 20578 - DNA, 50 bp, unidentified
  source 1..50: mol_type = unassigned DNA; note = target_019213e
  misc_feature 1..23: note = LF
  misc_feature 24..25: note = Core
  misc_feature 26..50: note = RF
gacataagatgccatgttatcacctccaaagatagtatgcgttagattcg

SEQ ID NO: 20579 - DNA, 50 bp, unidentified
  source 1..50: mol_type = unassigned DNA; note = target_0197a09
  misc_feature 1..23: note = LF
  misc_feature 24..25: note = Core
  misc_feature 26..50: note = RF
cgctcgctgacgcgagcggcctcctcagggtgacggcggaggggaggcga

SEQ ID NO: 20580 - DNA, 50 bp, unidentified
  source 1..50: mol_type = unassigned DNA; note = target_019aaee
  misc_feature 1..21: note = LF
  misc_feature 22..25: note = Core
  misc_feature 26..50: note = RF
cttggggacggccatggggtcctcctgggtgagtcgggttcttgccgggg

SEQ ID NO: 20581 - DNA, 50 bp, unidentified
  source 1..50: mol_type = unassigned DNA; note = target_01a9c4f
  misc_feature 1..24: note = LF
  misc_feature 25: note = Core
  misc_feature 26..50: note = RF
ccccgcgtgcgcgtaaaacggggttttgaccaacttcatattctgctccc

SEQ ID NO: 20582 - DNA, 50 bp, unidentified
  source 1..50: mol_type = unassigned DNA; note = target_01ad162
  misc_feature 1..24: note = LF
  misc_feature 25: note = Core
  misc_feature 26..50: note = RF
tgagtctcgcatgattttgtagggtgcgccgtgcgcaccatcgttgatca

SEQ ID NO: 20583 - DNA, 50 bp, unidentified
  source 1..50: mol_type = unassigned DNA; note = target_01c3370
  misc_feature 1..23: note = LF
  misc_feature 24..25: note = Core
  misc_feature 26..50: note = RF
gaacctgcaaccagtcggttatgagccgacggctctaacctttgagctag

SEQ ID NO: 20584 - DNA, 50 bp, unidentified
  source 1..50: mol_type = unassigned DNA; note = target_01cfb4a
  misc_feature 1..24: note = LF
  misc_feature 25: note = Core
  misc_feature 26..50: note = RF
attgtctttccgcttagccgacccgataccggacgtgcccgagcgtttgc

SEQ ID NO: 20585 - DNA, 50 bp, unidentified
  source 1..50: mol_type = unassigned DNA; note = target_01d09e5
  misc_feature 1..24: note = LF
  misc_feature 25: note = Core
  misc_feature 26..50: note = RF
attataatcttttgactaaacccgttatttgcgatgaaccgatgttggca

SEQ ID NO: 20586 - DNA, 50 bp, unidentified
  source 1..50: mol_type = unassigned DNA; note = target_01d39a7
  misc_feature 1..24: note = LF
  misc_feature 25: note = Core
  misc_feature 26..50: note = RF
agaaatcacttgcaatgcgggagccatccgcacaggacgctcatggtgtc

SEQ ID NO: 20587 - DNA, 50 bp, unidentified
  source 1..50: mol_type = unassigned DNA; note = target_01d8bc3
  misc_feature 1..23: note = LF
  misc_feature 24..25: note = Core
  misc_feature 26..50: note = RF
tgaccgatcaaagagtccgcttctggcacatcgcttcaattcaccccaac

SEQ ID NO: 20588 - DNA, 50 bp, unidentified
  source 1..50: mol_type = unassigned DNA; note = target_01de067
  misc_feature 1..23: note = LF
  misc_feature 24..25: note = Core
  misc_feature 26..50: note = RF
tctgccaaatatcctcaatactcctttctgtttttgtttggtggcttgaa

SEQ ID NO: 20589 - DNA, 50 bp, unidentified
  source 1..50: mol_type = unassigned DNA; note = target_01e30b2
  misc_feature 1..23: note = LF
  misc_feature 24..25: note = Core
  misc_feature 26..50: note = RF
tgtggagatggactctataaaattatgtaaagaaactcttgacggtctaa

SEQ ID NO: 20590 - DNA, 50 bp, unidentified
  source 1..50: mol_type = unassigned DNA; note = target_01e4de2
  misc_feature 1..23: note = LF
  misc_feature 24..25: note = Core
  misc_feature 26..50: note = RF
ggtttcactacgttcaacccaacctacaattatccttaaccgaaccgtat

SEQ ID NO: 20591 - DNA, 50 bp, unidentified
  source 1..50: mol_type = unassigned DNA; note = target_01e73c5
  misc_feature 1..23: note = LF
  misc_feature 24..25: note = Core
  misc_feature 26..50: note = RF
gaagcgctgagcatggcagaagctggccagcgtgccacgatagtggcgac

SEQ ID NO: 20592 - DNA, 50 bp, unidentified
  source 1..50: mol_type = unassigned DNA; note = target_01e9d2e
  misc_feature 1..23: note = LF
  misc_feature 24..25: note = Core
  misc_feature 26..50: note = RF
cctcgaattcgagggggtctgtactgtaacgtgcagatgttaaagtacag

SEQ ID NO: 20593 - DNA, 50 bp, unidentified
  source 1..50: mol_type = unassigned DNA; note = target_01ebc3d
  misc_feature 1..23: note = LF
  misc_feature 24..25: note = Core
  misc_feature 26..50: note = RF
atgcgcctccttcccggcgcatcctatgcgagctgggctgcacggccttg

SEQ ID NO: 20594 - DNA, 50 bp, unidentified
  source 1..50: mol_type = unassigned DNA; note = target_01ed685
  misc_feature 1..23: note = LF
  misc_feature 24..25: note = Core
  misc_feature 26..50: note = RF
ttcaattttgctcttgacattcattagcaagtcttgtgtctgtaacaaag

SEQ ID NO: 20595 - DNA, 50 bp, unidentified
  source 1..50: mol_type = unassigned DNA; note = target_01f19ee
  misc_feature 1..22: note = LF
  misc_feature 23..25: note = Core
  misc_feature 26..50: note = RF
atgcggcaacctgaggttactctgacaatgcccccgtctcctctgaaatc

SEQ ID NO: 20596 - DNA, 50 bp, unidentified
  source 1..50: mol_type = unassigned DNA; note = target_01f3239
  misc_feature 1..24: note = LF
  misc_feature 25: note = Core
  misc_feature 26..50: note = RF
tccgcgcaagccgagcgcacagggaggtgttcacagcgtctttacgatct

SEQ ID NO: 20597 - DNA, 50 bp, unidentified
  source 1..50: mol_type = unassigned DNA; note = target_01f707c
  misc_feature 1..23: note = LF
  misc_feature 24..25: note = Core
  misc_feature 26..50: note = RF
gttttgccataacggcctcctttctactttattttcaagaattagttttt

SEQ ID NO: 20598 - DNA, 50 bp, unidentified
  source 1..50: mol_type = unassigned DNA; note = target_01f733a
  misc_feature 1..24: note = LF
  misc_feature 25: note = Core
  misc_feature 26..50: note = RF
ctttgtagcaataaattatatacgttgttacccacaggctttttttattc

SEQ ID NO: 20599 - DNA, 50 bp, unidentified
  source 1..50: mol_type = unassigned DNA; note = target_01fb361
  misc_feature 1..23: note = LF
  misc_feature 24..25: note = Core
  misc_feature 26..50: note = RF
ttatctttatccataaactcctcctattacataccatactcaagttagct

SEQ ID NO: 20600 - DNA, 50 bp, unidentified
  source 1..50: mol_type = unassigned DNA; note = target_01fcdbf
  misc_feature 1..24: note = LF
  misc_feature 25: note = Core
  misc_feature 26..50: note = RF
atgacgtagttcaaaagcctggattgccacgcccctgcggggctcgcaat

SEQ ID NO: 20601 - DNA, 50 bp, unidentified
  source 1..50: mol_type = unassigned DNA; note = target_0203eeb
  misc_feature 1..22: note = LF
  misc_feature 23..25: note = Core
  misc_feature 26..50: note = RF
gctgcggtgcatgagtccgcttatggcacttagcgtcattcgccgcgccg

SEQ ID NO: 20602 - DNA, 50 bp, unidentified
  source 1..50: mol_type = unassigned DNA; note = target_0204134
  misc_feature 1..23: note = LF
  misc_feature 24..25: note = Core
  misc_feature 26..50: note = RF
cctgcctttgtgcgagccgagattgtccatgacaacgatgtcgccggggt

SEQ ID NO: 20603 - DNA, 50 bp, unidentified
  source 1..50: mol_type = unassigned DNA; note = target_0225791
  misc_feature 1..22: note = LF
  misc_feature 23..25: note = Core
  misc_feature 26..50: note = RF
tacgcggccgaatcgtcgcgaatgacccggagcagtcctccatgaagtcg

SEQ ID NO: 20604 - DNA, 50 bp, unidentified
  source 1..50: mol_type = unassigned DNA; note = target_022611f
  misc_feature 1..21: note = LF
  misc_feature 22..25: note = Core
  misc_feature 26..50: note = RF
gcagtgatgctgaacatgatgcccccctcgggtctgcgttcatttcagcg

SEQ ID NO: 20605 - DNA, 50 bp, unidentified
  source 1..50: mol_type = unassigned DNA; note = target_022f473
  misc_feature 1..23: note = LF
  misc_feature 24..25: note = Core
  misc_feature 26..50: note = RF
aataaagattaaacctaattatcctatttagatgtatatgacaaaaatgt

SEQ ID NO: 20606 - DNA, 50 bp, unidentified
  source 1..50: mol_type = unassigned DNA; note = target_022fe00
  misc_feature 1..22: note = LF
  misc_feature 23..25: note = Core
  misc_feature 26..50: note = RF
accataaatccatctatttctcctttctcttaataacgttgatatgattg

SEQ ID NO: 20607 - DNA, 50 bp, unidentified
  source 1..50: mol_type = unassigned DNA; note = target_022fe03
  misc_feature 1..23: note = LF
  misc_feature 24..25: note = Core
  misc_feature 26..50: note = RF
ctccggcgagtacgcgaaggggcctagccggttcggttggccaagctccg

SEQ ID NO: 20608 - DNA, 50 bp, unidentified
  source 1..50: mol_type = unassigned DNA; note = target_0234e45
  misc_feature 1..22: note = LF
  misc_feature 23..25: note = Core
  misc_feature 26..50: note = RF
tatgcttatttagttttgatacaaagttggggataaatgtatgaaatggg

SEQ ID NO: 20609 - DNA, 50 bp, unidentified
  source 1..50: mol_type = unassigned DNA; note = target_023b80b
  misc_feature 1..23: note = LF
  misc_feature 24..25: note = Core
  misc_feature 26..50: note = RF
tcttgtgattcttccttttcctcctgttctttccctgattcgtggtcttc

SEQ ID NO: 20610 - DNA, 50 bp, unidentified
  source 1..50: mol_type = unassigned DNA; note = target_023eb55
  misc_feature 1..24: note = LF
  misc_feature 25: note = Core
  misc_feature 26..50: note = RF
gcaaggcaggcctgctgagcgcaaaaagaaatgtttgatcgtgcccatcc

SEQ ID NO: 20611 - DNA, 50 bp, unidentified
  source 1..50: mol_type = unassigned DNA; note = target_0243c78
  misc_feature 1..23: note = LF
  misc_feature 24..25: note = Core
  misc_feature 26..50: note = RF
ctgaaaattgtaagtaaccaggcctggtaagttgagcaagcctcaaatat

SEQ ID NO: 20612 - DNA, 50 bp, unidentified
  source 1..50: mol_type = unassigned DNA; note = target_0243f85
  misc_feature 1..23: note = LF
  misc_feature 24..25: note = Core
  misc_feature 26..50: note = RF
tgtctggaatcccctcaaaagcagacgttcggcaccgagcaagcaaacga

SEQ ID NO: 20613 - DNA, 50 bp, unidentified
  source 1..50: mol_type = unassigned DNA; note = target_0244740
  misc_feature 1..23: note = LF
  misc_feature 24..25: note = Core
  misc_feature 26..50: note = RF
cacgtgcgtactgcctcagagcagaccttcccgatgttagaaatgggatg

SEQ ID NO: 20614 - DNA, 50 bp, unidentified
  source 1..50: mol_type = unassigned DNA; note = target_024ce75
  misc_feature 1..23: note = LF
  misc_feature 24..25: note = Core
  misc_feature 26..50: note = RF
ccgtggccagttttacttgaccactacaggtctaagcagccttggctggc

SEQ ID NO: 20615 - DNA, 50 bp, unidentified
  source 1..50: mol_type = unassigned DNA; note = target_02593ed
  misc_feature 1..22: note = LF
  misc_feature 23..25: note = Core
  misc_feature 26..50: note = RF
tcgcacgtgaggactttctttactgctatcaagctcgccggcgcggggct

SEQ ID NO: 20616 - DNA, 50 bp, unidentified
  source 1..50: mol_type = unassigned DNA; note = target_025a32e
  misc_feature 1..23: note = LF
  misc_feature 24..25: note = Core
  misc_feature 26..50: note = RF
tcttcatgacggcaggccaagtcagcgactatacgggtgcggcggcccta

SEQ ID NO: 20617 - DNA, 50 bp, unidentified
  source 1..50: mol_type = unassigned DNA; note = target_025e5da
  misc_feature 1..23: note = LF
  misc_feature 24..25: note = Core
  misc_feature 26..50: note = RF
tacgcgtgtccatattcatcctccttgtattcctcggctatggggaccgg

SEQ ID NO: 20618 - DNA, 50 bp, unidentified
  source 1..50: mol_type = unassigned DNA; note = target_0260eb0
  misc_feature 1..23: note = LF
  misc_feature 24..25: note = Core
  misc_feature 26..50: note = RF
tcggcgcacctcgctcattcccgtgcgtcccggcgaaggtctcttaactg

SEQ ID NO: 20619 - DNA, 50 bp, unidentified
  source 1..50: mol_type = unassigned DNA; note = target_0264524
  misc_feature 1..24: note = LF
  misc_feature 25: note = Core
  misc_feature 26..50: note = RF
tgcgccggcggtcgcggctgaagacacccccccgtcaccccgccgcaccc

SEQ ID NO: 20620 - DNA, 50 bp, unidentified
  source 1..50: mol_type = unassigned DNA; note = target_0266862
  misc_feature 1..24: note = LF
  misc_feature 25: note = Core
  misc_feature 26..50: note = RF
aagcgccaggagttcatccgtaaacgatccgaggatcactcatacagggc

SEQ ID NO: 20621 - DNA, 50 bp, unidentified
  source 1..50: mol_type = unassigned DNA; note = target_0267f89
  misc_feature 1..24: note = LF
  misc_feature 25: note = Core
  misc_feature 26..50: note = RF
ggcgtcgcgaagaccacccccccccgcggtgatccgtcaacggccccgta

SEQ ID NO: 20622 - DNA, 50 bp, unidentified
  source 1..50: mol_type = unassigned DNA; note = target_0271b29
  misc_feature 1..22: note = LF
  misc_feature 23..25: note = Core
  misc_feature 26..50: note = RF
ataattaactccgttaattccgatttgttgagataattataactcaaaac

SEQ ID NO: 20623 - DNA, 50 bp, unidentified
  source 1..50: mol_type = unassigned DNA; note = target_027a933
  misc_feature 1..23: note = LF
  misc_feature 24..25: note = Core
  misc_feature 26..50: note = RF
ttgttcaactcttctgctccgttagtttaagtgaagaacttcacaataac

SEQ ID NO: 20624 - DNA, 50 bp, unidentified
  source 1..50: mol_type = unassigned DNA; note = target_02835f5
  misc_feature 1..20: note = LF
  misc_feature 21..25: note = Core
  misc_feature 26..50: note = RF
tccgaagttttgcttcggggcttttttgatcagcggatgatcgttcccaa

SEQ ID NO: 20625 - DNA, 50 bp, unidentified
  source 1..50: mol_type = unassigned DNA; note = target_02851fb
  misc_feature 1..22: note = LF
  misc_feature 23..25: note = Core
  misc_feature 26..50: note = RF
tcgttctcgaatcccatgatggaagggccttggtgccgattccgaagaga

SEQ ID NO: 20626 - DNA, 50 bp, unidentified
  source 1..50: mol_type = unassigned DNA; note = target_028a2d6
  misc_feature 1..23: note = LF
  misc_feature 24..25: note = Core
  misc_feature 26..50: note = RF
cctgggctattctccactcctccctacgggaggaactgcactgagggcct

SEQ ID NO: 20627 - DNA, 50 bp, unidentified
  source 1..50: mol_type = unassigned DNA; note = target_028a4db
  misc_feature 1..24: note = LF
  misc_feature 25: note = Core
  misc_feature 26..50: note = RF
gcgccgacagggcctggaggcacccccccccttcgaggccttttgtctcc

SEQ ID NO: 20628 - DNA, 50 bp, unidentified
  source 1..50: mol_type = unassigned DNA; note = target_028b083
  misc_feature 1..23: note = LF
  misc_feature 24..25: note = Core
  misc_feature 26..50: note = RF
tgctgaactgccgcctaggctcgctttcagcacgcctcgttcaaccgacc

SEQ ID NO: 20629 - DNA, 50 bp, unidentified
  source 1..50: mol_type = unassigned DNA; note = target_028b3d9
  misc_feature 1..24: note = LF
  misc_feature 25: note = Core
  misc_feature 26..50: note = RF
cctgtttttggggcaataaaaaggcgctgtcacccaagcacgtggggtga

SEQ ID NO: 20630 - DNA, 50 bp, unidentified
  source 1..50: mol_type = unassigned DNA; note = target_028e2fd
  misc_feature 1..23: note = LF
  misc_feature 24..25: note = Core
  misc_feature 26..50: note = RF
gtgtaaggagatggtttataggatgtgctgaggtacgaagcgcatcacac

SEQ ID NO: 20631 - DNA, 50 bp, unidentified
  source 1..50: mol_type = unassigned DNA; note = target_028f7c1
  misc_feature 1..23: note = LF
  misc_feature 24..25: note = Core
  misc_feature 26..50: note = RF
ccgctctcggggctgtcaggaatttcgtgtgcggcgaggcggttgaccat

SEQ ID NO: 20632 - DNA, 50 bp, unidentified
  source 1..50: mol_type = unassigned DNA; note = target_02a0ca8
  misc_feature 1..22: note = LF
  misc_feature 23..25: note = Core
  misc_feature 26..50: note = RF
cgttcagtctccttgcggagcctgaatcatgctgcaagagcaagatcaat

SEQ ID NO: 20633 - DNA, 50 bp, unidentified
  source 1..50: mol_type = unassigned DNA; note = target_02a2aff
  misc_feature 1..24: note = LF
  misc_feature 25: note = Core
  misc_feature 26..50: note = RF
cgtcgtagttcccgaaaacggggttatcggcaacttcgaggttgaacttg

SEQ ID NO: 20634 - DNA, 50 bp, unidentified
  source 1..50: mol_type = unassigned DNA; note = target_02b26ab
  misc_feature 1..21: note = LF
  misc_feature 22..25: note = Core
  misc_feature 26..50: note = RF
cgagggtcacggtcatcggatgtcctgtcgttcggcgggcaggctcatcg

SEQ ID NO: 20635 - DNA, 50 bp, unidentified
  source 1..50: mol_type = unassigned DNA; note = target_02c83a1
  misc_feature 1..24: note = LF
  misc_feature 25: note = Core
  misc_feature 26..50: note = RF
gcagtgtcctggttcggcgccgatttcacagaaaggccgcagcatgcaga

SEQ ID NO: 20636 - DNA, 50 bp, unidentified
  source 1..50: mol_type = unassigned DNA; note = target_02cbbf8
  misc_feature 1..23: note = LF
  misc_feature 24..25: note = Core
  misc_feature 26..50: note = RF
tatttgtatatacaaatgcgtatcttgcaatgcacagggatgtattactg

SEQ ID NO: 20637 - DNA, 50 bp, unidentified
  source 1..50: mol_type = unassigned DNA; note = target_02cc050
  misc_feature 1..23: note = LF
  misc_feature 24..25: note = Core
  misc_feature 26..50: note = RF
tttgcggttggtgacagccgcctctacaccaaaatttagcacgtaatagc

SEQ ID NO: 20638 - DNA, 50 bp, unidentified
  source 1..50: mol_type = unassigned DNA; note = target_02d1b0d
  misc_feature 1..21: note = LF
  misc_feature 22..25: note = Core
  misc_feature 26..50: note = RF
gggccgtccagctcatcggttctcctctccggccggggcgggcccggcgg

SEQ ID NO: 20639 - DNA, 50 bp, unidentified
  source 1..50: mol_type = unassigned DNA; note = target_02d3b90
  misc_feature 1..23: note = LF
  misc_feature 24..25: note = Core
  misc_feature 26..50: note = RF
gtttgcgacgacggccgacgcccctctggtgggacaggatggcgggagtc

SEQ ID NO: 20640 - DNA, 50 bp, unidentified
  source 1..50: mol_type = unassigned DNA; note = target_02d8d27
  misc_feature 1..23: note = LF
  misc_feature 24..25: note = Core
  misc_feature 26..50: note = RF
cagcgaatcgaggagtcacgaggagcagcagcatgaaacgtgttgcaatg

SEQ ID NO: 20641 - DNA, 50 bp, unidentified
  source 1..50: mol_type = unassigned DNA; note = target_02f7caa
  misc_feature 1..23: note = LF
  misc_feature 24..25: note = Core
  misc_feature 26..50: note = RF
tttctttttcatcctgtttcctccttatatagtagagcatgatatcctca

SEQ ID NO: 20642 - DNA, 50 bp, unidentified
  source 1..50: mol_type = unassigned DNA; note = target_03060bb
  misc_feature 1..23: note = LF
  misc_feature 24..25: note = Core
  misc_feature 26..50: note = RF
gcattatcacccatattttcttcctctttacagtaaatttaccaactcac

SEQ ID NO: 20643 - DNA, 50 bp, unidentified
  source 1..50: mol_type = unassigned DNA; note = target_030b853
  misc_feature 1..24: note = LF
  misc_feature 25: note = Core
  misc_feature 26..50: note = RF
acaaaagcccgccgattggcgggctttttgtgcttcggttgacgggatgc

SEQ ID NO: 20644 - DNA, 50 bp, unidentified
  source 1..50: mol_type = unassigned DNA; note = target_030c53b
  misc_feature 1..23: note = LF
  misc_feature 24..25: note = Core
  misc_feature 26..50: note = RF
tctctaccgccttgactgggcgttgttgcacatctctgtcgacagaggat

SEQ ID NO: 20645 - DNA, 50 bp, unidentified
  source 1..50: mol_type = unassigned DNA; note = target_031016a
  misc_feature 1..22: note = LF
  misc_feature 23..25: note = Core
  misc_feature 26..50: note = RF
gagaaagtttcataaactgccttctttctgttcaatcctgcaattcatct

SEQ ID NO: 20646 - DNA, 50 bp, unidentified
  source 1..50: mol_type = unassigned DNA; note = target_03114d1
  misc_feature 1..23: note = LF
  misc_feature 24..25: note = Core
  misc_feature 26..50: note = RF
cttctctaccgccgaactacaccactcggcgggacacgaccttcagtttt

SEQ ID NO: 20647 - DNA, 50 bp, unidentified
  source 1..50: mol_type = unassigned DNA; note = target_0329289
  misc_feature 1..24: note = LF
  misc_feature 25: note = Core
  misc_feature 26..50: note = RF
gggcagcctttgggccgcaccgaacggcgggtcggcgcgcgttctctcgg

SEQ ID NO: 20648 - DNA, 50 bp, unidentified
  source 1..50: mol_type = unassigned DNA; note = target_032d267
  misc_feature 1..23: note = LF
  misc_feature 24..25: note = Core
  misc_feature 26..50: note = RF
ggtgataacagctacagccgaagtggccgttgtagctgctgccttcctgg

SEQ ID NO: 20649 - DNA, 50 bp, unidentified
  source 1..50: mol_type = unassigned DNA; note = target_0331695
  misc_feature 1..23: note = LF
  misc_feature 24..25: note = Core
  misc_feature 26..50: note = RF
cggcaagaatattgaccgccccccttactgctttatatcattggcgctaa

SEQ ID NO: 20650 - DNA, 50 bp, unidentified
  source 1..50: mol_type = unassigned DNA; note = target_0333db1
  misc_feature 1..24: note = LF
  misc_feature 25: note = Core
  misc_feature 26..50: note = RF
ctgaggagccacggtcattctgggcggaaggacgcggactgccggtagtc

SEQ ID NO: 20651 - DNA, 50 bp, unidentified
  source 1..50: mol_type = unassigned DNA; note = target_0334600
  misc_feature 1..23: note = LF
  misc_feature 24..25: note = Core
  misc_feature 26..50: note = RF
ctcttaaccttttctgccctaatagttgaagaaggagagcaattccttat

SEQ ID NO: 20652 - DNA, 50 bp, unidentified
  source 1..50: mol_type = unassigned DNA; note = target_033975c
  misc_feature 1..22: note = LF
  misc_feature 23..25: note = Core
  misc_feature 26..50: note = RF
gcctaggtcttacgtccgcttttgacccaaagcggacaatcgaaggcata

SEQ ID NO: 20653 - DNA, 50 bp, unidentified
  source 1..50: mol_type = unassigned DNA; note = target_033af7c
  misc_feature 1..23: note = LF
  misc_feature 24..25: note = Core
  misc_feature 26..50: note = RF
tgtatattctgtcatctgaactcctttctgaaaatcttaccctatgtgtg

SEQ ID NO: 20654 - DNA, 50 bp, unidentified
  source 1..50: mol_type = unassigned DNA; note = target_0341bc3
  misc_feature 1..21: note = LF
  misc_feature 22..25: note = Core
  misc_feature 26..50: note = RF
cccgctccggtttccggcccgctcatcccgcaccaccgtcaccgctggcc

SEQ ID NO: 20655 - DNA, 50 bp, unidentified
  source 1..50: mol_type = unassigned DNA; note = target_0349c53
  misc_feature 1..23: note = LF
  misc_feature 24..25: note = Core
  misc_feature 26..50: note = RF
gctgcactgcatatatctgcttttggcacaaagcggacatcccgtgactg

SEQ ID NO: 20656 - DNA, 50 bp, unidentified
  source 1..50: mol_type = unassigned DNA; note = target_035f46c
  misc_feature 1..23: note = LF
  misc_feature 24..25: note = Core
  misc_feature 26..50: note = RF
gcccttcgggcaaccctgcagtgctcgcacaggcggccggcccgcagact

SEQ ID NO: 20657 - DNA, 50 bp, unidentified
  source 1..50: mol_type = unassigned DNA; note = target_0361d5b
  misc_feature 1..22: note = LF
  misc_feature 23..25: note = Core
  misc_feature 26..50: note = RF
gtaacagggagacctggcactctgaacacttggcgcatagtgtaaaaagt

SEQ ID NO: 20658 - DNA, 50 bp, unidentified
  source 1..50: mol_type = unassigned DNA; note = target_036877e
  misc_feature 1..23: note = LF
  misc_feature 24..25: note = Core
  misc_feature 26..50: note = RF
tggcaaacgagatcgtcaaaaccagtttatacactcgacaaacttccggg

SEQ ID NO: 20659 - DNA, 50 bp, unidentified
  source 1..50: mol_type = unassigned DNA; note = target_037008c
  misc_feature 1..22: note = LF
  misc_feature 23..25: note = Core
  misc_feature 26..50: note = RF
gatgccgacatgctcactcagcctttcttttctttcatccgatggtgttg

SEQ ID NO: 20660 - DNA, 50 bp, unidentified
  source 1..50: mol_type = unassigned DNA; note = target_03703b4
  misc_feature 1..23: note = LF
  misc_feature 24..25: note = Core
  misc_feature 26..50: note = RF
ggatgcgctaacgcttatccaccctacgcggcccctgcgaagcccgcgta

SEQ ID NO: 20661 - DNA, 50 bp, unidentified
  source 1..50: mol_type = unassigned DNA; note = target_0377ebc
  misc_feature 1..23: note = LF
  misc_feature 24..25: note = Core
  misc_feature 26..50: note = RF
ccgttcgcccaacagaggggctcaggatgacaggtctacttcttcctcgc

SEQ ID NO: 20662 - DNA, 50 bp, unidentified
  source 1..50: mol_type = unassigned DNA; note = target_037ddbc
  misc_feature 1..23: note = LF
  misc_feature 24..25: note = Core
  misc_feature 26..50: note = RF
ttctcgcaccagcgaaagaaatttgcaacagtgccccggcgacaggttgc

SEQ ID NO: 20663 - DNA, 50 bp, unidentified
  source 1..50: mol_type = unassigned DNA; note = target_03814dc
  misc_feature 1..24: note = LF
  misc_feature 25: note = Core
  misc_feature 26..50: note = RF
ggccggcgccgggcgctgacgccccacccccccccccccggcgacacgtg

SEQ ID NO: 20664 - DNA, 50 bp, unidentified
  source 1..50: mol_type = unassigned DNA; note = target_038c354
  misc_feature 1..23: note = LF
  misc_feature 24..25: note = Core
  misc_feature 26..50: note = RF
agtcacgagcgaagaatcaggggtatggcaacgattcggtacaaacgggc

SEQ ID NO: 20665 - DNA, 50 bp, unidentified
  source 1..50: mol_type = unassigned DNA; note = target_038c5c8
  misc_feature 1..23: note = LF
  misc_feature 24..25: note = Core
  misc_feature 26..50: note = RF
ttcaaaatatcatcatcggtggttgggtccctgctttcgcaggacgacca

SEQ ID NO: 20666 - DNA, 50 bp, unidentified
  source 1..50: mol_type = unassigned DNA; note = target_0394048
  misc_feature 1..24: note = LF
  misc_feature 25: note = Core
  misc_feature 26..50: note = RF
tccgacatcaagagagcagtagccttttttaatatttctttctcaagctc

SEQ ID NO: 20667 - DNA, 50 bp, unidentified
  source 1..50: mol_type = unassigned DNA; note = target_03a0bc3
  misc_feature 1..24: note = LF
  misc_feature 25: note = Core
  misc_feature 26..50: note = RF
cacgcccgagatcttcaacacggatccagggatcgcagttcacatccacc

SEQ ID NO: 20668 - DNA, 50 bp, unidentified
  source 1..50: mol_type = unassigned DNA; note = target_03a0d69
  misc_feature 1..24: note = LF
  misc_feature 25: note = Core
  misc_feature 26..50: note = RF
gaccggcaaattttttcttccagttgtaaaaagtggcctcagcaataccc

SEQ ID NO: 20669 - DNA, 50 bp, unidentified
  source 1..50: mol_type = unassigned DNA; note = target_03a84fb
  misc_feature 1..23: note = LF
  misc_feature 24..25: note = Core
  misc_feature 26..50: note = RF
catcgatacgatcttgtcatcaaagccgggaaaacggcgctggtacttgg

SEQ ID NO: 20670 - DNA, 50 bp, unidentified
  source 1..50: mol_type = unassigned DNA; note = target_03ad14a
  misc_feature 1..23: note = LF
  misc_feature 24..25: note = Core
  misc_feature 26..50: note = RF
aggatagccgcctatgcgcaaggctacggcgtgccagggagatcggagcg

SEQ ID NO: 20671 - DNA, 50 bp, unidentified
  source 1..50: mol_type = unassigned DNA; note = target_03b3860
  misc_feature 1..24: note = LF
  misc_feature 25: note = Core
  misc_feature 26..50: note = RF
gcaatatggccgcacggcagcttctggcactttgcgtcgattcaggtctt

SEQ ID NO: 20672 - DNA, 50 bp, unidentified
  source 1..50: mol_type = unassigned DNA; note = target_03d541d
  misc_feature 1..23: note = LF
  misc_feature 24..25: note = Core
  misc_feature 26..50: note = RF
ctcggcgccggccccgacgacgcctgaggcggccgcccggggtcgcggag

SEQ ID NO: 20673 - DNA, 50 bp, unidentified
  source 1..50: mol_type = unassigned DNA; note = target_03d8ed4
  misc_feature 1..23: note = LF
  misc_feature 24..25: note = Core
  misc_feature 26..50: note = RF
cgcccaaaaccgcctgccccagtagcgcttacgcagttcagggaactcca

SEQ ID NO: 20674 - DNA, 50 bp, unidentified
  source 1..50: mol_type = unassigned DNA; note = target_03da94e
  misc_feature 1..24: note = LF
  misc_feature 25: note = Core
  misc_feature 26..50: note = RF
aaacaaaccccttaaacccggacattcaacttagccagaaagcggacatt

SEQ ID NO: 20675 - DNA, 50 bp, unidentified
  source 1..50: mol_type = unassigned DNA; note = target_03dede4
  misc_feature 1..22: note = LF
  misc_feature 23..25: note = Core
  misc_feature 26..50: note = RF
tgaggccatctgactggaaatcactctaacgacccaatagtcgccctaac

SEQ ID NO: 20676 - DNA, 50 bp, unidentified
  source 1..50: mol_type = unassigned DNA; note = target_03e81bf
  misc_feature 1..23: note = LF
  misc_feature 24..25: note = Core
  misc_feature 26..50: note = RF
cgatgtctcagtggcgccagttgcggacgttggcctcgggcccggaacgc

SEQ ID NO: 20677 - DNA, 50 bp, unidentified
  source 1..50: mol_type = unassigned DNA; note = target_03ed8fa
  misc_feature 1..23: note = LF
  misc_feature 24..25: note = Core
  misc_feature 26..50: note = RF
cctggacctgcagcagcatgtccctccgggaggttgcttctccaggaatt

SEQ ID NO: 20678 - DNA, 50 bp, unidentified
  source 1..50: mol_type = unassigned DNA; note = target_03f736a
  misc_feature 1..23: note = LF
  misc_feature 24..25: note = Core
  misc_feature 26..50: note = RF
ttttcaacacaatcagcccattgtgtgaattcgatttttctgctgcgtgc

SEQ ID NO: 20679 - DNA, 50 bp, unidentified
  source 1..50: mol_type = unassigned DNA; note = target_03f89f2
  misc_feature 1..23: note = LF
  misc_feature 24..25: note = Core
  misc_feature 26..50: note = RF
cactattgtttgatagaaataagaggatgtgtaccgtggagatgggctga

SEQ ID NO: 20680 - DNA, 50 bp, unidentified
  source 1..50: mol_type = unassigned DNA; note = target_03fcd23
  misc_feature 1..24: note = LF
  misc_feature 25: note = Core
  misc_feature 26..50: note = RF
tctacgttgagacggcctcaaggcttttttccaagcgcgtccttcagcag

SEQ ID NO: 20681 - DNA, 50 bp, unidentified
  source 1..50: mol_type = unassigned DNA; note = target_040e383
  misc_feature 1..20: note = LF
  misc_feature 21..25: note = Core
  misc_feature 26..50: note = RF
gaggtggtcgagcatggcggtcccttcgggagagtggggtgggagagggg

SEQ ID NO: 20682 - DNA, 50 bp, unidentified
  source 1..50: mol_type = unassigned DNA; note = target_040eb4f
  misc_feature 1..23: note = LF
  misc_feature 24..25: note = Core
  misc_feature 26..50: note = RF
tgctttcggctatatccttcccactaccggcggattcgagactttcaccc

SEQ ID NO: 20683 - DNA, 50 bp, unidentified
  source 1..50: mol_type = unassigned DNA; note = target_0417412
  misc_feature 1..22: note = LF
  misc_feature 23..25: note = Core
  misc_feature 26..50: note = RF
ttgcgcatgggagttgctcctttctggagcgatatgcacgcatggagtga

SEQ ID NO: 20684 - DNA, 50 bp, unidentified
  source 1..50: mol_type = unassigned DNA; note = target_041d2e9
  misc_feature 1..24: note = LF
  misc_feature 25: note = Core
  misc_feature 26..50: note = RF
ccgagttcggccataggactaaaccgctaccgcggtagggggaggtaggc

SEQ ID NO: 20685 - DNA, 50 bp, unidentified
  source 1..50: mol_type = unassigned DNA; note = target_0422044
  misc_feature 1..23: note = LF
  misc_feature 24..25: note = Core
  misc_feature 26..50: note = RF
gctttgcctcttcggcgccaagttgacaataccactgtccctataaagga

SEQ ID NO: 20686 - DNA, 50 bp, unidentified
  source 1..50: mol_type = unassigned DNA; note = target_0434af8
  misc_feature 1..24: note = LF
  misc_feature 25: note = Core
  misc_feature 26..50: note = RF
gcaggtcttcggccacatcaaggacgagttcttccggggaaggacgtggc

SEQ ID NO: 20687 - DNA, 50 bp, unidentified
  source 1..50: mol_type = unassigned DNA; note = target_0437385
  misc_feature 1..23: note = LF
  misc_feature 24..25: note = Core
  misc_feature 26..50: note = RF
ggcgctgcgcgcctttgcccaccctacgcttgctacatctctcgccggat

SEQ ID NO: 20688 - DNA, 50 bp, unidentified
  source 1..50: mol_type = unassigned DNA; note = target_043c182
  misc_feature 1..23: note = LF
  misc_feature 24..25: note = Core
  misc_feature 26..50: note = RF
cgcttaatagacgcaaaagggacctactcatgcggtatttgacttaagca

SEQ ID NO: 20689 - DNA, 50 bp, unidentified
  source 1..50: mol_type = unassigned DNA; note = target_043d337
  misc_feature 1..23: note = LF
  misc_feature 24..25: note = Core
  misc_feature 26..50: note = RF
cccgatcccgtggccggctttctagcggtgatcgcaagcgcggcacggcg

SEQ ID NO: 20690 - DNA, 50 bp, unidentified
  source 1..50: mol_type = unassigned DNA; note = target_0448288
  misc_feature 1..23: note = LF
  misc_feature 24..25: note = Core
  misc_feature 26..50: note = RF
gcaccggctgggacgtcggcttgtggcccgacgcagacctcgtccaacgt

SEQ ID NO: 20691 - DNA, 50 bp, unidentified
  source 1..50: mol_type = unassigned DNA; note = target_044923c
  misc_feature 1..23: note = LF
  misc_feature 24..25: note = Core
  misc_feature 26..50: note = RF
gcatgagtggccctttgctgctgctgggacggcaggagatgcccaccgac

SEQ ID NO: 20692 - DNA, 50 bp, unidentified
  source 1..50: mol_type = unassigned DNA; note = target_044fae2
  misc_feature 1..23: note = LF
  misc_feature 24..25: note = Core
  misc_feature 26..50: note = RF
gccgcatcacgctcggcggtatgctcttggtcagcggtcatctcatcctg

SEQ ID NO: 20693 - DNA, 50 bp, unidentified
  source 1..50: mol_type = unassigned DNA; note = target_045196a
  misc_feature 1..23: note = LF
  misc_feature 24..25: note = Core
  misc_feature 26..50: note = RF
aaaacccaacataagtgctgggttttttatatgttgaaacctagtgaaga

SEQ ID NO: 20694 - DNA, 50 bp, unidentified
  source 1..50: mol_type = unassigned DNA; note = target_046d868
  misc_feature 1..24: note = LF
  misc_feature 25: note = Core
  misc_feature 26..50: note = RF
gttgcgagtcacaaagcacctaacgtagagctaaccggcgctgcgcggct

SEQ ID NO: 20695 - DNA, 50 bp, unidentified
  source 1..50: mol_type = unassigned DNA; note = target_046f912
  misc_feature 1..23: note = LF
  misc_feature 24..25: note = Core
  misc_feature 26..50: note = RF
actttcattgtgatttgtacctccttacaggcaattgatttcatatttct

SEQ ID NO: 20696 - DNA, 50 bp, unidentified
  source 1..50: mol_type = unassigned DNA; note = target_0470ab1
  misc_feature 1..23: note = LF
  misc_feature 24..25: note = Core
  misc_feature 26..50: note = RF
cgtgcagctcgccgctggtgtgcctcaggcggacgacagtcgcttcgctt

SEQ ID NO: 20697 - DNA, 50 bp, unidentified
  source 1..50: mol_type = unassigned DNA; note = target_047aef7
  misc_feature 1..23: note = LF
  misc_feature 24..25: note = Core
  misc_feature 26..50: note = RF
cgaccccggcccggggacaagtggcatctggacgaggtgttcatgaagat

SEQ ID NO: 20698 - DNA, 50 bp, unidentified
  source 1..50: mol_type = unassigned DNA; note = target_0481207
  misc_feature 1..24: note = LF
  misc_feature 25: note = Core
  misc_feature 26..50: note = RF
aaatagctgtttgccagagtccgctcgggtcatgtgtggacggcgctccg

SEQ ID NO: 20699 - DNA, 50 bp, unidentified
  source 1..50: mol_type = unassigned DNA; note = target_0489b67
  misc_feature 1..22: note = LF
  misc_feature 23..25: note = Core
  misc_feature 26..50: note = RF
ctccacccgcatagcgggtggttttttgtttcgcacgtttcacgcactca

SEQ ID NO: 20700 - DNA, 50 bp, unidentified
  source 1..50: mol_type = unassigned DNA; note = target_048fde6
  misc_feature 1..24: note = LF
  misc_feature 25: note = Core
  misc_feature 26..50: note = RF
agatgcgcatgcgcactattaaaatgttaggcattcaggagataccaatg

SEQ ID NO: 20701 - DNA, 50 bp, unidentified
  source 1..50: mol_type = unassigned DNA; note = target_049e3bf
  misc_feature 1..24: note = LF
  misc_feature 25: note = Core
  misc_feature 26..50: note = RF
cgcacccccgcgcgttgtttgcggcatgagagttgacccgatcatggagt

SEQ ID NO: 20702 - DNA, 50 bp, unidentified
  source 1..50: mol_type = unassigned DNA; note = target_04a3066
  misc_feature 1..23: note = LF
  misc_feature 24..25: note = Core
  misc_feature 26..50: note = RF
agggtgtcattcggcgtggaataaggacccctttgttggggttatcagca

SEQ ID NO: 20703 - DNA, 50 bp, unidentified
  source 1..50: mol_type = unassigned DNA; note = target_04b172d
  misc_feature 1..24: note = LF
  misc_feature 25: note = Core
  misc_feature 26..50: note = RF
attatgagtcattcacattcccccttctcccgccggggcgggcgcattgg

SEQ ID NO: 20704 - DNA, 50 bp, unidentified
  source 1..50: mol_type = unassigned DNA; note = target_04b4c5f
  misc_feature 1..23: note = LF
  misc_feature 24..25: note = Core
  misc_feature 26..50: note = RF
ttacagatattgatggaacattattaaacacgcaaaaacaaatttctaaa

SEQ ID NO: 20705 - DNA, 50 bp, unidentified
  source 1..50: mol_type = unassigned DNA; note = target_04c03bc
  misc_feature 1..23: note = LF
  misc_feature 24..25: note = Core
  misc_feature 26..50: note = RF
tgacctcgcgatatccgagattgaggtgattggcgacgttttccagaaac

SEQ ID NO: 20706 - DNA, 50 bp, unidentified
  source 1..50: mol_type = unassigned DNA; note = target_04d8221
  misc_feature 1..23: note = LF
  misc_feature 24..25: note = Core
  misc_feature 26..50: note = RF
ggtcacgttcaggcgcatgcgttgtcctttccgagaagctcctgccaggc

SEQ ID NO: 20707 - DNA, 50 bp, unidentified
  source 1..50: mol_type = unassigned DNA; note = target_04e1b4f
  misc_feature 1..24: note = LF
  misc_feature 25: note = Core
  misc_feature 26..50: note = RF
catatccagggacggcgattgacgtgatccccaattctcatccagcgata

SEQ ID NO: 20708 - DNA, 50 bp, unidentified
  source 1..50: mol_type = unassigned DNA; note = target_04f7f1e
  misc_feature 1..24: note = LF
  misc_feature 25: note = Core
  misc_feature 26..50: note = RF
ctgacagtcaatctagggcagaagcggacattcagccgactatcgaatca

SEQ ID NO: 20709 - DNA, 50 bp, unidentified
  source 1..50: mol_type = unassigned DNA; note = target_04fdbb5
  misc_feature 1..23: note = LF
  misc_feature 24..25: note = Core
  misc_feature 26..50: note = RF
ccgcagggggcggacactgccgcctgacctgaacgggtggtggagcgaac

SEQ ID NO: 20710 - DNA, 50 bp, unidentified
  source 1..50: mol_type = unassigned DNA; note = target_05007f4
  misc_feature 1..22: note = LF
  misc_feature 23..25: note = Core
  misc_feature 26..50: note = RF
tacgagccactgagtccgtctttgaccctaggcggacatcagcccgtttg

SEQ ID NO: 20711 - DNA, 50 bp, unidentified
  source 1..50: mol_type = unassigned DNA; note = target_0508996
  misc_feature 1..23: note = LF
  misc_feature 24..25: note = Core
  misc_feature 26..50: note = RF
tgccaaatggctacaagaaacgtctcaggtcagaacaaccgggcggaaaa

SEQ ID NO: 20712 - DNA, 50 bp, unidentified
  source 1..50: mol_type = unassigned DNA; note = target_050eb69
  misc_feature 1..23: note = LF
  misc_feature 24..25: note = Core
  misc_feature 26..50: note = RF
ttcgtcgctaacgctcctcgcaatgacgattccaggtcggagcaattttc

SEQ ID NO: 20713 - DNA, 50 bp, unidentified
  source 1..50: mol_type = unassigned DNA; note = target_05113fc
  misc_feature 1..24: note = LF
  misc_feature 25: note = Core
  misc_feature 26..50: note = RF
acgttttgaccctgcgggcggggttttgagtgagatcgggattttgcaac

SEQ ID NO: 20714 - DNA, 50 bp, unidentified
  source 1..50: mol_type = unassigned DNA; note = target_051497f
  misc_feature 1..23: note = LF
  misc_feature 24..25: note = Core
  misc_feature 26..50: note = RF
tcgtacatcatcattcatacttcctttcttgcaaatttcttcggatgcgg

SEQ ID NO: 20715 - DNA, 50 bp, unidentified
  source 1..50: mol_type = unassigned DNA; note = target_051c786
  misc_feature 1..24: note = LF
  misc_feature 25: note = Core
  misc_feature 26..50: note = RF
gacaatcaattaacttgtcggtactgataagttaaacctcaatctgtcag

SEQ ID NO: 20716 - DNA, 50 bp, unidentified
  source 1..50: mol_type = unassigned DNA; note = target_052bc59
  misc_feature 1..23: note = LF
  misc_feature 24..25: note = Core
  misc_feature 26..50: note = RF
taggagcggcgtcgcctacagggatgcaggaggtagagcaatgcatggag

SEQ ID NO: 20717 - DNA, 50 bp, unidentified
  source 1..50: mol_type = unassigned DNA; note = target_052c4e3
  misc_feature 1..23: note = LF
  misc_feature 24..25: note = Core
  misc_feature 26..50: note = RF
ggccagaattcaccggagcgctcctctcaccgggatcgcggcgccgcggg

SEQ ID NO: 20718 - DNA, 50 bp, unidentified
  source 1..50: mol_type = unassigned DNA; note = target_05308da
  misc_feature 1..24: note = LF
  misc_feature 25: note = Core
  misc_feature 26..50: note = RF
acgcttggcggcaggccctaccatttttttgcgagaagctcgcgaagtgc

SEQ ID NO: 20719 - DNA, 50 bp, unidentified
  source 1..50: mol_type = unassigned DNA; note = target_053725d
  misc_feature 1..23: note = LF
  misc_feature 24..25: note = Core
  misc_feature 26..50: note = RF
atgggtgcctctcacacaggctcctatgaggtcactgcccgcccggcgcg

SEQ ID NO: 20720 - DNA, 50 bp, unidentified
  source 1..50: mol_type = unassigned DNA; note = target_05385b4
  misc_feature 1..23: note = LF
  misc_feature 24..25: note = Core
  misc_feature 26..50: note = RF
agtagggaccatagcaggtcttttttattttgcctatttttaattaagag

SEQ ID NO: 20721 - DNA, 50 bp, unidentified
  source 1..50: mol_type = unassigned DNA; note = target_0539635
  misc_feature 1..23: note = LF
  misc_feature 24..25: note = Core
  misc_feature 26..50: note = RF
tggggccccaagcgacttggttctgtcgcaaacttttcttggcggttgac

SEQ ID NO: 20722 - DNA, 50 bp, unidentified
  source 1..50: mol_type = unassigned DNA; note = target_0540497
  misc_feature 1..22: note = LF
  misc_feature 23..25: note = Core
  misc_feature 26..50: note = RF
attatagcgcggccctcccttttctgcttaacatttataccgcaatcgtg

SEQ ID NO: 20723 - DNA, 50 bp, unidentified
  source 1..50: mol_type = unassigned DNA; note = target_054c5ea
  misc_feature 1..21: note = LF
  misc_feature 22..25: note = Core
  misc_feature 26..50: note = RF
ttatccccgaattcgtaaactttcacactaatattctcccaattgtttga

SEQ ID NO: 20724 - DNA, 50 bp, unidentified
  source 1..50: mol_type = unassigned DNA; note = target_054f327
  misc_feature 1..23: note = LF
  misc_feature 24..25: note = Core
  misc_feature 26..50: note = RF
cccagcgaaggataaaccttcgcctacaaaaaccaaaaatccccaacccg

SEQ ID NO: 20725 - DNA, 50 bp, unidentified
  source 1..50: mol_type = unassigned DNA; note = target_055a497
  misc_feature 1..22: note = LF
  misc_feature 23..25: note = Core
  misc_feature 26..50: note = RF
cacaagtctcaaaactttcgcggttaataaataaagttacagcgcctctc

SEQ ID NO: 20726 - DNA, 50 bp, unidentified
  source 1..50: mol_type = unassigned DNA; note = target_056c365
  misc_feature 1..21: note = LF
  misc_feature 22..25: note = Core
  misc_feature 26..50: note = RF
cagtcgtcggtgacgctgctggtcatgccgcccgctcttctgaccgggac

SEQ ID NO: 20727 - DNA, 50 bp, unidentified
  source 1..50: mol_type = unassigned DNA; note = target_056e2db
  misc_feature 1..23: note = LF
  misc_feature 24..25: note = Core
  misc_feature 26..50: note = RF
acgcctcggcaagtcgcgagatcctctcacggccacgcccaggacgtcag

SEQ ID NO: 20728 - DNA, 50 bp, unidentified
  source 1..50: mol_type = unassigned DNA; note = target_056e914
  misc_feature 1..24: note = LF
  misc_feature 25: note = Core
  misc_feature 26..50: note = RF
gattgatcacttgcaaatttccgaccaatgcggacttttcggcctccaac

SEQ ID NO: 20729 - DNA, 50 bp, unidentified
  source 1..50: mol_type = unassigned DNA; note = target_0570fec
  misc_feature 1..23: note = LF
  misc_feature 24..25: note = Core
  misc_feature 26..50: note = RF
ggttgcagaatcatcctctattttttttgtgcaaaaacgaagaactttat

SEQ ID NO: 20730 - DNA, 50 bp, unidentified
  source 1..50: mol_type = unassigned DNA; note = target_0573458
  misc_feature 1..23: note = LF
  misc_feature 24..25: note = Core
  misc_feature 26..50: note = RF
ttcttaaacattatataatcctcctaaaatatcttcagaaataatttagt

SEQ ID NO: 20731 - DNA, 50 bp, unidentified
  source 1..50: mol_type = unassigned DNA; note = target_0574cd6
  misc_feature 1..23: note = LF
  misc_feature 24..25: note = Core
  misc_feature 26..50: note = RF
aaggagggggcaaaagcctcctccttgtatttgtacgggtcgcgggagac

SEQ ID NO: 20732 - DNA, 50 bp, unidentified
  source 1..50: mol_type = unassigned DNA; note = target_0580567
  misc_feature 1..24: note = LF
  misc_feature 25: note = Core
  misc_feature 26..50: note = RF
tagcaaaaagtgtattcagtaaactgtccccgatttctgacttagttgaa

SEQ ID NO: 20733 - DNA, 50 bp, unidentified
  source 1..50: mol_type = unassigned DNA; note = target_058f057
  misc_feature 1..24: note = LF
  misc_feature 25: note = Core
  misc_feature 26..50: note = RF
tattgggcgtcgctgggccggtactgtcaagttaaccattttttagcaga

SEQ ID NO: 20734 - DNA, 50 bp, unidentified
  source 1..50: mol_type = unassigned DNA; note = target_05956ee
  misc_feature 1..23: note = LF
  misc_feature 24..25: note = Core
  misc_feature 26..50: note = RF
gaatcccattccctcaaggagcccttcacggacctcgggcaatcccgtct

SEQ ID NO: 20735 - DNA, 50 bp, unidentified
  source 1..50: mol_type = unassigned DNA; note = target_059f257
  misc_feature 1..23: note = LF
  misc_feature 24..25: note = Core
  misc_feature 26..50: note = RF
agaaacgaacgacaaaaccactcctgtcagcgggaaacgtacgccggcga

SEQ ID NO: 20736 - DNA, 50 bp, unidentified
  source 1..50: mol_type = unassigned DNA; note = target_05aa055
  misc_feature 1..23: note = LF
  misc_feature 24..25: note = Core
  misc_feature 26..50: note = RF
aagagggcgtatgcaatacgcccctacaccggacgtcctctccagattcc

SEQ ID NO: 20737 - DNA, 50 bp, unidentified
  source 1..50: mol_type = unassigned DNA; note = target_05ae041
  misc_feature 1..23: note = LF
  misc_feature 24..25: note = Core
  misc_feature 26..50: note = RF
ccgcgtcggcttaaaggcgcgacctaccatagaaaatgaaagcttcgctt

SEQ ID NO: 20738 - DNA, 50 bp, unidentified
  source 1..50: mol_type = unassigned DNA; note = target_05b4329
  misc_feature 1..23: note = LF
  misc_feature 24..25: note = Core
  misc_feature 26..50: note = RF
ttcaaggcaaattcattaagaatagttattctattgtttatgaatttaac

SEQ ID NO: 20739 - DNA, 50 bp, unidentified
  source 1..50: mol_type = unassigned DNA; note = target_05bdaec
  misc_feature 1..23: note = LF
  misc_feature 24..25: note = Core
  misc_feature 26..50: note = RF
aataaaccgctttcataactctccttttaagtaaaagggaaggacggacc

SEQ ID NO: 20740 - DNA, 50 bp, unidentified
  source 1..50: mol_type = unassigned DNA; note = target_05bdcc1
  misc_feature 1..24: note = LF
  misc_feature 25: note = Core
  misc_feature 26..50: note = RF
gctcgaggttggtgaaatcgggatttatcgtcattttgatttgattcaac

SEQ ID NO: 20741 - DNA, 50 bp, unidentified
  source 1..50: mol_type = unassigned DNA; note = target_05bf0cc
  misc_feature 1..23: note = LF
  misc_feature 24..25: note = Core
  misc_feature 26..50: note = RF
gcagagcttaaaatccggttttcctttcattttatatcgccttttcaaca

SEQ ID NO: 20742 - DNA, 50 bp, unidentified
  source 1..50: mol_type = unassigned DNA; note = target_05c2ae9
  misc_feature 1..24: note = LF
  misc_feature 25: note = Core
  misc_feature 26..50: note = RF
aatgttgtacaacgtgtttgtgtatgattagtggcgtgtttgagcaccta

SEQ ID NO: 20743 - DNA, 50 bp, unidentified
  source 1..50: mol_type = unassigned DNA; note = target_05ddd62
  misc_feature 1..22: note = LF
  misc_feature 23..25: note = Core
  misc_feature 26..50: note = RF
gcaccggctatgactgctcttgaacggagtcgaaccggtgacctccccat

SEQ ID NO: 20744 - DNA, 50 bp, unidentified
  source 1..50: mol_type = unassigned DNA; note = target_05e98d4
  misc_feature 1..23: note = LF
  misc_feature 24..25: note = Core
  misc_feature 26..50: note = RF
ctgcccgccgtagccccgagacttcggggtgaggcaattatgaattataa

SEQ ID NO: 20745 - DNA, 50 bp, unidentified
  source 1..50: mol_type = unassigned DNA; note = target_05ecb7e
  misc_feature 1..21: note = LF
  misc_feature 22..25: note = Core
  misc_feature 26..50: note = RF
taagatatatcagaagaataatcacctccatctaataatacctgatagct

SEQ ID NO: 20746 - DNA, 50 bp, unidentified
  source 1..50: mol_type = unassigned DNA; note = target_05ed742
  misc_feature 1..23: note = LF
  misc_feature 24..25: note = Core
  misc_feature 26..50: note = RF
ccaacgggcggattcagaccgccctctcctggatggactccaggcgcaac

SEQ ID NO: 20747 - DNA, 50 bp, unidentified
  source 1..50: mol_type = unassigned DNA; note = target_05ee89a
  misc_feature 1..22: note = LF
  misc_feature 23..25: note = Core
  misc_feature 26..50: note = RF
tgagactgcacttttggcggtgtcctctcgtacttctccgccaaatccgc

SEQ ID NO: 20748 - DNA, 50 bp, unidentified
  source 1..50: mol_type = unassigned DNA; note = target_05fd7d2
  misc_feature 1..22: note = LF
  misc_feature 23..25: note = Core
  misc_feature 26..50: note = RF
cgatgctctaattaggcgcaggactcattctttgagatagaagatgaaac

SEQ ID NO: 20749 - DNA, 50 bp, unidentified
  source 1..50: mol_type = unassigned DNA; note = target_06111a6
  misc_feature 1..23: note = LF
  misc_feature 24..25: note = Core
  misc_feature 26..50: note = RF
tgtccggacactcccattgcttgctacaatatgctcgtactgaaaggacg

SEQ ID NO: 20750 - DNA, 50 bp, unidentified
  source 1..50: mol_type = unassigned DNA; note = target_061b5ed
  misc_feature 1..24: note = LF
  misc_feature 25: note = Core
  misc_feature 26..50: note = RF
cagttgcggctccggcgggcaaagcccgcacggcctccaagcggcatcgc

SEQ ID NO: 20751 - DNA, 50 bp, unidentified
  source 1..50: mol_type = unassigned DNA; note = target_0620c2e
  misc_feature 1..23: note = LF
  misc_feature 24..25: note = Core
  misc_feature 26..50: note = RF
tgccatccacgcatggcgtggatctactgtgtcgaccaaggtcgacaccc

SEQ ID NO: 20752 - DNA, 50 bp, unidentified
  source 1..50: mol_type = unassigned DNA; note = target_0623a79
  misc_feature 1..24: note = LF
  misc_feature 25: note = Core
  misc_feature 26..50: note = RF
aaggttccacaagtccaattctcctttattttgtcgggaaaaccacgcgg

SEQ ID NO: 20753 - DNA, 50 bp, unidentified
  source 1..50: mol_type = unassigned DNA; note = target_06303cf
  misc_feature 1..23: note = LF
  misc_feature 24..25: note = Core
  misc_feature 26..50: note = RF
gggctgctagtggcaactttgggtggaaagcggacattagcctcagccgt

SEQ ID NO: 20754 - DNA, 50 bp, unidentified
  source 1..50: mol_type = unassigned DNA; note = target_0631794
  misc_feature 1..23: note = LF
  misc_feature 24..25: note = Core
  misc_feature 26..50: note = RF
cgcgctgttctagtcgggcttctagtcgagctgcatgatcagctcggtca

SEQ ID NO: 20755 - DNA, 50 bp, unidentified
  source 1..50: mol_type = unassigned DNA; note = target_064629c
  misc_feature 1..20: note = LF
  misc_feature 21..25: note = Core
  misc_feature 26..50: note = RF
caggaagattttccttggggcttttttatggaattgggttttggggatga

SEQ ID NO: 20756 - DNA, 50 bp, unidentified
  source 1..50: mol_type = unassigned DNA; note = target_0658f5c
  misc_feature 1..23: note = LF
  misc_feature 24..25: note = Core
  misc_feature 26..50: note = RF
cacacgtcccaaaggaccggaattggcacggggctgaccttagccgttct

SEQ ID NO: 20757 - DNA, 50 bp, unidentified
  source 1..50: mol_type = unassigned DNA; note = target_065a83e
  misc_feature 1..22: note = LF
  misc_feature 23..25: note = Core
  misc_feature 26..50: note = RF
ccctcgatgccagcctgttcccctttctagtcgcgttctggccaatgcgg

SEQ ID NO: 20758 - DNA, 50 bp, unidentified
  source 1..50: mol_type = unassigned DNA; note = target_065de92
  misc_feature 1..24: note = LF
  misc_feature 25: note = Core
  misc_feature 26..50: note = RF
taccaccaaatttggctttccagttgtagtacgaggcctcggatatcccc

SEQ ID NO: 20759 - DNA, 50 bp, unidentified
  source 1..50: mol_type = unassigned DNA; note = target_0660fbf
  misc_feature 1..23: note = LF
  misc_feature 24..25: note = Core
  misc_feature 26..50: note = RF
tggagacggtcatgcgcactttcctttcgtgaacgagccgtgcgcggctt

SEQ ID NO: 20760 - DNA, 50 bp, unidentified
  source 1..50: mol_type = unassigned DNA; note = target_067a758
  misc_feature 1..23: note = LF
  misc_feature 24..25: note = Core
  misc_feature 26..50: note = RF
gctcgcgcgcggacgacgcacgcctcaggccgtcatcgaatgcagcgcga

SEQ ID NO: 20761 - DNA, 50 bp, unidentified
  source 1..50: mol_type = unassigned DNA; note = target_0682c12
  misc_feature 1..23: note = LF
  misc_feature 24..25: note = Core
  misc_feature 26..50: note = RF
aagaaccaccgatacatctagggtgggaagcagggcgatctcatctgggg

SEQ ID NO: 20762 - DNA, 50 bp, unidentified
  source 1..50: mol_type = unassigned DNA; note = target_068972b
  misc_feature 1..23: note = LF
  misc_feature 24..25: note = Core
  misc_feature 26..50: note = RF
gccgccagtggaaggttgcattcctgtcacgtcgggtctccgacacccac

SEQ ID NO: 20763 - DNA, 50 bp, unidentified
  source 1..50: mol_type = unassigned DNA; note = target_068e009
  misc_feature 1..23: note = LF
  misc_feature 24..25: note = Core
  misc_feature 26..50: note = RF
tccatgttaaaatatattcctacctcttattaacccgactactataaaca

SEQ ID NO: 20764 - DNA, 50 bp, unidentified
  source 1..50: mol_type = unassigned DNA; note = target_06922c1
  misc_feature 1..22: note = LF
  misc_feature 23..25: note = Core
  misc_feature 26..50: note = RF
tgtcatttcaacggcccaaaccggatcttcgcggtccagccggtcgctgc

SEQ ID NO: 20765 - DNA, 50 bp, unidentified
  source 1..50: mol_type = unassigned DNA; note = target_06930e7
  misc_feature 1..24: note = LF
  misc_feature 25: note = Core
  misc_feature 26..50: note = RF
aaaaaggacttgcaaaaatggagccatccacacaggacattcgcggcaat

SEQ ID NO: 20766 - DNA, 50 bp, unidentified
  source 1..50: mol_type = unassigned DNA; note = target_0694b8f
  misc_feature 1..23: note = LF
  misc_feature 24..25: note = Core
  misc_feature 26..50: note = RF
ttgagagcgtgcgcagggttgttagcactacaaagcgcgtcgagggagga

SEQ ID NO: 20767 - DNA, 50 bp, unidentified
  source 1..50: mol_type = unassigned DNA; note = target_06a7c76
  misc_feature 1..24: note = LF
  misc_feature 25: note = Core
  misc_feature 26..50: note = RF
gatggtgacaggctgctactgacccaaagcggacgttcagttctgctgcg

SEQ ID NO: 20768 - DNA, 50 bp, unidentified
  source 1..50: mol_type = unassigned DNA; note = target_06be574
  misc_feature 1..23: note = LF
  misc_feature 24..25: note = Core
  misc_feature 26..50: note = RF
cgaacgcctcacggcgttcgcgcttttgtttgctgcggctttcccgcgac

SEQ ID NO: 20769 - DNA, 50 bp, unidentified
  source 1..50: mol_type = unassigned DNA; note = target_06c35ee
  misc_feature 1..23: note = LF
  misc_feature 24..25: note = Core
  misc_feature 26..50: note = RF
cgtttccacctaaagtcattccgctctaaggtcgcccgaattgggcgctc

SEQ ID NO: 20770 - DNA, 50 bp, unidentified
  source 1..50: mol_type = unassigned DNA; note = target_06cd010
  misc_feature 1..24: note = LF
  misc_feature 25: note = Core
  misc_feature 26..50: note = RF
taattgaggccgcacgcccagcggcatgagcggacgtccggcagtcgcga

SEQ ID NO: 20771 - DNA, 50 bp, unidentified
  source 1..50: mol_type = unassigned DNA; note = target_06d0c65
  misc_feature 1..23: note = LF
  misc_feature 24..25: note = Core
  misc_feature 26..50: note = RF
tcggaacattcagtgggctcagcctactccccgtctggagaacagcgcaa

SEQ ID NO: 20772 - DNA, 50 bp, unidentified
  source 1..50: mol_type = unassigned DNA; note = target_06d6eff
  misc_feature 1..23: note = LF
  misc_feature 24..25: note = Core
  misc_feature 26..50: note = RF
aatgggtcctattcatcggttgctgcccttcaacatcggtctcgtaaatg

SEQ ID NO: 20773 - DNA, 50 bp, unidentified
  source 1..50: mol_type = unassigned DNA; note = target_06dfae3
  misc_feature 1..24: note = LF
  misc_feature 25: note = Core
  misc_feature 26..50: note = RF
aggcgtcgtcattccggcgcaagccggaatctagagcgcaacgaccgggt

SEQ ID NO: 20774 - DNA, 50 bp, unidentified
  source 1..50: mol_type = unassigned DNA; note = target_06e175c
  misc_feature 1..21: note = LF
  misc_feature 22..25: note = Core
  misc_feature 26..50: note = RF
gtttgcattcacagtgattacctcctgtcagtttgataaaatatctatgg

SEQ ID NO: 20775 - DNA, 50 bp, unidentified
  source 1..50: mol_type = unassigned DNA; note = target_06e6c51
  misc_feature 1..24: note = LF
  misc_feature 25: note = Core
  misc_feature 26..50: note = RF
aacacgtgtgcttgtgtcgccttgaggggatatgaaccggagacccattt

SEQ ID NO: 20776 - DNA, 50 bp, unidentified
  source 1..50: mol_type = unassigned DNA; note = target_06ed074
  misc_feature 1..24: note = LF
  misc_feature 25: note = Core
  misc_feature 26..50: note = RF
ctgcggagggaacgccatgcggcaaggggctgagcagtcagccccgacga

SEQ ID NO: 20777 - DNA, 50 bp, unidentified
  source 1..50: mol_type = unassigned DNA; note = target_06eecc8
  misc_feature 1..23: note = LF
  misc_feature 24..25: note = Core
  misc_feature 26..50: note = RF
aatgttgcattttccttatcctgctttgtttttttgaggcagaatgcatc

SEQ ID NO: 20778 - DNA, 50 bp, unidentified
  source 1..50: mol_type = unassigned DNA; note = target_06f1d0b
  misc_feature 1..23: note = LF
  misc_feature 24..25: note = Core
  misc_feature 26..50: note = RF
cgcaatgatcccgttcggctgtttgcaacggagccgacaggctacatgcc

SEQ ID NO: 20779 - DNA, 50 bp, unidentified
  source 1..50: mol_type = unassigned DNA; note = target_06fd218
  misc_feature 1..24: note = LF
  misc_feature 25: note = Core
  misc_feature 26..50: note = RF
cacgccgccagcatccccggcccccacccccgtgtcctgcacgcgccgga

SEQ ID NO: 20780 - DNA, 50 bp, unidentified
  source 1..50: mol_type = unassigned DNA; note = target_06fe798
  misc_feature 1..22: note = LF
  misc_feature 23..25: note = Core
  misc_feature 26..50: note = RF
cgttgccgacgaggtgatcgagtgaagcggcgcgagttcatcggactggt

SEQ ID NO: 20781 - DNA, 50 bp, unidentified
  source 1..50: mol_type = unassigned DNA; note = target_070a447
  misc_feature 1..23: note = LF
  misc_feature 24..25: note = Core
  misc_feature 26..50: note = RF
gcatttaagagaaattcctcctactcgatttggaaatatggttgcaaata

SEQ ID NO: 20782 - DNA, 50 bp, unidentified
  source 1..50: mol_type = unassigned DNA; note = target_071aa7f
  misc_feature 1..22: note = LF
  misc_feature 23..25: note = Core
  misc_feature 26..50: note = RF
gtattattgtgcttatcaagtagctcagccttcggttgaaaaatgatcaa

SEQ ID NO: 20783 - DNA, 50 bp, unidentified
  source 1..50: mol_type = unassigned DNA; note = target_071d561
  misc_feature 1..23: note = LF
  misc_feature 24..25: note = Core
  misc_feature 26..50: note = RF
atagtatttatattttttacctccttatctataagccttgctgtttagca

SEQ ID NO: 20784 - DNA, 50 bp, unidentified
  source 1..50: mol_type = unassigned DNA; note = target_071ee78
  misc_feature 1..23: note = LF
  misc_feature 24..25: note = Core
  misc_feature 26..50: note = RF
ccagccgcggaggggtggtggtgtcaggcttttattatttgcttattgat

SEQ ID NO: 20785 - DNA, 50 bp, unidentified
  source 1..50: mol_type = unassigned DNA; note = target_0728a46
  misc_feature 1..21: note = LF
  misc_feature 22..25: note = Core
  misc_feature 26..50: note = RF
acgccactagttacaaactagcggggaaagaggtttctacgattgaaaat

SEQ ID NO: 20786 - DNA, 50 bp, unidentified
  source 1..50: mol_type = unassigned DNA; note = target_07342b9
  misc_feature 1..23: note = LF
  misc_feature 24..25: note = Core
  misc_feature 26..50: note = RF
tcagcccaccgaggtcctggacgctagagccgcgaactccccgcgtcctg

SEQ ID NO: 20787 - DNA, 50 bp, unidentified
  source 1..50: mol_type = unassigned DNA; note = target_0736085
  misc_feature 1..24: note = LF
  misc_feature 25: note = Core
  misc_feature 26..50: note = RF
ccactgaccgggttcatctcgacacgctcgctgcgcgagctactcgatga

SEQ ID NO: 20788 - DNA, 50 bp, unidentified
  source 1..50: mol_type = unassigned DNA; note = target_074ac57
  misc_feature 1..23: note = LF
  misc_feature 24..25: note = Core
  misc_feature 26..50: note = RF
tgagcgctacctgtgaatcggcgtggggtcccggcgccgatcggcacgct

SEQ ID NO: 20789 - DNA, 50 bp, unidentified
  source 1..50: mol_type = unassigned DNA; note = target_0751509
  misc_feature 1..23: note = LF
  misc_feature 24..25: note = Core
  misc_feature 26..50: note = RF
gatattaaaatcaaacatatttcctccttccttttaaacgtaaaaaagca

SEQ ID NO: 20790 - DNA, 50 bp, unidentified
  source 1..50: mol_type = unassigned DNA; note = target_0751734
  misc_feature 1..23: note = LF
  misc_feature 24..25: note = Core
  misc_feature 26..50: note = RF
cctcgcaaagaaggctgcggcctttttaggatgtcgcgctccgcccgcag

SEQ ID NO: 20791 - DNA, 50 bp, unidentified
  source 1..50: mol_type = unassigned DNA; note = target_075227a
  misc_feature 1..22: note = LF
  misc_feature 23..25: note = Core
  misc_feature 26..50: note = RF
cggctcatggtggtcatcgtcgtccttccagtcacaccgatcaacgccgg

SEQ ID NO: 20792 - DNA, 50 bp, unidentified
  source 1..50: mol_type = unassigned DNA; note = target_07597ef
  misc_feature 1..23: note = LF
  misc_feature 24..25: note = Core
  misc_feature 26..50: note = RF
ctcataggtaggttggaaaaggctcagtgtttgcggcggtccagccccgg

SEQ ID NO: 20793 - DNA, 50 bp, unidentified
  source 1..50: mol_type = unassigned DNA; note = target_0761e79
  misc_feature 1..24: note = LF
  misc_feature 25: note = Core
  misc_feature 26..50: note = RF
cgcatggaggcatccgctcctcggcagattcggacgcttcgctacgccgt

SEQ ID NO: 20794 - DNA, 50 bp, unidentified
  source 1..50: mol_type = unassigned DNA; note = target_076d454
  misc_feature 1..24: note = LF
  misc_feature 25: note = Core
  misc_feature 26..50: note = RF
ggtaaccctcgccgaaaaacaccccaccccccaaaaccaaccccccgccc

SEQ ID NO: 20795 - DNA, 50 bp, unidentified
  source 1..50: mol_type = unassigned DNA; note = target_07700a6
  misc_feature 1..23: note = LF
  misc_feature 24..25: note = Core
  misc_feature 26..50: note = RF
ctcgcgtttttctaagcaggccgctcaaaaaggcccagatgcgaggcgac

SEQ ID NO: 20796 - DNA, 50 bp, unidentified
  source 1..50: mol_type = unassigned DNA; note = target_0774db6
  misc_feature 1..22: note = LF
  misc_feature 23..25: note = Core
  misc_feature 26..50: note = RF
ctcaggagccagtttcagcataagacaagccccagcaggaccgcgggcgc

SEQ ID NO: 20797 - DNA, 50 bp, unidentified
  source 1..50: mol_type = unassigned DNA; note = target_0784884
  misc_feature 1..23: note = LF
  misc_feature 24..25: note = Core
  misc_feature 26..50: note = RF
tgtttttttcattctctttccctcttattacggctgatgatttatcggtt

SEQ ID NO: 20798 - DNA, 50 bp, unidentified
  source 1..50: mol_type = unassigned DNA; note = target_078c958
  misc_feature 1..23: note = LF
  misc_feature 24..25: note = Core
  misc_feature 26..50: note = RF
gctgcgctgcgtttgtccgcttttggcacaacgcggacatatcggggcgc

SEQ ID NO: 20799 - DNA, 50 bp, unidentified
  source 1..50: mol_type = unassigned DNA; note = target_078f1f0
  misc_feature 1..21: note = LF
  misc_feature 22..25: note = Core
  misc_feature 26..50: note = RF
cgggcagccgctggttcatgaatgacgatgatgtcgttgtcttgctgctt

SEQ ID NO: 20800 - DNA, 50 bp, unidentified
  source 1..50: mol_type = unassigned DNA; note = target_079c3f5
  misc_feature 1..21: note = LF
  misc_feature 22..25: note = Core
  misc_feature 26..50: note = RF
gctcgcatcgctccggccgggatgacgggtggaacgggcggcgcgcgact

SEQ ID NO: 20801 - DNA, 50 bp, unidentified
  source 1..50: mol_type = unassigned DNA; note = target_079caac
  misc_feature 1..24: note = LF
  misc_feature 25: note = Core
  misc_feature 26..50: note = RF
tctgtgtactggccgcatgtccgcttgggtcattcacgtcatagccaact

SEQ ID NO: 20802 - DNA, 50 bp, unidentified
  source 1..50: mol_type = unassigned DNA; note = target_07ab388
  misc_feature 1..22: note = LF
  misc_feature 23..25: note = Core
  misc_feature 26..50: note = RF
tttatcgtttctttcatttttctctccttataatattaaaaagcatattt

SEQ ID NO: 20803 - DNA, 50 bp, unidentified
  source 1..50: mol_type = unassigned DNA; note = target_07b50a9
  misc_feature 1..23: note = LF
  misc_feature 24..25: note = Core
  misc_feature 26..50: note = RF
aatgaagccgagacaggggtacatgggtcccggatcgcctcgcttgcgct

SEQ ID NO: 20804 - DNA, 50 bp, unidentified
  source 1..50: mol_type = unassigned DNA; note = target_07b6051
  misc_feature 1..23: note = LF
  misc_feature 24..25: note = Core
  misc_feature 26..50: note = RF
cgaacgccggccggtgttcggggtttttgaggtttgcccggtgcggctcc

SEQ ID NO: 20805 - DNA, 50 bp, unidentified
  source 1..50: mol_type = unassigned DNA; note = target_07c1001
  misc_feature 1..24: note = LF
  misc_feature 25: note = Core
  misc_feature 26..50: note = RF
cggcggttagacgcccacaagcggcggtatgacgctgacgcaagacgtga

SEQ ID NO: 20806 - DNA, 50 bp, unidentified
  source 1..50: mol_type = unassigned DNA; note = target_07c80b5
  misc_feature 1..23: note = LF
  misc_feature 24..25: note = Core
  misc_feature 26..50: note = RF
ccgcgttgtcaacggtcatcgtgtctccttctcgcgagccgatagcgcgg

SEQ ID NO: 20807 - DNA, 50 bp, unidentified
  source 1..50: mol_type = unassigned DNA; note = target_07cad29
  misc_feature 1..23: note = LF
  misc_feature 24..25: note = Core
  misc_feature 26..50: note = RF
ggacgaccccgccccaaggccgcctgaccagacccggtaaaggttcgtgg

SEQ ID NO: 20808 - DNA, 50 bp, unidentified
  source 1..50: mol_type = unassigned DNA; note = target_07ce804
  misc_feature 1..23: note = LF
  misc_feature 24..25: note = Core
  misc_feature 26..50: note = RF
ctgtactcatattccatttctccctcccatattgaactgcattaacatac

SEQ ID NO: 20809 - DNA, 50 bp, unidentified
  source 1..50: mol_type = unassigned DNA; note = target_07cfdc0
  misc_feature 1..23: note = LF
  misc_feature 24..25: note = Core
  misc_feature 26..50: note = RF
gtagttatcgaagccattgaagtgacatattttacagagaacctttaaat

SEQ ID NO: 20810 - DNA, 50 bp, unidentified
  source 1..50: mol_type = unassigned DNA; note = target_07d54be
  misc_feature 1..23: note = LF
  misc_feature 24..25: note = Core
  misc_feature 26..50: note = RF
aggtaaggcgatccattcgtcgtgcatctcgaagagcgcagcggaaacca

SEQ ID NO: 20811 - DNA, 50 bp, unidentified
  source 1..50: mol_type = unassigned DNA; note = target_07d6bb9
  misc_feature 1..23: note = LF
  misc_feature 24..25: note = Core
  misc_feature 26..50: note = RF
tattgcaggaggttgcgcagaaaaccatgtgaaatatcacgctttcatgg

SEQ ID NO: 20812 - DNA, 50 bp, unidentified
  source 1..50: mol_type = unassigned DNA; note = target_07e1b80
  misc_feature 1..22: note = LF
  misc_feature 23..25: note = Core
  misc_feature 26..50: note = RF
cgcggtcttcggcatggtgcgctcccttctatccgcacacggttacccgt

SEQ ID NO: 20813 - DNA, 50 bp, unidentified
  source 1..50: mol_type = unassigned DNA; note = target_07e2945
  misc_feature 1..23: note = LF
  misc_feature 24..25: note = Core
  misc_feature 26..50: note = RF
tgcagttttttcatagtttcctcctcaatctttcactgcggtatatccgc

SEQ ID NO: 20814 - DNA, 50 bp, unidentified
  source 1..50: mol_type = unassigned DNA; note = target_07e5bc8
  misc_feature 1..23: note = LF
  misc_feature 24..25: note = Core
  misc_feature 26..50: note = RF
tctggaatttcgtagtcacatcgctatagttgctatttcgcgaaatatgc

SEQ ID NO: 20815 - DNA, 50 bp, unidentified
  source 1..50: mol_type = unassigned DNA; note = target_07f27bd
  misc_feature 1..24: note = LF
  misc_feature 25: note = Core
  misc_feature 26..50: note = RF
atttccgccacacgcgtggagaagtttaaaagcagccacggccgcgtcgc

SEQ ID NO: 20816 - DNA, 50 bp, unidentified
  source 1..50: mol_type = unassigned DNA; note = target_07f6110
  misc_feature 1..24: note = LF
  misc_feature 25: note = Core
  misc_feature 26..50: note = RF
cactcaccaagttgactgaatcgccccgggttcggtggagtgcgagttct

SEQ ID NO: 20817 - DNA, 50 bp, unidentified
  source 1..50: mol_type = unassigned DNA; note = target_07f8cfc
  misc_feature 1..23: note = LF
  misc_feature 24..25: note = Core
  misc_feature 26..50: note = RF
gagtggtacgggatgtccgctattggcacttagcggaccctgcggggggc

SEQ ID NO: 20818 - DNA, 50 bp, unidentified
  source 1..50: mol_type = unassigned DNA; note = target_07fcbfc
  misc_feature 1..23: note = LF
  misc_feature 24..25: note = Core
  misc_feature 26..50: note = RF
gaagaccgtatctcaacgaaccacttttccagggagggtaatcgctgaag

SEQ ID NO: 20819 - DNA, 50 bp, unidentified
  source 1..50: mol_type = unassigned DNA; note = target_07fde3d
  misc_feature 1..24: note = LF
  misc_feature 25: note = Core
  misc_feature 26..50: note = RF
atatatcagattgacatacggactctttcttaaattttgtgaaaatgggt

SEQ ID NO: 20820 - DNA, 50 bp, unidentified
  source 1..50: mol_type = unassigned DNA; note = target_07ff35b
  misc_feature 1..23: note = LF
  misc_feature 24..25: note = Core
  misc_feature 26..50: note = RF
tattttggttatgaatcctgaccctagtattgcgttcgtagggacaggct

SEQ ID NO: 20821 - DNA, 50 bp, unidentified
  source 1..50: mol_type = unassigned DNA; note = target_0800b9c
  misc_feature 1..24: note = LF
  misc_feature 25: note = Core
  misc_feature 26..50: note = RF
cgccgcgggtcctgtgaaacgcgcttctcgtcactagtgtttttggattg

SEQ ID NO: 20822 - DNA, 50 bp, unidentified
  source 1..50: mol_type = unassigned DNA; note = target_0805652
  misc_feature 1..23: note = LF
  misc_feature 24..25: note = Core
  misc_feature 26..50: note = RF
aacctcgaattttcttttttctccttatttttttgttctttttctctctg

SEQ ID NO: 20823 - DNA, 50 bp, unidentified
  source 1..50: mol_type = unassigned DNA; note = target_0809f65
  misc_feature 1..23: note = LF
  misc_feature 24..25: note = Core
  misc_feature 26..50: note = RF
cgatggtgtgcacggcggtttccctttctgctgtaggggtcgggcgacac

SEQ ID NO: 20824 - DNA, 50 bp, unidentified
  source 1..50: mol_type = unassigned DNA; note = target_080ba4b
  misc_feature 1..23: note = LF
  misc_feature 24..25: note = Core
  misc_feature 26..50: note = RF
cgcggacgatgcgtccggtggcgctcattgcccctcgatcgcatcgaaga

SEQ ID NO: 20825 - DNA, 50 bp, unidentified
  source 1..50: mol_type = unassigned DNA; note = target_0811741
  misc_feature 1..23: note = LF
  misc_feature 24..25: note = Core
  misc_feature 26..50: note = RF
ataagcgggatcgaaccgctgacctcttgaatgccattcaagcgctctcc

SEQ ID NO: 20826 - DNA, 50 bp, unidentified
  source 1..50: mol_type = unassigned DNA; note = target_0817244
  misc_feature 1..24: note = LF
  misc_feature 25: note = Core
  misc_feature 26..50: note = RF
cctggattagccgtaggcgtaatccgggtgtccgaaggcttaacccgacg

SEQ ID NO: 20827 - DNA, 50 bp, unidentified
  source 1..50: mol_type = unassigned DNA; note = target_0817348
  misc_feature 1..23: note = LF
  misc_feature 24..25: note = Core
  misc_feature 26..50: note = RF
cccaccctgggacaccggtggagtgcaccccctgtgtgagacacgggatt

SEQ ID NO: 20828 - DNA, 50 bp, unidentified
  source 1..50: mol_type = unassigned DNA; note = target_0819ffe
  misc_feature 1..24: note = LF
  misc_feature 25: note = Core
  misc_feature 26..50: note = RF
agacagaccaactgactaggagaaacgattatgtccagacgttcattttt

SEQ ID NO: 20829 - DNA, 50 bp, unidentified
  source 1..50: mol_type = unassigned DNA; note = target_081cf84
  misc_feature 1..23: note = LF
  misc_feature 24..25: note = Core
  misc_feature 26..50: note = RF
cggggcagggcgctgatcggtgttggtgcatggaccccaggagatcggtg

SEQ ID NO: 20830 - DNA, 50 bp, unidentified
  source 1..50: mol_type = unassigned DNA; note = target_0833d73
  misc_feature 1..23: note = LF
  misc_feature 24..25: note = Core
  misc_feature 26..50: note = RF
ccgagtctcacgatccggcggggttgtattgggccatgcgatcgatgcga

SEQ ID NO: 20831 - DNA, 50 bp, unidentified
  source 1..50: mol_type = unassigned DNA; note = target_0835f97
  misc_feature 1..23: note = LF
  misc_feature 24..25: note = Core
  misc_feature 26..50: note = RF
agaaaagggcccggcccattgcggacatccacggccacctctgacgctgc

SEQ ID NO: 20832 - DNA, 50 bp, unidentified
  source 1..50: mol_type = unassigned DNA; note = target_0839a2d
  misc_feature 1..22: note = LF
  misc_feature 23..25: note = Core
  misc_feature 26..50: note = RF
tcgttcttcccgacaaataagaatttatcgtttgcaaaacaaaatattat

SEQ ID NO: 20833 - DNA, 50 bp, unidentified
  source 1..50: mol_type = unassigned DNA; note = target_0843fd6
  misc_feature 1..24: note = LF
  misc_feature 25: note = Core
  misc_feature 26..50: note = RF
tacgccggttactacggcttctgctcctccagaccccacctcgcagtgac

SEQ ID NO: 20834 - DNA, 50 bp, unidentified
  source 1..50: mol_type = unassigned DNA; note = target_08498b6
  misc_feature 1..23: note = LF
  misc_feature 24..25: note = Core
  misc_feature 26..50: note = RF
gcgtcacgcgatgcctgtgttgtctaacgccccagttcagctgcaaagga

SEQ ID NO: 20835 - DNA, 50 bp, unidentified
  source 1..50: mol_type = unassigned DNA; note = target_0878cc2
  misc_feature 1..23: note = LF
  misc_feature 24..25: note = Core
  misc_feature 26..50: note = RF
tgccgactgcatacgtcggcttgtggcacgaagtgtgagtgcccaccata

SEQ ID NO: 20836 - DNA, 50 bp, unidentified
  source 1..50: mol_type = unassigned DNA; note = target_0881c0b
  misc_feature 1..23: note = LF
  misc_feature 24..25: note = Core
  misc_feature 26..50: note = RF
cgacatcgctacgcttgtcgaccctctcttcagcttcgctggaaagaggg

SEQ ID NO: 20837 - DNA, 50 bp, unidentified
  source 1..50: mol_type = unassigned DNA; note = target_08855f8
  misc_feature 1..23: note = LF
  misc_feature 24..25: note = Core
  misc_feature 26..50: note = RF
ggtttcgctgcgctcaacccatcctacgaaatgccgtcgtcattgcgagg

SEQ ID NO: 20838 - DNA, 50 bp, unidentified
  source 1..50: mol_type = unassigned DNA; note = target_08a6c05
  misc_feature 1..23: note = LF
  misc_feature 24..25: note = Core
  misc_feature 26..50: note = RF
tttgatgttaccatagacacttcctttcgttattcggtcaagcaagggcg

SEQ ID NO: 20839 - DNA, 50 bp, unidentified
  source 1..50: mol_type = unassigned DNA; note = target_08b7549
  misc_feature 1..23: note = LF
  misc_feature 24..25: note = Core
  misc_feature 26..50: note = RF
gtcggggtggtcggggtggtcgcctgacagcacggctgctcctgctggtc

SEQ ID NO: 20840 - DNA, 50 bp, unidentified
  source 1..50: mol_type = unassigned DNA; note = target_08c0275
  misc_feature 1..24: note = LF
  misc_feature 25: note = Core
  misc_feature 26..50: note = RF
gtacctgccaagaacatcccgcccccccccgcgatgacgcggcttgacct

SEQ ID NO: 20841 - DNA, 50 bp, unidentified
  source 1..50: mol_type = unassigned DNA; note = target_08c58bc
  misc_feature 1..23: note = LF
  misc_feature 24..25: note = Core
  misc_feature 26..50: note = RF
aagatcgcagccttcggcagctcctacagataaatgccgattccactgta

SEQ ID NO: 20842 - DNA, 50 bp, unidentified
  source 1..50: mol_type = unassigned DNA; note = target_08c7f5e
  misc_feature 1..24: note = LF
  misc_feature 25: note = Core
  misc_feature 26..50: note = RF
aagctgggaaccctccgcgtagggcgaataaccgctacgcggttatccgc

SEQ ID NO: 20843 - DNA, 50 bp, unidentified
  source 1..50: mol_type = unassigned DNA; note = target_08cead7
  misc_feature 1..23: note = LF
  misc_feature 24..25: note = Core
  misc_feature 26..50: note = RF
aaagagctcagacacgccgttcaatcagggctaacttcatccctaaaaac

SEQ ID NO: 20844 - DNA, 50 bp, unidentified
  source 1..50: mol_type = unassigned DNA; note = target_08d66d1
  misc_feature 1..24: note = LF
  misc_feature 25: note = Core
  misc_feature 26..50: note = RF
tcttggtccgtcttcggccagaagcgggctgtccggtcgcgtgcgcccac

SEQ ID NO: 20845 - DNA, 50 bp, unidentified
  source 1..50: mol_type = unassigned DNA; note = target_08e1286
  misc_feature 1..24: note = LF
  misc_feature 25: note = Core
  misc_feature 26..50: note = RF
ggaatttgacaaaaaagccctaacgcccaaggtaagcggcgccggagcac

SEQ ID NO: 20846 - DNA, 50 bp, unidentified
  source 1..50: mol_type = unassigned DNA; note = target_08eb7e9
  misc_feature 1..23: note = LF
  misc_feature 24..25: note = Core
  misc_feature 26..50: note = RF
tccggccatcgaaaggccggcacccccccgctcgatcatcgaatagcagc

SEQ ID NO: 20847 - DNA, 50 bp, unidentified
  source 1..50: mol_type = unassigned DNA; note = target_08ee89e
  misc_feature 1..23: note = LF
  misc_feature 24..25: note = Core
  misc_feature 26..50: note = RF
cttcgggcaatgccgattacgacaggagttgtaggcgatgcgcgtcgcgc

SEQ ID NO: 20848 - DNA, 50 bp, unidentified
  source 1..50: mol_type = unassigned DNA; note = target_08fd24e
  misc_feature 1..23: note = LF
  misc_feature 24..25: note = Core
  misc_feature 26..50: note = RF
tctgaaaaggcacggcacgccccctacaataaccacatcgaggtattatt

SEQ ID NO: 20849 - DNA, 50 bp, unidentified
  source 1..50: mol_type = unassigned DNA; note = target_090eaff
  misc_feature 1..23: note = LF
  misc_feature 24..25: note = Core
  misc_feature 26..50: note = RF
tttattttaaatcatttctattcctccatctgttctttattatactttta

SEQ ID NO: 20850 - DNA, 50 bp, unidentified
  source 1..50: mol_type = unassigned DNA; note = target_0919758
  misc_feature 1..22: note = LF
  misc_feature 23..25: note = Core
  misc_feature 26..50: note = RF
cacatcgggagccgatttatgcagactttccctagcaagcaccctgaacc

SEQ ID NO: 20851 - DNA, 50 bp, unidentified
  source 1..50: mol_type = unassigned DNA; note = target_092822b
  misc_feature 1..23: note = LF
  misc_feature 24..25: note = Core
  misc_feature 26..50: note = RF
gccgcagcgctcgcaagcgtccctggatgcccgcggccagcaaccacgag

SEQ ID NO: 20852 - DNA, 50 bp, unidentified
  source 1..50: mol_type = unassigned DNA; note = target_092badd
  misc_feature 1..23: note = LF
  misc_feature 24..25: note = Core
  misc_feature 26..50: note = RF
ccgatgatgaaataggcgtagggcggaagaggccgaaggccgtcatccgc

SEQ ID NO: 20853 - DNA, 50 bp, unidentified
  source 1..50: mol_type = unassigned DNA; note = target_092e34c
  misc_feature 1..23: note = LF
  misc_feature 24..25: note = Core
  misc_feature 26..50: note = RF
cggggctttgaatggggagggtgtaggagcggctttcagccgcgaaccgc

SEQ ID NO: 20854 - DNA, 50 bp, unidentified
  source 1..50: mol_type = unassigned DNA; note = target_092f712
  misc_feature 1..23: note = LF
  misc_feature 24..25: note = Core
  misc_feature 26..50: note = RF
ttgcgcacctcggtcgtcataccgcctccctaccaaggccgccgccgcgc

SEQ ID NO: 20855 - DNA, 50 bp, unidentified
  source 1..50: mol_type = unassigned DNA; note = target_0937032
  misc_feature 1..23: note = LF
  misc_feature 24..25: note = Core
  misc_feature 26..50: note = RF
ctattgacaggtctttccatatcagaagtcgaactgcgcgctcaccttga

SEQ ID NO: 20856 - DNA, 50 bp, unidentified
  source 1..50: mol_type = unassigned DNA; note = target_09379ed
  misc_feature 1..22: note = LF
  misc_feature 23..25: note = Core
  misc_feature 26..50: note = RF
catacctgtcatacatttcctcactttcccagggcgtaaatacgccttgt

SEQ ID NO: 20857 - DNA, 50 bp, unidentified
  source 1..50: mol_type = unassigned DNA; note = target_093b78e
  misc_feature 1..23: note = LF
  misc_feature 24..25: note = Core
  misc_feature 26..50: note = RF
aacaataatcgccataaattcacctcccattttaatttgtgagatggtta

SEQ ID NO: 20858 - DNA, 50 bp, unidentified
  source 1..50: mol_type = unassigned DNA; note = target_0940796
  misc_feature 1..24: note = LF
  misc_feature 25: note = Core
  misc_feature 26..50: note = RF
gtccgatcgccaacaacaacggagaggcgacatgcagaaaaaaaacccgg

SEQ ID NO: 20859 - DNA, 50 bp, unidentified
  source 1..50: mol_type = unassigned DNA; note = target_094289b
  misc_feature 1..24: note = LF
  misc_feature 25: note = Core
  misc_feature 26..50: note = RF
cctgatgtgctgcaacctgaggaaagggaacgatgaacagcaccgatgtc

SEQ ID NO: 20860 - DNA, 50 bp, unidentified
  source 1..50: mol_type = unassigned DNA; note = target_09475c8
  misc_feature 1..23: note = LF
  misc_feature 24..25: note = Core
  misc_feature 26..50: note = RF
caaagtttatactttgggggcttttatgttttgtaatattgcacaaaatc

SEQ ID NO: 20861 - DNA, 50 bp, unidentified
  source 1..50: mol_type = unassigned DNA; note = target_094e3da
  misc_feature 1..22: note = LF
  misc_feature 23..25: note = Core
  misc_feature 26..50: note = RF
catcacaggtaatatcgctggtaaactatatagtccaggcaggcgaaaca

SEQ ID NO: 20862 - DNA, 50 bp, unidentified
  source 1..50: mol_type = unassigned DNA; note = target_095e39a
  misc_feature 1..23: note = LF
  misc_feature 24..25: note = Core
  misc_feature 26..50: note = RF
attgcaggaatgggtcgaaagcagacataagccgcctaaacaaaacgctg

SEQ ID NO: 20863 - DNA, 50 bp, unidentified
  source 1..50: mol_type = unassigned DNA; note = target_09620de
  misc_feature 1..24: note = LF
  misc_feature 25: note = Core
  misc_feature 26..50: note = RF
ttcatattagacaaaagggccagtttgtgaaacaacaatcttttttgatt

SEQ ID NO: 20864 - DNA, 50 bp, unidentified
  source 1..50: mol_type = unassigned DNA; note = target_0970db8
  misc_feature 1..24: note = LF
  misc_feature 25: note = Core
  misc_feature 26..50: note = RF
ttgctcgatcgcgtgcccggtcttttttttccgagtgatgccgtggcgcg

SEQ ID NO: 20865 - DNA, 50 bp, unidentified
  source 1..50: mol_type = unassigned DNA; note = target_09808c5
  misc_feature 1..21: note = LF
  misc_feature 22..25: note = Core
  misc_feature 26..50: note = RF
attaggtcaagctgcatagaatcaccccctgaattttatcagacggatta

SEQ ID NO: 20866 - DNA, 50 bp, unidentified
  source 1..50: mol_type = unassigned DNA; note = target_0989c3d
  misc_feature 1..24: note = LF
  misc_feature 25: note = Core
  misc_feature 26..50: note = RF
tttgtggaaattattcatgtccgcttcggggtcatgagcgacggatttgc

SEQ ID NO: 20867 - DNA, 50 bp, unidentified
  source 1..50: mol_type = unassigned DNA; note = target_0997e61
  misc_feature 1..24: note = LF
  misc_feature 25: note = Core
  misc_feature 26..50: note = RF
aaatttctctccattatgtcatcccgacgggaggagggatcttctaaaag

SEQ ID NO: 20868 - DNA, 50 bp, unidentified
  source 1..50: mol_type = unassigned DNA; note = target_09a16a5
  misc_feature 1..23: note = LF
  misc_feature 24..25: note = Core
  misc_feature 26..50: note = RF
atcttgtctcataatgtcaccccctaaaacacaaaattgtgcggagctgc

SEQ ID NO: 20869 - DNA, 50 bp, unidentified
  source 1..50: mol_type = unassigned DNA; note = target_09aa040
  misc_feature 1..23: note = LF
  misc_feature 24..25: note = Core
  misc_feature 26..50: note = RF
ggcttgttgccctcaccccagccctctcccaacgggagagggggtcgtcc

SEQ ID NO: 20870 - DNA, 50 bp, unidentified
  source 1..50: mol_type = unassigned DNA; note = target_09ae6fa
  misc_feature 1..24: note = LF
  misc_feature 25: note = Core
  misc_feature 26..50: note = RF
ctgacatccccagcccaagcggatttgaagcgtcttacggccagcgtcaa

SEQ ID NO: 20871 - DNA, 50 bp, unidentified
  source 1..50: mol_type = unassigned DNA; note = target_09b4eda
  misc_feature 1..24: note = LF
  misc_feature 25: note = Core
  misc_feature 26..50: note = RF
cttttcagagctggcgtccgttattggctaatatgagaccaataccaaac

SEQ ID NO: 20872 - DNA, 50 bp, unidentified
  source 1..50: mol_type = unassigned DNA; note = target_09b4f09
  misc_feature 1..23: note = LF
  misc_feature 24..25: note = Core
  misc_feature 26..50: note = RF
ctcatgtcagctacgaccctaagcggaccttcagattgccatcaccatga

SEQ ID NO: 20873 - DNA, 50 bp, unidentified
  source 1..50: mol_type = unassigned DNA; note = target_09b556e
  misc_feature 1..24: note = LF
  misc_feature 25: note = Core
  misc_feature 26..50: note = RF
gtttttttgaactaatctgcccgttagcttaatgggacgtcacagtctac

SEQ ID NO: 20874 - DNA, 50 bp, unidentified
  source 1..50: mol_type = unassigned DNA; note = target_09ba0df
  misc_feature 1..24: note = LF
  misc_feature 25: note = Core
  misc_feature 26..50: note = RF
tcgtgtgatcccgataggatgaaactctatctttaccattgagtatctgt

SEQ ID NO: 20875 - DNA, 50 bp, unidentified
  source 1..50: mol_type = unassigned DNA; note = target_09c43cc
  misc_feature 1..23: note = LF
  misc_feature 24..25: note = Core
  misc_feature 26..50: note = RF
ggattagaattcattaggtataactattgagtatattggtcagccacgta

SEQ ID NO: 20876 - DNA, 50 bp, unidentified
  source 1..50: mol_type = unassigned DNA; note = target_09c6b57
  misc_feature 1..24: note = LF
  misc_feature 25: note = Core
  misc_feature 26..50: note = RF
gcatatttgaactaacctgcccgttagttgaaccccgaattaaattaagt

SEQ ID NO: 20877 - DNA, 50 bp, unidentified
  source 1..50: mol_type = unassigned DNA; note = target_09db0de
  misc_feature 1..23: note = LF
  misc_feature 24..25: note = Core
  misc_feature 26..50: note = RF
tgccttcggctatatccttcccactaccgggcggatttgggactttcacc

SEQ ID NO: 20878 - DNA, 50 bp, unidentified
  source 1..50: mol_type = unassigned DNA; note = target_09ddd96
  misc_feature 1..23: note = LF
  misc_feature 24..25: note = Core
  misc_feature 26..50: note = RF
ccccgcacgaccagcgcaccatgtgggcttacatcttcggcgcgatctgc

SEQ ID NO: 20879 - DNA, 50 bp, unidentified
  source 1..50: mol_type = unassigned DNA; note = target_09e16fe
  misc_feature 1..23: note = LF
  misc_feature 24..25: note = Core
  misc_feature 26..50: note = RF
atcctcccgcgtagcttttgggtccggctcagaagcgcatcactgacgtg

SEQ ID NO: 20880 - DNA, 50 bp, unidentified
  source 1..50: mol_type = unassigned DNA; note = target_09e72c7
  misc_feature 1..18: note = LF
  misc_feature 19..25: note = Core
  misc_feature 26..50: note = RF
tcgacgatgaggatggtgctcattgcgccaccgggagcgcgatctccacg

SEQ ID NO: 20881 - DNA, 50 bp, unidentified
  source 1..50: mol_type = unassigned DNA; note = target_09eff79
  misc_feature 1..23: note = LF
  misc_feature 24..25: note = Core
  misc_feature 26..50: note = RF
ttccattatcattacaattatcactatcatttgtgaattcgtaattagca

SEQ ID NO: 20882 - DNA, 50 bp, unidentified
  source 1..50: mol_type = unassigned DNA; note = target_09f1a10
  misc_feature 1..23: note = LF
  misc_feature 24..25: note = Core
  misc_feature 26..50: note = RF
gtcagccttcgcgagcaagcccgctcccacattgaaatgcaatcaaatgt

SEQ ID NO: 20883 - DNA, 50 bp, unidentified
  source 1..50: mol_type = unassigned DNA; note = target_09f1b8f
  misc_feature 1..24: note = LF
  misc_feature 25: note = Core
  misc_feature 26..50: note = RF
gtgatttcctcgttcatcggttcccaccccccccacatgctccatgagac

SEQ ID NO: 20884 - DNA, 50 bp, unidentified
  source 1..50: mol_type = unassigned DNA; note = target_0a0255b
  misc_feature 1..23: note = LF
  misc_feature 24..25: note = Core
  misc_feature 26..50: note = RF
tacaggggtccttcgctgcgctcaggatgacggcgcgttctttaggtgtt

SEQ ID NO: 20885 - DNA, 50 bp, unidentified
  source 1..50: mol_type = unassigned DNA; note = target_0a0299b
  misc_feature 1..24: note = LF
  misc_feature 25: note = Core
  misc_feature 26..50: note = RF
gataaaggtggatagtgatgaactcttaagagatgaaattgaattcatgt

SEQ ID NO: 20886 - DNA, 50 bp, unidentified
  source 1..50: mol_type = unassigned DNA; note = target_0a0ae4b
  misc_feature 1..23: note = LF
  misc_feature 24..25: note = Core
  misc_feature 26..50: note = RF
gatcggtgtgttcatcgtgaaggctcacaagctgtgggccttcggcttcg

SEQ ID NO: 20887 - DNA, 50 bp, unidentified
  source 1..50: mol_type = unassigned DNA; note = target_0a0d538
  misc_feature 1..24: note = LF
  misc_feature 25: note = Core
  misc_feature 26..50: note = RF
ttttggataaattaggctgcgcctcggaaataaaaatgaaaatctttcgc

SEQ ID NO: 20888 - DNA, 50 bp, unidentified
  source 1..50: mol_type = unassigned DNA; note = target_0a1490e
  misc_feature 1..24: note = LF
  misc_feature 25: note = Core
  misc_feature 26..50: note = RF
gcctccactttagtgccgcctaacgtcgaggtgtgcggcgccgcgagtac

SEQ ID NO: 20889 - DNA, 50 bp, unidentified
  source 1..50: mol_type = unassigned DNA; note = target_0a16753
  misc_feature 1..22: note = LF
  misc_feature 23..25: note = Core
  misc_feature 26..50: note = RF
agcctccacacgctgacgatcttgaatcacgataagcgactcttgtgaat

SEQ ID NO: 20890 - DNA, 50 bp, unidentified
  source 1..50: mol_type = unassigned DNA; note = target_0a1ce01
  misc_feature 1..24: note = LF
  misc_feature 25: note = Core
  misc_feature 26..50: note = RF
cctccgtcgtctattgaccgaggctgtgtcaaaacccaaaccacttgccg

SEQ ID NO: 20891 - DNA, 50 bp, unidentified
  source 1..50: mol_type = unassigned DNA; note = target_0a23330
  misc_feature 1..23: note = LF
  misc_feature 24..25: note = Core
  misc_feature 26..50: note = RF
tttggtcaaagcgggttttaatctgacaatgcctctttctgatcacggct

SEQ ID NO: 20892 - DNA, 50 bp, unidentified
  source 1..50: mol_type = unassigned DNA; note = target_0a29990
  misc_feature 1..23: note = LF
  misc_feature 24..25: note = Core
  misc_feature 26..50: note = RF
aaaaaggctcatgggcagccctccttcgtaaaatgaaaagagaccggatt

SEQ ID NO: 20893 - DNA, 50 bp, unidentified
  source 1..50: mol_type = unassigned DNA; note = target_0a2c7b8
  misc_feature 1..24: note = LF
  misc_feature 25: note = Core
  misc_feature 26..50: note = RF
cgtcgacctcatggaagcctctttttttccgaagccggaaggctgtcaag

SEQ ID NO: 20894 - DNA, 50 bp, unidentified
  source 1..50: mol_type = unassigned DNA; note = target_0a41a91
  misc_feature 1..24: note = LF
  misc_feature 25: note = Core
  misc_feature 26..50: note = RF
ccggcgacgggcggggcttagaagtttccccgggcggcttcggtcaggat

SEQ ID NO: 20895 - DNA, 50 bp, unidentified
  source 1..50: mol_type = unassigned DNA; note = target_0a48840
  misc_feature 1..24: note = LF
  misc_feature 25: note = Core
  misc_feature 26..50: note = RF
ttccctgcttgaaccctgcccttacagggcgttggctgtgcatcctttcc

SEQ ID NO: 20896 - DNA, 50 bp, unidentified
  source 1..50: mol_type = unassigned DNA; note = target_0a5779e
  misc_feature 1..24: note = LF
  misc_feature 25: note = Core
  misc_feature 26..50: note = RF
tgacacctctcaaaggccgatgtacaaagggctgaagtcacgtgagggac

SEQ ID NO: 20897 - DNA, 50 bp, unidentified
  source 1..50: mol_type = unassigned DNA; note = target_0a61720
  misc_feature 1..23: note = LF
  misc_feature 24..25: note = Core
  misc_feature 26..50: note = RF
aagttaccatctccacaaggctttgttgcttaattcggtgagaagacatg

SEQ ID NO: 20898 - DNA, 50 bp, unidentified
  source 1..50: mol_type = unassigned DNA; note = target_0a6196c
  misc_feature 1..23: note = LF
  misc_feature 24..25: note = Core
  misc_feature 26..50: note = RF
cgggggcggcggcctgcccctcttgtcccaataagattggcgcgggctgg

SEQ ID NO: 20899 - DNA, 50 bp, unidentified
  source 1..50: mol_type = unassigned DNA; note = target_0a6791a
  misc_feature 1..23: note = LF
  misc_feature 24..25: note = Core
  misc_feature 26..50: note = RF
ctgagactctgacgcgcactcatctgccgcgatcagcgcgcggaggtgtc

SEQ ID NO: 20900 - DNA, 50 bp, unidentified
  source 1..50: mol_type = unassigned DNA; note = target_0a68efc
  misc_feature 1..21: note = LF
  misc_feature 22..25: note = Core
  misc_feature 26..50: note = RF
cccgagatcggtggccccggaatgacagccgagggatggcgccggcgggc

SEQ ID NO: 20901 - DNA, 50 bp, unidentified
  source 1..50: mol_type = unassigned DNA; note = target_0a6a89f
  misc_feature 1..24: note = LF
  misc_feature 25: note = Core
  misc_feature 26..50: note = RF
agaactagcaattaattatacacgttgttagctgtagttattttacttta

SEQ ID NO: 20902 - DNA, 50 bp, unidentified
  source 1..50: mol_type = unassigned DNA; note = target_0a7489d
  misc_feature 1..24: note = LF
  misc_feature 25: note = Core
  misc_feature 26..50: note = RF
gcggatgctgcccgcaccatgccccacgttaccttgttggtggttccggg

SEQ ID NO: 20903 - DNA, 50 bp, unidentified
  source 1..50: mol_type = unassigned DNA; note = target_0a7991d
  misc_feature 1..24: note = LF
  misc_feature 25: note = Core
  misc_feature 26..50: note = RF
atgccgaagaagtactggttgtcttcttcgtctggtgcatttccggatcg

SEQ ID NO: 20904 - DNA, 50 bp, unidentified
  source 1..50: mol_type = unassigned DNA; note = target_0a870da
  misc_feature 1..21: note = LF
  misc_feature 22..25: note = Core
  misc_feature 26..50: note = RF
ttcgtcgctttgctcctcgcaatgacgaatggaaagccccgggatgactg

SEQ ID NO: 20905 - DNA, 50 bp, unidentified
  source 1..50: mol_type = unassigned DNA; note = target_0a87ca9
  misc_feature 1..23: note = LF
  misc_feature 24..25: note = Core
  misc_feature 26..50: note = RF
cagggcgggtttcaaacccgcccctacaaaaggttgggataggcgcgcgc

SEQ ID NO: 20906 - DNA, 50 bp, unidentified
  source 1..50: mol_type = unassigned DNA; note = target_0a8d23e
  misc_feature 1..23: note = LF
  misc_feature 24..25: note = Core
  misc_feature 26..50: note = RF
tgtgctaacaaaaaacttaagagtgtcctatcttttacattctatctgct

SEQ ID NO: 20907 - DNA, 50 bp, unidentified
  source 1..50: mol_type = unassigned DNA; note = target_0a8d320
  misc_feature 1..23: note = LF
  misc_feature 24..25: note = Core
  misc_feature 26..50: note = RF
ggtttcgttgcgctctacccaccctacggttctttataaaggacggtagg

SEQ ID NO: 20908 - DNA, 50 bp, unidentified
  source 1..50: mol_type = unassigned DNA; note = target_0a96117
  misc_feature 1..21: note = LF
  misc_feature 22..25: note = Core
  misc_feature 26..50: note = RF
cgccctgcgtcccgtggtgtgccccccttcgccgggcggggaggcgacgg

SEQ ID NO: 20909 - DNA, 50 bp, unidentified
  source 1..50: mol_type = unassigned DNA; note = target_0aa9795
  misc_feature 1..23: note = LF
  misc_feature 24..25: note = Core
  misc_feature 26..50: note = RF
cgtgggatcgtcatgcctgtctcctgtgtaatttctcgttggatggcgcc

SEQ ID NO: 20910 - DNA, 50 bp, unidentified
  source 1..50: mol_type = unassigned DNA; note = target_0aa9e93
  misc_feature 1..23: note = LF
  misc_feature 24..25: note = Core
  misc_feature 26..50: note = RF
ggaccagcccgaacaactggaggaggttgaatcatgatgcccggatgcca

SEQ ID NO: 20911 - DNA, 50 bp, unidentified
  source 1..50: mol_type = unassigned DNA; note = target_0aaa310
  misc_feature 1..23: note = LF
  misc_feature 24..25: note = Core
  misc_feature 26..50: note = RF
cttggcccgcgcctttgcccaccctacgtccaaactgagggagcgggcgc

SEQ ID NO: 20912 - DNA, 50 bp, unidentified
  source 1..50: mol_type = unassigned DNA; note = target_0aaa4ec
  misc_feature 1..24: note = LF
  misc_feature 25: note = Core
  misc_feature 26..50: note = RF
ctgtttataactgtacgacttcttctccttcatcactaaagaaaccttcg

SEQ ID NO: 20913 - DNA, 50 bp, unidentified
  source 1..50: mol_type = unassigned DNA; note = target_0aaa64c
  misc_feature 1..22: note = LF
  misc_feature 23..25: note = Core
  misc_feature 26..50: note = RF
ttcatggatggctaaagggtgcgtttagttgatgaaggattaagtgattt

SEQ ID NO: 20914 - DNA, 50 bp, unidentified
  source 1..50: mol_type = unassigned DNA; note = target_0aab861
  misc_feature 1..24: note = LF
  misc_feature 25: note = Core
  misc_feature 26..50: note = RF
gattattgggcgccgcacttgggccgctatcgggtgcccttcggtgtggc

SEQ ID NO: 20915 - DNA, 50 bp, unidentified
  source 1..50: mol_type = unassigned DNA; note = target_0ab0f7a
  misc_feature 1..24: note = LF
  misc_feature 25: note = Core
  misc_feature 26..50: note = RF
ttgccaactgaaaactcaaaggaaataatcatggtcagtacacgggcatt

SEQ ID NO: 20916 - DNA, 50 bp, unidentified
  source 1..50: mol_type = unassigned DNA; note = target_0ac0477
  misc_feature 1..23: note = LF
  misc_feature 24..25: note = Core
  misc_feature 26..50: note = RF
gccgcattaccggcgaccggatgtgaggttgataggctcagcgatgagcc

SEQ ID NO: 20917 - DNA, 50 bp, unidentified
  source 1..50: mol_type = unassigned DNA; note = target_0ac6554
  misc_feature 1..23: note = LF
  misc_feature 24..25: note = Core
  misc_feature 26..50: note = RF
accgcattgtttggtcggcgtgtctatcggctcgcctcctgaccggcacc

SEQ ID NO: 20918 - DNA, 50 bp, unidentified
  source 1..50: mol_type = unassigned DNA; note = target_0aca156
  misc_feature 1..24: note = LF
  misc_feature 25: note = Core
  misc_feature 26..50: note = RF
gcggcctgtcgtgctcgagagaagcggacgttcccatgcatccatcggcg

SEQ ID NO: 20919 - DNA, 50 bp, unidentified
  source 1..50: mol_type = unassigned DNA; note = target_0ad8151
  misc_feature 1..22: note = LF
  misc_feature 23..25: note = Core
  misc_feature 26..50: note = RF
cgtaagatagtagtcaccgccgcacctcaatccctccaccttatcggaaa

SEQ ID NO: 20920 - DNA, 50 bp, unidentified
  source 1..50: mol_type = unassigned DNA; note = target_0af5e82
  misc_feature 1..23: note = LF
  misc_feature 24..25: note = Core
  misc_feature 26..50: note = RF
cccccgttaccgaagtcctgagcctagaatggctcatccacgatcatacg

SEQ ID NO: 20921 - DNA, 50 bp, unidentified
  source 1..50: mol_type = unassigned DNA; note = target_0afdb27
  misc_feature 1..24: note = LF
  misc_feature 25: note = Core
  misc_feature 26..50: note = RF
gattctgtgaccgggctgttgatttgcaccgaagcctgacccactaagac

SEQ ID NO: 20922 - DNA, 50 bp, unidentified
  source 1..50: mol_type = unassigned DNA; note = target_0afe3f8
  misc_feature 1..23: note = LF
  misc_feature 24..25: note = Core
  misc_feature 26..50: note = RF
gggccccttcgcgggcaagcccgctcccacagtggccggcgatgtctgca

SEQ ID NO: 20923 - DNA, 50 bp, unidentified
  source 1..50: mol_type = unassigned DNA; note = target_0affaab
  misc_feature 1..24: note = LF
  misc_feature 25: note = Core
  misc_feature 26..50: note = RF
acttccatcggctccgggcgtaacttccggtttgccgaccacccggacag

SEQ ID NO: 20924 - DNA, 50 bp, unidentified
  source 1..50: mol_type = unassigned DNA; note = target_0b09eb4
  misc_feature 1..23: note = LF
  misc_feature 24..25: note = Core
  misc_feature 26..50: note = RF
tccatgtacatttccaaaacaggctcaaagaaaatagttcatgttttaac

SEQ ID NO: 20925 - DNA, 50 bp, unidentified
  source 1..50: mol_type = unassigned DNA; note = target_0b0ad8d
  misc_feature 1..24: note = LF
  misc_feature 25: note = Core
  misc_feature 26..50: note = RF
tgccacggcccgctgcgcgggcctcgcaatgacagtaggggtagggtggg

SEQ ID NO: 20926 - DNA, 50 bp, unidentified
  source 1..50: mol_type = unassigned DNA; note = target_0b189c4
  misc_feature 1..22: note = LF
  misc_feature 23..25: note = Core
  misc_feature 26..50: note = RF
acagcaccctcggcgagcctcccccccctcgttctgttcgtcgtttcaca

SEQ ID NO: 20927 - DNA, 50 bp, unidentified
  source 1..50: mol_type = unassigned DNA; note = target_0b28858
  misc_feature 1..24: note = LF
  misc_feature 25: note = Core
  misc_feature 26..50: note = RF
gcggaatatgaagcagttgtaggtcggattagcgcagcgtaatctgacaa

SEQ ID NO: 20928 - DNA, 50 bp, unidentified
  source 1..50: mol_type = unassigned DNA; note = target_0b2b237
  misc_feature 1..23: note = LF
  misc_feature 24..25: note = Core
  misc_feature 26..50: note = RF
ttgataccggaaagaatagttctctttccggtaccatcattgagcgtaaa

SEQ ID NO: 20929 - DNA, 50 bp, unidentified
  source 1..50: mol_type = unassigned DNA; note = target_0b2d1b2
  misc_feature 1..24: note = LF
  misc_feature 25: note = Core
  misc_feature 26..50: note = RF
gcgcggcgattgaaccagggcaagtttcactggccaggcatccgccacgg

SEQ ID NO: 20930 - DNA, 50 bp, unidentified
  source 1..50: mol_type = unassigned DNA; note = target_0b31164
  misc_feature 1..24: note = LF
  misc_feature 25: note = Core
  misc_feature 26..50: note = RF
ctcacacgatgatgcgtgtattcatggttatcctctgttcgcttctggcg

SEQ ID NO: 20931 - DNA, 50 bp, unidentified
  source 1..50: mol_type = unassigned DNA; note = target_0b415e5
  misc_feature 1..23: note = LF
  misc_feature 24..25: note = Core
  misc_feature 26..50: note = RF
taccgctttcgcgagcaagcccgctcccacattggttcggtgttgtttgc

SEQ ID NO: 20932 - DNA, 50 bp, unidentified
  source 1..50: mol_type = unassigned DNA; note = target_0b41ab1
  misc_feature 1..24: note = LF
  misc_feature 25: note = Core
  misc_feature 26..50: note = RF
cggcaaaaaccgcctaacccaccctacatttgaattattagaggttccct

SEQ ID NO: 20933 - DNA, 50 bp, unidentified
  source 1..50: mol_type = unassigned DNA; note = target_0b41c9a
  misc_feature 1..23: note = LF
  misc_feature 24..25: note = Core
  misc_feature 26..50: note = RF
acaagattggccgcgatatccgtttttttgagtccgctttggaaagggcc

SEQ ID NO: 20934 - DNA, 50 bp, unidentified
  source 1..50: mol_type = unassigned DNA; note = target_0b50220
  misc_feature 1..23: note = LF
  misc_feature 24..25: note = Core
  misc_feature 26..50: note = RF
gtgagtaaactcacaatcagaggtgactcatgacaaaaccagcatcaatc

SEQ ID NO: 20935 - DNA, 50 bp, unidentified
  source 1..50: mol_type = unassigned DNA; note = target_0b5873f
  misc_feature 1..24: note = LF
  misc_feature 25: note = Core
  misc_feature 26..50: note = RF
acaaattacagttggctttttgttcgtgcctcacttattttagccaacag

SEQ ID NO: 20936 - DNA, 50 bp, unidentified
  source 1..50: mol_type = unassigned DNA; note = target_0b5e62a
  misc_feature 1..22: note = LF
  misc_feature 23..25: note = Core
  misc_feature 26..50: note = RF
gacaaattacccggtactataaatggcttatcgaaagtccgactcgcaaa

SEQ ID NO: 20937 - DNA, 50 bp, unidentified
  source 1..50: mol_type = unassigned DNA; note = target_0b6128e
  misc_feature 1..23: note = LF
  misc_feature 24..25: note = Core
  misc_feature 26..50: note = RF
atatccaattttcattcttattcctcgtataatttcttttatgagtaacc

SEQ ID NO: 20938 - DNA, 50 bp, unidentified
  source 1..50: mol_type = unassigned DNA; note = target_0b685e2
  misc_feature 1..24: note = LF
  misc_feature 25: note = Core
  misc_feature 26..50: note = RF
taaccgtccgcttctggcccaggctgtgtgaaaactcaaaaatggccgcc

SEQ ID NO: 20939 - DNA, 50 bp, unidentified
  source 1..50: mol_type = unassigned DNA; note = target_0b787c0
  misc_feature 1..22: note = LF
  misc_feature 23..25: note = Core
  misc_feature 26..50: note = RF
gtacaactgacgcttagggtgtcattctgagcgaagcctgcctgccggta

SEQ ID NO: 20940 - DNA, 50 bp, unidentified
  source 1..50: mol_type = unassigned DNA; note = target_0b887d9
  misc_feature 1..23: note = LF
  misc_feature 24..25: note = Core
  misc_feature 26..50: note = RF
gtgaaactgtagtcgacaacttcctgaagtcgagtttgcagcaattaacc

SEQ ID NO: 20941 - DNA, 50 bp, unidentified
  source 1..50: mol_type = unassigned DNA; note = target_0b8a2b4
  misc_feature 1..24: note = LF
  misc_feature 25: note = Core
  misc_feature 26..50: note = RF
cacgcatctgtgcacaggttaaggttacggtgccttgaaggccgtcggtg

SEQ ID NO: 20942 - DNA, 50 bp, unidentified
  source 1..50: mol_type = unassigned DNA; note = target_0b8b302
  misc_feature 1..22: note = LF
  misc_feature 23..25: note = Core
  misc_feature 26..50: note = RF
tgatacagataactctcagaacgtctaaaaaccaccagcctaccgtccgg

SEQ ID NO: 20943 - DNA, 50 bp, unidentified
  source 1..50: mol_type = unassigned DNA; note = target_0b922a5
  misc_feature 1..21: note = LF
  misc_feature 22..25: note = Core
  misc_feature 26..50: note = RF
tgaaagagactaacaaacgggaaaaagaatgagttcaccggaagatctgt

SEQ ID NO: 20944 - DNA, 50 bp, unidentified
  source 1..50: mol_type = unassigned DNA; note = target_0b9233d
  misc_feature 1..22: note = LF
  misc_feature 23..25: note = Core
  misc_feature 26..50: note = RF
taggattataccctagtcatgttgacaaatagcggagccacaggcggatc

SEQ ID NO: 20945 - DNA, 50 bp, unidentified
  source 1..50: mol_type = unassigned DNA; note = target_0b9adb8
  misc_feature 1..23: note = LF
  misc_feature 24..25: note = Core
  misc_feature 26..50: note = RF
ataccatggccgttctacccatcctacgctggctacccggctatttacac

SEQ ID NO: 20946 - DNA, 50 bp, unidentified
  source 1..50: mol_type = unassigned DNA; note = target_0b9ed85
  misc_feature 1..23: note = LF
  misc_feature 24..25: note = Core
  misc_feature 26..50: note = RF
ccgccgcagcagcgccggtgtcttgaatgttatggcggtgaaatcgatag

SEQ ID NO: 20947 - DNA, 50 bp, unidentified
  source 1..50: mol_type = unassigned DNA; note = target_0bae753
  misc_feature 1..24: note = LF
  misc_feature 25: note = Core
  misc_feature 26..50: note = RF
agtgcaacaaccgtggattcccgccttcgcgggaaagacgttttactaga

SEQ ID NO: 20948 - DNA, 50 bp, unidentified
  source 1..50: mol_type = unassigned DNA; note = target_0bb5c45
  misc_feature 1..23: note = LF
  misc_feature 24..25: note = Core
  misc_feature 26..50: note = RF
aattatttttttcataactcctcctaaaatcatatattaaaactagttat

SEQ ID NO: 20949 - DNA, 50 bp, unidentified
  source 1..50: mol_type = unassigned DNA; note = target_0bb75b0
  misc_feature 1..23: note = LF
  misc_feature 24..25: note = Core
  misc_feature 26..50: note = RF
tctattataataagcacatattaaggtgtacaagtggacagtaagtatgt

SEQ ID NO: 20950 - DNA, 50 bp, unidentified
  source 1..50: mol_type = unassigned DNA; note = target_0bb783a
  misc_feature 1..24: note = LF
  misc_feature 25: note = Core
  misc_feature 26..50: note = RF
cattccgctgcgttcaccctttcacaggtaaagcggcatactgtctcagc

SEQ ID NO: 20951 - DNA, 50 bp, unidentified
  source 1..50: mol_type = unassigned DNA; note = target_0bb88f8
  misc_feature 1..24: note = LF
  misc_feature 25: note = Core
  misc_feature 26..50: note = RF
cctagaattccatccgctcatcggcagatgcggatgcctctcacgactgt

SEQ ID NO: 20952 - DNA, 50 bp, unidentified
  source 1..50: mol_type = unassigned DNA; note = target_0bbb06c
  misc_feature 1..24: note = LF
  misc_feature 25: note = Core
  misc_feature 26..50: note = RF
aacaaactcttgatccgcgggcgccgtccacacatgactatgttgtatcg

SEQ ID NO: 20953 - DNA, 50 bp, unidentified
  source 1..50: mol_type = unassigned DNA; note = target_0bc0077
  misc_feature 1..23: note = LF
  misc_feature 24..25: note = Core
  misc_feature 26..50: note = RF
tgccgccttcgcgagcaagcccgctcccacattggaatgcatttcaagtg

SEQ ID NO: 20954 - DNA, 50 bp, unidentified
  source 1..50: mol_type = unassigned DNA; note = target_0bc314c
  misc_feature 1..22: note = LF
  misc_feature 23..25: note = Core
  misc_feature 26..50: note = RF
gcgtcagccgaacgtcctattcagaggttccttagcatagtccgcagcac

SEQ ID NO: 20955 - DNA, 50 bp, unidentified
  source 1..50: mol_type = unassigned DNA; note = target_0be06fe
  misc_feature 1..23: note = LF
  misc_feature 24..25: note = Core
  misc_feature 26..50: note = RF
gggtgcggtcgagcgcctggatctggctcttttcgtcgaccgacagcacc

SEQ ID NO: 20956 - DNA, 50 bp, unidentified
  source 1..50: mol_type = unassigned DNA; note = target_0be0f00
  misc_feature 1..24: note = LF
  misc_feature 25: note = Core
  misc_feature 26..50: note = RF
acggacgcttcgcccagagtgcggcagatccggacgttcgtccgagacgc

SEQ ID NO: 20957 - DNA, 50 bp, unidentified
  source 1..50: mol_type = unassigned DNA; note = target_0be9037
  misc_feature 1..23: note = LF
  misc_feature 24..25: note = Core
  misc_feature 26..50: note = RF
cttcatgtctgcttgtggcacttagcagacctaaatcgcgaggtgagtca

SEQ ID NO: 20958 - DNA, 50 bp, unidentified
  source 1..50: mol_type = unassigned DNA; note = target_0becb8d
  misc_feature 1..24: note = LF
  misc_feature 25: note = Core
  misc_feature 26..50: note = RF
ggccagcctggccggggggtgtgacagggggagtggcggacctgcggccg

SEQ ID NO: 20959 - DNA, 50 bp, unidentified
  source 1..50: mol_type = unassigned DNA; note = target_0bf0396
  misc_feature 1..23: note = LF
  misc_feature 24..25: note = Core
  misc_feature 26..50: note = RF
ttcgcgaggtatctcaccaggcccttcgtggctcgtcgcttacgctcctc

SEQ ID NO: 20960 - DNA, 50 bp, unidentified
  source 1..50: mol_type = unassigned DNA; note = target_0c01c15
  misc_feature 1..24: note = LF
  misc_feature 25: note = Core
  misc_feature 26..50: note = RF
ggggtcaatgagcgatatcgcgattaatcgccaacaatctgatgcgatgg

SEQ ID NO: 20961 - DNA, 50 bp, unidentified
  source 1..50: mol_type = unassigned DNA; note = target_0c02d1d
  misc_feature 1..24: note = LF
  misc_feature 25: note = Core
  misc_feature 26..50: note = RF
ccctgtttaaaaaacagccttaacgtacaataattttcgatatccaaact

SEQ ID NO: 20962 - DNA, 50 bp, unidentified
  source 1..50: mol_type = unassigned DNA; note = target_0c042d7
  misc_feature 1..23: note = LF
  misc_feature 24..25: note = Core
  misc_feature 26..50: note = RF
ttagacactttgggtggaaacctgaccttagctgcttctgcgaaggctcc

SEQ ID NO: 20963 - DNA, 50 bp, unidentified
  source 1..50: mol_type = unassigned DNA; note = target_0c0b84d
  misc_feature 1..23: note = LF
  misc_feature 24..25: note = Core
  misc_feature 26..50: note = RF
tgtagaaatcattaatattcctccttataataaattatctttctaaccaa

SEQ ID NO: 20964 - DNA, 50 bp, unidentified
  source 1..50: mol_type = unassigned DNA; note = target_0c1dea4
  misc_feature 1..23: note = LF
  misc_feature 24..25: note = Core
  misc_feature 26..50: note = RF
aggtgtcgaaacgtcgccggacccttcgtgaccctcgctccttcgtcgct

SEQ ID NO: 20965 - DNA, 50 bp, unidentified
  source 1..50: mol_type = unassigned DNA; note = target_0c27a6a
  misc_feature 1..24: note = LF
  misc_feature 25: note = Core
  misc_feature 26..50: note = RF
ccggagccgacttccgctcatcggcatgagcgggcgctcccaccgctcgc

SEQ ID NO: 20966 - DNA, 50 bp, unidentified
  source 1..50: mol_type = unassigned DNA; note = target_0c28d42
  misc_feature 1..23: note = LF
  misc_feature 24..25: note = Core
  misc_feature 26..50: note = RF
tgtcctccgtgccttctccgtatctccgtggttaagtctcggcaatttta

SEQ ID NO: 20967 - DNA, 50 bp, unidentified
  source 1..50: mol_type = unassigned DNA; note = target_0c2a7c8
  misc_feature 1..24: note = LF
  misc_feature 25: note = Core
  misc_feature 26..50: note = RF
taatacagccattaattatacacgttgttggcaaatcgtattttttagtc

SEQ ID NO: 20968 - DNA, 50 bp, unidentified
  source 1..50: mol_type = unassigned DNA; note = target_0c3430f
  misc_feature 1..24: note = LF
  misc_feature 25: note = Core
  misc_feature 26..50: note = RF
cttgtaaacttgcggcacttcgcgtttactctctgcttttgcgtgacgca

SEQ ID NO: 20969 - DNA, 50 bp, unidentified
  source 1..50: mol_type = unassigned DNA; note = target_0c37a55
  misc_feature 1..22: note = LF
  misc_feature 23..25: note = Core
  misc_feature 26..50: note = RF
cacgtacagtacccgtaactgtcattgcgaacgtagcgcagcggagtgcg

SEQ ID NO: 20970 - DNA, 50 bp, unidentified
  source 1..50: mol_type = unassigned DNA; note = target_0c37f6a
  misc_feature 1..23: note = LF
  misc_feature 24..25: note = Core
  misc_feature 26..50: note = RF
cgccgctgcgcggctaacccaccctacgaaaacgccgagctgctgtatgc

SEQ ID NO: 20971 - DNA, 50 bp, unidentified
  source 1..50: mol_type = unassigned DNA; note = target_0c48427
  misc_feature 1..21: note = LF
  misc_feature 22..25: note = Core
  misc_feature 26..50: note = RF
ggccggtaaacaacatcactgctccaggggagacgtctctgccacggcga

SEQ ID NO: 20972 - DNA, 50 bp, unidentified
  source 1..50: mol_type = unassigned DNA; note = target_0c4b7ea
  misc_feature 1..24: note = LF
  misc_feature 25: note = Core
  misc_feature 26..50: note = RF
cctaaccggaaactgagagtcagttacgagtaaatgtgtttatcaggcag

SEQ ID NO: 20973 - DNA, 50 bp, unidentified
  source 1..50: mol_type = unassigned DNA; note = target_0c4ddec
  misc_feature 1..24: note = LF
  misc_feature 25: note = Core
  misc_feature 26..50: note = RF
cggccgacttgtgggagccaagattatccatgacgacgatgtcgccgggc

SEQ ID NO: 20974 - DNA, 50 bp, unidentified
  source 1..50: mol_type = unassigned DNA; note = target_0c4e94c
  misc_feature 1..24: note = LF
  misc_feature 25: note = Core
  misc_feature 26..50: note = RF
ctcgcgtgaatcacccaccgggaggcaagcatggacatttatgagctata

SEQ ID NO: 20975 - DNA, 50 bp, unidentified
  source 1..50: mol_type = unassigned DNA; note = target_0c50db2
  misc_feature 1..22: note = LF
  misc_feature 23..25: note = Core
  misc_feature 26..50: note = RF
aaaccttcatctaaaatggcccgttttgtggaactgttgccatctgactt

SEQ ID NO: 20976 - DNA, 50 bp, unidentified
  source 1..50: mol_type = unassigned DNA; note = target_0c55618
  misc_feature 1..21: note = LF
  misc_feature 22..25: note = Core
  misc_feature 26..50: note = RF
tccgtcctctcggccgccgtggtcacgccgcgtcctcctgcccgacgtcc

SEQ ID NO: 20977 - DNA, 50 bp, unidentified
  source 1..50: mol_type = unassigned DNA; note = target_0c5b49d
  misc_feature 1..24: note = LF
  misc_feature 25: note = Core
  misc_feature 26..50: note = RF
tcacgatcgcgggacgtaggttacgagcttctgtgcctgccgtgcgccct

SEQ ID NO: 20978 - DNA, 50 bp, unidentified
  source 1..50: mol_type = unassigned DNA; note = target_0c6a5a2
  misc_feature 1..23: note = LF
  misc_feature 24..25: note = Core
  misc_feature 26..50: note = RF
gtgggcacaaagacgtgcccaccctacacaaacatgctaccgctcaatca

SEQ ID NO: 20979 - DNA, 50 bp, unidentified
  source 1..50: mol_type = unassigned DNA; note = target_0c707a4
  misc_feature 1..24: note = LF
  misc_feature 25: note = Core
  misc_feature 26..50: note = RF
agtgatttgacgatggctgggtattgccaacttaactcgccgaaatgaga

SEQ ID NO: 20980 - DNA, 50 bp, unidentified
  source 1..50: mol_type = unassigned DNA; note = target_0c7bf79
  misc_feature 1..22: note = LF
  misc_feature 23..25: note = Core
  misc_feature 26..50: note = RF
cccgtctcaagctcgttttgtctgacagtgccattggatgcatacaacag

SEQ ID NO: 20981 - DNA, 50 bp, unidentified
  source 1..50: mol_type = unassigned DNA; note = target_0c7c2a0
  misc_feature 1..23: note = LF
  misc_feature 24..25: note = Core
  misc_feature 26..50: note = RF
gttacgccttcggctaacccgccctacgaattcttgcgagctttaagacg

SEQ ID NO: 20982 - DNA, 50 bp, unidentified
  source 1..50: mol_type = unassigned DNA; note = target_0ca8842
  misc_feature 1..23: note = LF
  misc_feature 24..25: note = Core
  misc_feature 26..50: note = RF
gcccaatcgcggcactggggccgctcccacaggtgaccgcgatagcctgc

SEQ ID NO: 20983 - DNA, 50 bp, unidentified
  source 1..50: mol_type = unassigned DNA; note = target_0ca8a5f
  misc_feature 1..23: note = LF
  misc_feature 24..25: note = Core
  misc_feature 26..50: note = RF
gagcagcttcgcgcggcgctgggctagccgacgaagtcgcgagcgacgcg

SEQ ID NO: 20984 - DNA, 50 bp, unidentified
  source 1..50: mol_type = unassigned DNA; note = target_0caf534
  misc_feature 1..23: note = LF
  misc_feature 24..25: note = Core
  misc_feature 26..50: note = RF
gtccgggcaccgtcgccgggaggctagacccgggacgtcctccacgacga

SEQ ID NO: 20985 - DNA, 50 bp, unidentified
  source 1..50: mol_type = unassigned DNA; note = target_0cbb92a
  misc_feature 1..24: note = LF
  misc_feature 25: note = Core
  misc_feature 26..50: note = RF
cgatgccgggcgagcgcgtggaggactactgatgcggtggaaactcccct

SEQ ID NO: 20986 - DNA, 50 bp, unidentified
  source 1..50: mol_type = unassigned DNA; note = target_0cbbfa6
  misc_feature 1..24: note = LF
  misc_feature 25: note = Core
  misc_feature 26..50: note = RF
tccatcaaaacagcacatagaaaaaggggacgctgccgctgtgacgcttg

SEQ ID NO: 20987 - DNA, 50 bp, unidentified
  source 1..50: mol_type = unassigned DNA; note = target_0cbcae3
  misc_feature 1..23: note = LF
  misc_feature 24..25: note = Core
  misc_feature 26..50: note = RF
ggccgccgctcccacaggcgccgctcccacaggcgccgctcccacaggcg

SEQ ID NO: 20988 - DNA, 50 bp, unidentified
  source 1..50: mol_type = unassigned DNA; note = target_0cc0850
  misc_feature 1..24: note = LF
  misc_feature 25: note = Core
  misc_feature 26..50: note = RF
cgcttcgcttgtgcttcatgtgtattgtctcctttccgtttggtttgtat

SEQ ID NO: 20989 - DNA, 50 bp, unidentified
  source 1..50: mol_type = unassigned DNA; note = target_0cc571d
  misc_feature 1..23: note = LF
  misc_feature 24..25: note = Core
  misc_feature 26..50: note = RF
caggcaatggccaagtcgggaagtggcgcatcgcgcccggcacacgcaaa

SEQ ID NO: 20990 - DNA, 50 bp, unidentified
  source 1..50: mol_type = unassigned DNA; note = target_0cc9741
  misc_feature 1..24: note = LF
  misc_feature 25: note = Core
  misc_feature 26..50: note = RF
aaaaggtagttgccggggcctaacgtcggagttgaccggcacgcaccggc

SEQ ID NO: 20991 - DNA, 50 bp, unidentified
  source 1..50: mol_type = unassigned DNA; note = target_0ccc814
  misc_feature 1..23: note = LF
  misc_feature 24..25: note = Core
  misc_feature 26..50: note = RF
gcgcccggcgccctccgccccctttttctttgacgcgacggagccaggca

SEQ ID NO: 20992 - DNA, 50 bp, unidentified
  source 1..50: mol_type = unassigned DNA; note = target_0cd1dec
  misc_feature 1..22: note = LF
  misc_feature 23..25: note = Core
  misc_feature 26..50: note = RF
gttcgatgttattgtggttctctttttgtgtttatgcaagcttattctcg

SEQ ID NO: 20993 - DNA, 50 bp, unidentified
  source 1..50: mol_type = unassigned DNA; note = target_0cd7188
  misc_feature 1..22: note = LF
  misc_feature 23..25: note = Core
  misc_feature 26..50: note = RF
tgctttttttattctcatctcttctctttctatcattaccgttagtatga

SEQ ID NO: 20994 - DNA, 50 bp, unidentified
  source 1..50: mol_type = unassigned DNA; note = target_0cde5f7
  misc_feature 1..23: note = LF
  misc_feature 24..25: note = Core
  misc_feature 26..50: note = RF
ggaaaaacaccgcgtcatgccacctcactcggcgagggaggctttaaagg

SEQ ID NO: 20995 - DNA, 50 bp, unidentified
  source 1..50: mol_type = unassigned DNA; note = target_0ce2f77
  misc_feature 1..24: note = LF
  misc_feature 25: note = Core
  misc_feature 26..50: note = RF
atttattccgcttcgggcagagactgtgtaaaaacgcgggttattgggct

SEQ ID NO: 20996 - DNA, 50 bp, unidentified
  source 1..50: mol_type = unassigned DNA; note = target_0ce3597
  misc_feature 1..23: note = LF
  misc_feature 24..25: note = Core
  misc_feature 26..50: note = RF
ttttactcatactgagtacctgcctttcttaaaataatatatatcaaacg

SEQ ID NO: 20997 - DNA, 50 bp, unidentified
  source 1..50: mol_type = unassigned DNA; note = target_0ce63ff
  misc_feature 1..24: note = LF
  misc_feature 25: note = Core
  misc_feature 26..50: note = RF
cgggaagtagtggaatttcccccccccccgggcgggggagggggggtcgg

SEQ ID NO: 20998 - DNA, 50 bp, unidentified
  source 1..50: mol_type = unassigned DNA; note = target_0cec75b
  misc_feature 1..20: note = LF
  misc_feature 21..25: note = Core
  misc_feature 26..50: note = RF
agcctggttgtaaaactgggctttttttgtttcaaacatcaacgtttcct

SEQ ID NO: 20999 - DNA, 50 bp, unidentified
  source 1..50: mol_type = unassigned DNA; note = target_0cece2c
  misc_feature 1..23: note = LF
  misc_feature 24..25: note = Core
  misc_feature 26..50: note = RF
gtcgcagacggcgacctgggcacctttcatccgcttggcccgccgccatg

SEQ ID NO: 21000 - DNA, 50 bp, unidentified
  source 1..50: mol_type = unassigned DNA; note = target_0cf53fe
  misc_feature 1..22: note = LF
  misc_feature 23..25: note = Core
  misc_feature 26..50: note = RF
gtcggggagccgacgtcaacaatctccgactggcgacttcagcggtgggg

SEQ ID NO: 21001 - DNA, 50 bp, unidentified
  source 1..50: mol_type = unassigned DNA; note = target_0cfd883
  misc_feature 1..24: note = LF
  misc_feature 25: note = Core
  misc_feature 26..50: note = RF
gaaagaagtaaaaagtaggagggagtgtactgatgacgatggacaattaa

SEQ ID NO: 21002 - DNA, 50 bp, unidentified
  source 1..50: mol_type = unassigned DNA; note = target_0d05aa7
  misc_feature 1..23: note = LF
  misc_feature 24..25: note = Core
  misc_feature 26..50: note = RF
tgccgaaatcagacggttcttcgaggtgtccagttggcgcaagggaacca

SEQ ID NO: 21003 - DNA, 50 bp, unidentified
  source 1..50: mol_type = unassigned DNA; note = target_0d0749a
  misc_feature 1..21: note = LF
  misc_feature 22..25: note = Core
  misc_feature 26..50: note = RF
agtagtgacgtacatggagggttccttccctcggacaacgtggggggagg

SEQ ID NO: 21004 - DNA, 50 bp, unidentified
  source 1..50: mol_type = unassigned DNA; note = target_0d074ed
  misc_feature 1..20: note = LF
  misc_feature 21..25: note = Core
  misc_feature 26..50: note = RF
tggattcagacatcttatgcctccttatttcgatcgaacacgatttgtcc

SEQ ID NO: 21005 - DNA, 50 bp, unidentified
  source 1..50: mol_type = unassigned DNA; note = target_0d0933b
  misc_feature 1..24: note = LF
  misc_feature 25: note = Core
  misc_feature 26..50: note = RF
gtagcctcggccattggtgtctcctttgggtcaaatggacgtagcaacgg

SEQ ID NO: 21006 - DNA, 50 bp, unidentified
  source 1..50: mol_type = unassigned DNA; note = target_0d0ae09
  misc_feature 1..20: note = LF
  misc_feature 21..25: note = Core
  misc_feature 26..50: note = RF
gccaagggcatgagagcagttcctttcataggggacccgcgggaggcagg

SEQ ID NO: 21007 - DNA, 50 bp, unidentified
  source 1..50: mol_type = unassigned DNA; note = target_0d10b35
  misc_feature 1..23: note = LF
  misc_feature 24..25: note = Core
  misc_feature 26..50: note = RF
ggagcccgctgagggactgtggatctaacggtgtttccggcccgaccgcg

SEQ ID NO: 21008 - DNA, 50 bp, unidentified
  source 1..50: mol_type = unassigned DNA; note = target_0d1c42e
  misc_feature 1..23: note = LF
  misc_feature 24..25: note = Core
  misc_feature 26..50: note = RF
ggcttccgttcgaagctgaaacggctagtggagcggggctggctggccga

SEQ ID NO: 21009 - DNA, 50 bp, unidentified
  source 1..50: mol_type = unassigned DNA; note = target_0d206cd
  misc_feature 1..23: note = LF
  misc_feature 24..25: note = Core
  misc_feature 26..50: note = RF
cacatgatcaatgcaggccccctctcatggtttgcaaggcaaaccatgag

SEQ ID NO: 21010 - DNA, 50 bp, unidentified
  source 1..50: mol_type = unassigned DNA; note = target_0d21f6f
  misc_feature 1..23: note = LF
  misc_feature 24..25: note = Core
  misc_feature 26..50: note = RF
tctggtcctgggacatcaccaagctgatggggcctgccaaatggagctac

SEQ ID NO: 21011 - DNA, 50 bp, unidentified
  source 1..50: mol_type = unassigned DNA; note = target_0d255f0
  misc_feature 1..22: note = LF
  misc_feature 23..25: note = Core
  misc_feature 26..50: note = RF
gcagattcatagccgataaaaatacaataacccctacgatatgggaaata

SEQ ID NO: 21012 - DNA, 50 bp, unidentified
  source 1..50: mol_type = unassigned DNA; note = target_0d28d7d
  misc_feature 1..23: note = LF
  misc_feature 24..25: note = Core
  misc_feature 26..50: note = RF
ataatcgactgtgtacataatcactcccatactaatgtaaccccttatac

SEQ ID NO: 21013 - DNA, 50 bp, unidentified
  source 1..50: mol_type = unassigned DNA; note = target_0d2b80d
  misc_feature 1..24: note = LF
  misc_feature 25: note = Core
  misc_feature 26..50: note = RF
catccgaggatgccctctattcggcagaatagtaagatcagtcggaccgt

SEQ ID NO: 21014 - DNA, 50 bp, unidentified
  source 1..50: mol_type = unassigned DNA; note = target_0d39aec
  misc_feature 1..23: note = LF
  misc_feature 24..25: note = Core
  misc_feature 26..50: note = RF
agcagacaattcctcccccgaaggaggagtaatgagcagtagcgtttcaa

SEQ ID NO: 21015 - DNA, 50 bp, unidentified
  source 1..50: mol_type = unassigned DNA; note = target_0d43c03
  misc_feature 1..24: note = LF
  misc_feature 25: note = Core
  misc_feature 26..50: note = RF
aatctttcttttcttttgatctctctttcattatcattttatatttatcc

SEQ ID NO: 21016 - DNA, 50 bp, unidentified
  source 1..50: mol_type = unassigned DNA; note = target_0d47596
  misc_feature 1..24: note = LF
  misc_feature 25: note = Core
  misc_feature 26..50: note = RF
atcaatgttgccgacaaccccgactttgcgggagccatgcgggtcaacgg

SEQ ID NO: 21017 - DNA, 50 bp, unidentified
  source 1..50: mol_type = unassigned DNA; note = target_0d5340c
  misc_feature 1..21: note = LF
  misc_feature 22..25: note = Core
  misc_feature 26..50: note = RF
caagggcgcacgcaagagcttctcctggcaggactaccgcgatctgctgg

SEQ ID NO: 21018 - DNA, 50 bp, unidentified
  source 1..50: mol_type = unassigned DNA; note = target_0d58049
  misc_feature 1..23: note = LF
  misc_feature 24..25: note = Core
  misc_feature 26..50: note = RF
gaatggcgcgggtggggcggcggtaggagcgcgccctgcgcgcgaaatcg

SEQ ID NO: 21019 - DNA, 50 bp, unidentified
  source 1..50: mol_type = unassigned DNA; note = target_0d5b9e5
  misc_feature 1..23: note = LF
  misc_feature 24..25: note = Core
  misc_feature 26..50: note = RF
caagagcatcgcccgcgagcgggctcctacgaatcgcctgcatggggtgg

SEQ ID NO: 21020 - DNA, 50 bp, unidentified
  source 1..50: mol_type = unassigned DNA; note = target_0d6212a
  misc_feature 1..23: note = LF
  misc_feature 24..25: note = Core
  misc_feature 26..50: note = RF
gcggcggatcgcgtgcgggtaacccacgttcgcgcctcgaatggggtgtc

SEQ ID NO: 21021 - DNA, 50 bp, unidentified
  source 1..50: mol_type = unassigned DNA; note = target_0d692e7
  misc_feature 1..23: note = LF
  misc_feature 24..25: note = Core
  misc_feature 26..50: note = RF
cccggctgtgtgagcagccgggcttttgctgtgtggagtgtgtttccctg

SEQ ID NO: 21022 - DNA, 50 bp, unidentified
  source 1..50: mol_type = unassigned DNA; note = target_0d6fd21
  misc_feature 1..23: note = LF
  misc_feature 24..25: note = Core
  misc_feature 26..50: note = RF
ttcgccaagcatctgcccgtggctgggtcccgggctcacgacttcgtcgc

SEQ ID NO: 21023 - DNA, 50 bp, unidentified
  source 1..50: mol_type = unassigned DNA; note = target_0d71c32
  misc_feature 1..23: note = LF
  misc_feature 24..25: note = Core
  misc_feature 26..50: note = RF
cggctctctcgccatatcgcctcctttcgatctcgtccactttttttaac

SEQ ID NO: 21024 - DNA, 50 bp, unidentified
  source 1..50: mol_type = unassigned DNA; note = target_0d79312
  misc_feature 1..24: note = LF
  misc_feature 25: note = Core
  misc_feature 26..50: note = RF
tgcttgtgaaaacctaagtgtaggtgcggctgcgagcttcgatttcaggg

SEQ ID NO: 21025 - DNA, 50 bp, unidentified
  source 1..50: mol_type = unassigned DNA; note = target_0d84758
  misc_feature 1..24: note = LF
  misc_feature 25: note = Core
  misc_feature 26..50: note = RF
gcgcttcgcggcgggccctaccatttttttccgagaagctcacgcagcgc

SEQ ID NO: 21026 - DNA, 50 bp, unidentified
  source 1..50: mol_type = unassigned DNA; note = target_0d90075
  misc_feature 1..23: note = LF
  misc_feature 24..25: note = Core
  misc_feature 26..50: note = RF
gtaacagggggaatttttggtgcctgtccccgcggggacaggcacacgca

SEQ ID NO: 21027 - DNA, 50 bp, unidentified
  source 1..50: mol_type = unassigned DNA; note = target_0d94b95
  misc_feature 1..23: note = LF
  misc_feature 24..25: note = Core
  misc_feature 26..50: note = RF
aagttaaatagaacatcatagaaaggaagggcattgtgaaagacgatttc

SEQ ID NO: 21028 - DNA, 50 bp, unidentified
  source 1..50: mol_type = unassigned DNA; note = target_0d9dfec
  misc_feature 1..23: note = LF
  misc_feature 24..25: note = Core
  misc_feature 26..50: note = RF
ccatcgctcaatccggcgcgcccctctctagaggggaacaaaaaagcagc

SEQ ID NO: 21029 - DNA, 50 bp, unidentified
  source 1..50: mol_type = unassigned DNA; note = target_0db045e
  misc_feature 1..23: note = LF
  misc_feature 24..25: note = Core
  misc_feature 26..50: note = RF
cgtgaatgcgtggtggggctgagaggactcaaacttcctgccaggcatac

SEQ ID NO: 21030 - DNA, 50 bp, unidentified
  source 1..50: mol_type = unassigned DNA; note = target_0dc6e32
  misc_feature 1..24: note = LF
  misc_feature 25: note = Core
  misc_feature 26..50: note = RF
gcgccccgtgcaaataacaagacttgaccctctgcatcgatgcaggtcag

SEQ ID NO: 21031 - DNA, 50 bp, unidentified
  source 1..50: mol_type = unassigned DNA; note = target_0dcffd3
  misc_feature 1..24: note = LF
  misc_feature 25: note = Core
  misc_feature 26..50: note = RF
ggatcaaagcgcccatacggacgaactaccccattcagcactcggattgg

SEQ ID NO: 21032 - DNA, 50 bp, unidentified
  source 1..50: mol_type = unassigned DNA; note = target_0dd9b36
  misc_feature 1..22: note = LF
  misc_feature 23..25: note = Core
  misc_feature 26..50: note = RF
agtcataacgactcctggcctttttttatgcccttttttaggaggaaaaa

SEQ ID NO: 21033 - DNA, 50 bp, unidentified
  source 1..50: mol_type = unassigned DNA; note = target_0ddc166
  misc_feature 1..22: note = LF
  misc_feature 23..25: note = Core
  misc_feature 26..50: note = RF
tgttgaactgggtttcgacgcagctcagccacgtagtcacgagtaacgaa

SEQ ID NO: 21034 - DNA, 50 bp, unidentified
  source 1..50: mol_type = unassigned DNA; note = target_0df55f2
  misc_feature 1..24: note = LF
  misc_feature 25: note = Core
  misc_feature 26..50: note = RF
gaaacctggctgccagaccagatctgggttacgacaggttacccgccggg

SEQ ID NO: 21035 - DNA, 50 bp, unidentified
  source 1..50: mol_type = unassigned DNA; note = target_0dfd931
  misc_feature 1..20: note = LF
  misc_feature 21..25: note = Core
  misc_feature 26..50: note = RF
cggacaggactcgcctgccgctcacgcggccacacgccggacagaacgcg

SEQ ID NO: 21036 - DNA, 50 bp, unidentified
  source 1..50: mol_type = unassigned DNA; note = target_0e020ac
  misc_feature 1..23: note = LF
  misc_feature 24..25: note = Core
  misc_feature 26..50: note = RF
cagggaattggaggctgttgacctgctccccgttttcaggccggtgataa

SEQ ID NO: 21037 - DNA, 50 bp, unidentified
  source 1..50: mol_type = unassigned DNA; note = target_0e033c8
  misc_feature 1..23: note = LF
  misc_feature 24..25: note = Core
  misc_feature 26..50: note = RF
ctctggttttcagcccccatcatctgttgagtttcgggagccgcggtttt

SEQ ID NO: 21038 - DNA, 50 bp, unidentified
  source 1..50: mol_type = unassigned DNA; note = target_0e05277
  misc_feature 1..23: note = LF
  misc_feature 24..25: note = Core
  misc_feature 26..50: note = RF
tctcactgagatagtcacggtgactgacatagggggttattcagcgatcc

SEQ ID NO: 21039 - DNA, 50 bp, unidentified
  source 1..50: mol_type = unassigned DNA; note = target_0e1d2b5
  misc_feature 1..24: note = LF
  misc_feature 25: note = Core
  misc_feature 26..50: note = RF
gtcccgctatgaactctcgccgtctcactcgatcacctcgtcggctcggg

SEQ ID NO: 21040 - DNA, 50 bp, unidentified
  source 1..50: mol_type = unassigned DNA; note = target_0e1f539
  misc_feature 1..23: note = LF
  misc_feature 24..25: note = Core
  misc_feature 26..50: note = RF
aactgcatgcaacccaggttcggctagctggcggctcgctgcaggtcgat

SEQ ID NO: 21041 - DNA, 50 bp, unidentified
  source 1..50: mol_type = unassigned DNA; note = target_0e2671c
  misc_feature 1..23: note = LF
  misc_feature 24..25: note = Core
  misc_feature 26..50: note = RF
ggctctgcgggtggtcatgaggttccttccgtgcgagcggcggtggtgat

SEQ ID NO: 21042 - DNA, 50 bp, unidentified
  source 1..50: mol_type = unassigned DNA; note = target_0e29e7c
  misc_feature 1..23: note = LF
  misc_feature 24..25: note = Core
  misc_feature 26..50: note = RF
agaatctccccctcaccctaaccctctcccgccaggggcgagggagttat

SEQ ID NO: 21043 - DNA, 50 bp, unidentified
  source 1..50: mol_type = unassigned DNA; note = target_0e2ccd1
  misc_feature 1..24: note = LF
  misc_feature 25: note = Core
  misc_feature 26..50: note = RF
tttaaaatttttcatttttttcctttgtgtttaaatttatgtaggaatta

SEQ ID NO: 21044 - DNA, 50 bp, unidentified
  source 1..50: mol_type = unassigned DNA; note = target_0e3cef1
  misc_feature 1..21: note = LF
  misc_feature 22..25: note = Core
  misc_feature 26..50: note = RF
attaagaatgcttttatcttgtcatcccagcatgcttatagctgggatct

SEQ ID NO: 21045 - DNA, 50 bp, unidentified
  source 1..50: mol_type = unassigned DNA; note = target_0e42b0a
  misc_feature 1..22: note = LF
  misc_feature 23..25: note = Core
  misc_feature 26..50: note = RF
ttgtttttatctttcattttattctccatataaaaaccccctaaatacac

SEQ ID NO: 21046 - DNA, 50 bp, unidentified
  source 1..50: mol_type = unassigned DNA; note = target_0e45074
  misc_feature 1..23: note = LF
  misc_feature 24..25: note = Core
  misc_feature 26..50: note = RF
tcggaacaagagctgttcaaaatcgtacgctaaggtcgaacggagcggga

SEQ ID NO: 21047 - DNA, 50 bp, unidentified
  source 1..50: mol_type = unassigned DNA; note = target_0e46636
  misc_feature 1..23: note = LF
  misc_feature 24..25: note = Core
  misc_feature 26..50: note = RF
tactgcaggtattgggcttcttcctgaaatgcgcagagcaagcatcttta

SEQ ID NO: 21048 - DNA, 50 bp, unidentified
  source 1..50: mol_type = unassigned DNA; note = target_0e4ce8d
  misc_feature 1..23: note = LF
  misc_feature 24..25: note = Core
  misc_feature 26..50: note = RF
ttcgcatgcttttcctaggacctaggacctaggacctaagaccgctctct

SEQ ID NO: 21049 - DNA, 50 bp, unidentified
  source 1..50: mol_type = unassigned DNA; note = target_0e5676c
  misc_feature 1..23: note = LF
  misc_feature 24..25: note = Core
  misc_feature 26..50: note = RF
cggagtccaggcgcccggcccgcctttcaccatgggtttgactttcagac

SEQ ID NO: 21050 - DNA, 50 bp, unidentified
  source 1..50: mol_type = unassigned DNA; note = target_0e586ba
  misc_feature 1..22: note = LF
  misc_feature 23..25: note = Core
  misc_feature 26..50: note = RF
tattaacctactttagatttcgcgaagtaggtggctacctttttgacaat

SEQ ID NO: 21051 - DNA, 50 bp, unidentified
  source 1..50: mol_type = unassigned DNA; note = target_0e5f8de
  misc_feature 1..23: note = LF
  misc_feature 24..25: note = Core
  misc_feature 26..50: note = RF
ggggcatagtcagtctcctttgttgctgtaaatgctatcaaaggagcggc

SEQ ID NO: 21052 - DNA, 50 bp, unidentified
  source 1..50: mol_type = unassigned DNA; note = target_0e607d4
  misc_feature 1..23: note = LF
  misc_feature 24..25: note = Core
  misc_feature 26..50: note = RF
tgctcatgacacgattcctcctcctgtcacctccgccgcacgcggggggt

SEQ ID NO: 21053 - DNA, 50 bp, unidentified
  source 1..50: mol_type = unassigned DNA; note = target_0e66052
  misc_feature 1..22: note = LF
  misc_feature 23..25: note = Core
  misc_feature 26..50: note = RF
acaggggtcaccgcgatcctcgaaccagcgatgctcggaaccgtcgatct

SEQ ID NO: 21054 - DNA, 50 bp, unidentified
  source 1..50: mol_type = unassigned DNA; note = target_0e6963a
  misc_feature 1..23: note = LF
  misc_feature 24..25: note = Core
  misc_feature 26..50: note = RF
ctctcaccagggtgtcagacacccttgagccgtcgcagccacacgcgaag

SEQ ID NO: 21055 - DNA, 50 bp, unidentified
  source 1..50: mol_type = unassigned DNA; note = target_0e6f476
  misc_feature 1..23: note = LF
  misc_feature 24..25: note = Core
  misc_feature 26..50: note = RF
gcgcttttccaagtgacccgctaatgtaagagcggaactaatagtcgccg

SEQ ID NO: 21056 - DNA, 50 bp, unidentified
  source 1..50: mol_type = unassigned DNA; note = target_0e700c2
  misc_feature 1..23: note = LF
  misc_feature 24..25: note = Core
  misc_feature 26..50: note = RF
tagagctctgaaaagagctctttttttaatgtgtataatttacaaaaaat

SEQ ID NO: 21057 - DNA, 50 bp, unidentified
  source 1..50: mol_type = unassigned DNA; note = target_0e782cf
  misc_feature 1..22: note = LF
  misc_feature 23..25: note = Core
  misc_feature 26..50: note = RF
cctccaatcccagcacaaagcttgaatcagaaaaccgcccaaaaaagaat

SEQ ID NO: 21058 - DNA, 50 bp, unidentified
  source 1..50: mol_type = unassigned DNA; note = target_0e8ba70
  misc_feature 1..23: note = LF
  misc_feature 24..25: note = Core
  misc_feature 26..50: note = RF
cgccttgggacggcccggcggcgctcatgtgaccccggcgccgttccacc

SEQ ID NO: 21059 - DNA, 50 bp, unidentified
  source 1..50: mol_type = unassigned DNA; note = target_0e8ea0b
  misc_feature 1..24: note = LF
  misc_feature 25: note = Core
  misc_feature 26..50: note = RF
gtagatagcctctttgtgccaaagcggtcattcagttttacttcaaatga

SEQ ID NO: 21060 - DNA, 50 bp, unidentified
  source 1..50: mol_type = unassigned DNA; note = target_0e9c20d
  misc_feature 1..24: note = LF
  misc_feature 25: note = Core
  misc_feature 26..50: note = RF
tcagaagtcttagtgcaagtcggcttgtgagaatcgatcgcaagaactcc

SEQ ID NO: 21061 - DNA, 50 bp, unidentified
  source 1..50: mol_type = unassigned DNA; note = target_0e9ec31
  misc_feature 1..24: note = LF
  misc_feature 25: note = Core
  misc_feature 26..50: note = RF
tcttttccgggcgcccattctgggcggaatgggcttcgcaccctcaacgt

SEQ ID NO: 21062 - DNA, 50 bp, unidentified
  source 1..50: mol_type = unassigned DNA; note = target_0ea2bdd
  misc_feature 1..24: note = LF
  misc_feature 25: note = Core
  misc_feature 26..50: note = RF
gctggtgacgcaccgggacagacccactccccagataagaacatcaactt

SEQ ID NO: 21063 - DNA, 50 bp, unidentified
  source 1..50: mol_type = unassigned DNA; note = target_0ea48f2
  misc_feature 1..23: note = LF
  misc_feature 24..25: note = Core
  misc_feature 26..50: note = RF
gcggagtacgaccgtctgtggaaaaataatgccgctgctggataccctca

SEQ ID NO: 21064 - DNA, 50 bp, unidentified
  source 1..50: mol_type = unassigned DNA; note = target_0eaf2d3
  misc_feature 1..24: note = LF
  misc_feature 25: note = Core
  misc_feature 26..50: note = RF
atcagtaagccgagatcctcgcggcgaaatgaatcgccccgggtttcgtg

SEQ ID NO: 21065 - DNA, 50 bp, unidentified
  source 1..50: mol_type = unassigned DNA; note = target_0ec213a
  misc_feature 1..23: note = LF
  misc_feature 24..25: note = Core
  misc_feature 26..50: note = RF
gacgctgcgggagtttgctgacgctcatggcacccgtccgggtcaggagt

SEQ ID NO: 21066 - DNA, 50 bp, unidentified
  source 1..50: mol_type = unassigned DNA; note = target_0ec2872
  misc_feature 1..23: note = LF
  misc_feature 24..25: note = Core
  misc_feature 26..50: note = RF
tacctttgcaaaaaatgaatgattatggcagtgacaaaagcgatattgga

SEQ ID NO: 21067 - DNA, 50 bp, unidentified
  source 1..50: mol_type = unassigned DNA; note = target_0ecab58
  misc_feature 1..23: note = LF
  misc_feature 24..25: note = Core
  misc_feature 26..50: note = RF
cttcgtcccctggaagggaactcctacagcgaccccgagtaaacgccaac

SEQ ID NO: 21068 - DNA, 50 bp, unidentified
  source 1..50: mol_type = unassigned DNA; note = target_0ed13c7
  misc_feature 1..23: note = LF
  misc_feature 24..25: note = Core
  misc_feature 26..50: note = RF
agcggggggaaggcgcgcagcgcctcagggggtgtcacgcctggtatccg

SEQ ID NO: 21069 - DNA, 50 bp, unidentified
  source 1..50: mol_type = unassigned DNA; note = target_0edaf0f
  misc_feature 1..20: note = LF
  misc_feature 21..25: note = Core
  misc_feature 26..50: note = RF
tccgacgccaaccctttatcctgctttctttttcgtcctcgaaaaagccg

SEQ ID NO: 21070 - DNA, 50 bp, unidentified
  source 1..50: mol_type = unassigned DNA; note = target_0edb3a2
  misc_feature 1..23: note = LF
  misc_feature 24..25: note = Core
  misc_feature 26..50: note = RF
tattatctttcttctgcaaatgtatttgcattctttttcataatttgttt

SEQ ID NO: 21071 - DNA, 50 bp, unidentified
  source 1..50: mol_type = unassigned DNA; note = target_0edcd9a
  misc_feature 1..24: note = LF
  misc_feature 25: note = Core
  misc_feature 26..50: note = RF
gtctgtagcgtgcactgtattcggcatttgcgcgctgggaagccacgtcg

SEQ ID NO: 21072 - DNA, 50 bp, unidentified
  source 1..50: mol_type = unassigned DNA; note = target_0eee8a8
  misc_feature 1..24: note = LF
  misc_feature 25: note = Core
  misc_feature 26..50: note = RF
atggcctggctctgagtcccccgttttgcgccctggccgtgccggtgaac

SEQ ID NO: 21073 - DNA, 50 bp, unidentified
  source 1..50: mol_type = unassigned DNA; note = target_0eef9d7
  misc_feature 1..24: note = LF
  misc_feature 25: note = Core
  misc_feature 26..50: note = RF
cccggccggggccacgctcggcggcatgagagtgcactgtgccgacccca

SEQ ID NO: 21074 - DNA, 50 bp, unidentified
  source 1..50: mol_type = unassigned DNA; note = target_0ef4e33
  misc_feature 1..23: note = LF
  misc_feature 24..25: note = Core
  misc_feature 26..50: note = RF
gccgacggcaacaccgtgagcttgtcgtttaacctccgaccgaacctggc

SEQ ID NO: 21075 - DNA, 50 bp, unidentified
  source 1..50: mol_type = unassigned DNA; note = target_0ef6270
  misc_feature 1..24: note = LF
  misc_feature 25: note = Core
  misc_feature 26..50: note = RF
gacttttgttcctcgaaaacgggttttgagcaactttcgattcaggctcg

SEQ ID NO: 21076 - DNA, 50 bp, unidentified
  source 1..50: mol_type = unassigned DNA; note = target_0f06cff
  misc_feature 1..23: note = LF
  misc_feature 24..25: note = Core
  misc_feature 26..50: note = RF
gcctggagcgcgtcactctaggtcgggtttgagtactctcgcaggggcgc

SEQ ID NO: 21077 - DNA, 50 bp, unidentified
  source 1..50: mol_type = unassigned DNA; note = target_0f070a8
  misc_feature 1..23: note = LF
  misc_feature 24..25: note = Core
  misc_feature 26..50: note = RF
gcgcggcgacgatgcagatatcttgaatttcgcacattccctcccgcgcg

SEQ ID NO: 21078 - DNA, 50 bp, unidentified
  source 1..50: mol_type = unassigned DNA; note = target_0f0b090
  misc_feature 1..24: note = LF
  misc_feature 25: note = Core
  misc_feature 26..50: note = RF
gaaggtcgcgtgcccgttgcgtgcccgatgaggcagacagccacgggtac

SEQ ID NO: 21079 - DNA, 50 bp, unidentified
  source 1..50: mol_type = unassigned DNA; note = target_0f15383
  misc_feature 1..20: note = LF
  misc_feature 21..25: note = Core
  misc_feature 26..50: note = RF
cactccattttccggagtgccttttttgcttttttaatatttgttcctaa

SEQ ID NO: 21080 - DNA, 50 bp, unidentified
  source 1..50: mol_type = unassigned DNA; note = target_0f1cc2e
  misc_feature 1..23: note = LF
  misc_feature 24..25: note = Core
  misc_feature 26..50: note = RF
catacatgaatctcgcgccggccctacgggacgcgaaaacgcgattgggg

SEQ ID NO: 21081 - DNA, 50 bp, unidentified
  source 1..50: mol_type = unassigned DNA; note = target_0f1f542
  misc_feature 1..24: note = LF
  misc_feature 25: note = Core
  misc_feature 26..50: note = RF
gaaagttaacagccccacggggccttttgaaaccgtctcttaggcatcgc

SEQ ID NO: 21082 - DNA, 50 bp, unidentified
  source 1..50: mol_type = unassigned DNA; note = target_0f2101d
  misc_feature 1..23: note = LF
  misc_feature 24..25: note = Core
  misc_feature 26..50: note = RF
gcactgctcgccaaccgctgcccccccccgggcatccgacgtgactcccc

SEQ ID NO: 21083 - DNA, 50 bp, unidentified
  source 1..50: mol_type = unassigned DNA; note = target_0f211b9
  misc_feature 1..24: note = LF
  misc_feature 25: note = Core
  misc_feature 26..50: note = RF
gtggcggatcctggttccgtagggcgaataaccgcttgcggttatccgcc

SEQ ID NO: 21084 - DNA, 50 bp, unidentified
  source 1..50: mol_type = unassigned DNA; note = target_0f23c64
  misc_feature 1..23: note = LF
  misc_feature 24..25: note = Core
  misc_feature 26..50: note = RF
acgcagcctctgccattagaattttttagctgaaatttccctacaatcga

SEQ ID NO: 21085 - DNA, 50 bp, unidentified
  source 1..50: mol_type = unassigned DNA; note = target_0f27e0d
  misc_feature 1..24: note = LF
  misc_feature 25: note = Core
  misc_feature 26..50: note = RF
catatctgcccactgcgaccgccccccctgtgaagaagtcaatcacgcag

SEQ ID NO: 21086 - DNA, 50 bp, unidentified
  source 1..50: mol_type = unassigned DNA; note = target_0f29ec5
  misc_feature 1..24: note = LF
  misc_feature 25: note = Core
  misc_feature 26..50: note = RF
acaagttgctgtgtgaggcctaacgtttgagcttaggggcgcgcgcaggc

SEQ ID NO: 21087 - DNA, 50 bp, unidentified
  source 1..50: mol_type = unassigned DNA; note = target_0f2a312
  misc_feature 1..23: note = LF
  misc_feature 24..25: note = Core
  misc_feature 26..50: note = RF
tcattccgggggctgagatggggtggtttgcggacggtccgcttccgatt

SEQ ID NO: 21088 - DNA, 50 bp, unidentified
  source 1..50: mol_type = unassigned DNA; note = target_0f2f54d
  misc_feature 1..24: note = LF
  misc_feature 25: note = Core
  misc_feature 26..50: note = RF
gcgcttggcggcgagccctaccattcttttgaaagaagctcacgaagtgc

SEQ ID NO: 21089 - DNA, 50 bp, unidentified
  source 1..50: mol_type = unassigned DNA; note = target_0f2ffa4
  misc_feature 1..24: note = LF
  misc_feature 25: note = Core
  misc_feature 26..50: note = RF
cggcaccgccgcttcggcgcctgaccctcccttcgcacgtccttgaggtc

SEQ ID NO: 21090 - DNA, 50 bp, unidentified
  source 1..50: mol_type = unassigned DNA; note = target_0f34037
  misc_feature 1..22: note = LF
  misc_feature 23..25: note = Core
  misc_feature 26..50: note = RF
tcctggcagtggaacccaaaggagaatcatgaagatgtcacggcttggtt

SEQ ID NO: 21091 - DNA, 50 bp, unidentified
  source 1..50: mol_type = unassigned DNA; note = target_0f3f9e9
  misc_feature 1..24: note = LF
  misc_feature 25: note = Core
  misc_feature 26..50: note = RF
ccgtatgaatggggtgcccttctctttggttactttctcttgggcaagca

SEQ ID NO: 21092 - DNA, 50 bp, unidentified
  source 1..50: mol_type = unassigned DNA; note = target_0f479dc
  misc_feature 1..24: note = LF
  misc_feature 25: note = Core
  misc_feature 26..50: note = RF
atagtgtctgcttcgggtcggaagcggaccttatgacccgtcacttttcg

SEQ ID NO: 21093 - DNA, 50 bp, unidentified
  source 1..50: mol_type = unassigned DNA; note = target_0f4c6a2
  misc_feature 1..23: note = LF
  misc_feature 24..25: note = Core
  misc_feature 26..50: note = RF
aaatccccaatctatatagttagcttattaattatttcattctaaccatt

SEQ ID NO: 21094 - DNA, 50 bp, unidentified
  source 1..50: mol_type = unassigned DNA; note = target_0f4c85c
  misc_feature 1..23: note = LF
  misc_feature 24..25: note = Core
  misc_feature 26..50: note = RF
ggaatgattcgcgagcgagctcgctcctacaggagccggcttgccggcga

SEQ ID NO: 21095 - DNA, 50 bp, unidentified
  source 1..50: mol_type = unassigned DNA; note = target_0f4e6f2
  misc_feature 1..23: note = LF
  misc_feature 24..25: note = Core
  misc_feature 26..50: note = RF
gaccgctatcgcgagcaagctcgctcccacagtttttgatcgcagggttt

SEQ ID NO: 21096 - DNA, 50 bp, unidentified
  source 1..50: mol_type = unassigned DNA; note = target_0f5a307
  misc_feature 1..24: note = LF
  misc_feature 25: note = Core
  misc_feature 26..50: note = RF
acagcagacattcaaaacagacgcttatcgaaatcttcttgctacccacg

SEQ ID NO: 21097 - DNA, 50 bp, unidentified
  source 1..50: mol_type = unassigned DNA; note = target_0f5ac62
  misc_feature 1..24: note = LF
  misc_feature 25: note = Core
  misc_feature 26..50: note = RF
ccgcttcgcatcgggcgtcaccatttttttgcggcgacatccttcaggat

SEQ ID NO: 21098 - DNA, 50 bp, unidentified
  source 1..50: mol_type = unassigned DNA; note = target_0f5bd80
  misc_feature 1..24: note = LF
  misc_feature 25: note = Core
  misc_feature 26..50: note = RF
tcgcgccggtccggcggcagcaagccccgggactcgagccgacagatcaa

SEQ ID NO: 21099 - DNA, 50 bp, unidentified
  source 1..50: mol_type = unassigned DNA; note = target_0f5bef4
  misc_feature 1..22: note = LF
  misc_feature 23..25: note = Core
  misc_feature 26..50: note = RF
ttctctacaattcttgatggcctacgaccaatctatttattatatgttct

SEQ ID NO: 21100 - DNA, 50 bp, unidentified
  source 1..50: mol_type = unassigned DNA; note = target_0f65323
  misc_feature 1..23: note = LF
  misc_feature 24..25: note = Core
  misc_feature 26..50: note = RF
ttgggcaaaggcgctgcagcgtgattcatataatctccgaggtggtttaa

SEQ ID NO: 21101 - DNA, 50 bp, unidentified
  source 1..50: mol_type = unassigned DNA; note = target_0f778f4
  misc_feature 1..21: note = LF
  misc_feature 22..25: note = Core
  misc_feature 26..50: note = RF
ccgaggaggttgccgtgaacgctcatcgcgtcaccgccacaggaccgccg

SEQ ID NO: 21102 - DNA, 50 bp, unidentified
  source 1..50: mol_type = unassigned DNA; note = target_0f79fc0
  misc_feature 1..23: note = LF
  misc_feature 24..25: note = Core
  misc_feature 26..50: note = RF
gcgggattagagtccgatataattgcgtcagagagcctgggaatgcgttc

SEQ ID NO: 21103 - DNA, 50 bp, unidentified
  source 1..50: mol_type = unassigned DNA; note = target_0f7f827
  misc_feature 1..23: note = LF
  misc_feature 24..25: note = Core
  misc_feature 26..50: note = RF
aaaccatttccataccaattatcctcctgtgccgggggtgggacagataa

SEQ ID NO: 21104 - DNA, 50 bp, unidentified
  source 1..50: mol_type = unassigned DNA; note = target_0f87743
  misc_feature 1..23: note = LF
  misc_feature 24..25: note = Core
  misc_feature 26..50: note = RF
cacccatcttgattttgttggttaggaggtggactccgcctttataaaaa

SEQ ID NO: 21105 - DNA, 50 bp, unidentified
  source 1..50: mol_type = unassigned DNA; note = target_0f88dff
  misc_feature 1..23: note = LF
  misc_feature 24..25: note = Core
  misc_feature 26..50: note = RF
gagcatggtctgtcgtgaaccgcctaacgccgcgttctgctgcaaaggct

SEQ ID NO: 21106 - DNA, 50 bp, unidentified
  source 1..50: mol_type = unassigned DNA; note = target_0f9da7a
  misc_feature 1..23: note = LF
  misc_feature 24..25: note = Core
  misc_feature 26..50: note = RF
catgcgggtttgcggggttttgcagggccgactacatactggcactgagg

SEQ ID NO: 21107 - DNA, 50 bp, unidentified
  source 1..50: mol_type = unassigned DNA; note = target_0fa85e7
  misc_feature 1..24: note = LF
  misc_feature 25: note = Core
  misc_feature 26..50: note = RF
cagacggcgagtcatcacaagccccaccccccaggcggcgaggcgacgtt

SEQ ID NO: 21108 - DNA, 50 bp, unidentified
  source 1..50: mol_type = unassigned DNA; note = target_0fb594a
  misc_feature 1..23: note = LF
  misc_feature 24..25: note = Core
  misc_feature 26..50: note = RF
aggggcttctgctatgggtggaaagcagacattcagccgcttggtcctac

SEQ ID NO: 21109 - DNA, 50 bp, unidentified
  source 1..50: mol_type = unassigned DNA; note = target_0fd0470
  misc_feature 1..24: note = LF
  misc_feature 25: note = Core
  misc_feature 26..50: note = RF
gtctggcgtacatccgctcatcggcacgtccggatgcacctgacaattag

SEQ ID NO: 21110 - DNA, 50 bp, unidentified
  source 1..50: mol_type = unassigned DNA; note = target_0fd487a
  misc_feature 1..21: note = LF
  misc_feature 22..25: note = Core
  misc_feature 26..50: note = RF
gccatgtcggtccaacgaggaccccccgcaagcaacgacttgtttcttga

SEQ ID NO: 21111 - DNA, 50 bp, unidentified
  source 1..50: mol_type = unassigned DNA; note = target_0fdc33b
  misc_feature 1..24: note = LF
  misc_feature 25: note = Core
  misc_feature 26..50: note = RF
ctcgccctagccctaggtgtgaagcgtcaagaggttgtttcttgacgagt

SEQ ID NO: 21112 - DNA, 50 bp, unidentified
  source 1..50: mol_type = unassigned DNA; note = target_0fe3303
  misc_feature 1..23: note = LF
  misc_feature 24..25: note = Core
  misc_feature 26..50: note = RF
tgacagtgtccctctctatcttcctgtaatacacaaaaagtcaaccttaa

SEQ ID NO: 21113 - DNA, 50 bp, unidentified
  source 1..50: mol_type = unassigned DNA; note = target_0ff8474
  misc_feature 1..23: note = LF
  misc_feature 24..25: note = Core
  misc_feature 26..50: note = RF
gtcacggtgatcgtggcgctggctggattgcttcgtcacttcgttcctcg

SEQ ID NO: 21114 - DNA, 50 bp, unidentified
  source 1..50: mol_type = unassigned DNA; note = target_0ff8f05
  misc_feature 1..23: note = LF
  misc_feature 24..25: note = Core
  misc_feature 26..50: note = RF
ttccgaatcggtttactgcgctcaggatgacactatccgaagatgtcttt

SEQ ID NO: 21115 - DNA, 50 bp, unidentified
  source 1..50: mol_type = unassigned DNA; note = target_0ffe726
  misc_feature 1..21: note = LF
  misc_feature 22..25: note = Core
  misc_feature 26..50: note = RF
aggatgaggcaacgctcgacgccccccgtggtcgcacgtgtcgacgatca

SEQ ID NO: 21116 - DNA, 50 bp, unidentified
  source 1..50: mol_type = unassigned DNA; note = target_101866f
  misc_feature 1..20: note = LF
  misc_feature 21..25: note = Core
  misc_feature 26..50: note = RF
gcgtcctgacagcatgagaatcctttcgttgtgacccgactcggtcgggt

SEQ ID NO: 21117 - DNA, 50 bp, unidentified
  source 1..50: mol_type = unassigned DNA; note = target_101c82b
  misc_feature 1..23: note = LF
  misc_feature 24..25: note = Core
  misc_feature 26..50: note = RF
tcctgcgctgacgggcggcggggtcagatcttcacttttgatgtctcact

SEQ ID NO: 21118 - DNA, 50 bp, unidentified
  source 1..50: mol_type = unassigned DNA; note = target_102077a
  misc_feature 1..22: note = LF
  misc_feature 23..25: note = Core
  misc_feature 26..50: note = RF
ctgtcttcaagtaaagcaccccgtttagttgaacaaaaaactttttaact

SEQ ID NO: 21119 - DNA, 50 bp, unidentified
  source 1..50: mol_type = unassigned DNA; note = target_10289b5
  misc_feature 1..23: note = LF
  misc_feature 24..25: note = Core
  misc_feature 26..50: note = RF
gggctggcgaacgtcaggtggagcggggttaggtcgcaccccgttctcac

SEQ ID NO: 21120 - DNA, 50 bp, unidentified
  source 1..50: mol_type = unassigned DNA; note = target_1034807
  misc_feature 1..22: note = LF
  misc_feature 23..25: note = Core
  misc_feature 26..50: note = RF
atctttgagaacgcgaacttcgatttgttcacttctttttcttcttcggc

SEQ ID NO: 21121 - DNA, 50 bp, unidentified
  source 1..50: mol_type = unassigned DNA; note = target_1037342
  misc_feature 1..22: note = LF
  misc_feature 23..25: note = Core
  misc_feature 26..50: note = RF
tagttcaatttttatcccgagctgaggttagttaagacgttaactcaaat

SEQ ID NO: 21122 - DNA, 50 bp, unidentified
  source 1..50: mol_type = unassigned DNA; note = target_103bbc3
  misc_feature 1..23: note = LF
  misc_feature 24..25: note = Core
  misc_feature 26..50: note = RF
aattgtagctttagatatcccaccttaggcgcgatggaactgcgccgaag

SEQ ID NO: 21123 - DNA, 50 bp, unidentified
  source 1..50: mol_type = unassigned DNA; note = target_1041cb3
  misc_feature 1..22: note = LF
  misc_feature 23..25: note = Core
  misc_feature 26..50: note = RF
ccgtcttgaagtaaagcacctcgtttagtgaaaagacttggttagtttga

SEQ ID NO: 21124 - DNA, 50 bp, unidentified
  source 1..50: mol_type = unassigned DNA; note = target_1050eee
  misc_feature 1..20: note = LF
  misc_feature 21..25: note = Core
  misc_feature 26..50: note = RF
tatcgtcctgctgcttaatcctgctattcaggcacaagagttcgttggag

SEQ ID NO: 21125 - DNA, 50 bp, unidentified
  source 1..50: mol_type = unassigned DNA; note = target_1052410
  misc_feature 1..23: note = LF
  misc_feature 24..25: note = Core
  misc_feature 26..50: note = RF
catacaaagtctatctcactatgtgcccctttgtgagataggaactataa

SEQ ID NO: 21126 - DNA, 50 bp, unidentified
  source 1..50: mol_type = unassigned DNA; note = target_1056886
  misc_feature 1..23: note = LF
  misc_feature 24..25: note = Core
  misc_feature 26..50: note = RF
ggtgcgattgccaaggccaatcgtaagggcgaaaccctaagtcgccgtca

SEQ ID NO: 21127 - DNA, 50 bp, unidentified
  source 1..50: mol_type = unassigned DNA; note = target_105ef4c
  misc_feature 1..23: note = LF
  misc_feature 24..25: note = Core
  misc_feature 26..50: note = RF
ccgaaccattcttgcccgaggatccatgtggcgtgaagtgcttgggctcg

SEQ ID NO: 21128 - DNA, 50 bp, unidentified
  source 1..50: mol_type = unassigned DNA; note = target_10610fb
  misc_feature 1..21: note = LF
  misc_feature 22..25: note = Core
  misc_feature 26..50: note = RF
gcgtcgttggtcagcgtcgcgctcatcggaccccggtcacactcgttggc

SEQ ID NO: 21129 - DNA, 50 bp, unidentified
  source 1..50: mol_type = unassigned DNA; note = target_1061a2a
  misc_feature 1..23: note = LF
  misc_feature 24..25: note = Core
  misc_feature 26..50: note = RF
ggcaagcgatgaaaagcagattcctccgctgcgctgcggaatgacaaaca

SEQ ID NO: 21130 - DNA, 50 bp, unidentified
  source 1..50: mol_type = unassigned DNA; note = target_106a811
  misc_feature 1..23: note = LF
  misc_feature 24..25: note = Core
  misc_feature 26..50: note = RF
gcaaagcgtcgtggttatgggtccccgccttcgcggggacgactgttatt

SEQ ID NO: 21131 - DNA, 50 bp, unidentified
  source 1..50: mol_type = unassigned DNA; note = target_107f99a
  misc_feature 1..21: note = LF
  misc_feature 22..25: note = Core
  misc_feature 26..50: note = RF
acaggacaccggccaaaaccgctccaccacccgcagtgggcatgtactgg

SEQ ID NO: 21132 - DNA, 50 bp, unidentified
  source 1..50: mol_type = unassigned DNA; note = target_1080728
  misc_feature 1..22: note = LF
  misc_feature 23..25: note = Core
  misc_feature 26..50: note = RF
ctccaatcatctctgcaaattactcgtatctttttgtgttgttgaaacat

SEQ ID NO: 21133 - DNA, 50 bp, unidentified
  source 1..50: mol_type = unassigned DNA; note = target_1083a50
  misc_feature 1..23: note = LF
  misc_feature 24..25: note = Core
  misc_feature 26..50: note = RF
cagcgctgaccggcagcatcgcagacgaagccgtcactgaagcggcagtg

SEQ ID NO: 21134 - DNA, 50 bp, unidentified
  source 1..50: mol_type = unassigned DNA; note = target_108bbe8
  misc_feature 1..24: note = LF
  misc_feature 25: note = Core
  misc_feature 26..50: note = RF
tttcgctgcgggccggcttgtgatttcaaggagtccgcttttttcgcgga

SEQ ID NO: 21135 - DNA, 50 bp, unidentified
  source 1..50: mol_type = unassigned DNA; note = target_1091333
  misc_feature 1..24: note = LF
  misc_feature 25: note = Core
  misc_feature 26..50: note = RF
agcggttgttggtgaaatggggattaatcgccaacggccgcatagttctc

SEQ ID NO: 21136 - DNA, 50 bp, unidentified
  source 1..50: mol_type = unassigned DNA; note = target_1093e9a
  misc_feature 1..24: note = LF
  misc_feature 25: note = Core
  misc_feature 26..50: note = RF
aggctacactgtcggctagtgacccaaaggagacacagaaacttggtagt

SEQ ID NO: 21137 - DNA, 50 bp, unidentified
  source 1..50: mol_type = unassigned DNA; note = target_10a6249
  misc_feature 1..21: note = LF
  misc_feature 22..25: note = Core
  misc_feature 26..50: note = RF
atgtatatacgtctgcactgcttgcgtgctctagtccagttccgtctgct

SEQ ID NO: 21138 - DNA, 50 bp, unidentified
  source 1..50: mol_type = unassigned DNA; note = target_10bba37
  misc_feature 1..23: note = LF
  misc_feature 24..25: note = Core
  misc_feature 26..50: note = RF
ggctgcccatccttcgactccgctcaggatgacagacactcacacctgat

SEQ ID NO: 21139 - DNA, 50 bp, unidentified
  source 1..50: mol_type = unassigned DNA; note = target_10c031d
  misc_feature 1..23: note = LF
  misc_feature 24..25: note = Core
  misc_feature 26..50: note = RF
tggcgcaaggggtgagttgggtcccagctttcgctgggatgacagccggt

SEQ ID NO: 21140 - DNA, 50 bp, unidentified
  source 1..50: mol_type = unassigned DNA; note = target_10c2b37
  misc_feature 1..22: note = LF
  misc_feature 23..25: note = Core
  misc_feature 26..50: note = RF
tttcgattcattggcatatttcctttcttgtactcatttttgggcacaaa

SEQ ID NO: 21141 - DNA, 50 bp, unidentified
  source 1..50: mol_type = unassigned DNA; note = target_10c47f3
  misc_feature 1..23: note = LF
  misc_feature 24..25: note = Core
  misc_feature 26..50: note = RF
ggctgagggcatacggcacagggatgtgccgttatacccgacccgtccgg

SEQ ID NO: 21142 - DNA, 50 bp, unidentified
  source 1..50: mol_type = unassigned DNA; note = target_10cdb04
  misc_feature 1..24: note = LF
  misc_feature 25: note = Core
  misc_feature 26..50: note = RF
aggttcgaaactattattcatatttacccctccaattcttctagtactag

SEQ ID NO: 21143 - DNA, 50 bp, unidentified
  source 1..50: mol_type = unassigned DNA; note = target_10ce261
  misc_feature 1..24: note = LF
  misc_feature 25: note = Core
  misc_feature 26..50: note = RF
atcggacgaccgcgcggatcgcggcatgtccggatgggtcggacgccact

SEQ ID NO: 21144 - DNA, 50 bp, unidentified
  source 1..50: mol_type = unassigned DNA; note = target_10d93eb
  misc_feature 1..23: note = LF
  misc_feature 24..25: note = Core
  misc_feature 26..50: note = RF
gagtgccgtgatgtcatcgagattgagtcagagtcccgttacaacgccga

SEQ ID NO: 21145 - DNA, 50 bp, unidentified
  source 1..50: mol_type = unassigned DNA; note = target_10d95d6
  misc_feature 1..24: note = LF
  misc_feature 25: note = Core
  misc_feature 26..50: note = RF
atcaggcacaatgaactatacacgttgttgcccacagcacttatctttca

SEQ ID NO: 21146 - DNA, 50 bp, unidentified
  source 1..50: mol_type = unassigned DNA; note = target_10d9fc3
  misc_feature 1..23: note = LF
  misc_feature 24..25: note = Core
  misc_feature 26..50: note = RF
ttcgcttttgtgagacgacagattgtccatcacgacgatatcgcctggct

SEQ ID NO: 21147 - DNA, 50 bp, unidentified
  source 1..50: mol_type = unassigned DNA; note = target_10de82c
  misc_feature 1..23: note = LF
  misc_feature 24..25: note = Core
  misc_feature 26..50: note = RF
atggcctggctctgagtcccccttttgcgccctggccgtgacggtgaacc

SEQ ID NO: 21148 - DNA, 50 bp, unidentified
  source 1..50: mol_type = unassigned DNA; note = target_10de86f
  misc_feature 1..22: note = LF
  misc_feature 23..25: note = Core
  misc_feature 26..50: note = RF
tcgcttttgtatttttgcacccgtttagttttacaagaaactaaaactct

SEQ ID NO: 21149 - DNA, 50 bp, unidentified
  source 1..50: mol_type = unassigned DNA; note = target_10e4d01
  misc_feature 1..24: note = LF
  misc_feature 25: note = Core
  misc_feature 26..50: note = RF
accaccgacattcggagggaattttttatgcatcaggggccatatttcgt

SEQ ID NO: 21150 - DNA, 50 bp, unidentified
  source 1..50: mol_type = unassigned DNA; note = target_10f31e0
  misc_feature 1..24: note = LF
  misc_feature 25: note = Core
  misc_feature 26..50: note = RF
catgggaggctcgaagtctgcctatgggataatgcagaccatatcccttg

SEQ ID NO: 21151 - DNA, 50 bp, unidentified
  source 1..50: mol_type = unassigned DNA; note = target_10fe246
  misc_feature 1..23: note = LF
  misc_feature 24..25: note = Core
  misc_feature 26..50: note = RF
aatttttccatctttacgttatcctttctgttcttttcgtattgttaagt

SEQ ID NO: 21152 - DNA, 50 bp, unidentified
  source 1..50: mol_type = unassigned DNA; note = target_11016dd
  misc_feature 1..23: note = LF
  misc_feature 24..25: note = Core
  misc_feature 26..50: note = RF
gcgcttcgcgggccatcacctgatcggtggccagctcgaagaagctcact

SEQ ID NO: 21153 - DNA, 50 bp, unidentified
  source 1..50: mol_type = unassigned DNA; note = target_110b84e
  misc_feature 1..21: note = LF
  misc_feature 22..25: note = Core
  misc_feature 26..50: note = RF
catgatatcatattcatatgctcacctcgtcaattgccagaactatcgcg

SEQ ID NO: 21154 - DNA, 50 bp, unidentified
  source 1..50: mol_type = unassigned DNA; note = target_110ee93
  misc_feature 1..23: note = LF
  misc_feature 24..25: note = Core
  misc_feature 26..50: note = RF
ttgtctttcgccgccgcgggccaagtctgctggcgcaccagaaactcccg

SEQ ID NO: 21155 - DNA, 50 bp, unidentified
  source 1..50: mol_type = unassigned DNA; note = target_11121a3
  misc_feature 1..24: note = LF
  misc_feature 25: note = Core
  misc_feature 26..50: note = RF
tttctgcacccattgattacctccttttttagcataaaaaaagttctgaa

SEQ ID NO: 21156 - DNA, 50 bp, unidentified
  source 1..50: mol_type = unassigned DNA; note = target_111c272
  misc_feature 1..23: note = LF
  misc_feature 24..25: note = Core
  misc_feature 26..50: note = RF
tcagtttcatatgttattacctcctaacttaaatataaaaatttaattat

SEQ ID NO: 21157 - DNA, 50 bp, unidentified
  source 1..50: mol_type = unassigned DNA; note = target_111fd91
  misc_feature 1..22: note = LF
  misc_feature 23..25: note = Core
  misc_feature 26..50: note = RF
aatctctccgcctaggacgaattgaatcagcagcttacgtcccgatcgac

SEQ ID NO: 21158 - DNA, 50 bp, unidentified
  source 1..50: mol_type = unassigned DNA; note = target_112135c
  misc_feature 1..24: note = LF
  misc_feature 25: note = Core
  misc_feature 26..50: note = RF
ctgtgtaacggcgatgtatttactttccgagttgcgagtggatcgtcgga

SEQ ID NO: 21159 - DNA, 50 bp, unidentified
  source 1..50: mol_type = unassigned DNA; note = target_113f5a2
  misc_feature 1..24: note = LF
  misc_feature 25: note = Core
  misc_feature 26..50: note = RF
tagactcgatggctggttctgacccaaagcggccggtcgagaattggcca

SEQ ID NO: 21160 - DNA, 50 bp, unidentified
  source 1..50: mol_type = unassigned DNA; note = target_113f8e3
  misc_feature 1..24: note = LF
  misc_feature 25: note = Core
  misc_feature 26..50: note = RF
aggataccgcttcctccgatgggtcggagcactcacgcggggaagagaga

SEQ ID NO: 21161 - DNA, 50 bp, unidentified
  source 1..50: mol_type = unassigned DNA; note = target_113ffbd
  misc_feature 1..21: note = LF
  misc_feature 22..25: note = Core
  misc_feature 26..50: note = RF
gcttgtagtggtacgatagaatcaccccccaataaaaaagccgggcagaa

SEQ ID NO: 21162 - DNA, 50 bp, unidentified
  source 1..50: mol_type = unassigned DNA; note = target_114901e
  misc_feature 1..23: note = LF
  misc_feature 24..25: note = Core
  misc_feature 26..50: note = RF
ccccttgtcttttattgcaatcttggtttttgcatctcgatcccggctcg

SEQ ID NO: 21163 - DNA, 50 bp, unidentified
  source 1..50: mol_type = unassigned DNA; note = target_114ad43
  misc_feature 1..23: note = LF
  misc_feature 24..25: note = Core
  misc_feature 26..50: note = RF
tggacattctattgtcccttatttggaatccgatttcgcggggatattga

SEQ ID NO: 21164 - DNA, 50 bp, unidentified
  source 1..50: mol_type = unassigned DNA; note = target_114f071
  misc_feature 1..23: note = LF
  misc_feature 24..25: note = Core
  misc_feature 26..50: note = RF
ggaatcagcccgcgagtttccgcacagtctggatggtcaattgggaaagc

SEQ ID NO: 21165 - DNA, 50 bp, unidentified
  source 1..50: mol_type = unassigned DNA; note = target_11598ae
  misc_feature 1..23: note = LF
  misc_feature 24..25: note = Core
  misc_feature 26..50: note = RF
cgccgaccaccccgccgctgccgccccccgtcccgcccgtcacggcaccc

SEQ ID NO: 21166 - DNA, 50 bp, unidentified
  source 1..50: mol_type = unassigned DNA; note = target_115ca27
  misc_feature 1..23: note = LF
  misc_feature 24..25: note = Core
  misc_feature 26..50: note = RF
atcccggggttgagaccgaggagctcgagccgtgggacgccgatggcgag

SEQ ID NO: 21167 - DNA, 50 bp, unidentified
  source 1..50: mol_type = unassigned DNA; note = target_116103d
  misc_feature 1..23: note = LF
  misc_feature 24..25: note = Core
  misc_feature 26..50: note = RF
ggcggatggtcgaggttcaggcgtcgaagtcgtactcaaggacgtaggac

SEQ ID NO: 21168 - DNA, 50 bp, unidentified
  source 1..50: mol_type = unassigned DNA; note = target_117bf5b
  misc_feature 1..24: note = LF
  misc_feature 25: note = Core
  misc_feature 26..50: note = RF
gaccaaagcaattaattatacacgttgttgtgcccagttattttaagtgt

SEQ ID NO: 21169 - DNA, 50 bp, unidentified
  source 1..50: mol_type = unassigned DNA; note = target_1185ef0
  misc_feature 1..23: note = LF
  misc_feature 24..25: note = Core
  misc_feature 26..50: note = RF
ttgtttttcaaaaatagatgctcctttctgttctaaagtttcttggctta

SEQ ID NO: 21170 - DNA, 50 bp, unidentified
  source 1..50: mol_type = unassigned DNA; note = target_1186ff5
  misc_feature 1..23: note = LF
  misc_feature 24..25: note = Core
  misc_feature 26..50: note = RF
acgcgattgcatcatctgaagcggaccttcgccgcgactgcaaactcggg

SEQ ID NO: 21171 - DNA, 50 bp, unidentified
  source 1..50: mol_type = unassigned DNA; note = target_1188495
  misc_feature 1..23: note = LF
  misc_feature 24..25: note = Core
  misc_feature 26..50: note = RF
gggatgtcgggatgtgctgtctgagtcattgtggaatattagaaaaacta

SEQ ID NO: 21172 - DNA, 50 bp, unidentified
  source 1..50: mol_type = unassigned DNA; note = target_118978e
  misc_feature 1..24: note = LF
  misc_feature 25: note = Core
  misc_feature 26..50: note = RF
ataactgctttcttcattcaattcctcctcgcctttttttaattataata

SEQ ID NO: 21173 - DNA, 50 bp, unidentified
  source 1..50: mol_type = unassigned DNA; note = target_118d4d3
  misc_feature 1..24: note = LF
  misc_feature 25: note = Core
  misc_feature 26..50: note = RF
cggtcgtctcccggaaccggccatttcgttcacgtcttggcgaggcgaga

SEQ ID NO: 21174 - DNA, 50 bp, unidentified
  source 1..50: mol_type = unassigned DNA; note = target_118fc42
  misc_feature 1..22: note = LF
  misc_feature 23..25: note = Core
  misc_feature 26..50: note = RF
atttggtctatttccgctctgcggacaaagctgccgttggctgtcgtgcc

SEQ ID NO: 21175 - DNA, 50 bp, unidentified
  source 1..50: mol_type = unassigned DNA; note = target_1193a2d
  misc_feature 1..24: note = LF
  misc_feature 25: note = Core
  misc_feature 26..50: note = RF
aacgtgcataccttcacaagattgtgtttaaatggccccggatcgccttt

SEQ ID NO: 21176 - DNA, 50 bp, unidentified
  source 1..50: mol_type = unassigned DNA; note = target_11971aa
  misc_feature 1..21: note = LF
  misc_feature 22..25: note = Core
  misc_feature 26..50: note = RF
gcccgcagctcaccgcggtctccccccccgtgccctccgagagagggtcg

SEQ ID NO: 21177 - DNA, 50 bp, unidentified
  source 1..50: mol_type = unassigned DNA; note = target_11981b8
  misc_feature 1..23: note = LF
  misc_feature 24..25: note = Core
  misc_feature 26..50: note = RF
ctccggacttcccctttctcatcctcgttgccgcctgcggcggctgcctt

SEQ ID NO: 21178 - DNA, 50 bp, unidentified
  source 1..50: mol_type = unassigned DNA; note = target_11a23e2
  misc_feature 1..23: note = LF
  misc_feature 24..25: note = Core
  misc_feature 26..50: note = RF
cgatggagctgcctcagcccaacctacggcatcagacaaaccaccgtagg

SEQ ID NO: 21179 - DNA, 50 bp, unidentified
  source 1..50: mol_type = unassigned DNA; note = target_11b8c3a
  misc_feature 1..24: note = LF
  misc_feature 25: note = Core
  misc_feature 26..50: note = RF
acacctgtcgcaaaagagacctgacccctgttgcacgggtctcctgtcag

SEQ ID NO: 21180 - DNA, 50 bp, unidentified
  source 1..50: mol_type = unassigned DNA; note = target_11cc11f
  misc_feature 1..23: note = LF
  misc_feature 24..25: note = Core
  misc_feature 26..50: note = RF
aattccagactgccaattatgcgactttcgaagcacaaaaagtgaacatg

SEQ ID NO: 21181 - DNA, 50 bp, unidentified
  source 1..50: mol_type = unassigned DNA; note = target_11d4d6a
  misc_feature 1..23: note = LF
  misc_feature 24..25: note = Core
  misc_feature 26..50: note = RF
gggtaatttcgcgcctaaaggcgctcctacaacgtctcctcgccccgtag

SEQ ID NO: 21182 - DNA, 50 bp, unidentified
  source 1..50: mol_type = unassigned DNA; note = target_11df1f9
  misc_feature 1..24: note = LF
  misc_feature 25: note = Core
  misc_feature 26..50: note = RF
cccttcgatgggggaggattaaggtgggggtgaggaaccacacgacacca

SEQ ID NO: 21183 - DNA, 50 bp, unidentified
  source 1..50: mol_type = unassigned DNA; note = target_11e375a
  misc_feature 1..23: note = LF
  misc_feature 24..25: note = Core
  misc_feature 26..50: note = RF
aaccgtaatcccgagaacgtaagcggcacgaggcccccacatggcggttt

SEQ ID NO: 21184 - DNA, 50 bp, unidentified
  source 1..50: mol_type = unassigned DNA; note = target_11ef5aa
  misc_feature 1..24: note = LF
  misc_feature 25: note = Core
  misc_feature 26..50: note = RF
aagcattattgctgatgagtccgctttggcacgaaacggacgttctatgc

SEQ ID NO: 21185 - DNA, 50 bp, unidentified
  source 1..50: mol_type = unassigned DNA; note = target_11f4746
  misc_feature 1..22: note = LF
  misc_feature 23..25: note = Core
  misc_feature 26..50: note = RF
acagagcatatattaaccccaatcgtcattagatttgggttaagatatgt

SEQ ID NO: 21186 - DNA, 50 bp, unidentified
  source 1..50: mol_type = unassigned DNA; note = target_11f4a39
  misc_feature 1..22: note = LF
  misc_feature 23..25: note = Core
  misc_feature 26..50: note = RF
cttcctcattttcactttctcctcttttaatagcctttgtatgccttata

SEQ ID NO: 21187 - DNA, 50 bp, unidentified
  source 1..50: mol_type = unassigned DNA; note = target_121986e
  misc_feature 1..24: note = LF
  misc_feature 25: note = Core
  misc_feature 26..50: note = RF
gtgcttctagtcatgaggcataacgtagaagtgagcggcctgcgcagctt

SEQ ID NO: 21188 - DNA, 50 bp, unidentified
  source 1..50: mol_type = unassigned DNA; note = target_121c72d
  misc_feature 1..24: note = LF
  misc_feature 25: note = Core
  misc_feature 26..50: note = RF
cctgaaaggtgggcagttcccccccacccaaaaacgcccggccggggatt

SEQ ID NO: 21189 - DNA, 50 bp, unidentified
  source 1..50: mol_type = unassigned DNA; note = target_122be24
  misc_feature 1..24: note = LF
  misc_feature 25: note = Core
  misc_feature 26..50: note = RF
actgaagttaatcaggtctggaattgggcttccgagtacggattgtcatc

SEQ ID NO: 21190 - DNA, 50 bp, unidentified
  source 1..50: mol_type = unassigned DNA; note = target_1232619
  misc_feature 1..22: note = LF
  misc_feature 23..25: note = Core
  misc_feature 26..50: note = RF
caataagatacatatatttctcctttcttctatcttccattatatcatac

SEQ ID NO: 21191 - DNA, 50 bp, unidentified
  source 1..50: mol_type = unassigned DNA; note = target_123a990
  misc_feature 1..23: note = LF
  misc_feature 24..25: note = Core
  misc_feature 26..50: note = RF
gcaattgggggcgatgcaagatttgttcctgattgagcgccggcataatt

SEQ ID NO: 21192 - DNA, 50 bp, unidentified
  source 1..50: mol_type = unassigned DNA; note = target_123d04a
  misc_feature 1..24: note = LF
  misc_feature 25: note = Core
  misc_feature 26..50: note = RF
ggatgggcctcctcctgttggtgccgagaagtcgtccggtccctattcgc

SEQ ID NO: 21193 - DNA, 50 bp, unidentified
  source 1..50: mol_type = unassigned DNA; note = target_1243a01
  misc_feature 1..24: note = LF
  misc_feature 25: note = Core
  misc_feature 26..50: note = RF
ttccgttttaggccgttttgtgatttcaagatgctggctggagcggaggc

SEQ ID NO: 21194 - DNA, 50 bp, unidentified
  source 1..50: mol_type = unassigned DNA; note = target_12473d9
  misc_feature 1..23: note = LF
  misc_feature 24..25: note = Core
  misc_feature 26..50: note = RF
gacttatcaatcgccgaatgtggaggttggatatcaggcccattccctcc

SEQ ID NO: 21195 - DNA, 50 bp, unidentified
  source 1..50: mol_type = unassigned DNA; note = target_1247da0
  misc_feature 1..23: note = LF
  misc_feature 24..25: note = Core
  misc_feature 26..50: note = RF
ctgaacgcgaaatagattgatgccgggttaataatctgtgccatttggca

SEQ ID NO: 21196 - DNA, 50 bp, unidentified
  source 1..50: mol_type = unassigned DNA; note = target_124a0d8
  misc_feature 1..23: note = LF
  misc_feature 24..25: note = Core
  misc_feature 26..50: note = RF
attcattaaattttattgatattaggacttacgcaaaagtaacgctaggc

SEQ ID NO: 21197 - DNA, 50 bp, unidentified
  source 1..50: mol_type = unassigned DNA; note = target_1259b9d
  misc_feature 1..23: note = LF
  misc_feature 24..25: note = Core
  misc_feature 26..50: note = RF
tggcgctatcgccggcaagccggctcccacaggcaccgagcaggccgtga

SEQ ID NO: 21198 - DNA, 50 bp, unidentified
  source 1..50: mol_type = unassigned DNA; note = target_12638d1
  misc_feature 1..21: note = LF
  misc_feature 22..25: note = Core
  misc_feature 26..50: note = RF
gggaacgaaggcggtcccatacccccccgacgtcgacgtcagccggtggg

SEQ ID NO: 21199 - DNA, 50 bp, unidentified
  source 1..50: mol_type = unassigned DNA; note = target_12655c8
  misc_feature 1..24: note = LF
  misc_feature 25: note = Core
  misc_feature 26..50: note = RF
cgccgacccgccgatgcatgtcatcgatatggtcggccgctacttgcgca

SEQ ID NO: 21200 - DNA, 50 bp, unidentified
  source 1..50: mol_type = unassigned DNA; note = target_126a6e0
  misc_feature 1..23: note = LF
  misc_feature 24..25: note = Core
  misc_feature 26..50: note = RF
gaggtttaatccccccgccaaccctatcgggtcaagtggagaaactaccc

SEQ ID NO: 21201 - DNA, 50 bp, unidentified
  source 1..50: mol_type = unassigned DNA; note = target_126bd8f
  misc_feature 1..22: note = LF
  misc_feature 23..25: note = Core
  misc_feature 26..50: note = RF
ggcggaatagatacgcagcgaatgaccccaagcggacattggacttcatc

SEQ ID NO: 21202 - DNA, 50 bp, unidentified
  source 1..50: mol_type = unassigned DNA; note = target_1281f19
  misc_feature 1..23: note = LF
  misc_feature 24..25: note = Core
  misc_feature 26..50: note = RF
atcggcggcttggatgacatgggtgggaacaggcaagccgcacaggcgca

SEQ ID NO: 21203 - DNA, 50 bp, unidentified
  source 1..50: mol_type = unassigned DNA; note = target_129069c
  misc_feature 1..23: note = LF
  misc_feature 24..25: note = Core
  misc_feature 26..50: note = RF
ggttttaacgtgtccttcgtgatctcctcggggagcgatgcactgttgcc

SEQ ID NO: 21204 - DNA, 50 bp, unidentified
  source 1..50: mol_type = unassigned DNA; note = target_129ae6e
  misc_feature 1..23: note = LF
  misc_feature 24..25: note = Core
  misc_feature 26..50: note = RF
gatttcgcagaggggtctgacccctatttaaaaaaatctaccaggtaaac

SEQ ID NO: 21205 - DNA, 50 bp, unidentified
  source 1..50: mol_type = unassigned DNA; note = target_12a37c6
  misc_feature 1..23: note = LF
  misc_feature 24..25: note = Core
  misc_feature 26..50: note = RF
aaaaagtgagagtacgcacgcaactaaccatacacaatcacgttgccaag

SEQ ID NO: 21206 - DNA, 50 bp, unidentified
  source 1..50: mol_type = unassigned DNA; note = target_12b41dd
  misc_feature 1..23: note = LF
  misc_feature 24..25: note = Core
  misc_feature 26..50: note = RF
tcgtccgtcgcggttaaggctattggcccttcgcgacatttcgcggagct

SEQ ID NO: 21207 - DNA, 50 bp, unidentified
  source 1..50: mol_type = unassigned DNA; note = target_12b9d36
  misc_feature 1..23: note = LF
  misc_feature 24..25: note = Core
  misc_feature 26..50: note = RF
catcaggatcaggcaaaaatccgtaggagccggcttgctggcgaacccgg

SEQ ID NO: 21208 - DNA, 50 bp, unidentified
  source 1..50: mol_type = unassigned DNA; note = target_12bf355
  misc_feature 1..24: note = LF
  misc_feature 25: note = Core
  misc_feature 26..50: note = RF
tcgaatacgtgactctccagcccccaccccccagcctcggacgataactg

SEQ ID NO: 21209 - DNA, 50 bp, unidentified
  source 1..50: mol_type = unassigned DNA; note = target_12d66ed
  misc_feature 1..24: note = LF
  misc_feature 25: note = Core
  misc_feature 26..50: note = RF
gctgacctgaaaacaataatggagagacaaaaatgaaacttgccatcaga

SEQ ID NO: 21210 - DNA, 50 bp, unidentified
  source 1..50: mol_type = unassigned DNA; note = target_12d916c
  misc_feature 1..23: note = LF
  misc_feature 24..25: note = Core
  misc_feature 26..50: note = RF
gcagaagtaacccactcaggagcctgtccccgcggggacaggctcctgcc

SEQ ID NO: 21211 - DNA, 50 bp, unidentified
  source 1..50: mol_type = unassigned DNA; note = target_12dc666
  misc_feature 1..24: note = LF
  misc_feature 25: note = Core
  misc_feature 26..50: note = RF
tgaagggcaggagttggccgaactcggaccttccttataaggcactttaa

SEQ ID NO: 21212 - DNA, 50 bp, unidentified
  source 1..50: mol_type = unassigned DNA; note = target_12dd1fd
  misc_feature 1..23: note = LF
  misc_feature 24..25: note = Core
  misc_feature 26..50: note = RF
gaacgggctgcaagtaaagaaggagcaaatcatgaagcgcattcacaaga

SEQ ID NO: 21213 - DNA, 50 bp, unidentified
  source 1..50: mol_type = unassigned DNA; note = target_12f56cb
  misc_feature 1..24: note = LF
  misc_feature 25: note = Core
  misc_feature 26..50: note = RF
ttcctggcgtggagataaatattgtgtccccggaacttatttacaccaaa

SEQ ID NO: 21214 - DNA, 50 bp, unidentified
  source 1..50: mol_type = unassigned DNA; note = target_12f6856
  misc_feature 1..23: note = LF
  misc_feature 24..25: note = Core
  misc_feature 26..50: note = RF
atgttcgcgagcagagctcgctcctacaggttccgacgcgtgggtttccg

SEQ ID NO: 21215 - DNA, 50 bp, unidentified
  source 1..50: mol_type = unassigned DNA; note = target_1308ee0
  misc_feature 1..24: note = LF
  misc_feature 25: note = Core
  misc_feature 26..50: note = RF
ctgaacaccccacttcaaggagaaacggacatgtcggatgaaagatcgct

SEQ ID NO: 21216 - DNA, 50 bp, unidentified
  source 1..50: mol_type = unassigned DNA; note = target_1310de4
  misc_feature 1..23: note = LF
  misc_feature 24..25: note = Core
  misc_feature 26..50: note = RF
tcctgctgttttgtgaacattggagcgaagcgacgatggcccgacagggt

SEQ ID NO: 21217 - DNA, 50 bp, unidentified
  source 1..50: mol_type = unassigned DNA; note = target_1311286
  misc_feature 1..23: note = LF
  misc_feature 24..25: note = Core
  misc_feature 26..50: note = RF
cccccggcatcaatcaccccaccctacgcctttaccaccatgatcccggc

SEQ ID NO: 21218 - DNA, 50 bp, unidentified
  source 1..50: mol_type = unassigned DNA; note = target_13182e8
  misc_feature 1..21: note = LF
  misc_feature 22..25: note = Core
  misc_feature 26..50: note = RF
ggtgatgatcacacattgggattcccaatgccccggctgggagcggtcct

SEQ ID NO: 21219 - DNA, 50 bp, unidentified
  source 1..50: mol_type = unassigned DNA; note = target_131f871
  misc_feature 1..24: note = LF
  misc_feature 25: note = Core
  misc_feature 26..50: note = RF
ctgcgagcgcggactatccgtaagcgtccagccaacacaccttccgaact

SEQ ID NO: 21220 - DNA, 50 bp, unidentified
  source 1..50: mol_type = unassigned DNA; note = target_1320b3f
  misc_feature 1..23: note = LF
  misc_feature 24..25: note = Core
  misc_feature 26..50: note = RF
ctctgttaacggcggagcaattccgggccacggtgtcggagtcaaagcag

SEQ ID NO: 21221 - DNA, 50 bp, unidentified
  source 1..50: mol_type = unassigned DNA; note = target_132ab26
  misc_feature 1..24: note = LF
  misc_feature 25: note = Core
  misc_feature 26..50: note = RF
aagatctcggtgccattggcgtgccattagcaagggtcagcggcggtacc

SEQ ID NO: 21222 - DNA, 50 bp, unidentified
  source 1..50: mol_type = unassigned DNA; note = target_132b9dc
  misc_feature 1..24: note = LF
  misc_feature 25: note = Core
  misc_feature 26..50: note = RF
gcgtccgccatggtgcaacctaacgtgaattaggtgactttttagttggc

SEQ ID NO: 21223 - DNA, 50 bp, unidentified
  source 1..50: mol_type = unassigned DNA; note = target_132ecd4
  misc_feature 1..22: note = LF
  misc_feature 23..25: note = Core
  misc_feature 26..50: note = RF
agtctagctctgcggtatgcgtcattcccgagatcttttatcgggaatct

SEQ ID NO: 21224 - DNA, 50 bp, unidentified
  source 1..50: mol_type = unassigned DNA; note = target_1334c3b
  misc_feature 1..23: note = LF
  misc_feature 24..25: note = Core
  misc_feature 26..50: note = RF
tggcaataagcgcctaacacaccctacagtgatttctttataaataacct

SEQ ID NO: 21225 - DNA, 50 bp, unidentified
  source 1..50: mol_type = unassigned DNA; note = target_133bb8f
  misc_feature 1..22: note = LF
  misc_feature 23..25: note = Core
  misc_feature 26..50: note = RF
agagcagtaaaaacggttgatgtgacaatgccctagccttagcccaaagc

SEQ ID NO: 21226 - DNA, 50 bp, unidentified
  source 1..50: mol_type = unassigned DNA; note = target_133d057
  misc_feature 1..23: note = LF
  misc_feature 24..25: note = Core
  misc_feature 26..50: note = RF
tcattccggccctgagccggaatccagccgacgcgtctgcgcgacgggaa

SEQ ID NO: 21227 - DNA, 50 bp, unidentified
  source 1..50: mol_type = unassigned DNA; note = target_133d458
  misc_feature 1..22: note = LF
  misc_feature 23..25: note = Core
  misc_feature 26..50: note = RF
tagatggaacaaaaaacatgtctgaacaaacggcagaactgcttaagacg

SEQ ID NO: 21228 - DNA, 50 bp, unidentified
  source 1..50: mol_type = unassigned DNA; note = target_133edb5
  misc_feature 1..17: note = LF
  misc_feature 18..25: note = Core
  misc_feature 26..50: note = RF
aatatttctaagcctcatttgatacctcttttgtctgaaatataaaatcg

SEQ ID NO: 21229 - DNA, 50 bp, unidentified
  source 1..50: mol_type = unassigned DNA; note = target_133f57d
  misc_feature 1..23: note = LF
  misc_feature 24..25: note = Core
  misc_feature 26..50: note = RF
gcaaaaatcataattttgtcctcctttcaaaaaggccatccgcgcgccgc

SEQ ID NO: 21230 - DNA, 50 bp, unidentified
  source 1..50: mol_type = unassigned DNA; note = target_13401e9
  misc_feature 1..22: note = LF
  misc_feature 23..25: note = Core
  misc_feature 26..50: note = RF
cttgattaagcttcagccggtttttttgtgcaaaatagcgaggcggctgt

SEQ ID NO: 21231 - DNA, 50 bp, unidentified
  source 1..50: mol_type = unassigned DNA; note = target_134e291
  misc_feature 1..23: note = LF
  misc_feature 24..25: note = Core
  misc_feature 26..50: note = RF
gcactgttttgccggcacaggtcaggatgacgcaccagccgagctgcgtt

SEQ ID NO: 21232 - DNA, 50 bp, unidentified
  source 1..50: mol_type = unassigned DNA; note = target_134fd5f
  misc_feature 1..23: note = LF
  misc_feature 24..25: note = Core
  misc_feature 26..50: note = RF
acgagttcttgacgcaagccgtcatacgatcgagttcttcactcggagaa

SEQ ID NO: 21233 - DNA, 50 bp, unidentified
  source 1..50: mol_type = unassigned DNA; note = target_1353ebf
  misc_feature 1..20: note = LF
  misc_feature 21..25: note = Core
  misc_feature 26..50: note = RF
aggatttgagtcatggcacgtccctcctcctacccgcctgagctgcgccg

SEQ ID NO: 21234 - DNA, 50 bp, unidentified
  source 1..50: mol_type = unassigned DNA; note = target_135d152
  misc_feature 1..22: note = LF
  misc_feature 23..25: note = Core
  misc_feature 26..50: note = RF
ctagtgctcattaacacatcccctttctttttcgcctccggggttagctg

SEQ ID NO: 21235 - DNA, 50 bp, unidentified
  source 1..50: mol_type = unassigned DNA; note = target_135e79b
  misc_feature 1..24: note = LF
  misc_feature 25: note = Core
  misc_feature 26..50: note = RF
gcgtagccagttgccaagaggagtttcgtaacagtctccatacctttccg

SEQ ID NO: 21236 - DNA, 50 bp, unidentified
  source 1..50: mol_type = unassigned DNA; note = target_1360a04
  misc_feature 1..24: note = LF
  misc_feature 25: note = Core
  misc_feature 26..50: note = RF
atctgaacatgccaaccctaagagcgcctaacaaaatttcttgttgctct

SEQ ID NO: 21237 - DNA, 50 bp, unidentified
  source 1..50: mol_type = unassigned DNA; note = target_1360bd2
  misc_feature 1..23: note = LF
  misc_feature 24..25: note = Core
  misc_feature 26..50: note = RF
gggaaggcgatggattcctgctcctctcagttccagcggcgcttctcgat

SEQ ID NO: 21238 - DNA, 50 bp, unidentified
  source 1..50: mol_type = unassigned DNA; note = target_136435d
  misc_feature 1..22: note = LF
  misc_feature 23..25: note = Core
  misc_feature 26..50: note = RF
acaatagttcatcctttgcctccttataacacgctcattgcatgtttacc

SEQ ID NO: 21239 - DNA, 50 bp, unidentified
  source 1..50: mol_type = unassigned DNA; note = target_136a903
  misc_feature 1..23: note = LF
  misc_feature 24..25: note = Core
  misc_feature 26..50: note = RF
cgaacttgcttctggtagcaagatcacggcgggaagagggtgtctggtcg

SEQ ID NO: 21240 - DNA, 50 bp, unidentified
  source 1..50: mol_type = unassigned DNA; note = target_1372b12
  misc_feature 1..23: note = LF
  misc_feature 24..25: note = Core
  misc_feature 26..50: note = RF
caaagcccagcaaattgctgggcttttagtacttgtcttttagcttttac

SEQ ID NO: 21241 - DNA, 50 bp, unidentified
  source 1..50: mol_type = unassigned DNA; note = target_137416e
  misc_feature 1..24: note = LF
  misc_feature 25: note = Core
  misc_feature 26..50: note = RF
tatactcaggggctggtgatgacccaaaggagccgctcggatgggcatga

SEQ ID NO: 21242 - DNA, 50 bp, unidentified
  source 1..50: mol_type = unassigned DNA; note = target_137dcfd
  misc_feature 1..24: note = LF
  misc_feature 25: note = Core
  misc_feature 26..50: note = RF
tgcgccctgctgccgacgggaaagtccatattgagtttcgttcggaatgg

SEQ ID NO: 21243 - DNA, 50 bp, unidentified
  source 1..50: mol_type = unassigned DNA; note = target_13862ac
  misc_feature 1..22: note = LF
  misc_feature 23..25: note = Core
  misc_feature 26..50: note = RF
tggcctcatcgctggcaagccagctcccacagggtccgtgtgggagctgg

SEQ ID NO: 21244 - DNA, 50 bp, unidentified
  source 1..50: mol_type = unassigned DNA; note = target_1386a6f
  misc_feature 1..23: note = LF
  misc_feature 24..25: note = Core
  misc_feature 26..50: note = RF
ggaaccgatcagcggactacatcagggccagcggcatgaacgcgccgcaa

SEQ ID NO: 21245 - DNA, 50 bp, unidentified
  source 1..50: mol_type = unassigned DNA; note = target_1388813
  misc_feature 1..22: note = LF
  misc_feature 23..25: note = Core
  misc_feature 26..50: note = RF
tcaacccccacgctatcccctcactttctgcgttatcttctgtacggcca

SEQ ID NO: 21246 - DNA, 50 bp, unidentified
  source 1..50: mol_type = unassigned DNA; note = target_1389fac
  misc_feature 1..23: note = LF
  misc_feature 24..25: note = Core
  misc_feature 26..50: note = RF
atgagggcggtcatgtttgcttttggcccatctcgtcatttcgctgcctc

SEQ ID NO: 21247 - DNA, 50 bp, unidentified
  source 1..50: mol_type = unassigned DNA; note = target_139013d
  misc_feature 1..23: note = LF
  misc_feature 24..25: note = Core
  misc_feature 26..50: note = RF
tcgaaacgaagtatctacgggtgctcacggcacacccccgttcgttcgct

SEQ ID NO: 21248 - DNA, 50 bp, unidentified
  source 1..50: mol_type = unassigned DNA; note = target_1393442
  misc_feature 1..23: note = LF
  misc_feature 24..25: note = Core
  misc_feature 26..50: note = RF
tatcgacgcggtgaacgttagcggactttcgtcggcggatcgcggtgctg

SEQ ID NO: 21249 - DNA, 50 bp, unidentified
  source 1..50: mol_type = unassigned DNA; note = target_1396495
  misc_feature 1..23: note = LF
  misc_feature 24..25: note = Core
  misc_feature 26..50: note = RF
cgcacccgcctcgacaccaccacctgacccctgcgcttcccggtccaacc

SEQ ID NO: 21250 - DNA, 50 bp, unidentified
  source 1..50: mol_type = unassigned DNA; note = target_13a040e
  misc_feature 1..24: note = LF
  misc_feature 25: note = Core
  misc_feature 26..50: note = RF
ccttcagtcaaaataaaacctaacgcctcgttaagcggataaaaatggtt

SEQ ID NO: 21251 - DNA, 50 bp, unidentified
  source 1..50: mol_type = unassigned DNA; note = target_13a5d49
  misc_feature 1..24: note = LF
  misc_feature 25: note = Core
  misc_feature 26..50: note = RF
aatcagaaaatccagtgccatggctcttcctctgtaataatcgtttccac

SEQ ID NO: 21252 - DNA, 50 bp, unidentified
  source 1..50: mol_type = unassigned DNA; note = target_13a7449
  misc_feature 1..24: note = LF
  misc_feature 25: note = Core
  misc_feature 26..50: note = RF
caccccactgttgggcaggtggggtttatggatcgcatacatttttccga

SEQ ID NO: 21253 - DNA, 50 bp, unidentified
  source 1..50: mol_type = unassigned DNA; note = target_13b77d2
  misc_feature 1..24: note = LF
  misc_feature 25: note = Core
  misc_feature 26..50: note = RF
cccgagggtcaccgggtctcgtggctcggcgctggcgcgcctcgcacctc

SEQ ID NO: 21254 - DNA, 50 bp, unidentified
  source 1..50: mol_type = unassigned DNA; note = target_13bc6ef
  misc_feature 1..23: note = LF
  misc_feature 24..25: note = Core
  misc_feature 26..50: note = RF
aaactgacatattttattcttcctctaattataccggttttaaggctcta

SEQ ID NO: 21255 - DNA, 50 bp, unidentified
  source 1..50: mol_type = unassigned DNA; note = target_13be86d
  misc_feature 1..24: note = LF
  misc_feature 25: note = Core
  misc_feature 26..50: note = RF
taatacagccgacgtctaaaacgtttgtccataaacgagctatgccctta

SEQ ID NO: 21256 - DNA, 50 bp, unidentified
  source 1..50: mol_type = unassigned DNA; note = target_13c4e78
  misc_feature 1..23: note = LF
  misc_feature 24..25: note = Core
  misc_feature 26..50: note = RF
tgccgagtggtggggcaagagcgtttgcttacttttgcgcttttcaaaag

SEQ ID NO: 21257 - DNA, 50 bp, unidentified
  source 1..50: mol_type = unassigned DNA; note = target_13d4cbe
  misc_feature 1..23: note = LF
  misc_feature 24..25: note = Core
  misc_feature 26..50: note = RF
gaaggcctaaccaagcgctgcagctaaccgcgccccggcgcgtgtaactt

SEQ ID NO: 21258 - DNA, 50 bp, unidentified
  source 1..50: mol_type = unassigned DNA; note = target_13db70e
  misc_feature 1..23: note = LF
  misc_feature 24..25: note = Core
  misc_feature 26..50: note = RF
atgccgaacttcatgggctgatcctttctgtgccggggaggtgtggcgtc

SEQ ID NO: 21259 - DNA, 50 bp, unidentified
  source 1..50: mol_type = unassigned DNA; note = target_13e1b9f
  misc_feature 1..23: note = LF
  misc_feature 24..25: note = Core
  misc_feature 26..50: note = RF
aactcatgccgcaattgcacatcctttcaagtggtgataaaaaaatccac

SEQ ID NO: 21260 - DNA, 50 bp, unidentified
  source 1..50: mol_type = unassigned DNA; note = target_13e1e2d
  misc_feature 1..23: note = LF
  misc_feature 24..25: note = Core
  misc_feature 26..50: note = RF
tcttctcttttttcaacatgacctgccactgaactttcatccagcggcga

SEQ ID NO: 21261 - DNA, 50 bp, unidentified
  source 1..50: mol_type = unassigned DNA; note = target_13e7327
  misc_feature 1..24: note = LF
  misc_feature 25: note = Core
  misc_feature 26..50: note = RF
aagcctgtcaccattcatatcttttcacctcatacttcaataaacttttc

SEQ ID NO: 21262 - DNA, 50 bp, unidentified
  source 1..50: mol_type = unassigned DNA; note = target_13f04ea
  misc_feature 1..23: note = LF
  misc_feature 24..25: note = Core
  misc_feature 26..50: note = RF
tgattcatattagcccggaagtgctctaggttattgaaatacctggaaag

SEQ ID NO: 21263 - DNA, 50 bp, unidentified
  source 1..50: mol_type = unassigned DNA; note = target_13f6c22
  misc_feature 1..23: note = LF
  misc_feature 24..25: note = Core
  misc_feature 26..50: note = RF
caaaccctctaaaaattttacctctttacaattaccccggtttgcggtat

SEQ ID NO: 21264 - DNA, 50 bp, unidentified
  source 1..50: mol_type = unassigned DNA; note = target_13fff77
  misc_feature 1..24: note = LF
  misc_feature 25: note = Core
  misc_feature 26..50: note = RF
cagggataacgcgcgccgagccgccgttatgatcggcttgttcgctgttc

SEQ ID NO: 21265 - DNA, 50 bp, unidentified
  source 1..50: mol_type = unassigned DNA; note = target_1403abf
  misc_feature 1..23: note = LF
  misc_feature 24..25: note = Core
  misc_feature 26..50: note = RF
tgcggatcgggtggcatgaaccgctctagcgtagcgagcagtcctttgtc

SEQ ID NO: 21266 - DNA, 50 bp, unidentified
  source 1..50: mol_type = unassigned DNA; note = target_140ee8b
  misc_feature 1..23: note = LF
  misc_feature 24..25: note = Core
  misc_feature 26..50: note = RF
gcagcccatcgccggcaagccggctcccacaggtacagggcagaactcaa

SEQ ID NO: 21267 - DNA, 50 bp, unidentified
  source 1..50: mol_type = unassigned DNA; note = target_1414e0c
  misc_feature 1..23: note = LF
  misc_feature 24..25: note = Core
  misc_feature 26..50: note = RF
aggtatcctccttaattgacttcctttctatcataatacaagaaactcct

SEQ ID NO: 21268 - DNA, 50 bp, unidentified
  source 1..50: mol_type = unassigned DNA; note = target_14158f2
  misc_feature 1..23: note = LF
  misc_feature 24..25: note = Core
  misc_feature 26..50: note = RF
gagaggcgcaagcgcggccaaccctagccgttgtcagcatccgcgtcccg

SEQ ID NO: 21269 - DNA, 50 bp, unidentified
  source 1..50: mol_type = unassigned DNA; note = target_141727f
  misc_feature 1..24: note = LF
  misc_feature 25: note = Core
  misc_feature 26..50: note = RF
tttcggggccgagcgagccgttggcgaaggcagcccgcatgggcggacga

SEQ ID NO: 21270 - DNA, 50 bp, unidentified
  source 1..50: mol_type = unassigned DNA; note = target_1418c57
  misc_feature 1..22: note = LF
  misc_feature 23..25: note = Core
  misc_feature 26..50: note = RF
tgggcttttcgccgctatagcggctcctacaggcctcgtcgttggcagcc

SEQ ID NO: 21271 - DNA, 50 bp, unidentified; identical to SEQ ID NO: 20776
  source 1..50: mol_type = unassigned DNA; note = target_142a225
  misc_feature 1..24: note = LF
  misc_feature 25: note = Core
  misc_feature 26..50: note = RF

SEQ ID NO: 21272 - DNA, 50 bp, unidentified
  source 1..50: mol_type = unassigned DNA; note = target_144030e
  misc_feature 1..23: note = LF
  misc_feature 24..25: note = Core
  misc_feature 26..50: note = RF
tgaggcaagcgtgatccctaaaatgcgttccaattgtatccagtagggga

SEQ ID NO: 21273 - DNA, 50 bp, unidentified
  source 1..50: mol_type = unassigned DNA; note = target_1442ef9
  misc_feature 1..24: note = LF
  misc_feature 25: note = Core
  misc_feature 26..50: note = RF
ctccccgaaccccgccgcgtcccccacccccccccgccacccccttcccc

SEQ ID NO: 21274 - DNA, 50 bp, unidentified
  source 1..50: mol_type = unassigned DNA; note = target_14454ab
  misc_feature 1..24: note = LF
  misc_feature 25: note = Core
  misc_feature 26..50: note = RF
agacgcgagcgcacgcgtaggtgccgttctgcgctgttgtggcgagagca

SEQ ID NO: 21275 - DNA, 50 bp, unidentified
  source 1..50: mol_type = unassigned DNA; note = target_1454c47
  misc_feature 1..23: note = LF
  misc_feature 24..25: note = Core
  misc_feature 26..50: note = RF
cagtcgcagccattagctgtcgccccccctgctctccactgctctcccct

SEQ ID NO: 21276 - DNA, 50 bp, unidentified
  source 1..50: mol_type = unassigned DNA; note = target_145b206
  misc_feature 1..23: note = LF
  misc_feature 24..25: note = Core
  misc_feature 26..50: note = RF
cgcacggcctgagccggcaaacatgacaatgccagccagatatcctacgc

SEQ ID NO: 21277 - DNA, 50 bp, unidentified
  source 1..50: mol_type = unassigned DNA; note = target_14676d6
  misc_feature 1..22: note = LF
  misc_feature 23..25: note = Core
  misc_feature 26..50: note = RF
catgagcttattccacggcatttttttgcttttttctgaccgcacagact

SEQ ID NO: 21278 - DNA, 50 bp, unidentified
  source 1..50: mol_type = unassigned DNA; note = target_146f219
  misc_feature 1..24: note = LF
  misc_feature 25: note = Core
  misc_feature 26..50: note = RF
agccgaaagggaaactgctgggataacgccgtggccgagtcattcttcgg

SEQ ID NO: 21279 - DNA, 50 bp, unidentified
  source 1..50: mol_type = unassigned DNA; note = target_14718f1
  misc_feature 1..23: note = LF
  misc_feature 24..25: note = Core
  misc_feature 26..50: note = RF
gccgtttcgaggggccctatctcctaacccgtccttcatctgatcgagcg

SEQ ID NO: 21280 - DNA, 50 bp, unidentified
  source 1..50: mol_type = unassigned DNA; note = target_1477aec
  misc_feature 1..23: note = LF
  misc_feature 24..25: note = Core
  misc_feature 26..50: note = RF
gacgcaacagcgtcttatccggcctacaaagctcgcacaggcccgaaagc

SEQ ID NO: 21281 - DNA, 50 bp, unidentified
  source 1..50: mol_type = unassigned DNA; note = target_1478591
  misc_feature 1..24: note = LF
  misc_feature 25: note = Core
  misc_feature 26..50: note = RF
actggaccccacggccgtttgcccccccccggggctgctgaacatcgtcg

SEQ ID NO: 21282 - DNA, 50 bp, unidentified
  source 1..50: mol_type = unassigned DNA; note = target_147c029
  misc_feature 1..24: note = LF
  misc_feature 25: note = Core
  misc_feature 26..50: note = RF
gtcgcgagggtgtccgcgattttgtgtaaacgggaaatcgtttaatgctg

SEQ ID NO: 21283 - DNA, 50 bp, unidentified
  source 1..50: mol_type = unassigned DNA; note = target_147f2c4
  misc_feature 1..22: note = LF
  misc_feature 23..25: note = Core
  misc_feature 26..50: note = RF
accacttccatgtggtgcgtcttttttgtgcacctgaaaagggcaaccaa

SEQ ID NO: 21284 - DNA, 50 bp, unidentified
  source 1..50: mol_type = unassigned DNA; note = target_147f618
  misc_feature 1..24: note = LF
  misc_feature 25: note = Core
  misc_feature 26..50: note = RF
caccgagtggtggggcaagagccctttgcttactttggggctcttccaaa

SEQ ID NO: 21285 - DNA, 50 bp, unidentified
  source 1..50: mol_type = unassigned DNA; note = target_14a67f6
  misc_feature 1..23: note = LF
  misc_feature 24..25: note = Core
  misc_feature 26..50: note = RF
tttgatgtagtgattgatgacatttccgttttgatgcagacaaagtcctg

SEQ ID NO: 21286 - DNA, 50 bp, unidentified
  source 1..50: mol_type = unassigned DNA; note = target_14a9e9d
  misc_feature 1..23: note = LF
  misc_feature 24..25: note = Core
  misc_feature 26..50: note = RF
aaggcgacaggccgcttgaaagcctgtcgcctttaacgcttcgccacgtt

SEQ ID NO: 21287 - DNA, 50 bp, unidentified
  source 1..50: mol_type = unassigned DNA; note = target_14afd79
  misc_feature 1..23: note = LF
  misc_feature 24..25: note = Core
  misc_feature 26..50: note = RF
tcgtttcctcctttaaattctaatttattacgcaaaactcatttgccgct

SEQ ID NO: 21288 - DNA, 50 bp, unidentified; identical to SEQ ID NO: 20355
  source 1..50: mol_type = unassigned DNA; note = target_14b89d6
  misc_feature 1..23: note = LF
  misc_feature 24..25: note = Core
  misc_feature 26..50: note = RF

SEQ ID NO: 21289 - DNA, 50 bp, unidentified
  source 1..50: mol_type = unassigned DNA; note = target_14bd26d
  misc_feature 1..23: note = LF
  misc_feature 24..25: note = Core
  misc_feature 26..50: note = RF
cgcgaaaatcgcggataaatccgctcctacatgagtggcaacgtcactga

SEQ ID NO: 21290 - DNA, 50 bp, unidentified
  source 1..50: mol_type = unassigned DNA; note = target_14c1328
  misc_feature 1..23: note = LF
  misc_feature 24..25: note = Core
  misc_feature 26..50: note = RF
tctccgagtcattaattaccctcctctttgggtggtttgagcaaggtatc

SEQ ID NO: 21291 - DNA, 50 bp, unidentified
  source 1..50: mol_type = unassigned DNA; note = target_14c1c55
  misc_feature 1..23: note = LF
  misc_feature 24..25: note = Core
  misc_feature 26..50: note = RF
cgctccgaagatgagcgcggcttttttaggatatcgcgctccatccgaag

SEQ ID NO: 21292 - DNA, 50 bp, unidentified
  source 1..50: mol_type = unassigned DNA; note = target_14c8d28
  misc_feature 1..23: note = LF
  misc_feature 24..25: note = Core
  misc_feature 26..50: note = RF
agcggttagacatcagcaagcgtagcccggatggagcgaagcgaaatccg

SEQ ID NO: 21293 - DNA, 50 bp, unidentified
  source 1..50: mol_type = unassigned DNA; note = target_14c9055
  misc_feature 1..21: note = LF
  misc_feature 22..25: note = Core
  misc_feature 26..50: note = RF
cgcggatcccgacaactccgaccccccgtagcaccgggacccgtttcgta

SEQ ID NO: 21294 - DNA, 50 bp, unidentified
  source 1..50: mol_type = unassigned DNA; note = target_14ce709
  misc_feature 1..24: note = LF
  misc_feature 25: note = Core
  misc_feature 26..50: note = RF
gtcgaactgcccgaaaagtcgggttttcggcaacttcgcattctgggtcc

SEQ ID NO: 21295 - DNA, 50 bp, unidentified
  source 1..50: mol_type = unassigned DNA; note = target_14d2386
  misc_feature 1..24: note = LF
  misc_feature 25: note = Core
  misc_feature 26..50: note = RF
gaaaagcccttgccacgcggaggccgtccatacatgccactgaactttca

SEQ ID NO: 21296 - DNA, 50 bp, unidentified
  source 1..50: mol_type = unassigned DNA; note = target_14d2615
  misc_feature 1..23: note = LF
  misc_feature 24..25: note = Core
  misc_feature 26..50: note = RF
gcccgcctcggcgcaaagtcgctggtcacaagggtgatcgcagtttttga

SEQ ID NO: 21297 - DNA, 50 bp, unidentified
  source 1..50: mol_type = unassigned DNA; note = target_14d7e78
  misc_feature 1..24: note = LF
  misc_feature 25: note = Core
  misc_feature 26..50: note = RF
tccgacgtcgaggcgagagggactagttggccaccgactgcgacgactca

SEQ ID NO: 21298 - DNA, 50 bp, unidentified
  source 1..50: mol_type = unassigned DNA; note = target_14d9e61
  misc_feature 1..23: note = LF
  misc_feature 24..25: note = Core
  misc_feature 26..50: note = RF
cggcgcgggcgcgccgggcgggcctcccaaggccggaggccggcgctgac

SEQ ID NO: 21299 - DNA, 50 bp, unidentified
  source 1..50: mol_type = unassigned DNA; note = target_14e832f
  misc_feature 1..22: note = LF
  misc_feature 23..25: note = Core
  misc_feature 26..50: note = RF
tcaaccattatctgctgctcaaagctgtcagagccgacatagcgcacgtc

SEQ ID NO: 21300 - DNA, 50 bp, unidentified
  source 1..50: mol_type = unassigned DNA; note = target_14f2639
  misc_feature 1..24: note = LF
  misc_feature 25: note = Core
  misc_feature 26..50: note = RF
ggggaggtgtcccccgtccgtctgcgggaacgagccaccgcttatcgtcg

SEQ ID NO: 21301 - DNA, 50 bp, unidentified
  source 1..50: mol_type = unassigned DNA; note = target_14f443c
  misc_feature 1..24: note = LF
  misc_feature 25: note = Core
  misc_feature 26..50: note = RF
tcgagtgccccgccccagccctgccccccccgcggcggagccggtcgagc

SEQ ID NO: 21302 - DNA, 50 bp, unidentified
  source 1..50: mol_type = unassigned DNA; note = target_14f74b2
  misc_feature 1..23: note = LF
  misc_feature 24..25: note = Core
  misc_feature 26..50: note = RF
tggtgctggcgggctgagcgccgctaggccggctgggaccgcaggaactt

SEQ ID NO: 21303 - DNA, 50 bp, unidentified
  source 1..50: mol_type = unassigned DNA; note = target_14f7b59
  misc_feature 1..24: note = LF
  misc_feature 25: note = Core
  misc_feature 26..50: note = RF
tgtactagcaatgaattatacacgttgttgtgtgtagttttattttataa

SEQ ID NO: 21304 - DNA, 50 bp, unidentified
  source 1..50: mol_type = unassigned DNA; note = target_14f8b13
  misc_feature 1..23: note = LF
  misc_feature 24..25: note = Core
  misc_feature 26..50: note = RF
ccggcgcggctgaagtgggtactagcactactttggcacttgtacgctca

SEQ ID NO: 21305 - DNA, 50 bp, unidentified
  source 1..50: mol_type = unassigned DNA; note = target_14f8d4c
  misc_feature 1..24: note = LF
  misc_feature 25: note = Core
  misc_feature 26..50: note = RF
atctagacggaaacctgtcagcagtgctgacaacattgtttgtcgcggga

SEQ ID NO: 21306 - DNA, 50 bp, unidentified
  source 1..50: mol_type = unassigned DNA; note = target_14fccc0
  misc_feature 1..24: note = LF
  misc_feature 25: note = Core
  misc_feature 26..50: note = RF
gggaaattgaagtgcccatccctgggggagtttgggtgcccgccagggtt

SEQ ID NO: 21307 - DNA, 50 bp, unidentified
  source 1..50: mol_type = unassigned DNA; note = target_14fefed
  misc_feature 1..23: note = LF
  misc_feature 24..25: note = Core
  misc_feature 26..50: note = RF
ctccggactgccccttcctcatcctcgttgccgcctggcggcggctgcct

SEQ ID NO: 21308 - DNA, 50 bp, unidentified
  source 1..50: mol_type = unassigned DNA; note = target_150d1f4
  misc_feature 1..24: note = LF
  misc_feature 25: note = Core
  misc_feature 26..50: note = RF
ggtgcggacccgcatgccgggtggtgtggcaggggcgtagcctcttggct

SEQ ID NO: 21309 - DNA, 50 bp, unidentified
  source 1..50: mol_type = unassigned DNA; note = target_1511a7c
  misc_feature 1..23: note = LF
  misc_feature 24..25: note = Core
  misc_feature 26..50: note = RF
gcgcagcgccagcatcccgcaattggggcattcgctctcgggcggcagcg

SEQ ID NO: 21310 - DNA, 50 bp, unidentified
  source 1..50: mol_type = unassigned DNA; note = target_15198d1
  misc_feature 1..24: note = LF
  misc_feature 25: note = Core
  misc_feature 26..50: note = RF
gctgctgtgcaatctgcaattcctcttctctttgatttcctgctggatcg

SEQ ID NO: 21311 - DNA, 50 bp, unidentified
  source 1..50: mol_type = unassigned DNA; note = target_151e696
  misc_feature 1..23: note = LF
  misc_feature 24..25: note = Core
  misc_feature 26..50: note = RF
tttaaattcataacgttaacttcctgaaatagtgacactaaaacttcttc

SEQ ID NO: 21312 - DNA, 50 bp, unidentified
  source 1..50: mol_type = unassigned DNA; note = target_152a6ac
  misc_feature 1..21: note = LF
  misc_feature 22..25: note = Core
  misc_feature 26..50: note = RF
gtcttgcggacgcgggtggcgctcatgcccccacctcggcatcaatccgg

SEQ ID NO: 21313 - DNA, 50 bp, unidentified
  source 1..50: mol_type = unassigned DNA; note = target_152b0eb
  misc_feature 1..24: note = LF
  misc_feature 25: note = Core
  misc_feature 26..50: note = RF
gccgtcgggccgcgccatatctgccgctctgtagccgaactctgcctccg

SEQ ID NO: 21314 - DNA, 50 bp, unidentified
  source 1..50: mol_type = unassigned DNA; note = target_1532e66
  misc_feature 1..23: note = LF
  misc_feature 24..25: note = Core
  misc_feature 26..50: note = RF
ttgcttttttccatgatgtcctccttttacatataagagcagataataat

SEQ ID NO: 21315 - DNA, 50 bp, unidentified
  source 1..50: mol_type = unassigned DNA; note = target_153cff7
  misc_feature 1..24: note = LF
  misc_feature 25: note = Core
  misc_feature 26..50: note = RF
ttggacgtcccgtcctccgtgcggcatgagcgtgcgttgcggacttcttg

SEQ ID NO: 21316 - DNA, 50 bp, unidentified
  source 1..50: mol_type = unassigned DNA; note = target_153e511
  misc_feature 1..23: note = LF
  misc_feature 24..25: note = Core
  misc_feature 26..50: note = RF
aaattttttcataaacaatactcctttctaaaatgaccagaacctacatt

SEQ ID NO: 21317 - DNA, 50 bp, unidentified
  source 1..50: mol_type = unassigned DNA; note = target_15435e5
  misc_feature 1..24: note = LF
  misc_feature 25: note = Core
  misc_feature 26..50: note = RF
tgcgggtggctctcgatactagaaagggtgttatgaaccttaaaaatttc

SEQ ID NO: 21318 - DNA, 50 bp, unidentified
  source 1..50: mol_type = unassigned DNA; note = target_154c2a1
  misc_feature 1..24: note = LF
  misc_feature 25: note = Core
  misc_feature 26..50: note = RF
cagaagtctcgcggcggttgaacgatggatccccgacacaaggtcgggga

SEQ ID NO: 21319 - DNA, 50 bp, unidentified
  source 1..50: mol_type = unassigned DNA; note = target_156daba
  misc_feature 1..23: note = LF
  misc_feature 24..25: note = Core
  misc_feature 26..50: note = RF
ccgccgccgcgcccggtggccgcctcagagcacgtcggcggcgtggtcgg

SEQ ID NO: 21320 - DNA, 50 bp, unidentified
  source 1..50: mol_type = unassigned DNA; note = target_1570bf4
  misc_feature 1..23: note = LF
  misc_feature 24..25: note = Core
  misc_feature 26..50: note = RF
ctttcttaacatcttatcaattcctttcttgttatttagtatcgcagaca

SEQ ID NO: 21321 - DNA, 50 bp, unidentified
  source 1..50: mol_type = unassigned DNA; note = target_157bf85
  misc_feature 1..23: note = LF
  misc_feature 24..25: note = Core
  misc_feature 26..50: note = RF
gtcgctagggtgagagcggccatctcattaaactcagatccaaatcggta

SEQ ID NO: 21322 - DNA, 50 bp, unidentified
  source 1..50: mol_type = unassigned DNA; note = target_1589681
  misc_feature 1..23: note = LF
  misc_feature 24..25: note = Core
  misc_feature 26..50: note = RF
gcggggttgccatgagcgggacgctagctgggccgtgttgccggggcatc

SEQ ID NO: 21323 - DNA, 50 bp, unidentified
  source 1..50: mol_type = unassigned DNA; note = target_1592ec7
  misc_feature 1..24: note = LF
  misc_feature 25: note = Core
  misc_feature 26..50: note = RF
catgagagcatcctccatcaaaaaagggaggaaataaacatatgtcttta

SEQ ID NO: 21324 - DNA, 50 bp, unidentified
  source 1..50: mol_type = unassigned DNA; note = target_1593422
  misc_feature 1..23: note = LF
  misc_feature 24..25: note = Core
  misc_feature 26..50: note = RF
ttcgagtcaacggaaccccaggctggtataagactactcaaaagtcccat

SEQ ID NO: 21325 - DNA, 50 bp, unidentified
  source 1..50: mol_type = unassigned DNA; note = target_159bdb5
  misc_feature 1..23: note = LF
  misc_feature 24..25: note = Core
  misc_feature 26..50: note = RF
cggcgaaggtcgtcgtcttccaatggccgtgcggaacgcccgcccggcaa

SEQ ID NO: 21326 - DNA, 50 bp, unidentified
  source 1..50: mol_type = unassigned DNA; note = target_15a47dd
  misc_feature 1..24: note = LF
  misc_feature 25: note = Core
  misc_feature 26..50: note = RF
gtctcatgataagcttagcgtcctcgctaagcttgggttagttaaagcgt

SEQ ID NO: 21327 - DNA, 50 bp, unidentified
  source 1..50: mol_type = unassigned DNA; note = target_15ac9bd
  misc_feature 1..23: note = LF
  misc_feature 24..25: note = Core
  misc_feature 26..50: note = RF
tctcgtgttccgctccgcgcatgtgcaatctctattccgtcatgagcagc

SEQ ID NO: 21328 - DNA, 50 bp, unidentified
  source 1..50: mol_type = unassigned DNA; note = target_15b288d
  misc_feature 1..21: note = LF
  misc_feature 22..25: note = Core
  misc_feature 26..50: note = RF
tggcgaggttggtcatggtggttccttctcggtcggggggggccgggtgg

SEQ ID NO: 21329 - DNA, 50 bp, unidentified
  source 1..50: mol_type = unassigned DNA; note = target_15c38ef
  misc_feature 1..23: note = LF
  misc_feature 24..25: note = Core
  misc_feature 26..50: note = RF
acgcactggatgttcgctatgggtgggaaacggaggtaggccgacgaacc

SEQ ID NO: 21330 - DNA, 50 bp, unidentified
  source 1..50: mol_type = unassigned DNA; note = target_15cd353
  misc_feature 1..23: note = LF
  misc_feature 24..25: note = Core
  misc_feature 26..50: note = RF
accaagtcaaacgggacctaagctgccgttcgggcggatcaattaagggt

SEQ ID NO: 21331 - DNA, 50 bp, unidentified
  source 1..50: mol_type = unassigned DNA; note = target_15d0c10
  misc_feature 1..24: note = LF
  misc_feature 25: note = Core
  misc_feature 26..50: note = RF
ttgcaataccggatcggggaaatcgtacttctcgtgctgaaaatggcgct

SEQ ID NO: 21332 - DNA, 50 bp, unidentified
  source 1..50: mol_type = unassigned DNA; note = target_15df0ae
  misc_feature 1..20: note = LF
  misc_feature 21..25: note = Core
  misc_feature 26..50: note = RF
accaaaatgcgcatacaggcctccttgtgcagacatcgcctctcttaaca

SEQ ID NO: 21333 - DNA, 50 bp, unidentified
  source 1..50: mol_type = unassigned DNA; note = target_15e2113
  misc_feature 1..23: note = LF
  misc_feature 24..25: note = Core
  misc_feature 26..50: note = RF
gcagccattcgcgagcaggctcgctcccacagtcgttatgcgcctatctg

SEQ ID NO: 21334 - DNA, 50 bp, unidentified
  source 1..50: mol_type = unassigned DNA; note = target_15e56df
  misc_feature 1..21: note = LF
  misc_feature 22..25: note = Core
  misc_feature 26..50: note = RF
gatgtgaaaagcatctggcgtttttcatgcagaaaatcaggacaggagga

SEQ ID NO: 21335 - DNA, 50 bp, unidentified
  source 1..50: mol_type = unassigned DNA; note = target_15e84ad
  misc_feature 1..20: note = LF
  misc_feature 21..25: note = Core
  misc_feature 26..50: note = RF
tcagccacaccgaacggcaccccccccaccaagatcgcgataggaagcga

SEQ ID NO: 21336 - DNA, 50 bp, unidentified
  source 1..50: mol_type = unassigned DNA; note = target_15f3fcc
  misc_feature 1..23: note = LF
  misc_feature 24..25: note = Core
  misc_feature 26..50: note = RF
tcatcatattttaacttgtcctcctttcttatcttgtcataccactaaat

SEQ ID NO: 21337 - DNA, 50 bp, unidentified
  source 1..50: mol_type = unassigned DNA; note = target_15fc173
  misc_feature 1..23: note = LF
  misc_feature 24..25: note = Core
  misc_feature 26..50: note = RF
aaccggaagtgacttcgagggatccaacttcgcgacgaagcgcaaccgcg

SEQ ID NO: 21338 - DNA, 50 bp, unidentified
  source 1..50: mol_type = unassigned DNA; note = target_15ff9ca
  misc_feature 1..23: note = LF
  misc_feature 24..25: note = Core
  misc_feature 26..50: note = RF
tcggcgtgagcgactgctttgcagacaaagccgccgtcaacatgcttgcc

SEQ ID NO: 21339 - DNA, 50 bp, unidentified
  source 1..50: mol_type = unassigned DNA; note = target_1618b90
  misc_feature 1..23: note = LF
  misc_feature 24..25: note = Core
  misc_feature 26..50: note = RF
ttttcaacagtatccgccagtagcggacattgatctggcatcgcaatgtc

SEQ ID NO: 21340 - DNA, 50 bp, unidentified
  source 1..50: mol_type = unassigned DNA; note = target_1619f4c
  misc_feature 1..22: note = LF
  misc_feature 23..25: note = Core
  misc_feature 26..50: note = RF
aaccgttaagccggaaacaacgtgacaatgcccaactgcgacttacagtg

SEQ ID NO: 21341 - DNA, 50 bp, unidentified
  source 1..50: mol_type = unassigned DNA; note = target_1621dab
  misc_feature 1..23: note = LF
  misc_feature 24..25: note = Core
  misc_feature 26..50: note = RF
aagaaccgctgccctggcagcggtttttatggcgcgagatttgtgttggc

SEQ ID NO: 21342 - DNA, 50 bp, unidentified
  source 1..50: mol_type = unassigned DNA; note = target_162cfa0
  misc_feature 1..24: note = LF
  misc_feature 25: note = Core
  misc_feature 26..50: note = RF
ccaagtggccaggcgctggcacctttttcgagacgccagccggcatagag

SEQ ID NO: 21343 - DNA, 50 bp, unidentified
  source 1..50: mol_type = unassigned DNA; note = target_162dc96
  misc_feature 1..24: note = LF
  misc_feature 25: note = Core
  misc_feature 26..50: note = RF
atcctctaatcttcaaatcttacgaatcatggttcagacaactataaaaa

SEQ ID NO: 21344 - DNA, 50 bp, unidentified
  source 1..50: mol_type = unassigned DNA; note = target_1633490
  misc_feature 1..23: note = LF
  misc_feature 24..25: note = Core
  misc_feature 26..50: note = RF
ccatggtcaaaactggataaagcagagcttccctaatggcgctgtctgct

SEQ ID NO: 21345 - DNA, 50 bp, unidentified
  source 1..50: mol_type = unassigned DNA; note = target_163b31a
  misc_feature 1..24: note = LF
  misc_feature 25: note = Core
  misc_feature 26..50: note = RF
ttcccacaggtgccggtgcgccagtgggtcgtgacgttcccgaagcggct

SEQ ID NO: 21346 - DNA, 50 bp, unidentified
  source 1..50: mol_type = unassigned DNA; note = target_1645d67
  misc_feature 1..23: note = LF
  misc_feature 24..25: note = Core
  misc_feature 26..50: note = RF
aaccgtgccgaataaattggcacctacaaggtcaaaataccaaactgagc

SEQ ID NO: 21347 - DNA, 50 bp, unidentified
  source 1..50: mol_type = unassigned DNA; note = target_1647d14
  misc_feature 1..24: note = LF
  misc_feature 25: note = Core
  misc_feature 26..50: note = RF
ccttgatcgttagcacgacggttctggtgcaaattacggatgaaccggcg

SEQ ID NO: 21348 - DNA, 50 bp, unidentified
  source 1..50: mol_type = unassigned DNA; note = target_16500c0
  misc_feature 1..23: note = LF
  misc_feature 24..25: note = Core
  misc_feature 26..50: note = RF
attattgatgacatgaacgtaagcgcctcatttgaatcgtctggtctgtt

SEQ ID NO: 21349 - DNA, 50 bp, unidentified
  source 1..50: mol_type = unassigned DNA; note = target_165187c
  misc_feature 1..20: note = LF
  misc_feature 21..25: note = Core
  misc_feature 26..50: note = RF
ttgactttgctcatggcgcgctcctttctggcgggtgcttgttgggtgag

SEQ ID NO: 21350 - DNA, 50 bp, unidentified
  source 1..50: mol_type = unassigned DNA; note = target_165c4cb
  misc_feature 1..23: note = LF
  misc_feature 24..25: note = Core
  misc_feature 26..50: note = RF
gccaatgtccgcttttggtggaaagcggacattagcgtagagcctgaacg

SEQ ID NO: 21351 - DNA, 50 bp, unidentified
  source 1..50: mol_type = unassigned DNA; note = target_1662f3c
  misc_feature 1..22: note = LF
  misc_feature 23..25: note = Core
  misc_feature 26..50: note = RF
ttcttttatttgttttcatggttcacctcctcagaaacttctaagctcat

SEQ ID NO: 21352 - DNA, 50 bp, unidentified
  source 1..50: mol_type = unassigned DNA; note = target_166334c
  misc_feature 1..24: note = LF
  misc_feature 25: note = Core
  misc_feature 26..50: note = RF
tttctgccactgccgcggggaagttttttaatcgcctcaatggcttgggg

SEQ ID NO: 21353 - DNA, 50 bp, unidentified
  source 1..50: mol_type = unassigned DNA; note = target_1664766
  misc_feature 1..23: note = LF
  misc_feature 24..25: note = Core
  misc_feature 26..50: note = RF
tcatctgtaaatgccatcatttcctccttagaacagtccgctgatctttc

SEQ ID NO: 21354 - DNA, 50 bp, unidentified
  source 1..50: mol_type = unassigned DNA; note = target_1664818
  misc_feature 1..23: note = LF
  misc_feature 24..25: note = Core
  misc_feature 26..50: note = RF
tccccgaagcgatggttcaaacatgcatcgtccatctgctgcggaactcg

SEQ ID NO: 21355 - DNA, 50 bp, unidentified
  source 1..50: mol_type = unassigned DNA; note = target_166907f
  misc_feature 1..24: note = LF
  misc_feature 25: note = Core
  misc_feature 26..50: note = RF
tataattgcgcagacctgaccggccaggcagggacgtctacttgtccgcc

SEQ ID NO: 21356 - DNA, 50 bp, unidentified
  source 1..50: mol_type = unassigned DNA; note = target_1674312
  misc_feature 1..22: note = LF
  misc_feature 23..25: note = Core
  misc_feature 26..50: note = RF
tttttctgctgtttcattatcatcatctccattcaaaatattgctgcgtg

SEQ ID NO: 21357 - DNA, 50 bp, unidentified
  source 1..50: mol_type = unassigned DNA; note = target_16761d3
  misc_feature 1..24: note = LF
  misc_feature 25: note = Core
  misc_feature 26..50: note = RF
gcgagcctgatagcaacagttgacttccggtttgtccgtgacttgccaat

SEQ ID NO: 21358 - DNA, 50 bp, unidentified
  source 1..50: mol_type = unassigned DNA; note = target_16782f5
  misc_feature 1..23: note = LF
  misc_feature 24..25: note = Core
  misc_feature 26..50: note = RF
gccaaaatcacgaagtcttcttcagagtttccctagcacgatgaatatta

SEQ ID NO: 21359 - DNA, 50 bp, unidentified
  source 1..50: mol_type = unassigned DNA; note = target_1678df7
  misc_feature 1..23: note = LF
  misc_feature 24..25: note = Core
  misc_feature 26..50: note = RF
ggactggcaccgttctctggtgcctgtacccattcagcatcatctcatcc

SEQ ID NO: 21360 - DNA, 50 bp, unidentified
  source 1..50: mol_type = unassigned DNA; note = target_168784a
  misc_feature 1..23: note = LF
  misc_feature 24..25: note = Core
  misc_feature 26..50: note = RF
cgaaacgcatgcatcgtaagcggcttatgatgcgatatcgttacgccgcg

SEQ ID NO: 21361 - DNA, 50 bp, unidentified
  source 1..50: mol_type = unassigned DNA; note = target_1694f91
  misc_feature 1..23: note = LF
  misc_feature 24..25: note = Core
  misc_feature 26..50: note = RF
ccgcaagagaaaatcaatactcacacaaaatttatcctaatatgaaatgg

SEQ ID NO: 21362 - DNA, 50 bp, unidentified
  source 1..50: mol_type = unassigned DNA; note = target_1695f6f
  misc_feature 1..23: note = LF
  misc_feature 24..25: note = Core
  misc_feature 26..50: note = RF
gagaaagtcaggttcttgagttcctttcacgtaatgaagtctgatatcgc

SEQ ID NO: 21363 - DNA, 50 bp, unidentified
  source 1..50: mol_type = unassigned DNA; note = target_169fdd6
  misc_feature 1..21: note = LF
  misc_feature 22..25: note = Core
  misc_feature 26..50: note = RF
tcggggcccgtgtcggcgccggtcatcgctcttcctcggggctcgaggct

SEQ ID NO: 21364 - DNA, 50 bp, unidentified
  source 1..50: mol_type = unassigned DNA; note = target_16a2653
  misc_feature 1..22: note = LF
  misc_feature 23..25: note = Core
  misc_feature 26..50: note = RF
gtactaaatagcggtcggaacaagagcagtgcgaaatcgtaccctaaggg

SEQ ID NO: 21365 - DNA, 50 bp, unidentified
  source 1..50: mol_type = unassigned DNA; note = target_16a2bef
  misc_feature 1..23: note = LF
  misc_feature 24..25: note = Core
  misc_feature 26..50: note = RF
cggcatccgcattgtcactttcgaggcctgctcaggcttcactcgcgtta

SEQ ID NO: 21366 - DNA, 50 bp, unidentified
  source 1..50: mol_type = unassigned DNA; note = target_16a778d
  misc_feature 1..23: note = LF
  misc_feature 24..25: note = Core
  misc_feature 26..50: note = RF
gacctgatcggcggacttccatcagggccagcggtcagatgaccgcacca

SEQ ID NO: 21367 - DNA, 50 bp, unidentified
  source 1..50: mol_type = unassigned DNA; note = target_16aacc0
  misc_feature 1..23: note = LF
  misc_feature 24..25: note = Core
  misc_feature 26..50: note = RF
catgtctttggtggctattgacctgccactgcgaatttccttcaggatgg

SEQ ID NO: 21368 - DNA, 50 bp, unidentified
  source 1..50: mol_type = unassigned DNA; note = target_16be2e2
  misc_feature 1..23: note = LF
  misc_feature 24..25: note = Core
  misc_feature 26..50: note = RF
aaaagacactacatatcccctgcctttctggttttgggcgcaaaaaaagc

SEQ ID NO: 21369 - DNA, 50 bp, unidentified
  source 1..50: mol_type = unassigned DNA; note = target_16c137b
  misc_feature 1..23: note = LF
  misc_feature 24..25: note = Core
  misc_feature 26..50: note = RF
gcctccgtgtccgttattggtctagctgccgccccggacggcagcaggcc

SEQ ID NO: 21370 - DNA, 50 bp, unidentified
  source 1..50: mol_type = unassigned DNA; note = target_16c2f82
  misc_feature 1..24: note = LF
  misc_feature 25: note = Core
  misc_feature 26..50: note = RF
cacaaccgctattttttatatacgttgttggcaactggcttttattcatt

SEQ ID NO: 21371 - DNA, 50 bp, unidentified
  source 1..50: mol_type = unassigned DNA; note = target_16c8a5a
  misc_feature 1..23: note = LF
  misc_feature 24..25: note = Core
  misc_feature 26..50: note = RF
ggcggagggcgcagaacgacctcctgggatttggccttggacgacaggat

SEQ ID NO: 21372 - DNA, 50 bp, unidentified
  source 1..50: mol_type = unassigned DNA; note = target_16cf76b
  misc_feature 1..24: note = LF
  misc_feature 25: note = Core
  misc_feature 26..50: note = RF
catacacacagcgacaatgtctgctttgggtcatgtgtggacggcgcctt

SEQ ID NO: 21373 - DNA, 50 bp, unidentified
  source 1..50: mol_type = unassigned DNA; note = target_16d868b
  misc_feature 1..22: note = LF
  misc_feature 23..25: note = Core
  misc_feature 26..50: note = RF
cctaattctctgtatttcattgtaatacctccaccttgcaattatgttgt

SEQ ID NO: 21374 - DNA, 50 bp, unidentified
  source 1..50: mol_type = unassigned DNA; note = target_16d951b
  misc_feature 1..23: note = LF
  misc_feature 24..25: note = Core
  misc_feature 26..50: note = RF
tgcaatgtccgcttttggcccaaagcagacatgccgaaaaacgcgatcga

SEQ ID NO: 21375 - DNA, 50 bp, unidentified
  source 1..50: mol_type = unassigned DNA; note = target_16d9c88
  misc_feature 1..23: note = LF
  misc_feature 24..25: note = Core
  misc_feature 26..50: note = RF
gccgggacgccgtcggctgcaagcggtgttaggttaggcagctactcaac

SEQ ID NO: 21376 - DNA, 50 bp, unidentified
  source 1..50: mol_type = unassigned DNA; note = target_16e8fe9
  misc_feature 1..22: note = LF
  misc_feature 23..25: note = Core
  misc_feature 26..50: note = RF
cgagggttccaaccgtctttgcccccacccggcagcctacaaaactcttt

SEQ ID NO: 21377 - DNA, 50 bp, unidentified
  source 1..50: mol_type = unassigned DNA; note = target_16edf85
  misc_feature 1..24: note = LF
  misc_feature 25: note = Core
  misc_feature 26..50: note = RF
ttttaactgtgttgacctctgtcgcgactcagccaaacatgcaagcatga

SEQ ID NO: 21378 - DNA, 50 bp, unidentified
  source 1..50: mol_type = unassigned DNA; note = target_16f7998
  misc_feature 1..23: note = LF
  misc_feature 24..25: note = Core
  misc_feature 26..50: note = RF
taagatcgtactacaatgtgcccccaagcgtcgggtcggtagaccttccc

SEQ ID NO: 21379 - DNA, 50 bp, unidentified
  source 1..50: mol_type = unassigned DNA; note = target_1700337
  misc_feature 1..23: note = LF
  misc_feature 24..25: note = Core
  misc_feature 26..50: note = RF
atggcgacgagcccaccgtggaaagctgacattcggacaggcgcgagaat

SEQ ID NO: 21380 - DNA, 50 bp, unidentified
  source 1..50: mol_type = unassigned DNA; note = target_170469d
  misc_feature 1..19: note = LF
  misc_feature 20..25: note = Core
  misc_feature 26..50: note = RF
gagcaaggagtgtccctgggtgccgcttaaataccgtttatcggagaaaa

SEQ ID NO: 21381 - DNA, 50 bp, unidentified
  source 1..50: mol_type = unassigned DNA; note = target_170d925
  misc_feature 1..24: note = LF
  misc_feature 25: note = Core
  misc_feature 26..50: note = RF
accaaacccttgacgaaggggcgccgtccagacatgccgttcccgacagc

SEQ ID NO: 21382 - DNA, 50 bp, unidentified
  source 1..50: mol_type = unassigned DNA; note = target_1714965
  misc_feature 1..23: note = LF
  misc_feature 24..25: note = Core
  misc_feature 26..50: note = RF
ccatcaatacctggtcctatagaaggaagttcggtctgagaagttctaat

SEQ ID NO: 21383 - DNA, 50 bp, unidentified
  source 1..50: mol_type = unassigned DNA; note = target_171b8a0
  misc_feature 1..23: note = LF
  misc_feature 24..25: note = Core
  misc_feature 26..50: note = RF
tcagaatggccggttggccccagaggttcgcccgcagtcgcgttccctcc

SEQ ID NO: 21384 - DNA, 50 bp, unidentified
  source 1..50: mol_type = unassigned DNA; note = target_171ce46
  misc_feature 1..22: note = LF
  misc_feature 23..25: note = Core
  misc_feature 26..50: note = RF
tggagactggttcgcattagcctgacagcacccatgtgtcccttgtcctc

SEQ ID NO: 21385 - DNA, 50 bp, unidentified
  source 1..50: mol_type = unassigned DNA; note = target_171f8a0
  misc_feature 1..23: note = LF
  misc_feature 24..25: note = Core
  misc_feature 26..50: note = RF
taacacccgggattatgcgctgcctcaaacgacaggtttgccggcttgaa

SEQ ID NO: 21386 - DNA, 50 bp, unidentified
  source 1..50: mol_type = unassigned DNA; note = target_1724235
  misc_feature 1..23: note = LF
  misc_feature 24..25: note = Core
  misc_feature 26..50: note = RF
gtccattccatgtaaacatggggtctggcctgagtaattgacttattcgc

SEQ ID NO: 21387 - DNA, 50 bp, unidentified
  source 1..50: mol_type = unassigned DNA; note = target_172e9cf
  misc_feature 1..23: note = LF
  misc_feature 24..25: note = Core
  misc_feature 26..50: note = RF
ccttataggctgttgaagctggctgactttcaggcgtaatcaggagaggt

SEQ ID NO: 21388 - DNA, 50 bp, unidentified
  source 1..50: mol_type = unassigned DNA; note = target_174074f
  misc_feature 1..24: note = LF
  misc_feature 25: note = Core
  misc_feature 26..50: note = RF
ttcgctggatcgttaaacgtccgctcagggtcaaatcaggaaatcgcctg

SEQ ID NO: 21389 - DNA, 50 bp, unidentified
  source 1..50: mol_type = unassigned DNA; note = target_17569f7
  misc_feature 1..23: note = LF
  misc_feature 24..25: note = Core
  misc_feature 26..50: note = RF
tactgggatttcatgacggggcctttcaggaggatgactcaaaaaggccg

SEQ ID NO: 21390 - DNA, 50 bp, unidentified
  source 1..50: mol_type = unassigned DNA; note = target_175a0e4
  misc_feature 1..24: note = LF
  misc_feature 25: note = Core
  misc_feature 26..50: note = RF
tcgcccaagaccgaacccgtagcccggatggaacgcagtggaatccggga

SEQ ID NO: 21391 - DNA, 50 bp, unidentified
  source 1..50: mol_type = unassigned DNA; note = target_176a64d
  misc_feature 1..23: note = LF
  misc_feature 24..25: note = Core
  misc_feature 26..50: note = RF
ctaatcgcggtctgagaccgctcctacaaaatcaaacccaatggtaatct

SEQ ID NO: 21392 - DNA, 50 bp, unidentified
  source 1..50: mol_type = unassigned DNA; note = target_176febc
  misc_feature 1..24: note = LF
  misc_feature 25: note = Core
  misc_feature 26..50: note = RF
tgctccagtgcatgtgcggacttttttttgaacgtccagccgcgcttgcc

SEQ ID NO: 21393 - DNA, 50 bp, unidentified
  source 1..50: mol_type = unassigned DNA; note = target_17773e5
  misc_feature 1..23: note = LF
  misc_feature 24..25: note = Core
  misc_feature 26..50: note = RF
aggagtcaagcagccaccaccgacactcaccgccggctcggatccggctg

SEQ ID NO: 21394 - DNA, 50 bp, unidentified
  source 1..50: mol_type = unassigned DNA; note = target_177fbd6
  misc_feature 1..23: note = LF
  misc_feature 24..25: note = Core
  misc_feature 26..50: note = RF
gagctgaccaagccggtcaaacttcgctgagacgggtcagccaggtttcg

SEQ ID NO: 21395 - DNA, 50 bp, unidentified
  source 1..50: mol_type = unassigned DNA; note = target_1781545
  misc_feature 1..24: note = LF
  misc_feature 25: note = Core
  misc_feature 26..50: note = RF
taaccaaattagctaaaacaaaacacaggtcgccaaagacaaattcatta

SEQ ID NO: 21396 - DNA, 50 bp, unidentified
  source 1..50: mol_type = unassigned DNA; note = target_178db32
  misc_feature 1..24: note = LF
  misc_feature 25: note = Core
  misc_feature 26..50: note = RF
gctcgaagacattcttaacgtaagcgttcattccaggactgcgtaaaccg

SEQ ID NO: 21397 - DNA, 50 bp, unidentified
  source 1..50: mol_type = unassigned DNA; note = target_17912cd
  misc_feature 1..23: note = LF
  misc_feature 24..25: note = Core
  misc_feature 26..50: note = RF
aaaacgcatggaatcgctccctcctttatttgtgatgatattctattttt

SEQ ID NO: 21398 - DNA, 50 bp, unidentified
  source 1..50: mol_type = unassigned DNA; note = target_1792e12
  misc_feature 1..23: note = LF
  misc_feature 24..25: note = Core
  misc_feature 26..50: note = RF
atgtccgcaatgggtggaaagcagacattagcctcttagctgcaggaagg

SEQ ID NO: 21399 - DNA, 50 bp, unidentified
  source 1..50: mol_type = unassigned DNA; note = target_1796245
  misc_feature 1..22: note = LF
  misc_feature 23..25: note = Core
  misc_feature 26..50: note = RF
tttccgcatgtctttatcgcaaaaccgctgctcacttttgcgagacatgc

SEQ ID NO: 21400 - DNA, 50 bp, unidentified
  source 1..50: mol_type = unassigned DNA; note = target_17a24c3
  misc_feature 1..20: note = LF
  misc_feature 21..25: note = Core
  misc_feature 26..50: note = RF
cgccgtccgggagacggtcgctcacaggcctgacttcccggcctcgccca

SEQ ID NO: 21401 - DNA, 50 bp, unidentified
  source 1..50: mol_type = unassigned DNA; note = target_17ac832
  misc_feature 1..24: note = LF
  misc_feature 25: note = Core
  misc_feature 26..50: note = RF
gcaaaataacaccttgtgagttaaccggaggcaagtttattatacatata

SEQ ID NO: 21402 - DNA, 50 bp, unidentified
  source 1..50: mol_type = unassigned DNA; note = target_17aeb3f
  misc_feature 1..23: note = LF
  misc_feature 24..25: note = Core
  misc_feature 26..50: note = RF
agggctggggtcagaggttggggtcaggcatgcttaattgatctttatgg

SEQ ID NO: 21403 - DNA, 50 bp, unidentified
  source 1..50: mol_type = unassigned DNA; note = target_17b9f06
  misc_feature 1..23: note = LF
  misc_feature 24..25: note = Core
  misc_feature 26..50: note = RF
aaacggcttcatcactcgtcctcctcgtcatcttcatcggtgcagcagct

SEQ ID NO: 21404 - DNA, 50 bp, unidentified
  source 1..50: mol_type = unassigned DNA; note = target_17bd441
  misc_feature 1..23: note = LF
  misc_feature 24..25: note = Core
  misc_feature 26..50: note = RF
gtatccggcctcttatctgcctcctttacatatccggtatctaaatagag

SEQ ID NO: 21405 - DNA, 50 bp, unidentified
  source 1..50: mol_type = unassigned DNA; note = target_17bf5a0
  misc_feature 1..24: note = LF
  misc_feature 25: note = Core
  misc_feature 26..50: note = RF
aatctcggccacatgtcatctaacgtcctggaagtccttatagtccttat

SEQ ID NO: 21406 - DNA, 50 bp, unidentified
  source 1..50: mol_type = unassigned DNA; note = target_17d8d1a
  misc_feature 1..24: note = LF
  misc_feature 25: note = Core
  misc_feature 26..50: note = RF
aaccgagcgtggttgatatacaaatgttaaggctcagaatggaaattcga

SEQ ID NO: 21407 - DNA, 50 bp, unidentified
  source 1..50: mol_type = unassigned DNA; note = target_17d9073
  misc_feature 1..23: note = LF
  misc_feature 24..25: note = Core
  misc_feature 26..50: note = RF
tgaaactttacttaaaaggtaagcgtcacatccacaccgtcttccatttc

SEQ ID NO: 21408 - DNA, 50 bp, unidentified
  source 1..50: mol_type = unassigned DNA; note = target_17da502
  misc_feature 1..23: note = LF
  misc_feature 24..25: note = Core
  misc_feature 26..50: note = RF
atccagaaggttgggggtccggtagcaacggaaccgaaactgcatttcaa

SEQ ID NO: 21409 - DNA, 50 bp, unidentified
  source 1..50: mol_type = unassigned DNA; note = target_17e017a
  misc_feature 1..23: note = LF
  misc_feature 24..25: note = Core
  misc_feature 26..50: note = RF
ctcacttttccacctcttccttcctgaaagtgtgatttttgagttttccc

SEQ ID NO: 21410 - DNA, 50 bp, unidentified
  source 1..50: mol_type = unassigned DNA; note = target_17e7f82
  misc_feature 1..24: note = LF
  misc_feature 25: note = Core
  misc_feature 26..50: note = RF
caaatgggtcaacagcgttgagcttgcaggtctctatcagggaggcgatg

SEQ ID NO: 21411 - DNA, 50 bp, unidentified
  source 1..50: mol_type = unassigned DNA; note = target_17f6ef4
  misc_feature 1..23: note = LF
  misc_feature 24..25: note = Core
  misc_feature 26..50: note = RF
atctttatcatcatctcacctcgctttccgcaggtactatattcgctctg

SEQ ID NO: 21412 - DNA, 50 bp, unidentified
  source 1..50: mol_type = unassigned DNA; note = target_17f717d
  misc_feature 1..23: note = LF
  misc_feature 24..25: note = Core
  misc_feature 26..50: note = RF
cgggaacgcatcatcagcgctgttgggttcacaagacggctaacgtcctg

SEQ ID NO: 21413 - DNA, 50 bp, unidentified
  source 1..50: mol_type = unassigned DNA; note = target_17f81c0
  misc_feature 1..23: note = LF
  misc_feature 24..25: note = Core
  misc_feature 26..50: note = RF
atcttgtgaaacgggatgatgtctgaatctgtgggttaccatgattcaga

SEQ ID NO: 21414 - DNA, 50 bp, unidentified
  source 1..50: mol_type = unassigned DNA; note = target_17fbc0e
  misc_feature 1..23: note = LF
  misc_feature 24..25: note = Core
  misc_feature 26..50: note = RF
acgcctggtgttcatttgtgctcctttctttttcatccgccttggtttat

SEQ ID NO: 21415 - DNA, 50 bp, unidentified
  source 1..50: mol_type = unassigned DNA; note = target_1801629
  misc_feature 1..23: note = LF
  misc_feature 24..25: note = Core
  misc_feature 26..50: note = RF
tccataaccccgggcagtggttatggattccgggctccctcgctacgctc

SEQ ID NO: 21416 - DNA, 50 bp, unidentified
  source 1..50: mol_type = unassigned DNA; note = target_1801d83
  misc_feature 1..23: note = LF
  misc_feature 24..25: note = Core
  misc_feature 26..50: note = RF
gtggctttcgagggtcatgcgcttctcctgattggttgagtggccgacca

SEQ ID NO: 21417 - DNA, 50 bp, unidentified
  source 1..50: mol_type = unassigned DNA; note = target_18020d6
  misc_feature 1..19: note = LF
  misc_feature 20..25: note = Core
  misc_feature 26..50: note = RF
ggcggtggtcatgggaggcgtcctttctgtaggtcgtcggttcttcactg

SEQ ID NO: 21418 - DNA, 50 bp, unidentified
  source 1..50: mol_type = unassigned DNA; note = target_180757b
  misc_feature 1..23: note = LF
  misc_feature 24..25: note = Core
  misc_feature 26..50: note = RF
caagcctattatcgcggccatgggctcctacagcgagtgatgattttgta

SEQ ID NO: 21419 - DNA, 50 bp, unidentified
  source 1..50: mol_type = unassigned DNA; note = target_1808287
  misc_feature 1..22: note = LF
  misc_feature 23..25: note = Core
  misc_feature 26..50: note = RF
tgatccatcctcccgaacagagtgaatcatcaaacgatacgcaagggaat

SEQ ID NO: 21420 - DNA, 50 bp, unidentified
  source 1..50: mol_type = unassigned DNA; note = target_180b40e
  misc_feature 1..23: note = LF
  misc_feature 24..25: note = Core
  misc_feature 26..50: note = RF
gtgctgtcagacgttggggccggctagcctgcgggaggcttcaccgcgct

SEQ ID NO: 21421 - DNA, 50 bp, unidentified
  source 1..50: mol_type = unassigned DNA; note = target_1813a6e
  misc_feature 1..24: note = LF
  misc_feature 25: note = Core
  misc_feature 26..50: note = RF
tgcacacaaacacgctctcagcggctacttggcattggcgtcagggccag

SEQ ID NO: 21422 - DNA, 50 bp, unidentified
  source 1..50: mol_type = unassigned DNA; note = target_181dc08
  misc_feature 1..23: note = LF
  misc_feature 24..25: note = Core
  misc_feature 26..50: note = RF
caggactgcaacagcctgtgtgctagatttgtgctagaagttgtcagaat

SEQ ID NO: 21423 - DNA, 50 bp, unidentified
  source 1..50: mol_type = unassigned DNA; note = target_1820274
  misc_feature 1..22: note = LF
  misc_feature 23..25: note = Core
  misc_feature 26..50: note = RF
aactttgcgtaaatcttagcgttctttgcggttaaattcgtcgcggttag

SEQ ID NO: 21424 - DNA, 50 bp, unidentified
  source 1..50: mol_type = unassigned DNA; note = target_1824463
  misc_feature 1..22: note = LF
  misc_feature 23..25: note = Core
  misc_feature 26..50: note = RF
gacgctgcaaatcggtcgttcatgacccagagcggtcatcgcggcggctt

SEQ ID NO: 21425 - DNA, 50 bp, unidentified
  source 1..50: mol_type = unassigned DNA; note = target_1829bde
  misc_feature 1..22: note = LF
  misc_feature 23..25: note = Core
  misc_feature 26..50: note = RF
gatgttggtttccacgcagaactgagccggttaggcgcataatttccatt

SEQ ID NO: 21426 - DNA, 50 bp, unidentified
  source 1..50: mol_type = unassigned DNA; note = target_1832472
  misc_feature 1..23: note = LF
  misc_feature 24..25: note = Core
  misc_feature 26..50: note = RF
gcttgttggaagaaaccggggtcccgggtctgcagcgcatcacttcgtgc

SEQ ID NO: 21427 - DNA, 50 bp, unidentified
  source 1..50: mol_type = unassigned DNA; note = target_183ad02
  misc_feature 1..24: note = LF
  misc_feature 25: note = Core
  misc_feature 26..50: note = RF
gaccgaacttgccgaaaggccgactttccgggagtgcgcttgttacgata

SEQ ID NO: 21428 - DNA, 50 bp, unidentified
  source 1..50: mol_type = unassigned DNA; note = target_183ed6e
  misc_feature 1..24: note = LF
  misc_feature 25: note = Core
  misc_feature 26..50: note = RF
tttcgaggcaacggttggcctgaccccttgcatgccatatacggacctgc

SEQ ID NO: 21429 - DNA, 50 bp, unidentified
  source 1..50: mol_type = unassigned DNA; note = target_1844399
  misc_feature 1..24: note = LF
  misc_feature 25: note = Core
  misc_feature 26..50: note = RF
tcgctcggccgcagatccccccttttttgcggcacctgccgctttctggt

SEQ ID NO: 21430 - DNA, 50 bp, unidentified
  source 1..50: mol_type = unassigned DNA; note = target_1849135
  misc_feature 1..23: note = LF
  misc_feature 24..25: note = Core
  misc_feature 26..50: note = RF
gggcacccggctttccctgcgccctctcttgaggggcgcctgccctctcg

SEQ ID NO: 21431 - DNA, 50 bp, unidentified
  source 1..50: mol_type = unassigned DNA; note = target_1849e95
  misc_feature 1..24: note = LF
  misc_feature 25: note = Core
  misc_feature 26..50: note = RF
ctggccgagcacttcgatggtttttctttgctggtagtcataaacacagt

SEQ ID NO: 21432 - DNA, 50 bp, unidentified
  source 1..50: mol_type = unassigned DNA; note = target_184fe4a
  misc_feature 1..24: note = LF
  misc_feature 25: note = Core
  misc_feature 26..50: note = RF
aaaaagctcatatcttcaatccctcttactcatagcgtttgctttttgcc

SEQ ID NO: 21433 - DNA, 50 bp, unidentified
  source 1..50: mol_type = unassigned DNA; note = target_1860e04
  misc_feature 1..23: note = LF
  misc_feature 24..25: note = Core
  misc_feature 26..50: note = RF
ttttctttggttttgatcatctcctatcgttcatggttttggcggttctg

SEQ ID NO: 21434 - DNA, 50 bp, unidentified
  source 1..50: mol_type = unassigned DNA; note = target_186877e
  misc_feature 1..23: note = LF
  misc_feature 24..25: note = Core
  misc_feature 26..50: note = RF
tcatccatgattttccaaacaggctcttagcagcagacacaaaacacgac

SEQ ID NO: 21435 - DNA, 50 bp, unidentified
  source 1..50: mol_type = unassigned DNA; note = target_186a74e
  misc_feature 1..23: note = LF
  misc_feature 24..25: note = Core
  misc_feature 26..50: note = RF
gggcacgtaccgggttagagccgctaacacaacccagcaaatcgaagatt

SEQ ID NO: 21436 - DNA, 50 bp, unidentified
  source 1..50: mol_type = unassigned DNA; note = target_186ebc5
  misc_feature 1..23: note = LF
  misc_feature 24..25: note = Core
  misc_feature 26..50: note = RF
aaagacgactgacaaaaaaatttcttaagaatatgtctaatttttgggcc

SEQ ID NO: 21437 - DNA, 50 bp, unidentified
  source 1..50: mol_type = unassigned DNA; note = target_187539f
  misc_feature 1..22: note = LF
  misc_feature 23..25: note = Core
  misc_feature 26..50: note = RF
ggcaaagcatcccccaccccgtcattgcgagaagcgatagcgacgaagca

SEQ ID NO: 21438 - DNA, 50 bp, unidentified
  source 1..50: mol_type = unassigned DNA; note = target_18762e6
  misc_feature 1..22: note = LF
  misc_feature 23..25: note = Core
  misc_feature 26..50: note = RF
ttttaaacagatctaaaataagaaatgagggtgtgacaaacacccatggc

SEQ ID NO: 21439 - DNA, 50 bp, unidentified
  source 1..50: mol_type = unassigned DNA; note = target_18773ba
  misc_feature 1..22: note = LF
  misc_feature 23..25: note = Core
  misc_feature 26..50: note = RF
ggggtcttccccgtggggcttttctcatgcgcggaaacagaggaaagcta

SEQ ID NO: 21440 - DNA, 50 bp, unidentified
  source 1..50: mol_type = unassigned DNA; note = target_18832ec
  misc_feature 1..23: note = LF
  misc_feature 24..25: note = Core
  misc_feature 26..50: note = RF
gcgattctgctctagtgtcgcctagcattacagttgcgtaattaggcggt

SEQ ID NO: 21441 - DNA, 50 bp, unidentified
  source 1..50: mol_type = unassigned DNA; note = target_18854b4
  misc_feature 1..24: note = LF
  misc_feature 25: note = Core
  misc_feature 26..50: note = RF
ccactagttgcaaactagcggcagcggggcagcgggggttgttttaatgg

SEQ ID NO: 21442 - DNA, 50 bp, unidentified
  source 1..50: mol_type = unassigned DNA; note = target_188a338
  misc_feature 1..23: note = LF
  misc_feature 24..25: note = Core
  misc_feature 26..50: note = RF
tatctgtctaacattttatgctcctttcacagtcttcaacagattcgtaa

SEQ ID NO: 21443 - DNA, 50 bp, unidentified
  source 1..50: mol_type = unassigned DNA; note = target_188b65d
  misc_feature 1..24: note = LF
  misc_feature 25: note = Core
  misc_feature 26..50: note = RF
gagccacggcatcaataccgtaaccgtctggccaagtcgtctggcttgaa

SEQ ID NO: 21444 - DNA, 50 bp, unidentified
  source 1..50: mol_type = unassigned DNA; note = target_188df72
  misc_feature 1..23: note = LF
  misc_feature 24..25: note = Core
  misc_feature 26..50: note = RF
ttgggtcgagctatgctggaaaatgggtgacggggtttgagaaggcggcg

SEQ ID NO: 21445 - DNA, 50 bp, unidentified
  source 1..50: mol_type = unassigned DNA; note = target_189363c
  misc_feature 1..24: note = LF
  misc_feature 25: note = Core
  misc_feature 26..50: note = RF
ccagatcggcggccccggcccgcgcgggagcatgcgatccgcaccccagc

SEQ ID NO: 21446 - DNA, 50 bp, unidentified
  source 1..50: mol_type = unassigned DNA; note = target_1896d27
  misc_feature 1..21: note = LF
  misc_feature 22..25: note = Core
  misc_feature 26..50: note = RF
ctatcatctttattatattatatcattaaattataaaatttcataacttt

SEQ ID NO: 21447 - DNA, 50 bp, unidentified
  source 1..50: mol_type = unassigned DNA; note = target_189a07a
  misc_feature 1..24: note = LF
  misc_feature 25: note = Core
  misc_feature 26..50: note = RF
ttgaagtccgcaatcggccagaagcagactttagtttgtaaatgaaatca

SEQ ID NO: 21448 - DNA, 50 bp, unidentified
  source 1..50: mol_type = unassigned DNA; note = target_189d446
  misc_feature 1..23: note = LF
  misc_feature 24..25: note = Core
  misc_feature 26..50: note = RF
gtgcctgactgtctcctcttggttggcgcgctgcagcctgacgaagtcag

SEQ ID NO: 21449 - DNA, 50 bp, unidentified
  source 1..50: mol_type = unassigned DNA; note = target_18a0108
  misc_feature 1..23: note = LF
  misc_feature 24..25: note = Core
  misc_feature 26..50: note = RF
cgcttacccacatatccatcatgaggaagactggagacctttaggattta

SEQ ID NO: 21450 - DNA, 50 bp, unidentified
  source 1..50: mol_type = unassigned DNA; note = target_18a10f6
  misc_feature 1..24: note = LF
  misc_feature 25: note = Core
  misc_feature 26..50: note = RF
aaacgcgcatgcgtgatattaaaatgttaggtaaatcggagaaaaaatga

SEQ ID NO: 21451 - DNA, 50 bp, unidentified
  source 1..50: mol_type = unassigned DNA; note = target_18ae8b2
  misc_feature 1..23: note = LF
  misc_feature 24..25: note = Core
  misc_feature 26..50: note = RF
cttgggacaatggcggttgcggcaggagttataggcgatgagcgtgtgcc

SEQ ID NO: 21452 - DNA, 50 bp, unidentified
  source 1..50: mol_type = unassigned DNA; note = target_18b4efd
  misc_feature 1..22: note = LF
  misc_feature 23..25: note = Core
  misc_feature 26..50: note = RF
tctctgcctttttttctatgtttctatgtggctataaaattttatgatac

SEQ ID NO: 21453 - DNA, 50 bp, unidentified
  source 1..50: mol_type = unassigned DNA; note = target_18bb14b
  misc_feature 1..24: note = LF
  misc_feature 25: note = Core
  misc_feature 26..50: note = RF
gaggggctgcttcatggccgaaagcagccctacagaaaacttagattaac

SEQ ID NO: 21454 - DNA, 50 bp, unidentified
  source 1..50: mol_type = unassigned DNA; note = target_18c1a26
  misc_feature 1..21: note = LF
  misc_feature 22..25: note = Core
  misc_feature 26..50: note = RF
tcttccaacctgtccttgcagctcatgccagccactccttctgaccgtga

SEQ ID NO: 21455 - DNA, 50 bp, unidentified
  source 1..50: mol_type = unassigned DNA; note = target_18c38ed
  misc_feature 1..20: note = LF
  misc_feature 21..25: note = Core
  misc_feature 26..50: note = RF
gccagcaagcaacactcgctccccccggccaccgtcgagctggtgaccgc

SEQ ID NO: 21456 - DNA, 50 bp, unidentified
  source 1..50: mol_type = unassigned DNA; note = target_18caeef
  misc_feature 1..24: note = LF
  misc_feature 25: note = Core
  misc_feature 26..50: note = RF
ctgttcgccatcggaacttgaccccgcaatgtggaacagcaaggtcttga

SEQ ID NO: 21457 - DNA, 50 bp, unidentified
  source 1..50: mol_type = unassigned DNA; note = target_18caef2
  misc_feature 1..22: note = LF
  misc_feature 23..25: note = Core
  misc_feature 26..50: note = RF
ctgcgcaacttgacccgaaagctgacagaaccctccatctaactgaccga

SEQ ID NO: 21458 - DNA, 50 bp, unidentified
  source 1..50: mol_type = unassigned DNA; note = target_18cc6b9
  misc_feature 1..24: note = LF
  misc_feature 25: note = Core
  misc_feature 26..50: note = RF
ggcggtttgccaaaggtgcagagttgtccacggcggcgggcggcgcttgc

SEQ ID NO: 21459 - DNA, 50 bp, unidentified
  source 1..50: mol_type = unassigned DNA; note = target_18ce1b6
  misc_feature 1..23: note = LF
  misc_feature 24..25: note = Core
  misc_feature 26..50: note = RF
gcacaaaaacaccggctctgacgtggtcctttagatagctgacgaccgcc

SEQ ID NO: 21460 - DNA, 50 bp, unidentified
  source 1..50: mol_type = unassigned DNA; note = target_18d1ec5
  misc_feature 1..23: note = LF
  misc_feature 24..25: note = Core
  misc_feature 26..50: note = RF
gagctcggttttgtgctcgaggctttttgttggagatagctaaacactct

SEQ ID NO: 21461 - DNA, 50 bp, unidentified
  source 1..50: mol_type = unassigned DNA; note = target_18d3806
  misc_feature 1..23: note = LF
  misc_feature 24..25: note = Core
  misc_feature 26..50: note = RF
ttttgtcaatgtcatattttctccttaaattttacagttaataatgtaac

SEQ ID NO: 21462 - DNA, 50 bp, unidentified
  source 1..50: mol_type = unassigned DNA; note = target_18ec16f
  misc_feature 1..24: note = LF
  misc_feature 25: note = Core
  misc_feature 26..50: note = RF
ggcgcgtggtcgcagctgtagctgcctacaatgctggggggcggggggag

SEQ ID NO: 21463 - DNA, 50 bp, unidentified
  source 1..50: mol_type = unassigned DNA; note = target_18f4ffb
  misc_feature 1..22: note = LF
  misc_feature 23..25: note = Core
  misc_feature 26..50: note = RF
ctttatgtcagccggacaggttagaagtgattacatcggcgcagcggccc

SEQ ID NO: 21464 - DNA, 50 bp, unidentified
  source 1..50: mol_type = unassigned DNA; note = target_18f6aa1
  misc_feature 1..23: note = LF
  misc_feature 24..25: note = Core
  misc_feature 26..50: note = RF
caccaactggccgatcttcccctctcatcgtttgcaagcaaaccactgcc

SEQ ID NO: 21465 - DNA, 50 bp, unidentified
  source 1..50: mol_type = unassigned DNA; note = target_18f99ba
  misc_feature 1..23: note = LF
  misc_feature 24..25: note = Core
  misc_feature 26..50: note = RF
atcgctctctgtgtccactgcgcctctgcggtgggataatcttgtggagt

SEQ ID NO: 21466 - DNA, 50 bp, unidentified
  source 1..50: mol_type = unassigned DNA; note = target_1909d95
  misc_feature 1..23: note = LF
  misc_feature 24..25: note = Core
  misc_feature 26..50: note = RF
catgttgcacggaggcagttctgtagggtgggcttcagcccaccaataga

SEQ ID NO: 21467 - DNA, 50 bp, unidentified
  source 1..50: mol_type = unassigned DNA; note = target_19103ba
  misc_feature 1..23: note = LF
  misc_feature 24..25: note = Core
  misc_feature 26..50: note = RF
tatccgatgctcgtgctcatccatgtctttctcgacaacgcgcgctatca

SEQ ID NO: 21468 - DNA, 50 bp, unidentified
  source 1..50: mol_type = unassigned DNA; note = target_191bfd2
  misc_feature 1..23: note = LF
  misc_feature 24..25: note = Core
  misc_feature 26..50: note = RF
cgattcacagaatcagcaggatgctctagcgatgaattggagcagacagc

SEQ ID NO: 21469 - DNA, 50 bp, unidentified
  source 1..50: mol_type = unassigned DNA; note = target_191f2de
  misc_feature 1..22: note = LF
  misc_feature 23..25: note = Core
  misc_feature 26..50: note = RF
gcgctcgctcacggcgcggattctagttgagttccggccccaattcccga

SEQ ID NO: 21470 - DNA, 50 bp, unidentified
  source 1..50: mol_type = unassigned DNA; note = target_1924743
  misc_feature 1..23: note = LF
  misc_feature 24..25: note = Core
  misc_feature 26..50: note = RF
gccccaggtctggattttcagacctgggaaacaacgaacctgatgccgaa

SEQ ID NO: 21471 - DNA, 50 bp, unidentified
  source 1..50: mol_type = unassigned DNA; note = target_192a5fc
  misc_feature 1..24: note = LF
  misc_feature 25: note = Core
  misc_feature 26..50: note = RF
tctgcctgcagtccgcatgccgtatgtgtctggcatgcctgcaatccggg

SEQ ID NO: 21472 - DNA, 50 bp, unidentified
  source 1..50: mol_type = unassigned DNA; note = target_19446eb
  misc_feature 1..23: note = LF
  misc_feature 24..25: note = Core
  misc_feature 26..50: note = RF
attccggtccttgggcctgcctcctttctaaatagacgagattgcaggtc

SEQ ID NO: 21473 - DNA, 50 bp, unidentified
  source 1..50: mol_type = unassigned DNA; note = target_19538f6
  misc_feature 1..22: note = LF
  misc_feature 23..25: note = Core
  misc_feature 26..50: note = RF
tagatgagggaacgctgagaatagcacttacttcaagacaagagtatgag

SEQ ID NO: 21474 - DNA, 50 bp, unidentified
  source 1..50: mol_type = unassigned DNA; note = target_195b9b4
  misc_feature 1..23: note = LF
  misc_feature 24..25: note = Core
  misc_feature 26..50: note = RF
gcggggttcgagcatggctgatcctttcaccgagccgagcgagtaatgtc

SEQ ID NO: 21475 - DNA, 50 bp, unidentified
  source 1..50: mol_type = unassigned DNA; note = target_195edf7
  misc_feature 1..23: note = LF
  misc_feature 24..25: note = Core
  misc_feature 26..50: note = RF
ctctttcagcgtgccgcatgaccctaggtagttgtacggcctcacaggct

SEQ ID NO: 21476 - DNA, 50 bp, unidentified
  source 1..50: mol_type = unassigned DNA; note = target_1964f65
  misc_feature 1..24: note = LF
  misc_feature 25: note = Core
  misc_feature 26..50: note = RF
tactgccgaacgaaacttgatccacccccccgtgggggagtttgggtggc

SEQ ID NO: 21477 - DNA, 50 bp, unidentified
  source 1..50: mol_type = unassigned DNA; note = target_1968b26
  misc_feature 1..24: note = LF
  misc_feature 25: note = Core
  misc_feature 26..50: note = RF
ccgtgccgggcgcccgcacatcggcagatccggtcactcgccgggccaca

SEQ ID NO: 21478 - DNA, 50 bp, unidentified
  source 1..50: mol_type = unassigned DNA; note = target_196a83c
  misc_feature 1..22: note = LF
  misc_feature 23..25: note = Core
  misc_feature 26..50: note = RF
tgaaacatcctcccaatcagggtgaatcacaaatcaaacccaatgggaat

SEQ ID NO: 21479 - DNA, 50 bp, unidentified
  source 1..50: mol_type = unassigned DNA; note = target_1970a98
  misc_feature 1..24: note = LF
  misc_feature 25: note = Core
  misc_feature 26..50: note = RF
ggactgggacttctaggaagtctccacccccccccacggaggggctcgcg

SEQ ID NO: 21480 - DNA, 50 bp, unidentified
  source 1..50: mol_type = unassigned DNA; note = target_1972316
  misc_feature 1..23: note = LF
  misc_feature 24..25: note = Core
  misc_feature 26..50: note = RF
tagttccttctttcattatccccctcctttagattcggtgactcatgaaa

SEQ ID NO: 21481 - DNA, 50 bp, unidentified
  source 1..50: mol_type = unassigned DNA; note = target_1978234
  misc_feature 1..23: note = LF
  misc_feature 24..25: note = Core
  misc_feature 26..50: note = RF
cgattcacagaatcagcaggatgctctagtcggcgcgctcgtccggcgtc

SEQ ID NO: 21482 - DNA, 50 bp, unidentified
  source 1..50: mol_type = unassigned DNA; note = target_197e3f0
  misc_feature 1..22: note = LF
  misc_feature 23..25: note = Core
  misc_feature 26..50: note = RF
tatcatcatcgataattttcttcatccttagaagtgcgaataacattcag

SEQ ID NO: 21483 - DNA, 50 bp, unidentified
  source 1..50: mol_type = unassigned DNA; note = target_1990dee
  misc_feature 1..21: note = LF
  misc_feature 22..25: note = Core
  misc_feature 26..50: note = RF
gtaactatatgtgctgcctaccccccctacagggggtgtatcggtggtca

SEQ ID NO: 21484 - DNA, 50 bp, unidentified
  source 1..50: mol_type = unassigned DNA; note = target_1991336
  misc_feature 1..23: note = LF
  misc_feature 24..25: note = Core
  misc_feature 26..50: note = RF
gccggctcgacgaattgctgccatggaactggcgcccgcatcaggcaacg

SEQ ID NO: 21485 - DNA, 50 bp, unidentified
  source 1..50: mol_type = unassigned DNA; note = target_1999177
  misc_feature 1..23: note = LF
  misc_feature 24..25: note = Core
  misc_feature 26..50: note = RF
tgaaacgtctgcagcatctgctcagtcgagcggtgacaccagcgttggtc

SEQ ID NO: 21486 - DNA, 50 bp, unidentified
  source 1..50: mol_type = unassigned DNA; note = target_19a3446
  misc_feature 1..23: note = LF
  misc_feature 24..25: note = Core
  misc_feature 26..50: note = RF
tgaggttcgtgcctcaacccagcctacaactgaaccactcggaaactcta

SEQ ID NO: 21487 - DNA, 50 bp, unidentified
  source 1..50: mol_type = unassigned DNA; note = target_19ace54
  misc_feature 1..23: note = LF
  misc_feature 24..25: note = Core
  misc_feature 26..50: note = RF
tgccggctcctattgaggagtattgctccggtactgacaccaaactagag

SEQ ID NO: 21488 - DNA, 50 bp, unidentified
  source 1..50: mol_type = unassigned DNA; note = target_19bf819
  misc_feature 1..21: note = LF
  misc_feature 22..25: note = Core
  misc_feature 26..50: note = RF
tgccgcgtaaaatgtcaacttagatgcccacaatggtgcggagagtacaa

SEQ ID NO: 21489 - DNA, 50 bp, unidentified
  source 1..50: mol_type = unassigned DNA; note = target_19c0264
  misc_feature 1..22: note = LF
  misc_feature 23..25: note = Core
  misc_feature 26..50: note = RF
cggagacgagttggcgttagactgatagcaccaaggcggtgcccatgtct

SEQ ID NO: 21490 - DNA, 50 bp, unidentified
  source 1..50: mol_type = unassigned DNA; note = target_19c0492
  misc_feature 1..23: note = LF
  misc_feature 24..25: note = Core
  misc_feature 26..50: note = RF
acgttgaaccgattgacctgaacctttgagctcttgaacgatagtttcgt

SEQ ID NO: 21491 - DNA, 50 bp, unidentified
  source 1..50: mol_type = unassigned DNA; note = target_19c11ae
  misc_feature 1..21: note = LF
  misc_feature 22..25: note = Core
  misc_feature 26..50: note = RF
cttttggaggacgttgcctcgctcatcggtggtcctttgggcttgcgggt

SEQ ID NO: 21492 - DNA, 50 bp, unidentified
  source 1..50: mol_type = unassigned DNA; note = target_19ca83a
  misc_feature 1..23: note = LF
  misc_feature 24..25: note = Core
  misc_feature 26..50: note = RF
gcccaacggaagatttttgtcatcttttcatctctgaaaagtgaggcatc

SEQ ID NO: 21493 - DNA, 50 bp, unidentified
  source 1..50: mol_type = unassigned DNA; note = target_19d25d6
  misc_feature 1..23: note = LF
  misc_feature 24..25: note = Core
  misc_feature 26..50: note = RF
gcccgcctgctctacgagaagctctactgcgcccgcggcgacatggagaa

SEQ ID NO: 21494 - DNA, 50 bp, unidentified
  source 1..50: mol_type = unassigned DNA; note = target_19d3a00
  misc_feature 1..21: note = LF
  misc_feature 22..25: note = Core
  misc_feature 26..50: note = RF
acgcgctgcgcgctcgccgcgctcatacggccagcaggatgcagtgcgcc

SEQ ID NO: 21495 - DNA, 50 bp, unidentified
  source 1..50: mol_type = unassigned DNA; note = target_19d4c27
  misc_feature 1..22: note = LF
  misc_feature 23..25: note = Core
  misc_feature 26..50: note = RF
acggacatagctccagcctcctacttttctgttgtacattatatcaaatt

SEQ ID NO: 21496 - DNA, 50 bp, unidentified; identical to SEQ ID NO: 21190
  source 1..50: mol_type = unassigned DNA; note = target_19ecd44
  misc_feature 1..22: note = LF
  misc_feature 23..25: note = Core
  misc_feature 26..50: note = RF

SEQ ID NO: 21497 - DNA, 50 bp, unidentified
  source 1..50: mol_type = unassigned DNA; note = target_19f0ffe
  misc_feature 1..22: note = LF
  misc_feature 23..25: note = Core
  misc_feature 26..50: note = RF
gatgtcgaccacgacgaacgttctccttgccatccgggctgaccatcggc

SEQ ID NO: 21498 - DNA, 50 bp, unidentified
  source 1..50: mol_type = unassigned DNA; note = target_19f34f6
  misc_feature 1..22: note = LF
  misc_feature 23..25: note = Core
  misc_feature 26..50: note = RF
ccgcgccgacgaggtgatcgagtgaaacgacgtgaggtcatcacgctgct

SEQ ID NO: 21499 - DNA, 50 bp, unidentified
  source 1..50: mol_type = unassigned DNA; note = target_19f4962
  misc_feature 1..23: note = LF
  misc_feature 24..25: note = Core
  misc_feature 26..50: note = RF
gctcgcaacaggttaatttccaaacaccctctaaagctcaagtgcctgaa

SEQ ID NO: 21500 - DNA, 50 bp, unidentified
  source 1..50: mol_type = unassigned DNA; note = target_19fb58f
  misc_feature 1..21: note = LF
  misc_feature 22..25: note = Core
  misc_feature 26..50: note = RF
gaaacatccatatcccgcaccctaaccccgcacccacccggccacgggcg

SEQ ID NO: 21501 - DNA, 50 bp, unidentified
  source 1..50: mol_type = unassigned DNA; note = target_19fc1ec
  misc_feature 1..24: note = LF
  misc_feature 25: note = Core
  misc_feature 26..50: note = RF
tcaacgtcatcccgacgaaggtcggacccatgctgaatatgctttaccta

SEQ ID NO: 21502 - DNA, 50 bp, unidentified
  source 1..50: mol_type = unassigned DNA; note = target_19fe4a8
  misc_feature 1..23: note = LF
  misc_feature 24..25: note = Core
  misc_feature 26..50: note = RF
attttgcccagctaccgctgggctttttgtacatggaagtacttatcctc

SEQ ID NO: 21503 - DNA, 50 bp, unidentified
  source 1..50: mol_type = unassigned DNA; note = target_1a0927f
  misc_feature 1..23: note = LF
  misc_feature 24..25: note = Core
  misc_feature 26..50: note = RF
tataatagatacggttacagggcttttatatcagcacttaaatgctaggt

SEQ ID NO: 21504 - DNA, 50 bp, unidentified
  source 1..50: mol_type = unassigned DNA; note = target_1a0d0b4
  misc_feature 1..22: note = LF
  misc_feature 23..25: note = Core
  misc_feature 26..50: note = RF
ggttctgaggtgacgcatcgggttctcctggaagagcgggaagggaaagg

SEQ ID NO: 21505 - DNA, 50 bp, unidentified
  source 1..50: mol_type = unassigned DNA; note = target_1a16fc0
  misc_feature 1..24: note = LF
  misc_feature 25: note = Core
  misc_feature 26..50: note = RF
taaccggtaattttaatcagaaagcggacggcacggaacggccattgagc

SEQ ID NO: 21506 - DNA, 50 bp, unidentified
  source 1..50: mol_type = unassigned DNA; note = target_1a183f2
  misc_feature 1..23: note = LF
  misc_feature 24..25: note = Core
  misc_feature 26..50: note = RF
gcaacatgtctgctgattttgctaggccgtcgtgcgcaatggctatttac

SEQ ID NO: 21507 - DNA, 50 bp, unidentified
  source 1..50: mol_type = unassigned DNA; note = target_1a195d6
  misc_feature 1..23: note = LF
  misc_feature 24..25: note = Core
  misc_feature 26..50: note = RF
atcgtgaggtcgatgtccgcttctgggcactaaagcgaatctcgcaagcg

SEQ ID NO: 21508 - DNA, 50 bp, unidentified
  source 1..50: mol_type = unassigned DNA; note = target_1a1a586
  misc_feature 1..24: note = LF
  misc_feature 25: note = Core
  misc_feature 26..50: note = RF
gaaaatttgcgtataactgcccgttagcttgtcatagaggtgcgaaatgt

SEQ ID NO: 21509 - DNA, 50 bp, unidentified
  source 1..50: mol_type = unassigned DNA; note = target_1a239a6
  misc_feature 1..23: note = LF
  misc_feature 24..25: note = Core
  misc_feature 26..50: note = RF
ggcgggctaggtatctgtcctgtagcccggatggagcggagcacaatccg

SEQ ID NO: 21510 - DNA, 50 bp, unidentified
  source 1..50: mol_type = unassigned DNA; note = target_1a2abdf
  misc_feature 1..23: note = LF
  misc_feature 24..25: note = Core
  misc_feature 26..50: note = RF
cgttcgacgccagcccgaaagcagacctccccaacgcccgcaatgagtca

SEQ ID NO: 21511 - DNA, 50 bp, unidentified
  source 1..50: mol_type = unassigned DNA; note = target_1a2de84
  misc_feature 1..23: note = LF
  misc_feature 24..25: note = Core
  misc_feature 26..50: note = RF
tgctttcgtcataacactttctcctttacaataaattttggtgatattgt

SEQ ID NO: 21512 - DNA, 50 bp, unidentified
  source 1..50: mol_type = unassigned DNA; note = target_1a30312
  misc_feature 1..24: note = LF
  misc_feature 25: note = Core
  misc_feature 26..50: note = RF
agcgtcggatggtctcacccaaagcagacactcgccgaaactagagggta

SEQ ID NO: 21513 - DNA, 50 bp, unidentified
  source 1..50: mol_type = unassigned DNA; note = target_1a37236
  misc_feature 1..23: note = LF
  misc_feature 24..25: note = Core
  misc_feature 26..50: note = RF
aatcgttgctcaattcttctcacctccttttggctcattcagcgattcgg

SEQ ID NO: 21514 - DNA, 50 bp, unidentified
  source 1..50: mol_type = unassigned DNA; note = target_1a3c8b0
  misc_feature 1..21: note = LF
  misc_feature 22..25: note = Core
  misc_feature 26..50: note = RF
accaatcaccagcaagaagtgaaaaaactgtgagtaagcgggtgataaat

SEQ ID NO: 21515 - DNA, 50 bp, unidentified
  source 1..50: mol_type = unassigned DNA; note = target_1a3e16d
  misc_feature 1..24: note = LF
  misc_feature 25: note = Core
  misc_feature 26..50: note = RF
tttgtcgatctcctgacgcctaacgcctgagttaagccgcgccgcgaagc

SEQ ID NO: 21516 - DNA, 50 bp, unidentified
  source 1..50: mol_type = unassigned DNA; note = target_1a40847
  misc_feature 1..23: note = LF
  misc_feature 24..25: note = Core
  misc_feature 26..50: note = RF
acatgaataaacataaataccacctttcattattaataacatatgccgga

SEQ ID NO: 21517 - DNA, 50 bp, unidentified
  source 1..50: mol_type = unassigned DNA; note = target_1a532f1
  misc_feature 1..23: note = LF
  misc_feature 24..25: note = Core
  misc_feature 26..50: note = RF
agcagccgagcatgggctcggctctacagagcgctcagcggcgcggtgcg

SEQ ID NO: 21518 - DNA, 50 bp, unidentified
  source 1..50: mol_type = unassigned DNA; note = target_1a5d881
  misc_feature 1..24: note = LF
  misc_feature 25: note = Core
  misc_feature 26..50: note = RF
aaatcaacgaaggtactatacaactttatttttgctcaacaaggtggcgc

SEQ ID NO: 21519 - DNA, 50 bp, unidentified
  source 1..50: mol_type = unassigned DNA; note = target_1a6aca5
  misc_feature 1..23: note = LF
  misc_feature 24..25: note = Core
  misc_feature 26..50: note = RF
ggtacgcgctgagccagcagccctggattccgggttcgctcgccatagcg

SEQ ID NO: 21520 - DNA, 50 bp, unidentified
  source 1..50: mol_type = unassigned DNA; note = target_1a80d1d
  misc_feature 1..23: note = LF
  misc_feature 24..25: note = Core
  misc_feature 26..50: note = RF
tcccggaagcgatcgtccagacctgcattgttcatctgctgcgcaattcg

SEQ ID NO: 21521 - DNA, 50 bp, unidentified
  source 1..50: mol_type = unassigned DNA; note = target_1a83d9f
  misc_feature 1..20: note = LF
  misc_feature 21..25: note = Core
  misc_feature 26..50: note = RF
caggacccgaccgcgggcgccaccccccctttgccggggaagaaccttcg

SEQ ID NO: 21522 - DNA, 50 bp, unidentified
  source 1..50: mol_type = unassigned DNA; note = target_1a857ff
  misc_feature 1..23: note = LF
  misc_feature 24..25: note = Core
  misc_feature 26..50: note = RF
gcaatgggcttaacgtgctttatttccgttttccaagcggcccccttcct

SEQ ID NO: 21523 - DNA, 50 bp, unidentified
  source 1..50: mol_type = unassigned DNA; note = target_1a8ff85
  misc_feature 1..23: note = LF
  misc_feature 24..25: note = Core
  misc_feature 26..50: note = RF
ttgcgcccgcagtgaagtaggtcccggacaagccgctgcgcggctctccg

SEQ ID NO: 21524 - DNA, 50 bp, unidentified
  source 1..50: mol_type = unassigned DNA; note = target_1a983b3
  misc_feature 1..23: note = LF
  misc_feature 24..25: note = Core
  misc_feature 26..50: note = RF
ctcagggggtcaaaattgcacgccgaaacacaccgcccaatcagattgtg

SEQ ID NO: 21525 - DNA, 50 bp, unidentified
  source 1..50: mol_type = unassigned DNA; note = target_1aa33ae
  misc_feature 1..23: note = LF
  misc_feature 24..25: note = Core
  misc_feature 26..50: note = RF
agaactaggaacaggtgatgcggtcaggtctttacttttgatgttttgaa

SEQ ID NO: 21526 - DNA, 50 bp, unidentified
  source 1..50: mol_type = unassigned DNA; note = target_1aa90cc
  misc_feature 1..23: note = LF
  misc_feature 24..25: note = Core
  misc_feature 26..50: note = RF
ctttggcgctgttcagtatttccctgttttctgcgagtgagtccgtattg

SEQ ID NO: 21527 - DNA, 50 bp, unidentified
  source 1..50: mol_type = unassigned DNA; note = target_1aaf2a5
  misc_feature 1..24: note = LF
  misc_feature 25: note = Core
  misc_feature 26..50: note = RF
tagagagctgaactcctgtaggagagcgccttcaggcgcgaatgcagttt

SEQ ID NO: 21528 - DNA, 50 bp, unidentified
  source 1..50: mol_type = unassigned DNA; note = target_1ab2f0c
  misc_feature 1..23: note = LF
  misc_feature 24..25: note = Core
  misc_feature 26..50: note = RF
accgtcggcgcattcaagactgaagtgcaacacctgcccccgagtacggt

SEQ ID NO: 21529 - DNA, 50 bp, unidentified
  source 1..50: mol_type = unassigned DNA; note = target_1ab5560
  misc_feature 1..23: note = LF
  misc_feature 24..25: note = Core
  misc_feature 26..50: note = RF
aggccagcaaccgaggccgacgcccccccggcaccgagcctcccgccgga

SEQ ID NO: 21530 - DNA, 50 bp, unidentified
  source 1..50: mol_type = unassigned DNA; note = target_1ac1e9a
  misc_feature 1..23: note = LF
  misc_feature 24..25: note = Core
  misc_feature 26..50: note = RF
tctatagtgaacatgttccattcctttctgtgtttattttaactggttac

SEQ ID NO: 21531 - DNA, 50 bp, unidentified
  source 1..50: mol_type = unassigned DNA; note = target_1aca842
  misc_feature 1..23: note = LF
  misc_feature 24..25: note = Core
  misc_feature 26..50: note = RF
tggcccttccgccaaaaaaatggtggggccccgtcgtcccttgaggcgat

SEQ ID NO: 21532 - DNA, 50 bp, unidentified
  source 1..50: mol_type = unassigned DNA; note = target_1ad01b4
  misc_feature 1..23: note = LF
  misc_feature 24..25: note = Core
  misc_feature 26..50: note = RF
cccccggatagacctttcgacccctcatccttcgcctttggcgacacctt

SEQ ID NO: 21533 - DNA, 50 bp, unidentified
  source 1..50: mol_type = unassigned DNA; note = target_1aed8a5
  misc_feature 1..23: note = LF
  misc_feature 24..25: note = Core
  misc_feature 26..50: note = RF
gcttatcgtccatggcgcacctcctataatctgtttgatcagattataaa

SEQ ID NO: 21534 - DNA, 50 bp, unidentified
  source 1..50: mol_type = unassigned DNA; note = target_1af5af1
  misc_feature 1..23: note = LF
  misc_feature 24..25: note = Core
  misc_feature 26..50: note = RF
catctactctcatcttttttctcctttcaaatctgtcagctgctcatact

SEQ ID NO: 21535 - DNA, 50 bp, unidentified
  source 1..50: mol_type = unassigned DNA; note = target_1b06edb
  misc_feature 1..24: note = LF
  misc_feature 25: note = Core
  misc_feature 26..50: note = RF
ggcattggacaaaagggctcattttgtctcatcgccttcgaataaatttt

SEQ ID NO: 21536 - DNA, 50 bp, unidentified
  source 1..50: mol_type = unassigned DNA; note = target_1b0a640
  misc_feature 1..23: note = LF
  misc_feature 24..25: note = Core
  misc_feature 26..50: note = RF
caacaaaagccccggaaacggtggctttttttactcagatacacatacgc

SEQ ID NO: 21537 - DNA, 50 bp, unidentified
  source 1..50: mol_type = unassigned DNA; note = target_1b0adcd
  misc_feature 1..23: note = LF
  misc_feature 24..25: note = Core
  misc_feature 26..50: note = RF
caatctgactgaatcgagcccctagcactactttggcggattaacggagg

SEQ ID NO: 21538 - DNA, 50 bp, unidentified
  source 1..50: mol_type = unassigned DNA; note = target_1b2c54c
  misc_feature 1..23: note = LF
  misc_feature 24..25: note = Core
  misc_feature 26..50: note = RF
cagcatacccatgctttcacctccttcatctcatttggaatgctctccgt

SEQ ID NO: 21539 - DNA, 50 bp, unidentified
  source 1..50: mol_type = unassigned DNA; note = target_1b35686
  misc_feature 1..23: note = LF
  misc_feature 24..25: note = Core
  misc_feature 26..50: note = RF
ccgtgaccaattttaattgaccactacacaccaaccgtataaatacatag

SEQ ID NO: 21540 - DNA, 50 bp, unidentified
  source 1..50: mol_type = unassigned DNA; note = target_1b3d345
  misc_feature 1..23: note = LF
  misc_feature 24..25: note = Core
  misc_feature 26..50: note = RF
ctgtccgcccggctgtgacctgacttgggccacaccttgggcatggcttg

SEQ ID NO: 21541 - DNA, 50 bp, unidentified
  source 1..50: mol_type = unassigned DNA; note = target_1b42c6c
  misc_feature 1..23: note = LF
  misc_feature 24..25: note = Core
  misc_feature 26..50: note = RF
ttttcttttactcatattcaatcctccctataaataaacgaataaatata

SEQ ID NO: 21542 - DNA, 50 bp, unidentified
  source 1..50: mol_type = unassigned DNA; note = target_1b4da17
  misc_feature 1..24: note = LF
  misc_feature 25: note = Core
  misc_feature 26..50: note = RF
ttccgtagcaattaattatacacgttgttggttgcagtttttagtattta

SEQ ID NO: 21543 - DNA, 50 bp, unidentified
  source 1..50: mol_type = unassigned DNA; note = target_1b4e15a
  misc_feature 1..22: note = LF
  misc_feature 23..25: note = Core
  misc_feature 26..50: note = RF
ctccggggtcgcaattccaaggagaaccgcgatgagccatcaaccgagca

SEQ ID NO: 21544 - DNA, 50 bp, unidentified
  source 1..50: mol_type = unassigned DNA; note = target_1b50e91
  misc_feature 1..21: note = LF
  misc_feature 22..25: note = Core
  misc_feature 26..50: note = RF
cgcttcaagtcacttccgctaatgacccatgtgcgacattgcgccggtac

SEQ ID NO: 21545 - DNA, 50 bp, unidentified
  source 1..50: mol_type = unassigned DNA; note = target_1b529da
  misc_feature 1..24: note = LF
  misc_feature 25: note = Core
  misc_feature 26..50: note = RF
aagtagctcccaaaaacgggttacttccggataggccacaagaacgaagc

SEQ ID NO: 21546 - DNA, 50 bp, unidentified
  source 1..50: mol_type = unassigned DNA; note = target_1b6c328
  misc_feature 1..22: note = LF
  misc_feature 23..25: note = Core
  misc_feature 26..50: note = RF
ctaaaaattgtaggtcccaaatagaaatgtcgggtttccgctaaatagaa

SEQ ID NO: 21547 - DNA, 50 bp, unidentified
  source 1..50: mol_type = unassigned DNA; note = target_1b6cbbd
  misc_feature 1..23: note = LF
  misc_feature 24..25: note = Core
  misc_feature 26..50: note = RF
aaataattagttctacagttcattttttgtgcaaaaacataaatctcaaa

SEQ ID NO: 21548 - DNA, 50 bp, unidentified
  source 1..50: mol_type = unassigned DNA; note = target_1b78105
  misc_feature 1..24: note = LF
  misc_feature 25: note = Core
  misc_feature 26..50: note = RF
tcgggcgtcccgccccgacagcggcagagtcggacgttcgacaacgacac

SEQ ID NO: 21549 - DNA, 50 bp, unidentified
  source 1..50: mol_type = unassigned DNA; note = target_1b7b21d
  misc_feature 1..22: note = LF
  misc_feature 23..25: note = Core
  misc_feature 26..50: note = RF
aaagtaaatcaaaaaacgctgtcatttcgagcgaagtcgagaaatctaca

SEQ ID NO: 21550 - DNA, 50 bp, unidentified
  source 1..50: mol_type = unassigned DNA; note = target_1b7b2de
  misc_feature 1..23: note = LF
  misc_feature 24..25: note = Core
  misc_feature 26..50: note = RF
cggcatggatgccgccactgagcctccagggatgggtttacggcgtgtcc

SEQ ID NO: 21551 - DNA, 50 bp, unidentified
  source 1..50: mol_type = unassigned DNA; note = target_1b84263
  misc_feature 1..24: note = LF
  misc_feature 25: note = Core
  misc_feature 26..50: note = RF
acgaagaaaggcccaatggtagggcggcctcgccgcgcagcggcagcccg

SEQ ID NO: 21552 - DNA, 50 bp, unidentified
  source 1..50: mol_type = unassigned DNA; note = target_1ba8093
  misc_feature 1..24: note = LF
  misc_feature 25: note = Core
  misc_feature 26..50: note = RF
cggattcccgtatcgcttcattgctttctttaggaatttcaacgcagcag

SEQ ID NO: 21553 - DNA, 50 bp, unidentified
  source 1..50: mol_type = unassigned DNA; note = target_1bafd5b
  misc_feature 1..24: note = LF
  misc_feature 25: note = Core
  misc_feature 26..50: note = RF
ccaagtcgctctgttcgtcgcccccacccccgcgaagggccgctcgttgg

SEQ ID NO: 21554 - DNA, 50 bp, unidentified
  source 1..50: mol_type = unassigned DNA; note = target_1bb6fa9
  misc_feature 1..22: note = LF
  misc_feature 23..25: note = Core
  misc_feature 26..50: note = RF
taaaactttcaaaattattctcctttcactatgctttattctattcatca

SEQ ID NO: 21555 - DNA, 50 bp, unidentified
  source 1..50: mol_type = unassigned DNA; note = target_1bb8097
  misc_feature 1..22: note = LF
  misc_feature 23..25: note = Core
  misc_feature 26..50: note = RF
aaatacataagcatatacttatgaggtgattttatgaatttacgccagct

SEQ ID NO: 21556 - DNA, 50 bp, unidentified
  source 1..50: mol_type = unassigned DNA; note = target_1bc4f08
  misc_feature 1..23: note = LF
  misc_feature 24..25: note = Core
  misc_feature 26..50: note = RF
atctttggagctatgcccgaatttgggtgacgcgctttgatcaggcggcg

SEQ ID NO: 21557 - DNA, 50 bp, unidentified
  source 1..50: mol_type = unassigned DNA; note = target_1bd6e5a
  misc_feature 1..23: note = LF
  misc_feature 24..25: note = Core
  misc_feature 26..50: note = RF
ccagcctccgcgatcgcaagcggctctaggtttcgttacgcagggcgccc

SEQ ID NO: 21558 - DNA, 50 bp, unidentified
  source 1..50: mol_type = unassigned DNA; note = target_1bd7dbb
  misc_feature 1..22: note = LF
  misc_feature 23..25: note = Core
  misc_feature 26..50: note = RF
ggccgccttcgcgagcaagcccgctcccacatttggatcgcggggcaaca

SEQ ID NO: 21559 - DNA, 50 bp, unidentified
  source 1..50: mol_type = unassigned DNA; note = target_1bd9ec2
  misc_feature 1..24: note = LF
  misc_feature 25: note = Core
  misc_feature 26..50: note = RF
gtaaacaggtatccttagagcataagggaggtgtcagtaatggcaaatga

SEQ ID NO: 21560 - DNA, 50 bp, unidentified
  source 1..50: mol_type = unassigned DNA; note = target_1be0fb5
  misc_feature 1..23: note = LF
  misc_feature 24..25: note = Core
  misc_feature 26..50: note = RF
ccctgttctcatgcaagctccttgtctttctgcgcccctgttacgcaata

SEQ ID NO: 21561 - DNA, 50 bp, unidentified
  source 1..50: mol_type = unassigned DNA; note = target_1be82b1
  misc_feature 1..23: note = LF
  misc_feature 24..25: note = Core
  misc_feature 26..50: note = RF
caccgggagccaatgaccgcttttggatactttcagtcataccccatcct

SEQ ID NO: 21562 - DNA, 50 bp, unidentified
  source 1..50: mol_type = unassigned DNA; note = target_1be89bd
  misc_feature 1..23: note = LF
  misc_feature 24..25: note = Core
  misc_feature 26..50: note = RF
atcgagcagtgttttcgcaaaaggatattcatgggtcttttcagctttat

SEQ ID NO: 21563 - DNA, 50 bp, unidentified
  source 1..50: mol_type = unassigned DNA; note = target_1bf3f29
  misc_feature 1..24: note = LF
  misc_feature 25: note = Core
  misc_feature 26..50: note = RF
gtcggcatagttctgcaacctaacgtagaggtaagcggcctgccgcgtac

SEQ ID NO: 21564 - DNA, 50 bp, unidentified
  source 1..50: mol_type = unassigned DNA; note = target_1bf7310
  misc_feature 1..22: note = LF
  misc_feature 23..25: note = Core
  misc_feature 26..50: note = RF
gcggcattggctcgctcagctcctttctggttacagttccttgctggtag

SEQ ID NO: 21565 - DNA, 50 bp, unidentified
  source 1..50: mol_type = unassigned DNA; note = target_1bfc2cf
  misc_feature 1..20: note = LF
  misc_feature 21..25: note = Core
  misc_feature 26..50: note = RF
tataagacatggtaaaattcctcctttgttcatctcaattctactcacat

SEQ ID NO: 21566 - DNA, 50 bp, unidentified
  source 1..50: mol_type = unassigned DNA; note = target_1c01ac9
  misc_feature 1..22: note = LF
  misc_feature 23..25: note = Core
  misc_feature 26..50: note = RF
tggtgtaaagacgcatgatgtctcctcggcgaagctttgcggtggtttcg

SEQ ID NO: 21567 - DNA, 50 bp, unidentified
  source 1..50: mol_type = unassigned DNA; note = target_1c0c7fd
  misc_feature 1..23: note = LF
  misc_feature 24..25: note = Core
  misc_feature 26..50: note = RF
actgtgcagtcgaacgcactcatctgccgcgatgatggagctcttgtgat

SEQ ID NO: 21568 - DNA, 50 bp, unidentified
  source 1..50: mol_type = unassigned DNA; note = target_1c127d5
  misc_feature 1..24: note = LF
  misc_feature 25: note = Core
  misc_feature 26..50: note = RF
ggatgacgtcgcggaaaacccctccgcggaggggtccgagaattcacttt

SEQ ID NO: 21569 - DNA, 50 bp, unidentified
  source 1..50: mol_type = unassigned DNA; note = target_1c1399a
  misc_feature 1..23: note = LF
  misc_feature 24..25: note = Core
  misc_feature 26..50: note = RF
cagtttctcgcactgaaagcagctgccatacattcaggtgctcgccgatg

SEQ ID NO: 21570 - DNA, 50 bp, unidentified
  source 1..50: mol_type = unassigned DNA; note = target_1c18a13
  misc_feature 1..23: note = LF
  misc_feature 24..25: note = Core
  misc_feature 26..50: note = RF
caagtggattcatatactgccaattttgttgaataaaaaaaatcgactaa

SEQ ID NO: 21571 - DNA, 50 bp, unidentified
  source 1..50: mol_type = unassigned DNA; note = target_1c2497b
  misc_feature 1..23: note = LF
  misc_feature 24..25: note = Core
  misc_feature 26..50: note = RF
gggcgctccggcgacttacgtcgctacgaccccaacggcacgattcccct

SEQ ID NO: 21572 - DNA, 50 bp, unidentified
  source 1..50: mol_type = unassigned DNA; note = target_1c28c75
  misc_feature 1..23: note = LF
  misc_feature 24..25: note = Core
  misc_feature 26..50: note = RF
aataaatcatccctcgactccgctcgggatgacaattcaaatatatttgt

SEQ ID NO: 21573 - DNA, 50 bp, unidentified
  source 1..50: mol_type = unassigned DNA; note = target_1c2d134
  misc_feature 1..24: note = LF
  misc_feature 25: note = Core
  misc_feature 26..50: note = RF
tggcggactcattcatcattccgacaggggctcgcaatacgtgtccattc

SEQ ID NO: 21574 - DNA, 50 bp, unidentified
  source 1..50: mol_type = unassigned DNA; note = target_1c2fdfe
  misc_feature 1..23: note = LF
  misc_feature 24..25: note = Core
  misc_feature 26..50: note = RF
ccggtgtcgggcctgtccaggccctcccacagggattcagtgccgtagga

SEQ ID NO: 21575 - DNA, 50 bp, unidentified
  source 1..50: mol_type = unassigned DNA; note = target_1c43d32
  misc_feature 1..24: note = LF
  misc_feature 25: note = Core
  misc_feature 26..50: note = RF
aatattagaattcctgaaactctttctgtccaataacgtgtttcaattgt

SEQ ID NO: 21576 - DNA, 50 bp, unidentified
  source 1..50: mol_type = unassigned DNA; note = target_1c45549
  misc_feature 1..21: note = LF
  misc_feature 22..25: note = Core
  misc_feature 26..50: note = RF
tgcggggcgatggccaggccggtcatgagcggggagtcatggagcacctg

SEQ ID NO: 21577 - DNA, 50 bp, unidentified
  source 1..50: mol_type = unassigned DNA; note = target_1c4f211
  misc_feature 1..24: note = LF
  misc_feature 25: note = Core
  misc_feature 26..50: note = RF
caattgcgcgaaatcactcaaaagtggaagatgcccccacgcgaatgggc

SEQ ID NO: 21578 - DNA, 50 bp, unidentified
  source 1..50: mol_type = unassigned DNA; note = target_1c4f403
  misc_feature 1..23: note = LF
  misc_feature 24..25: note = Core
  misc_feature 26..50: note = RF
ccttgtgctggcgatgttggttctggtgcaaatagcgaaggcgactcggt

SEQ ID NO: 21579 - DNA, 50 bp, unidentified
  source 1..50: mol_type = unassigned DNA; note = target_1c59a2d
  misc_feature 1..23: note = LF
  misc_feature 24..25: note = Core
  misc_feature 26..50: note = RF
acaaaccataatcaaccttctttctttttttgctcatctattattatcga

SEQ ID NO: 21580 - DNA, 50 bp, unidentified
  source 1..50: mol_type = unassigned DNA; note = target_1c6255d
  misc_feature 1..23: note = LF
  misc_feature 24..25: note = Core
  misc_feature 26..50: note = RF
tgaaaatacgtcacgacagctccctcatcccaaccttctcccggggggag

SEQ ID NO: 21581 - DNA, 50 bp, unidentified
  source 1..50: mol_type = unassigned DNA; note = target_1c63dd7
  misc_feature 1..24: note = LF
  misc_feature 25: note = Core
  misc_feature 26..50: note = RF
cgtcgtctgcaacatttgcattacttccgagtatggggatttcagcacag

SEQ ID NO: 21582 - DNA, 50 bp, unidentified
  source 1..50: mol_type = unassigned DNA; note = target_1c678cd
  misc_feature 1..24: note = LF
  misc_feature 25: note = Core
  misc_feature 26..50: note = RF
tgcgagcggattctccagcaggagagtgtgacatggccgcgtggctgctg

SEQ ID NO: 21583 - DNA, 50 bp, unidentified
  source 1..50: mol_type = unassigned DNA; note = target_1c68ffd
  misc_feature 1..24: note = LF
  misc_feature 25: note = Core
  misc_feature 26..50: note = RF
agcgacaggacaagcttcggagaaactgatatgattattcgtaaaaagct

SEQ ID NO: 21584 - DNA, 50 bp, unidentified
  source 1..50: mol_type = unassigned DNA; note = target_1c83ea4
  misc_feature 1..23: note = LF
  misc_feature 24..25: note = Core
  misc_feature 26..50: note = RF
gttaaaattcatgattctttctccttatttaatgatttgttcaataggta

SEQ ID NO: 21585 - DNA, 50 bp, unidentified
  source 1..50: mol_type = unassigned DNA; note = target_1c85c26
  misc_feature 1..24: note = LF
  misc_feature 25: note = Core
  misc_feature 26..50: note = RF
atgttgcaacgcgaagtggatcccccccccccgaatcgagctctcgcttc

SEQ ID NO: 21586 - DNA, 50 bp, unidentified
  source 1..50: mol_type = unassigned DNA; note = target_1c980ff
  misc_feature 1..24: note = LF
  misc_feature 25: note = Core
  misc_feature 26..50: note = RF
ctttagttgaaatttagtaccaacttagttgtgtgagcggaagcgtactt

SEQ ID NO: 21587 - DNA, 50 bp, unidentified
  source 1..50: mol_type = unassigned DNA; note = target_1ca7c68
  misc_feature 1..23: note = LF
  misc_feature 24..25: note = Core
  misc_feature 26..50: note = RF
cttttgcaacactatcggttaaaagcggacatcggcgccgtctcggctca

SEQ ID NO: 21588 - DNA, 50 bp, unidentified
  source 1..50: mol_type = unassigned DNA; note = target_1ca97e6
  misc_feature 1..23: note = LF
  misc_feature 24..25: note = Core
  misc_feature 26..50: note = RF
gatcctaccggcgtcagccggtcagtcattcagccggtgatcgcgcggct

SEQ ID NO: 21589 - DNA, 50 bp, unidentified
  source 1..50: mol_type = unassigned DNA; note = target_1caaaac
  misc_feature 1..23: note = LF
  misc_feature 24..25: note = Core
  misc_feature 26..50: note = RF
tggttcatcccggacatcagcacgcctccgccacctcggacaccgtccgt

SEQ ID NO: 21590 - DNA, 50 bp, unidentified
  source 1..50: mol_type = unassigned DNA; note = target_1cb2511
  misc_feature 1..24: note = LF
  misc_feature 25: note = Core
  misc_feature 26..50: note = RF
tgttgtggtagacgtaaagttttacgtctctactttagatactggatgta

SEQ ID NO: 21591 - DNA, 50 bp, unidentified
  source 1..50: mol_type = unassigned DNA; note = target_1cb6eff
  misc_feature 1..23: note = LF
  misc_feature 24..25: note = Core
  misc_feature 26..50: note = RF
gcagagcgcagcccactgatcttgttctttatcaacgatggtagaagttc

SEQ ID NO: 21592 - DNA, 50 bp, unidentified
  source 1..50: mol_type = unassigned DNA; note = target_1cb6f5c
  misc_feature 1..23: note = LF
  misc_feature 24..25: note = Core
  misc_feature 26..50: note = RF
cacctgatcaggctgatccatcggggagtcgccgccaacttccgcttcca

SEQ ID NO: 21593 - DNA, 50 bp, unidentified
  source 1..50: mol_type = unassigned DNA; note = target_1cbf0c4
  misc_feature 1..24: note = LF
  misc_feature 25: note = Core
  misc_feature 26..50: note = RF
tgccaaagcaattaattatacacgttgttgtgctttcgttatttattttt

SEQ ID NO: 21594 - DNA, 50 bp, unidentified
  source 1..50: mol_type = unassigned DNA; note = target_1cc1400
  misc_feature 1..23: note = LF
  misc_feature 24..25: note = Core
  misc_feature 26..50: note = RF
ccgaaaattcaactttgcaacagagcccgaggaagtcggtgatcagatct

SEQ ID NO: 21595 - DNA, 50 bp, unidentified
  source 1..50: mol_type = unassigned DNA; note = target_1cc3c24
  misc_feature 1..24: note = LF
  misc_feature 25: note = Core
  misc_feature 26..50: note = RF
gggacatttctacttagcggaaagcggacatttggactttgggcccacac

SEQ ID NO: 21596 - DNA, 50 bp, unidentified
  source 1..50: mol_type = unassigned DNA; note = target_1cc65b0
  misc_feature 1..23: note = LF
  misc_feature 24..25: note = Core
  misc_feature 26..50: note = RF
tttctataaacctctcattttctctcacgaacaacggatcagagtgcctg

SEQ ID NO: 21597 - DNA, 50 bp, unidentified
  source 1..50: mol_type = unassigned DNA; note = target_1cc76f2
  misc_feature 1..23: note = LF
  misc_feature 24..25: note = Core
  misc_feature 26..50: note = RF
ataattttccaatgaaattcctccttgaataattgtactgtttatttttg

SEQ ID NO: 21598 - DNA, 50 bp, unidentified
  source 1..50: mol_type = unassigned DNA; note = target_1cc89a3
  misc_feature 1..23: note = LF
  misc_feature 24..25: note = Core
  misc_feature 26..50: note = RF
tccggtttttcatacgatcgctccttttgagcgctgatcttttgcgtaaa

SEQ ID NO: 21599 - DNA, 50 bp, unidentified
  source 1..50: mol_type = unassigned DNA; note = target_1cd2841
  misc_feature 1..23: note = LF
  misc_feature 24..25: note = Core
  misc_feature 26..50: note = RF
aaaacgggccagaaaaggcccgttttttatggctggaatttgggataagt

SEQ ID NO: 21600 - DNA, 50 bp, unidentified
  source 1..50: mol_type = unassigned DNA; note = target_1cd3abb
  misc_feature 1..23: note = LF
  misc_feature 24..25: note = Core
  misc_feature 26..50: note = RF
ggggggccacagcgacgatcgtccttctctcagcggtagctttctggaag

SEQ ID NO: 21601 - DNA, 50 bp, unidentified
  source 1..50: mol_type = unassigned DNA; note = target_1ce4651
  misc_feature 1..23: note = LF
  misc_feature 24..25: note = Core
  misc_feature 26..50: note = RF
ccgaccgcccctggctcgcccccccccctggggccgatgcggtatccggg

SEQ ID NO: 21602 - DNA, 50 bp, unidentified
  source 1..50: mol_type = unassigned DNA; note = target_1cf52aa
  misc_feature 1..24: note = LF
  misc_feature 25: note = Core
  misc_feature 26..50: note = RF
tcgcagttttggccggactgtgatttcgatcagccgggttcgcgacgggg

SEQ ID NO: 21603 - DNA, 50 bp, unidentified
  source 1..50: mol_type = unassigned DNA; note = target_1cfdd96
  misc_feature 1..22: note = LF
  misc_feature 23..25: note = Core
  misc_feature 26..50: note = RF
agctgtcacttcaacagccctcctttcctagactctcttgaggaagtcca

SEQ ID NO: 21604 - DNA, 50 bp, unidentified
  source 1..50: mol_type = unassigned DNA; note = target_1d0daa8
  misc_feature 1..23: note = LF
  misc_feature 24..25: note = Core
  misc_feature 26..50: note = RF
aaagagtcgggtaatcggccttctggaaaatcaggcgtcgtcggcttgcg

SEQ ID NO: 21605 - DNA, 50 bp, unidentified
  source 1..50: mol_type = unassigned DNA; note = target_1d11003
  misc_feature 1..23: note = LF
  misc_feature 24..25: note = Core
  misc_feature 26..50: note = RF
agccgcagcgattcacatcatccacaccatcaacgggtcacttcgcgacg

SEQ ID NO: 21606 - DNA, 50 bp, unidentified
  source 1..50: mol_type = unassigned DNA; note = target_1d13dd9
  misc_feature 1..21: note = LF
  misc_feature 22..25: note = Core
  misc_feature 26..50: note = RF
gattgcttcgcttcgctcgcaatgacaagcgcttatttgcatttcgatgc

SEQ ID NO: 21607 - DNA, 50 bp, unidentified
  source 1..50: mol_type = unassigned DNA; note = target_1d1859f
  misc_feature 1..23: note = LF
  misc_feature 24..25: note = Core
  misc_feature 26..50: note = RF
gcatgctccgcatagccgacccctgcgggttgatcgtggaaggccgggcg

SEQ ID NO: 21608 - DNA, 50 bp, unidentified
  source 1..50: mol_type = unassigned DNA; note = target_1d223da
  misc_feature 1..22: note = LF
  misc_feature 23..25: note = Core
  misc_feature 26..50: note = RF
gacatgtcaacatcgacgcgaatgacccgacgcggaaatcgccgttgctc

SEQ ID NO: 21609 - DNA, 50 bp, unidentified
  source 1..50: mol_type = unassigned DNA; note = target_1d28783
  misc_feature 1..23: note = LF
  misc_feature 24..25: note = Core
  misc_feature 26..50: note = RF
tccgcaatgcgaaatgtcgcttttggcccttaaccgccgcccgaggcacg

SEQ ID NO: 21610 - DNA, 50 bp, unidentified
  source 1..50: mol_type = unassigned DNA; note = target_1d2c8ff
  misc_feature 1..23: note = LF
  misc_feature 24..25: note = Core
  misc_feature 26..50: note = RF
aaatgtggaccgcggccggcaacctacgtgtacgtaggttgccgacggag

SEQ ID NO: 21611 - DNA, 50 bp, unidentified
  source 1..50: mol_type = unassigned DNA; note = target_1d2d873
  misc_feature 1..22: note = LF
  misc_feature 23..25: note = Core
  misc_feature 26..50: note = RF
ccggggcgtagaagctccggcccttcttcatgcccttattcacccaagtg

SEQ ID NO: 21612 - DNA, 50 bp, unidentified
  source 1..50: mol_type = unassigned DNA; note = target_1d34506
  misc_feature 1..23: note = LF
  misc_feature 24..25: note = Core
  misc_feature 26..50: note = RF
aaaaacccgcatcgctgcgggtctttgttttttgggaagcacgcctcgcg

SEQ ID NO: 21613 - DNA, 50 bp, unidentified
  source 1..50: mol_type = unassigned DNA; note = target_1d662b6
  misc_feature 1..24: note = LF
  misc_feature 25: note = Core
  misc_feature 26..50: note = RF
aaaatcggggcgggctatccgttacaagtcctcgctgcgctgcgggcttt

SEQ ID NO: 21614 - DNA, 50 bp, unidentified
  source 1..50: mol_type = unassigned DNA; note = target_1d67d37
  misc_feature 1..24: note = LF
  misc_feature 25: note = Core
  misc_feature 26..50: note = RF
taataatgagtaatttaagtttcgcaagtaaatatactctgtataatagt

SEQ ID NO: 21615 - DNA, 50 bp, unidentified
  source 1..50: mol_type = unassigned DNA; note = target_1d6eac4
  misc_feature 1..23: note = LF
  misc_feature 24..25: note = Core
  misc_feature 26..50: note = RF
aaccacactacagtgtgctttaatctaatcttactctgttttgtacaatt

SEQ ID NO: 21616 - DNA, 50 bp, unidentified
  source 1..50: mol_type = unassigned DNA; note = target_1d70a0f
  misc_feature 1..23: note = LF
  misc_feature 24..25: note = Core
  misc_feature 26..50: note = RF
ggcatttcgccaccgccggagcctgtcctcgggccggccgaaggccggac

SEQ ID NO: 21617 - DNA, 50 bp, unidentified
  source 1..50: mol_type = unassigned DNA; note = target_1d75879
  misc_feature 1..22: note = LF
  misc_feature 23..25: note = Core
  misc_feature 26..50: note = RF
cgtcgagcgggacgaagggatgagacggcttttccgcgaacaaagggatg

SEQ ID NO: 21618 - DNA, 50 bp, unidentified
  source 1..50: mol_type = unassigned DNA; note = target_1d78830
  misc_feature 1..23: note = LF
  misc_feature 24..25: note = Core
  misc_feature 26..50: note = RF
ccaatctgaagaccaccagatttagttgtttggaataaccaaacgcccgc

SEQ ID NO: 21619 - DNA, 50 bp, unidentified
  source 1..50: mol_type = unassigned DNA; note = target_1d7ea49
  misc_feature 1..24: note = LF
  misc_feature 25: note = Core
  misc_feature 26..50: note = RF
gtcgtccgcatcgccgaaacgcggcggaatgacgcatgtcgtccacccgc

SEQ ID NO: 21620 - DNA, 50 bp, unidentified
  source 1..50: mol_type = unassigned DNA; note = target_1d88daa
  misc_feature 1..23: note = LF
  misc_feature 24..25: note = Core
  misc_feature 26..50: note = RF
gatggcggtctgttcctcagtcgtccaccgcatacggtcctcccagctgg

SEQ ID NO: 21621 - DNA, 50 bp, unidentified
  source 1..50: mol_type = unassigned DNA; note = target_1d8df51
  misc_feature 1..23: note = LF
  misc_feature 24..25: note = Core
  misc_feature 26..50: note = RF
ctggacggcgtttaagaaccgggctcagcccggacccggcagggcatgat

SEQ ID NO: 21622 - DNA, 50 bp, unidentified
  source 1..50: mol_type = unassigned DNA; note = target_1d8f3cd
  misc_feature 1..21: note = LF
  misc_feature 22..25: note = Core
  misc_feature 26..50: note = RF
tttctttcgttatccattttgtttcctcctcttacttttatacgaaactt

SEQ ID NO: 21623 - DNA, 50 bp, unidentified
  source 1..50: mol_type = unassigned DNA; note = target_1d90911
  misc_feature 1..22: note = LF
  misc_feature 23..25: note = Core
  misc_feature 26..50: note = RF
tggcaccgtgctcggagccgtcaaggccaagcccttcgggtggccgcaaa

SEQ ID NO: 21624 - DNA, 50 bp, unidentified
  source 1..50: mol_type = unassigned DNA; note = target_1d937c2
  misc_feature 1..23: note = LF
  misc_feature 24..25: note = Core
  misc_feature 26..50: note = RF
ccaggggtgtccgtcacgtaattccccatgctcgggcgtgctgagtcgag

SEQ ID NO: 21625 - DNA, 50 bp, unidentified
  source 1..50: mol_type = unassigned DNA; note = target_1d9adb1
  misc_feature 1..24: note = LF
  misc_feature 25: note = Core
  misc_feature 26..50: note = RF
gctgcggctgcgcatcgagaacaccaaccgtgaagtgggccctggcgtca

SEQ ID NO: 21626 - DNA, 50 bp, unidentified
  source 1..50: mol_type = unassigned DNA; note = target_1d9c6f0
  misc_feature 1..24: note = LF
  misc_feature 25: note = Core
  misc_feature 26..50: note = RF
ccggaggctacgtcctcagcgcggcagaggcggacgtctagttcgggtgc

SEQ ID NO: 21627 - DNA, 50 bp, unidentified
  source 1..50: mol_type = unassigned DNA; note = target_1dab636
  misc_feature 1..23: note = LF
  misc_feature 24..25: note = Core
  misc_feature 26..50: note = RF
gtcgcgcttcatcttccgcctcgctcactcgctcacgcagtcccgatcga

SEQ ID NO: 21628 - DNA, 50 bp, unidentified
  source 1..50: mol_type = unassigned DNA; note = target_1daf255
  misc_feature 1..22: note = LF
  misc_feature 23..25: note = Core
  misc_feature 26..50: note = RF
ttattatgtaactaaagcatcagtttagttacataagaaaagtgatttat

SEQ ID NO: 21629 - DNA, 50 bp, unidentified
  source 1..50: mol_type = unassigned DNA; note = target_1db0ac8
  misc_feature 1..24: note = LF
  misc_feature 25: note = Core
  misc_feature 26..50: note = RF
cggatcgacgaactccacatggagttccgtttgccggggcgcggatgctg

SEQ ID NO: 21630 - DNA, 50 bp, unidentified
  source 1..50: mol_type = unassigned DNA; note = target_1db31d1
  misc_feature 1..24: note = LF
  misc_feature 25: note = Core
  misc_feature 26..50: note = RF
tcgaaggccccacctcgccgcgagagcaccgcagggcagtcacgccaccg

SEQ ID NO: 21631 - DNA, 50 bp, unidentified
  source 1..50: mol_type = unassigned DNA; note = target_1db59ea
  misc_feature 1..23: note = LF
  misc_feature 24..25: note = Core
  misc_feature 26..50: note = RF
attacggcagccacttcaaagcagacatcaaaacggtcacacagtacgaa

SEQ ID NO: 21632 - DNA, 50 bp, unidentified
  source 1..50: mol_type = unassigned DNA; note = target_1db6bc1
  misc_feature 1..24: note = LF
  misc_feature 25: note = Core
  misc_feature 26..50: note = RF
tatagcgactgatactatctgcctctttatatgtttcctgacttatcatg

SEQ ID NO: 21633 - DNA, 50 bp, unidentified
  source 1..50: mol_type = unassigned DNA; note = target_1dbcebd
  misc_feature 1..24: note = LF
  misc_feature 25: note = Core
  misc_feature 26..50: note = RF
gataatttttttcattttgaaactctttctttagtacaccgtaatcctaa

SEQ ID NO: 21634 - DNA, 50 bp, unidentified
  source 1..50: mol_type = unassigned DNA; note = target_1dc07da
  misc_feature 1..24: note = LF
  misc_feature 25: note = Core
  misc_feature 26..50: note = RF
taagggaaaagaagggatccaactattcctaaccatcgagtatggttaca

SEQ ID NO: 21635 - DNA, 50 bp, unidentified
  source 1..50: mol_type = unassigned DNA; note = target_1dc183d
  misc_feature 1..24: note = LF
  misc_feature 25: note = Core
  misc_feature 26..50: note = RF
gtcctgatctcggcaggttcgcggcaaatcagggcgattctcgaaaggtc

SEQ ID NO: 21636 - DNA, 50 bp, unidentified
  source 1..50: mol_type = unassigned DNA; note = target_1dc83ab
  misc_feature 1..23: note = LF
  misc_feature 24..25: note = Core
  misc_feature 26..50: note = RF
gcggagaaccaagtggaccgactctcacgaaaggtggacccatgactggg

SEQ ID NO: 21637 - DNA, 50 bp, unidentified
  source 1..50: mol_type = unassigned DNA; note = target_1dca04e
  misc_feature 1..24: note = LF
  misc_feature 25: note = Core
  misc_feature 26..50: note = RF
acagggcccgcaacgcccctcttccgaacaacgcgttgctgaattacctg

SEQ ID NO: 21638 - DNA, 50 bp, unidentified
  source 1..50: mol_type = unassigned DNA; note = target_1dcbeb0
  misc_feature 1..23: note = LF
  misc_feature 24..25: note = Core
  misc_feature 26..50: note = RF
cggttcatgttaaacgcaaaatgctttaggctgatacaatgaaaggaggt

SEQ ID NO: 21639 - DNA, 50 bp, unidentified
  source 1..50: mol_type = unassigned DNA; note = target_1dcc5ad
  misc_feature 1..23: note = LF
  misc_feature 24..25: note = Core
  misc_feature 26..50: note = RF
aaaaaaatatgaatatgcgattttttttctgcgaaactttaaaaaagcat

SEQ ID NO: 21640 - DNA, 50 bp, unidentified
  source 1..50: mol_type = unassigned DNA; note = target_1de6fc3
  misc_feature 1..24: note = LF
  misc_feature 25: note = Core
  misc_feature 26..50: note = RF
ttcgggccgagactgtcggaaattttcgtgttcgggatgacatgatggga

SEQ ID NO: 21641 - DNA, 50 bp, unidentified
  source 1..50: mol_type = unassigned DNA; note = target_1de70c2
  misc_feature 1..23: note = LF
  misc_feature 24..25: note = Core
  misc_feature 26..50: note = RF
cgggcataaacagcatgcccggcctacgacttcatagagtacgtgtatac

SEQ ID NO: 21642 - DNA, 50 bp, unidentified
  source 1..50: mol_type = unassigned DNA; note = target_1df236d
  misc_feature 1..24: note = LF
  misc_feature 25: note = Core
  misc_feature 26..50: note = RF
ttgatgtctaaacaatgcataaaaactacactaagatgctacctctaagg

SEQ ID NO: 21643 - DNA, 50 bp, unidentified
  source 1..50: mol_type = unassigned DNA; note = target_1dfefc1
  misc_feature 1..24: note = LF
  misc_feature 25: note = Core
  misc_feature 26..50: note = RF
cgggtccgacgtctacagcgacaaaatcaacatgagaattctcaccctgc

SEQ ID NO: 21644 - DNA, 50 bp, unidentified
  source 1..50: mol_type = unassigned DNA; note = target_1e0d369
  misc_feature 1..23: note = LF
  misc_feature 24..25: note = Core
  misc_feature 26..50: note = RF
agtcacgttctttgtgacgttcgagcaacgagcaagtcacgttctttgtg

SEQ ID NO: 21645 - DNA, 50 bp, unidentified
  source 1..50: mol_type = unassigned DNA; note = target_1e1c2bd
  misc_feature 1..23: note = LF
  misc_feature 24..25: note = Core
  misc_feature 26..50: note = RF
gcaaaggcggagttgactccgcctttttattgccagctaaaaacaaacgg

SEQ ID NO: 21646 - DNA, 50 bp, unidentified
  source 1..50: mol_type = unassigned DNA; note = target_1e23987
  misc_feature 1..24: note = LF
  misc_feature 25: note = Core
  misc_feature 26..50: note = RF
aagctccttcactatcgtacccgttagcgtaatgattcgaaattcatatt

SEQ ID NO: 21647 - DNA, 50 bp, unidentified
  source 1..50: mol_type = unassigned DNA; note = target_1e26b49
  misc_feature 1..24: note = LF
  misc_feature 25: note = Core
  misc_feature 26..50: note = RF
gctgcttcagtccagcttgttgatttgccgctcgcatatgatccacgctg

SEQ ID NO: 21648 - DNA, 50 bp, unidentified
  source 1..50: mol_type = unassigned DNA; note = target_1e2e5d6
  misc_feature 1..23: note = LF
  misc_feature 24..25: note = Core
  misc_feature 26..50: note = RF
gtggagcacttcaccgacctcgactgaccgacgaggtcgccggggtccgc

SEQ ID NO: 21649 - DNA, 50 bp, unidentified
  source 1..50: mol_type = unassigned DNA; note = target_1e49d52
  misc_feature 1..23: note = LF
  misc_feature 24..25: note = Core
  misc_feature 26..50: note = RF
gcgagacctctcccgcagggtgtctctgtttcgcagtacaaccaaggatg

SEQ ID NO: 21650 - DNA, 50 bp, unidentified
  source 1..50: mol_type = unassigned DNA; note = target_1e536da
  misc_feature 1..22: note = LF
  misc_feature 23..25: note = Core
  misc_feature 26..50: note = RF
ttggttggcacgctctacaacttctgtcgtcacaacaacgtggccgcaag

SEQ ID NO: 21651 - DNA, 50 bp, unidentified
  source 1..50: mol_type = unassigned DNA; note = target_1e5807d
  misc_feature 1..23: note = LF
  misc_feature 24..25: note = Core
  misc_feature 26..50: note = RF
cgacaataaacaggagcttacccctctctagtttattgttattcgatgat

SEQ ID NO: 21652 - DNA, 50 bp, unidentified
  source 1..50: mol_type = unassigned DNA; note = target_1e5ba06
  misc_feature 1..24: note = LF
  misc_feature 25: note = Core
  misc_feature 26..50: note = RF
cgcctgatgaccttaaagctagactaaggtcacacgcttggcgaattaca

SEQ ID NO: 21653 - DNA, 50 bp, unidentified
  source 1..50: mol_type = unassigned DNA; note = target_1e64e5c
  misc_feature 1..23: note = LF
  misc_feature 24..25: note = Core
  misc_feature 26..50: note = RF
caaaggccgcaccttttgcgctccgcgcccaggcacgttactgctgtgcc

SEQ ID NO: 21654 - DNA, 50 bp, unidentified
  source 1..50: mol_type = unassigned DNA; note = target_1e66b8d
  misc_feature 1..23: note = LF
  misc_feature 24..25: note = Core
  misc_feature 26..50: note = RF
ttaagtattttcttcataataaactcctgttaaatgcaacgatattacat

SEQ ID NO: 21655 - DNA, 50 bp, unidentified
  source 1..50: mol_type = unassigned DNA; note = target_1e67120
  misc_feature 1..21: note = LF
  misc_feature 22..25: note = Core
  misc_feature 26..50: note = RF
acggcacacgcgcgacgatcaccccccgacgaccgccggacctgtcggcg

SEQ ID NO: 21656 - DNA, 50 bp, unidentified
  source 1..50: mol_type = unassigned DNA; note = target_1e67259
  misc_feature 1..23: note = LF
  misc_feature 24..25: note = Core
  misc_feature 26..50: note = RF
ggtcgggagctataagctgggtcccgggtctccatccgctcggccaagtg

SEQ ID NO: 21657 - DNA, 50 bp, unidentified
  source 1..50: mol_type = unassigned DNA; note = target_1e6a87c
  misc_feature 1..23: note = LF
  misc_feature 24..25: note = Core
  misc_feature 26..50: note = RF
gtctcattgctgaagtccgctaatgggatattgcggctacgtcacgacgt

SEQ ID NO: 21658 - DNA, 50 bp, unidentified
  source 1..50: mol_type = unassigned DNA; note = target_1e6bdf8
  misc_feature 1..23: note = LF
  misc_feature 24..25: note = Core
  misc_feature 26..50: note = RF
tgtatatacgaagacactgcttgcctgctatgaacgccttttgaattgca

SEQ ID NO: 21659 - DNA, 50 bp, unidentified
  source 1..50: mol_type = unassigned DNA; note = target_1e7257c
  misc_feature 1..24: note = LF
  misc_feature 25: note = Core
  misc_feature 26..50: note = RF
agccttgaagcttgttaattcaattggtattaataataagtgttccgatt

SEQ ID NO: 21660 - DNA, 50 bp, unidentified
  source 1..50: mol_type = unassigned DNA; note = target_1e7695a
  misc_feature 1..23: note = LF
  misc_feature 24..25: note = Core
  misc_feature 26..50: note = RF
gagccctcggttactgacagctacttgggagctggggtcacgttcgagag

SEQ ID NO: 21661 - DNA, 50 bp, unidentified
  source 1..50: mol_type = unassigned DNA; note = target_1e769b6
  misc_feature 1..23: note = LF
  misc_feature 24..25: note = Core
  misc_feature 26..50: note = RF
gcgcaacgaccgcaatctcggggtggaaagcggtcattcactggacaaac

SEQ ID NO: 21662 - DNA, 50 bp, unidentified
  source 1..50: mol_type = unassigned DNA; note = target_1e7f5ee
  misc_feature 1..23: note = LF
  misc_feature 24..25: note = Core
  misc_feature 26..50: note = RF
caagttgaatcattatctgtctcctttcatttgaattcagcgttgtgatt

SEQ ID NO: 21663 - DNA, 50 bp, unidentified
  source 1..50: mol_type = unassigned DNA; note = target_1e8664c
  misc_feature 1..23: note = LF
  misc_feature 24..25: note = Core
  misc_feature 26..50: note = RF
gcactataatatgacattagtttctccttattttgccactgctccgcttt

SEQ ID NO: 21664 - DNA, 50 bp, unidentified
  source 1..50: mol_type = unassigned DNA; note = target_1e8eb84
  misc_feature 1..23: note = LF
  misc_feature 24..25: note = Core
  misc_feature 26..50: note = RF
tggcgcgccgcggccgatgaagatgggctctatgatgccgtagcccaaac

SEQ ID NO: 21665 - DNA, 50 bp, unidentified
  source 1..50: mol_type = unassigned DNA; note = target_1e92874
  misc_feature 1..24: note = LF
  misc_feature 25: note = Core
  misc_feature 26..50: note = RF
tcttcgaactgctggactataaagcagacgttggtgacctcaatctatcg

SEQ ID NO: 21666 - DNA, 50 bp, unidentified
  source 1..50: mol_type = unassigned DNA; note = target_1e9764f
  misc_feature 1..23: note = LF
  misc_feature 24..25: note = Core
  misc_feature 26..50: note = RF
gctgcactgcatatgtcggcttttggcactgagcgtcatttcgatgctgc

SEQ ID NO: 21667 - DNA, 50 bp, unidentified
  source 1..50: mol_type = unassigned DNA; note = target_1ea3463
  misc_feature 1..21: note = LF
  misc_feature 22..25: note = Core
  misc_feature 26..50: note = RF
tgtccatgaatcccatgtcggctcctttcgatagcgtcacatcaagacaa

SEQ ID NO: 21668 - DNA, 50 bp, unidentified
  source 1..50: mol_type = unassigned DNA; note = target_1ea3669
  misc_feature 1..23: note = LF
  misc_feature 24..25: note = Core
  misc_feature 26..50: note = RF
gcgcagggggaaagcatgagaactgcacagccctgacgtgcaggcccctt

SEQ ID NO: 21669 - DNA, 50 bp, unidentified
  source 1..50: mol_type = unassigned DNA; note = target_1eab27e
  misc_feature 1..23: note = LF
  misc_feature 24..25: note = Core
  misc_feature 26..50: note = RF
cgctgttgatttccgctgagatctgacccatgtttgactgtttccccgtc

SEQ ID NO: 21670 - DNA, 50 bp, unidentified
  source 1..50: mol_type = unassigned DNA; note = target_1eaf80d
  misc_feature 1..23: note = LF
  misc_feature 24..25: note = Core
  misc_feature 26..50: note = RF
catgccgtcggcgaccagagcattccccttgacgtctacgcccacttggg

SEQ ID NO: 21671 - DNA, 50 bp, unidentified
  source 1..50: mol_type = unassigned DNA; note = target_1eb1ba9
  misc_feature 1..22: note = LF
  misc_feature 23..25: note = Core
  misc_feature 26..50: note = RF
gccggggtccagaccgtggaggactactgatgcgcgccctgatcctgatc

SEQ ID NO: 21672 - DNA, 50 bp, unidentified
  source 1..50: mol_type = unassigned DNA; note = target_1ebdc39
  misc_feature 1..23: note = LF
  misc_feature 24..25: note = Core
  misc_feature 26..50: note = RF
gcgtgctgcaggtcggtcatcacgccaccagccgtcggtagaagcctcgg

SEQ ID NO: 21673 - DNA, 50 bp, unidentified
  source 1..50: mol_type = unassigned DNA; note = target_1ec558c
  misc_feature 1..21: note = LF
  misc_feature 22..25: note = Core
  misc_feature 26..50: note = RF
ggcaaacggatcgttagggtgctcatgggtagatctccaaacattgggcg

SEQ ID NO: 21674 - DNA, 50 bp, unidentified
  source 1..50: mol_type = unassigned DNA; note = target_1ec872b
  misc_feature 1..23: note = LF
  misc_feature 24..25: note = Core
  misc_feature 26..50: note = RF
tttaccccaaaaagtggcaactgctgcgcacttttcctggaattgctctg

SEQ ID NO: 21675 - DNA, 50 bp, unidentified
  source 1..50: mol_type = unassigned DNA; note = target_1eceaab
  misc_feature 1..23: note = LF
  misc_feature 24..25: note = Core
  misc_feature 26..50: note = RF
cggcacccagaggtggcacgctcctttcggctcggggacagcgctcagcg

SEQ ID NO: 21676 - DNA, 50 bp, unidentified
  source 1..50: mol_type = unassigned DNA; note = target_1ecf22a
  misc_feature 1..23: note = LF
  misc_feature 24..25: note = Core
  misc_feature 26..50: note = RF
tgccaagcctcaagagttcaccatgccaagcctcaagagttcaccatgga

SEQ ID NO: 21677 - DNA, 50 bp, unidentified
  source 1..50: mol_type = unassigned DNA; note = target_1ee7960
  misc_feature 1..23: note = LF
  misc_feature 24..25: note = Core
  misc_feature 26..50: note = RF
acacggattacgcggattacggtgacagcttactgaatccccatttgctt

SEQ ID NO: 21678 - DNA, 50 bp, unidentified
  source 1..50: mol_type = unassigned DNA; note = target_1ef014a
  misc_feature 1..23: note = LF
  misc_feature 24..25: note = Core
  misc_feature 26..50: note = RF
gggcttgctgccaatcagggcgacttttgagaagccctatgcacaagaaa

SEQ ID NO: 21679 - DNA, 50 bp, unidentified
  source 1..50: mol_type = unassigned DNA; note = target_1ef5e1a
  misc_feature 1..24: note = LF
  misc_feature 25: note = Core
  misc_feature 26..50: note = RF
tgatgctcacactaaactgcccgttagcttaatgaacttcgtcagtctaa

SEQ ID NO: 21680 - DNA, 50 bp, unidentified
  source 1..50: mol_type = unassigned DNA; note = target_1ef8417
  misc_feature 1..24: note = LF
  misc_feature 25: note = Core
  misc_feature 26..50: note = RF
cgaaaaaagccaccttgcggtggctttttcttgaatctggcggagacggc

SEQ ID NO: 21681 - DNA, 50 bp, unidentified
  source 1..50: mol_type = unassigned DNA; note = target_1eff8c3
  misc_feature 1..23: note = LF
  misc_feature 24..25: note = Core
  misc_feature 26..50: note = RF
cacaatctcataaataaattttcctcgtttctattttattttttcgattt

SEQ ID NO: 21682 - DNA, 50 bp, unidentified
  source 1..50: mol_type = unassigned DNA; note = target_1f036ab
  misc_feature 1..23: note = LF
  misc_feature 24..25: note = Core
  misc_feature 26..50: note = RF
gtcagctgctgacgtcatggctttctccttcaggatgcgcgcgatgtcgc

SEQ ID NO: 21683 - DNA, 50 bp, unidentified
  source 1..50: mol_type = unassigned DNA; note = target_1f0637c
  misc_feature 1..24: note = LF
  misc_feature 25: note = Core
  misc_feature 26..50: note = RF
cttacttcgctaaggacgccgccccaaaatgatgttcccgctcgtcgctg

SEQ ID NO: 21684 - DNA, 50 bp, unidentified
  source 1..50: mol_type = unassigned DNA; note = target_1f149ad
  misc_feature 1..24: note = LF
  misc_feature 25: note = Core
  misc_feature 26..50: note = RF
taatccgacgcacgaacccataacttccgggttgcccgtcaaccgacaag

SEQ ID NO: 21685 - DNA, 50 bp, unidentified
  source 1..50: mol_type = unassigned DNA; note = target_1f1629f
  misc_feature 1..24: note = LF
  misc_feature 25: note = Core
  misc_feature 26..50: note = RF
agcactcttcattaaacgggcgctttctctaataagaaatagcgccaata

SEQ ID NO: 21686 - DNA, 50 bp, unidentified
  source 1..50: mol_type = unassigned DNA; note = target_1f162fc
  misc_feature 1..24: note = LF
  misc_feature 25: note = Core
  misc_feature 26..50: note = RF
cctctcgactccgcctgccttccgcaggcaggctcgaggagacaatagca

SEQ ID NO: 21687 - DNA, 50 bp, unidentified
  source 1..50: mol_type = unassigned DNA; note = target_1f1840e
  misc_feature 1..23: note = LF
  misc_feature 24..25: note = Core
  misc_feature 26..50: note = RF
ttgctgccgacagcgctctgacctgcggggttggttggtgggcctgccag

SEQ ID NO: 21688 - DNA, 50 bp, unidentified
  source 1..50: mol_type = unassigned DNA; note = target_1f20002
  misc_feature 1..23: note = LF
  misc_feature 24..25: note = Core
  misc_feature 26..50: note = RF
agcccctttatccccttgaccctagcactactttggcagattgaggctgg

SEQ ID NO: 21689 - DNA, 50 bp, unidentified
  source 1..50: mol_type = unassigned DNA; note = target_1f213f6
  misc_feature 1..24: note = LF
  misc_feature 25: note = Core
  misc_feature 26..50: note = RF
cagtggggtggcggcaccccaccccaccccccgggcgggaccgaccccga

SEQ ID NO: 21690 - DNA, 50 bp, unidentified
  source 1..50: mol_type = unassigned DNA; note = target_1f30a9b
  misc_feature 1..23: note = LF
  misc_feature 24..25: note = Core
  misc_feature 26..50: note = RF
aggaccgctttgggtccaggccgtgtgaaaacctgcgcgagccgagaaag

SEQ ID NO: 21691 - DNA, 50 bp, unidentified
  source 1..50: mol_type = unassigned DNA; note = target_1f31585
  misc_feature 1..23: note = LF
  misc_feature 24..25: note = Core
  misc_feature 26..50: note = RF
agcttggcgaaggcctgttcgattgggtttcgatgtaggtgtcgaaggcc

SEQ ID NO: 21692 - DNA, 50 bp, unidentified
  source 1..50: mol_type = unassigned DNA; note = target_1f3ee24
  misc_feature 1..21: note = LF
  misc_feature 22..25: note = Core
  misc_feature 26..50: note = RF
agaccccaccatcccaaaggacccctcagaccccagctcccaccatcgcg

SEQ ID NO: 21693 - DNA, 50 bp, unidentified
  source 1..50: mol_type = unassigned DNA; note = target_1f47fb7
  misc_feature 1..23: note = LF
  misc_feature 24..25: note = Core
  misc_feature 26..50: note = RF
agccatggagccggcttcccacccttcccacagcccttggaaatcccttc

SEQ ID NO: 21694 - DNA, 50 bp, unidentified
  source 1..50: mol_type = unassigned DNA; note = target_1f610b9
  misc_feature 1..23: note = LF
  misc_feature 24..25: note = Core
  misc_feature 26..50: note = RF
tttggcgcggacttgagcttgggtggattgcagaacggcggctattgggt

SEQ ID NO: 21695 - DNA, 50 bp, unidentified
  source 1..50: mol_type = unassigned DNA; note = target_1f643d4
  misc_feature 1..24: note = LF
  misc_feature 25: note = Core
  misc_feature 26..50: note = RF
cgaaaaacagcatgcgcggtcttttttttaaatgtgatgtcgtggcggtt

SEQ ID NO: 21696 - DNA, 50 bp, unidentified
  source 1..50: mol_type = unassigned DNA; note = target_1f6fa4d
  misc_feature 1..24: note = LF
  misc_feature 25: note = Core
  misc_feature 26..50: note = RF
tgtgtgtatccgaaatgcctaacgtaaagctaaagagcgcgccttccacg

SEQ ID NO: 21697 - DNA, 50 bp, unidentified
  source 1..50: mol_type = unassigned DNA; note = target_1f767de
  misc_feature 1..23: note = LF
  misc_feature 24..25: note = Core
  misc_feature 26..50: note = RF
acggacggttcatacggcggttctggtgcaaatggctggtcaggccgaga

SEQ ID NO: 21698 - DNA, 50 bp, unidentified
  source 1..50: mol_type = unassigned DNA; note = target_1f77684
  misc_feature 1..23: note = LF
  misc_feature 24..25: note = Core
  misc_feature 26..50: note = RF
agggtacgggtgctgctcatgcgtcctcctggccggagccggagcgggtc

SEQ ID NO: 21699 - DNA, 50 bp, unidentified
  source 1..50: mol_type = unassigned DNA; note = target_1f77847
  misc_feature 1..22: note = LF
  misc_feature 23..25: note = Core
  misc_feature 26..50: note = RF
ggcaacaaggtaaccgacaagttgacggtgcccatgttatatctagccgg

SEQ ID NO: 21700 - DNA, 50 bp, unidentified
  source 1..50: mol_type = unassigned DNA; note = target_1f7df43
  misc_feature 1..24: note = LF
  misc_feature 25: note = Core
  misc_feature 26..50: note = RF
ggcgtgcgagaaagcgcaccaatttgcacgaaaagtacgacaaccccgga

SEQ ID NO: 21701 - DNA, 50 bp, unidentified
  source 1..50: mol_type = unassigned DNA; note = target_1f7f250
  misc_feature 1..24: note = LF
  misc_feature 25: note = Core
  misc_feature 26..50: note = RF
gcggcaagtagatacaggataactcgttcctcgtttccggcatgacgatg

SEQ ID NO: 21702 - DNA, 50 bp, unidentified
  source 1..50: mol_type = unassigned DNA; note = target_1f8cf49
  misc_feature 1..23: note = LF
  misc_feature 24..25: note = Core
  misc_feature 26..50: note = RF
gtccccgtcacgtttcgacaggctcaacatgacaaggagagacgtgtcat

SEQ ID NO: 21703 - DNA, 50 bp, unidentified
  source 1..50: mol_type = unassigned DNA; note = target_1f8db74
  misc_feature 1..22: note = LF
  misc_feature 23..25: note = Core
  misc_feature 26..50: note = RF
cgaatggctctccttccgagtttgaccctggctgcgtgaaaacgaactgt

SEQ ID NO: 21704 - DNA, 50 bp, unidentified
  source 1..50: mol_type = unassigned DNA; note = target_1f9405c
  misc_feature 1..22: note = LF
  misc_feature 23..25: note = Core
  misc_feature 26..50: note = RF
agccaaacagaagtaaagcgacaaaagccaataaaaattagaacgattct

SEQ ID NO: 21705 - DNA, 50 bp, unidentified
  source 1..50: mol_type = unassigned DNA; note = target_1f95b5b
  misc_feature 1..23: note = LF
  misc_feature 24..25: note = Core
  misc_feature 26..50: note = RF
cgaatacgcttcgctattcgaacctacggccttggtgactcatgctgaac

SEQ ID NO: 21706 - DNA, 50 bp, unidentified
  source 1..50: mol_type = unassigned DNA; note = target_1f999b9
  misc_feature 1..23: note = LF
  misc_feature 24..25: note = Core
  misc_feature 26..50: note = RF
gcggcccaccaggtccaggactcctgacatggagtccgggtccggtcggt

SEQ ID NO: 21707 - DNA, 50 bp, unidentified
  source 1..50: mol_type = unassigned DNA; note = target_1fa4817
  misc_feature 1..23: note = LF
  misc_feature 24..25: note = Core
  misc_feature 26..50: note = RF
ttaatcggaaagcagagttattgctctgaattgactacgatactcagtcc

SEQ ID NO: 21708 - DNA, 50 bp, unidentified
  source 1..50: mol_type = unassigned DNA; note = target_1fa8855
  misc_feature 1..24: note = LF
  misc_feature 25: note = Core
  misc_feature 26..50: note = RF
acgtgccgctccgtaacctgcccccaccccccggggccacgcgagatcgg

SEQ ID NO: 21709 - DNA, 50 bp, unidentified
  source 1..50: mol_type = unassigned DNA; note = target_1fac60b
  misc_feature 1..23: note = LF
  misc_feature 24..25: note = Core
  misc_feature 26..50: note = RF
gtttctgcttccgctctttgttcctttcctacaatctcttcccgatacga

SEQ ID NO: 21710 - DNA, 50 bp, unidentified
  source 1..50: mol_type = unassigned DNA; note = target_1fb68eb
  misc_feature 1..23: note = LF
  misc_feature 24..25: note = Core
  misc_feature 26..50: note = RF
gcgcagcgcaaggcttcgacaagctcagcccgaacggatctttctcatcc

SEQ ID NO: 21711 - DNA, 50 bp, unidentified
  source 1..50: mol_type = unassigned DNA; note = target_1fbd82d
  misc_feature 1..23: note = LF
  misc_feature 24..25: note = Core
  misc_feature 26..50: note = RF
caagaagcccgctttggcgggcttttgttttggttgaattgccagccaca

SEQ ID NO: 21712 - DNA, 50 bp, unidentified
  source 1..50: mol_type = unassigned DNA; note = target_1fc74e7
  misc_feature 1..21: note = LF
  misc_feature 22..25: note = Core
  misc_feature 26..50: note = RF
ccgacggccaccgggtcgaaggtcatcggcccaggtcgggatgtggctga

SEQ ID NO: 21713 - DNA, 50 bp, unidentified
  source 1..50: mol_type = unassigned DNA; note = target_1fd09aa
  misc_feature 1..23: note = LF
  misc_feature 24..25: note = Core
  misc_feature 26..50: note = RF
cgggggtacattctatttccaagtgcgacatgccaatgatttcaacggct

SEQ ID NO: 21714 - DNA, 50 bp, unidentified
  source 1..50: mol_type = unassigned DNA; note = target_1fd2090
  misc_feature 1..22: note = LF
  misc_feature 23..25: note = Core
  misc_feature 26..50: note = RF
ccacggcttctccgctttgtgattagctggttggaaagcaagcgcgggcc

SEQ ID NO: 21715 - DNA, 50 bp, unidentified
  source 1..50: mol_type = unassigned DNA; note = target_1fd2d55
  misc_feature 1..23: note = LF
  misc_feature 24..25: note = Core
  misc_feature 26..50: note = RF
gaggtcgccaagtccgcgaagtcctaaccccccccgggggtagaccgtac

SEQ ID NO: 21716 - DNA, 50 bp, unidentified
  source 1..50: mol_type = unassigned DNA; note = target_1fd8334
  misc_feature 1..21: note = LF
  misc_feature 22..25: note = Core
  misc_feature 26..50: note = RF
gcgcggaccgtcccgtgctcgctcacggcttgaccgggcgcgacctcggt

SEQ ID NO: 21717 - DNA, 50 bp, unidentified
  source 1..50: mol_type = unassigned DNA; note = target_1fda3ef
  misc_feature 1..24: note = LF
  misc_feature 25: note = Core
  misc_feature 26..50: note = RF
acctaaacgtacggagatttccctttcttgaactgtcccttataagtcca

SEQ ID NO: 21718 - DNA, 50 bp, unidentified
  source 1..50: mol_type = unassigned DNA; note = target_1fde3dc
  misc_feature 1..23: note = LF
  misc_feature 24..25: note = Core
  misc_feature 26..50: note = RF
acacctcgccgccgctcatgcctgcccccaaggggtgtagccgaagtcca

SEQ ID NO: 21719 - DNA, 50 bp, unidentified
  source 1..50: mol_type = unassigned DNA; note = target_1fed8cd
  misc_feature 1..24: note = LF
  misc_feature 25: note = Core
  misc_feature 26..50: note = RF
ccaagagtcggtctgagcgtccagtgcgagttgaatgtcggtattgagtt

SEQ ID NO: 21720 - DNA, 50 bp, unidentified
  source 1..50: mol_type = unassigned DNA; note = target_1fefaf3
  misc_feature 1..23: note = LF
  misc_feature 24..25: note = Core
  misc_feature 26..50: note = RF
ggtgttaacggcttatacgtgctctccccggtgaccgggctcttttgcca

SEQ ID NO: 21721 - DNA, 50 bp, unidentified
  source 1..50: mol_type = unassigned DNA; note = target_20035fc
  misc_feature 1..23: note = LF
  misc_feature 24..25: note = Core
  misc_feature 26..50: note = RF
agtccaacagcaagcacttcttcctgaagtcagtaaaatgtcgtccttaa

SEQ ID NO: 21722 - DNA, 50 bp, unidentified
  source 1..50: mol_type = unassigned DNA; note = target_201a03a
  misc_feature 1..22: note = LF
  misc_feature 23..25: note = Core
  misc_feature 26..50: note = RF
attcctgacatatcattttctcctttttcggtgctattcgttctgccttt

SEQ ID NO: 21723 - DNA, 50 bp, unidentified
  source 1..50: mol_type = unassigned DNA; note = target_201be81
  misc_feature 1..23: note = LF
  misc_feature 24..25: note = Core
  misc_feature 26..50: note = RF
aacgctttatcccgcattgtaatctcctatctctacaacacgtaaactgt

SEQ ID NO: 21724 - DNA, 50 bp, unidentified
  source 1..50: mol_type = unassigned DNA; note = target_2024963
  misc_feature 1..23: note = LF
  misc_feature 24..25: note = Core
  misc_feature 26..50: note = RF
tgctaccgctggtattcagtcactcgaagtgacagggcgaagcgtatttc

SEQ ID NO: 21725 - DNA, 50 bp, unidentified
  source 1..50: mol_type = unassigned DNA; note = target_202c74b
  misc_feature 1..24: note = LF
  misc_feature 25: note = Core
  misc_feature 26..50: note = RF
ttattctttttattttaatcaccgctttaatataatttaaaattcgttca

SEQ ID NO: 21726 - DNA, 50 bp, unidentified
  source 1..50: mol_type = unassigned DNA; note = target_202ea97
  misc_feature 1..24: note = LF
  misc_feature 25: note = Core
  misc_feature 26..50: note = RF
tggaaatactctcactactatgaaaaggcatttagaagaagtttctgttc

SEQ ID NO: 21727 - DNA, 50 bp, unidentified
  source 1..50: mol_type = unassigned DNA; note = target_203168e
  misc_feature 1..23: note = LF
  misc_feature 24..25: note = Core
  misc_feature 26..50: note = RF
gaaaccccggccccgcgccggggttctctttccggcatcagcaacaaacg

SEQ ID NO: 21728 - DNA, 50 bp, unidentified
  source 1..50: mol_type = unassigned DNA; note = target_20322fc
  misc_feature 1..23: note = LF
  misc_feature 24..25: note = Core
  misc_feature 26..50: note = RF
cgtaaccacgaacgcctgtggtttgggtcccggatcgcgttcgcggcgct

SEQ ID NO: 21729 - DNA, 50 bp, unidentified
  source 1..50: mol_type = unassigned DNA; note = target_2033f11
  misc_feature 1..23: note = LF
  misc_feature 24..25: note = Core
  misc_feature 26..50: note = RF
agtaggggggattaccaccccacctactggcaaggcctactgtcagatca

SEQ ID NO: 21730 - DNA, 50 bp, unidentified
  source 1..50: mol_type = unassigned DNA; note = target_203b277
  misc_feature 1..23: note = LF
  misc_feature 24..25: note = Core
  misc_feature 26..50: note = RF
tcaaaggctgacaccatttaccgtaggagcgagcttgctcgctcctacgg

SEQ ID NO: 21731 - DNA, 50 bp, unidentified
  source 1..50: mol_type = unassigned DNA; note = target_203c970
  misc_feature 1..22: note = LF
  misc_feature 23..25: note = Core
  misc_feature 26..50: note = RF
ttaaaaattgccccaaacgccctgccggcagccgcaggccgggtttagca

SEQ ID NO: 21732 - DNA, 50 bp, unidentified
  source 1..50: mol_type = unassigned DNA; note = target_203c99b
  misc_feature 1..24: note = LF
  misc_feature 25: note = Core
  misc_feature 26..50: note = RF
gcccggtcggctccttagactgaccgcgtgaaggacatcggtctggtcgg

SEQ ID NO: 21733 - DNA, 50 bp, unidentified
  source 1..50: mol_type = unassigned DNA; note = target_2044d42
  misc_feature 1..24: note = LF
  misc_feature 25: note = Core
  misc_feature 26..50: note = RF
ttcatagcctttaagacagccccttttttgacataaccaacattgcatta

SEQ ID NO: 21734 - DNA, 50 bp, unidentified
  source 1..50: mol_type = unassigned DNA; note = target_2047757
  misc_feature 1..23: note = LF
  misc_feature 24..25: note = Core
  misc_feature 26..50: note = RF
ggcctgtcgtgaatgtccgcaattggggcgtaagccgccgttcgcgccgg

SEQ ID NO: 21735 - DNA, 50 bp, unidentified
  source 1..50: mol_type = unassigned DNA; note = target_2049118
  misc_feature 1..24: note = LF
  misc_feature 25: note = Core
  misc_feature 26..50: note = RF
tccgacatcaagagcgcggtagcctttttaaaatggatttctcccgctca

SEQ ID NO: 21736 - DNA, 50 bp, unidentified
  source 1..50: mol_type = unassigned DNA; note = target_204d61d
  misc_feature 1..23: note = LF
  misc_feature 24..25: note = Core
  misc_feature 26..50: note = RF
tgggaagagccggcaaaaccgccccccccgggtattcctcaatcgcacca

SEQ ID NO: 21737 - DNA, 50 bp, unidentified
  source 1..50: mol_type = unassigned DNA; note = target_2051b04
  misc_feature 1..22: note = LF
  misc_feature 23..25: note = Core
  misc_feature 26..50: note = RF
ccaaaaagcctagtctggaatcagaaatcgggctggagaggatagatgac

SEQ ID NO: 21738 - DNA, 50 bp, unidentified
  source 1..50: mol_type = unassigned DNA; note = target_2054311
  misc_feature 1..24: note = LF
  misc_feature 25: note = Core
  misc_feature 26..50: note = RF
ctcgcgaagtaggctgcggcctttttttaggatatagcactccgccttga

SEQ ID NO: 21739 - DNA, 50 bp, unidentified
  source 1..50: mol_type = unassigned DNA; note = target_2056796
  misc_feature 1..24: note = LF
  misc_feature 25: note = Core
  misc_feature 26..50: note = RF
tctgcagtcgtagcccgaaagtgccgtacgggggcatgccgaccagtgcc

SEQ ID NO: 21740 - DNA, 50 bp, unidentified
  source 1..50: mol_type = unassigned DNA; note = target_20576b5
  misc_feature 1..23: note = LF
  misc_feature 24..25: note = Core
  misc_feature 26..50: note = RF
cgacggaggtcgggccggggcattggcctgcaacgaggtgcgccccggct

SEQ ID NO: 21741 - DNA, 50 bp, unidentified
  source 1..50: mol_type = unassigned DNA; note = target_206067d
  misc_feature 1..23: note = LF
  misc_feature 24..25: note = Core
  misc_feature 26..50: note = RF
ggacgaccgacagcaccgggacgctcaccgggccagccggcgggcgatgg

SEQ ID NO: 21742 - DNA, 50 bp, unidentified
  source 1..50: mol_type = unassigned DNA; note = target_206cb48
  misc_feature 1..23: note = LF
  misc_feature 24..25: note = Core
  misc_feature 26..50: note = RF
cggtgggtaacagggccttggctgattcactggcatgcacagtggaaagg

SEQ ID NO: 21743 - DNA, 50 bp, unidentified
  source 1..50: mol_type = unassigned DNA; note = target_2072438
  misc_feature 1..23: note = LF
  misc_feature 24..25: note = Core
  misc_feature 26..50: note = RF
gcggtttgtggaggagccagatgtgtaaacgctttacgtttactctggtc

SEQ ID NO: 21744 - DNA, 50 bp, unidentified
  source 1..50: mol_type = unassigned DNA; note = target_2078869
  misc_feature 1..23: note = LF
  misc_feature 24..25: note = Core
  misc_feature 26..50: note = RF
ttttagtttccataaagcttcacctcctgtaatgattataccatttggct

SEQ ID NO: 21745 - DNA, 50 bp, unidentified
  source 1..50: mol_type = unassigned DNA; note = target_208930d
  misc_feature 1..23: note = LF
  misc_feature 24..25: note = Core
  misc_feature 26..50: note = RF
gcgcaagagcgcctttgcccaccctacggcaactcgctacgccgcgatca

SEQ ID NO: 21746 - DNA, 50 bp, unidentified
  source 1..50: mol_type = unassigned DNA; note = target_208c55a
  misc_feature 1..24: note = LF
  misc_feature 25: note = Core
  misc_feature 26..50: note = RF
tgtattggatttggtgggcctaacgtaatgtagacggcaaaacccggttg

SEQ ID NO: 21747 - DNA, 50 bp, unidentified
  source 1..50: mol_type = unassigned DNA; note = target_208d0da
  misc_feature 1..23: note = LF
  misc_feature 24..25: note = Core
  misc_feature 26..50: note = RF
ggtggtggtttcaatcaagactcctttcagacagagacatggtttgctgt

SEQ ID NO: 21748 - DNA, 50 bp, unidentified
  source 1..50: mol_type = unassigned DNA; note = target_208d841
  misc_feature 1..24: note = LF
  misc_feature 25: note = Core
  misc_feature 26..50: note = RF
tatattttttttcatatttttccttttttatgccaattatacatgtatga

SEQ ID NO: 21749 - DNA, 50 bp, unidentified
  source 1..50: mol_type = unassigned DNA; note = target_2090fa9
  misc_feature 1..23: note = LF
  misc_feature 24..25: note = Core
  misc_feature 26..50: note = RF
gcaatcgcgggcaagctgaactcctacaaggaagcgggctgttgtgcctg

SEQ ID NO: 21750 - DNA, 50 bp, unidentified
  source 1..50: mol_type = unassigned DNA; note = target_2091438
  misc_feature 1..24: note = LF
  misc_feature 25: note = Core
  misc_feature 26..50: note = RF
tctgttccggcattttcatgtcctctttttgatagatttagctgcccgcc

SEQ ID NO: 21751 - DNA, 50 bp, unidentified
  source 1..50: mol_type = unassigned DNA; note = target_209d6c4
  misc_feature 1..23: note = LF
  misc_feature 24..25: note = Core
  misc_feature 26..50: note = RF
tacatattgcatattcgcccccgtttaacgtaagtagattcagaactagg

SEQ ID NO: 21752 - DNA, 50 bp, unidentified
  source 1..50: mol_type = unassigned DNA; note = target_209ecee
  misc_feature 1..23: note = LF
  misc_feature 24..25: note = Core
  misc_feature 26..50: note = RF
gagggcgagtcgtggggcatcatagcgaagctttcatcggaatcgatacg

SEQ ID NO: 21753 - DNA, 50 bp, unidentified
  source 1..50: mol_type = unassigned DNA; note = target_20a1c66
  misc_feature 1..24: note = LF
  misc_feature 25: note = Core
  misc_feature 26..50: note = RF
cgggcccacggcatgtgctctaacgaactgctaaatggcagcagaggttc

SEQ ID NO: 21754 - DNA, 50 bp, unidentified
  source 1..50: mol_type = unassigned DNA; note = target_20a23d6
  misc_feature 1..24: note = LF
  misc_feature 25: note = Core
  misc_feature 26..50: note = RF
tccccgccgttctttcggcacagcttggcgcaggtccgacggagatcgtg

SEQ ID NO: 21755 - DNA, 50 bp, unidentified
  source 1..50: mol_type = unassigned DNA; note = target_20b8662
  misc_feature 1..24: note = LF
  misc_feature 25: note = Core
  misc_feature 26..50: note = RF
gagttcgtcttcgagcgcgccccccaacccccccggcgtgaccgtgacgg

SEQ ID NO: 21756 - DNA, 50 bp, unidentified
  source 1..50: mol_type = unassigned DNA; note = target_20bc353
  misc_feature 1..23: note = LF
  misc_feature 24..25: note = Core
  misc_feature 26..50: note = RF
taaaatcttctgcattgttccacctccaagtctgtagtgtagcatagttt

SEQ ID NO: 21757 - DNA, 50 bp, unidentified
  source 1..50: mol_type = unassigned DNA; note = target_20beca2
  misc_feature 1..23: note = LF
  misc_feature 24..25: note = Core
  misc_feature 26..50: note = RF
ttcataagtgcttttgttcgttcctttcgtgcaatttcttccggtgttct

SEQ ID NO: 21758 - DNA, 50 bp, unidentified
  source 1..50: mol_type = unassigned DNA; note = target_20c3430
  misc_feature 1..21: note = LF
  misc_feature 22..25: note = Core
  misc_feature 26..50: note = RF
cgacgaagggggttcagccggctcatcgcactacctcaccgatcgctgcg

SEQ ID NO: 21759 - DNA, 50 bp, unidentified
  source 1..50: mol_type = unassigned DNA; note = target_20cbf21
  misc_feature 1..23: note = LF
  misc_feature 24..25: note = Core
  misc_feature 26..50: note = RF
atcgttgccattacctgaaagcagacgtttttggcgaccattctgaaggt

SEQ ID NO: 21760 - DNA, 50 bp, unidentified
  source 1..50: mol_type = unassigned DNA; note = target_20ceee8
  misc_feature 1..23: note = LF
  misc_feature 24..25: note = Core
  misc_feature 26..50: note = RF
gtttgcgacgatggccgacgcccctctggtgggacaggatggcgggagtc

SEQ ID NO: 21761 - DNA, 50 bp, unidentified
  source 1..50: mol_type = unassigned DNA; note = target_20d7f37
  misc_feature 1..23: note = LF
  misc_feature 24..25: note = Core
  misc_feature 26..50: note = RF
tgccttcggcgccccgattcgtcctgcgttcgtgtcactgcgtcacatca

SEQ ID NO: 21762 - DNA, 50 bp, unidentified
  source 1..50: mol_type = unassigned DNA; note = target_20e54c3
  misc_feature 1..24: note = LF
  misc_feature 25: note = Core
  misc_feature 26..50: note = RF
gagccagaggtttcggttcataagcgcgcgtttatacagggcgggcgttc

SEQ ID NO: 21763 - DNA, 50 bp, unidentified
  source 1..50: mol_type = unassigned DNA; note = target_20e81b5
  misc_feature 1..24: note = LF
  misc_feature 25: note = Core
  misc_feature 26..50: note = RF
attcattgcaatgagctatacacgttgttgtgcatagtattttattcctt

SEQ ID NO: 21764 - DNA, 50 bp, unidentified
  source 1..50: mol_type = unassigned DNA; note = target_20faa72
  misc_feature 1..23: note = LF
  misc_feature 24..25: note = Core
  misc_feature 26..50: note = RF
gaagggctcgacgccgttgatcttgcaggtctcgaccagtgaggcgatga

SEQ ID NO: 21765 - DNA, 50 bp, unidentified
  source 1..50: mol_type = unassigned DNA; note = target_20ff04a
  misc_feature 1..23: note = LF
  misc_feature 24..25: note = Core
  misc_feature 26..50: note = RF
agaggtcgtcgtccaccagcacgctcatgccgctgcctccctccggccgg

SEQ ID NO: 21766 - DNA, 50 bp, unidentified
  source 1..50: mol_type = unassigned DNA; note = target_21072e4
  misc_feature 1..24: note = LF
  misc_feature 25: note = Core
  misc_feature 26..50: note = RF
aattatgatgataaattatagacctgaccctattttcttcaataattatc

SEQ ID NO: 21767 - DNA, 50 bp, unidentified
  source 1..50: mol_type = unassigned DNA; note = target_210d265
  misc_feature 1..24: note = LF
  misc_feature 25: note = Core
  misc_feature 26..50: note = RF
gcaaagcttcaaaatcatgttgtcacctcttcctttccacgcatttttcc

SEQ ID NO: 21768 - DNA, 50 bp, unidentified
  source 1..50: mol_type = unassigned DNA; note = target_211274e
  misc_feature 1..23: note = LF
  misc_feature 24..25: note = Core
  misc_feature 26..50: note = RF
cgtgggcggcccagtcgcccaccctacgtcttacagcaagtgatccagca

SEQ ID NO: 21769 - DNA, 50 bp, unidentified
  source 1..50: mol_type = unassigned DNA; note = target_21184a8
  misc_feature 1..22: note = LF
  misc_feature 23..25: note = Core
  misc_feature 26..50: note = RF
aaggtccatacgccagggctgctttttttacattagcgctcatccgggtt

SEQ ID NO: 21770 - DNA, 50 bp, unidentified
  source 1..50: mol_type = unassigned DNA; note = target_2120405
  misc_feature 1..24: note = LF
  misc_feature 25: note = Core
  misc_feature 26..50: note = RF
tcggcggcgacttccgagagcttttttttgaaagccgcctcctgttcggc

SEQ ID NO: 21771 - DNA, 50 bp, unidentified
  source 1..50: mol_type = unassigned DNA; note = target_2128407
  misc_feature 1..23: note = LF
  misc_feature 24..25: note = Core
  misc_feature 26..50: note = RF
ttatcattctaaatccctactttcttatttttaaaaaaagctgaaacttt

SEQ ID NO: 21772 - DNA, 50 bp, unidentified
  source 1..50: mol_type = unassigned DNA; note = target_212dfd4
  misc_feature 1..24: note = LF
  misc_feature 25: note = Core
  misc_feature 26..50: note = RF
tgctgacctgtttacaacagtaacttccggttggctcgtcatccatcagt

SEQ ID NO: 21773 - DNA, 50 bp, unidentified
  source 1..50: mol_type = unassigned DNA; note = target_2144f1a
  misc_feature 1..23: note = LF
  misc_feature 24..25: note = Core
  misc_feature 26..50: note = RF
accgggtgcgcattggcgcaccccccccccgacaggtcaaaccccgaccg

SEQ ID NO: 21774 - DNA, 50 bp, unidentified
  source 1..50: mol_type = unassigned DNA; note = target_21496fe
  misc_feature 1..24: note = LF
  misc_feature 25: note = Core
  misc_feature 26..50: note = RF
caaccccggcccgtcgccgcctgacccggcagagccggaccgcacccacc

SEQ ID NO: 21775 - DNA, 50 bp, unidentified
  source 1..50: mol_type = unassigned DNA; note = target_215b3d9
  misc_feature 1..23: note = LF
  misc_feature 24..25: note = Core
  misc_feature 26..50: note = RF
gcatgaggtccttcgcttcgctcagatgacagtggaggaggagggagcga

SEQ ID NO: 21776 - DNA, 50 bp, unidentified
  source 1..50: mol_type = unassigned DNA; note = target_215da85
  misc_feature 1..23: note = LF
  misc_feature 24..25: note = Core
  misc_feature 26..50: note = RF
gatgtctgtcgcggctgaagccgctcctacaggggcttgccggctggtga

SEQ ID NO: 21777 - DNA, 50 bp, unidentified
  source 1..50: mol_type = unassigned DNA; note = target_216d2ad
  misc_feature 1..24: note = LF
  misc_feature 25: note = Core
  misc_feature 26..50: note = RF
gattatcgggcgctctatatgggccgaagtgttgcgtcgcgcttccgccg

SEQ ID NO: 21778 - DNA, 50 bp, unidentified
  source 1..50: mol_type = unassigned DNA; note = target_216e140
  misc_feature 1..24: note = LF
  misc_feature 25: note = Core
  misc_feature 26..50: note = RF
tgccatgatctccaggtcccccttttttccccgtcgcaccgtgctagctg

SEQ ID NO: 21779 - DNA, 50 bp, unidentified
  source 1..50: mol_type = unassigned DNA; note = target_217694a
  misc_feature 1..24: note = LF
  misc_feature 25: note = Core
  misc_feature 26..50: note = RF
tccggcggctctctgagccacttttttttgaacgatgcgaggacatgaaa

SEQ ID NO: 21780 - DNA, 50 bp, unidentified
  source 1..50: mol_type = unassigned DNA; note = target_217c9cc
  misc_feature 1..23: note = LF
  misc_feature 24..25: note = Core
  misc_feature 26..50: note = RF
gaccaaatcgtttaggcgtactcctgttattatacgttaaatgagaaccg

SEQ ID NO: 21781 - DNA, 50 bp, unidentified
  source 1..50: mol_type = unassigned DNA; note = target_2184a43
  misc_feature 1..22: note = LF
  misc_feature 23..25: note = Core
  misc_feature 26..50: note = RF
cccttattgaagtaaagcacctgtttagttccataagaaaaagagctgcc

SEQ ID NO: 21782 - DNA, 50 bp, unidentified
  source 1..50: mol_type = unassigned DNA; note = target_2188b9a
  misc_feature 1..23: note = LF
  misc_feature 24..25: note = Core
  misc_feature 26..50: note = RF
agtgctttgatcatgggatcatcctttctttactcttttcttctttttta

SEQ ID NO: 21783 - DNA, 50 bp, unidentified
  source 1..50: mol_type = unassigned DNA; note = target_2190e62
  misc_feature 1..23: note = LF
  misc_feature 24..25: note = Core
  misc_feature 26..50: note = RF
ttattaaactaaactgcaccgttagtttatgtacatttcttcacaagctc

SEQ ID NO: 21784 - DNA, 50 bp, unidentified
  source 1..50: mol_type = unassigned DNA; note = target_219df7d
  misc_feature 1..22: note = LF
  misc_feature 23..25: note = Core
  misc_feature 26..50: note = RF
tcggccttgatgtgtcattgaaagagacctcgatctcggtgcggcagaat

SEQ ID NO: 21785 - DNA, 50 bp, unidentified
  source 1..50: mol_type = unassigned DNA; note = target_21a4d98
  misc_feature 1..23: note = LF
  misc_feature 24..25: note = Core
  misc_feature 26..50: note = RF
tcgtataacatatgtagacgaggaggtttttgacgtgaagcagttaaatg

SEQ ID NO: 21786 - DNA, 50 bp, unidentified
  source 1..50: mol_type = unassigned DNA; note = target_21ab5a9
  misc_feature 1..21: note = LF
  misc_feature 22..25: note = Core
  misc_feature 26..50: note = RF
gcattgcttgctacaatgagtttgccaagtatgttctaacatattggcaa

SEQ ID NO: 21787 - DNA, 50 bp, unidentified
  source 1..50: mol_type = unassigned DNA; note = target_21af8e6
  misc_feature 1..23: note = LF
  misc_feature 24..25: note = Core
  misc_feature 26..50: note = RF
atctttgttagtcgatactgtagtggtcaactaaaactgatcccgtttat

SEQ ID NO: 21788 - DNA, 50 bp, unidentified
  source 1..50: mol_type = unassigned DNA; note = target_21b08ed
  misc_feature 1..23: note = LF
  misc_feature 24..25: note = Core
  misc_feature 26..50: note = RF
ctccccacagatccgcgcccagcctcaccgggcgtcctccctggccatcc

SEQ ID NO: 21789 - DNA, 50 bp, unidentified
  source 1..50: mol_type = unassigned DNA; note = target_21b67a9
  misc_feature 1..22: note = LF
  misc_feature 23..25: note = Core
  misc_feature 26..50: note = RF
tctggctctgatcaatgagtcctgagcctagtcaggtgaacctaaattcg

SEQ ID NO: 21790 - DNA, 50 bp, unidentified
  source 1..50: mol_type = unassigned DNA; note = target_21be954
  misc_feature 1..22: note = LF
  misc_feature 23..25: note = Core
  misc_feature 26..50: note = RF
gaagaaacaaaattatcttcttcatatttaagatgtgttagttatttatt

SEQ ID NO: 21791 - DNA, 50 bp, unidentified
  source 1..50: mol_type = unassigned DNA; note = target_21c2491
  misc_feature 1..23: note = LF
  misc_feature 24..25: note = Core
  misc_feature 26..50: note = RF
ggcaagtgtcgcagaagcggcagtgccggttgctgtcgaggctgctcccg

SEQ ID NO: 21792 - DNA, 50 bp, unidentified
  source 1..50: mol_type = unassigned DNA; note = target_21c6f0b
  misc_feature 1..23: note = LF
  misc_feature 24..25: note = Core
  misc_feature 26..50: note = RF
gcggttcggttctgatgggtcgtctaatcgcgagccattttgcaagtagt

SEQ ID NO: 21793 - DNA, 50 bp, unidentified
  source 1..50: mol_type = unassigned DNA; note = target_21cf5d1
  misc_feature 1..21: note = LF
  misc_feature 22..25: note = Core
  misc_feature 26..50: note = RF
gaggggaccagggttcgggcgctcagccggcctggtcctcgacggccggc

SEQ ID NO: 21794 - DNA, 50 bp, unidentified
  source 1..50: mol_type = unassigned DNA; note = target_21d9038
  misc_feature 1..22: note = LF
  misc_feature 23..25: note = Core
  misc_feature 26..50: note = RF
tttcgcacaactcttctgccccgtttagtttaagaacaatatttcacaat

SEQ ID NO: 21795 - DNA, 50 bp, unidentified
  source 1..50: mol_type = unassigned DNA; note = target_21df889
  misc_feature 1..23: note = LF
  misc_feature 24..25: note = Core
  misc_feature 26..50: note = RF
tcaagtccgggggtcgcaagccttgacccctccgcgcggctctggctctt

SEQ ID NO: 21796 - DNA, 50 bp, unidentified
  source 1..50: mol_type = unassigned DNA; note = target_21e136b
  misc_feature 1..24: note = LF
  misc_feature 25: note = Core
  misc_feature 26..50: note = RF
ccaatcgacggatgcccgagccgccgttctgctcgcctaagtgccggcag

SEQ ID NO: 21797 - DNA, 50 bp, unidentified
  source 1..50: mol_type = unassigned DNA; note = target_21eb556
  misc_feature 1..23: note = LF
  misc_feature 24..25: note = Core
  misc_feature 26..50: note = RF
tatgcgagtgcaatgtcgccttctggcccatttcgacgttcgcggccccg

SEQ ID NO: 21798 - DNA, 50 bp, unidentified
  source 1..50: mol_type = unassigned DNA; note = target_21f3e85
  misc_feature 1..23: note = LF
  misc_feature 24..25: note = Core
  misc_feature 26..50: note = RF
tggagttgaagcttagcgagcgtagcccgggtgagcgcagcgatacccgg

SEQ ID NO: 21799 - DNA, 50 bp, unidentified
  source 1..50: mol_type = unassigned DNA; note = target_220461c
  misc_feature 1..22: note = LF
  misc_feature 23..25: note = Core
  misc_feature 26..50: note = RF
tggagactagttcgcattagactgacagcacccgctgctctccccgacac

SEQ ID NO: 21800 - DNA, 50 bp, unidentified
  source 1..50: mol_type = unassigned DNA; note = target_2208727
  misc_feature 1..23: note = LF
  misc_feature 24..25: note = Core
  misc_feature 26..50: note = RF
ggagtcccaagcggctgattttgtgattcaatggccgtatcgggggaggt

SEQ ID NO: 21801 - DNA, 50 bp, unidentified
  source 1..50: mol_type = unassigned DNA; note = target_220ae29
  misc_feature 1..24: note = LF
  misc_feature 25: note = Core
  misc_feature 26..50: note = RF
gaaaagttacattatttcactacctttcgtactggtctcaaggtaaactc

SEQ ID NO: 21802 - DNA, 50 bp, unidentified
  source 1..50: mol_type = unassigned DNA; note = target_220b174
  misc_feature 1..20: note = LF
  misc_feature 21..25: note = Core
  misc_feature 26..50: note = RF
gcagcccattcgcgggcttgcccgcgaatgggccccgcagcggcccctgt

SEQ ID NO: 21803 - DNA, 50 bp, unidentified
  source 1..50: mol_type = unassigned DNA; note = target_220d30c
  misc_feature 1..23: note = LF
  misc_feature 24..25: note = Core
  misc_feature 26..50: note = RF
gaccaagacggcggatcacgatccgccctacgggctgtggcatacatgtg

SEQ ID NO: 21804 - DNA, 50 bp, unidentified
  source 1..50: mol_type = unassigned DNA; note = target_220d90b
  misc_feature 1..23: note = LF
  misc_feature 24..25: note = Core
  misc_feature 26..50: note = RF
cactcaggaactcaaaggtgttgtggtcaacgaaaattggtcacctcctg

SEQ ID NO: 21805 - DNA, 50 bp, unidentified
  source 1..50: mol_type = unassigned DNA; note = target_22151eb
  misc_feature 1..23: note = LF
  misc_feature 24..25: note = Core
  misc_feature 26..50: note = RF
cgcaataacaaaaagagctccgttcaagtcgggctgcagattttcgctac

SEQ ID NO: 21806 - DNA, 50 bp, unidentified
  source 1..50: mol_type = unassigned DNA; note = target_221db8a
  misc_feature 1..23: note = LF
  misc_feature 24..25: note = Core
  misc_feature 26..50: note = RF
accggctgaggtggcaccccaatagcggacatttaattttgctgttcgca

SEQ ID NO: 21807 - DNA, 50 bp, unidentified
  source 1..50: mol_type = unassigned DNA; note = target_2224950
  misc_feature 1..23: note = LF
  misc_feature 24..25: note = Core
  misc_feature 26..50: note = RF
agagtaaagcgtccgcgccaaggatggcgcggctcgagccatcagggacg

SEQ ID NO: 21808 - DNA, 50 bp, unidentified
  source 1..50: mol_type = unassigned DNA; note = target_2225afa
  misc_feature 1..24: note = LF
  misc_feature 25: note = Core
  misc_feature 26..50: note = RF
ttgaaaagccgccataccgtagcccggatggaacgcagtggaatccggga

SEQ ID NO: 21809 - DNA, 50 bp, unidentified
  source 1..50: mol_type = unassigned DNA; note = target_2225cc1
  misc_feature 1..24: note = LF
  misc_feature 25: note = Core
  misc_feature 26..50: note = RF
tcattacagtattaatactattatctccttcatttttaatggtgcctata

SEQ ID NO: 21810 - DNA, 50 bp, unidentified
  source 1..50: mol_type = unassigned DNA; note = target_222712a
  misc_feature 1..24: note = LF
  misc_feature 25: note = Core
  misc_feature 26..50: note = RF
ctttcctgcaggggtaagacgcggcggtatgacgcctcggcagattgctg

SEQ ID NO: 21811 - DNA, 50 bp, unidentified
  source 1..50: mol_type = unassigned DNA; note = target_2227aa0
  misc_feature 1..24: note = LF
  misc_feature 25: note = Core
  misc_feature 26..50: note = RF
tgactttctagcggtgcccaatagcggtcatcgtaacgcgtgctcgcgga

SEQ ID NO: 21812 - DNA, 50 bp, unidentified
  source 1..50: mol_type = unassigned DNA; note = target_22320d8
  misc_feature 1..23: note = LF
  misc_feature 24..25: note = Core
  misc_feature 26..50: note = RF
tggcatactattcttctctcctccttacgatattatgaaagtaataggat

SEQ ID NO: 21813 - DNA, 50 bp, unidentified
  source 1..50: mol_type = unassigned DNA; note = target_22389b4
  misc_feature 1..24: note = LF
  misc_feature 25: note = Core
  misc_feature 26..50: note = RF
tgagccgatcggcgatccgtaggtcgcgtcgagccgaaggcgagggcgac

SEQ ID NO: 21814 - DNA, 50 bp, unidentified
  source 1..50: mol_type = unassigned DNA; note = target_223d1ca
  misc_feature 1..24: note = LF
  misc_feature 25: note = Core
  misc_feature 26..50: note = RF
ggtgcagtccaattgcaaggcaattgcactgtgacatggtgagattgaaa

SEQ ID NO: 21815 - DNA, 50 bp, unidentified
  source 1..50: mol_type = unassigned DNA; note = target_2243b6b
  misc_feature 1..23: note = LF
  misc_feature 24..25: note = Core
  misc_feature 26..50: note = RF
agctcatccccgacgaattgaatagcccctagatttctggacgccttctt

SEQ ID NO: 21816 - DNA, 50 bp, unidentified
  source 1..50: mol_type = unassigned DNA; note = target_2249b85
  misc_feature 1..23: note = LF
  misc_feature 24..25: note = Core
  misc_feature 26..50: note = RF
acttgttgtccacgatatttctcctttcggtttttcgttttgtttttatg

SEQ ID NO: 21817 - DNA, 50 bp, unidentified
  source 1..50: mol_type = unassigned DNA; note = target_224aa21
  misc_feature 1..23: note = LF
  misc_feature 24..25: note = Core
  misc_feature 26..50: note = RF
caataggcgacaattctcatagctatgtacctcctgcctaaatatctatt

SEQ ID NO: 21818 - DNA, 50 bp, unidentified
  source 1..50: mol_type = unassigned DNA; note = target_225511e
  misc_feature 1..24: note = LF
  misc_feature 25: note = Core
  misc_feature 26..50: note = RF
gtaatgtctcaatttgacctaggctgtatgaaaacgcctgcaaccgctgt

SEQ ID NO: 21819 - DNA, 50 bp, unidentified
  source 1..50: mol_type = unassigned DNA; note = target_225f309
  misc_feature 1..23: note = LF
  misc_feature 24..25: note = Core
  misc_feature 26..50: note = RF
cttttctggcatataatcaccacctttatatgaagtaacgattacctgct

SEQ ID NO: 21820 - DNA, 50 bp, unidentified
  source 1..50: mol_type = unassigned DNA; note = target_22611ef
  misc_feature 1..23: note = LF
  misc_feature 24..25: note = Core
  misc_feature 26..50: note = RF
ttaagtagccgtaaacgtttgtaagtaggtggcatcgacaatttgcgctc

SEQ ID NO: 21821 - DNA, 50 bp, unidentified
  source 1..50: mol_type = unassigned DNA; note = target_2262fc2
  misc_feature 1..22: note = LF
  misc_feature 23..25: note = Core
  misc_feature 26..50: note = RF
gtgatcctgctgcgtctgcttttgacccaaagcggacatccagccgcccc

SEQ ID NO: 21822 - DNA, 50 bp, unidentified
  source 1..50: mol_type = unassigned DNA; note = target_22676fe
  misc_feature 1..23: note = LF
  misc_feature 24..25: note = Core
  misc_feature 26..50: note = RF
aaccatcgcaggagccttcaatgtgcaacctctacgccctgatgaaggcg

SEQ ID NO: 21823 - DNA, 50 bp, unidentified
  source 1..50: mol_type = unassigned DNA; note = target_2271351
  misc_feature 1..23: note = LF
  misc_feature 24..25: note = Core
  misc_feature 26..50: note = RF
ggacgggtgaagcgtcgtccaccctacccgttcccacccgcaccggcgca

SEQ ID NO: 21824 - DNA, 50 bp, unidentified
  source 1..50: mol_type = unassigned DNA; note = target_227ec4d
  misc_feature 1..23: note = LF
  misc_feature 24..25: note = Core
  misc_feature 26..50: note = RF
gattgttgattgccactgagaagtgacatccacaaccaacgatcaggcgc

SEQ ID NO: 21825 - DNA, 50 bp, unidentified
  source 1..50: mol_type = unassigned DNA; note = target_2287628
  misc_feature 1..20: note = LF
  misc_feature 21..25: note = Core
  misc_feature 26..50: note = RF
cctgacgatactgtcagggactttttttatgtttgtaacttgtatgatta

SEQ ID NO: 21826 - DNA, 50 bp, unidentified
  source 1..50: mol_type = unassigned DNA; note = target_229aa51
  misc_feature 1..24: note = LF
  misc_feature 25: note = Core
  misc_feature 26..50: note = RF
gacctgcgttgtgtgaggcctaacgcagagttaaccgggcgacgacgggt

SEQ ID NO: 21827 - DNA, 50 bp, unidentified
  source 1..50: mol_type = unassigned DNA; note = target_22a6bb4
  misc_feature 1..24: note = LF
  misc_feature 25: note = Core
  misc_feature 26..50: note = RF
aaataccgcttgtgagggctttgttgaataaatcgagcttttgtggaatg

SEQ ID NO: 21828 - DNA, 50 bp, unidentified
  source 1..50: mol_type = unassigned DNA; note = target_22a7618
  misc_feature 1..23: note = LF
  misc_feature 24..25: note = Core
  misc_feature 26..50: note = RF
tgcgcgcgacagccgagcatgggctcggctctacaaaggggcacgggctt

SEQ ID NO: 21829 - DNA, 50 bp, unidentified
  source 1..50: mol_type = unassigned DNA; note = target_22aa809
  misc_feature 1..22: note = LF
  misc_feature 23..25: note = Core
  misc_feature 26..50: note = RF
gactctgccaatcggtcgctaatgacccttagcgtcattttttggtacgg

SEQ ID NO: 21830 - DNA, 50 bp, unidentified
  source 1..50: mol_type = unassigned DNA; note = target_22bbece
  misc_feature 1..24: note = LF
  misc_feature 25: note = Core
  misc_feature 26..50: note = RF
cacggtgtgcgggtcgacggcagacggggtggtggctctgctcactcggc

SEQ ID NO: 21831 - DNA, 50 bp, unidentified
  source 1..50: mol_type = unassigned DNA; note = target_22bcdf7
  misc_feature 1..23: note = LF
  misc_feature 24..25: note = Core
  misc_feature 26..50: note = RF
ggtatcgcttcgctcaacccatcctacgaactcaccccagccctgtaggg

SEQ ID NO: 21832 - DNA, 50 bp, unidentified
  source 1..50: mol_type = unassigned DNA; note = target_22c4c10
  misc_feature 1..24: note = LF
  misc_feature 25: note = Core
  misc_feature 26..50: note = RF
tcggaccgggcgcgcgatcagcggcagatgagtgcgcctagactcatgga

SEQ ID NO: 21833 - DNA, 50 bp, unidentified
  source 1..50: mol_type = unassigned DNA; note = target_22c9564
  misc_feature 1..23: note = LF
  misc_feature 24..25: note = Core
  misc_feature 26..50: note = RF
actcaaaaagtcgcagcagcggcttttgttgcctcaaccccaaggcttgt

SEQ ID NO: 21834 - DNA, 50 bp, unidentified
  source 1..50: mol_type = unassigned DNA; note = target_22c9e41
  misc_feature 1..22: note = LF
  misc_feature 23..25: note = Core
  misc_feature 26..50: note = RF
cgggcgcttgtcacttctaaactgaccactctcgcgtcacctggatatct

SEQ ID NO: 21835 - DNA, 50 bp, unidentified
  source 1..50: mol_type = unassigned DNA; note = target_22cd656
  misc_feature 1..23: note = LF
  misc_feature 24..25: note = Core
  misc_feature 26..50: note = RF
tgatggttcttgcatgacaatcccctttccggcagtgtgcgtaggtttac

SEQ ID NO: 21836 - DNA, 50 bp, unidentified
  source 1..50: mol_type = unassigned DNA; note = target_22d5403
  misc_feature 1..24: note = LF
  misc_feature 25: note = Core
  misc_feature 26..50: note = RF
ccgttaccccataacgcacccaccccccgtcaaaccatcacaaagtcagc

SEQ ID NO: 21837 - DNA, 50 bp, unidentified
  source 1..50: mol_type = unassigned DNA; note = target_22d543c
  misc_feature 1..24: note = LF
  misc_feature 25: note = Core
  misc_feature 26..50: note = RF
tcgggaacccgccctccgaggtgccaatatgggcggccctgtgggccggt

SEQ ID NO: 21838 - DNA, 50 bp, unidentified
  source 1..50: mol_type = unassigned DNA; note = target_22d9e83
  misc_feature 1..23: note = LF
  misc_feature 24..25: note = Core
  misc_feature 26..50: note = RF
tgcgggctgatcgagccccccctttttcggcgctcttcacgctctgggaa

SEQ ID NO: 21839 - DNA, 50 bp, unidentified
  source 1..50: mol_type = unassigned DNA; note = target_22dbe2e
  misc_feature 1..23: note = LF
  misc_feature 24..25: note = Core
  misc_feature 26..50: note = RF
aagctccgacagtcgcaatagggtataccccagcgccacgccgctcgtgt

SEQ ID NO: 21840 - DNA, 50 bp, unidentified
  source 1..50: mol_type = unassigned DNA; note = target_22dd421
  misc_feature 1..22: note = LF
  misc_feature 23..25: note = Core
  misc_feature 26..50: note = RF
acgtggcgcgaccgatctagaaccccccacatgcaacgaaaccctttcgg

SEQ ID NO: 21841 - DNA, 50 bp, unidentified
  source 1..50: mol_type = unassigned DNA; note = target_22e612c
  misc_feature 1..22: note = LF
  misc_feature 23..25: note = Core
  misc_feature 26..50: note = RF
tccagtcaccctccggttaacctgacggtgccgtgccctgtcctgctcca

SEQ ID NO: 21842 - DNA, 50 bp, unidentified
  source 1..50: mol_type = unassigned DNA; note = target_22e868f
  misc_feature 1..23: note = LF
  misc_feature 24..25: note = Core
  misc_feature 26..50: note = RF
tggtgacgcgcgctgcccaaaagcggagattagcggaggaagaacgcctg

SEQ ID NO: 21843 - DNA, 50 bp, unidentified
  source 1..50: mol_type = unassigned DNA; note = target_2300364
  misc_feature 1..23: note = LF
  misc_feature 24..25: note = Core
  misc_feature 26..50: note = RF
atcctttcggcagcatcaagcaatggatgaaccagggcgccttcctcatg

SEQ ID NO: 21844 - DNA, 50 bp, unidentified
  source 1..50: mol_type = unassigned DNA; note = target_2301037
  misc_feature 1..24: note = LF
  misc_feature 25: note = Core
  misc_feature 26..50: note = RF
tcaaggggcctgccccactcgtgccgtttagtgacgcttttgacgtgcaa

SEQ ID NO: 21845 - DNA, 50 bp, unidentified
  source 1..50: mol_type = unassigned DNA; note = target_2305488
  misc_feature 1..23: note = LF
  misc_feature 24..25: note = Core
  misc_feature 26..50: note = RF
ttactttcataacaacattatatcatttttttaacaagaaaatataaatt

SEQ ID NO: 21846 - DNA, 50 bp, unidentified
  source 1..50: mol_type = unassigned DNA; note = target_230a2f0
  misc_feature 1..24: note = LF
  misc_feature 25: note = Core
  misc_feature 26..50: note = RF
tgggtcgagacgaggtgacgaggacgaatcggggcagccgaaggcattgg

SEQ ID NO: 21847 - DNA, 50 bp, unidentified
  source 1..50: mol_type = unassigned DNA; note = target_230ea1b
  misc_feature 1..24: note = LF
  misc_feature 25: note = Core
  misc_feature 26..50: note = RF
agaaagttcttgccaaggcggcgccgtccacacatgacccaaaggagaca

SEQ ID NO: 21848 - DNA, 50 bp, unidentified
  source 1..50: mol_type = unassigned DNA; note = target_230efe5
  misc_feature 1..23: note = LF
  misc_feature 24..25: note = Core
  misc_feature 26..50: note = RF
ggtgctgggaatgatgtatgaatagccccgagtttcgtagacccctcggg

SEQ ID NO: 21849 - DNA, 50 bp, unidentified
  source 1..50: mol_type = unassigned DNA; note = target_2325626
  misc_feature 1..20: note = LF
  misc_feature 21..25: note = Core
  misc_feature 26..50: note = RF
cattactttgttttattaataaaaaaccataaggaaacagcaaaagagtt

SEQ ID NO: 21850 - DNA, 50 bp, unidentified
  source 1..50: mol_type = unassigned DNA; note = target_2326bdf
  misc_feature 1..24: note = LF
  misc_feature 25: note = Core
  misc_feature 26..50: note = RF
tcagtccggcccgatgcatgtcatcgttatgcgcgccctcggcttttgat

SEQ ID NO: 21851 - DNA, 50 bp, unidentified
  source 1..50: mol_type = unassigned DNA; note = target_23298da
  misc_feature 1..24: note = LF
  misc_feature 25: note = Core
  misc_feature 26..50: note = RF
cgggcgcctttcactgctgcaaagcggacgttcccacgactcccctcaat

SEQ ID NO: 21852 - DNA, 50 bp, unidentified
  source 1..50: mol_type = unassigned DNA; note = target_232a33e
  misc_feature 1..24: note = LF
  misc_feature 25: note = Core
  misc_feature 26..50: note = RF
atttaaagtaaaaatctagggcgcttgtgccccaaagcgccatagaaacc

SEQ ID NO: 21853 - DNA, 50 bp, unidentified
  source 1..50: mol_type = unassigned DNA; note = target_232ede8
  misc_feature 1..23: note = LF
  misc_feature 24..25: note = Core
  misc_feature 26..50: note = RF
acttctgccacttgttatacctcctttctttaaaacctttctcttaacct

SEQ ID NO: 21854 - DNA, 50 bp, unidentified
  source 1..50: mol_type = unassigned DNA; note = target_2333df3
  misc_feature 1..24: note = LF
  misc_feature 25: note = Core
  misc_feature 26..50: note = RF
cttcgtaactcgcacctcgcacctcgtaactcgcatttcgtagctagcac

SEQ ID NO: 21855 - DNA, 50 bp, unidentified
  source 1..50: mol_type = unassigned DNA; note = target_2338a53
  misc_feature 1..24: note = LF
  misc_feature 25: note = Core
  misc_feature 26..50: note = RF
cactcttcgatcttgccgtagatcttctggttcagatcgctcaccgtcga

SEQ ID NO: 21856 - DNA, 50 bp, unidentified
  source 1..50: mol_type = unassigned DNA; note = target_233ac0a
  misc_feature 1..23: note = LF
  misc_feature 24..25: note = Core
  misc_feature 26..50: note = RF
atatttcatttttattttttctcctttcattttacagtggggaattgttg

SEQ ID NO: 21857 - DNA, 50 bp, unidentified
  source 1..50: mol_type = unassigned DNA; note = target_233bd7f
  misc_feature 1..23: note = LF
  misc_feature 24..25: note = Core
  misc_feature 26..50: note = RF
gtagttctattattttactccttgtctctcttttttagacctcttcggaa

SEQ ID NO: 21858 - DNA, 50 bp, unidentified
  source 1..50: mol_type = unassigned DNA; note = target_233db5c
  misc_feature 1..21: note = LF
  misc_feature 22..25: note = Core
  misc_feature 26..50: note = RF
tcagaagttctgctcatcaaggtcctttcgggtagaaacatttctacatc

SEQ ID NO: 21859 - DNA, 50 bp, unidentified
  source 1..50: mol_type = unassigned DNA; note = target_2344dba
  misc_feature 1..20: note = LF
  misc_feature 21..25: note = Core
  misc_feature 26..50: note = RF
tccttcactgccatggtttcctccttgtgagaaacgcttatagccttgag

SEQ ID NO: 21860 - DNA, 50 bp, unidentified
  source 1..50: mol_type = unassigned DNA; note = target_2349268
  misc_feature 1..24: note = LF
  misc_feature 25: note = Core
  misc_feature 26..50: note = RF
gtgccgctcgactgatcacaaggagagtcatatgccgacttatcgcgtct

SEQ ID NO: 21861 - DNA, 50 bp, unidentified
  source 1..50: mol_type = unassigned DNA; note = target_23580da
  misc_feature 1..24: note = LF
  misc_feature 25: note = Core
  misc_feature 26..50: note = RF
cagaaaacacttgcaagtgggagccggcgctcgcgccgctctgggtcgcg

SEQ ID NO: 21862 - DNA, 50 bp, unidentified
  source 1..50: mol_type = unassigned DNA; note = target_23630c4
  misc_feature 1..21: note = LF
  misc_feature 22..25: note = Core
  misc_feature 26..50: note = RF
catgaggcagctagggcatacccccccagcggcgacgtgctggtgaacca

SEQ ID NO: 21863 - DNA, 50 bp, unidentified
  source 1..50: mol_type = unassigned DNA; note = target_2371467
  misc_feature 1..23: note = LF
  misc_feature 24..25: note = Core
  misc_feature 26..50: note = RF
tcatcgttgctacctttcggagcctgtcaacctttctgagacacgttctt

SEQ ID NO: 21864 - DNA, 50 bp, unidentified
  source 1..50: mol_type = unassigned DNA; note = target_2371d6d
  misc_feature 1..22: note = LF
  misc_feature 23..25: note = Core
  misc_feature 26..50: note = RF
agccgctccgattggggcggctttttttgctatgcatacggccaacttgg

SEQ ID NO: 21865 - DNA, 50 bp, unidentified
  source 1..50: mol_type = unassigned DNA; note = target_2382586
  misc_feature 1..23: note = LF
  misc_feature 24..25: note = Core
  misc_feature 26..50: note = RF
ctccgaaggacaacgagccaccttgttgcatggataattccatttagcaa

SEQ ID NO: 21866 - DNA, 50 bp, unidentified
  source 1..50: mol_type = unassigned DNA; note = target_238a0c1
  misc_feature 1..24: note = LF
  misc_feature 25: note = Core
  misc_feature 26..50: note = RF
ttcagaagcaatgaactatacacattgttagcttgagtatttttattttt

SEQ ID NO: 21867 - DNA, 50 bp, unidentified
  source 1..50: mol_type = unassigned DNA; note = target_238e6b3
  misc_feature 1..21: note = LF
  misc_feature 22..25: note = Core
  misc_feature 26..50: note = RF
aaatttttccgtcatgccggacttgatccggcatccagttgcagcgcgtc

SEQ ID NO: 21868 - DNA, 50 bp, unidentified
  source 1..50: mol_type = unassigned DNA; note = target_23a029f
  misc_feature 1..24: note = LF
  misc_feature 25: note = Core
  misc_feature 26..50: note = RF
gatttccgagcactgcactagggccggactgttgtacgacgtggggcggt

SEQ ID NO: 21869 - DNA, 50 bp, unidentified
  source 1..50: mol_type = unassigned DNA; note = target_23a6b14
  misc_feature 1..23: note = LF
  misc_feature 24..25: note = Core
  misc_feature 26..50: note = RF
ttgttgccatatatttatacctccttaaaaattttattctttcacaccac

SEQ ID NO: 21870 - DNA, 50 bp, unidentified
  source 1..50: mol_type = unassigned DNA; note = target_23a8e03
  misc_feature 1..22: note = LF
  misc_feature 23..25: note = Core
  misc_feature 26..50: note = RF
cgccgccatcgccagcaagccggctcctacaaataggccggggcctattt

SEQ ID NO: 21871 - DNA, 50 bp, unidentified
  source 1..50: mol_type = unassigned DNA; note = target_23ac6c3
  misc_feature 1..23: note = LF
  misc_feature 24..25: note = Core
  misc_feature 26..50: note = RF
ggacacccggctttccctgcgccctctgttttcgagggccgaaggatttg

SEQ ID NO: 21872 - DNA, 50 bp, unidentified
  source 1..50: mol_type = unassigned DNA; note = target_23ad36f
  misc_feature 1..24: note = LF
  misc_feature 25: note = Core
  misc_feature 26..50: note = RF
gacacccaccaaccgcccagcccccaccccccgttatgttttctgcggtc

SEQ ID NO: 21873 - DNA, 50 bp, unidentified
  source 1..50: mol_type = unassigned DNA; note = target_23aefb4
  misc_feature 1..24: note = LF
  misc_feature 25: note = Core
  misc_feature 26..50: note = RF
gcagatggccgagcgcctacgtgccgatacagagtgggtcggcggtcgag

SEQ ID NO: 21874 - DNA, 50 bp, unidentified
  source 1..50: mol_type = unassigned DNA; note = target_23b8915
  misc_feature 1..20: note = LF
  misc_feature 21..25: note = Core
  misc_feature 26..50: note = RF
aagcgatgcgcttgccctgcttgctatcgaaaccctaccttctatttctc

SEQ ID NO: 21875 - DNA, 50 bp, unidentified
  source 1..50: mol_type = unassigned DNA; note = target_23ba56a
  misc_feature 1..23: note = LF
  misc_feature 24..25: note = Core
  misc_feature 26..50: note = RF
aggacctgcaaacgctgctgcgctgtcacatgcaggccttcaccgcgatc

SEQ ID NO: 21876 - DNA, 50 bp, unidentified
  source 1..50: mol_type = unassigned DNA; note = target_23babaf
  misc_feature 1..23: note = LF
  misc_feature 24..25: note = Core
  misc_feature 26..50: note = RF
acggacagttcgcggcggcggcgctgcgcgccgcgatcattctccggtgc

SEQ ID NO: 21877 - DNA, 50 bp, unidentified
  source 1..50: mol_type = unassigned DNA; note = target_23cd9f7
  misc_feature 1..23: note = LF
  misc_feature 24..25: note = Core
  misc_feature 26..50: note = RF
actcatatgccttatgtgcgctcctttcaataatttgaaactcattcaaa

SEQ ID NO: 21878 - DNA, 50 bp, unidentified
  source 1..50: mol_type = unassigned DNA; note = target_23ce3fb
  misc_feature 1..22: note = LF
  misc_feature 23..25: note = Core
  misc_feature 26..50: note = RF
tcggatggaattggatatttcttctccctgccgtattggaatttcggcaa

SEQ ID NO: 21879 - DNA, 50 bp, unidentified
  source 1..50: mol_type = unassigned DNA; note = target_23cfad1
  misc_feature 1..24: note = LF
  misc_feature 25: note = Core
  misc_feature 26..50: note = RF
aaaaggcctgctttcgacccaaagcggacacttaatgcccatgggcgtaa

SEQ ID NO: 21880 - DNA, 50 bp, unidentified
  source 1..50: mol_type = unassigned DNA; note = target_23d6b5f
  misc_feature 1..24: note = LF
  misc_feature 25: note = Core
  misc_feature 26..50: note = RF
aggacgagaatcacttccagaaagcggtcatacgcaacgcgcccagcgct

SEQ ID NO: 21881 - DNA, 50 bp, unidentified
  source 1..50: mol_type = unassigned DNA; note = target_23dfcb2
  misc_feature 1..22: note = LF
  misc_feature 23..25: note = Core
  misc_feature 26..50: note = RF
aagccctttgttaatcgccagaagaacgacgcggcggatgcagaggcgat

SEQ ID NO: 21882 - DNA, 50 bp, unidentified
  source 1..50: mol_type = unassigned DNA; note = target_23e3f87
  misc_feature 1..21: note = LF
  misc_feature 22..25: note = Core
  misc_feature 26..50: note = RF
gtgcgagcggccgggacagcgctcatgccgagaccagcgcgtcgatggcc

SEQ ID NO: 21883 - DNA, 50 bp, unidentified
  source 1..50: mol_type = unassigned DNA; note = target_23e6ff1
  misc_feature 1..23: note = LF
  misc_feature 24..25: note = Core
  misc_feature 26..50: note = RF
ttgcattcgggttcctcctttccctttcgtatacgtttttctctcaggat

SEQ ID NO: 21884 - DNA, 50 bp, unidentified
  source 1..50: mol_type = unassigned DNA; note = target_23efca8
  misc_feature 1..23: note = LF
  misc_feature 24..25: note = Core
  misc_feature 26..50: note = RF
aagcggccgcattctcacggttaagtgccaagcgacacctgcccatgaga

SEQ ID NO: 21885 - DNA, 50 bp, unidentified
  source 1..50: mol_type = unassigned DNA; note = target_23f4a91
  misc_feature 1..23: note = LF
  misc_feature 24..25: note = Core
  misc_feature 26..50: note = RF
tcgtctatcgccgaacaggcccgagcctgctggtggcggaggggcggctg

SEQ ID NO: 21886 - DNA, 50 bp, unidentified
  source 1..50: mol_type = unassigned DNA; note = target_23f87d7
  misc_feature 1..22: note = LF
  misc_feature 23..25: note = Core
  misc_feature 26..50: note = RF
ggcctcatcgccggcaacgccggctcccacagggtttggcgtcgaggtaa

SEQ ID NO: 21887 - DNA, 50 bp, unidentified
  source 1..50: mol_type = unassigned DNA; note = target_24004a8
  misc_feature 1..23: note = LF
  misc_feature 24..25: note = Core
  misc_feature 26..50: note = RF
gtgtgcgtggcggcgcgccgtctagcgcggtccgttcggccgtggcgcag

SEQ ID NO: 21888 - DNA, 50 bp, unidentified
  source 1..50: mol_type = unassigned DNA; note = target_241594e
  misc_feature 1..23: note = LF
  misc_feature 24..25: note = Core
  misc_feature 26..50: note = RF
gccggtcccggcccccgcggatcctttcatgcgcgcgctcgggagcattc

SEQ ID NO: 21889 - DNA, 50 bp, unidentified
  source 1..50: mol_type = unassigned DNA; note = target_24250bb
  misc_feature 1..23: note = LF
  misc_feature 24..25: note = Core
  misc_feature 26..50: note = RF
caatttcttcttgactaatacccctttctagttctgcgcgtttttcaaac

SEQ ID NO: 21890 - DNA, 50 bp, unidentified
  source 1..50: mol_type = unassigned DNA; note = target_2425265
  misc_feature 1..23: note = LF
  misc_feature 24..25: note = Core
  misc_feature 26..50: note = RF
gaccggcttgccgacgaggtccgctagtctttcgggctgatggcgttgcc

SEQ ID NO: 21891 - DNA, 50 bp, unidentified
  source 1..50: mol_type = unassigned DNA; note = target_2437058
  misc_feature 1..23: note = LF
  misc_feature 24..25: note = Core
  misc_feature 26..50: note = RF
tgttctgacatttttaaatcctccttttttataaaaaaatttattgttcc

SEQ ID NO: 21892 - DNA, 50 bp, unidentified
  source 1..50: mol_type = unassigned DNA; note = target_243c761
  misc_feature 1..23: note = LF
  misc_feature 24..25: note = Core
  misc_feature 26..50: note = RF
atttacctgtagcatattatcacctcaaacaattaaaattttaacagaaa

SEQ ID NO: 21893 - DNA, 50 bp, unidentified
  source 1..50: mol_type = unassigned DNA; note = target_244236b
  misc_feature 1..23: note = LF
  misc_feature 24..25: note = Core
  misc_feature 26..50: note = RF
ggtccgatgtacctggcgtggtcctttcttgtacctggggtggacctgcg

SEQ ID NO: 21894 - DNA, 50 bp, unidentified
  source 1..50: mol_type = unassigned DNA; note = target_2444310
  misc_feature 1..24: note = LF
  misc_feature 25: note = Core
  misc_feature 26..50: note = RF
tgatttttctaggttaattgtaagcggtgcgtgaaccgaggggttgccta

SEQ ID NO: 21895 - DNA, 50 bp, unidentified
  source 1..50: mol_type = unassigned DNA; note = target_24520ad
  misc_feature 1..22: note = LF
  misc_feature 23..25: note = Core
  misc_feature 26..50: note = RF
ccctgcgggcggcgctatgctaaacctccggtgggtacccttttaactgg

SEQ ID NO: 21896 - DNA, 50 bp, unidentified
  source 1..50: mol_type = unassigned DNA; note = target_246ad7d
  misc_feature 1..23: note = LF
  misc_feature 24..25: note = Core
  misc_feature 26..50: note = RF
ggggtgccggcacggtggcggcgctcaccagatcactcccctcgaggtca

SEQ ID NO: 21897 - DNA, 50 bp, unidentified
  source 1..50: mol_type = unassigned DNA; note = target_246b3fc
  misc_feature 1..23: note = LF
  misc_feature 24..25: note = Core
  misc_feature 26..50: note = RF
acggtagccccctctggcaggatagttgtcactgttaaaatttaaccagt

SEQ ID NO: 21898 - DNA, 50 bp, unidentified
  source 1..50: mol_type = unassigned DNA; note = target_248160f
  misc_feature 1..24: note = LF
  misc_feature 25: note = Core
  misc_feature 26..50: note = RF
cgctcagcgatattcataaaaatcacctcaaaaagcagtatatcaaaatt

SEQ ID NO: 21899 - DNA, 50 bp, unidentified
  source 1..50: mol_type = unassigned DNA; note = target_248280d
  misc_feature 1..23: note = LF
  misc_feature 24..25: note = Core
  misc_feature 26..50: note = RF
ttggtgtacccgaacgccgcgccctgcttggcgaccccgtacacctggca

SEQ ID NO: 21900 - DNA, 50 bp, unidentified
  source 1..50: mol_type = unassigned DNA; note = target_24873a9
  misc_feature 1..22: note = LF
  misc_feature 23..25: note = Core
  misc_feature 26..50: note = RF
gctggagtgtagctactccggccttcttcttcttggccttattcacccaa

SEQ ID NO: 21901 - DNA, 50 bp, unidentified
  source 1..50: mol_type = unassigned DNA; note = target_2493997
  misc_feature 1..21: note = LF
  misc_feature 22..25: note = Core
  misc_feature 26..50: note = RF
aaccggcactaaacccttacaatccctaacgcaaaacccaccgtttaagc

SEQ ID NO: 21902 - DNA, 50 bp, unidentified
  source 1..50: mol_type = unassigned DNA; note = target_2496618
  misc_feature 1..21: note = LF
  misc_feature 22..25: note = Core
  misc_feature 26..50: note = RF
gtaacgccgatggaggcatggatgaccgggccgatctcctcgggacaagc

SEQ ID NO: 21903 - DNA, 50 bp, unidentified
  source 1..50: mol_type = unassigned DNA; note = target_249839d
  misc_feature 1..21: note = LF
  misc_feature 22..25: note = Core
  misc_feature 26..50: note = RF
ggcagctccagcccaaagccgctccgccgacctactctcactcgttctgt

SEQ ID NO: 21904 - DNA, 50 bp, unidentified
  source 1..50: mol_type = unassigned DNA; note = target_249a6da
  misc_feature 1..23: note = LF
  misc_feature 24..25: note = Core
  misc_feature 26..50: note = RF
ggatggatgagcatgatggtaagcgctgagcgagccccatggtcgtcgcg

SEQ ID NO: 21905 - DNA, 50 bp, unidentified
  source 1..50: mol_type = unassigned DNA; note = target_249b225
  misc_feature 1..22: note = LF
  misc_feature 23..25: note = Core
  misc_feature 26..50: note = RF
ctttttcattttgctttcctcatttcttattatttttattgtaaatggga

SEQ ID NO: 21906 - DNA, 50 bp, unidentified
  source 1..50: mol_type = unassigned DNA; note = target_24a0886
  misc_feature 1..23: note = LF
  misc_feature 24..25: note = Core
  misc_feature 26..50: note = RF
aaataataatttcatatttactcctttatttaaatcatgccctaaaatct

SEQ ID NO: 21907 - DNA, 50 bp, unidentified
  source 1..50: mol_type = unassigned DNA; note = target_24ad066
  misc_feature 1..23: note = LF
  misc_feature 24..25: note = Core
  misc_feature 26..50: note = RF
tctcgcgtcgagcgtcggacgattgcgcgcggctatagctgtggcagctt

SEQ ID NO: 21908 - DNA, 50 bp, unidentified
  source 1..50: mol_type = unassigned DNA; note = target_24af800
  misc_feature 1..24: note = LF
  misc_feature 25: note = Core
  misc_feature 26..50: note = RF
ttcgacataatattcatacctctcttctgaaaaatgagtttcttacttat

SEQ ID NO: 21909 - DNA, 50 bp, unidentified
  source 1..50: mol_type = unassigned DNA; note = target_24b7c11
  misc_feature 1..22: note = LF
  misc_feature 23..25: note = Core
  misc_feature 26..50: note = RF
agctgaagccggtcatcgaggttcctttcggatggtgccaaccgtggcaa

SEQ ID NO: 21910 - DNA, 50 bp, unidentified
  source 1..50: mol_type = unassigned DNA; note = target_24bb925
  misc_feature 1..22: note = LF
  misc_feature 23..25: note = Core
  misc_feature 26..50: note = RF
aagctggacaagcggcgcataaaaccccattggttgcgaattcagcagcg

SEQ ID NO: 21911 - DNA, 50 bp, unidentified
  source 1..50: mol_type = unassigned DNA; note = target_24c7d51
  misc_feature 1..23: note = LF
  misc_feature 24..25: note = Core
  misc_feature 26..50: note = RF
gtttcgcagaggtctctgaaccggacattgcaaactgcaacagggatcat

SEQ ID NO: 21912 - DNA, 50 bp, unidentified
  source 1..50: mol_type = unassigned DNA; note = target_24ca97d
  misc_feature 1..23: note = LF
  misc_feature 24..25: note = Core
  misc_feature 26..50: note = RF
tgccctttccgagggccgcggcgtgggtccctgcgttccaggctgtgtaa

SEQ ID NO: 21913 - DNA, 50 bp, unidentified
  source 1..50: mol_type = unassigned DNA; note = target_24cd1db
  misc_feature 1..22: note = LF
  misc_feature 23..25: note = Core
  misc_feature 26..50: note = RF
attgcggacctaagacttacgaagtttttaaaacttcgtaagtctgggtt

SEQ ID NO: 21914 - DNA, 50 bp, unidentified
  source 1..50: mol_type = unassigned DNA; note = target_24d9a31
  misc_feature 1..23: note = LF
  misc_feature 24..25: note = Core
  misc_feature 26..50: note = RF
tggcggatcaggccatggggttcctagcggcatcgaccctgtatggtcct

SEQ ID NO: 21915 - DNA, 50 bp, unidentified
  source 1..50: mol_type = unassigned DNA; note = target_24df675
  misc_feature 1..22: note = LF
  misc_feature 23..25: note = Core
  misc_feature 26..50: note = RF
gccgcgagtaccaccatcgtcctgagcttgtcgaaccacggcaatgcgaa

SEQ ID NO: 21916 - DNA, 50 bp, unidentified
  source 1..50: mol_type = unassigned DNA; note = target_24e4c04
  misc_feature 1..23: note = LF
  misc_feature 24..25: note = Core
  misc_feature 26..50: note = RF
gatggcgagcctatgtccgccattggtccgaggacaatggcgagcgcggc

SEQ ID NO: 21917 - DNA, 50 bp, unidentified; identical to SEQ ID NO: 21190
  source 1..50: mol_type = unassigned DNA; note = target_24f6b81
  misc_feature 1..22: note = LF
  misc_feature 23..25: note = Core
  misc_feature 26..50: note = RF

SEQ ID NO: 21918 - DNA, 50 bp, unidentified
  source 1..50: mol_type = unassigned DNA; note = target_250426d
  misc_feature 1..23: note = LF
  misc_feature 24..25: note = Core
  misc_feature 26..50: note = RF
tttccccgtctgcacaatatcacctcgattattctttcatgtatacagca

SEQ ID NO: 21919 - DNA, 50 bp, unidentified
  source 1..50: mol_type = unassigned DNA; note = target_250fc27
  misc_feature 1..23: note = LF
  misc_feature 24..25: note = Core
  misc_feature 26..50: note = RF
gccacagttgaacttcctaaaagcggaccgtccgctgctccgacggtaca

SEQ ID NO: 21920 - DNA, 50 bp, unidentified
  source 1..50: mol_type = unassigned DNA; note = target_2515e0e
  misc_feature 1..24: note = LF
  misc_feature 25: note = Core
  misc_feature 26..50: note = RF
ggcatgggcatgcccccgaagtgccgtacggggatagggcatagccgtgg

SEQ ID NO: 21921 - DNA, 50 bp, unidentified
  source 1..50: mol_type = unassigned DNA; note = target_2519b7a
  misc_feature 1..22: note = LF
  misc_feature 23..25: note = Core
  misc_feature 26..50: note = RF
tatgcataggtagggcttgctcctttctcttcacaaacaggtcatatcag

SEQ ID NO: 21922 - DNA, 50 bp, unidentified
  source 1..50: mol_type = unassigned DNA; note = target_253007f
  misc_feature 1..21: note = LF
  misc_feature 22..25: note = Core
  misc_feature 26..50: note = RF
ccgagacgcggcagccccccacccccccccacgatcgtgagggtcggggg

SEQ ID NO: 21923 - DNA, 50 bp, unidentified
  source 1..50: mol_type = unassigned DNA; note = target_2537ca6
  misc_feature 1..23: note = LF
  misc_feature 24..25: note = Core
  misc_feature 26..50: note = RF
cggcccgcctgcaaagtgcccaaagtcaccgttctcattcgacgctcggc

SEQ ID NO: 21924 - DNA, 50 bp, unidentified
  source 1..50: mol_type = unassigned DNA; note = target_25399f5
  misc_feature 1..23: note = LF
  misc_feature 24..25: note = Core
  misc_feature 26..50: note = RF
ggctcagactcgcggcagcgcccctcatcccaccttctccagccgaagtc

SEQ ID NO: 21925 - DNA, 50 bp, unidentified
  source 1..50: mol_type = unassigned DNA; note = target_25440c0
  misc_feature 1..23: note = LF
  misc_feature 24..25: note = Core
  misc_feature 26..50: note = RF
gctggaagccgtattcgtcgtaatgacggccggacagacccatgactgca

SEQ ID NO: 21926 - DNA, 50 bp, unidentified
  source 1..50: mol_type = unassigned DNA; note = target_25454f5
  misc_feature 1..23: note = LF
  misc_feature 24..25: note = Core
  misc_feature 26..50: note = RF
agcccaccgggttcgacctgtccctaagtgggccgctctgtcgcacgtcc

SEQ ID NO: 21927 - DNA, 50 bp, unidentified
  source 1..50: mol_type = unassigned DNA; note = target_2554cda
  misc_feature 1..23: note = LF
  misc_feature 24..25: note = Core
  misc_feature 26..50: note = RF
taaattttccatagtgttacctccttattttattaaaatttatactgaaa

SEQ ID NO: 21928 - DNA, 50 bp, unidentified
  source 1..50: mol_type = unassigned DNA; note = target_255c9e6
  misc_feature 1..22: note = LF
  misc_feature 23..25: note = Core
  misc_feature 26..50: note = RF
tagaagggctaatgggatgcccttttttcaggtgggatttaggtagatgg

SEQ ID NO: 21929 - DNA, 50 bp, unidentified
  source 1..50: mol_type = unassigned DNA; note = target_255f5be
  misc_feature 1..23: note = LF
  misc_feature 24..25: note = Core
  misc_feature 26..50: note = RF
ccggcactactctcggctccagcggcaggctcagccactggtccaggccg

SEQ ID NO: 21930 - DNA, 50 bp, unidentified
  source 1..50: mol_type = unassigned DNA; note = target_256071b
  misc_feature 1..22: note = LF
  misc_feature 23..25: note = Core
  misc_feature 26..50: note = RF
ttgcttcaatgttcactatttccataatcaattattttttagataggtta

SEQ ID NO: 21931 - DNA, 50 bp, unidentified
  source 1..50: mol_type = unassigned DNA; note = target_256ee3b
  misc_feature 1..24: note = LF
  misc_feature 25: note = Core
  misc_feature 26..50: note = RF
ttttcctgcttctcgatgccagagaaaggatagcgaagacggctgcggtc

SEQ ID NO: 21932 - DNA, 50 bp, unidentified
  source 1..50: mol_type = unassigned DNA; note = target_2573ae7
  misc_feature 1..22: note = LF
  misc_feature 23..25: note = Core
  misc_feature 26..50: note = RF
tcgggaagtcgggaagtccggaagtccgaaagtccgaaagttggaaagtt

SEQ ID NO: 21933 - DNA, 50 bp, unidentified
  source 1..50: mol_type = unassigned DNA; note = target_2575610
  misc_feature 1..23: note = LF
  misc_feature 24..25: note = Core
  misc_feature 26..50: note = RF
acctcagccacgaagacggacatacggtcttaccattcggacgcatcgcg

SEQ ID NO: 21934 - DNA, 50 bp, unidentified
  source 1..50: mol_type = unassigned DNA; note = target_25799bd
  misc_feature 1..22: note = LF
  misc_feature 23..25: note = Core
  misc_feature 26..50: note = RF
actgctccttaaagagcagccttgaatcagaacttgggccggttgaaaat

SEQ ID NO: 21935 - DNA, 50 bp, unidentified
  source 1..50: mol_type = unassigned DNA; note = target_257ec1a
  misc_feature 1..22: note = LF
  misc_feature 23..25: note = Core
  misc_feature 26..50: note = RF
atgccgttggcagggggtatccacaccatcacttctcagcgacaatcaac

SEQ ID NO: 21936 - DNA, 50 bp, unidentified
  source 1..50: mol_type = unassigned DNA; note = target_2594669
  misc_feature 1..22: note = LF
  misc_feature 23..25: note = Core
  misc_feature 26..50: note = RF
ttcttaatgaactaacgggtgcgtttagttaaataaggtttaggtattcc

SEQ ID NO: 21937 - DNA, 50 bp, unidentified
  source 1..50: mol_type = unassigned DNA; note = target_25968f8
  misc_feature 1..23: note = LF
  misc_feature 24..25: note = Core
  misc_feature 26..50: note = RF
atcgttgggatgacgaggatcatagattccatcctcgtcgacgatgaccg

SEQ ID NO: 21938 - DNA, 50 bp, unidentified
  source 1..50: mol_type = unassigned DNA; note = target_259a3d2
  misc_feature 1..23: note = LF
  misc_feature 24..25: note = Core
  misc_feature 26..50: note = RF
actgccgtcggctctgctaaactgactctcaattgaaaacgccctgggct

SEQ ID NO: 21939 - DNA, 50 bp, unidentified
  source 1..50: mol_type = unassigned DNA; note = target_259dbd9
  misc_feature 1..22: note = LF
  misc_feature 23..25: note = Core
  misc_feature 26..50: note = RF
tttttcataattattcatccccctttttatacagtgtctatgttattttc

SEQ ID NO: 21940 - DNA, 50 bp, unidentified
  source 1..50: mol_type = unassigned DNA; note = target_25a16a6
  misc_feature 1..23: note = LF
  misc_feature 24..25: note = Core
  misc_feature 26..50: note = RF
ttaacgcaagtaggccaccccccctttttgccgcaaattgaccgcgtttc

SEQ ID NO: 21941 - DNA, 50 bp, unidentified
  source 1..50: mol_type = unassigned DNA; note = target_25a6fd2
  misc_feature 1..20: note = LF
  misc_feature 21..25: note = Core
  misc_feature 26..50: note = RF
tgactgcaccggccaactacccccccccacgcggagcgcgtgtcgtcgat

SEQ ID NO: 21942 - DNA, 50 bp, unidentified
  source 1..50: mol_type = unassigned DNA; note = target_25ae482
  misc_feature 1..24: note = LF
  misc_feature 25: note = Core
  misc_feature 26..50: note = RF
acatgatcatatgactccttcccccccctcaacttcagacggcttctcac

SEQ ID NO: 21943 - DNA, 50 bp, unidentified
  source 1..50: mol_type = unassigned DNA; note = target_25b6955
  misc_feature 1..23: note = LF
  misc_feature 24..25: note = Core
  misc_feature 26..50: note = RF
acgccaaattccgggaccggaatccagcgcttcctccggtcaccatgagg

SEQ ID NO: 21944 - DNA, 50 bp, unidentified
  source 1..50: mol_type = unassigned DNA; note = target_25bb604
  misc_feature 1..24: note = LF
  misc_feature 25: note = Core
  misc_feature 26..50: note = RF
acgctgaatgactgaaaaaaaaggcgctgtcaccgttcgatgttggacat

SEQ ID NO: 21945 - DNA, 50 bp, unidentified
  source 1..50: mol_type = unassigned DNA; note = target_25bc9ba
  misc_feature 1..23: note = LF
  misc_feature 24..25: note = Core
  misc_feature 26..50: note = RF
atatgtaaatctatcataaatacctcctatttttttataactattactgg

SEQ ID NO: 21946 - DNA, 50 bp, unidentified
  source 1..50: mol_type = unassigned DNA; note = target_25bd72c
  misc_feature 1..24: note = LF
  misc_feature 25: note = Core
  misc_feature 26..50: note = RF
tgacaggcaggacgcgacccaaagcggacattcgcaaatcaagccaccaa

SEQ ID NO: 21947 - DNA, 50 bp, unidentified
  source 1..50: mol_type = unassigned DNA; note = target_25c3f8f
  misc_feature 1..24: note = LF
  misc_feature 25: note = Core
  misc_feature 26..50: note = RF
attcgcggcttcgctgctcacccccaccttctccccgaggggagaagaga

SEQ ID NO: 21948 - DNA, 50 bp, unidentified
  source 1..50: mol_type = unassigned DNA; note = target_25d2eb3
  misc_feature 1..24: note = LF
  misc_feature 25: note = Core
  misc_feature 26..50: note = RF
ccgcttggccgcgggcgtcaccatttttttgccagcagcgccttcagcgc

SEQ ID NO: 21949 - DNA, 50 bp, unidentified
  source 1..50: mol_type = unassigned DNA; note = target_25d410f
  misc_feature 1..23: note = LF
  misc_feature 24..25: note = Core
  misc_feature 26..50: note = RF
atgcttgcccgggcgggatgatcctttcgtgcctcgtcccgggtcgtgcc

SEQ ID NO: 21950 - DNA, 50 bp, unidentified
  source 1..50: mol_type = unassigned DNA; note = target_25d5bda
  misc_feature 1..23: note = LF
  misc_feature 24..25: note = Core
  misc_feature 26..50: note = RF
accgcgtcggactgaagtccgacctacaaaaaccgcttattttcacggca

SEQ ID NO: 21951 - DNA, 50 bp, unidentified
  source 1..50: mol_type = unassigned DNA; note = target_25e8a61
  misc_feature 1..22: note = LF
  misc_feature 23..25: note = Core
  misc_feature 26..50: note = RF
gcgatttcatcatttctgagtcagaccccaattctgacccgcgcgaccgg

SEQ ID NO: 21952 - DNA, 50 bp, unidentified
  source 1..50: mol_type = unassigned DNA; note = target_25e93ee
  misc_feature 1..23: note = LF
  misc_feature 24..25: note = Core
  misc_feature 26..50: note = RF
tcgaggtgtagccgcaaggaaggctcacgtccggttctgtgagcgccggg

SEQ ID NO: 21953 - DNA, 50 bp, unidentified
  source 1..50: mol_type = unassigned DNA; note = target_25ee7f6
  misc_feature 1..23: note = LF
  misc_feature 24..25: note = Core
  misc_feature 26..50: note = RF
catccgatcactcatttatcctcctatgctgaagcaggatcagccagaga

SEQ ID NO: 21954 - DNA, 50 bp, unidentified
  source 1..50: mol_type = unassigned DNA; note = target_25f3ece
  misc_feature 1..23: note = LF
  misc_feature 24..25: note = Core
  misc_feature 26..50: note = RF
cgaagataaggctcaagccgaataccccatctcggatggccgagccgcct

SEQ ID NO: 21955 - DNA, 50 bp, unidentified
  source 1..50: mol_type = unassigned DNA; note = target_25fe88e
  misc_feature 1..23: note = LF
  misc_feature 24..25: note = Core
  misc_feature 26..50: note = RF
ttgtcgagcgtgtagatcgcatcctataattcgcatctcggcctccttcg

SEQ ID NO: 21956 - DNA, 50 bp, unidentified
  source 1..50: mol_type = unassigned DNA; note = target_2602c89
  misc_feature 1..23: note = LF
  misc_feature 24..25: note = Core
  misc_feature 26..50: note = RF
ccaaaaatcatttgaaatactccctttcctaacgaagcttttattttcga

SEQ ID NO: 21957 - DNA, 50 bp, unidentified
  source 1..50: mol_type = unassigned DNA; note = target_2609c74
  misc_feature 1..24: note = LF
  misc_feature 25: note = Core
  misc_feature 26..50: note = RF
tgccatccgtcccttcactgtaaccgttcattttaatacgttctgcccct

SEQ ID NO: 21958 - DNA, 50 bp, unidentified
  source 1..50: mol_type = unassigned DNA; note = target_2619c6d
  misc_feature 1..21: note = LF
  misc_feature 22..25: note = Core
  misc_feature 26..50: note = RF
cctaaactttcaaacatattatcacctattcctattttatcaaacatttg

SEQ ID NO: 21959 - DNA, 50 bp, unidentified
  source 1..50: mol_type = unassigned DNA; note = target_261d759
  misc_feature 1..23: note = LF
  misc_feature 24..25: note = Core
  misc_feature 26..50: note = RF
ccgaagtgaccgcagatacaagatcacgagaagacacgacagggcgggtg

SEQ ID NO: 21960 - DNA, 50 bp, unidentified
  source 1..50: mol_type = unassigned DNA; note = target_2623e4a
  misc_feature 1..23: note = LF
  misc_feature 24..25: note = Core
  misc_feature 26..50: note = RF
gaaccccgtcatctctcctatcgtcgagatgacgaccagaaccctctttt

SEQ ID NO: 21961 - DNA, 50 bp, unidentified
  source 1..50: mol_type = unassigned DNA; note = target_262f24e
  misc_feature 1..24: note = LF
  misc_feature 25: note = Core
  misc_feature 26..50: note = RF
cggcgtagttagcgacatggcgatttcacaacaattacctaccaggtctt

SEQ ID NO: 21962 - DNA, 50 bp, unidentified
  source 1..50: mol_type = unassigned DNA; note = target_263e05d
  misc_feature 1..23: note = LF
  misc_feature 24..25: note = Core
  misc_feature 26..50: note = RF
cctaaggttcgtttgagccatggatgacgaatcgagccgacccgacaaat

SEQ ID NO: 21963 - DNA, 50 bp, unidentified
  source 1..50: mol_type = unassigned DNA; note = target_26402b3
  misc_feature 1..22: note = LF
  misc_feature 23..25: note = Core
  misc_feature 26..50: note = RF
caccgccttcgcaggcaagccagctcccacatttgatctgcgtacacccg

SEQ ID NO: 21964 - DNA, 50 bp, unidentified
  source 1..50: mol_type = unassigned DNA; note = target_264529c
  misc_feature 1..22: note = LF
  misc_feature 23..25: note = Core
  misc_feature 26..50: note = RF
ttcatggatggctaacgggtgcgtttacttcaataagagagttgctttgg

SEQ ID NO: 21965 - DNA, 50 bp, unidentified
  source 1..50: mol_type = unassigned DNA; note = target_2650651
  misc_feature 1..23: note = LF
  misc_feature 24..25: note = Core
  misc_feature 26..50: note = RF
gatgccgttcatggggcttcctcctttcccggcgcaatcgccgtattact

SEQ ID NO: 21966 - DNA, 50 bp, unidentified
  source 1..50: mol_type = unassigned DNA; note = target_26549f1
  misc_feature 1..23: note = LF
  misc_feature 24..25: note = Core
  misc_feature 26..50: note = RF
aaatgaatttccgcaaattagtcctccaccttatcaagctcttttaatga

SEQ ID NO: 21967 - DNA, 50 bp, unidentified
  source 1..50: mol_type = unassigned DNA; note = target_265627a
  misc_feature 1..22: note = LF
  misc_feature 23..25: note = Core
  misc_feature 26..50: note = RF
ggggtcgattcgacccctcccccccccccgacccgtcactgcggcgctcg

SEQ ID NO: 21968 - DNA, 50 bp, unidentified
  source 1..50: mol_type = unassigned DNA; note = target_2657b67
  misc_feature 1..24: note = LF
  misc_feature 25: note = Core
  misc_feature 26..50: note = RF
cgccaagtccgcagtgtaggagaaaagaccatgccgattcccgccacaag

SEQ ID NO: 21969 - DNA, 50 bp, unidentified
  source 1..50: mol_type = unassigned DNA; note = target_265c82e
  misc_feature 1..23: note = LF
  misc_feature 24..25: note = Core
  misc_feature 26..50: note = RF
agaataggcatggactaaacctcctcctaacttcttttccaactgataat

SEQ ID NO: 21970 - DNA, 50 bp, unidentified
  source 1..50: mol_type = unassigned DNA; note = target_26611de
  misc_feature 1..23: note = LF
  misc_feature 24..25: note = Core
  misc_feature 26..50: note = RF
ctcaccctcccattgcttcgcaatgggcccctccctctccccgctgaagc

SEQ ID NO: 21971 - DNA, 50 bp, unidentified
  source 1..50: mol_type = unassigned DNA; note = target_266d028
  misc_feature 1..23: note = LF
  misc_feature 24..25: note = Core
  misc_feature 26..50: note = RF
ttcgagcgtgtcgagaagcggctagcactatacgagcgtttctcgacttc

SEQ ID NO: 21972 - DNA, 50 bp, unidentified
  source 1..50: mol_type = unassigned DNA; note = target_2674b42
  misc_feature 1..24: note = LF
  misc_feature 25: note = Core
  misc_feature 26..50: note = RF
gccctccgaatttcttcttccagttgtagaacgtcgcctcgcttattccg

SEQ ID NO: 21973 - DNA, 50 bp, unidentified
  source 1..50: mol_type = unassigned DNA; note = target_2681a36
  misc_feature 1..23: note = LF
  misc_feature 24..25: note = Core
  misc_feature 26..50: note = RF
ccatggtccgttggtccgttccagacacataggttacggtttattccggc

SEQ ID NO: 21974 - DNA, 50 bp, unidentified
  source 1..50: mol_type = unassigned DNA; note = target_268304d
  misc_feature 1..23: note = LF
  misc_feature 24..25: note = Core
  misc_feature 26..50: note = RF
cttagctaaatccatattaccacctcgtattgcgtgtttttataattata

SEQ ID NO: 21975 - DNA, 50 bp, unidentified
  source 1..50: mol_type = unassigned DNA; note = target_2686298
  misc_feature 1..24: note = LF
  misc_feature 25: note = Core
  misc_feature 26..50: note = RF
acaagagcatggcctgcccgatgttttgtaccagcgagattgttagtgta

SEQ ID NO: 21976 - DNA, 50 bp, unidentified
  source 1..50: mol_type = unassigned DNA; note = target_2686ff5
  misc_feature 1..23: note = LF
  misc_feature 24..25: note = Core
  misc_feature 26..50: note = RF
ccattcagcagcttgctctagcccggattttgcacgcaggcggggcggac

SEQ ID NO: 21977 - DNA, 50 bp, unidentified
  source 1..50: mol_type = unassigned DNA; note = target_2699281
  misc_feature 1..23: note = LF
  misc_feature 24..25: note = Core
  misc_feature 26..50: note = RF
agattaccgcgtcacttcgttcctcgcaatgacagataaccctttgtttt

SEQ ID NO: 21978 - DNA, 50 bp, unidentified
  source 1..50: mol_type = unassigned DNA; note = target_26a6595
  misc_feature 1..23: note = LF
  misc_feature 24..25: note = Core
  misc_feature 26..50: note = RF
aaccatgccgctgaagcggttattttttatgcagatttacgggaagaggt

SEQ ID NO: 21979 - DNA, 50 bp, unidentified
  source 1..50: mol_type = unassigned DNA; note = target_26a7f60
  misc_feature 1..23: note = LF
  misc_feature 24..25: note = Core
  misc_feature 26..50: note = RF
cgttcgtgacgtgcgcaacgcccctctgggtgggtgaggacgaggcgcaa

SEQ ID NO: 21980 - DNA, 50 bp, unidentified
  source 1..50: mol_type = unassigned DNA; note = target_26aa67d
  misc_feature 1..23: note = LF
  misc_feature 24..25: note = Core
  misc_feature 26..50: note = RF
atgagacatttttattcacctacctttcatataatgtttgatcatcatat

SEQ ID NO: 21981 - DNA, 50 bp, unidentified
  source 1..50: mol_type = unassigned DNA; note = target_26aadc8
  misc_feature 1..22: note = LF
  misc_feature 23..25: note = Core
  misc_feature 26..50: note = RF
tcgcgcaaatgctcgactacgctgacagctctgccttctcgcgtagctgc

SEQ ID NO: 21982 - DNA, 50 bp, unidentified
  source 1..50: mol_type = unassigned DNA; note = target_26acc11
  misc_feature 1..24: note = LF
  misc_feature 25: note = Core
  misc_feature 26..50: note = RF
gcaatggcaactaccggccagaagcggacatctggcgcgcctaatccttc

SEQ ID NO: 21983 - DNA, 50 bp, unidentified
  source 1..50: mol_type = unassigned DNA; note = target_26b9a87
  misc_feature 1..23: note = LF
  misc_feature 24..25: note = Core
  misc_feature 26..50: note = RF
gaagccgagccacaagacacggatggacgcggatgccgcttcgcggccac

SEQ ID NO: 21984 - DNA, 50 bp, unidentified
  source 1..50: mol_type = unassigned DNA; note = target_26baac8
  misc_feature 1..24: note = LF
  misc_feature 25: note = Core
  misc_feature 26..50: note = RF
gttcatggattgccacactacgttcgcaatgacagacggttcatggagag

SEQ ID NO: 21985 - DNA, 50 bp, unidentified
  source 1..50: mol_type = unassigned DNA; note = target_26bd1c1
  misc_feature 1..23: note = LF
  misc_feature 24..25: note = Core
  misc_feature 26..50: note = RF
agagcatccgccttcgcacaaggctacggcgtttgcgagccgcgggagaa

SEQ ID NO: 21986 - DNA, 50 bp, unidentified
  source 1..50: mol_type = unassigned DNA; note = target_26c143f
  misc_feature 1..23: note = LF
  misc_feature 24..25: note = Core
  misc_feature 26..50: note = RF
ctgagcacaagggaagtctggggtcagaccttcattcttcggatctcata

SEQ ID NO: 21987 - DNA, 50 bp, unidentified
  source 1..50: mol_type = unassigned DNA; note = target_26cf299
  misc_feature 1..24: note = LF
  misc_feature 25: note = Core
  misc_feature 26..50: note = RF
ccatccccggtcacccatatgtgccgttatgcgtgggtcgagaagctcac

SEQ ID NO: 21988 - DNA, 50 bp, unidentified
  source 1..50: mol_type = unassigned DNA; note = target_26e4400
  misc_feature 1..23: note = LF
  misc_feature 24..25: note = Core
  misc_feature 26..50: note = RF
gtcgccgaagcgattaccgcgagagcggtttagtccaccgctgcataacg

SEQ ID NO: 21989 - DNA, 50 bp, unidentified
  source 1..50: mol_type = unassigned DNA; note = target_26e70d1
  misc_feature 1..23: note = LF
  misc_feature 24..25: note = Core
  misc_feature 26..50: note = RF
gcgctcactgagtgcgcttttcttgcaatttgattttgcggtttgcgccc

SEQ ID NO: 21990 - DNA, 50 bp, unidentified
  source 1..50: mol_type = unassigned DNA; note = target_26ec754
  misc_feature 1..22: note = LF
  misc_feature 23..25: note = Core
  misc_feature 26..50: note = RF
gtcatactgtcgtcgtgtcctcctttcgtcatgacgtaggaatcaaacgc

SEQ ID NO: 21991 - DNA, 50 bp, unidentified
  source 1..50: mol_type = unassigned DNA; note = target_26ec9ab
  misc_feature 1..23: note = LF
  misc_feature 24..25: note = Core
  misc_feature 26..50: note = RF
aaaatcgcgggcagggcccgctcctacagattgccgggaggcacggcatt

SEQ ID NO: 21992 - DNA, 50 bp, unidentified
  source 1..50: mol_type = unassigned DNA; note = target_26f33eb
  misc_feature 1..23: note = LF
  misc_feature 24..25: note = Core
  misc_feature 26..50: note = RF
cgacgttcgggatggtgtaggtgctcatgcgcgtacccccaggcccatcg

SEQ ID NO: 21993 - DNA, 50 bp, unidentified
  source 1..50: mol_type = unassigned DNA; note = target_26f9493
  misc_feature 1..23: note = LF
  misc_feature 24..25: note = Core
  misc_feature 26..50: note = RF
ttcgcttgataagctaacccagcctactacttgccgtagtacacgatccg

SEQ ID NO: 21994 - DNA, 50 bp, unidentified
  source 1..50: mol_type = unassigned DNA; note = target_26fe55a
  misc_feature 1..24: note = LF
  misc_feature 25: note = Core
  misc_feature 26..50: note = RF
cgatttctccctagaacacttaacgttcaagctcagcgtgcggcgaagcc

SEQ ID NO: 21995 - DNA, 50 bp, unidentified
  source 1..50: mol_type = unassigned DNA; note = target_2704a58
  misc_feature 1..23: note = LF
  misc_feature 24..25: note = Core
  misc_feature 26..50: note = RF
atggagcattgttcactagcagcctgtcggactttcacgggtcagtctat

SEQ ID NO: 21996 - DNA, 50 bp, unidentified
  source 1..50: mol_type = unassigned DNA; note = target_2711832
  misc_feature 1..23: note = LF
  misc_feature 24..25: note = Core
  misc_feature 26..50: note = RF
gccgccctcgccacggcctccgcctagcgcctgagccgagggaaccgcga

SEQ ID NO: 21997 - DNA, 50 bp, unidentified
  source 1..50: mol_type = unassigned DNA; note = target_2713ffe
  misc_feature 1..21: note = LF
  misc_feature 22..25: note = Core
  misc_feature 26..50: note = RF
tagaaaaatgaaccattttgtcattctgaacgaaacggagtgtagtgaag

SEQ ID NO: 21998 - DNA, 50 bp, unidentified
  source 1..50: mol_type = unassigned DNA; note = target_27189ad
  misc_feature 1..24: note = LF
  misc_feature 25: note = Core
  misc_feature 26..50: note = RF
ggcgggcattcgccggtgacgactaattacttcgctgtacgtctagccag

SEQ ID NO: 21999 - DNA, 50 bp, unidentified
  source 1..50: mol_type = unassigned DNA; note = target_271a792
  misc_feature 1..24: note = LF
  misc_feature 25: note = Core
  misc_feature 26..50: note = RF
tttcatgagcgatggccggggaacttttttaacagcacgtcctgaaggac

SEQ ID NO: 22000 - DNA, 50 bp, unidentified
  source 1..50: mol_type = unassigned DNA; note = target_2721143
  misc_feature 1..23: note = LF
  misc_feature 24..25: note = Core
  misc_feature 26..50: note = RF
cggcatggatgccgccacggagcctacagggatgtacttgcggcgtgtcc

SEQ ID NO: 22001 - DNA, 50 bp, unidentified
  source 1..50: mol_type = unassigned DNA; note = target_27431ce
  misc_feature 1..23: note = LF
  misc_feature 24..25: note = Core
  misc_feature 26..50: note = RF
ttcctcgcggtgctcgtgagctcctacagagacagtgtttcagcgctaca

SEQ ID NO: 22002 - DNA, 50 bp, unidentified
  source 1..50: mol_type = unassigned DNA; note = target_2743a58
  misc_feature 1..23: note = LF
  misc_feature 24..25: note = Core
  misc_feature 26..50: note = RF
ttcttccactcttgcaccccgatagtttaagtatgaattaatatcaaaaa

SEQ ID NO: 22003 - DNA, 50 bp, unidentified
  source 1..50: mol_type = unassigned DNA; note = target_274fa7f
  misc_feature 1..20: note = LF
  misc_feature 21..25: note = Core
  misc_feature 26..50: note = RF
tgagttcgtacatgatggacctccttatgtattggcggttcgcccctttg

SEQ ID NO: 22004 - DNA, 50 bp, unidentified
  source 1..50: mol_type = unassigned DNA; note = target_2760735
  misc_feature 1..23: note = LF
  misc_feature 24..25: note = Core
  misc_feature 26..50: note = RF
cacaatacaaaaacattcctggagaacaccatgactcaatccgcaactgt

SEQ ID NO: 22005 - DNA, 50 bp, unidentified
  source 1..50: mol_type = unassigned DNA; note = target_27757df
  misc_feature 1..23: note = LF
  misc_feature 24..25: note = Core
  misc_feature 26..50: note = RF
aagtgccgccatgagtccgctgttggcacctagcagatctcgatttgtcg

SEQ ID NO: 22006 - DNA, 50 bp, unidentified
  source 1..50: mol_type = unassigned DNA; note = target_277ee4e
  misc_feature 1..24: note = LF
  misc_feature 25: note = Core
  misc_feature 26..50: note = RF
actgtttacttcctcggtaagctgttaaccttgggcatccgaacaacgga

SEQ ID NO: 22007 - DNA, 50 bp, unidentified
  source 1..50: mol_type = unassigned DNA; note = target_2780260
  misc_feature 1..24: note = LF
  misc_feature 25: note = Core
  misc_feature 26..50: note = RF
agaactagcaataaattatatacgttgttgtgtgtagttattttttaatt

SEQ ID NO: 22008 - DNA, 50 bp, unidentified
  source 1..50: mol_type = unassigned DNA; note = target_2783a28
  misc_feature 1..23: note = LF
  misc_feature 24..25: note = Core
  misc_feature 26..50: note = RF
ttctctaagtgattccatcttatctcctttatctatgaatctgatagtta

SEQ ID NO: 22009 - DNA, 50 bp, unidentified
  source 1..50: mol_type = unassigned DNA; note = target_2784a00
  misc_feature 1..22: note = LF
  misc_feature 23..25: note = Core
  misc_feature 26..50: note = RF
tcccccgagttgatcccgcgggaagggtcaccccggtattgacatcgcct

SEQ ID NO: 22010 - DNA, 50 bp, unidentified
  source 1..50: mol_type = unassigned DNA; note = target_279166b
  misc_feature 1..21: note = LF
  misc_feature 22..25: note = Core
  misc_feature 26..50: note = RF
ttcgatcgagcgcgccccggaatgacggacgacactcctacattcctaaa

SEQ ID NO: 22011 - DNA, 50 bp, unidentified
  source 1..50: mol_type = unassigned DNA; note = target_2791c06
  misc_feature 1..24: note = LF
  misc_feature 25: note = Core
  misc_feature 26..50: note = RF
tgttgacggtaaccgaactgacgctcttggcacgtcgcgtcgcgtttaca

SEQ ID NO: 22012 - DNA, 50 bp, unidentified
  source 1..50: mol_type = unassigned DNA; note = target_27a7f8c
  misc_feature 1..24: note = LF
  misc_feature 25: note = Core
  misc_feature 26..50: note = RF
acctgcttaagtcactggcttagcgtaggataatttccggtttccaagcg

SEQ ID NO: 22013 - DNA, 50 bp, unidentified
  source 1..50: mol_type = unassigned DNA; note = target_27ad00a
  misc_feature 1..23: note = LF
  misc_feature 24..25: note = Core
  misc_feature 26..50: note = RF
tttgaatttctcataattaactcctttcaagagatagtcaaggctgacac

SEQ ID NO: 22014 - DNA, 50 bp, unidentified
  source 1..50: mol_type = unassigned DNA; note = target_27afbcb
  misc_feature 1..23: note = LF
  misc_feature 24..25: note = Core
  misc_feature 26..50: note = RF
ttcgtcgctttgcgcagtttcctgacattcgctgatgatcgaacgcagta

SEQ ID NO: 22015 - DNA, 50 bp, unidentified
  source 1..50: mol_type = unassigned DNA; note = target_27baf8f
  misc_feature 1..22: note = LF
  misc_feature 23..25: note = Core
  misc_feature 26..50: note = RF
gttccataaaattgctcctttatctgatttcctgcaggtttgtctttatt

SEQ ID NO: 22016 - DNA, 50 bp, unidentified
  source 1..50: mol_type = unassigned DNA; note = target_27bbae3
  misc_feature 1..24: note = LF
  misc_feature 25: note = Core
  misc_feature 26..50: note = RF
agagcttgcccttcctgccccctttttgcgccgctcgccgagcgatgcgc

SEQ ID NO: 22017 - DNA, 50 bp, unidentified
  source 1..50: mol_type = unassigned DNA; note = target_27be9d7
  misc_feature 1..23: note = LF
  misc_feature 24..25: note = Core
  misc_feature 26..50: note = RF
cactcaatgacaatgttctttcccttgacgggagaggaatgaggtgaggg

SEQ ID NO: 22018 - DNA, 50 bp, unidentified
  source 1..50: mol_type = unassigned DNA; note = target_27c107e
  misc_feature 1..21: note = LF
  misc_feature 22..25: note = Core
  misc_feature 26..50: note = RF
ttgtacgcacaaaggcattgcttgccaagtaagtatgacctcacatctca

SEQ ID NO: 22019 - DNA, 50 bp, unidentified
  source 1..50: mol_type = unassigned DNA; note = target_27c2c1a
  misc_feature 1..23: note = LF
  misc_feature 24..25: note = Core
  misc_feature 26..50: note = RF
ctggtgagatgggaccagtggggatttcatcttatcagtggaatgcaggc

SEQ ID NO: 22020 - DNA, 50 bp, unidentified
  source 1..50: mol_type = unassigned DNA; note = target_27c6b2c
  misc_feature 1..23: note = LF
  misc_feature 24..25: note = Core
  misc_feature 26..50: note = RF
gaattaggacttccttcaggtggaggttggatatcagacccatcccctcc

SEQ ID NO: 22021 - DNA, 50 bp, unidentified
  source 1..50: mol_type = unassigned DNA; note = target_27caded
  misc_feature 1..23: note = LF
  misc_feature 24..25: note = Core
  misc_feature 26..50: note = RF
tcgccaagctccgaccccaccagctgatttacttgattgcggtagcgctc

SEQ ID NO: 22022 - DNA, 50 bp, unidentified
  source 1..50: mol_type = unassigned DNA; note = target_27cdf0a
  misc_feature 1..23: note = LF
  misc_feature 24..25: note = Core
  misc_feature 26..50: note = RF
ctttgccggtgcgggtgctgtgctattttgtgatcgctgacctcggccac

SEQ ID NO: 22023 - DNA, 50 bp, unidentified
  source 1..50: mol_type = unassigned DNA; note = target_27d9c80
  misc_feature 1..23: note = LF
  misc_feature 24..25: note = Core
  misc_feature 26..50: note = RF
cgtgggcgggaaacccgcccaccctatcgccggctcagctcgcgctccag

SEQ ID NO: 22024 - DNA, 50 bp, unidentified
  source 1..50: mol_type = unassigned DNA; note = target_27db841
  misc_feature 1..23: note = LF
  misc_feature 24..25: note = Core
  misc_feature 26..50: note = RF
ttgaccgggtatccaagttcaccctgatgaagaacagcgctatcaagcgc

SEQ ID NO: 22025 - DNA, 50 bp, unidentified
  source 1..50: mol_type = unassigned DNA; note = target_27f7413
  misc_feature 1..21: note = LF
  misc_feature 22..25: note = Core
  misc_feature 26..50: note = RF
gttcggcggggaagacgactgccccccccgggcgaacccgccgcgctgat

SEQ ID NO: 22026 - DNA, 50 bp, unidentified
  source 1..50: mol_type = unassigned DNA; note = target_2800497
  misc_feature 1..24: note = LF
  misc_feature 25: note = Core
  misc_feature 26..50: note = RF
cagatcggcgaagcctgtcagaaattcgccagaacaatgacctgtcccgt

SEQ ID NO: 22027 - DNA, 50 bp, unidentified
  source 1..50: mol_type = unassigned DNA; note = target_2807d7c
  misc_feature 1..23: note = LF
  misc_feature 24..25: note = Core
  misc_feature 26..50: note = RF
gttgctcatgactgcgggcctctagcccaacttctccgagaaccagatgt

SEQ ID NO: 22028 - DNA, 50 bp, unidentified
  source 1..50: mol_type = unassigned DNA; note = target_28091ab
  misc_feature 1..24: note = LF
  misc_feature 25: note = Core
  misc_feature 26..50: note = RF
ttcccctttaggtcgttttgtgatttcatcctgtttgggaggatggatca

SEQ ID NO: 22029 - DNA, 50 bp, unidentified
  source 1..50: mol_type = unassigned DNA; note = target_280e170
  misc_feature 1..24: note = LF
  misc_feature 25: note = Core
  misc_feature 26..50: note = RF
gatctggcacgaagccacctgaaccgttcttaggtggcggtcttcaagcg

SEQ ID NO: 22030 - DNA, 50 bp, unidentified
  source 1..50: mol_type = unassigned DNA; note = target_2810db2
  misc_feature 1..22: note = LF
  misc_feature 23..25: note = Core
  misc_feature 26..50: note = RF
atttgcacattacaataacttttaaagaatatcctgtaaggcttcgcttc

SEQ ID NO: 22031 - DNA, 50 bp, unidentified
  source 1..50: mol_type = unassigned DNA; note = target_281c2f8
  misc_feature 1..23: note = LF
  misc_feature 24..25: note = Core
  misc_feature 26..50: note = RF
tcttaatcactcgctcaaaaggactaaattacgaatatctctgacccgca

SEQ ID NO: 22032 - DNA, 50 bp, unidentified
  source 1..50: mol_type = unassigned DNA; note = target_28240e1
  misc_feature 1..24: note = LF
  misc_feature 25: note = Core
  misc_feature 26..50: note = RF
ataaacggcgaatatttccacagtttccccattgccgactaacggccagc

SEQ ID NO: 22033 - DNA, 50 bp, unidentified
  source 1..50: mol_type = unassigned DNA; note = target_2829f00
  misc_feature 1..23: note = LF
  misc_feature 24..25: note = Core
  misc_feature 26..50: note = RF
atttttcgcattttgctattttcctttcttaaattattttcaatcacttt

SEQ ID NO: 22034 - DNA, 50 bp, unidentified
  source 1..50: mol_type = unassigned DNA; note = target_282af23
  misc_feature 1..22: note = LF
  misc_feature 23..25: note = Core
  misc_feature 26..50: note = RF
tgcgaccgccgacttccgagtttgacccttctcggacatcgagctgttgc

SEQ ID NO: 22035 - DNA, 50 bp, unidentified
  source 1..50: mol_type = unassigned DNA; note = target_283194f
  misc_feature 1..24: note = LF
  misc_feature 25: note = Core
  misc_feature 26..50: note = RF
ggcattattttttccagtggcggtcgagctccgcctgagcaaaataagct

SEQ ID NO: 22036 - DNA, 50 bp, unidentified
  source 1..50: mol_type = unassigned DNA; note = target_2832431
  misc_feature 1..24: note = LF
  misc_feature 25: note = Core
  misc_feature 26..50: note = RF
gcgttccgggccatcccggacccgccttaagcttcaagttcagcgttaaa

SEQ ID NO: 22037 - DNA, 50 bp, unidentified
  source 1..50: mol_type = unassigned DNA; note = target_2846ab4
  misc_feature 1..23: note = LF
  misc_feature 24..25: note = Core
  misc_feature 26..50: note = RF
ccaggttggagttaatccgctcgtggcccctctgagacgttcggggccag

SEQ ID NO: 22038 - DNA, 50 bp, unidentified
  source 1..50: mol_type = unassigned DNA; note = target_28563c7
  misc_feature 1..23: note = LF
  misc_feature 24..25: note = Core
  misc_feature 26..50: note = RF
ggcgaggggccgggccagccaggctttcactgcgtcgggacgtactggat

SEQ ID NO: 22039 - DNA, 50 bp, unidentified
  source 1..50: mol_type = unassigned DNA; note = target_285bf11
  misc_feature 1..24: note = LF
  misc_feature 25: note = Core
  misc_feature 26..50: note = RF
gtcgatggtttggcgtgtcgaggtcgaatgaattcgaccccacaaaacgt

SEQ ID NO: 22040 - DNA, 50 bp, unidentified
  source 1..50: mol_type = unassigned DNA; note = target_285d40c
  misc_feature 1..23: note = LF
  misc_feature 24..25: note = Core
  misc_feature 26..50: note = RF
aataaattcacacttcgacaagctcagtgtgacactaaaaaattatttat

SEQ ID NO: 22041 - DNA, 50 bp, unidentified
  source 1..50: mol_type = unassigned DNA; note = target_286a3c2
  misc_feature 1..23: note = LF
  misc_feature 24..25: note = Core
  misc_feature 26..50: note = RF
agaagcctgggcaccggtcatggatgttgaatttgattaccttgattctg

SEQ ID NO: 22042 - DNA, 50 bp, unidentified
  source 1..50: mol_type = unassigned DNA; note = target_2880784
  misc_feature 1..23: note = LF
  misc_feature 24..25: note = Core
  misc_feature 26..50: note = RF
gggcatcgcggctgaagccgctcctaccgcttccgggaacggccttcagc

SEQ ID NO: 22043 - DNA, 50 bp, unidentified
  source 1..50: mol_type = unassigned DNA; note = target_28814be
  misc_feature 1..24: note = LF
  misc_feature 25: note = Core
  misc_feature 26..50: note = RF
tcacgatatttccgaaatccccgttttagggaatttcgccatttgtccga

SEQ ID NO: 22044 - DNA, 50 bp, unidentified
  source 1..50: mol_type = unassigned DNA; note = target_28856bf
  misc_feature 1..23: note = LF
  misc_feature 24..25: note = Core
  misc_feature 26..50: note = RF
catgcggggtacggggattattcagggacgactacttgcactatcaaccg

SEQ ID NO: 22045 - DNA, 50 bp, unidentified
  source 1..50: mol_type = unassigned DNA; note = target_2885fc7
  misc_feature 1..24: note = LF
  misc_feature 25: note = Core
  misc_feature 26..50: note = RF
tctggcagcggcagcggtcggtgtttttttgctagacgtctacgggaata

SEQ ID NO: 22046 - DNA, 50 bp, unidentified
  source 1..50: mol_type = unassigned DNA; note = target_2888371
  misc_feature 1..23: note = LF
  misc_feature 24..25: note = Core
  misc_feature 26..50: note = RF
cgcgcatggagccgcaggcagaatgcatgttggtgatcattggcgcgacg

SEQ ID NO: 22047 - DNA, 50 bp, unidentified
  source 1..50: mol_type = unassigned DNA; note = target_2889dbc
  misc_feature 1..24: note = LF
  misc_feature 25: note = Core
  misc_feature 26..50: note = RF
ggcggaacgccgcatccattgcggcagatccggatgttcggtgagctccg

SEQ ID NO: 22048 - DNA, 50 bp, unidentified
  source 1..50: mol_type = unassigned DNA; note = target_2898534
  misc_feature 1..22: note = LF
  misc_feature 23..25: note = Core
  misc_feature 26..50: note = RF
gcaataactcctctcctgtcattccgaggaacgaagtgacgaggaatccc

SEQ ID NO: 22049 - DNA, 50 bp, unidentified
  source 1..50: mol_type = unassigned DNA; note = target_28a1506
  misc_feature 1..24: note = LF
  misc_feature 25: note = Core
  misc_feature 26..50: note = RF
cgacggactcgtgcatcacagcgaccggggcagccaatacgtctcgatca

SEQ ID NO: 22050 - DNA, 50 bp, unidentified
  source 1..50: mol_type = unassigned DNA; note = target_28a85fd
  misc_feature 1..24: note = LF
  misc_feature 25: note = Core
  misc_feature 26..50: note = RF
tgtcgagctcaagctagcccttagcggacgttgaaggtgctacccgttta

SEQ ID NO: 22051 - DNA, 50 bp, unidentified
  source 1..50: mol_type = unassigned DNA; note = target_28b2180
  misc_feature 1..23: note = LF
  misc_feature 24..25: note = Core
  misc_feature 26..50: note = RF
tcctcactcactaacccattttccttaatacgaatgtttacagaaaaaaa

SEQ ID NO: 22052 - DNA, 50 bp, unidentified
  source 1..50: mol_type = unassigned DNA; note = target_28b60d1
  misc_feature 1..22: note = LF
  misc_feature 23..25: note = Core
  misc_feature 26..50: note = RF
tcttcttccactaaactgcttcgtttagctcaataacaaaaaaaggatcg

SEQ ID NO: 22053 - DNA, 50 bp, unidentified
  source 1..50: mol_type = unassigned DNA; note = target_28bc30b
  misc_feature 1..23: note = LF
  misc_feature 24..25: note = Core
  misc_feature 26..50: note = RF
ttcttcatacatcagtctgtcacctccagtgcgcatgagcgaagctgccg

SEQ ID NO: 22054 - DNA, 50 bp, unidentified
  source 1..50: mol_type = unassigned DNA; note = target_28c4f26
  misc_feature 1..21: note = LF
  misc_feature 22..25: note = Core
  misc_feature 26..50: note = RF
ctgaagggagtggggcggtcgctcatgcgcgggggaggaacccgtccaac

SEQ ID NO: 22055 - DNA, 50 bp, unidentified
  source 1..50: mol_type = unassigned DNA; note = target_28c714c
  misc_feature 1..24: note = LF
  misc_feature 25: note = Core
  misc_feature 26..50: note = RF
actattgctcatggttttacctccttatttcatccccagaacgtgtctgg

SEQ ID NO: 22056 - DNA, 50 bp, unidentified
  source 1..50: mol_type = unassigned DNA; note = target_28c8bfc
  misc_feature 1..23: note = LF
  misc_feature 24..25: note = Core
  misc_feature 26..50: note = RF
ctcagcgttctcggcccacagcggacattcgagggaaaggtctgcgccgc

SEQ ID NO: 22057 - DNA, 50 bp, unidentified
  source 1..50: mol_type = unassigned DNA; note = target_28ce748
  misc_feature 1..21: note = LF
  misc_feature 22..25: note = Core
  misc_feature 26..50: note = RF
gtcaagcgtgcataagcaggcttttatttcgtataaaatatggatttttt

SEQ ID NO: 22058 - DNA, 50 bp, unidentified
  source 1..50: mol_type = unassigned DNA; note = target_28d3f05
  misc_feature 1..23: note = LF
  misc_feature 24..25: note = Core
  misc_feature 26..50: note = RF
ctaccaaatcaacccgttttcacacagcctcgacccaacccggaactttc

SEQ ID NO: 22059 - DNA, 50 bp, unidentified
  source 1..50: mol_type = unassigned DNA; note = target_28e0a03
  misc_feature 1..24: note = LF
  misc_feature 25: note = Core
  misc_feature 26..50: note = RF
atgctgcggctcccggaaggagaaatgtttcatgacgatatcggacgaca

SEQ ID NO: 22060 - DNA, 50 bp, unidentified
  source 1..50: mol_type = unassigned DNA; note = target_28e740f
  misc_feature 1..24: note = LF
  misc_feature 25: note = Core
  misc_feature 26..50: note = RF
cttgccattgacctgacgagacggaggctcaaagcaataaaaaaacccgc

SEQ ID NO: 22061 - DNA, 50 bp, unidentified
  source 1..50: mol_type = unassigned DNA; note = target_28ebf71
  misc_feature 1..20: note = LF
  misc_feature 21..25: note = Core
  misc_feature 26..50: note = RF
gcggcgggccggtatcgcacccccccgggggccggcctgcacggccgtgc

SEQ ID NO: 22062 - DNA, 50 bp, unidentified
  source 1..50: mol_type = unassigned DNA; note = target_28ee23c
  misc_feature 1..24: note = LF
  misc_feature 25: note = Core
  misc_feature 26..50: note = RF
gtattcacagtcctacttctatccgtagcaaagataagcgatggaccgtg

SEQ ID NO: 22063 - DNA, 50 bp, unidentified
  source 1..50: mol_type = unassigned DNA; note = target_28ee6f0
  misc_feature 1..24: note = LF
  misc_feature 25: note = Core
  misc_feature 26..50: note = RF
cgaccgcaatgcctctttcaggcgtgtcacgttgctgagtaagtcgggta

SEQ ID NO: 22064 - DNA, 50 bp, unidentified
  source 1..50: mol_type = unassigned DNA; note = target_28fd7d4
  misc_feature 1..23: note = LF
  misc_feature 24..25: note = Core
  misc_feature 26..50: note = RF
cttcgctaccgccgagctacaccacctgtgacgccctcggcgatcaactt

SEQ ID NO: 22065 - DNA, 50 bp, unidentified
  source 1..50: mol_type = unassigned DNA; note = target_29091ab
  misc_feature 1..23: note = LF
  misc_feature 24..25: note = Core
  misc_feature 26..50: note = RF
taaaattgttcattgatttgctccttttttatataaatttgattatttat

SEQ ID NO: 22066 - DNA, 50 bp, unidentified
  source 1..50: mol_type = unassigned DNA; note = target_290f7e6
  misc_feature 1..21: note = LF
  misc_feature 22..25: note = Core
  misc_feature 26..50: note = RF
ccggtcaggggaggtggagtggtcatgggttgtcgtcctccagaagtgtc

SEQ ID NO: 22067 - DNA, 50 bp, unidentified
  source 1..50: mol_type = unassigned DNA; note = target_2915693
  misc_feature 1..24: note = LF
  misc_feature 25: note = Core
  misc_feature 26..50: note = RF
ccgctaaggacagcaatgcaactacggacattcccgtcagctaaccggta

SEQ ID NO: 22068 - DNA, 50 bp, unidentified
  source 1..50: mol_type = unassigned DNA; note = target_291e39f
  misc_feature 1..18: note = LF
  misc_feature 19..25: note = Core
  misc_feature 26..50: note = RF
attgaggcgggcggttgccgctggttgagcagtcgacgagcgcagcgagg

SEQ ID NO: 22069 - DNA, 50 bp, unidentified; identical to SEQ ID NO: 21261
  source 1..50: mol_type = unassigned DNA; note = target_291f26b
  misc_feature 1..24: note = LF
  misc_feature 25: note = Core
  misc_feature 26..50: note = RF

SEQ ID NO: 22070 - DNA, 50 bp, unidentified
  source 1..50: mol_type = unassigned DNA; note = target_292007d
  misc_feature 1..22: note = LF
  misc_feature 23..25: note = Core
  misc_feature 26..50: note = RF
tccttatttaagtaaagcacccgtttagtttaagcataaaagccaaatct

SEQ ID NO: 22071 - DNA, 50 bp, unidentified
  source 1..50: mol_type = unassigned DNA; note = target_29254aa
  misc_feature 1..23: note = LF
  misc_feature 24..25: note = Core
  misc_feature 26..50: note = RF
cgggacctgcattgcgtccactcctttcctgtatgagatcatcataacat

SEQ ID NO: 22072 - DNA, 50 bp, unidentified
  source 1..50: mol_type = unassigned DNA; note = target_2927aca
  misc_feature 1..23: note = LF
  misc_feature 24..25: note = Core
  misc_feature 26..50: note = RF
attgaatgacacctactctcttcctttcctctattaaccttttacacaat

SEQ ID NO: 22073 - DNA, 50 bp, unidentified
  source 1..50: mol_type = unassigned DNA; note = target_292b4ad
  misc_feature 1..23: note = LF
  misc_feature 24..25: note = Core
  misc_feature 26..50: note = RF
gctacttcgagcagagcaaacccctcttgagcctctccccgcccctgggg

SEQ ID NO: 22074 - DNA, 50 bp, unidentified
  source 1..50: mol_type = unassigned DNA; note = target_292f3a3
  misc_feature 1..23: note = LF
  misc_feature 24..25: note = Core
  misc_feature 26..50: note = RF
gtggcctggaatcgctccgccgttgacagacagcaccaacccggtcttgc

SEQ ID NO: 22075 - DNA, 50 bp, unidentified
  source 1..50: mol_type = unassigned DNA; note = target_29317ae
  misc_feature 1..22: note = LF
  misc_feature 23..25: note = Core
  misc_feature 26..50: note = RF
ggcggcgctttccagtgggtgcaagtcccacccggcaaccgctccagccg

SEQ ID NO: 22076 - DNA, 50 bp, unidentified
  source 1..50: mol_type = unassigned DNA; note = target_2932026
  misc_feature 1..23: note = LF
  misc_feature 24..25: note = Core
  misc_feature 26..50: note = RF
ccttgcttcatgtattaacccgccgggttaataattgtattcgtcagata

SEQ ID NO: 22077 - DNA, 50 bp, unidentified
  source 1..50: mol_type = unassigned DNA; note = target_2938f5e
  misc_feature 1..23: note = LF
  misc_feature 24..25: note = Core
  misc_feature 26..50: note = RF
cacagaccccgcttcggcggggttttgtttgtgcctaggctttgagtctg

SEQ ID NO: 22078 - DNA, 50 bp, unidentified
  source 1..50: mol_type = unassigned DNA; note = target_2939bf6
  misc_feature 1..23: note = LF
  misc_feature 24..25: note = Core
  misc_feature 26..50: note = RF
ttgttgttcgtcatggcccgacttgttcgggccatccagagcaaccgcac

SEQ ID NO: 22079 - DNA, 50 bp, unidentified
  source 1..50: mol_type = unassigned DNA; note = target_29469e9
  misc_feature 1..23: note = LF
  misc_feature 24..25: note = Core
  misc_feature 26..50: note = RF
caggacaggacttcgtcctgacccttgacacaactacgacacaactcggg

SEQ ID NO: 22080 - DNA, 50 bp, unidentified
  source 1..50: mol_type = unassigned DNA; note = target_295053a
  misc_feature 1..22: note = LF
  misc_feature 23..25: note = Core
  misc_feature 26..50: note = RF
cttgcctggaagacgacgatcgagaccatgagcgtggcggcgagggaggc

SEQ ID NO: 22081 - DNA, 50 bp, unidentified
  source 1..50: mol_type = unassigned DNA; note = target_29654ac
  misc_feature 1..23: note = LF
  misc_feature 24..25: note = Core
  misc_feature 26..50: note = RF
tgctggcacgctgtccgcagagcctctgcggctgcggctgcggcggaact

SEQ ID NO: 22082 - DNA, 50 bp, unidentified
  source 1..50: mol_type = unassigned DNA; note = target_296a945
  misc_feature 1..24: note = LF
  misc_feature 25: note = Core
  misc_feature 26..50: note = RF
tgtttgacgcagctaaaatagccccgtcccaaattgactaccccggcatt

SEQ ID NO: 22083 - DNA, 50 bp, unidentified
  source 1..50: mol_type = unassigned DNA; note = target_2978ca7
  misc_feature 1..23: note = LF
  misc_feature 24..25: note = Core
  misc_feature 26..50: note = RF
aatgcatggcgcgtgtggtgaacagttcgccagtcatttgttcaccttac

SEQ ID NO: 22084 - DNA, 50 bp, unidentified
  source 1..50: mol_type = unassigned DNA; note = target_297a0f5
  misc_feature 1..23: note = LF
  misc_feature 24..25: note = Core
  misc_feature 26..50: note = RF
aaaaaagcccgctgaacgcgggcttttcattggcgtacgggatacggccc

SEQ ID NO: 22085 - DNA, 50 bp, unidentified
  source 1..50: mol_type = unassigned DNA; note = target_297c69d
  misc_feature 1..24: note = LF
  misc_feature 25: note = Core
  misc_feature 26..50: note = RF
aggttcatctggtgacacagatggttcactcgattaacggtgaacagcgc

SEQ ID NO: 22086 - DNA, 50 bp, unidentified
  source 1..50: mol_type = unassigned DNA; note = target_2980967
  misc_feature 1..23: note = LF
  misc_feature 24..25: note = Core
  misc_feature 26..50: note = RF
cctcgggttgtcggggtcaggccagcggatcggccgtggaatagtgcagc

SEQ ID NO: 22087 - DNA, 50 bp, unidentified
  source 1..50: mol_type = unassigned DNA; note = target_298794c
  misc_feature 1..23: note = LF
  misc_feature 24..25: note = Core
  misc_feature 26..50: note = RF
aggatcgaactgccgaccttccgcttttcaggtcaaccgcgctaagcgct

SEQ ID NO: 22088 - DNA, 50 bp, unidentified
  source 1..50: mol_type = unassigned DNA; note = target_298b936
  misc_feature 1..23: note = LF
  misc_feature 24..25: note = Core
  misc_feature 26..50: note = RF
gaagatcggcgcatcataagcggcttatgatgctaacgctttcgacggaa

SEQ ID NO: 22089 - DNA, 50 bp, unidentified
  source 1..50: mol_type = unassigned DNA; note = target_29902aa
  misc_feature 1..23: note = LF
  misc_feature 24..25: note = Core
  misc_feature 26..50: note = RF
ctcgggctgggcactcatcgtgttcctcctgtgctccggacgcggcggat

SEQ ID NO: 22090 - DNA, 50 bp, unidentified
  source 1..50: mol_type = unassigned DNA; note = target_2993537
  misc_feature 1..23: note = LF
  misc_feature 24..25: note = Core
  misc_feature 26..50: note = RF
cttccgcccttacggcgggtcacttttcttggaaaaaagtaaccaaaaac

SEQ ID NO: 22091 - DNA, 50 bp, unidentified
  source 1..50: mol_type = unassigned DNA; note = target_29a9317
  misc_feature 1..24: note = LF
  misc_feature 25: note = Core
  misc_feature 26..50: note = RF
acgcttggcggcaggccctaccatttttttgcgagaagctcgcggagtgc

SEQ ID NO: 22092 - DNA, 50 bp, unidentified
  source 1..50: mol_type = unassigned DNA; note = target_29a982c
  misc_feature 1..23: note = LF
  misc_feature 24..25: note = Core
  misc_feature 26..50: note = RF
cgcaatgtccgctttgggccaaaagcagactcctgcagcgcagcaaaacg

SEQ ID NO: 22093 - DNA, 50 bp, unidentified
  source 1..50: mol_type = unassigned DNA; note = target_29adf15
  misc_feature 1..22: note = LF
  misc_feature 23..25: note = Core
  misc_feature 26..50: note = RF
gcgtctggtttgtacggtgtactgacataagcgatttttccatcgtcata

SEQ ID NO: 22094 - DNA, 50 bp, unidentified
  source 1..50: mol_type = unassigned DNA; note = target_29b3ca5
  misc_feature 1..24: note = LF
  misc_feature 25: note = Core
  misc_feature 26..50: note = RF
gtgggcggagccggctgcgtagggtgcgccacgcgcaccgtttctcgtgt

SEQ ID NO: 22095 - DNA, 50 bp, unidentified
  source 1..50: mol_type = unassigned DNA; note = target_29b4d45
  misc_feature 1..24: note = LF
  misc_feature 25: note = Core
  misc_feature 26..50: note = RF
gcagaaataccttgctatcagggccgttccacatatgcgacagaaccccc

SEQ ID NO: 22096 - DNA, 50 bp, unidentified
  source 1..50: mol_type = unassigned DNA; note = target_29b5b97
  misc_feature 1..24: note = LF
  misc_feature 25: note = Core
  misc_feature 26..50: note = RF
tcctttgattgatattgggctaacgccgcgttaagtagtgagcaacgctt

SEQ ID NO: 22097 - DNA, 50 bp, unidentified
  source 1..50: mol_type = unassigned DNA; note = target_29b6354
  misc_feature 1..22: note = LF
  misc_feature 23..25: note = Core
  misc_feature 26..50: note = RF
gttgtccataattcttgttcgccttcccttttctaatcgttgggatcagt

SEQ ID NO: 22098 - DNA, 50 bp, unidentified
  source 1..50: mol_type = unassigned DNA; note = target_29c394d
  misc_feature 1..23: note = LF
  misc_feature 24..25: note = Core
  misc_feature 26..50: note = RF
cgaccatgccggggaagctgaggtggtttcttcgacgcacccagcttgac

SEQ ID NO: 22099 - DNA, 50 bp, unidentified
  source 1..50: mol_type = unassigned DNA; note = target_29d1eab
  misc_feature 1..23: note = LF
  misc_feature 24..25: note = Core
  misc_feature 26..50: note = RF
ccggatccgaaggtccagtcaggagtcacccatggccgcatctgtcattc

SEQ ID NO: 22100 - DNA, 50 bp, unidentified
  source 1..50: mol_type = unassigned DNA; note = target_29d6534
  misc_feature 1..23: note = LF
  misc_feature 24..25: note = Core
  misc_feature 26..50: note = RF
tttttaaaacacattttcagttaattcctaaccatcgagattattccttc

SEQ ID NO: 22101 - DNA, 50 bp, unidentified
  source 1..50: mol_type = unassigned DNA; note = target_29e1fb4
  misc_feature 1..23: note = LF
  misc_feature 24..25: note = Core
  misc_feature 26..50: note = RF
acaagaagcctgcgaaagcaggtttttatgtccgtaaaatggctgtcgcc

SEQ ID NO: 22102 - DNA, 50 bp, unidentified
  source 1..50: mol_type = unassigned DNA; note = target_29e2a89
  misc_feature 1..24: note = LF
  misc_feature 25: note = Core
  misc_feature 26..50: note = RF
actacgaaaccgtccgctcatcggcagttgaggatgcatccaagcctggg

SEQ ID NO: 22103 - DNA, 50 bp, unidentified
  source 1..50: mol_type = unassigned DNA; note = target_29e75b3
  misc_feature 1..23: note = LF
  misc_feature 24..25: note = Core
  misc_feature 26..50: note = RF
ggctgcgagcttccaaaacagggatgttttggtagagcccacatggatgt

SEQ ID NO: 22104 - DNA, 50 bp, unidentified
  source 1..50: mol_type = unassigned DNA; note = target_29efd08
  misc_feature 1..23: note = LF
  misc_feature 24..25: note = Core
  misc_feature 26..50: note = RF
ataataaaagagttgtacggttaaagagtgaaggtgttccgctgctgctg

SEQ ID NO: 22105 - DNA, 50 bp, unidentified
  source 1..50: mol_type = unassigned DNA; note = target_29f5aae
  misc_feature 1..23: note = LF
  misc_feature 24..25: note = Core
  misc_feature 26..50: note = RF
aattttcttcatactgcgtcctcctttcgcaaaaaagagggataccgccg

SEQ ID NO: 22106 - DNA, 50 bp, unidentified
  source 1..50: mol_type = unassigned DNA; note = target_2a06c57
  misc_feature 1..24: note = LF
  misc_feature 25: note = Core
  misc_feature 26..50: note = RF
ggaccctgagcgcgccgcaggcggcgaaatgacgcgcagccgggacggcg

SEQ ID NO: 22107 - DNA, 50 bp, unidentified
  source 1..50: mol_type = unassigned DNA; note = target_2a09245
  misc_feature 1..23: note = LF
  misc_feature 24..25: note = Core
  misc_feature 26..50: note = RF
cgggccatgaggtggtccccgattgacggacaggtggttaagcttggttc

SEQ ID NO: 22108 - DNA, 50 bp, unidentified
  source 1..50: mol_type = unassigned DNA; note = target_2a0a7d5
  misc_feature 1..23: note = LF
  misc_feature 24..25: note = Core
  misc_feature 26..50: note = RF
tttcttcagcataattttttctcctttcaaataaaaagaagccccgcaca

SEQ ID NO: 22109 - DNA, 50 bp, unidentified
  source 1..50: mol_type = unassigned DNA; note = target_2a1020d
  misc_feature 1..23: note = LF
  misc_feature 24..25: note = Core
  misc_feature 26..50: note = RF
cgacacgcgaagccgagctggggaggccaacaggctcaagtcaaagttga

SEQ ID NO: 22110 - DNA, 50 bp, unidentified
  source 1..50: mol_type = unassigned DNA; note = target_2a13ae7
  misc_feature 1..23: note = LF
  misc_feature 24..25: note = Core
  misc_feature 26..50: note = RF
ggaaaacatgggcggcattgacctgccaaggaagtttcatccagcgacga

SEQ ID NO: 22111 - DNA, 50 bp, unidentified
  source 1..50: mol_type = unassigned DNA; note = target_2a1846a
  misc_feature 1..24: note = LF
  misc_feature 25: note = Core
  misc_feature 26..50: note = RF
ccttcgatcggttgaaccgggcgttgcccaaatcgatgcagcttgaatgg

SEQ ID NO: 22112 - DNA, 50 bp, unidentified
  source 1..50: mol_type = unassigned DNA; note = target_2a2096a
  misc_feature 1..24: note = LF
  misc_feature 25: note = Core
  misc_feature 26..50: note = RF
tacgcaggctagacgtctcgtaagcggtcgttcgcgaaggtcgggtactg

SEQ ID NO: 22113 - DNA, 50 bp, unidentified
  source 1..50: mol_type = unassigned DNA; note = target_2a24116
  misc_feature 1..23: note = LF
  misc_feature 24..25: note = Core
  misc_feature 26..50: note = RF
atccgacttcggccatgccggggtttttatacctgcgatttacgatccct

SEQ ID NO: 22114 - DNA, 50 bp, unidentified
  source 1..50: mol_type = unassigned DNA; note = target_2a2cdab
  misc_feature 1..24: note = LF
  misc_feature 25: note = Core
  misc_feature 26..50: note = RF
ctgatgcacctacgtcaatctgggcggaatggccgtgggcgtcgatcgcc

SEQ ID NO: 22115 - DNA, 50 bp, unidentified
  source 1..50: mol_type = unassigned DNA; note = target_2a34e3d
  misc_feature 1..23: note = LF
  misc_feature 24..25: note = Core
  misc_feature 26..50: note = RF
aagcatcgcgcctgaaggcgctcctacgaatgcctgatcaaccgaccagg

SEQ ID NO: 22116 - DNA, 50 bp, unidentified
  source 1..50: mol_type = unassigned DNA; note = target_2a475bb
  misc_feature 1..23: note = LF
  misc_feature 24..25: note = Core
  misc_feature 26..50: note = RF
tctgccctcaatagcgaccaaataggagacatcgcgcgacttccgtttgg

SEQ ID NO: 22117 - DNA, 50 bp, unidentified
  source 1..50: mol_type = unassigned DNA; note = target_2a4d248
  misc_feature 1..24: note = LF
  misc_feature 25: note = Core
  misc_feature 26..50: note = RF
cggcgtcggacccactcgtcgcggcagatccggttgtccccgacaagcgg

SEQ ID NO: 22118 - DNA, 50 bp, unidentified
  source 1..50: mol_type = unassigned DNA; note = target_2a4e311
  misc_feature 1..24: note = LF
  misc_feature 25: note = Core
  misc_feature 26..50: note = RF
ttaacttccgctttaccccgaaagcgacttcgaggtacaagccgccactg

SEQ ID NO: 22119 - DNA, 50 bp, unidentified
  source 1..50: mol_type = unassigned DNA; note = target_2a4e67f
  misc_feature 1..24: note = LF
  misc_feature 25: note = Core
  misc_feature 26..50: note = RF
aaacgttgccagacagaggtccgttaggggtcagtcgcgaccgagccgtt

SEQ ID NO: 22120 - DNA, 50 bp, unidentified
  source 1..50: mol_type = unassigned DNA; note = target_2a51baa
  misc_feature 1..22: note = LF
  misc_feature 23..25: note = Core
  misc_feature 26..50: note = RF
cacttttttgatatttccataataataactccttcgtatatcaaattcct

SEQ ID NO: 22121 - DNA, 50 bp, unidentified
  source 1..50: mol_type = unassigned DNA; note = target_2a53ee6
  misc_feature 1..23: note = LF
  misc_feature 24..25: note = Core
  misc_feature 26..50: note = RF
ttttaaatatcataatataccttgtctcctagtaggtatattatcagatt

SEQ ID NO: 22122 - DNA, 50 bp, unidentified
  source 1..50: mol_type = unassigned DNA; note = target_2a59bd6
  misc_feature 1..22: note = LF
  misc_feature 23..25: note = Core
  misc_feature 26..50: note = RF
acccatgaacctgcgttccttaaacccttccctagcgcctttgcggcccc

SEQ ID NO: 22123 - DNA, 50 bp, unidentified
  source 1..50: mol_type = unassigned DNA; note = target_2a66e66
  misc_feature 1..22: note = LF
  misc_feature 23..25: note = Core
  misc_feature 26..50: note = RF
agcagccgagcatgggctcggctctacagaggtcgcgtgtcgaccaaggt

SEQ ID NO: 22124 - DNA, 50 bp, unidentified
  source 1..50: mol_type = unassigned DNA; note = target_2a6a0e0
  misc_feature 1..24: note = LF
  misc_feature 25: note = Core
  misc_feature 26..50: note = RF
gtattccgcaatttaaattattcatcttaagcttaaaataaaacagcatt

SEQ ID NO: 22125 - DNA, 50 bp, unidentified
  source 1..50: mol_type = unassigned DNA; note = target_2a6cb6e
  misc_feature 1..21: note = LF
  misc_feature 22..25: note = Core
  misc_feature 26..50: note = RF
ttaacattaaatatcattttgtcattctgaatgaatctcagcacactgaa

SEQ ID NO: 22126 - DNA, 50 bp, unidentified
  source 1..50: mol_type = unassigned DNA; note = target_2a77b52
  misc_feature 1..22: note = LF
  misc_feature 23..25: note = Core
  misc_feature 26..50: note = RF
aagctccctcctttccaaattactcctttatttttataatactatgtaat

SEQ ID NO: 22127 - DNA, 50 bp, unidentified
  source 1..50: mol_type = unassigned DNA; note = target_2a7aa7a
  misc_feature 1..23: note = LF
  misc_feature 24..25: note = Core
  misc_feature 26..50: note = RF
ataatcatttagtttcataatgcctccttctaataaaaaatggtcgggac

SEQ ID NO: 22128 - DNA, 50 bp, unidentified
  source 1..50: mol_type = unassigned DNA; note = target_2a80871
  misc_feature 1..22: note = LF
  misc_feature 23..25: note = Core
  misc_feature 26..50: note = RF
cccgccacccggcgggcgcaggagatcctatgttgctttctcctgaggag

SEQ ID NO: 22129 - DNA, 50 bp, unidentified
  source 1..50: mol_type = unassigned DNA; note = target_2a8540a
  misc_feature 1..23: note = LF
  misc_feature 24..25: note = Core
  misc_feature 26..50: note = RF
gaattaaatttgacggcttcgggctcgaagcagctaactgtagcaatcag

SEQ ID NO: 22130 - DNA, 50 bp, unidentified
  source 1..50: mol_type = unassigned DNA; note = target_2a87a92
  misc_feature 1..22: note = LF
  misc_feature 23..25: note = Core
  misc_feature 26..50: note = RF
tctaaaaagtctagttctatgtcatattgagcacttcgacaagctcagca

SEQ ID NO: 22131 - DNA, 50 bp, unidentified
  source 1..50: mol_type = unassigned DNA; note = target_2a880d2
  misc_feature 1..24: note = LF
  misc_feature 25: note = Core
  misc_feature 26..50: note = RF
ctattggaaaggtaacagcgagggctctataggaagtaaattagatatgc

SEQ ID NO: 22132 - DNA, 50 bp, unidentified
  source 1..50: mol_type = unassigned DNA; note = target_2a97c80
  misc_feature 1..23: note = LF
  misc_feature 24..25: note = Core
  misc_feature 26..50: note = RF
cggacgtaccgtttaattcctaccttttcggtggacattatattttaaat

SEQ ID NO: 22133 - DNA, 50 bp, unidentified
  source 1..50: mol_type = unassigned DNA; note = target_2aa29e6
  misc_feature 1..23: note = LF
  misc_feature 24..25: note = Core
  misc_feature 26..50: note = RF
attcattttcggagcgtatgctcctgtcgggagggcgtattttcgctgtt

SEQ ID NO: 22134 - DNA, 50 bp, unidentified
  source 1..50: mol_type = unassigned DNA; note = target_2aab41a
  misc_feature 1..22: note = LF
  misc_feature 23..25: note = Core
  misc_feature 26..50: note = RF
ttgggtaataacttatatactcctattcatcagcttaactttcacccgaa

SEQ ID NO: 22135 - DNA, 50 bp, unidentified
  source 1..50: mol_type = unassigned DNA; note = target_2aabb21
  misc_feature 1..22: note = LF
  misc_feature 23..25: note = Core
  misc_feature 26..50: note = RF
tggagactttttagcgttagcctgacagcgccctccctttcggcgctcat

SEQ ID NO: 22136 - DNA, 50 bp, unidentified
  source 1..50: mol_type = unassigned DNA; note = target_2aaf7a5
  misc_feature 1..24: note = LF
  misc_feature 25: note = Core
  misc_feature 26..50: note = RF
aaattttccttctattcagctaacgcccaattaagttgtgagcaacgctg

SEQ ID NO: 22137 - DNA, 50 bp, unidentified
  source 1..50: mol_type = unassigned DNA; note = target_2aaf8a7
  misc_feature 1..23: note = LF
  misc_feature 24..25: note = Core
  misc_feature 26..50: note = RF
ttcctgcgcattatgtcacgcccctttctcaaccggcgtagtcgaaaatg

SEQ ID NO: 22138 - DNA, 50 bp, unidentified
  source 1..50: mol_type = unassigned DNA; note = target_2ab53dd
  misc_feature 1..24: note = LF
  misc_feature 25: note = Core
  misc_feature 26..50: note = RF
tcgcctgaagaagaccgtgtttattggcttccagaagagcctccaagcca

SEQ ID NO: 22139 - DNA, 50 bp, unidentified
  source 1..50: mol_type = unassigned DNA; note = target_2ab5b8c
  misc_feature 1..23: note = LF
  misc_feature 24..25: note = Core
  misc_feature 26..50: note = RF
gcagacgtcccacgtccacacccctgacccgcgtcgggcgcaccgcgtcg

SEQ ID NO: 22140 - DNA, 50 bp, unidentified
  source 1..50: mol_type = unassigned DNA; note = target_2ab64a1
  misc_feature 1..24: note = LF
  misc_feature 25: note = Core
  misc_feature 26..50: note = RF
tggggcagatgccggtcagatcgtccgctcgacgaagtcaccgcgccaac

SEQ ID NO: 22141 - DNA, 50 bp, unidentified
  source 1..50: mol_type = unassigned DNA; note = target_2ab6efb
  misc_feature 1..24: note = LF
  misc_feature 25: note = Core
  misc_feature 26..50: note = RF
attttattttccatttttaatccttttttgttttaatggcgttattctac

SEQ ID NO: 22142 - DNA, 50 bp, unidentified
  source 1..50: mol_type = unassigned DNA; note = target_2abf6b6
  misc_feature 1..21: note = LF
  misc_feature 22..25: note = Core
  misc_feature 26..50: note = RF
tttcatgtggtcgtactcgaccccccggagatctcactgcgagcaaattg

SEQ ID NO: 22143 - DNA, 50 bp, unidentified
  source 1..50: mol_type = unassigned DNA; note = target_2ad80cb
  misc_feature 1..23: note = LF
  misc_feature 24..25: note = Core
  misc_feature 26..50: note = RF
tctgcataatatgcgtcctccttctacttttaagataatagcatattttt

SEQ ID NO: 22144 - DNA, 50 bp, unidentified
  source 1..50: mol_type = unassigned DNA; note = target_2ae0546
  misc_feature 1..23: note = LF
  misc_feature 24..25: note = Core
  misc_feature 26..50: note = RF
gggggaaggagaaggcagaccgtagcccggatggagcgcgcacgatcgct

SEQ ID NO: 22145 - DNA, 50 bp, unidentified
  source 1..50: mol_type = unassigned DNA; note = target_2ae7d4b
  misc_feature 1..24: note = LF
  misc_feature 25: note = Core
  misc_feature 26..50: note = RF
aacggcgcatcgttgacggttaacgttgtgctctgcggcgggcgcgcacg

SEQ ID NO: 22146 - DNA, 50 bp, unidentified
  source 1..50: mol_type = unassigned DNA; note = target_2aeb409
  misc_feature 1..24: note = LF
  misc_feature 25: note = Core
  misc_feature 26..50: note = RF
gcgcttggcggcgggccctaccatttttttgacagaagctcacgcagcgc

SEQ ID NO: 22147 - DNA, 50 bp, unidentified
  source 1..50: mol_type = unassigned DNA; note = target_2aef7cc
  misc_feature 1..23: note = LF
  misc_feature 24..25: note = Core
  misc_feature 26..50: note = RF
ttgaaaaggcagccgagcatgggctcggctctacacagacacgggacgcg

SEQ ID NO: 22148 - DNA, 50 bp, unidentified
  source 1..50: mol_type = unassigned DNA; note = target_2b0c1a6
  misc_feature 1..23: note = LF
  misc_feature 24..25: note = Core
  misc_feature 26..50: note = RF
tattttcattccatacctcctttcttatttttctttgtctacaaaaaggg

SEQ ID NO: 22149 - DNA, 50 bp, unidentified
  source 1..50: mol_type = unassigned DNA; note = target_2b1513c
  misc_feature 1..22: note = LF
  misc_feature 23..25: note = Core
  misc_feature 26..50: note = RF
gagctgcaacggatgctcggcaaaagaccatggagaacgagattcttcgc

SEQ ID NO: 22150 - DNA, 50 bp, unidentified
  source 1..50: mol_type = unassigned DNA; note = target_2b1efb5
  misc_feature 1..23: note = LF
  misc_feature 24..25: note = Core
  misc_feature 26..50: note = RF
gtaaaaggtacgcacagcgtaccctactggactggaatttaattaatcat

SEQ ID NO: 22151 - DNA, 50 bp, unidentified
  source 1..50: mol_type = unassigned DNA; note = target_2b28b3f
  misc_feature 1..23: note = LF
  misc_feature 24..25: note = Core
  misc_feature 26..50: note = RF
agaggccggtgccgggtaggtgccccccgggtcgtcgacccggaccagga

SEQ ID NO: 22152 - DNA, 50 bp, unidentified
  source 1..50: mol_type = unassigned DNA; note = target_2b2d6e0
  misc_feature 1..24: note = LF
  misc_feature 25: note = Core
  misc_feature 26..50: note = RF
tattaaactattgaaagactgggatggtccaggaagggctgtgcccttcc

SEQ ID NO: 22153 - DNA, 50 bp, unidentified
  source 1..50: mol_type = unassigned DNA; note = target_2b4241a
  misc_feature 1..24: note = LF
  misc_feature 25: note = Core
  misc_feature 26..50: note = RF
gcgtactctacgcgcattttagtgcggtttccttcgaattttcccttttg

SEQ ID NO: 22154 - DNA, 50 bp, unidentified
  source 1..50: mol_type = unassigned DNA; note = target_2b4ce52
  misc_feature 1..22: note = LF
  misc_feature 23..25: note = Core
  misc_feature 26..50: note = RF
atgcgcccgatgctgttaaacgtgacaccacccccggggtgtcgcctttg

SEQ ID NO: 22155 - DNA, 50 bp, unidentified
  source 1..50: mol_type = unassigned DNA; note = target_2b4e9f6
  misc_feature 1..22: note = LF
  misc_feature 23..25: note = Core
  misc_feature 26..50: note = RF
aatgttaagatgataactaacctgagcgcggaataacaactcgctctcta

SEQ ID NO: 22156 - DNA, 50 bp, unidentified
  source 1..50: mol_type = unassigned DNA; note = target_2b5cfbd
  misc_feature 1..23: note = LF
  misc_feature 24..25: note = Core
  misc_feature 26..50: note = RF
gcgaaaatcccgggtcagctctcagcggaaatcaacagctgggctactga

SEQ ID NO: 22157 - DNA, 50 bp, unidentified
  source 1..50: mol_type = unassigned DNA; note = target_2b5f7d9
  misc_feature 1..24: note = LF
  misc_feature 25: note = Core
  misc_feature 26..50: note = RF
acgacgcagacgtcctgagcgcggcagatgcggatgtccgcagtggtctc

SEQ ID NO: 22158 - DNA, 50 bp, unidentified
  source 1..50: mol_type = unassigned DNA; note = target_2b629db
  misc_feature 1..22: note = LF
  misc_feature 23..25: note = Core
  misc_feature 26..50: note = RF
tgaccggcttcacgtcggctaatgaccgatgctgtcgataaacgtttttc

SEQ ID NO: 22159 - DNA, 50 bp, unidentified
  source 1..50: mol_type = unassigned DNA; note = target_2b6d4ba
  misc_feature 1..24: note = LF
  misc_feature 25: note = Core
  misc_feature 26..50: note = RF
ttcggttgaatccaagacccgaagcggtcgttcaaccggttaatgcgcca

SEQ ID NO: 22160 - DNA, 50 bp, unidentified
  source 1..50: mol_type = unassigned DNA; note = target_2b72218
  misc_feature 1..23: note = LF
  misc_feature 24..25: note = Core
  misc_feature 26..50: note = RF
gacccgcgaggggcggccgtctcctagcccgcgcgggcggagcgggactc

SEQ ID NO: 22161 - DNA, 50 bp, unidentified
  source 1..50: mol_type = unassigned DNA; note = target_2b7770e
  misc_feature 1..22: note = LF
  misc_feature 23..25: note = Core
  misc_feature 26..50: note = RF
cctgcaccaacggcagctctgcggacaaagctgccttagaaaaaatagca

SEQ ID NO: 22162 - DNA, 50 bp, unidentified
  source 1..50: mol_type = unassigned DNA; note = target_2b79778
  misc_feature 1..23: note = LF
  misc_feature 24..25: note = Core
  misc_feature 26..50: note = RF
aaaatatatttcatatgtcattactcctttcaattaactgttcaggttcc

SEQ ID NO: 22163 - DNA, 50 bp, unidentified
  source 1..50: mol_type = unassigned DNA; note = target_2b7b85b
  misc_feature 1..24: note = LF
  misc_feature 25: note = Core
  misc_feature 26..50: note = RF
gccgccggatggattttcgacgggtgtttatcctcgcgacgaccgaacac

SEQ ID NO: 22164 - DNA, 50 bp, unidentified
  source 1..50: mol_type = unassigned DNA; note = target_2b88542
  misc_feature 1..24: note = LF
  misc_feature 25: note = Core
  misc_feature 26..50: note = RF
caagcaggcctgacggacagcccccaccccccccccccgctgaaacagga

SEQ ID NO: 22165 - DNA, 50 bp, unidentified
  source 1..50: mol_type = unassigned DNA; note = target_2b8a6e4
  misc_feature 1..24: note = LF
  misc_feature 25: note = Core
  misc_feature 26..50: note = RF
tccttgcacttcaaaccgaactcacgttaaataataataagattcatcaa

SEQ ID NO: 22166 - DNA, 50 bp, unidentified; identical to SEQ ID NO: 20464
  source 1..50: mol_type = unassigned DNA; note = target_2b8b1f2
  misc_feature 1..24: note = LF
  misc_feature 25: note = Core
  misc_feature 26..50: note = RF

SEQ ID NO: 22167 - DNA, 50 bp, unidentified
  source 1..50: mol_type = unassigned DNA; note = target_2b93ef4
  misc_feature 1..23: note = LF
  misc_feature 24..25: note = Core
  misc_feature 26..50: note = RF
cgtcccagctcaagctcaccacccttgcgggccttcttgcggaacccgcg

SEQ ID NO: 22168 - DNA, 50 bp, unidentified
  source 1..50: mol_type = unassigned DNA; note = target_2b967f2
  misc_feature 1..24: note = LF
  misc_feature 25: note = Core
  misc_feature 26..50: note = RF
ggcaacaacgccctacagcggcgttgtttcccaaatcagccagcaagtca

SEQ ID NO: 22169 - DNA, 50 bp, unidentified
  source 1..50: mol_type = unassigned DNA; note = target_2b98b6a
  misc_feature 1..24: note = LF
  misc_feature 25: note = Core
  misc_feature 26..50: note = RF
tccgacttttccgagacggctaacgttcgcgttgagcggcgcgccgacac

SEQ ID NO: 22170 - DNA, 50 bp, unidentified
  source 1..50: mol_type = unassigned DNA; note = target_2b98d37
  misc_feature 1..24: note = LF
  misc_feature 25: note = Core
  misc_feature 26..50: note = RF
cggaatctgagcctccatgtccgcttgggtcattcgcgtcgattcacgac

SEQ ID NO: 22171 - DNA, 50 bp, unidentified
  source 1..50: mol_type = unassigned DNA; note = target_2b9b495
  misc_feature 1..24: note = LF
  misc_feature 25: note = Core
  misc_feature 26..50: note = RF
ccccagacaccgccctgaaatcggcaatacagtgcgttttatgagcgcgc

SEQ ID NO: 22172 - DNA, 50 bp, unidentified
  source 1..50: mol_type = unassigned DNA; note = target_2ba12ba
  misc_feature 1..23: note = LF
  misc_feature 24..25: note = Core
  misc_feature 26..50: note = RF
attgaatccaaaagacctcactcctttcacaagatttttcttttgttgtc

SEQ ID NO: 22173 - DNA, 50 bp, unidentified
  source 1..50: mol_type = unassigned DNA; note = target_2ba2406
  misc_feature 1..22: note = LF
  misc_feature 23..25: note = Core
  misc_feature 26..50: note = RF
gagcatgcaatattgcatgtttttttaatatgcattcatatctgaacttg

SEQ ID NO: 22174 - DNA, 50 bp, unidentified
  source 1..50: mol_type = unassigned DNA; note = target_2ba4e7f
  misc_feature 1..24: note = LF
  misc_feature 25: note = Core
  misc_feature 26..50: note = RF
accgacaatccctgaaaacggggttttcggaaacttgagggcttagcgac

SEQ ID NO: 22175 - DNA, 50 bp, unidentified
  source 1..50: mol_type = unassigned DNA; note = target_2bac004
  misc_feature 1..24: note = LF
  misc_feature 25: note = Core
  misc_feature 26..50: note = RF
tgtgccttgaaagcagagtgattcccgacattcatcccagcagatgactg

SEQ ID NO: 22176 - DNA, 50 bp, unidentified
  source 1..50: mol_type = unassigned DNA; note = target_2bad09f
  misc_feature 1..22: note = LF
  misc_feature 23..25: note = Core
  misc_feature 26..50: note = RF
ctgagacgagttcgcatttgtctgacaccacctgctgatcgaatacttta

SEQ ID NO: 22177 - DNA, 50 bp, unidentified
  source 1..50: mol_type = unassigned DNA; note = target_2bb55be
  misc_feature 1..23: note = LF
  misc_feature 24..25: note = Core
  misc_feature 26..50: note = RF
ccaccggggctcgtccaaaagatcttggaaactattttcctggcggacga

SEQ ID NO: 22178 - DNA, 50 bp, unidentified
  source 1..50: mol_type = unassigned DNA; note = target_2bbc682
  misc_feature 1..23: note = LF
  misc_feature 24..25: note = Core
  misc_feature 26..50: note = RF
agtgtttttcgcgaacaagttcgctcctacggcctgcggccagaagctgg

SEQ ID NO: 22179 - DNA, 50 bp, unidentified
  source 1..50: mol_type = unassigned DNA; note = target_2bd6cf7
  misc_feature 1..23: note = LF
  misc_feature 24..25: note = Core
  misc_feature 26..50: note = RF
actggaagaccggcacgctcgccctcagtcctcgcgcgtgacgcgaagca

SEQ ID NO: 22180 - DNA, 50 bp, unidentified
  source 1..50: mol_type = unassigned DNA; note = target_2bd7d43
  misc_feature 1..23: note = LF
  misc_feature 24..25: note = Core
  misc_feature 26..50: note = RF
cgaccgtatcgcgagcaagctcgctcccacattccgccgtccggtctgcg

SEQ ID NO: 22181 - DNA, 50 bp, unidentified
  source 1..50: mol_type = unassigned DNA; note = target_2be70bf
  misc_feature 1..23: note = LF
  misc_feature 24..25: note = Core
  misc_feature 26..50: note = RF
tgattgaatcagatcgaacagcgctctagggtgagttctctcatggggct

SEQ ID NO: 22182 - DNA, 50 bp, unidentified
  source 1..50: mol_type = unassigned DNA; note = target_2be9616
  misc_feature 1..24: note = LF
  misc_feature 25: note = Core
  misc_feature 26..50: note = RF
tgctgccaccacctccgtgtgacacgcttttcgtcatcctgaccgctcca

SEQ ID NO: 22183 - DNA, 50 bp, unidentified
  source 1..50: mol_type = unassigned DNA; note = target_2bed105
  misc_feature 1..23: note = LF
  misc_feature 24..25: note = Core
  misc_feature 26..50: note = RF
tattgattagtaggtttgcttcgttttttccactaaaaagaaaaagggag

SEQ ID NO: 22184 - DNA, 50 bp, unidentified
  source 1..50: mol_type = unassigned DNA; note = target_2c058f9
  misc_feature 1..23: note = LF
  misc_feature 24..25: note = Core
  misc_feature 26..50: note = RF
ggtgactggggctggctgaggttcccccgcttccttggagggctctgagc

SEQ ID NO: 22185 - DNA, 50 bp, unidentified
  source 1..50: mol_type = unassigned DNA; note = target_2c18566
  misc_feature 1..23: note = LF
  misc_feature 24..25: note = Core
  misc_feature 26..50: note = RF
ggtcatcgcttcgcttgaccaccctctcttcgcctgcggcggaaagaggg

SEQ ID NO: 22186 - DNA, 50 bp, unidentified
  source 1..50: mol_type = unassigned DNA; note = target_2c1d87c
  misc_feature 1..23: note = LF
  misc_feature 24..25: note = Core
  misc_feature 26..50: note = RF
tgtggtgtaggcgacagcgacgcctttggtgatgcgcgtcttgtggatca

SEQ ID NO: 22187 - DNA, 50 bp, unidentified
  source 1..50: mol_type = unassigned DNA; note = target_2c3d419
  misc_feature 1..23: note = LF
  misc_feature 24..25: note = Core
  misc_feature 26..50: note = RF
ccgtgcaccagtatgcgcgtatccgttcggcggcagggtgatgagatcaa

SEQ ID NO: 22188 - DNA, 50 bp, unidentified
  source 1..50: mol_type = unassigned DNA; note = target_2c4be1b
  misc_feature 1..23: note = LF
  misc_feature 24..25: note = Core
  misc_feature 26..50: note = RF
cgatcaggcgaccaaggccccctttttgactgccagactcgatgccgtgc

SEQ ID NO: 22189 - DNA, 50 bp, unidentified
  source 1..50: mol_type = unassigned DNA; note = target_2c50236
  misc_feature 1..23: note = LF
  misc_feature 24..25: note = Core
  misc_feature 26..50: note = RF
tctctttcttatctaaactatcatttaattatcttttgtaaaataatatg

SEQ ID NO: 22190 - DNA, 50 bp, unidentified
  source 1..50: mol_type = unassigned DNA; note = target_2c55e68
  misc_feature 1..23: note = LF
  misc_feature 24..25: note = Core
  misc_feature 26..50: note = RF
agccaagcttcctcttcaaagcggaccgtctccttccggccactagcagt

SEQ ID NO: 22191 - DNA, 50 bp, unidentified
  source 1..50: mol_type = unassigned DNA; note = target_2c593ac
  misc_feature 1..21: note = LF
  misc_feature 22..25: note = Core
  misc_feature 26..50: note = RF
accattatatttgaccacaacaaaaaagctgattacatccgtaatcagcc

SEQ ID NO: 22192 - DNA, 50 bp, unidentified
  source 1..50: mol_type = unassigned DNA; note = target_2c5ad8f
  misc_feature 1..23: note = LF
  misc_feature 24..25: note = Core
  misc_feature 26..50: note = RF
gccgaactagacgatcaatcgtcctgacaggtccggggctgtttgcgtcg

SEQ ID NO: 22193 - DNA, 50 bp, unidentified
  source 1..50: mol_type = unassigned DNA; note = target_2c6e2c8
  misc_feature 1..23: note = LF
  misc_feature 24..25: note = Core
  misc_feature 26..50: note = RF
ctacataccaacaacagcaaatatgagtcagagccgcgaatggccggcaa

SEQ ID NO: 22194 - DNA, 50 bp, unidentified
  source 1..50: mol_type = unassigned DNA; note = target_2c6e35e
  misc_feature 1..23: note = LF
  misc_feature 24..25: note = Core
  misc_feature 26..50: note = RF
gtcaacaggtccaatccttgacactaccaacgacgcagagtggaaagtag

SEQ ID NO: 22195 - DNA, 50 bp, unidentified
  source 1..50: mol_type = unassigned DNA; note = target_2c73608
  misc_feature 1..24: note = LF
  misc_feature 25: note = Core
  misc_feature 26..50: note = RF
tcatccgacccttcgggccacctttctccccgctggggagaagagggagc

SEQ ID NO: 22196 - DNA, 50 bp, unidentified
  source 1..50: mol_type = unassigned DNA; note = target_2c76e6d
  misc_feature 1..24: note = LF
  misc_feature 25: note = Core
  misc_feature 26..50: note = RF
aaggctcaagaaccagttgttggttttccacgcagcgccggttaggcgca

SEQ ID NO: 22197 - DNA, 50 bp, unidentified
  source 1..50: mol_type = unassigned DNA; note = target_2c7d6f5
  misc_feature 1..23: note = LF
  misc_feature 24..25: note = Core
  misc_feature 26..50: note = RF
acatgggatttatggtgaccctgtaggagctgccgaaggctgcgatcttt

SEQ ID NO: 22198 - DNA, 50 bp, unidentified
  source 1..50: mol_type = unassigned DNA; note = target_2c7e91d
  misc_feature 1..23: note = LF
  misc_feature 24..25: note = Core
  misc_feature 26..50: note = RF
ccatcgccggagggcgggcggcgctcatgactgcaccgtttccgctagtg

SEQ ID NO: 22199 - DNA, 50 bp, unidentified
  source 1..50: mol_type = unassigned DNA; note = target_2c80cb2
  misc_feature 1..24: note = LF
  misc_feature 25: note = Core
  misc_feature 26..50: note = RF
acctcaagtttccgaaaacccgactttacgatagtttcgcatcctagaat

SEQ ID NO: 22200 - DNA, 50 bp, unidentified
  source 1..50: mol_type = unassigned DNA; note = target_2c82f6b
  misc_feature 1..22: note = LF
  misc_feature 23..25: note = Core
  misc_feature 26..50: note = RF
atagagcaggcgtaagctggtctttttttattgcctaaaaggagtgttcg

SEQ ID NO: 22201 - DNA, 50 bp, unidentified
  source 1..50: mol_type = unassigned DNA; note = target_2c87113
  misc_feature 1..22: note = LF
  misc_feature 23..25: note = Core
  misc_feature 26..50: note = RF
ggaattctgcgctcgattgttgagacctttgtgagatcgatgttcgacat

SEQ ID NO: 22202 - DNA, 50 bp, unidentified
  source 1..50: mol_type = unassigned DNA; note = target_2c888ce
  misc_feature 1..23: note = LF
  misc_feature 24..25: note = Core
  misc_feature 26..50: note = RF
ctaatacattcataagtatcctcctaaaaaaataaatttcatctataata

SEQ ID NO: 22203 - DNA, 50 bp, unidentified
  source 1..50: mol_type = unassigned DNA; note = target_2c8958e
  misc_feature 1..22: note = LF
  misc_feature 23..25: note = Core
  misc_feature 26..50: note = RF
tggagacagtttagcgtcagactgacaacaccgtccgcggctatggcgtg

SEQ ID NO: 22204 - DNA, 50 bp, unidentified
  source 1..50: mol_type = unassigned DNA; note = target_2c8d888
  misc_feature 1..23: note = LF
  misc_feature 24..25: note = Core
  misc_feature 26..50: note = RF
agagtgctctagcggaccgctcaagtcgaccctactcggccggtcccgtg

SEQ ID NO: 22205 - DNA, 50 bp, unidentified
  source 1..50: mol_type = unassigned DNA; note = target_2c900b2
  misc_feature 1..23: note = LF
  misc_feature 24..25: note = Core
  misc_feature 26..50: note = RF
ctcacgatgcgtttgtattcataagcgaagcgtgatgtgcctaaacatgt

SEQ ID NO: 22206 - DNA, 50 bp, unidentified
  source 1..50: mol_type = unassigned DNA; note = target_2c924f5
  misc_feature 1..23: note = LF
  misc_feature 24..25: note = Core
  misc_feature 26..50: note = RF
gaaataggcttagcgtaggatatttccgttttccaaacggagccctaata

SEQ ID NO: 22207 - DNA, 50 bp, unidentified
  source 1..50: mol_type = unassigned DNA; note = target_2c973c6
  misc_feature 1..24: note = LF
  misc_feature 25: note = Core
  misc_feature 26..50: note = RF
cttgattcgcaaaatgagacacccccccctgcttgccgcgggccgcaagt

SEQ ID NO: 22208 - DNA, 50 bp, unidentified
  source 1..50: mol_type = unassigned DNA; note = target_2c9ca5c
  misc_feature 1..23: note = LF
  misc_feature 24..25: note = Core
  misc_feature 26..50: note = RF
tcccttgtggaggacgacgggtttttctttggtgtgcgaggttggggcgt

SEQ ID NO: 22209 - DNA, 50 bp, unidentified
  source 1..50: mol_type = unassigned DNA; note = target_2ca1b3d
  misc_feature 1..22: note = LF
  misc_feature 23..25: note = Core
  misc_feature 26..50: note = RF
gccttattcaattaaagcccccgtttacttgaataagaaaatgccttgct

SEQ ID NO: 22210 - DNA, 50 bp, unidentified
  source 1..50: mol_type = unassigned DNA; note = target_2ca25ad
  misc_feature 1..24: note = LF
  misc_feature 25: note = Core
  misc_feature 26..50: note = RF
tttcgtggtgtggggagtctgaatcgccccgggttttgcggaggccgttc

SEQ ID NO: 22211 - DNA, 50 bp, unidentified
  source 1..50: mol_type = unassigned DNA; note = target_2ca77b8
  misc_feature 1..24: note = LF
  misc_feature 25: note = Core
  misc_feature 26..50: note = RF
cgtttattcaactatcgttccccgttagcttagtgaagtctctgtggcca

SEQ ID NO: 22212 - DNA, 50 bp, unidentified
  source 1..50: mol_type = unassigned DNA; note = target_2ca9ee0
  misc_feature 1..23: note = LF
  misc_feature 24..25: note = Core
  misc_feature 26..50: note = RF
gcgactcgtccaaagccatcacgctctagctggcgccaccgatcgcggca

SEQ ID NO: 22213 - DNA, 50 bp, unidentified
  source 1..50: mol_type = unassigned DNA; note = target_2cae2cd
  misc_feature 1..24: note = LF
  misc_feature 25: note = Core
  misc_feature 26..50: note = RF
tgaatgaccgccaatgacccaaagcggacgttgcaagaagtcacccttcg

SEQ ID NO: 22214 - DNA, 50 bp, unidentified
  source 1..50: mol_type = unassigned DNA; note = target_2cbc968
  misc_feature 1..23: note = LF
  misc_feature 24..25: note = Core
  misc_feature 26..50: note = RF
ccggaaccacacagcggccttcaaggcgagagtggcgcttgccgctatca

SEQ ID NO: 22215 - DNA, 50 bp, unidentified
  source 1..50: mol_type = unassigned DNA; note = target_2cbfcd0
  misc_feature 1..24: note = LF
  misc_feature 25: note = Core
  misc_feature 26..50: note = RF
gcaagaaaggaaagcgcgccaaaacgggggctgacggccggaccgctact

SEQ ID NO: 22216 - DNA, 50 bp, unidentified
  source 1..50: mol_type = unassigned DNA; note = target_2cd403a
  misc_feature 1..22: note = LF
  misc_feature 23..25: note = Core
  misc_feature 26..50: note = RF
gccatcccggccttcggctacaagaaccatatctccatcgatcgccgctt

SEQ ID NO: 22217 - DNA, 50 bp, unidentified
  source 1..50: mol_type = unassigned DNA; note = target_2cd62ba
  misc_feature 1..23: note = LF
  misc_feature 24..25: note = Core
  misc_feature 26..50: note = RF
tcaccttggcaatagctgcccccctcacccgatcctcgcctgggggctcg

SEQ ID NO: 22218 - DNA, 50 bp, unidentified
  source 1..50: mol_type = unassigned DNA; note = target_2cdd456
  misc_feature 1..23: note = LF
  misc_feature 24..25: note = Core
  misc_feature 26..50: note = RF
gcgcaacggttaatgcgtgcttcctgaagtcaatagaatgagcattattg

SEQ ID NO: 22219 - DNA, 50 bp, unidentified
  source 1..50: mol_type = unassigned DNA; note = target_2cdedd8
  misc_feature 1..23: note = LF
  misc_feature 24..25: note = Core
  misc_feature 26..50: note = RF
ttcactataacctatcatataacctccttaataaattggaatttaccaac

SEQ ID NO: 22220 - DNA, 50 bp, unidentified
  source 1..50: mol_type = unassigned DNA; note = target_2ce7409
  misc_feature 1..23: note = LF
  misc_feature 24..25: note = Core
  misc_feature 26..50: note = RF
catagccccatcctctcaggagttggggcctccgacaaacccggggcgtg

SEQ ID NO: 22221 - DNA, 50 bp, unidentified
  source 1..50: mol_type = unassigned DNA; note = target_2cfcec2
  misc_feature 1..23: note = LF
  misc_feature 24..25: note = Core
  misc_feature 26..50: note = RF
gtcttcgcaaccgttgatcgctcctacaggattgatgttgtcctgaattt

SEQ ID NO: 22222 - DNA, 50 bp, unidentified
  source 1..50: mol_type = unassigned DNA; note = target_2d01866
  misc_feature 1..23: note = LF
  misc_feature 24..25: note = Core
  misc_feature 26..50: note = RF
atggccatcttcgaatacatcaatggcttctacaatccgcgccggcggca

SEQ ID NO: 22223 - DNA, 50 bp, unidentified
  source 1..50: mol_type = unassigned DNA; note = target_2d07510
  misc_feature 1..21: note = LF
  misc_feature 22..25: note = Core
  misc_feature 26..50: note = RF
ttatcggcagttgcatgcgagctcctttccctgtatgttgcgcgttaccc

SEQ ID NO: 22224 - DNA, 50 bp, unidentified
  source 1..50: mol_type = unassigned DNA; note = target_2d08efb
  misc_feature 1..24: note = LF
  misc_feature 25: note = Core
  misc_feature 26..50: note = RF
tagaagcggcccgtgctatccgctcatacgcctgcaggccttaggctctt

SEQ ID NO: 22225 - DNA, 50 bp, unidentified
  source 1..50: mol_type = unassigned DNA; note = target_2d121d6
  misc_feature 1..23: note = LF
  misc_feature 24..25: note = Core
  misc_feature 26..50: note = RF
cataaaattttctaaaagcattcctatagaagtaaaataatactatagat

SEQ ID NO: 22226 - DNA, 50 bp, unidentified
  source 1..50: mol_type = unassigned DNA; note = target_2d12cb6
  misc_feature 1..23: note = LF
  misc_feature 24..25: note = Core
  misc_feature 26..50: note = RF
cgggcgttcggcggctccgccgactgagccgtgggagtcgccgtcagcgg

SEQ ID NO: 22227 - DNA, 50 bp, unidentified
  source 1..50: mol_type = unassigned DNA; note = target_2d1cf9d
  misc_feature 1..23: note = LF
  misc_feature 24..25: note = Core
  misc_feature 26..50: note = RF
atccaaaacatacacctccttatctatttactccgaattcctgcatactc

SEQ ID NO: 22228 - DNA, 50 bp, unidentified
  source 1..50: mol_type = unassigned DNA; note = target_2d1f882
  misc_feature 1..24: note = LF
  misc_feature 25: note = Core
  misc_feature 26..50: note = RF
agggcggagtgatcattttggtattgccaacttgacgggccgaaattggg

SEQ ID NO: 22229 - DNA, 50 bp, unidentified
  source 1..50: mol_type = unassigned DNA; note = target_2d21ebe
  misc_feature 1..23: note = LF
  misc_feature 24..25: note = Core
  misc_feature 26..50: note = RF
gccaccggcttaacgtgctttatttccgttttctgagacgatcccagcat

SEQ ID NO: 22230 - DNA, 50 bp, unidentified
  source 1..50: mol_type = unassigned DNA; note = target_2d24103
  misc_feature 1..24: note = LF
  misc_feature 25: note = Core
  misc_feature 26..50: note = RF
agtcggcgcggcaattgctgggacaacgccgtggcggaatcctttttcag

SEQ ID NO: 22231 - DNA, 50 bp, unidentified
  source 1..50: mol_type = unassigned DNA; note = target_2d254e8
  misc_feature 1..23: note = LF
  misc_feature 24..25: note = Core
  misc_feature 26..50: note = RF
ttagcgttcatcgtcgcatcctgctcagaaatgaaggcccggcgacaggt

SEQ ID NO: 22232 - DNA, 50 bp, unidentified
  source 1..50: mol_type = unassigned DNA; note = target_2d25dc5
  misc_feature 1..24: note = LF
  misc_feature 25: note = Core
  misc_feature 26..50: note = RF
ttcgggaccgccgaccggcgtaacttctcaatagacggtgatacgaccgg

SEQ ID NO: 22233 - DNA, 50 bp, unidentified
  source 1..50: mol_type = unassigned DNA; note = target_2d2c35a
  misc_feature 1..23: note = LF
  misc_feature 24..25: note = Core
  misc_feature 26..50: note = RF
ttcgtaattcaaaatcccgatagctatcgggacggaagaccgaagccgga

SEQ ID NO: 22234 - DNA, 50 bp, unidentified
  source 1..50: mol_type = unassigned DNA; note = target_2d3464c
  misc_feature 1..22: note = LF
  misc_feature 23..25: note = Core
  misc_feature 26..50: note = RF
cggtgacgggaagcttgagatccttcgccgtcctgcggcgttccgcgctg

SEQ ID NO: 22235 - DNA, 50 bp, unidentified
  source 1..50: mol_type = unassigned DNA; note = target_2d47fef
  misc_feature 1..24: note = LF
  misc_feature 25: note = Core
  misc_feature 26..50: note = RF
acgctcggtaaaacgggctttgtcgcgataaggatggcaggatgagaaag

SEQ ID NO: 22236 - DNA, 50 bp, unidentified
  source 1..50: mol_type = unassigned DNA; note = target_2d4e5c1
  misc_feature 1..23: note = LF
  misc_feature 24..25: note = Core
  misc_feature 26..50: note = RF
gccccacaatttcatatttgcacctctgttgtttaattctccttaaggga

SEQ ID NO: 22237 - DNA, 50 bp, unidentified
  source 1..50: mol_type = unassigned DNA; note = target_2d5550f
  misc_feature 1..21: note = LF
  misc_feature 22..25: note = Core
  misc_feature 26..50: note = RF
gcgtcccagaagtcgcgctcgctcatcgggccacgaagacggtgacgtgc

SEQ ID NO: 22238 - DNA, 50 bp, unidentified
  source 1..50: mol_type = unassigned DNA; note = target_2d632f4
  misc_feature 1..23: note = LF
  misc_feature 24..25: note = Core
  misc_feature 26..50: note = RF
agcaaggcatggggtgccccgtcctaacttgttagggcgggaactgaagg

SEQ ID NO: 22239 - DNA, 50 bp, unidentified
  source 1..50: mol_type = unassigned DNA; note = target_2d67245
  misc_feature 1..24: note = LF
  misc_feature 25: note = Core
  misc_feature 26..50: note = RF
ttcggactgtttggacgggataatttccggtttgccggtcaaccatccgc

SEQ ID NO: 22240 - DNA, 50 bp, unidentified
  source 1..50: mol_type = unassigned DNA; note = target_2d68738
  misc_feature 1..23: note = LF
  misc_feature 24..25: note = Core
  misc_feature 26..50: note = RF
tttgacacatatgttgttatctcctttcttttttcatctgtacatttacc

SEQ ID NO: 22241 - DNA, 50 bp, unidentified
  source 1..50: mol_type = unassigned DNA; note = target_2d69c17
  misc_feature 1..23: note = LF
  misc_feature 24..25: note = Core
  misc_feature 26..50: note = RF
cggaatgtccgcttttgacccttagcggacatggcctggcgcactgcaaa

SEQ ID NO: 22242 - DNA, 50 bp, unidentified
  source 1..50: mol_type = unassigned DNA; note = target_2d6f62f
  misc_feature 1..24: note = LF
  misc_feature 25: note = Core
  misc_feature 26..50: note = RF
ggcctcgatgagtgctatcgcgatttttcgccaacccgccccgaagcggt

SEQ ID NO: 22243 - DNA, 50 bp, unidentified
  source 1..50: mol_type = unassigned DNA; note = target_2d738aa
  misc_feature 1..23: note = LF
  misc_feature 24..25: note = Core
  misc_feature 26..50: note = RF
ccgtagaccttctgacagtaggtcgggctgcgcccgacgtcattcggcgg

SEQ ID NO: 22244 - DNA, 50 bp, unidentified
  source 1..50: mol_type = unassigned DNA; note = target_2d77968
  misc_feature 1..24: note = LF
  misc_feature 25: note = Core
  misc_feature 26..50: note = RF
gagtgcgccctacgtcattctgggcgctgtgtagcgcgtggtctcggatc

SEQ ID NO: 22245 - DNA, 50 bp, unidentified
  source 1..50: mol_type = unassigned DNA; note = target_2d7c6aa
  misc_feature 1..24: note = LF
  misc_feature 25: note = Core
  misc_feature 26..50: note = RF
gggctcgggcctgtgtgttcgccccacttttttagtccggatgtgggcgg

SEQ ID NO: 22246 - DNA, 50 bp, unidentified
  source 1..50: mol_type = unassigned DNA; note = target_2d9ff80
  misc_feature 1..23: note = LF
  misc_feature 24..25: note = Core
  misc_feature 26..50: note = RF
accctcttgctcatgtttttctcctttctggaatgctgaattttaatggt

SEQ ID NO: 22247 - DNA, 50 bp, unidentified
  source 1..50: mol_type = unassigned DNA; note = target_2da15f6
  misc_feature 1..21: note = LF
  misc_feature 22..25: note = Core
  misc_feature 26..50: note = RF
tcggaatgcaatcgcatggctctcctgggggctgaggcgagatcagtccg

SEQ ID NO: 22248 - DNA, 50 bp, unidentified
  source 1..50: mol_type = unassigned DNA; note = target_2da1b81
  misc_feature 1..23: note = LF
  misc_feature 24..25: note = Core
  misc_feature 26..50: note = RF
ttcgtgaaaatatgcataacttcctgcagtcttgttttttcgattttcat

SEQ ID NO: 22249 - DNA, 50 bp, unidentified
  source 1..50: mol_type = unassigned DNA; note = target_2da463d
  misc_feature 1..22: note = LF
  misc_feature 23..25: note = Core
  misc_feature 26..50: note = RF
agcaagctgctagatgtctctttttttgtgtgcctggcctctggttcaac

SEQ ID NO: 22250 - DNA, 50 bp, unidentified
  source 1..50: mol_type = unassigned DNA; note = target_2da4e27
  misc_feature 1..23: note = LF
  misc_feature 24..25: note = Core
  misc_feature 26..50: note = RF
gaagcgtgatgaactcgcggcgcctcattcgatcacctcgtcggcgcggg

SEQ ID NO: 22251 - DNA, 50 bp, unidentified
  source 1..50: mol_type = unassigned DNA; note = target_2da82a9
  misc_feature 1..23: note = LF
  misc_feature 24..25: note = Core
  misc_feature 26..50: note = RF
cgaccgtggctcgtgacagggcactgttgcggtaggcgatcctgtgatct

SEQ ID NO: 22252 - DNA, 50 bp, unidentified
  source 1..50: mol_type = unassigned DNA; note = target_2daea0f
  misc_feature 1..24: note = LF
  misc_feature 25: note = Core
  misc_feature 26..50: note = RF
gccgctatgcggccgggaggtacccaccccccggaaccaccggccaggtg

SEQ ID NO: 22253 - DNA, 50 bp, unidentified
  source 1..50: mol_type = unassigned DNA; note = target_2db412c
  misc_feature 1..23: note = LF
  misc_feature 24..25: note = Core
  misc_feature 26..50: note = RF
cttggtttagtgacgtccgcttatggcccaaagccgcaattacgattttt

SEQ ID NO: 22254 - DNA, 50 bp, unidentified
  source 1..50: mol_type = unassigned DNA; note = target_2db5655
  misc_feature 1..24: note = LF
  misc_feature 25: note = Core
  misc_feature 26..50: note = RF
tttttcgcgaagtaggtggcggcctttttactatatctagctcttcagct

SEQ ID NO: 22255 - DNA, 50 bp, unidentified
  source 1..50: mol_type = unassigned DNA; note = target_2dc78e8
  misc_feature 1..23: note = LF
  misc_feature 24..25: note = Core
  misc_feature 26..50: note = RF
tttgtaatccatgtttttatctcctttcatggcaaaagggaggttaccct

SEQ ID NO: 22256 - DNA, 50 bp, unidentified
  source 1..50: mol_type = unassigned DNA; note = target_2dd616f
  misc_feature 1..22: note = LF
  misc_feature 23..25: note = Core
  misc_feature 26..50: note = RF
taacttccaaacttatctactcctttccttaaatttagccatcatttata

SEQ ID NO: 22257 - DNA, 50 bp, unidentified
  source 1..50: mol_type = unassigned DNA; note = target_2dd856f
  misc_feature 1..21: note = LF
  misc_feature 22..25: note = Core
  misc_feature 26..50: note = RF
ggcctgctgttcccggtctcgctcatctcatctggccagcttcccgtcga

SEQ ID NO: 22258 - DNA, 50 bp, unidentified
  source 1..50: mol_type = unassigned DNA; note = target_2de034a
  misc_feature 1..24: note = LF
  misc_feature 25: note = Core
  misc_feature 26..50: note = RF
cgggttttctttcaggcactagattgccctgtcagccgccccgtctttga

SEQ ID NO: 22259 - DNA, 50 bp, unidentified
  source 1..50: mol_type = unassigned DNA; note = target_2de6584
  misc_feature 1..24: note = LF
  misc_feature 25: note = Core
  misc_feature 26..50: note = RF
gcgcaacgccggctacacctttgccgggggatggttacgtcagctgtgtg

SEQ ID NO: 22260 - DNA, 50 bp, unidentified
  source 1..50: mol_type = unassigned DNA; note = target_2df1b26
  misc_feature 1..24: note = LF
  misc_feature 25: note = Core
  misc_feature 26..50: note = RF
ccttgaaacgtcgcgcacgtccgcttgggtcattttcagacttcgagccg

SEQ ID NO: 22261 - DNA, 50 bp, unidentified
  source 1..50: mol_type = unassigned DNA; note = target_2df1ccf
  misc_feature 1..24: note = LF
  misc_feature 25: note = Core
  misc_feature 26..50: note = RF
ttgtccgcccgcaaacctccgccgggtctgtccgctgcttttgagcggac

SEQ ID NO: 22262 - DNA, 50 bp, unidentified
  source 1..50: mol_type = unassigned DNA; note = target_2df4159
  misc_feature 1..23: note = LF
  misc_feature 24..25: note = Core
  misc_feature 26..50: note = RF
aagatcgcagccttcggcagctcctacagacggggtgatttttgaggatg

SEQ ID NO: 22263 - DNA, 50 bp, unidentified
  source 1..50: mol_type = unassigned DNA; note = target_2dfdce6
  misc_feature 1..23: note = LF
  misc_feature 24..25: note = Core
  misc_feature 26..50: note = RF
cttttctcataaaatatatcctcctttatttgagtttctttaataatttg

SEQ ID NO: 22264 - DNA, 50 bp, unidentified
  source 1..50: mol_type = unassigned DNA; note = target_2e04ae8
  misc_feature 1..23: note = LF
  misc_feature 24..25: note = Core
  misc_feature 26..50: note = RF
cttcgtagttgctcaaacgtgagcgtccggtgagcagtttttgctgatcg

SEQ ID NO: 22265 - DNA, 50 bp, unidentified
  source 1..50: mol_type = unassigned DNA; note = target_2e0b09b
  misc_feature 1..23: note = LF
  misc_feature 24..25: note = Core
  misc_feature 26..50: note = RF
gacccatggcaaaaggagcgattagagtcgctgacggcgattgggtgctt

SEQ ID NO: 22266 - DNA, 50 bp, unidentified
  source 1..50: mol_type = unassigned DNA; note = target_2e0d4a6
  misc_feature 1..23: note = LF
  misc_feature 24..25: note = Core
  misc_feature 26..50: note = RF
gtccttttcatctttcttcctcactttagttttaatatttgggtatatag

SEQ ID NO: 22267 - DNA, 50 bp, unidentified
  source 1..50: mol_type = unassigned DNA; note = target_2e1556a
  misc_feature 1..21: note = LF
  misc_feature 22..25: note = Core
  misc_feature 26..50: note = RF
gtccctcggcttcgcctcgggatgacaattttgttgatcgttgcgctgtg

SEQ ID NO: 22268 - DNA, 50 bp, unidentified
  source 1..50: mol_type = unassigned DNA; note = target_2e19f59
  misc_feature 1..24: note = LF
  misc_feature 25: note = Core
  misc_feature 26..50: note = RF
gggcttgcccgccctcggcgtaacttccgtatggccggttatccgaccgg

SEQ ID NO: 22269 - DNA, 50 bp, unidentified
  source 1..50: mol_type = unassigned DNA; note = target_2e25c89
  misc_feature 1..23: note = LF
  misc_feature 24..25: note = Core
  misc_feature 26..50: note = RF
cccgcgcgcgggtgaccccgttgctcacgacagctgcaccccctcggcgg

SEQ ID NO: 22270 - DNA, 50 bp, unidentified
  source 1..50: mol_type = unassigned DNA; note = target_2e2b6fa
  misc_feature 1..23: note = LF
  misc_feature 24..25: note = Core
  misc_feature 26..50: note = RF
taattgcaacacgttctccttttcttattttttgaatgttacttcctaat

SEQ ID NO: 22271 - DNA, 50 bp, unidentified
  source 1..50: mol_type = unassigned DNA; note = target_2e2d8b4
  misc_feature 1..23: note = LF
  misc_feature 24..25: note = Core
  misc_feature 26..50: note = RF
aactcctttacactcttttccgctctgcgagagattataatactccgtca

SEQ ID NO: 22272 - DNA, 50 bp, unidentified
  source 1..50: mol_type = unassigned DNA; note = target_2e443c5
  misc_feature 1..24: note = LF
  misc_feature 25: note = Core
  misc_feature 26..50: note = RF
ggaatgtcgctttgtggcccagactgtgtaaaaaccagaaaatccagggc

SEQ ID NO: 22273 - DNA, 50 bp, unidentified
  source 1..50: mol_type = unassigned DNA; note = target_2e45d2e
  misc_feature 1..24: note = LF
  misc_feature 25: note = Core
  misc_feature 26..50: note = RF
ttaggccgaccgagcggaatgcggcatgtccggatgttcttcgattgccg

SEQ ID NO: 22274 - DNA, 50 bp, unidentified
  source 1..50: mol_type = unassigned DNA; note = target_2e4efb6
  misc_feature 1..22: note = LF
  misc_feature 23..25: note = Core
  misc_feature 26..50: note = RF
ttaagaataaagtaattgtttccataattatggggatttattcaagatac

SEQ ID NO: 22275 - DNA, 50 bp, unidentified
  source 1..50: mol_type = unassigned DNA; note = target_2e554e2
  misc_feature 1..23: note = LF
  misc_feature 24..25: note = Core
  misc_feature 26..50: note = RF
cccaagtctacaagaagcaggtccttcggcttcgctcaggatgacagcaa

SEQ ID NO: 22276 - DNA, 50 bp, unidentified
  source 1..50: mol_type = unassigned DNA; note = target_2e581ea
  misc_feature 1..24: note = LF
  misc_feature 25: note = Core
  misc_feature 26..50: note = RF
acctgcctcgatgccggcctttcccaccccccattggggcagatcgactt

SEQ ID NO: 22277 - DNA, 50 bp, unidentified
  source 1..50: mol_type = unassigned DNA; note = target_2e58e06
  misc_feature 1..22: note = LF
  misc_feature 23..25: note = Core
  misc_feature 26..50: note = RF
gtttattgaactaacctgcccctttagttccataagaaaaagctgcctta

SEQ ID NO: 22278 - DNA, 50 bp, unidentified
  source 1..50: mol_type = unassigned DNA; note = target_2e69dd6
  misc_feature 1..23: note = LF
  misc_feature 24..25: note = Core
  misc_feature 26..50: note = RF
agattcgggtggcccgaaattcttgatttatgcacgccaatggcggaatc

SEQ ID NO: 22279 - DNA, 50 bp, unidentified
  source 1..50: mol_type = unassigned DNA; note = target_2e6d70c
  misc_feature 1..23: note = LF
  misc_feature 24..25: note = Core
  misc_feature 26..50: note = RF
actttagtgtttaaaccacgcaactaatcttatacaaacaagttagcaac

SEQ ID NO: 22280 - DNA, 50 bp, unidentified
  source 1..50: mol_type = unassigned DNA; note = target_2e6f4e4
  misc_feature 1..23: note = LF
  misc_feature 24..25: note = Core
  misc_feature 26..50: note = RF
acaaccatcaccgctaccatgagagcccaaaggatggcgcccacggcgat

SEQ ID NO: 22281 - DNA, 50 bp, unidentified
  source 1..50: mol_type = unassigned DNA; note = target_2e7c6ae
  misc_feature 1..24: note = LF
  misc_feature 25: note = Core
  misc_feature 26..50: note = RF
caccactcctgcggacgtgaccggcatgagcgtgcattcaccgtgaacgt

SEQ ID NO: 22282 - DNA, 50 bp, unidentified
  source 1..50: mol_type = unassigned DNA; note = target_2e881e7
  misc_feature 1..24: note = LF
  misc_feature 25: note = Core
  misc_feature 26..50: note = RF
actgctcgactcctacttcgtaagcgtccggcgaacccgtcttgacgagt

SEQ ID NO: 22283 - DNA, 50 bp, unidentified
  source 1..50: mol_type = unassigned DNA; note = target_2e8b24b
  misc_feature 1..21: note = LF
  misc_feature 22..25: note = Core
  misc_feature 26..50: note = RF
accaccgccagccacacccgcctaacccctatgccgctggcacccccggc

SEQ ID NO: 22284 - DNA, 50 bp, unidentified
  source 1..50: mol_type = unassigned DNA; note = target_2e8bb8e
  misc_feature 1..23: note = LF
  misc_feature 24..25: note = Core
  misc_feature 26..50: note = RF
ggtcttcctgccgccgtcgccccctaccgtcccgtcggcacccgcgcctc

SEQ ID NO: 22285 - DNA, 50 bp, unidentified
  source 1..50: mol_type = unassigned DNA; note = target_2e94eb4
  misc_feature 1..23: note = LF
  misc_feature 24..25: note = Core
  misc_feature 26..50: note = RF
ccggcagatccggcgcggttcacacagccatgagcagaagcgaccgcact

SEQ ID NO: 22286 - DNA, 50 bp, unidentified
  source 1..50: mol_type = unassigned DNA; note = target_2e963d2
  misc_feature 1..23: note = LF
  misc_feature 24..25: note = Core
  misc_feature 26..50: note = RF
gcaccgccgcagcagtcgttcgcctgaccaggcacctcgtcgccctcggc

SEQ ID NO: 22287 - DNA, 50 bp, unidentified
  source 1..50: mol_type = unassigned DNA; note = target_2e9d52c
  misc_feature 1..23: note = LF
  misc_feature 24..25: note = Core
  misc_feature 26..50: note = RF
gctatccattttcggtttcactccttcctactgggttgataaaacggggg

SEQ ID NO: 22288 - DNA, 50 bp, unidentified
  source 1..50: mol_type = unassigned DNA; note = target_2ea7a81
  misc_feature 1..23: note = LF
  misc_feature 24..25: note = Core
  misc_feature 26..50: note = RF
taactttaacatataaattactcctttctaaaaattaatatttatttctt

SEQ ID NO: 22289 - DNA, 50 bp, unidentified
  source 1..50: mol_type = unassigned DNA; note = target_2eac8f4
  misc_feature 1..23: note = LF
  misc_feature 24..25: note = Core
  misc_feature 26..50: note = RF
gcgtgcggtcgagcgcctggatctggctcttctcgtcgacggacagcacg

SEQ ID NO: 22290 - DNA, 50 bp, unidentified
  source 1..50: mol_type = unassigned DNA; note = target_2eafdc4
  misc_feature 1..24: note = LF
  misc_feature 25: note = Core
  misc_feature 26..50: note = RF
gtgtgaatatttatcattttttcctctccttaagtaaattaagtttatgt

SEQ ID NO: 22291 - DNA, 50 bp, unidentified
  source 1..50: mol_type = unassigned DNA; note = target_2eb24df
  misc_feature 1..23: note = LF
  misc_feature 24..25: note = Core
  misc_feature 26..50: note = RF
gatgaaacctacaataaccttcacttttatatttattatcattatcagct

SEQ ID NO: 22292 - DNA, 50 bp, unidentified
  source 1..50: mol_type = unassigned DNA; note = target_2ebf921
  misc_feature 1..24: note = LF
  misc_feature 25: note = Core
  misc_feature 26..50: note = RF
tgacttttatacaatcgcgcccgattgtgaaagaaaaaatcatggctgaa

SEQ ID NO: 22293 - DNA, 50 bp, unidentified
  source 1..50: mol_type = unassigned DNA; note = target_2ec4b7f
  misc_feature 1..23: note = LF
  misc_feature 24..25: note = Core
  misc_feature 26..50: note = RF
aaaattgcgcgtctaactcatcactgaagtaacgagaatgcgacgcgcag

SEQ ID NO: 22294 - DNA, 50 bp, unidentified
  source 1..50: mol_type = unassigned DNA; note = target_2ec50b3
  misc_feature 1..23: note = LF
  misc_feature 24..25: note = Core
  misc_feature 26..50: note = RF
tatactattcatacaaatcactcctttttttaaaatccaagtaaaaaatt

SEQ ID NO: 22295 - DNA, 50 bp, unidentified
  source 1..50: mol_type = unassigned DNA; note = target_2ec7b73
  misc_feature 1..22: note = LF
  misc_feature 23..25: note = Core
  misc_feature 26..50: note = RF
atgacgatatatatccctcaaatgactcgtcacacgatcaatcccggcgc

SEQ ID NO: 22296 - DNA, 50 bp, unidentified
  source 1..50: mol_type = unassigned DNA; note = target_2ed53b8
  misc_feature 1..23: note = LF
  misc_feature 24..25: note = Core
  misc_feature 26..50: note = RF
cagctcactcgtaacgtccgattctgccgcacggtgcgcgagggtagcct

SEQ ID NO: 22297 - DNA, 50 bp, unidentified
  source 1..50: mol_type = unassigned DNA; note = target_2ee5ce1
  misc_feature 1..23: note = LF
  misc_feature 24..25: note = Core
  misc_feature 26..50: note = RF
aattttacttatcatttatattcctttctattgttttacataatttaaac

SEQ ID NO: 22298 - DNA, 50 bp, unidentified
  source 1..50: mol_type = unassigned DNA; note = target_2ef8b8a
  misc_feature 1..23: note = LF
  misc_feature 24..25: note = Core
  misc_feature 26..50: note = RF
atgttcgggcgctcgttgttgtaagtccatagccaacgcgtggcgtgatc

SEQ ID NO: 22299 - DNA, 50 bp, unidentified
  source 1..50: mol_type = unassigned DNA; note = target_2f09a15
  misc_feature 1..23: note = LF
  misc_feature 24..25: note = Core
  misc_feature 26..50: note = RF
ctcagactgaagatggaaaaggctcactgagtgcactcgatgccgtggtg

SEQ ID NO: 22300 - DNA, 50 bp, unidentified
  source 1..50: mol_type = unassigned DNA; note = target_2f11435
  misc_feature 1..24: note = LF
  misc_feature 25: note = Core
  misc_feature 26..50: note = RF
tgccgaggaagaccccctccttgttgatcagggggcgggagacggagacg

SEQ ID NO: 22301 - DNA, 50 bp, unidentified
  source 1..50: mol_type = unassigned DNA; note = target_2f1658c
  misc_feature 1..23: note = LF
  misc_feature 24..25: note = Core
  misc_feature 26..50: note = RF
cggcgaagatagatgtccggctcaggatgacagcctcagttttgttgtgg

SEQ ID NO: 22302 - DNA, 50 bp, unidentified
  source 1..50: mol_type = unassigned DNA; note = target_2f22274
  misc_feature 1..23: note = LF
  misc_feature 24..25: note = Core
  misc_feature 26..50: note = RF
aagagcattcgcgtgcaagcacgctcccacgcacactcacagagaaccgg

SEQ ID NO: 22303 - DNA, 50 bp, unidentified
  source 1..50: mol_type = unassigned DNA; note = target_2f222e7
  misc_feature 1..24: note = LF
  misc_feature 25: note = Core
  misc_feature 26..50: note = RF
agtgacttgaaacgaggaacagactgcaaacctagagacgggcttgttgc

SEQ ID NO: 22304 - DNA, 50 bp, unidentified
  source 1..50: mol_type = unassigned DNA; note = target_2f2e30c
  misc_feature 1..20: note = LF
  misc_feature 21..25: note = Core
  misc_feature 26..50: note = RF
gagcaaaactcacgtggggctcctttcgaggatctccggtgcgtcggcgc

SEQ ID NO: 22305 - DNA, 50 bp, unidentified
  source 1..50: mol_type = unassigned DNA; note = target_2f3bdbb
  misc_feature 1..24: note = LF
  misc_feature 25: note = Core
  misc_feature 26..50: note = RF
cttgcatcgccgtctcgccgggactgacttttcctgtcccgtcccgggcc

SEQ ID NO: 22306 - DNA, 50 bp, unidentified
  source 1..50: mol_type = unassigned DNA; note = target_2f3d8c9
  misc_feature 1..22: note = LF
  misc_feature 23..25: note = Core
  misc_feature 26..50: note = RF
ttcccaaattccgggaagaatcttttttgtgcgggaagcacagtttccgc

SEQ ID NO: 22307 - DNA, 50 bp, unidentified
  source 1..50: mol_type = unassigned DNA; note = target_2f48f9e
  misc_feature 1..23: note = LF
  misc_feature 24..25: note = Core
  misc_feature 26..50: note = RF
acatcgtcatcgagcgctgtgcagacagagcgggcatcaaaaatgctcaa

SEQ ID NO: 22308 - DNA, 50 bp, unidentified
  source 1..50: mol_type = unassigned DNA; note = target_2f4e71f
  misc_feature 1..23: note = LF
  misc_feature 24..25: note = Core
  misc_feature 26..50: note = RF
ctacaatctttttcattttttacctccctttcattttaaggtcgtcttaa

SEQ ID NO: 22309 - DNA, 50 bp, unidentified
  source 1..50: mol_type = unassigned DNA; note = target_2f55761
  misc_feature 1..22: note = LF
  misc_feature 23..25: note = Core
  misc_feature 26..50: note = RF
ctgtacacgcatggtcacaccttctttcttgtcaggaggaggtagaggaa

SEQ ID NO: 22310 - DNA, 50 bp, unidentified
  source 1..50: mol_type = unassigned DNA; note = target_2f5879b
  misc_feature 1..24: note = LF
  misc_feature 25: note = Core
  misc_feature 26..50: note = RF
gtgcgtaacttgcgctaaagcgatttatcaacaactatctatcggttgag

SEQ ID NO: 22311 - DNA, 50 bp, unidentified
  source 1..50: mol_type = unassigned DNA; note = target_2f5f7d5
  misc_feature 1..20: note = LF
  misc_feature 21..25: note = Core
  misc_feature 26..50: note = RF
gcttcggcttggccgacgtgctcatgcggccccctgggccctgcgggccg

SEQ ID NO: 22312 - DNA, 50 bp, unidentified
  source 1..50: mol_type = unassigned DNA; note = target_2f6e78e
  misc_feature 1..23: note = LF
  misc_feature 24..25: note = Core
  misc_feature 26..50: note = RF
gtgagactcgctctcatcctgattgtcgcgctatacgccggactgatgca

SEQ ID NO: 22313 - DNA, 50 bp, unidentified
  source 1..50: mol_type = unassigned DNA; note = target_2f7ba2d
  misc_feature 1..22: note = LF
  misc_feature 23..25: note = Core
  misc_feature 26..50: note = RF
attcataggacgcggcgtaccggatacccccaagcgcggcgtatgaccag

SEQ ID NO: 22314 - DNA, 50 bp, unidentified
  source 1..50: mol_type = unassigned DNA; note = target_2f7d692
  misc_feature 1..23: note = LF
  misc_feature 24..25: note = Core
  misc_feature 26..50: note = RF
tcggtttgcactattaacaactcctttcaaaagactatccctggcaggat

SEQ ID NO: 22315 - DNA, 50 bp, unidentified
  source 1..50: mol_type = unassigned DNA; note = target_2f7e062
  misc_feature 1..23: note = LF
  misc_feature 24..25: note = Core
  misc_feature 26..50: note = RF
gattccatttcatgctaatcctcctttcggaatacgatgtgcagcaggcc

SEQ ID NO: 22316 - DNA, 50 bp, unidentified
  source 1..50: mol_type = unassigned DNA; note = target_2f7e236
  misc_feature 1..24: note = LF
  misc_feature 25: note = Core
  misc_feature 26..50: note = RF
gcgccggtaccctctcgactttaccgaccaaagtgaagcagagcatggga

SEQ ID NO: 22317 - DNA, 50 bp, unidentified
  source 1..50: mol_type = unassigned DNA; note = target_2f842cc
  misc_feature 1..22: note = LF
  misc_feature 23..25: note = Core
  misc_feature 26..50: note = RF
tgctcaattttccgctcacctcctttcctcattcattgaccatgctcgct

SEQ ID NO: 22318 - DNA, 50 bp, unidentified
  source 1..50: mol_type = unassigned DNA; note = target_2f89c97
  misc_feature 1..24: note = LF
  misc_feature 25: note = Core
  misc_feature 26..50: note = RF
gttgatcgtttccgataaccccgttttcggggaatgactctcgtgagagc

SEQ ID NO: 22319 - DNA, 50 bp, unidentified
  source 1..50: mol_type = unassigned DNA; note = target_2f8aecc
  misc_feature 1..24: note = LF
  misc_feature 25: note = Core
  misc_feature 26..50: note = RF
acgccatttcgacgggcccagaagcggacgttcgcgagagtgcgcgcggc

SEQ ID NO: 22320 - DNA, 50 bp, unidentified
  source 1..50: mol_type = unassigned DNA; note = target_2f8e308
  misc_feature 1..24: note = LF
  misc_feature 25: note = Core
  misc_feature 26..50: note = RF
tgaggcgccagaccctgctcgcggcggaatgacgcgtccaaacacggacg

SEQ ID NO: 22321 - DNA, 50 bp, unidentified
  source 1..50: mol_type = unassigned DNA; note = target_2f8f168
  misc_feature 1..22: note = LF
  misc_feature 23..25: note = Core
  misc_feature 26..50: note = RF
cgccgctggccgggatggaacccgaccttccagaaacacgccttcacaag

SEQ ID NO: 22322 - DNA, 50 bp, unidentified
  source 1..50: mol_type = unassigned DNA; note = target_2f8ff12
  misc_feature 1..24: note = LF
  misc_feature 25: note = Core
  misc_feature 26..50: note = RF
caacccatcgcgctgcgcctgccccaccccccgttacggccccagcagcc

SEQ ID NO: 22323 - DNA, 50 bp, unidentified
  source 1..50: mol_type = unassigned DNA; note = target_2f9196a
  misc_feature 1..24: note = LF
  misc_feature 25: note = Core
  misc_feature 26..50: note = RF
agccacaacgttacttttagatagagtatatttaatgcaccatttacatc

SEQ ID NO: 22324 - DNA, 50 bp, unidentified
  source 1..50: mol_type = unassigned DNA; note = target_2f94dbf
  misc_feature 1..23: note = LF
  misc_feature 24..25: note = Core
  misc_feature 26..50: note = RF
ttgtgcattatgaattgtgcattgtgcattaaaaaaaggcgcagtcactc

SEQ ID NO: 22325 - DNA, 50 bp, unidentified
  source 1..50: mol_type = unassigned DNA; note = target_2f9b643
  misc_feature 1..24: note = LF
  misc_feature 25: note = Core
  misc_feature 26..50: note = RF
tggggtgaaagcaggcgcgaaaaccggtgacaggcaccaattaacgggaa

SEQ ID NO: 22326 - DNA, 50 bp, unidentified
  source 1..50: mol_type = unassigned DNA; note = target_2fa49d1
  misc_feature 1..23: note = LF
  misc_feature 24..25: note = Core
  misc_feature 26..50: note = RF
aattctgtattcacgagtatctcctttctggttagtgtgcgttaaacaca

SEQ ID NO: 22327 - DNA, 50 bp, unidentified
  source 1..50: mol_type = unassigned DNA; note = target_2fab35c
  misc_feature 1..23: note = LF
  misc_feature 24..25: note = Core
  misc_feature 26..50: note = RF
gggtacgcgcaggtgcttatcttgtcttttaacctctgaggctgtcgcgc

SEQ ID NO: 22328 - DNA, 50 bp, unidentified
  source 1..50: mol_type = unassigned DNA; note = target_2fadedc
  misc_feature 1..23: note = LF
  misc_feature 24..25: note = Core
  misc_feature 26..50: note = RF
tctcctggtgcgcgcggcgcaccctacggggctgctcgcgaatgaattcg

SEQ ID NO: 22329 - DNA, 50 bp, unidentified
  source 1..50: mol_type = unassigned DNA; note = target_2fb0cac
  misc_feature 1..23: note = LF
  misc_feature 24..25: note = Core
  misc_feature 26..50: note = RF
ctaccatctctggaccggctgagtgcaccaacgccgcatggatctgcttc

SEQ ID NO: 22330 - DNA, 50 bp, unidentified
  source 1..50: mol_type = unassigned DNA; note = target_2fb255a
  misc_feature 1..23: note = LF
  misc_feature 24..25: note = Core
  misc_feature 26..50: note = RF
actctgaacgcctgaggcgcccctgccgggacgtgagccgagccattccg

SEQ ID NO: 22331 - DNA, 50 bp, unidentified
  source 1..50: mol_type = unassigned DNA; note = target_2fb7d9a
  misc_feature 1..23: note = LF
  misc_feature 24..25: note = Core
  misc_feature 26..50: note = RF
gctccgccatcactcgtgagattccgccacggttctcaagaccctacagc

SEQ ID NO: 22332 - DNA, 50 bp, unidentified
  source 1..50: mol_type = unassigned DNA; note = target_2fc30d9
  misc_feature 1..23: note = LF
  misc_feature 24..25: note = Core
  misc_feature 26..50: note = RF
ttttaaatccatagcaaaatcacctcttattagctattgtatgaacgctt

SEQ ID NO: 22333 - DNA, 50 bp, unidentified
  source 1..50: mol_type = unassigned DNA; note = target_2fcb763
  misc_feature 1..23: note = LF
  misc_feature 24..25: note = Core
  misc_feature 26..50: note = RF
ggatgacgcccttgcgcgccgacaggagccattcgagggaggttctgcca

SEQ ID NO: 22334 - DNA, 50 bp, unidentified
  source 1..50: mol_type = unassigned DNA; note = target_2fcd1cd
  misc_feature 1..24: note = LF
  misc_feature 25: note = Core
  misc_feature 26..50: note = RF
cccctgctcgctgtgccacctaacgttcgaaatcagcggcgcgctttagc

SEQ ID NO: 22335 - DNA, 50 bp, unidentified
  source 1..50: mol_type = unassigned DNA; note = target_2fdc614
  misc_feature 1..23: note = LF
  misc_feature 24..25: note = Core
  misc_feature 26..50: note = RF
tgacattttcattatttgtgctcctttccattatttattagttaatcttc

SEQ ID NO: 22336 - DNA, 50 bp, unidentified
  source 1..50: mol_type = unassigned DNA; note = target_2fdcd35
  misc_feature 1..23: note = LF
  misc_feature 24..25: note = Core
  misc_feature 26..50: note = RF
atctggcgcgcataaggaccttcctttctgtgtcgtggcggacgggcttt

SEQ ID NO: 22337 - DNA, 50 bp, unidentified
  source 1..50: mol_type = unassigned DNA; note = target_2fdf6df
  misc_feature 1..24: note = LF
  misc_feature 25: note = Core
  misc_feature 26..50: note = RF
catggacctacccatgacccaggcttcccccgtgatgggggccggaggcc

SEQ ID NO: 22338 - DNA, 50 bp, unidentified
  source 1..50: mol_type = unassigned DNA; note = target_2ff2c9a
  misc_feature 1..23: note = LF
  misc_feature 24..25: note = Core
  misc_feature 26..50: note = RF
ctaagacagcgatgtgttagggcttttatatataagcgaactattgggcc

SEQ ID NO: 22339 - DNA, 50 bp, unidentified
  source 1..50: mol_type = unassigned DNA; note = target_2ff39a9
  misc_feature 1..22: note = LF
  misc_feature 23..25: note = Core
  misc_feature 26..50: note = RF
gtattgtttaataatatggccctttaattcagaaagcaccttccttattc

SEQ ID NO: 22340 - DNA, 50 bp, unidentified
  source 1..50: mol_type = unassigned DNA; note = target_2ff6502
  misc_feature 1..23: note = LF
  misc_feature 24..25: note = Core
  misc_feature 26..50: note = RF
acagcccccgcacccgcagtaggctcacagcacctccaccgtgatctgct

SEQ ID NO: 22341 - DNA, 50 bp, unidentified
  source 1..50: mol_type = unassigned DNA; note = target_3007d0c
  misc_feature 1..23: note = LF
  misc_feature 24..25: note = Core
  misc_feature 26..50: note = RF
cctgcgcgtcaatcaagtgtaagcgtccggtcttggccccctaatcgaca

SEQ ID NO: 22342 - DNA, 50 bp, unidentified
  source 1..50: mol_type = unassigned DNA; note = target_3007d92
  misc_feature 1..24: note = LF
  misc_feature 25: note = Core
  misc_feature 26..50: note = RF
ccatggccgccgtatcacggcgactgacttttccccgggcaattcgagaa

SEQ ID NO: 22343 - DNA, 50 bp, unidentified
  source 1..50: mol_type = unassigned DNA; note = target_300f6c1
  misc_feature 1..23: note = LF
  misc_feature 24..25: note = Core
  misc_feature 26..50: note = RF
cacgaaatttcaaccagagcgtttacacaaaatggtttacaccctcttct

SEQ ID NO: 22344 - DNA, 50 bp, unidentified
  source 1..50: mol_type = unassigned DNA; note = target_3014086
  misc_feature 1..24: note = LF
  misc_feature 25: note = Core
  misc_feature 26..50: note = RF
tgcggcaactcaaattggcttaacgtgctttaaattccgttttctgagac

SEQ ID NO: 22345 - DNA, 50 bp, unidentified
  source 1..50: mol_type = unassigned DNA; note = target_301cc76
  misc_feature 1..23: note = LF
  misc_feature 24..25: note = Core
  misc_feature 26..50: note = RF
ctaactttttcataataaaattccttactctataaaaaaatagcgttacc

SEQ ID NO: 22346 - DNA, 50 bp, unidentified
  source 1..50: mol_type = unassigned DNA; note = target_301eead
  misc_feature 1..23: note = LF
  misc_feature 24..25: note = Core
  misc_feature 26..50: note = RF
cgcatcgcccaattccccctcgcctgacacccgcccaggacgtcgctgcc

SEQ ID NO: 22347 - DNA, 50 bp, unidentified
  source 1..50: mol_type = unassigned DNA; note = target_302278a
  misc_feature 1..23: note = LF
  misc_feature 24..25: note = Core
  misc_feature 26..50: note = RF
atggcgagaaggacttgggatagtggatagcggtcattcactcctgccag

SEQ ID NO: 22348 - DNA, 50 bp, unidentified
  source 1..50: mol_type = unassigned DNA; note = target_3028a24
  misc_feature 1..23: note = LF
  misc_feature 24..25: note = Core
  misc_feature 26..50: note = RF
agctatgccttagcgtgctttatttccgttttctgaggtgccccctaata

SEQ ID NO: 22349 - DNA, 50 bp, unidentified
  source 1..50: mol_type = unassigned DNA; note = target_302db97
  misc_feature 1..24: note = LF
  misc_feature 25: note = Core
  misc_feature 26..50: note = RF
cgacctagccattaattatacacgtcttaagttagcattttaataaaagc

SEQ ID NO: 22350 - DNA, 50 bp, unidentified
  source 1..50: mol_type = unassigned DNA; note = target_303224f
  misc_feature 1..22: note = LF
  misc_feature 23..25: note = Core
  misc_feature 26..50: note = RF
aggaacagacacaataccggtccccccccagaaaacgaacacttatcttg

SEQ ID NO: 22351 - DNA, 50 bp, unidentified
  source 1..50: mol_type = unassigned DNA; note = target_3032d8f
  misc_feature 1..23: note = LF
  misc_feature 24..25: note = Core
  misc_feature 26..50: note = RF
gaccgcgtcgttcttgccgcgcttgacataggccttgacgtaagccggcg

SEQ ID NO: 22352 - DNA, 50 bp, unidentified
  source 1..50: mol_type = unassigned DNA; note = target_303407c
  misc_feature 1..24: note = LF
  misc_feature 25: note = Core
  misc_feature 26..50: note = RF
tcttctggacactgagtccgctcctggcgcttagcgggcccactgacgcc

SEQ ID NO: 22353 - DNA, 50 bp, unidentified
  source 1..50: mol_type = unassigned DNA; note = target_3038138
  misc_feature 1..24: note = LF
  misc_feature 25: note = Core
  misc_feature 26..50: note = RF
ttctccctgggctgaggacggtactgacaacttaacttctctaggagttt

SEQ ID NO: 22354 - DNA, 50 bp, unidentified
  source 1..50: mol_type = unassigned DNA; note = target_303a25e
  misc_feature 1..23: note = LF
  misc_feature 24..25: note = Core
  misc_feature 26..50: note = RF
tcatcgcggcctggagaccgctcctacagggcgtgcaactgttttattgt

SEQ ID NO: 22355 - DNA, 50 bp, unidentified
  source 1..50: mol_type = unassigned DNA; note = target_303e140
  misc_feature 1..24: note = LF
  misc_feature 25: note = Core
  misc_feature 26..50: note = RF
tggatcgccacggcctgacggcctcgcgatgacgacatggccgtcattgc

SEQ ID NO: 22356 - DNA, 50 bp, unidentified
  source 1..50: mol_type = unassigned DNA; note = target_3048ca1
  misc_feature 1..23: note = LF
  misc_feature 24..25: note = Core
  misc_feature 26..50: note = RF
cattctttttcatattcccatttgtctcctttgacttttgcaaaacagtt

SEQ ID NO: 22357 - DNA, 50 bp, unidentified
  source 1..50: mol_type = unassigned DNA; note = target_3052963
  misc_feature 1..23: note = LF
  misc_feature 24..25: note = Core
  misc_feature 26..50: note = RF
tttaggtctttcatatattcctccttaaaatccatatgttcttcacatta

SEQ ID NO: 22358 - DNA, 50 bp, unidentified
  source 1..50: mol_type = unassigned DNA; note = target_3057b76
  misc_feature 1..22: note = LF
  misc_feature 23..25: note = Core
  misc_feature 26..50: note = RF
tccaaatcaagccaatttgctctgacaatgccctggcgcgcggacgactg

SEQ ID NO: 22359 - DNA, 50 bp, unidentified
  source 1..50: mol_type = unassigned DNA; note = target_305c4ec
  misc_feature 1..23: note = LF
  misc_feature 24..25: note = Core
  misc_feature 26..50: note = RF
gcgcattggcgtcagatagggacctaaattgacgaaggggtacgaaactg

SEQ ID NO: 22360 - DNA, 50 bp, unidentified
  source 1..50: mol_type = unassigned DNA; note = target_30666f0
  misc_feature 1..24: note = LF
  misc_feature 25: note = Core
  misc_feature 26..50: note = RF
actgttccggttctgggcgcaaagcagccattgggtttgttgagatttga

SEQ ID NO: 22361 - DNA, 50 bp, unidentified
  source 1..50: mol_type = unassigned DNA; note = target_306e839
  misc_feature 1..21: note = LF
  misc_feature 22..25: note = Core
  misc_feature 26..50: note = RF
ttaattataattgccattttatcacctttatacagtatattaagtgaaga

SEQ ID NO: 22362 - DNA, 50 bp, unidentified
  source 1..50: mol_type = unassigned DNA; note = target_3080115
  misc_feature 1..24: note = LF
  misc_feature 25: note = Core
  misc_feature 26..50: note = RF
ttgagatgcggtttgagaatgttttttttgagagtgcgcccgatggtgtt

SEQ ID NO: 22363 - DNA, 50 bp, unidentified
  source 1..50: mol_type = unassigned DNA; note = target_3080f47
  misc_feature 1..22: note = LF
  misc_feature 23..25: note = Core
  misc_feature 26..50: note = RF
agtgttgattgccgctgagaagtgacccggtttggggtgatatttccatt

SEQ ID NO: 22364 - DNA, 50 bp, unidentified
  source 1..50: mol_type = unassigned DNA; note = target_3086267
  misc_feature 1..23: note = LF
  misc_feature 24..25: note = Core
  misc_feature 26..50: note = RF
cgggcataccttcgcgctgcgcgctccggtgttcgcccttggggcggccc

SEQ ID NO: 22365 - DNA, 50 bp, unidentified
  source 1..50: mol_type = unassigned DNA; note = target_3088ac9
  misc_feature 1..23: note = LF
  misc_feature 24..25: note = Core
  misc_feature 26..50: note = RF
ctgacgtcgcgcgaaggacggggctagtcgcgcggcaggaccagcggggt

SEQ ID NO: 22366 - DNA, 50 bp, unidentified
  source 1..50: mol_type = unassigned DNA; note = target_309aba8
  misc_feature 1..23: note = LF
  misc_feature 24..25: note = Core
  misc_feature 26..50: note = RF
gctagagctttggtatgatttacctttcggagtattatttggtttggttg

SEQ ID NO: 22367 - DNA, 50 bp, unidentified
  source 1..50: mol_type = unassigned DNA; note = target_309fc49
  misc_feature 1..23: note = LF
  misc_feature 24..25: note = Core
  misc_feature 26..50: note = RF
atgtgcgcggcgtaaagccccgcctacaaaacaattaaaacgcggtggtt

SEQ ID NO: 22368 - DNA, 50 bp, unidentified
  source 1..50: mol_type = unassigned DNA; note = target_30a6143
  misc_feature 1..22: note = LF
  misc_feature 23..25: note = Core
  misc_feature 26..50: note = RF
cttacttcttaatttcttcattttatttatttcctaattactttcgttaa

SEQ ID NO: 22369 - DNA, 50 bp, unidentified
  source 1..50: mol_type = unassigned DNA; note = target_30b380c
  misc_feature 1..23: note = LF
  misc_feature 24..25: note = Core
  misc_feature 26..50: note = RF
cacaggccggccacggcgcccccccgcacccccgtcctggtcgtcaacgg

SEQ ID NO: 22370 - DNA, 50 bp, unidentified
  source 1..50: mol_type = unassigned DNA; note = target_30bbcb2
  misc_feature 1..23: note = LF
  misc_feature 24..25: note = Core
  misc_feature 26..50: note = RF
cgtggtgtgcccatacgctcctcctatgctcaaactatagggcaggatcg

SEQ ID NO: 22371 - DNA, 50 bp, unidentified
  source 1..50: mol_type = unassigned DNA; note = target_30c3db3
  misc_feature 1..23: note = LF
  misc_feature 24..25: note = Core
  misc_feature 26..50: note = RF
cgatcgcccgaagtgttccctcgctggcgcgtcgggctaaacgaccatgg

SEQ ID NO: 22372 - DNA, 50 bp, unidentified
  source 1..50: mol_type = unassigned DNA; note = target_30c8c56
  misc_feature 1..22: note = LF
  misc_feature 23..25: note = Core
  misc_feature 26..50: note = RF
ctggccggcgatgtcaagggaaaaggcgcaagcggctccaaccgcgaggc

SEQ ID NO: 22373 - DNA, 50 bp, unidentified
  source 1..50: mol_type = unassigned DNA; note = target_30d22a8
  misc_feature 1..22: note = LF
  misc_feature 23..25: note = Core
  misc_feature 26..50: note = RF
ctgcgcctaaaggaagttactgtgacagcgccccgttcgcgttcatctga

SEQ ID NO: 22374 - DNA, 50 bp, unidentified
  source 1..50: mol_type = unassigned DNA; note = target_30d3f72
  misc_feature 1..23: note = LF
  misc_feature 24..25: note = Core
  misc_feature 26..50: note = RF
gcctcgctcctccgagctcaccccttgatcgacactctgtcgtggctttt

SEQ ID NO: 22375 - DNA, 50 bp, unidentified
  source 1..50: mol_type = unassigned DNA; note = target_30e001d
  misc_feature 1..24: note = LF
  misc_feature 25: note = Core
  misc_feature 26..50: note = RF
aggccggcggctaccggccagaagcagaccctcgcgagaagagcatgaag

SEQ ID NO: 22376 - DNA, 50 bp, unidentified
  source 1..50: mol_type = unassigned DNA; note = target_30e335c
  misc_feature 1..23: note = LF
  misc_feature 24..25: note = Core
  misc_feature 26..50: note = RF
cttctctagcatccccatgggtcccggctctgcggagcagcgcaagatgc

SEQ ID NO: 22377 - DNA, 50 bp, unidentified
  source 1..50: mol_type = unassigned DNA; note = target_30e583e
  misc_feature 1..23: note = LF
  misc_feature 24..25: note = Core
  misc_feature 26..50: note = RF
ttgcaaatcaatgcatcctgaccctaatacgccttttgcggaagcagtca

SEQ ID NO: 22378 - DNA, 50 bp, unidentified
  source 1..50: mol_type = unassigned DNA; note = target_30f233b
  misc_feature 1..23: note = LF
  misc_feature 24..25: note = Core
  misc_feature 26..50: note = RF
tgcttcgtcataggactactcctagtgcttgcactaggacttgcagtctt

SEQ ID NO: 22379 - DNA, 50 bp, unidentified
  source 1..50: mol_type = unassigned DNA; note = target_30f4027
  misc_feature 1..22: note = LF
  misc_feature 23..25: note = Core
  misc_feature 26..50: note = RF
cccttgttcaactaaactgccctttagctcaataagaaaaacagcgatat

SEQ ID NO: 22380 - DNA, 50 bp, unidentified
  source 1..50: mol_type = unassigned DNA; note = target_30f41ff
  misc_feature 1..23: note = LF
  misc_feature 24..25: note = Core
  misc_feature 26..50: note = RF
acccggcgacccccgcgcttcccccccccgcaatgaacgggcctttcctt

SEQ ID NO: 22381 - DNA, 50 bp, unidentified
  source 1..50: mol_type = unassigned DNA; note = target_30f7e88
  misc_feature 1..21: note = LF
  misc_feature 22..25: note = Core
  misc_feature 26..50: note = RF
agcggacatgcggtctgttttatgagtacgcgggctaaggcgtttgcggc

SEQ ID NO: 22382 - DNA, 50 bp, unidentified
  source 1..50: mol_type = unassigned DNA; note = target_30f932d
  misc_feature 1..21: note = LF
  misc_feature 22..25: note = Core
  misc_feature 26..50: note = RF
gtcgggtcaacatcaccggtcctccttctggtgtgcggcggacgcgccga

SEQ ID NO: 22383 - DNA, 50 bp, unidentified
  source 1..50: mol_type = unassigned DNA; note = target_30fe296
  misc_feature 1..23: note = LF
  misc_feature 24..25: note = Core
  misc_feature 26..50: note = RF
ggtctccagcaattgagccactttttttgaagctcgatgacggcctcggc

SEQ ID NO: 22384 - DNA, 50 bp, unidentified
  source 1..50: mol_type = unassigned DNA; note = target_3116af3
  misc_feature 1..23: note = LF
  misc_feature 24..25: note = Core
  misc_feature 26..50: note = RF
gtccggccccaggacgtcaggccgcgtcgtcccctcactcgtcacggcgg

SEQ ID NO: 22385 - DNA, 50 bp, unidentified
  source 1..50: mol_type = unassigned DNA; note = target_3119f98
  misc_feature 1..24: note = LF
  misc_feature 25: note = Core
  misc_feature 26..50: note = RF
cggggcttggcgcctggcccatccatggatcccagctcgcgttcgctgac

SEQ ID NO: 22386 - DNA, 50 bp, unidentified
  source 1..50: mol_type = unassigned DNA; note = target_311b2e6
  misc_feature 1..23: note = LF
  misc_feature 24..25: note = Core
  misc_feature 26..50: note = RF
ccgacggagtatgtatatacggtgacacaatacatatttatgaccaccga

SEQ ID NO: 22387 - DNA, 50 bp, unidentified
  source 1..50: mol_type = unassigned DNA; note = target_312155d
  misc_feature 1..24: note = LF
  misc_feature 25: note = Core
  misc_feature 26..50: note = RF
tgcttcgcgaagaacgccgtggctttttttaagatgtctcgctcttcttg

SEQ ID NO: 22388 - DNA, 50 bp, unidentified
  source 1..50: mol_type = unassigned DNA; note = target_3122449
  misc_feature 1..22: note = LF
  misc_feature 23..25: note = Core
  misc_feature 26..50: note = RF
taatatttcaactaacgcccccgttttgtttaagtacaatgtttcacaaa

SEQ ID NO: 22389 - DNA, 50 bp, unidentified
  source 1..50: mol_type = unassigned DNA; note = target_3123ee5
  misc_feature 1..21: note = LF
  misc_feature 22..25: note = Core
  misc_feature 26..50: note = RF
acggcggattatcccttatggctcataggtgctggccagagcggctcatg

SEQ ID NO: 22390 - DNA, 50 bp, unidentified
  source 1..50: mol_type = unassigned DNA; note = target_312ca9a
  misc_feature 1..23: note = LF
  misc_feature 24..25: note = Core
  misc_feature 26..50: note = RF
gtatgatattcatattgtttttcctttcattaacagtattcctgatttgc

SEQ ID NO: 22391 - DNA, 50 bp, unidentified
  source 1..50: mol_type = unassigned DNA; note = target_3138989
  misc_feature 1..23: note = LF
  misc_feature 24..25: note = Core
  misc_feature 26..50: note = RF
ccgcatggatgcggctgccaagcctacacggacgtacttgcggcgtcccc

SEQ ID NO: 22392 - DNA, 50 bp, unidentified
  source 1..50: mol_type = unassigned DNA; note = target_313b8d2
  misc_feature 1..23: note = LF
  misc_feature 24..25: note = Core
  misc_feature 26..50: note = RF
tctatcaacgattccattttatcctctcatgtaaaaacaatttactatta

SEQ ID NO: 22393 - DNA, 50 bp, unidentified
  source 1..50: mol_type = unassigned DNA; note = target_3149376
  misc_feature 1..22: note = LF
  misc_feature 23..25: note = Core
  misc_feature 26..50: note = RF
acattaagtacgttaactaacctgaactcggggtaagagactaagatatg

SEQ ID NO: 22394 - DNA, 50 bp, unidentified
  source 1..50: mol_type = unassigned DNA; note = target_314dbba
  misc_feature 1..23: note = LF
  misc_feature 24..25: note = Core
  misc_feature 26..50: note = RF
cccgactcgaaagagccggggcatttttatgggcatcaggcagtgtcttt

SEQ ID NO: 22395 - DNA, 50 bp, unidentified
  source 1..50: mol_type = unassigned DNA; note = target_31531a6
  misc_feature 1..23: note = LF
  misc_feature 24..25: note = Core
  misc_feature 26..50: note = RF
ctaaacaaagtcataatctccttgtctttcagtttatttttaagcaacat

SEQ ID NO: 22396 - DNA, 50 bp, unidentified
  source 1..50: mol_type = unassigned DNA; note = target_3156789
  misc_feature 1..21: note = LF
  misc_feature 22..25: note = Core
  misc_feature 26..50: note = RF
gctccggtgatcaggtacgggctcatgggcggtcttccacggcccatacc

SEQ ID NO: 22397 - DNA, 50 bp, unidentified
  source 1..50: mol_type = unassigned DNA; note = target_315cf86
  misc_feature 1..24: note = LF
  misc_feature 25: note = Core
  misc_feature 26..50: note = RF
gctaatgatgcaagagagcgttgttgatcaaattaaacaataggtagatc

SEQ ID NO: 22398 - DNA, 50 bp, unidentified
  source 1..50: mol_type = unassigned DNA; note = target_315e817
  misc_feature 1..24: note = LF
  misc_feature 25: note = Core
  misc_feature 26..50: note = RF
gaaacgcgcctccgatagatcactagcgtttaccgggacttggcggacat

SEQ ID NO: 22399 - DNA, 50 bp, unidentified
  source 1..50: mol_type = unassigned DNA; note = target_316608f
  misc_feature 1..22: note = LF
  misc_feature 23..25: note = Core
  misc_feature 26..50: note = RF
tttcctccggtactccgggaaatttcagttttattgaataaattactgca

SEQ ID NO: 22400 - DNA, 50 bp, unidentified
  source 1..50: mol_type = unassigned DNA; note = target_3167d42
  misc_feature 1..22: note = LF
  misc_feature 23..25: note = Core
  misc_feature 26..50: note = RF
accgatatcccgacaaacgggaatttgtttatagtaccatcaacaatgtt

SEQ ID NO: 22401 - DNA, 50 bp, unidentified
  source 1..50: mol_type = unassigned DNA; note = target_31691d7
  misc_feature 1..22: note = LF
  misc_feature 23..25: note = Core
  misc_feature 26..50: note = RF
tatatatttttgacatgttaactctccttcttaattatcttaacctaaat

SEQ ID NO: 22402 - DNA, 50 bp, unidentified
  source 1..50: mol_type = unassigned DNA; note = target_316af09
  misc_feature 1..22: note = LF
  misc_feature 23..25: note = Core
  misc_feature 26..50: note = RF
aaatgtcgtgttctagccatttagaaatgtcgtgtttctaaacgctggca

SEQ ID NO: 22403 - DNA, 50 bp, unidentified
  source 1..50: mol_type = unassigned DNA; note = target_316e572
  misc_feature 1..22: note = LF
  misc_feature 23..25: note = Core
  misc_feature 26..50: note = RF
caaagcgtgaaaagcgccgaaaaaggggggcctgcatcgatgcgccgggt

SEQ ID NO: 22404 - DNA, 50 bp, unidentified
  source 1..50: mol_type = unassigned DNA; note = target_3178872
  misc_feature 1..24: note = LF
  misc_feature 25: note = Core
  misc_feature 26..50: note = RF
tcgcctggctgagtcccccccctttttccacccgaagcgcagcggtgagc

SEQ ID NO: 22405 - DNA, 50 bp, unidentified
  source 1..50: mol_type = unassigned DNA; note = target_317cf93
  misc_feature 1..24: note = LF
  misc_feature 25: note = Core
  misc_feature 26..50: note = RF
ccaggggctgctttcggccagaagcggacattgagggggcagtgcatcaa

SEQ ID NO: 22406 - DNA, 50 bp, unidentified
  source 1..50: mol_type = unassigned DNA; note = target_3180360
  misc_feature 1..23: note = LF
  misc_feature 24..25: note = Core
  misc_feature 26..50: note = RF
ccaccgtccttcgcgtaccgctcaggatgacgacgaaaaacaggcaacag

SEQ ID NO: 22407 - DNA, 50 bp, unidentified
  source 1..50: mol_type = unassigned DNA; note = target_3181080
  misc_feature 1..24: note = LF
  misc_feature 25: note = Core
  misc_feature 26..50: note = RF
ctatgagcgtctaccgctcatcggcatgagaggaagagtgcttccgcgtt

SEQ ID NO: 22408 - DNA, 50 bp, unidentified
  source 1..50: mol_type = unassigned DNA; note = target_31929c8
  misc_feature 1..23: note = LF
  misc_feature 24..25: note = Core
  misc_feature 26..50: note = RF
aattacaattgacatatgttttcctccagtcatttggttatattatagca

SEQ ID NO: 22409 - DNA, 50 bp, unidentified
  source 1..50: mol_type = unassigned DNA; note = target_3193f1d
  misc_feature 1..24: note = LF
  misc_feature 25: note = Core
  misc_feature 26..50: note = RF
atgggcctcatgtgtgcggaaccccacccccttttttcaaccacggtcga

SEQ ID NO: 22410 - DNA, 50 bp, unidentified
  source 1..50: mol_type = unassigned DNA; note = target_31960a4
  misc_feature 1..21: note = LF
  misc_feature 22..25: note = Core
  misc_feature 26..50: note = RF
tccggaaggttattacgatcgctcacgggtggacccctgcggggctggcg

SEQ ID NO: 22411 - DNA, 50 bp, unidentified
  source 1..50: mol_type = unassigned DNA; note = target_319db4c
  misc_feature 1..24: note = LF
  misc_feature 25: note = Core
  misc_feature 26..50: note = RF
attcattaggccgcacagattgcccgaacggagcgcacaccgcctcgccg

SEQ ID NO: 22412 - DNA, 50 bp, unidentified
  source 1..50: mol_type = unassigned DNA; note = target_31b0891
  misc_feature 1..24: note = LF
  misc_feature 25: note = Core
  misc_feature 26..50: note = RF
tgtgttgaccgcgcatccgtagcccgggcttcgcccgggatcaccttcaa

SEQ ID NO: 22413 - DNA, 50 bp, unidentified
  source 1..50: mol_type = unassigned DNA; note = target_31b6886
  misc_feature 1..21: note = LF
  misc_feature 22..25: note = Core
  misc_feature 26..50: note = RF
ccgccggccggcggtttctcgctcataagccgacggtaccggcggtacgt

SEQ ID NO: 22414 - DNA, 50 bp, unidentified
  source 1..50: mol_type = unassigned DNA; note = target_31b762f
  misc_feature 1..22: note = LF
  misc_feature 23..25: note = Core
  misc_feature 26..50: note = RF
gtgaactctccggcactgacaatctccgagtgactcattcatcagtactc

SEQ ID NO: 22415 - DNA, 50 bp, unidentified
  source 1..50: mol_type = unassigned DNA; note = target_31ba81d
  misc_feature 1..24: note = LF
  misc_feature 25: note = Core
  misc_feature 26..50: note = RF
gtgataggaatcaccgggaggttacaccccccgccctttcaggtcaatgc

SEQ ID NO: 22416 - DNA, 50 bp, unidentified
  source 1..50: mol_type = unassigned DNA; note = target_31c15e8
  misc_feature 1..22: note = LF
  misc_feature 23..25: note = Core
  misc_feature 26..50: note = RF
aacacgacactcattttgattcagacactaagatcgaatcgggcattcag

SEQ ID NO: 22417 - DNA, 50 bp, unidentified
  source 1..50: mol_type = unassigned DNA; note = target_31c585d
  misc_feature 1..23: note = LF
  misc_feature 24..25: note = Core
  misc_feature 26..50: note = RF
ataaatgttttttcatttgtaacctccagtctaatttcattactaattaa

SEQ ID NO: 22418 - DNA, 50 bp, unidentified
  source 1..50: mol_type = unassigned DNA; note = target_31c9aad
  misc_feature 1..23: note = LF
  misc_feature 24..25: note = Core
  misc_feature 26..50: note = RF
tataacctccaaaacatttcctcctttctttctccggctgtaactatatg

SEQ ID NO: 22419 - DNA, 50 bp, unidentified
  source 1..50: mol_type = unassigned DNA; note = target_31c9d47
  misc_feature 1..23: note = LF
  misc_feature 24..25: note = Core
  misc_feature 26..50: note = RF
tccgacatcagtagcgcagtagcttttttagaatgtcgcgttcctcggtc

SEQ ID NO: 22420 - DNA, 50 bp, unidentified
  source 1..50: mol_type = unassigned DNA; note = target_31e4112
  misc_feature 1..24: note = LF
  misc_feature 25: note = Core
  misc_feature 26..50: note = RF
gttgaacgaaagtttaacggggccttttcctttcctgccttcagccagtg

SEQ ID NO: 22421 - DNA, 50 bp, unidentified
  source 1..50: mol_type = unassigned DNA; note = target_31eda95
  misc_feature 1..23: note = LF
  misc_feature 24..25: note = Core
  misc_feature 26..50: note = RF
gaagcccgggtggtaatcgcatcctataatcagcatgttcggctcctttc

SEQ ID NO: 22422 - DNA, 50 bp, unidentified
  source 1..50: mol_type = unassigned DNA; note = target_31f7e62
  misc_feature 1..23: note = LF
  misc_feature 24..25: note = Core
  misc_feature 26..50: note = RF
cgtgttgtcccttagccttgtgctaattttgtgctaacgcggtcctgccg

SEQ ID NO: 22423 - DNA, 50 bp, unidentified
  source 1..50: mol_type = unassigned DNA; note = target_31fa650
  misc_feature 1..23: note = LF
  misc_feature 24..25: note = Core
  misc_feature 26..50: note = RF
agagcaagccattgtcgcgccattgggccgagagacattggcgaacgcgc

SEQ ID NO: 22424 - DNA, 50 bp, unidentified
  source 1..50: mol_type = unassigned DNA; note = target_31ff4c4
  misc_feature 1..24: note = LF
  misc_feature 25: note = Core
  misc_feature 26..50: note = RF
agggtcaatgagcgctatgaggatttatcgccaattgaactgacagaccg

SEQ ID NO: 22425 - DNA, 50 bp, unidentified
  source 1..50: mol_type = unassigned DNA; note = target_3203e3d
  misc_feature 1..23: note = LF
  misc_feature 24..25: note = Core
  misc_feature 26..50: note = RF
ctgtttgggtgggcgagatgctttggtgcatggaggccgaagagcacgga

SEQ ID NO: 22426 - DNA, 50 bp, unidentified
  source 1..50: mol_type = unassigned DNA; note = target_320e7c2
  misc_feature 1..24: note = LF
  misc_feature 25: note = Core
  misc_feature 26..50: note = RF
ctttgcggaggaaccgccagattttgcacaaaaaggacgactaccccgag

SEQ ID NO: 22427 - DNA, 50 bp, unidentified
  source 1..50: mol_type = unassigned DNA; note = target_3210c81
  misc_feature 1..23: note = LF
  misc_feature 24..25: note = Core
  misc_feature 26..50: note = RF
gccgagatcgacgaccagaccagctagccaactcgcccatcgggccgcaa

SEQ ID NO: 22428 - DNA, 50 bp, unidentified
  source 1..50: mol_type = unassigned DNA; note = target_3214d89
  misc_feature 1..24: note = LF
  misc_feature 25: note = Core
  misc_feature 26..50: note = RF
gttctaccggctctacccacttaacgggggatggaccggttttcactaaa

SEQ ID NO: 22429 - DNA, 50 bp, unidentified
  source 1..50: mol_type = unassigned DNA; note = target_3214ef5
  misc_feature 1..23: note = LF
  misc_feature 24..25: note = Core
  misc_feature 26..50: note = RF
gctgcgcccgcgttccgtcggggctagcggccacccggccgccaccgccg

SEQ ID NO: 22430 - DNA, 50 bp, unidentified
  source 1..50: mol_type = unassigned DNA; note = target_3224598
  misc_feature 1..23: note = LF
  misc_feature 24..25: note = Core
  misc_feature 26..50: note = RF
gcttcactgcgctcagcaccaacctaccggttttcctagaaaatttcgta

SEQ ID NO: 22431 - DNA, 50 bp, unidentified
  source 1..50: mol_type = unassigned DNA; note = target_322d01a
  misc_feature 1..21: note = LF
  misc_feature 22..25: note = Core
  misc_feature 26..50: note = RF
ccgaggcgggtgttgtcgtcggtcatgcgttcaccgtagagtgccgctcg

SEQ ID NO: 22432 - DNA, 50 bp, unidentified
  source 1..50: mol_type = unassigned DNA; note = target_322dea4
  misc_feature 1..23: note = LF
  misc_feature 24..25: note = Core
  misc_feature 26..50: note = RF
gcaactcattcttcataataaccctcctaaaaatcccgcaattgactgcg

SEQ ID NO: 22433 - DNA, 50 bp, unidentified
  source 1..50: mol_type = unassigned DNA; note = target_322f31b
  misc_feature 1..21: note = LF
  misc_feature 22..25: note = Core
  misc_feature 26..50: note = RF
gattgcttcgctgcgctcgcaatgacggctaaacacacgttcgcggcctc

SEQ ID NO: 22434 - DNA, 50 bp, unidentified
  source 1..50: mol_type = unassigned DNA; note = target_32321b3
  misc_feature 1..23: note = LF
  misc_feature 24..25: note = Core
  misc_feature 26..50: note = RF
ctgccttggaactcgatgaatgaacggcggaggttgacacgcggggaacg

SEQ ID NO: 22435 - DNA, 50 bp, unidentified
  source 1..50: mol_type = unassigned DNA; note = target_3238276
  misc_feature 1..24: note = LF
  misc_feature 25: note = Core
  misc_feature 26..50: note = RF
tgtaggcgctgacatggctacaacttagtttaaaggctgtgtttataaaa

SEQ ID NO: 22436 - DNA, 50 bp, unidentified
  source 1..50: mol_type = unassigned DNA; note = target_323c147
  misc_feature 1..23: note = LF
  misc_feature 24..25: note = Core
  misc_feature 26..50: note = RF
gaatatgcctccacttccgcttttgacccgatgtatggtccggccgtgcg

SEQ ID NO: 22437 - DNA, 50 bp, unidentified
  source 1..50: mol_type = unassigned DNA; note = target_3247322
  misc_feature 1..23: note = LF
  misc_feature 24..25: note = Core
  misc_feature 26..50: note = RF
ttagcgaattattcattcaaagcgaatggcaggttttggcgcaataaacc

SEQ ID NO: 22438 - DNA, 50 bp, unidentified
  source 1..50: mol_type = unassigned DNA; note = target_32510a7
  misc_feature 1..23: note = LF
  misc_feature 24..25: note = Core
  misc_feature 26..50: note = RF
gtcagccaccgaacgtctgaatttggggcgcaaagccgccgcgggactat

SEQ ID NO: 22439 - DNA, 50 bp, unidentified
  source 1..50: mol_type = unassigned DNA; note = target_3258d19
  misc_feature 1..23: note = LF
  misc_feature 24..25: note = Core
  misc_feature 26..50: note = RF
tccctagcacgtccggccgaaattggagcgaggacgagcgcgttgccgcg

SEQ ID NO: 22440 - DNA, 50 bp, unidentified
  source 1..50: mol_type = unassigned DNA; note = target_326a214
  misc_feature 1..24: note = LF
  misc_feature 25: note = Core
  misc_feature 26..50: note = RF
cgtcccctcggcccactgagcccccccacgccaaagtttgacttcaccca

SEQ ID NO: 22441 - DNA, 50 bp, unidentified
  source 1..50: mol_type = unassigned DNA; note = target_326e288
  misc_feature 1..22: note = LF
  misc_feature 23..25: note = Core
  misc_feature 26..50: note = RF
gctgtctcggagtcgtcaaagcctagaaccgcaggggatcgacctcgata

SEQ ID NO: 22442 - DNA, 50 bp, unidentified
  source 1..50: mol_type = unassigned DNA; note = target_32707fe
  misc_feature 1..23: note = LF
  misc_feature 24..25: note = Core
  misc_feature 26..50: note = RF
gggtcccggggccgtccacagcgctcacacggcctccgctgcgaacgaga

SEQ ID NO: 22443 - DNA, 50 bp, unidentified
  source 1..50: mol_type = unassigned DNA; note = target_328700e
  misc_feature 1..23: note = LF
  misc_feature 24..25: note = Core
  misc_feature 26..50: note = RF
attttattagccataattttctcctttctgcgtttgccgacctcagaaaa

SEQ ID NO: 22444 - DNA, 50 bp, unidentified
  source 1..50: mol_type = unassigned DNA; note = target_3288aff
  misc_feature 1..23: note = LF
  misc_feature 24..25: note = Core
  misc_feature 26..50: note = RF
gaacacagataggttatcgctcgcttttgcaggggaaaggtcatggcgta

SEQ ID NO: 22445 - DNA, 50 bp, unidentified
  source 1..50: mol_type = unassigned DNA; note = target_328b73d
  misc_feature 1..24: note = LF
  misc_feature 25: note = Core
  misc_feature 26..50: note = RF
ccgtcgcgcggcgggcgtcaccacttttttcccagaagatccttcagcgc

SEQ ID NO: 22446 - DNA, 50 bp, unidentified
  source 1..50: mol_type = unassigned DNA; note = target_3295af3
  misc_feature 1..24: note = LF
  misc_feature 25: note = Core
  misc_feature 26..50: note = RF
ggagctgacgctggcgaacgatttttttggaaggcgcgctcgacaaggtc

SEQ ID NO: 22447 - DNA, 50 bp, unidentified
  source 1..50: mol_type = unassigned DNA; note = target_329a7cb
  misc_feature 1..23: note = LF
  misc_feature 24..25: note = Core
  misc_feature 26..50: note = RF
gaaaaacccggcttcggccgggtttttgtgtgcagattcaataattatgt

SEQ ID NO: 22448 - DNA, 50 bp, unidentified
  source 1..50: mol_type = unassigned DNA; note = target_329cc52
  misc_feature 1..21: note = LF
  misc_feature 22..25: note = Core
  misc_feature 26..50: note = RF
gctgtcggtcgtcatgaggtcctcccgtcgtccggcgccgcagcgcccgc

SEQ ID NO: 22449 - DNA, 50 bp, unidentified
  source 1..50: mol_type = unassigned DNA; note = target_329d38f
  misc_feature 1..23: note = LF
  misc_feature 24..25: note = Core
  misc_feature 26..50: note = RF
ctccaaatccgaattacgaaatactaaacaaactccaaaacctgaaataa

SEQ ID NO: 22450 - DNA, 50 bp, unidentified
  source 1..50: mol_type = unassigned DNA; note = target_32a6a15
  misc_feature 1..24: note = LF
  misc_feature 25: note = Core
  misc_feature 26..50: note = RF
gcggtaatatgacggcttgtgacccaaagcagcctgtcgtgttcgatgcg

SEQ ID NO: 22451 - DNA, 50 bp, unidentified
  source 1..50: mol_type = unassigned DNA; note = target_32a7a43
  misc_feature 1..23: note = LF
  misc_feature 24..25: note = Core
  misc_feature 26..50: note = RF
ctgatgcgctacgcttatcaggcctacgcagtacctgtaatatattgaat

SEQ ID NO: 22452 - DNA, 50 bp, unidentified
  source 1..50: mol_type = unassigned DNA; note = target_32a9a16
  misc_feature 1..24: note = LF
  misc_feature 25: note = Core
  misc_feature 26..50: note = RF
cgagtggggcagctaaaatggccccgtcccaaattagccacccccgctga

SEQ ID NO: 22453 - DNA, 50 bp, unidentified
  source 1..50: mol_type = unassigned DNA; note = target_32ad0b5
  misc_feature 1..23: note = LF
  misc_feature 24..25: note = Core
  misc_feature 26..50: note = RF
ggtttcgttttgctcagcccgacctacggccctatctgttcgccctcccc

SEQ ID NO: 22454 - DNA, 50 bp, unidentified
  source 1..50: mol_type = unassigned DNA; note = target_32affc0
  misc_feature 1..24: note = LF
  misc_feature 25: note = Core
  misc_feature 26..50: note = RF
accagctcgcgtttgcctcacagttttcggcggatgacgtcctgcagcat

SEQ ID NO: 22455 - DNA, 50 bp, unidentified
  source 1..50: mol_type = unassigned DNA; note = target_32b3f09
  misc_feature 1..24: note = LF
  misc_feature 25: note = Core
  misc_feature 26..50: note = RF
cttatataaatagaattcaattttcaatcccaaaatcattttccaaaatg

SEQ ID NO: 22456 - DNA, 50 bp, unidentified
  source 1..50: mol_type = unassigned DNA; note = target_32be715
  misc_feature 1..24: note = LF
  misc_feature 25: note = Core
  misc_feature 26..50: note = RF
taagaccaccgaccacatgtccgctcatggcacatcgcgtcacttagttc

SEQ ID NO: 22457 - DNA, 50 bp, unidentified
  source 1..50: mol_type = unassigned DNA; note = target_32d57f3
  misc_feature 1..24: note = LF
  misc_feature 25: note = Core
  misc_feature 26..50: note = RF
ggcggcgctgcgcttggccgggcttactgaatggtagcccgggcgaggcg

SEQ ID NO: 22458 - DNA, 50 bp, unidentified
  source 1..50: mol_type = unassigned DNA; note = target_32d74ec
  misc_feature 1..23: note = LF
  misc_feature 24..25: note = Core
  misc_feature 26..50: note = RF
taattccatcattatattttctccttttcttgattaattttctgcaacaa

SEQ ID NO: 22459 - DNA, 50 bp, unidentified
  source 1..50: mol_type = unassigned DNA; note = target_32d80e8
  misc_feature 1..23: note = LF
  misc_feature 24..25: note = Core
  misc_feature 26..50: note = RF
cctcaacaagatcggccggtggttgggtcccggccggcgcccatatgcgc

SEQ ID NO: 22460 - DNA, 50 bp, unidentified
  source 1..50: mol_type = unassigned DNA; note = target_32dc5cd
  misc_feature 1..23: note = LF
  misc_feature 24..25: note = Core
  misc_feature 26..50: note = RF
tcctgattcaataacttatcctcctataataagttaacgtgagcctgcct

SEQ ID NO: 22461 - DNA, 50 bp, unidentified
  source 1..50: mol_type = unassigned DNA; note = target_32dd57d
  misc_feature 1..21: note = LF
  misc_feature 22..25: note = Core
  misc_feature 26..50: note = RF
cgcgcccatgatcaggtcgccttcccagtgcccgggcaccgcccggtccg

SEQ ID NO: 22462 - DNA, 50 bp, unidentified
  source 1..50: mol_type = unassigned DNA; note = target_32debff
  misc_feature 1..23: note = LF
  misc_feature 24..25: note = Core
  misc_feature 26..50: note = RF
ccgaaagtagcccgaccagtcgcctaacgccattagagggtttcgacgca

SEQ ID NO: 22463 - DNA, 50 bp, unidentified
  source 1..50: mol_type = unassigned DNA; note = target_32e0920
  misc_feature 1..23: note = LF
  misc_feature 24..25: note = Core
  misc_feature 26..50: note = RF
cgctcatttggctgatggtttccagcgtcatgtatctggcgcgctgcacg

SEQ ID NO: 22464 - DNA, 50 bp, unidentified
  source 1..50: mol_type = unassigned DNA; note = target_32e207f
  misc_feature 1..24: note = LF
  misc_feature 25: note = Core
  misc_feature 26..50: note = RF
gtgctcagaacatcagttgatcagagggcttccttaacgactgaatccag

SEQ ID NO: 22465 - DNA, 50 bp, unidentified
  source 1..50: mol_type = unassigned DNA; note = target_32f11ad
  misc_feature 1..23: note = LF
  misc_feature 24..25: note = Core
  misc_feature 26..50: note = RF
aggcgcaaacagcgcgcctttggagctatgtgcgcgatgaacgcccatgg

SEQ ID NO: 22466 - DNA, 50 bp, unidentified
  source 1..50: mol_type = unassigned DNA; note = target_32f5e42
  misc_feature 1..23: note = LF
  misc_feature 24..25: note = Core
  misc_feature 26..50: note = RF
cattgtcataagtgaaattcctcctttcgtgcatattgtacatcacaatt

SEQ ID NO: 22467 - DNA, 50 bp, unidentified
  source 1..50: mol_type = unassigned DNA; note = target_32f7be5
  misc_feature 1..23: note = LF
  misc_feature 24..25: note = Core
  misc_feature 26..50: note = RF
agatcagccgcgtaggcgcgaggctacggttctagtggcggccgtcttgg

SEQ ID NO: 22468 - DNA, 50 bp, unidentified
  source 1..50: mol_type = unassigned DNA; note = target_3300fb9
  misc_feature 1..24: note = LF
  misc_feature 25: note = Core
  misc_feature 26..50: note = RF
tttgtctccccagatcgcctggactttttttctcagaatcagcagcgccg

SEQ ID NO: 22469 - DNA, 50 bp, unidentified
  source 1..50: mol_type = unassigned DNA; note = target_330aeca
  misc_feature 1..22: note = LF
  misc_feature 23..25: note = Core
  misc_feature 26..50: note = RF
ggcgaatctccttcgccagccttgaatcacgtcgcgcagaaaaagggaat

SEQ ID NO: 22470 - DNA, 50 bp, unidentified
  source 1..50: mol_type = unassigned DNA; note = target_330fa83
  misc_feature 1..23: note = LF
  misc_feature 24..25: note = Core
  misc_feature 26..50: note = RF
gggttacgcttcgctaacccaccctacaaaaggctcggtgtagacgctgg

SEQ ID NO: 22471 - DNA, 50 bp, unidentified
  source 1..50: mol_type = unassigned DNA; note = target_331332c
  misc_feature 1..23: note = LF
  misc_feature 24..25: note = Core
  misc_feature 26..50: note = RF
aatattttcatatttttttactccttttcaaatgtctttttgtaaatctt

SEQ ID NO: 22472 - DNA, 50 bp, unidentified
  source 1..50: mol_type = unassigned DNA; note = target_33155ea
  misc_feature 1..23: note = LF
  misc_feature 24..25: note = Core
  misc_feature 26..50: note = RF
gtcacgtcggctttgccaccgtgagcggactcgtcagcggctcttttgaa

SEQ ID NO: 22473 - DNA, 50 bp, unidentified
  source 1..50: mol_type = unassigned DNA; note = target_332383d
  misc_feature 1..24: note = LF
  misc_feature 25: note = Core
  misc_feature 26..50: note = RF
aagtggggcatgcccccgaagtgccgttcggggtcacccagatcgggcac

SEQ ID NO: 22474 - DNA, 50 bp, unidentified
  source 1..50: mol_type = unassigned DNA; note = target_332478f
  misc_feature 1..23: note = LF
  misc_feature 24..25: note = Core
  misc_feature 26..50: note = RF
ttcatccactaaactgccccgatagtttaagtacaattattcacaatctt

SEQ ID NO: 22475 - DNA, 50 bp, unidentified
  source 1..50: mol_type = unassigned DNA; note = target_332f21a
  misc_feature 1..24: note = LF
  misc_feature 25: note = Core
  misc_feature 26..50: note = RF
caagagttattatcctattcctcctttataaaaacgaaggtcaatttgaa

SEQ ID NO: 22476 - DNA, 50 bp, unidentified
  source 1..50: mol_type = unassigned DNA; note = target_3341e06
  misc_feature 1..23: note = LF
  misc_feature 24..25: note = Core
  misc_feature 26..50: note = RF
gcggattgggccacggtcgtctcctgtgttctatgcgccggccggcgctc

SEQ ID NO: 22477 - DNA, 50 bp, unidentified
  source 1..50: mol_type = unassigned DNA; note = target_3349505
  misc_feature 1..23: note = LF
  misc_feature 24..25: note = Core
  misc_feature 26..50: note = RF
cttcggacagtgccggttgcggcaggagttgtaggcgatccgccattggc

SEQ ID NO: 22478 - DNA, 50 bp, unidentified
  source 1..50: mol_type = unassigned DNA; note = target_33506a9
  misc_feature 1..23: note = LF
  misc_feature 24..25: note = Core
  misc_feature 26..50: note = RF
cacgttcatggtcttgtggacccagcaacgttgctcccgcgtcgtggcga

SEQ ID NO: 22479 - DNA, 50 bp, unidentified
  source 1..50: mol_type = unassigned DNA; note = target_3357e51
  misc_feature 1..23: note = LF
  misc_feature 24..25: note = Core
  misc_feature 26..50: note = RF
tcggtcgcaaaccaggccgcggctttgcaaggatctcccgctcttccttg

SEQ ID NO: 22480 - DNA, 50 bp, unidentified
  source 1..50: mol_type = unassigned DNA; note = target_3358074
  misc_feature 1..24: note = LF
  misc_feature 25: note = Core
  misc_feature 26..50: note = RF
ctacaagacgttcactcctcgccccaccccccaacaaaaggggggcagcg

SEQ ID NO: 22481 - DNA, 50 bp, unidentified
  source 1..50: mol_type = unassigned DNA; note = target_3359654
  misc_feature 1..21: note = LF
  misc_feature 22..25: note = Core
  misc_feature 26..50: note = RF
gtgggtaccacgatgcattgcttgctgggtttgttttactccctcaattg

SEQ ID NO: 22482 - DNA, 50 bp, unidentified
  source 1..50: mol_type = unassigned DNA; note = target_3359b06
  misc_feature 1..24: note = LF
  misc_feature 25: note = Core
  misc_feature 26..50: note = RF
gtagcactattatgaaataatgaaaggttatttagattagagataattaa

SEQ ID NO: 22483 - DNA, 50 bp, unidentified; identical to SEQ ID NO: 21073
  source 1..50: mol_type = unassigned DNA; note = target_3370394
  misc_feature 1..24: note = LF
  misc_feature 25: note = Core
  misc_feature 26..50: note = RF

SEQ ID NO: 22484 - DNA, 50 bp, unidentified
  source 1..50: mol_type = unassigned DNA; note = target_3374b86
  misc_feature 1..24: note = LF
  misc_feature 25: note = Core
  misc_feature 26..50: note = RF
caaatctacctcgacaatgtcggctcagggtcatatcgctgcacattcac

SEQ ID NO: 22485 - DNA, 50 bp, unidentified
  source 1..50: mol_type = unassigned DNA; note = target_337d9f6
  misc_feature 1..23: note = LF
  misc_feature 24..25: note = Core
  misc_feature 26..50: note = RF
ccgttcaaacccccaccttaatcctcccccgcggacgcgggggaggacct

SEQ ID NO: 22486 - DNA, 50 bp, unidentified
  source 1..50: mol_type = unassigned DNA; note = target_3380e6e
  misc_feature 1..23: note = LF
  misc_feature 24..25: note = Core
  misc_feature 26..50: note = RF
tcaggttcttcataaagcgcctcctttcttttttacaagactcttatgct

SEQ ID NO: 22487 - DNA, 50 bp, unidentified
  source 1..50: mol_type = unassigned DNA; note = target_338acc7
  misc_feature 1..23: note = LF
  misc_feature 24..25: note = Core
  misc_feature 26..50: note = RF
gcgcagccacccatggggtggctctaccccggagatcaggccggcaccat

SEQ ID NO: 22488 - DNA, 50 bp, unidentified
  source 1..50: mol_type = unassigned DNA; note = target_3390638
  misc_feature 1..23: note = LF
  misc_feature 24..25: note = Core
  misc_feature 26..50: note = RF
tacgcgccggttcgccgacgttgctacacccgttgccacataacgatctc

SEQ ID NO: 22489 - DNA, 50 bp, unidentified
  source 1..50: mol_type = unassigned DNA; note = target_339b0b1
  misc_feature 1..24: note = LF
  misc_feature 25: note = Core
  misc_feature 26..50: note = RF
tttcaactttgcccagatccgacatacaactttgctcttacaaatttgtc

SEQ ID NO: 22490 - DNA, 50 bp, unidentified
  source 1..50: mol_type = unassigned DNA; note = target_339bb6f
  misc_feature 1..23: note = LF
  misc_feature 24..25: note = Core
  misc_feature 26..50: note = RF
gcggcacgttgtgcctgtccgggctaccagaccacagacagcgccgaact

SEQ ID NO: 22491 - DNA, 50 bp, unidentified
  source 1..50: mol_type = unassigned DNA; note = target_33a00b2
  misc_feature 1..22: note = LF
  misc_feature 23..25: note = Core
  misc_feature 26..50: note = RF
gttttcagacattatagccaccctttcatataaacaatataagatataac

SEQ ID NO: 22492 - DNA, 50 bp, unidentified
  source 1..50: mol_type = unassigned DNA; note = target_33a7cbd
  misc_feature 1..21: note = LF
  misc_feature 22..25: note = Core
  misc_feature 26..50: note = RF
gtggaacggcgtcggtctacaccccccggaccacaggcaagcgatgatca

SEQ ID NO: 22493 - DNA, 50 bp, unidentified
  source 1..50: mol_type = unassigned DNA; note = target_33a9fe9
  misc_feature 1..23: note = LF
  misc_feature 24..25: note = Core
  misc_feature 26..50: note = RF
gctgataactttcgttaccagcctttttgtgtatgtcgaatctacgatta

SEQ ID NO: 22494 - DNA, 50 bp, unidentified
  source 1..50: mol_type = unassigned DNA; note = target_33b55c3
  misc_feature 1..24: note = LF
  misc_feature 25: note = Core
  misc_feature 26..50: note = RF
acatatttcctctttatgcataacgccctgttaaggtgtgagcaacgcaa

SEQ ID NO: 22495 - DNA, 50 bp, unidentified
  source 1..50: mol_type = unassigned DNA; note = target_33b79cc
  misc_feature 1..23: note = LF
  misc_feature 24..25: note = Core
  misc_feature 26..50: note = RF
ttctccaatcggggtagatggggtcagaccttcatttataaggttttttg

SEQ ID NO: 22496 - DNA, 50 bp, unidentified
  source 1..50: mol_type = unassigned DNA; note = target_33c2c4d
  misc_feature 1..23: note = LF
  misc_feature 24..25: note = Core
  misc_feature 26..50: note = RF
gtggaccccctctctgtcaggatagttgtccgagtggttgactaaatcgc

SEQ ID NO: 22497 - DNA, 50 bp, unidentified
  source 1..50: mol_type = unassigned DNA; note = target_33c66a2
  misc_feature 1..23: note = LF
  misc_feature 24..25: note = Core
  misc_feature 26..50: note = RF
gcatcgcggcgacaatcagctattggttatgagtctggaccctagggcgg

SEQ ID NO: 22498 - DNA, 50 bp, unidentified
  source 1..50: mol_type = unassigned DNA; note = target_33c6bfe
  misc_feature 1..24: note = LF
  misc_feature 25: note = Core
  misc_feature 26..50: note = RF
aatagaatatttgtcattttttccttgtatgagcaaagtcaatgagaata

SEQ ID NO: 22499 - DNA, 50 bp, unidentified
  source 1..50: mol_type = unassigned DNA; note = target_33d31eb
  misc_feature 1..24: note = LF
  misc_feature 25: note = Core
  misc_feature 26..50: note = RF
cccccaacgtgccatcccaggcggcggaaagacgcacatccccgcgacat

SEQ ID NO: 22500 - DNA, 50 bp, unidentified
  source 1..50: mol_type = unassigned DNA; note = target_33e3765
  misc_feature 1..24: note = LF
  misc_feature 25: note = Core
  misc_feature 26..50: note = RF
tttgaacctagctaaaagcggacatacaacttggccactacaccagcgca

SEQ ID NO: 22501 - DNA, 50 bp, unidentified
  source 1..50: mol_type = unassigned DNA; note = target_33f55c6
  misc_feature 1..23: note = LF
  misc_feature 24..25: note = Core
  misc_feature 26..50: note = RF
tgattccacctgatctcatgctgctctagcgcatgacggcggccggcgca

SEQ ID NO: 22502 - DNA, 50 bp, unidentified
  source 1..50: mol_type = unassigned DNA; note = target_34095b6
  misc_feature 1..22: note = LF
  misc_feature 23..25: note = Core
  misc_feature 26..50: note = RF
ctgatattctcatatcttcctcctttctatatattaattataatacatgt

SEQ ID NO: 22503 - DNA, 50 bp, unidentified
  source 1..50: mol_type = unassigned DNA; note = target_340d6c7
  misc_feature 1..22: note = LF
  misc_feature 23..25: note = Core
  misc_feature 26..50: note = RF
ctgccaacactaactgtcctttgttcattagcccggaatctgattccggt

SEQ ID NO: 22504 - DNA, 50 bp, unidentified
  source 1..50: mol_type = unassigned DNA; note = target_341022f
  misc_feature 1..24: note = LF
  misc_feature 25: note = Core
  misc_feature 26..50: note = RF
ggcgaaaacgatggcttcttcagcgtagccttagacctgtctgcaagacc

SEQ ID NO: 22505 - DNA, 50 bp, unidentified
  source 1..50: mol_type = unassigned DNA; note = target_3419832
  misc_feature 1..23: note = LF
  misc_feature 24..25: note = Core
  misc_feature 26..50: note = RF
tgatgcaggatattccacaggaaaacacatcatgagacgacacgcctcac

SEQ ID NO: 22506 - DNA, 50 bp, unidentified
  source 1..50: mol_type = unassigned DNA; note = target_341fd7c
  misc_feature 1..23: note = LF
  misc_feature 24..25: note = Core
  misc_feature 26..50: note = RF
tcgaacacttcgatcgactctgttgcacagatcgggtcaaaggcggacct

SEQ ID NO: 22507 - DNA, 50 bp, unidentified
  source 1..50: mol_type = unassigned DNA; note = target_342140c
  misc_feature 1..23: note = LF
  misc_feature 24..25: note = Core
  misc_feature 26..50: note = RF
cggctgtgggatatctcttccacctcgtatattaattaagatgtttttcg

SEQ ID NO: 22508 - DNA, 50 bp, unidentified
  source 1..50: mol_type = unassigned DNA; note = target_346eb79
  misc_feature 1..24: note = LF
  misc_feature 25: note = Core
  misc_feature 26..50: note = RF
tgaatgtcgccagtctcatcgcggcagatgcggatgctcaacggacggcg

SEQ ID NO: 22509 - DNA, 50 bp, unidentified
  source 1..50: mol_type = unassigned DNA; note = target_3471c12
  misc_feature 1..23: note = LF
  misc_feature 24..25: note = Core
  misc_feature 26..50: note = RF
ccaaccaggatggaaatcacaccctacaatagtcatgaaggcttctcctg

SEQ ID NO: 22510 - DNA, 50 bp, unidentified
  source 1..50: mol_type = unassigned DNA; note = target_3478065
  misc_feature 1..24: note = LF
  misc_feature 25: note = Core
  misc_feature 26..50: note = RF
ccagccctcgttggcgaatgaccccacccccagctcgaacaggatcacgt

SEQ ID NO: 22511 - DNA, 50 bp, unidentified
  source 1..50: mol_type = unassigned DNA; note = target_347b07b
  misc_feature 1..24: note = LF
  misc_feature 25: note = Core
  misc_feature 26..50: note = RF
attaatggatatcagcccataaagaaagagactgagaaaactaatgtccc

SEQ ID NO: 22512 - DNA, 50 bp, unidentified
  source 1..50: mol_type = unassigned DNA; note = target_348c445
  misc_feature 1..23: note = LF
  misc_feature 24..25: note = Core
  misc_feature 26..50: note = RF
ggcgttgatccgatttccgcttgtggctacaaacggaagtccggtcgcct

SEQ ID NO: 22513 - DNA, 50 bp, unidentified
  source 1..50: mol_type = unassigned DNA; note = target_3490d5e
  misc_feature 1..22: note = LF
  misc_feature 23..25: note = Core
  misc_feature 26..50: note = RF
tgcgggagttgacgactgtcccctaaacgaacgccctggcgtcgcgacca

SEQ ID NO: 22514 - DNA, 50 bp, unidentified
  source 1..50: mol_type = unassigned DNA; note = target_3491540
  misc_feature 1..22: note = LF
  misc_feature 23..25: note = Core
  misc_feature 26..50: note = RF
ggtcggcagcgggacttcaaactgagacaccatcggtttacccgcatttc

SEQ ID NO: 22515 - DNA, 50 bp, unidentified
  source 1..50: mol_type = unassigned DNA; note = target_34947e1
  misc_feature 1..24: note = LF
  misc_feature 25: note = Core
  misc_feature 26..50: note = RF
accggcgccccggacggtacgcggcgcaatgggctacgggcggtgccgtc

SEQ ID NO: 22516 - DNA, 50 bp, unidentified
  source 1..50: mol_type = unassigned DNA; note = target_3498df9
  misc_feature 1..24: note = LF
  misc_feature 25: note = Core
  misc_feature 26..50: note = RF
accggcacagatcgcgggggattttgagataggttctagctaatcagcgc

SEQ ID NO: 22517 - DNA, 50 bp, unidentified
  source 1..50: mol_type = unassigned DNA; note = target_349eae5
  misc_feature 1..24: note = LF
  misc_feature 25: note = Core
  misc_feature 26..50: note = RF
agtgtttgagtcctgtgcagtacctgtgggagcgggcaagcccgcgaaga

SEQ ID NO: 22518 - DNA, 50 bp, unidentified
  source 1..50: mol_type = unassigned DNA; note = target_34a1da1
  misc_feature 1..23: note = LF
  misc_feature 24..25: note = Core
  misc_feature 26..50: note = RF
tggcgccttcgcgagcaggctcgctcccacggttgatcgcattccaaatg

SEQ ID NO: 22519 - DNA, 50 bp, unidentified
  source 1..50: mol_type = unassigned DNA; note = target_34a83c5
  misc_feature 1..23: note = LF
  misc_feature 24..25: note = Core
  misc_feature 26..50: note = RF
tgcgaccacgcacgtatcccatcctgccttcttggccgcgtcgacgagga

SEQ ID NO: 22520 - DNA, 50 bp, unidentified
  source 1..50: mol_type = unassigned DNA; note = target_34b383e
  misc_feature 1..23: note = LF
  misc_feature 24..25: note = Core
  misc_feature 26..50: note = RF
tgacatttcatagaatggttctcctttcccgcaaggtgctatctttttgg

SEQ ID NO: 22521 - DNA, 50 bp, unidentified
  source 1..50: mol_type = unassigned DNA; note = target_34bd28d
  misc_feature 1..23: note = LF
  misc_feature 24..25: note = Core
  misc_feature 26..50: note = RF
gctgacttagcgatgggtgaggagagagatatgggcagaatcgaagcgaa

SEQ ID NO: 22522 - DNA, 50 bp, unidentified
  source 1..50: mol_type = unassigned DNA; note = target_34cc0a8
  misc_feature 1..24: note = LF
  misc_feature 25: note = Core
  misc_feature 26..50: note = RF
cgtctaggtggattctcaatcagacggggatgtgctggttcacgaccgaa

SEQ ID NO: 22523 - DNA, 50 bp, unidentified
  source 1..50: mol_type = unassigned DNA; note = target_34d9e2e
  misc_feature 1..23: note = LF
  misc_feature 24..25: note = Core
  misc_feature 26..50: note = RF
gctgcaaactttccctggaattgctctgggaccgccgctctctactgcag

SEQ ID NO: 22524 - DNA, 50 bp, unidentified
  source 1..50: mol_type = unassigned DNA; note = target_34de4df
  misc_feature 1..24: note = LF
  misc_feature 25: note = Core
  misc_feature 26..50: note = RF
acatagctggctacttgcataaaaatgtatctatcttaatataatttcta

SEQ ID NO: 22525 - DNA, 50 bp, unidentified
  source 1..50: mol_type = unassigned DNA; note = target_34e0b2d
  misc_feature 1..24: note = LF
  misc_feature 25: note = Core
  misc_feature 26..50: note = RF
tacgccacctgctcgacctcgcccccccccgcgacgcactgagccgccgc

SEQ ID NO: 22526 - DNA, 50 bp, unidentified
  source 1..50: mol_type = unassigned DNA; note = target_34eb85b
  misc_feature 1..24: note = LF
  misc_feature 25: note = Core
  misc_feature 26..50: note = RF
atccgagggccgtcgacgaacctaagagagaggccattctagccatcgac

SEQ ID NO: 22527 - DNA, 50 bp, unidentified
  source 1..50: mol_type = unassigned DNA; note = target_34eb91d
  misc_feature 1..20: note = LF
  misc_feature 21..25: note = Core
  misc_feature 26..50: note = RF
tgtcggcatttcatgggcgtctccttggggatgtcaagcgaaggggcccg

SEQ ID NO: 22528 - DNA, 50 bp, unidentified
  source 1..50: mol_type = unassigned DNA; note = target_34f85a2
  misc_feature 1..23: note = LF
  misc_feature 24..25: note = Core
  misc_feature 26..50: note = RF
tggctcccgccaatgtcttttcctggcacatttttgtccttcccaaccag

SEQ ID NO: 22529 - DNA, 50 bp, unidentified
  source 1..50: mol_type = unassigned DNA; note = target_34f8980
  misc_feature 1..23: note = LF
  misc_feature 24..25: note = Core
  misc_feature 26..50: note = RF
gtttcgcctatccccccctcgtcctgctaagccaaacccacttaaagcga

SEQ ID NO: 22530 - DNA, 50 bp, unidentified
  source 1..50: mol_type = unassigned DNA; note = target_34f9729
  misc_feature 1..23: note = LF
  misc_feature 24..25: note = Core
  misc_feature 26..50: note = RF
cgtccccttcgcgagcaagcccgctcccacattcggttttgtgcagtggc

SEQ ID NO: 22531 - DNA, 50 bp, unidentified
  source 1..50: mol_type = unassigned DNA; note = target_350d4d6
  misc_feature 1..23: note = LF
  misc_feature 24..25: note = Core
  misc_feature 26..50: note = RF
ctcttttcttcataaatatcttcctttcgcatatatcagatagtgggctt

SEQ ID NO: 22532 - DNA, 50 bp, unidentified
  source 1..50: mol_type = unassigned DNA; note = target_3515782
  misc_feature 1..23: note = LF
  misc_feature 24..25: note = Core
  misc_feature 26..50: note = RF
cgattcgaagaaaagcggaattgctctagattccggcagctttggaaagc

SEQ ID NO: 22533 - DNA, 50 bp, unidentified
  source 1..50: mol_type = unassigned DNA; note = target_3517d15
  misc_feature 1..23: note = LF
  misc_feature 24..25: note = Core
  misc_feature 26..50: note = RF
ctttttaagtaggctcatatttcctccttttgaataattagctctataga

SEQ ID NO: 22534 - DNA, 50 bp, unidentified
  source 1..50: mol_type = unassigned DNA; note = target_3517d25
  misc_feature 1..24: note = LF
  misc_feature 25: note = Core
  misc_feature 26..50: note = RF
gaattattctactattctacccgttagttctatctacatgactaaaaatc

SEQ ID NO: 22535 - DNA, 50 bp, unidentified
  source 1..50: mol_type = unassigned DNA; note = target_351cb6d
  misc_feature 1..23: note = LF
  misc_feature 24..25: note = Core
  misc_feature 26..50: note = RF
caaccacgaggagccagccttttagcccgaattattcataaaaaaagacg

SEQ ID NO: 22536 - DNA, 50 bp, unidentified
  source 1..50: mol_type = unassigned DNA; note = target_3529a1a
  misc_feature 1..24: note = LF
  misc_feature 25: note = Core
  misc_feature 26..50: note = RF
ctacggccaacatcacggacgccccacccccctgagcaactggctggaaa

SEQ ID NO: 22537 - DNA, 50 bp, unidentified
  source 1..50: mol_type = unassigned DNA; note = target_353c23f
  misc_feature 1..23: note = LF
  misc_feature 24..25: note = Core
  misc_feature 26..50: note = RF
ggctgcgagcttccaaaacatggatgttttcgttaagcggccatggatgg

SEQ ID NO: 22538 - DNA, 50 bp, unidentified
  source 1..50: mol_type = unassigned DNA; note = target_35479a1
  misc_feature 1..23: note = LF
  misc_feature 24..25: note = Core
  misc_feature 26..50: note = RF
atattatagttatagttttgacacaccctctaaattaaaaccattacaca

SEQ ID NO: 22539 - DNA, 50 bp, unidentified
  source 1..50: mol_type = unassigned DNA; note = target_354af47
  misc_feature 1..24: note = LF
  misc_feature 25: note = Core
  misc_feature 26..50: note = RF
caaaaatgtcttgctatgcaggagcatccacacatgaccttcgcgcaagc

SEQ ID NO: 22540 - DNA, 50 bp, unidentified
  source 1..50: mol_type = unassigned DNA; note = target_3551122
  misc_feature 1..24: note = LF
  misc_feature 25: note = Core
  misc_feature 26..50: note = RF
agcttcctcaacaactgcgcccgtttgtttaaatcaaacaactataaact

SEQ ID NO: 22541 - DNA, 50 bp, unidentified
  source 1..50: mol_type = unassigned DNA; note = target_3553076
  misc_feature 1..23: note = LF
  misc_feature 24..25: note = Core
  misc_feature 26..50: note = RF
cgacatgcatcttgctcaagcttctgacctgcgatgatgcatcaccggcg

SEQ ID NO: 22542 - DNA, 50 bp, unidentified
  source 1..50: mol_type = unassigned DNA; note = target_35554f0
  misc_feature 1..24: note = LF
  misc_feature 25: note = Core
  misc_feature 26..50: note = RF
acgctggacggcgggccctaccatttttttgacagaagctcacgcatcgc

SEQ ID NO: 22543 - DNA, 50 bp, unidentified
  source 1..50: mol_type = unassigned DNA; note = target_355f97e
  misc_feature 1..22: note = LF
  misc_feature 23..25: note = Core
  misc_feature 26..50: note = RF
aacatatgggatattttaaaggaaacagtttaaacaagatattattttgg

SEQ ID NO: 22544 - DNA, 50 bp, unidentified
  source 1..50: mol_type = unassigned DNA; note = target_3571ec8
  misc_feature 1..23: note = LF
  misc_feature 24..25: note = Core
  misc_feature 26..50: note = RF
tgtcggacaccccctggaggctgctcaaaacggcccagatgctaggcggc

SEQ ID NO: 22545 - DNA, 50 bp, unidentified
  source 1..50: mol_type = unassigned DNA; note = target_3576c6d
  misc_feature 1..24: note = LF
  misc_feature 25: note = Core
  misc_feature 26..50: note = RF
cccttggtcgaaaacggcctcaagcggacgtttgagaccgtcacgggcta

SEQ ID NO: 22546 - DNA, 50 bp, unidentified
  source 1..50: mol_type = unassigned DNA; note = target_35812cb
  misc_feature 1..24: note = LF
  misc_feature 25: note = Core
  misc_feature 26..50: note = RF
cccatcagcgcattagcacccattcgacttcgctcagggcggcgcattag

SEQ ID NO: 22547 - DNA, 50 bp, unidentified
  source 1..50: mol_type = unassigned DNA; note = target_3586756
  misc_feature 1..24: note = LF
  misc_feature 25: note = Core
  misc_feature 26..50: note = RF
gaagagagcctcccataagccgacttctaaggacctcccatcaagcctcg

SEQ ID NO: 22548 - DNA, 50 bp, unidentified
  source 1..50: mol_type = unassigned DNA; note = target_35929f7
  misc_feature 1..24: note = LF
  misc_feature 25: note = Core
  misc_feature 26..50: note = RF
tgcttattggcctgaaatgtccgtttcagtgaatacagagctctgaggag

SEQ ID NO: 22549 - DNA, 50 bp, unidentified
  source 1..50: mol_type = unassigned DNA; note = target_3595881
  misc_feature 1..22: note = LF
  misc_feature 23..25: note = Core
  misc_feature 26..50: note = RF
tacaggtcattctttccttctcctttttgaggcaaagtggcaaggttact

SEQ ID NO: 22550 - DNA, 50 bp, unidentified
  source 1..50: mol_type = unassigned DNA; note = target_3597f6b
  misc_feature 1..22: note = LF
  misc_feature 23..25: note = Core
  misc_feature 26..50: note = RF
ttttccctttctgcaaatcccgatttgtcactgagaccattctaccacaa

SEQ ID NO: 22551 - DNA, 50 bp, unidentified
  source 1..50: mol_type = unassigned DNA; note = target_35a934e
  misc_feature 1..21: note = LF
  misc_feature 22..25: note = Core
  misc_feature 26..50: note = RF
cgttcggtggtgggctcgttgctcatgcctgctctccttggtcgtctgct

SEQ ID NO: 22552 - DNA, 50 bp, unidentified
  source 1..50: mol_type = unassigned DNA; note = target_35abd0a
  misc_feature 1..23: note = LF
  misc_feature 24..25: note = Core
  misc_feature 26..50: note = RF
cagatgcgcgacagagccaatcttgcatgccgatccacaaatatgctatc

SEQ ID NO: 22553 - DNA, 50 bp, unidentified
  source 1..50: mol_type = unassigned DNA; note = target_35b0d9a
  misc_feature 1..23: note = LF
  misc_feature 24..25: note = Core
  misc_feature 26..50: note = RF
gcgacgggaccccggccaggctcctatcaggtcacgttccgctcggttgg

SEQ ID NO: 22554 - DNA, 50 bp, unidentified
  source 1..50: mol_type = unassigned DNA; note = target_35b3ec5
  misc_feature 1..23: note = LF
  misc_feature 24..25: note = Core
  misc_feature 26..50: note = RF
gcggctatgccgagcatggtggtgttcctttccgaagggtgaggtgcttg

SEQ ID NO: 22555 - DNA, 50 bp, unidentified
  source 1..50: mol_type = unassigned DNA; note = target_35b4ea0
  misc_feature 1..23: note = LF
  misc_feature 24..25: note = Core
  misc_feature 26..50: note = RF
aatacatcagaatcacctccattctttatagacatattgtatcacgatac

SEQ ID NO: 22556 - DNA, 50 bp, unidentified
  source 1..50: mol_type = unassigned DNA; note = target_35bf270
  misc_feature 1..24: note = LF
  misc_feature 25: note = Core
  misc_feature 26..50: note = RF
cgtacgattcgcagctcctcgatctttttgcagaggaaagttggcgtcgt

SEQ ID NO: 22557 - DNA, 50 bp, unidentified
  source 1..50: mol_type = unassigned DNA; note = target_35c0be4
  misc_feature 1..23: note = LF
  misc_feature 24..25: note = Core
  misc_feature 26..50: note = RF
ggctgagggcatacggcacagggatgccgttatgcccgacccgtccggcg

SEQ ID NO: 22558 - DNA, 50 bp, unidentified
  source 1..50: mol_type = unassigned DNA; note = target_35d3ff5
  misc_feature 1..23: note = LF
  misc_feature 24..25: note = Core
  misc_feature 26..50: note = RF
cggagaaagtccctctgaaagcggacatctgggctccaaacgtccggagt

SEQ ID NO: 22559 - DNA, 50 bp, unidentified
  source 1..50: mol_type = unassigned DNA; note = target_35d4384
  misc_feature 1..23: note = LF
  misc_feature 24..25: note = Core
  misc_feature 26..50: note = RF
tttctgttgtcatacttgaattcctttcatagtttttttgtctgttcagc

SEQ ID NO: 22560 - DNA, 50 bp, unidentified
  source 1..50: mol_type = unassigned DNA; note = target_35d48d0
  misc_feature 1..24: note = LF
  misc_feature 25: note = Core
  misc_feature 26..50: note = RF
tgcaccagcaattaattttatacgttgttaccacacgttattctttttca

SEQ ID NO: 22561 - DNA, 50 bp, unidentified
  source 1..50: mol_type = unassigned DNA; note = target_35dc75e
  misc_feature 1..24: note = LF
  misc_feature 25: note = Core
  misc_feature 26..50: note = RF
gcgctaattgtttactcggcatgacaaactgcgcagataagttcagccgt

SEQ ID NO: 22562 - DNA, 50 bp, unidentified
  source 1..50: mol_type = unassigned DNA; note = target_35eb678
  misc_feature 1..23: note = LF
  misc_feature 24..25: note = Core
  misc_feature 26..50: note = RF
aggtgcgccaccgggccgagactagcggcgatcggaagcgcggcgaagcc

SEQ ID NO: 22563 - DNA, 50 bp, unidentified
  source 1..50: mol_type = unassigned DNA; note = target_35ebc83
  misc_feature 1..22: note = LF
  misc_feature 23..25: note = Core
  misc_feature 26..50: note = RF
tactcttccgccgagttagtttgtttctattggctcgtttctattggctt

SEQ ID NO: 22564 - DNA, 50 bp, unidentified
  source 1..50: mol_type = unassigned DNA; note = target_35ffb6b
  misc_feature 1..24: note = LF
  misc_feature 25: note = Core
  misc_feature 26..50: note = RF
tgcatcagtagcaagcatcgtatgcgtccggccaagtcatcttgacgccg

SEQ ID NO: 22565 - DNA, 50 bp, unidentified
  source 1..50: mol_type = unassigned DNA; note = target_3600832
  misc_feature 1..22: note = LF
  misc_feature 23..25: note = Core
  misc_feature 26..50: note = RF
gttaccaagtgccgccctcctaagaaccgtacgtgcaactttcactgcat

SEQ ID NO: 22566 - DNA, 50 bp, unidentified
  source 1..50: mol_type = unassigned DNA; note = target_3609a58
  misc_feature 1..23: note = LF
  misc_feature 24..25: note = Core
  misc_feature 26..50: note = RF
cgtgcgttcagtgagacacgctcctgtgaagtcacgtcggccggtccgct

SEQ ID NO: 22567 - DNA, 50 bp, unidentified
  source 1..50: mol_type = unassigned DNA; note = target_361bf55
  misc_feature 1..24: note = LF
  misc_feature 25: note = Core
  misc_feature 26..50: note = RF
gatgagctatgaataccccggcatcgccaagccctttacgttagcggtca

SEQ ID NO: 22568 - DNA, 50 bp, unidentified
  source 1..50: mol_type = unassigned DNA; note = target_3621146
  misc_feature 1..23: note = LF
  misc_feature 24..25: note = Core
  misc_feature 26..50: note = RF
taaaactctttattacaggaatactttctccaaagtcacaaaattaccaa

SEQ ID NO: 22569 - DNA, 50 bp, unidentified
  source 1..50: mol_type = unassigned DNA; note = target_3625240
  misc_feature 1..23: note = LF
  misc_feature 24..25: note = Core
  misc_feature 26..50: note = RF
tttctaatgtgatcgctcctccgtcgagatgacaaactatatgaaaacaa

SEQ ID NO: 22570 - DNA, 50 bp, unidentified
  source 1..50: mol_type = unassigned DNA; note = target_362e136
  misc_feature 1..23: note = LF
  misc_feature 24..25: note = Core
  misc_feature 26..50: note = RF
cctgccctactcactctaatccttgtggtgaggatcaactggcttcgctg

SEQ ID NO: 22571 - DNA, 50 bp, unidentified
  source 1..50: mol_type = unassigned DNA; note = target_363212a
  misc_feature 1..24: note = LF
  misc_feature 25: note = Core
  misc_feature 26..50: note = RF
atgattaaaacggtggtaacttgttatgccccatagtgtgccagcctaag

SEQ ID NO: 22572 - DNA, 50 bp, unidentified
  source 1..50: mol_type = unassigned DNA; note = target_3632cc2
  misc_feature 1..23: note = LF
  misc_feature 24..25: note = Core
  misc_feature 26..50: note = RF
acctcaagcacccttcggggtgcttttatggctggaactcaaccagaagt

SEQ ID NO: 22573 - DNA, 50 bp, unidentified
  source 1..50: mol_type = unassigned DNA; note = target_3636a1f
  misc_feature 1..24: note = LF
  misc_feature 25: note = Core
  misc_feature 26..50: note = RF
acctgggttctggaccggaataacttccgggttgcccgtcattcgggagc

SEQ ID NO: 22574 - DNA, 50 bp, unidentified
  source 1..50: mol_type = unassigned DNA; note = target_363b4ee
  misc_feature 1..23: note = LF
  misc_feature 24..25: note = Core
  misc_feature 26..50: note = RF
ggcgctttgcgcctttgcccaccctacgacacctgcaagagcgaagctgt

SEQ ID NO: 22575 - DNA, 50 bp, unidentified
  source 1..50: mol_type = unassigned DNA; note = target_363f02d
  misc_feature 1..23: note = LF
  misc_feature 24..25: note = Core
  misc_feature 26..50: note = RF
atacggcatcaagaggttttgttagcgggtcttagagctgccctagatat

SEQ ID NO: 22576 - DNA, 50 bp, unidentified
  source 1..50: mol_type = unassigned DNA; note = target_36411b1
  misc_feature 1..24: note = LF
  misc_feature 25: note = Core
  misc_feature 26..50: note = RF
gcgcgacgtaaagcacaactggagaggcaaaaatgatgattgacctggtg

SEQ ID NO: 22577 - DNA, 50 bp, unidentified
  source 1..50: mol_type = unassigned DNA; note = target_364de3e
  misc_feature 1..23: note = LF
  misc_feature 24..25: note = Core
  misc_feature 26..50: note = RF
gccgatgcgatgcctgccgggtcaggatgcattgatttcgggcgggagtg

SEQ ID NO: 22578 - DNA, 50 bp, unidentified
  source 1..50: mol_type = unassigned DNA; note = target_3655b24
  misc_feature 1..23: note = LF
  misc_feature 24..25: note = Core
  misc_feature 26..50: note = RF
tcacactgaacgcatcccgatggctatcggaactcgcaatggctgaacac

SEQ ID NO: 22579 - DNA, 50 bp, unidentified
  source 1..50: mol_type = unassigned DNA; note = target_365981c
  misc_feature 1..23: note = LF
  misc_feature 24..25: note = Core
  misc_feature 26..50: note = RF
tagaacttcaccgacgcccgcttctgccgcggtgagtaggtgggccgtgt

SEQ ID NO: 22580 - DNA, 50 bp, unidentified
  source 1..50: mol_type = unassigned DNA; note = target_3661928
  misc_feature 1..24: note = LF
  misc_feature 25: note = Core
  misc_feature 26..50: note = RF
atacgacgaccttgtgagatccgctttgggtcaaaagctgacgtgggcta

SEQ ID NO: 22581 - DNA, 50 bp, unidentified
  source 1..50: mol_type = unassigned DNA; note = target_366d007
  misc_feature 1..21: note = LF
  misc_feature 22..25: note = Core
  misc_feature 26..50: note = RF
aggatgtcgaaggtcgagtcgctcatgccgacaccgcctggcgcgccgcg

SEQ ID NO: 22582 - DNA, 50 bp, unidentified
  source 1..50: mol_type = unassigned DNA; note = target_366d4b4
  misc_feature 1..24: note = LF
  misc_feature 25: note = Core
  misc_feature 26..50: note = RF
gcggagagcccgcgtcatagtgggcgaatcgtggcgcctcgaagggcttc

SEQ ID NO: 22583 - DNA, 50 bp, unidentified
  source 1..50: mol_type = unassigned DNA; note = target_3671cb6
  misc_feature 1..23: note = LF
  misc_feature 24..25: note = Core
  misc_feature 26..50: note = RF
tttataggtcataataatcactcctttcaaatgttctggtgtagtatact

SEQ ID NO: 22584 - DNA, 50 bp, unidentified
  source 1..50: mol_type = unassigned DNA; note = target_367246b
  misc_feature 1..24: note = LF
  misc_feature 25: note = Core
  misc_feature 26..50: note = RF
gcccctgggcataggttgaaccgccccgggattcctgacgatcaaacgct

SEQ ID NO: 22585 - DNA, 50 bp, unidentified
  source 1..50: mol_type = unassigned DNA; note = target_36758cb
  misc_feature 1..24: note = LF
  misc_feature 25: note = Core
  misc_feature 26..50: note = RF
catattcgaagtcgaaaagacagcttgggtcaaaaggcccggttcgaagg

SEQ ID NO: 22586 - DNA, 50 bp, unidentified
  source 1..50: mol_type = unassigned DNA; note = target_368056f
  misc_feature 1..23: note = LF
  misc_feature 24..25: note = Core
  misc_feature 26..50: note = RF
ggctccaatactgtgtttctttgtaggaccggctttagccgggaaagcgc

SEQ ID NO: 22587 - DNA, 50 bp, unidentified
  source 1..50: mol_type = unassigned DNA; note = target_368e8d5
  misc_feature 1..23: note = LF
  misc_feature 24..25: note = Core
  misc_feature 26..50: note = RF
acctggtgtactaaagccacgccctacagagagggtattattatgagaaa

SEQ ID NO: 22588 - DNA, 50 bp, unidentified
  source 1..50: mol_type = unassigned DNA; note = target_3697fa2
  misc_feature 1..24: note = LF
  misc_feature 25: note = Core
  misc_feature 26..50: note = RF
gtctgaaaagggccgcttgtgacccaaagcggccgctagtgatgctcctg

SEQ ID NO: 22589 - DNA, 50 bp, unidentified
  source 1..50: mol_type = unassigned DNA; note = target_36985b4
  misc_feature 1..23: note = LF
  misc_feature 24..25: note = Core
  misc_feature 26..50: note = RF
tcatttctttatacatatcttatctcctctcgttatttatttgacttcgc

SEQ ID NO: 22590 - DNA, 50 bp, unidentified
  source 1..50: mol_type = unassigned DNA; note = target_369a6dd
  misc_feature 1..23: note = LF
  misc_feature 24..25: note = Core
  misc_feature 26..50: note = RF
tccaccataggagccaccaccgacagttctcaccacacggaaaccgaccc

SEQ ID NO: 22591 - DNA, 50 bp, unidentified
  source 1..50: mol_type = unassigned DNA; note = target_369fb51
  misc_feature 1..24: note = LF
  misc_feature 25: note = Core
  misc_feature 26..50: note = RF
gcgaccgtcgcgtcgcccacccggcattctgtaacggtggatcggaggct

SEQ ID NO: 22592 - DNA, 50 bp, unidentified
  source 1..50: mol_type = unassigned DNA; note = target_369fbce
  misc_feature 1..24: note = LF
  misc_feature 25: note = Core
  misc_feature 26..50: note = RF
tcgttccgccgtccgtagactggccggatgccggcgcacgaaggaaggtc

SEQ ID NO: 22593 - DNA, 50 bp, unidentified
  source 1..50: mol_type = unassigned DNA; note = target_36a5830
  misc_feature 1..24: note = LF
  misc_feature 25: note = Core
  misc_feature 26..50: note = RF
ccgcttcgcgtcgggcgttaccatttttttgcggcgacatctttcaagat

SEQ ID NO: 22594 - DNA, 50 bp, unidentified
  source 1..50: mol_type = unassigned DNA; note = target_36a751d
  misc_feature 1..23: note = LF
  misc_feature 24..25: note = Core
  misc_feature 26..50: note = RF
gattctggtgcatggaatgcaccctacgatggcgcctcttcattctcctg

SEQ ID NO: 22595 - DNA, 50 bp, unidentified
  source 1..50: mol_type = unassigned DNA; note = target_36af25f
  misc_feature 1..23: note = LF
  misc_feature 24..25: note = Core
  misc_feature 26..50: note = RF
agtttttatcatatatatcactccttaacagttatttattaattaaaaaa

SEQ ID NO: 22596 - DNA, 50 bp, unidentified
  source 1..50: mol_type = unassigned DNA; note = target_36b01a6
  misc_feature 1..24: note = LF
  misc_feature 25: note = Core
  misc_feature 26..50: note = RF
gatttccttgatgtagagcgtcaaaactactttggccggcggtcaagata

SEQ ID NO: 22597 - DNA, 50 bp, unidentified
  source 1..50: mol_type = unassigned DNA; note = target_36b16c8
  misc_feature 1..23: note = LF
  misc_feature 24..25: note = Core
  misc_feature 26..50: note = RF
aatgtggaacaggcactgagcttgttctttaaggtccgagctgccttgaa

SEQ ID NO: 22598 - DNA, 50 bp, unidentified
  source 1..50: mol_type = unassigned DNA; note = target_36b3583
  misc_feature 1..21: note = LF
  misc_feature 22..25: note = Core
  misc_feature 26..50: note = RF
atgacgatgccaagtagcacgctcatatgcgcacctcctcgttggatgac

SEQ ID NO: 22599 - DNA, 50 bp, unidentified
  source 1..50: mol_type = unassigned DNA; note = target_36b9cde
  misc_feature 1..23: note = LF
  misc_feature 24..25: note = Core
  misc_feature 26..50: note = RF
ttttttttcatatatttattctcctattttaaataaataactccatctac

SEQ ID NO: 22600 - DNA, 50 bp, unidentified
  source 1..50: mol_type = unassigned DNA; note = target_36ba787
  misc_feature 1..24: note = LF
  misc_feature 25: note = Core
  misc_feature 26..50: note = RF
gaccaaagcaattaattatacacgttgttgtggttagttttttacttttc

SEQ ID NO: 22601 - DNA, 50 bp, unidentified
  source 1..50: mol_type = unassigned DNA; note = target_36cdac0
  misc_feature 1..24: note = LF
  misc_feature 25: note = Core
  misc_feature 26..50: note = RF
ttacacccaacgcacgctcatcggcatgagcggatgttggaagacctcgc

SEQ ID NO: 22602 - DNA, 50 bp, unidentified
  source 1..50: mol_type = unassigned DNA; note = target_36d1cfe
  misc_feature 1..24: note = LF
  misc_feature 25: note = Core
  misc_feature 26..50: note = RF
tacgttcctttgtggaacgtagcctttttaaaatggatttctaccgctca

SEQ ID NO: 22603 - DNA, 50 bp, unidentified
  source 1..50: mol_type = unassigned DNA; note = target_36d567f
  misc_feature 1..24: note = LF
  misc_feature 25: note = Core
  misc_feature 26..50: note = RF
ttaaaaggctgtacttgcgaaaagagaaaacaaatatcttcttttcgctg

SEQ ID NO: 22604 - DNA, 50 bp, unidentified
  source 1..50: mol_type = unassigned DNA; note = target_36e58c8
  misc_feature 1..24: note = LF
  misc_feature 25: note = Core
  misc_feature 26..50: note = RF
aggagtatctgcatgatgcctaacgtttgaattcactggccttgcgcggc

SEQ ID NO: 22605 - DNA, 50 bp, unidentified
  source 1..50: mol_type = unassigned DNA; note = target_36f1a89
  misc_feature 1..21: note = LF
  misc_feature 22..25: note = Core
  misc_feature 26..50: note = RF
agaggccgcgaatggccgggtatgagtcttagctgcaatgacatcggacg

SEQ ID NO: 22606 - DNA, 50 bp, unidentified
  source 1..50: mol_type = unassigned DNA; note = target_36f2fa0
  misc_feature 1..23: note = LF
  misc_feature 24..25: note = Core
  misc_feature 26..50: note = RF
aacaccgccgcgcccgccccccccccccacgcgggcgatgagagcgaagc

SEQ ID NO: 22607 - DNA, 50 bp, unidentified
  source 1..50: mol_type = unassigned DNA; note = target_36f5bad
  misc_feature 1..23: note = LF
  misc_feature 24..25: note = Core
  misc_feature 26..50: note = RF
gtcccgagggtggcgttctcgatagccagacagtgaaggcccccgcgcac

SEQ ID NO: 22608 - DNA, 50 bp, unidentified
  source 1..50: mol_type = unassigned DNA; note = target_371465c
  misc_feature 1..22: note = LF
  misc_feature 23..25: note = Core
  misc_feature 26..50: note = RF
ttaggtgcatttttcatatttacacctcctgaaatactttaataaattct

SEQ ID NO: 22609 - DNA, 50 bp, unidentified
  source 1..50: mol_type = unassigned DNA; note = target_3715d2f
  misc_feature 1..23: note = LF
  misc_feature 24..25: note = Core
  misc_feature 26..50: note = RF
tggccgcaaaggtgacaccgtgaaagatcctctgggctgatgctgacggc

SEQ ID NO: 22610 - DNA, 50 bp, unidentified
  source 1..50: mol_type = unassigned DNA; note = target_3717739
  misc_feature 1..22: note = LF
  misc_feature 23..25: note = Core
  misc_feature 26..50: note = RF
tgacgtagacataaaatcactcctttcactacatattgtaatgtgtttgc

SEQ ID NO: 22611 - DNA, 50 bp, unidentified
  source 1..50: mol_type = unassigned DNA; note = target_3719ddf
  misc_feature 1..24: note = LF
  misc_feature 25: note = Core
  misc_feature 26..50: note = RF
gaagtcacgggtttccttgcggagagactctatgaagaccgaatcgcggg

SEQ ID NO: 22612 - DNA, 50 bp, unidentified
  source 1..50: mol_type = unassigned DNA; note = target_371c27f
  misc_feature 1..23: note = LF
  misc_feature 24..25: note = Core
  misc_feature 26..50: note = RF
cgcgtaggcaagcgtcgtccaccctacgaaccagccgttcgagcatgaaa

SEQ ID NO: 22613 - DNA, 50 bp, unidentified
  source 1..50: mol_type = unassigned DNA; note = target_371c8e7
  misc_feature 1..23: note = LF
  misc_feature 24..25: note = Core
  misc_feature 26..50: note = RF
gcgtgccggggccgacgatgatgagcactatgtctacgccatagcactat

SEQ ID NO: 22614 - DNA, 50 bp, unidentified
  source 1..50: mol_type = unassigned DNA; note = target_372dc4b
  misc_feature 1..23: note = LF
  misc_feature 24..25: note = Core
  misc_feature 26..50: note = RF
aaatgtggaaactgttttataaaaatctctacttccgaaaaaaagccttc

SEQ ID NO: 22615 - DNA, 50 bp, unidentified
  source 1..50: mol_type = unassigned DNA; note = target_3734a8a
  misc_feature 1..24: note = LF
  misc_feature 25: note = Core
  misc_feature 26..50: note = RF
gtgactgatactgatgcccgggtcttttttatgatttcctccgctttttt

SEQ ID NO: 22616 - DNA, 50 bp, unidentified; identical to SEQ ID NO: 20519
  source 1..50: mol_type = unassigned DNA; note = target_3736c00
  misc_feature 1..23: note = LF
  misc_feature 24..25: note = Core
  misc_feature 26..50: note = RF

SEQ ID NO: 22617 - DNA, 50 bp, unidentified
  source 1..50: mol_type = unassigned DNA; note = target_3741bca
  misc_feature 1..23: note = LF
  misc_feature 24..25: note = Core
  misc_feature 26..50: note = RF
ggcatatgactgacgatattcctaggcgctacgagcgcgtggaggtcctc

SEQ ID NO: 22618 - DNA, 50 bp, unidentified
  source 1..50: mol_type = unassigned DNA; note = target_3742100
  misc_feature 1..22: note = LF
  misc_feature 23..25: note = Core
  misc_feature 26..50: note = RF
gagatttccccacaattaatgtcatctcgaccgaagggagagatctcctg

SEQ ID NO: 22619 - DNA, 50 bp, unidentified
  source 1..50: mol_type = unassigned DNA; note = target_3742edd
  misc_feature 1..24: note = LF
  misc_feature 25: note = Core
  misc_feature 26..50: note = RF
tgtctaactggaacatccccaaagctgaccgtcgctcacaccaaaataaa

SEQ ID NO: 22620 - DNA, 50 bp, unidentified
  source 1..50: mol_type = unassigned DNA; note = target_374544f
  misc_feature 1..24: note = LF
  misc_feature 25: note = Core
  misc_feature 26..50: note = RF
ctacgccagggatggcgtcggtagcgcccagggaggggttcacagcgcct

SEQ ID NO: 22621 - DNA, 50 bp, unidentified
  source 1..50: mol_type = unassigned DNA; note = target_37461e9
  misc_feature 1..23: note = LF
  misc_feature 24..25: note = Core
  misc_feature 26..50: note = RF
ggcgcttcgcgcctttgcccaccctaccgggatcctgcttatctcaccac

SEQ ID NO: 22622 - DNA, 50 bp, unidentified
  source 1..50: mol_type = unassigned DNA; note = target_37463b1
  misc_feature 1..24: note = LF
  misc_feature 25: note = Core
  misc_feature 26..50: note = RF
cctccacggcgcgcacagattgcccgttctggatcgcttgcgccagtccg

SEQ ID NO: 22623 - DNA, 50 bp, unidentified
  source 1..50: mol_type = unassigned DNA; note = target_3749a19
  misc_feature 1..24: note = LF
  misc_feature 25: note = Core
  misc_feature 26..50: note = RF
ggtaagcctgctcacgaacggggttcgcggtaaagtgacgggcgtcttta

SEQ ID NO: 22624 - DNA, 50 bp, unidentified
  source 1..50: mol_type = unassigned DNA; note = target_374a0ab
  misc_feature 1..23: note = LF
  misc_feature 24..25: note = Core
  misc_feature 26..50: note = RF
gccggctgcatcctgcacgccgacaggggagcgcaatacaccagctggct

SEQ ID NO: 22625 - DNA, 50 bp, unidentified
  source 1..50: mol_type = unassigned DNA; note = target_374b7d1
  misc_feature 1..24: note = LF
  misc_feature 25: note = Core
  misc_feature 26..50: note = RF
aatgttacacaacgattatgtgtatgattagtggcgtcgataagcacgta

SEQ ID NO: 22626 - DNA, 50 bp, unidentified
  source 1..50: mol_type = unassigned DNA; note = target_3750d57
  misc_feature 1..24: note = LF
  misc_feature 25: note = Core
  misc_feature 26..50: note = RF
tactacccatcattccataatacttggggctgattgaagattagctttgc

SEQ ID NO: 22627 - DNA, 50 bp, unidentified
  source 1..50: mol_type = unassigned DNA; note = target_37544b2
  misc_feature 1..23: note = LF
  misc_feature 24..25: note = Core
  misc_feature 26..50: note = RF
ctccggactcccccatcctcatcctcgtccgccttcggctccctacggtt

SEQ ID NO: 22628 - DNA, 50 bp, unidentified
  source 1..50: mol_type = unassigned DNA; note = target_3756e29
  misc_feature 1..23: note = LF
  misc_feature 24..25: note = Core
  misc_feature 26..50: note = RF
cgtttgacatatcagccacccacctctccagagcatatgcgccccggcgc

SEQ ID NO: 22629 - DNA, 50 bp, unidentified
  source 1..50: mol_type = unassigned DNA; note = target_375a1db
  misc_feature 1..23: note = LF
  misc_feature 24..25: note = Core
  misc_feature 26..50: note = RF
cacttgacgggacaggattccccctcaccccttctttctgttgcgcctct

SEQ ID NO: 22630 - DNA, 50 bp, unidentified
  source 1..50: mol_type = unassigned DNA; note = target_37614dd
  misc_feature 1..22: note = LF
  misc_feature 23..25: note = Core
  misc_feature 26..50: note = RF
tgctgcattagaatttcaccacctttctttctaagaaaaagttacgcttc

SEQ ID NO: 22631 - DNA, 50 bp, unidentified
  source 1..50: mol_type = unassigned DNA; note = target_3766a2a
  misc_feature 1..22: note = LF
  misc_feature 23..25: note = Core
  misc_feature 26..50: note = RF
tcgccgagccttccgtttacggtgacacgccctcctttacctttttgttc

SEQ ID NO: 22632 - DNA, 50 bp, unidentified
  source 1..50: mol_type = unassigned DNA; note = target_376b2c9
  misc_feature 1..22: note = LF
  misc_feature 23..25: note = Core
  misc_feature 26..50: note = RF
atgctgctgcggtcatggtgtcctcgtttcgctggtgaaagtgtgtggtc

SEQ ID NO: 22633 - DNA, 50 bp, unidentified
  source 1..50: mol_type = unassigned DNA; note = target_376c3a8
  misc_feature 1..23: note = LF
  misc_feature 24..25: note = Core
  misc_feature 26..50: note = RF
accacacgcacgacaaggagaggctcagcgccgcctctccttgacctctg

SEQ ID NO: 22634 - DNA, 50 bp, unidentified
  source 1..50: mol_type = unassigned DNA; note = target_3773e74
  misc_feature 1..23: note = LF
  misc_feature 24..25: note = Core
  misc_feature 26..50: note = RF
agttttttcatatcatatccctccttatttattttctaatgcaattactc

SEQ ID NO: 22635 - DNA, 50 bp, unidentified
  source 1..50: mol_type = unassigned DNA; note = target_3782587
  misc_feature 1..23: note = LF
  misc_feature 24..25: note = Core
  misc_feature 26..50: note = RF
cccccgactggggtggctattgcacgccgatcctcaccacgccgatccgg

SEQ ID NO: 22636 - DNA, 50 bp, unidentified
  source 1..50: mol_type = unassigned DNA; note = target_3784958
  misc_feature 1..22: note = LF
  misc_feature 23..25: note = Core
  misc_feature 26..50: note = RF
catcgcaatcattattattccttctttctgaataaaataagccactaagg

SEQ ID NO: 22637 - DNA, 50 bp, unidentified
  source 1..50: mol_type = unassigned DNA; note = target_3785833
  misc_feature 1..23: note = LF
  misc_feature 24..25: note = Core
  misc_feature 26..50: note = RF
cctgcacaatcccttaaacttcttttttgagggaatgtccaccaccatac

SEQ ID NO: 22638 - DNA, 50 bp, unidentified
  source 1..50: mol_type = unassigned DNA; note = target_378b404
  misc_feature 1..23: note = LF
  misc_feature 24..25: note = Core
  misc_feature 26..50: note = RF
gaaatgtagtgaacgccaaactaatgtaggagccggcttgctggcgatgg

SEQ ID NO: 22639 - DNA, 50 bp, unidentified
  source 1..50: mol_type = unassigned DNA; note = target_3791536
  misc_feature 1..23: note = LF
  misc_feature 24..25: note = Core
  misc_feature 26..50: note = RF
tggcctcttcgcgggcttgcccgctcccacaggcacggcaccggtttcga

SEQ ID NO: 22640 - DNA, 50 bp, unidentified; identical to SEQ ID NO: 20777
  source 1..50: mol_type = unassigned DNA; note = target_3796b43
  misc_feature 1..23: note = LF
  misc_feature 24..25: note = Core
  misc_feature 26..50: note = RF

SEQ ID NO: 22641 - DNA, 50 bp, unidentified; identical to SEQ ID NO: 20455
  source 1..50: mol_type = unassigned DNA; note = target_379be3e
  misc_feature 1..23: note = LF
  misc_feature 24..25: note = Core
  misc_feature 26..50: note = RF

SEQ ID NO: 22642 - DNA, 50 bp, unidentified
  source 1..50: mol_type = unassigned DNA; note = target_37a960a
  misc_feature 1..23: note = LF
  misc_feature 24..25: note = Core
  misc_feature 26..50: note = RF
cgcgcgggctgctcgcccgcttttggcactgtgatgtttcgcgcgaggca

SEQ ID NO: 22643 - DNA, 50 bp, unidentified
  source 1..50: mol_type = unassigned DNA; note = target_37b89e7
  misc_feature 1..23: note = LF
  misc_feature 24..25: note = Core
  misc_feature 26..50: note = RF
gttggtttgtgccggacgcgccgctcagtcgaacagggcccggctcaggc

SEQ ID NO: 22644 - DNA, 50 bp, unidentified
  source 1..50: mol_type = unassigned DNA; note = target_37b90c3
  misc_feature 1..23: note = LF
  misc_feature 24..25: note = Core
  misc_feature 26..50: note = RF
tccaatttcgcatagctcccctccttacttttcaaactccatcttgaagc

SEQ ID NO: 22645 - DNA, 50 bp, unidentified
  source 1..50: mol_type = unassigned DNA; note = target_37bc599
  misc_feature 1..23: note = LF
  misc_feature 24..25: note = Core
  misc_feature 26..50: note = RF
gacagatcgtctggcgtccttccccccctgatacgataaggggccccgga

SEQ ID NO: 22646 - DNA, 50 bp, unidentified
  source 1..50: mol_type = unassigned DNA; note = target_37c2aa5
  misc_feature 1..24: note = LF
  misc_feature 25: note = Core
  misc_feature 26..50: note = RF
atccaattgatgacaatctcatccttcatgttcagcttctgtccgaaaac

SEQ ID NO: 22647 - DNA, 50 bp, unidentified
  source 1..50: mol_type = unassigned DNA; note = target_37c8212
  misc_feature 1..23: note = LF
  misc_feature 24..25: note = Core
  misc_feature 26..50: note = RF
gcttctgtcatgattattactccctttcatagcatgctattttaattttc

SEQ ID NO: 22648 - DNA, 50 bp, unidentified
  source 1..50: mol_type = unassigned DNA; note = target_37c8627
  misc_feature 1..23: note = LF
  misc_feature 24..25: note = Core
  misc_feature 26..50: note = RF
cccaagattcgctcgcaagcaagctcccacagcggcttcgtagtacggtc

SEQ ID NO: 22649 - DNA, 50 bp, unidentified
  source 1..50: mol_type = unassigned DNA; note = target_37cb857
  misc_feature 1..24: note = LF
  misc_feature 25: note = Core
  misc_feature 26..50: note = RF
gtttttaataaagtatccattctttcactccatttcatatccattttgtt

SEQ ID NO: 22650 - DNA, 50 bp, unidentified
  source 1..50: mol_type = unassigned DNA; note = target_37cb893
  misc_feature 1..23: note = LF
  misc_feature 24..25: note = Core
  misc_feature 26..50: note = RF
ggacccggcaagcggacttcatcagggccagcggctaacgccgcgacaaa

SEQ ID NO: 22651 - DNA, 50 bp, unidentified
  source 1..50: mol_type = unassigned DNA; note = target_37d2d78
  misc_feature 1..23: note = LF
  misc_feature 24..25: note = Core
  misc_feature 26..50: note = RF
ccgtctttaccggcaaggggcattgttgcagaactctcgctgcgaaggat

SEQ ID NO: 22652 - DNA, 50 bp, unidentified
  source 1..50: mol_type = unassigned DNA; note = target_37d3272
  misc_feature 1..21: note = LF
  misc_feature 22..25: note = Core
  misc_feature 26..50: note = RF
caaaagtctaaaaacttccgtcataccggcgaaggccggtatctccccta

SEQ ID NO: 22653 - DNA, 50 bp, unidentified
  source 1..50: mol_type = unassigned DNA; note = target_37d6fc8
  misc_feature 1..23: note = LF
  misc_feature 24..25: note = Core
  misc_feature 26..50: note = RF
ttcatccgctcgaccttggccattggtccaagggtggtttggcttcgtga

SEQ ID NO: 22654 - DNA, 50 bp, unidentified
  source 1..50: mol_type = unassigned DNA; note = target_37df897
  misc_feature 1..23: note = LF
  misc_feature 24..25: note = Core
  misc_feature 26..50: note = RF
ggcgaactaatcggcaaagatttctcccttcggtcgaaatgacatcttgc

SEQ ID NO: 22655 - DNA, 50 bp, unidentified
  source 1..50: mol_type = unassigned DNA; note = target_37e03ae
  misc_feature 1..23: note = LF
  misc_feature 24..25: note = Core
  misc_feature 26..50: note = RF
gcgatcatcagcaatgtcgcctttgggccccaaaaaacgacgttcgccgc

SEQ ID NO: 22656 - DNA, 50 bp, unidentified
  source 1..50: mol_type = unassigned DNA; note = target_3800fbb
  misc_feature 1..23: note = LF
  misc_feature 24..25: note = Core
  misc_feature 26..50: note = RF
cagccgcatagagcggggtgcgtagcccggatgagcgaagcgaaatccgg

SEQ ID NO: 22657 - DNA, 50 bp, unidentified
  source 1..50: mol_type = unassigned DNA; note = target_380b62f
  misc_feature 1..24: note = LF
  misc_feature 25: note = Core
  misc_feature 26..50: note = RF
cttagcctgaacatgagccctaacgtccgagctgagtggtccgccgccat

SEQ ID NO: 22658 - DNA, 50 bp, unidentified
  source 1..50: mol_type = unassigned DNA; note = target_380c2f3
  misc_feature 1..24: note = LF
  misc_feature 25: note = Core
  misc_feature 26..50: note = RF
tcctttttttcttttttttcccttctctacgcagtagagaggggtggtca

SEQ ID NO: 22659 - DNA, 50 bp, unidentified
  source 1..50: mol_type = unassigned DNA; note = target_381aea3
  misc_feature 1..23: note = LF
  misc_feature 24..25: note = Core
  misc_feature 26..50: note = RF
tctcgaacacgggacaccatcccctttccacttggggccactgccggacg

SEQ ID NO: 22660 - DNA, 50 bp, unidentified
  source 1..50: mol_type = unassigned DNA; note = target_381cd09
  misc_feature 1..23: note = LF
  misc_feature 24..25: note = Core
  misc_feature 26..50: note = RF
aggcgctgcagtcctaagagtcgctaacacaacccttgatacgtcgttgc

SEQ ID NO: 22661 - DNA, 50 bp, unidentified
  source 1..50: mol_type = unassigned DNA; note = target_3826ac5
  misc_feature 1..23: note = LF
  misc_feature 24..25: note = Core
  misc_feature 26..50: note = RF
gcgggtgcacaatgggacgtcagagagagatagcccacggcgccccccgg

SEQ ID NO: 22662 - DNA, 50 bp, unidentified
  source 1..50: mol_type = unassigned DNA; note = target_382c2f3
  misc_feature 1..24: note = LF
  misc_feature 25: note = Core
  misc_feature 26..50: note = RF
gcggagccctcgctcgcagagcggcatgtggggacgacttcgcccttagt

SEQ ID NO: 22663 - DNA, 50 bp, unidentified
  source 1..50: mol_type = unassigned DNA; note = target_38399c1
  misc_feature 1..24: note = LF
  misc_feature 25: note = Core
  misc_feature 26..50: note = RF
gccctcggccacgacgtcaactgacctggacgtcacggccgctcacctca

SEQ ID NO: 22664 - DNA, 50 bp, unidentified
  source 1..50: mol_type = unassigned DNA; note = target_383c7ec
  misc_feature 1..24: note = LF
  misc_feature 25: note = Core
  misc_feature 26..50: note = RF
atgcacgcgcataaagcccactgacctgcggctttgcttgtactcccgac

SEQ ID NO: 22665 - DNA, 50 bp, unidentified
  source 1..50: mol_type = unassigned DNA; note = target_38456af
  misc_feature 1..24: note = LF
  misc_feature 25: note = Core
  misc_feature 26..50: note = RF
tcgtttcgcctcagccagcatccatgctggctgccccggccagacgtcag

SEQ ID NO: 22666 - DNA, 50 bp, unidentified
  source 1..50: mol_type = unassigned DNA; note = target_385ee67
  misc_feature 1..23: note = LF
  misc_feature 24..25: note = Core
  misc_feature 26..50: note = RF
cgcaaaatcacaagggcacggcgtgggtccccgctttcgcggggacgacg

SEQ ID NO: 22667 - DNA, 50 bp, unidentified
  source 1..50: mol_type = unassigned DNA; note = target_38641a8
  misc_feature 1..23: note = LF
  misc_feature 24..25: note = Core
  misc_feature 26..50: note = RF
gccacagccgaaaccctggcggttttttggtcgagacactggcttcgctt

SEQ ID NO: 22668 - DNA, 50 bp, unidentified
  source 1..50: mol_type = unassigned DNA; note = target_3868a9a
  misc_feature 1..22: note = LF
  misc_feature 23..25: note = Core
  misc_feature 26..50: note = RF
gggatttgccaggcagcgcatgagacctgagggccgtggattgcatgtag

SEQ ID NO: 22669 - DNA, 50 bp, unidentified
  source 1..50: mol_type = unassigned DNA; note = target_3871135
  misc_feature 1..23: note = LF
  misc_feature 24..25: note = Core
  misc_feature 26..50: note = RF
acctctcaggaaaatatttacctctcaggaaaatattttcctgagaggta

SEQ ID NO: 22670 - DNA, 50 bp, unidentified
  source 1..50: mol_type = unassigned DNA; note = target_387488a
  misc_feature 1..23: note = LF
  misc_feature 24..25: note = Core
  misc_feature 26..50: note = RF
cgtcatcgcggttaaaaccgctcctacaggtcggggcacacagccctcag

SEQ ID NO: 22671 - DNA, 50 bp, unidentified
  source 1..50: mol_type = unassigned DNA; note = target_387a9d0
  misc_feature 1..23: note = LF
  misc_feature 24..25: note = Core
  misc_feature 26..50: note = RF
ggctctcactgccttcgcatctttgcaacagagccatttcgacgcctcaa

SEQ ID NO: 22672 - DNA, 50 bp, unidentified
  source 1..50: mol_type = unassigned DNA; note = target_3899688
  misc_feature 1..23: note = LF
  misc_feature 24..25: note = Core
  misc_feature 26..50: note = RF
gcgccgggatcgcccactacctcctgtcggtcggtccctcgatcgcgttc

SEQ ID NO: 22673 - DNA, 50 bp, unidentified
  source 1..50: mol_type = unassigned DNA; note = target_38a51c7
  misc_feature 1..23: note = LF
  misc_feature 24..25: note = Core
  misc_feature 26..50: note = RF
cgtttctagttacctccgataattgtcattatcggcagcctttgtgattt

SEQ ID NO: 22674 - DNA, 50 bp, unidentified
  source 1..50: mol_type = unassigned DNA; note = target_38a9aac
  misc_feature 1..23: note = LF
  misc_feature 24..25: note = Core
  misc_feature 26..50: note = RF
agcggataagtggatcataacattgctatttcgaggccggtatgcagggc

SEQ ID NO: 22675 - DNA, 50 bp, unidentified
  source 1..50: mol_type = unassigned DNA; note = target_38c0a86
  misc_feature 1..23: note = LF
  misc_feature 24..25: note = Core
  misc_feature 26..50: note = RF
ttgacgctgagtctcaccttgattggcgcccggcatgcgggaggcgacaa

SEQ ID NO: 22676 - DNA, 50 bp, unidentified
  source 1..50: mol_type = unassigned DNA; note = target_38c37a2
  misc_feature 1..23: note = LF
  misc_feature 24..25: note = Core
  misc_feature 26..50: note = RF
ggcgccgataagcgaaccacaggctagggcccatggagagactttggacc

SEQ ID NO: 22677 - DNA, 50 bp, unidentified
  source 1..50: mol_type = unassigned DNA; note = target_38d44a5
  misc_feature 1..23: note = LF
  misc_feature 24..25: note = Core
  misc_feature 26..50: note = RF
ccggctgccctacaagatgatggaggccgcatgaaggcgtactggtattt

SEQ ID NO: 22678 - DNA, 50 bp, unidentified
  source 1..50: mol_type = unassigned DNA; note = target_38d8539
  misc_feature 1..23: note = LF
  misc_feature 24..25: note = Core
  misc_feature 26..50: note = RF
tttgtgcgatgggtgtctgacacctacggagtcagacaccggcggactgg

SEQ ID NO: 22679 - DNA, 50 bp, unidentified
  source 1..50: mol_type = unassigned DNA; note = target_38d9b4b
  misc_feature 1..23: note = LF
  misc_feature 24..25: note = Core
  misc_feature 26..50: note = RF
gcaacacttccggcgtgcagtagtgggaatcaccgcgcagcatgattgcg

SEQ ID NO: 22680 - DNA, 50 bp, unidentified
  source 1..50: mol_type = unassigned DNA; note = target_38ebcde
  misc_feature 1..23: note = LF
  misc_feature 24..25: note = Core
  misc_feature 26..50: note = RF
gcgtgttgattgctgttgagaagtgacacgctatcacctacagtgagatc

SEQ ID NO: 22681 - DNA, 50 bp, unidentified
  source 1..50: mol_type = unassigned DNA; note = target_38eda4a
  misc_feature 1..24: note = LF
  misc_feature 25: note = Core
  misc_feature 26..50: note = RF
atgataggcgctaacggccaaaagcagacatccgcctttcattaccgcgc

SEQ ID NO: 22682 - DNA, 50 bp, unidentified
  source 1..50: mol_type = unassigned DNA; note = target_38f0d09
  misc_feature 1..23: note = LF
  misc_feature 24..25: note = Core
  misc_feature 26..50: note = RF
gcacgctaaccgcagaggtcggtctaacgcccaagttaacctgcggccga

SEQ ID NO: 22683 - DNA, 50 bp, unidentified
  source 1..50: mol_type = unassigned DNA; note = target_38f3aea
  misc_feature 1..23: note = LF
  misc_feature 24..25: note = Core
  misc_feature 26..50: note = RF
cgcccgatcccattccgttaacgtgacgatgcccgactgtacccggttga

SEQ ID NO: 22684 - DNA, 50 bp, unidentified
  source 1..50: mol_type = unassigned DNA; note = target_38f5bc9
  misc_feature 1..23: note = LF
  misc_feature 24..25: note = Core
  misc_feature 26..50: note = RF
aacggcttccttatcctgagaggtggtcccatccgttcggacagtttttg

SEQ ID NO: 22685 - DNA, 50 bp, unidentified
  source 1..50: mol_type = unassigned DNA; note = target_38ff1f2
  misc_feature 1..23: note = LF
  misc_feature 24..25: note = Core
  misc_feature 26..50: note = RF
ggtagttacccctcaccctaaccctctccctgtgcacaaacctcagttac

SEQ ID NO: 22686 - DNA, 50 bp, unidentified
  source 1..50: mol_type = unassigned DNA; note = target_390c23b
  misc_feature 1..24: note = LF
  misc_feature 25: note = Core
  misc_feature 26..50: note = RF
atggcctgggcgcgagcccccctttttgcgccgtcggaacaccggtgcgc

SEQ ID NO: 22687 - DNA, 50 bp, unidentified
  source 1..50: mol_type = unassigned DNA; note = target_390ce9b
  misc_feature 1..23: note = LF
  misc_feature 24..25: note = Core
  misc_feature 26..50: note = RF
gccagagcttcctccgccctggcttttgtgggcgcatgattcctgcccac

SEQ ID NO: 22688 - DNA, 50 bp, unidentified
  source 1..50: mol_type = unassigned DNA; note = target_390dd2b
  misc_feature 1..23: note = LF
  misc_feature 24..25: note = Core
  misc_feature 26..50: note = RF
acaaaattctttcagaatttcactcgaactgacgtttaatttacttaggc

SEQ ID NO: 22689 - DNA, 50 bp, unidentified
  source 1..50: mol_type = unassigned DNA; note = target_3911a92
  misc_feature 1..24: note = LF
  misc_feature 25: note = Core
  misc_feature 26..50: note = RF
gccaggcaaacgctcgttcatcggctacttaccgctttgacctgcgcaca

SEQ ID NO: 22690 - DNA, 50 bp, unidentified
  source 1..50: mol_type = unassigned DNA; note = target_3912646
  misc_feature 1..20: note = LF
  misc_feature 21..25: note = Core
  misc_feature 26..50: note = RF
gacgatctaccgccggctcccccccccgcagcggacgtagcgatcgctgt

SEQ ID NO: 22691 - DNA, 50 bp, unidentified
  source 1..50: mol_type = unassigned DNA; note = target_3918348
  misc_feature 1..23: note = LF
  misc_feature 24..25: note = Core
  misc_feature 26..50: note = RF
gttcggacgcctagtacgtgcccagcactacggcttgcccacgcgccttc

SEQ ID NO: 22692 - DNA, 50 bp, unidentified
  source 1..50: mol_type = unassigned DNA; note = target_391ac67
  misc_feature 1..23: note = LF
  misc_feature 24..25: note = Core
  misc_feature 26..50: note = RF
tgtagcttcttagcgaatgcaggagcatattctgctgaataaccattatc

SEQ ID NO: 22693 - DNA, 50 bp, unidentified
  source 1..50: mol_type = unassigned DNA; note = target_391af82
  misc_feature 1..24: note = LF
  misc_feature 25: note = Core
  misc_feature 26..50: note = RF
ttactctaactttgcataggattgcaaatctattcaaaatctctcaaaat

SEQ ID NO: 22694 - DNA, 50 bp, unidentified
  source 1..50: mol_type = unassigned DNA; note = target_39321f4
  misc_feature 1..24: note = LF
  misc_feature 25: note = Core
  misc_feature 26..50: note = RF
gcccaattattgggcgccaagtgaccccgcgttgctgtcgcgtggcggcc

SEQ ID NO: 22695 - DNA, 50 bp, unidentified
  source 1..50: mol_type = unassigned DNA; note = target_3933dca
  misc_feature 1..23: note = LF
  misc_feature 24..25: note = Core
  misc_feature 26..50: note = RF
aaatatacattgatattcaccctctttccataattattgtaccatatttc

SEQ ID NO: 22696 - DNA, 50 bp, unidentified
  source 1..50: mol_type = unassigned DNA; note = target_3935bcf
  misc_feature 1..24: note = LF
  misc_feature 25: note = Core
  misc_feature 26..50: note = RF
ccggccattgcgccctatgagaaccggacatcggcatcaacttgcctccc

SEQ ID NO: 22697 - DNA, 50 bp, unidentified
  source 1..50: mol_type = unassigned DNA; note = target_393e36d
  misc_feature 1..23: note = LF
  misc_feature 24..25: note = Core
  misc_feature 26..50: note = RF
tagcacgcgcccgacgcagggcgctcagtcgccgccgccctgcgaaccct

SEQ ID NO: 22698 - DNA, 50 bp, unidentified
  source 1..50: mol_type = unassigned DNA; note = target_3944f6b
  misc_feature 1..23: note = LF
  misc_feature 24..25: note = Core
  misc_feature 26..50: note = RF
gggtctcttcgcgagcgggctcgctcccacggttgatcgtggttggtcgc

SEQ ID NO: 22699 - DNA, 50 bp, unidentified
  source 1..50: mol_type = unassigned DNA; note = target_3947597
  misc_feature 1..22: note = LF
  misc_feature 23..25: note = Core
  misc_feature 26..50: note = RF
tatttattccttgttgtataacaaattaaaaacaaacactatgtcacaat

SEQ ID NO: 22700 - DNA, 50 bp, unidentified
  source 1..50: mol_type = unassigned DNA; note = target_394a61b
  misc_feature 1..23: note = LF
  misc_feature 24..25: note = Core
  misc_feature 26..50: note = RF
tcaattgggccgccacctcccaccattacctcgcggtgttcgatcgggcc

SEQ ID NO: 22701 - DNA, 50 bp, unidentified
  source 1..50: mol_type = unassigned DNA; note = target_394bcf8
  misc_feature 1..23: note = LF
  misc_feature 24..25: note = Core
  misc_feature 26..50: note = RF
ataagcgggatcgaaccgctgacctcttgaatgccatagattcagagcgg

SEQ ID NO: 22702 - DNA, 50 bp, unidentified
  source 1..50: mol_type = unassigned DNA; note = target_39600ee
  misc_feature 1..23: note = LF
  misc_feature 24..25: note = Core
  misc_feature 26..50: note = RF
cgcacccaacgcatcgccgtccgctgaccggactccgcgttcgcggccgc

SEQ ID NO: 22703 - DNA, 50 bp, unidentified
  source 1..50: mol_type = unassigned DNA; note = target_39603cd
  misc_feature 1..24: note = LF
  misc_feature 25: note = Core
  misc_feature 26..50: note = RF
ccgccgtgccgcgggcgtcaccacttttttgcggtcacgtcccgcagaac

SEQ ID NO: 22704 - DNA, 50 bp, unidentified
  source 1..50: mol_type = unassigned DNA; note = target_39633b8
  misc_feature 1..23: note = LF
  misc_feature 24..25: note = Core
  misc_feature 26..50: note = RF
cgtcggcggcgtagccgccaaccctacccgcaagggtcaagcaccatgcg

SEQ ID NO: 22705 - DNA, 50 bp, unidentified
  source 1..50: mol_type = unassigned DNA; note = target_3972111
  misc_feature 1..23: note = LF
  misc_feature 24..25: note = Core
  misc_feature 26..50: note = RF
catgcgttcagccacacccctacctgccaggcggtcctgtcgtcttgatg

SEQ ID NO: 22706 - DNA, 50 bp, unidentified
  source 1..50: mol_type = unassigned DNA; note = target_397575f
  misc_feature 1..23: note = LF
  misc_feature 24..25: note = Core
  misc_feature 26..50: note = RF
gtctgtaaaaccgtcggcttagcctacgttggttcgaacccaacacctgc

SEQ ID NO: 22707 - DNA, 50 bp, unidentified
  source 1..50: mol_type = unassigned DNA; note = target_397d4dd
  misc_feature 1..23: note = LF
  misc_feature 24..25: note = Core
  misc_feature 26..50: note = RF
ggcgtcgttgtgagggccaatagtgcacaataccaaatatgcactaagtg

SEQ ID NO: 22708 - DNA, 50 bp, unidentified
  source 1..50: mol_type = unassigned DNA; note = target_3981ade
  misc_feature 1..23: note = LF
  misc_feature 24..25: note = Core
  misc_feature 26..50: note = RF
aatcccaaagagacgtaatttgtaggaactcccacaagagttaacaacaa

SEQ ID NO: 22709 - DNA, 50 bp, unidentified
  source 1..50: mol_type = unassigned DNA; note = target_3989179
  misc_feature 1..22: note = LF
  misc_feature 23..25: note = Core
  misc_feature 26..50: note = RF
aagcccttcgtcaagcggcagaagaatgatgcggccgacgctgaagcgat

SEQ ID NO: 22710 - DNA, 50 bp, unidentified
  source 1..50: mol_type = unassigned DNA; note = target_3999b33
  misc_feature 1..23: note = LF
  misc_feature 24..25: note = Core
  misc_feature 26..50: note = RF
atagaacgcccgatgtccgctattggcacaaagcagacgttccgacccac

SEQ ID NO: 22711 - DNA, 50 bp, unidentified
  source 1..50: mol_type = unassigned DNA; note = target_399ac73
  misc_feature 1..23: note = LF
  misc_feature 24..25: note = Core
  misc_feature 26..50: note = RF
gcaaaaacttaatgtctgccgagcttgctcatcagaaagcagacaagcat

SEQ ID NO: 22712 - DNA, 50 bp, unidentified
  source 1..50: mol_type = unassigned DNA; note = target_399cde1
  misc_feature 1..22: note = LF
  misc_feature 23..25: note = Core
  misc_feature 26..50: note = RF
tttaaaatagactaacgggtgcgtttacttgaagatcagggctgccaaca

SEQ ID NO: 22713 - DNA, 50 bp, unidentified
  source 1..50: mol_type = unassigned DNA; note = target_39a9525
  misc_feature 1..23: note = LF
  misc_feature 24..25: note = Core
  misc_feature 26..50: note = RF
tactgacgtttttataagggctccttaagaaatgttccgggctgacatcc

SEQ ID NO: 22714 - DNA, 50 bp, unidentified
  source 1..50: mol_type = unassigned DNA; note = target_39b2162
  misc_feature 1..23: note = LF
  misc_feature 24..25: note = Core
  misc_feature 26..50: note = RF
tcgttgagcacgaggcctcggggtcgggtcttcattcttagggttccgct

SEQ ID NO: 22715 - DNA, 50 bp, unidentified
  source 1..50: mol_type = unassigned DNA; note = target_39b2934
  misc_feature 1..24: note = LF
  misc_feature 25: note = Core
  misc_feature 26..50: note = RF
gaggccattgccccttctctagagagcagatcacggatggcaagcaccac

SEQ ID NO: 22716 - DNA, 50 bp, unidentified
  source 1..50: mol_type = unassigned DNA; note = target_39b4cc5
  misc_feature 1..23: note = LF
  misc_feature 24..25: note = Core
  misc_feature 26..50: note = RF
atacaattttctacgaaaatcactcgaaatgacaattaatagcaatcaaa

SEQ ID NO: 22717 - DNA, 50 bp, unidentified
  source 1..50: mol_type = unassigned DNA; note = target_39c35e4
  misc_feature 1..23: note = LF
  misc_feature 24..25: note = Core
  misc_feature 26..50: note = RF
ctgcgtcggaaaacgcccttgattgcgcgtcgggtcgcctataattgcgc

SEQ ID NO: 22718 - DNA, 50 bp, unidentified
  source 1..50: mol_type = unassigned DNA; note = target_39c67c7
  misc_feature 1..23: note = LF
  misc_feature 24..25: note = Core
  misc_feature 26..50: note = RF
ccggttattggcgccgaggaaagaggctctatgaagcgcactccaaagta

SEQ ID NO: 22719 - DNA, 50 bp, unidentified
  source 1..50: mol_type = unassigned DNA; note = target_39c9985
  misc_feature 1..23: note = LF
  misc_feature 24..25: note = Core
  misc_feature 26..50: note = RF
agggatctcgcgctacacccatcctacggcccaacgttccgtacaccacc

SEQ ID NO: 22720 - DNA, 50 bp, unidentified
  source 1..50: mol_type = unassigned DNA; note = target_39d8ef4
  misc_feature 1..23: note = LF
  misc_feature 24..25: note = Core
  misc_feature 26..50: note = RF
agtgcgcccctctccctaaccctctcccacaagtgggagaggggactgtt

SEQ ID NO: 22721 - DNA, 50 bp, unidentified
  source 1..50: mol_type = unassigned DNA; note = target_39dc3de
  misc_feature 1..22: note = LF
  misc_feature 23..25: note = Core
  misc_feature 26..50: note = RF
gcctccactccagcaggaagcttgaatcacatcttaccccgcttgggaat

SEQ ID NO: 22722 - DNA, 50 bp, unidentified
  source 1..50: mol_type = unassigned DNA; note = target_39dccc1
  misc_feature 1..23: note = LF
  misc_feature 24..25: note = Core
  misc_feature 26..50: note = RF
ttgacatatccggtgcgtcatcgagggcctcatgcacaagagcaaactgg

SEQ ID NO: 22723 - DNA, 50 bp, unidentified
  source 1..50: mol_type = unassigned DNA; note = target_39e58d2
  misc_feature 1..23: note = LF
  misc_feature 24..25: note = Core
  misc_feature 26..50: note = RF
tcagtgggagcaggatatgaagcccccactcgagtccaccgctcgggcgg

SEQ ID NO: 22724 - DNA, 50 bp, unidentified
  source 1..50: mol_type = unassigned DNA; note = target_39e691e
  misc_feature 1..23: note = LF
  misc_feature 24..25: note = Core
  misc_feature 26..50: note = RF
ttcaggtggtagggcaatgcaggaggccctagggttacagccttttcaac

SEQ ID NO: 22725 - DNA, 50 bp, unidentified
  source 1..50: mol_type = unassigned DNA; note = target_39e8ac2
  misc_feature 1..24: note = LF
  misc_feature 25: note = Core
  misc_feature 26..50: note = RF
ctgatgtcgggttccgacccaaagcggtcattcgcgctccctcggtttga

SEQ ID NO: 22726 - DNA, 50 bp, unidentified
  source 1..50: mol_type = unassigned DNA; note = target_39f8bff
  misc_feature 1..23: note = LF
  misc_feature 24..25: note = Core
  misc_feature 26..50: note = RF
attcaaaccgtgatatgggaggccgggatttaggagcacgcttcgcacgt

SEQ ID NO: 22727 - DNA, 50 bp, unidentified
  source 1..50: mol_type = unassigned DNA; note = target_39fcf7b
  misc_feature 1..24: note = LF
  misc_feature 25: note = Core
  misc_feature 26..50: note = RF
gaatcggggctcaagaatggtatgcgtccggcgaacccatcttgaatgcg

SEQ ID NO: 22728 - DNA, 50 bp, unidentified
  source 1..50: mol_type = unassigned DNA; note = target_3a0a2f9
  misc_feature 1..23: note = LF
  misc_feature 24..25: note = Core
  misc_feature 26..50: note = RF
ggagggctgccgcgtgagtgcctgtttcttatccctgatgcttcttgatc

SEQ ID NO: 22729 - DNA, 50 bp, unidentified
  source 1..50: mol_type = unassigned DNA; note = target_3a0b712
  misc_feature 1..23: note = LF
  misc_feature 24..25: note = Core
  misc_feature 26..50: note = RF
taaaataactttcttgtcatctccttccaaatagaattgcagtatttatt

SEQ ID NO: 22730 - DNA, 50 bp, unidentified
  source 1..50: mol_type = unassigned DNA; note = target_3a0d9ec
  misc_feature 1..23: note = LF
  misc_feature 24..25: note = Core
  misc_feature 26..50: note = RF
cgctacaggtcgatcacgcggtatgggtccttgctttcgccaggatgact

SEQ ID NO: 22731 - DNA, 50 bp, unidentified
  source 1..50: mol_type = unassigned DNA; note = target_3a0df94
  misc_feature 1..21: note = LF
  misc_feature 22..25: note = Core
  misc_feature 26..50: note = RF
agctcgaacagcaacggctcgctcatgcgacgtgacccgacagccggctg

SEQ ID NO: 22732 - DNA, 50 bp, unidentified
  source 1..50: mol_type = unassigned DNA; note = target_3a1561b
  misc_feature 1..23: note = LF
  misc_feature 24..25: note = Core
  misc_feature 26..50: note = RF
cggccgcacgagcagcgggtcgatgggtcccggcctgcgccgggaggacg

SEQ ID NO: 22733 - DNA, 50 bp, unidentified
  source 1..50: mol_type = unassigned DNA; note = target_3a1c284
  misc_feature 1..23: note = LF
  misc_feature 24..25: note = Core
  misc_feature 26..50: note = RF
gcgcaccaattgccgaccacgtgagcaattacgccctaggagcagtggtc

SEQ ID NO: 22734 - DNA, 50 bp, unidentified
  source 1..50: mol_type = unassigned DNA; note = target_3a1dcf2
  misc_feature 1..23: note = LF
  misc_feature 24..25: note = Core
  misc_feature 26..50: note = RF
ttcctgtcattcggtagagccccctgtgtcccgcttcagggtcgcgccgt

SEQ ID NO: 22735 - DNA, 50 bp, unidentified
  source 1..50: mol_type = unassigned DNA; note = target_3a24c56
  misc_feature 1..24: note = LF
  misc_feature 25: note = Core
  misc_feature 26..50: note = RF
attttctttactcatgctacctcctttatagttgttaatttctaatatta

SEQ ID NO: 22736 - DNA, 50 bp, unidentified
  source 1..50: mol_type = unassigned DNA; note = target_3a27b02
  misc_feature 1..23: note = LF
  misc_feature 24..25: note = Core
  misc_feature 26..50: note = RF
acgttgttgagcgaagcccagtaagtatttgtcccagccgcgctttttgc

SEQ ID NO: 22737 - DNA, 50 bp, unidentified
  source 1..50: mol_type = unassigned DNA; note = target_3a28b94
  misc_feature 1..23: note = LF
  misc_feature 24..25: note = Core
  misc_feature 26..50: note = RF
cgtcgccgaaaaaccgctcctgcctcagaacgagatgacgtcttcgaaac

SEQ ID NO: 22738 - DNA, 50 bp, unidentified
  source 1..50: mol_type = unassigned DNA; note = target_3a2dd5d
  misc_feature 1..22: note = LF
  misc_feature 23..25: note = Core
  misc_feature 26..50: note = RF
cagcaatagaagccccggaagtagagatcaggggagccatcaggcaggcg

SEQ ID NO: 22739 - DNA, 50 bp, unidentified
  source 1..50: mol_type = unassigned DNA; note = target_3a2e42e
  misc_feature 1..24: note = LF
  misc_feature 25: note = Core
  misc_feature 26..50: note = RF
tcagcggtagaaaacggccagaagcggacatcactagtcagcctgacgcg

SEQ ID NO: 22740 - DNA, 50 bp, unidentified
  source 1..50: mol_type = unassigned DNA; note = target_3a32738
  misc_feature 1..22: note = LF
  misc_feature 23..25: note = Core
  misc_feature 26..50: note = RF
tcctcttaaactatcctgcccctttagtgccataagaaaaaggctgccga

SEQ ID NO: 22741 - DNA, 50 bp, unidentified
  source 1..50: mol_type = unassigned DNA; note = target_3a35b83
  misc_feature 1..22: note = LF
  misc_feature 23..25: note = Core
  misc_feature 26..50: note = RF
tttcatcaaaagtgagtcagtcagagccattattgcaagcgaatttacag

SEQ ID NO: 22742 - DNA, 50 bp, unidentified
  source 1..50: mol_type = unassigned DNA; note = target_3a383e8
  misc_feature 1..20: note = LF
  misc_feature 21..25: note = Core
  misc_feature 26..50: note = RF
caactgagtgctcatcgggagtcctttccggggttggcgagcaggtccag

SEQ ID NO: 22743 - DNA, 50 bp, unidentified
  source 1..50: mol_type = unassigned DNA; note = target_3a3a37d
  misc_feature 1..24: note = LF
  misc_feature 25: note = Core
  misc_feature 26..50: note = RF
gggctcggacctgtgtgttcgccccacttttttagcccggacatgggcgg

SEQ ID NO: 22744 - DNA, 50 bp, unidentified
  source 1..50: mol_type = unassigned DNA; note = target_3a48183
  misc_feature 1..21: note = LF
  misc_feature 22..25: note = Core
  misc_feature 26..50: note = RF
tccggatcgggggcgggggtgctcatgcccggcccggggcgtagcggccc

SEQ ID NO: 22745 - DNA, 50 bp, unidentified
  source 1..50: mol_type = unassigned DNA; note = target_3a4900c
  misc_feature 1..23: note = LF
  misc_feature 24..25: note = Core
  misc_feature 26..50: note = RF
cggtttgtgatggtgacctgacctgccccccttgaagtggtcctccctga

SEQ ID NO: 22746 - DNA, 50 bp, unidentified
  source 1..50: mol_type = unassigned DNA; note = target_3a4aef8
  misc_feature 1..24: note = LF
  misc_feature 25: note = Core
  misc_feature 26..50: note = RF
cgaatagccggaaccggccaggagcggacgtaagcgatgttcaatatatg

SEQ ID NO: 22747 - DNA, 50 bp, unidentified
  source 1..50: mol_type = unassigned DNA; note = target_3a4e417
  misc_feature 1..23: note = LF
  misc_feature 24..25: note = Core
  misc_feature 26..50: note = RF
catatctcatcgactataggcattgttgcaaaactatccccgtgaaggtt

SEQ ID NO: 22748 - DNA, 50 bp, unidentified
  source 1..50: mol_type = unassigned DNA; note = target_3a59ba2
  misc_feature 1..23: note = LF
  misc_feature 24..25: note = Core
  misc_feature 26..50: note = RF
tcgaagccctccgcaccaccccttgcgccaagcgtcgcgcgcgaagcccg

SEQ ID NO: 22749 - DNA, 50 bp, unidentified
  source 1..50: mol_type = unassigned DNA; note = target_3a61d31
  misc_feature 1..23: note = LF
  misc_feature 24..25: note = Core
  misc_feature 26..50: note = RF
taagcccccgccgagaccatctgtaggagcgggccctgcccgcgatttcg

SEQ ID NO: 22750 - DNA, 50 bp, unidentified
  source 1..50: mol_type = unassigned DNA; note = target_3a6987d
  misc_feature 1..23: note = LF
  misc_feature 24..25: note = Core
  misc_feature 26..50: note = RF
tctgatcaatcgccaaactgtagtggcacagtaaatttggccacctgatt

SEQ ID NO: 22751 - DNA, 50 bp, unidentified
  source 1..50: mol_type = unassigned DNA; note = target_3a6b00e
  misc_feature 1..24: note = LF
  misc_feature 25: note = Core
  misc_feature 26..50: note = RF
aatgcgacctcgcgcaatgtccgcttcgggtcatgtgtggacggcgcctg

SEQ ID NO: 22752 - DNA, 50 bp, unidentified
  source 1..50: mol_type = unassigned DNA; note = target_3a6e27c
  misc_feature 1..24: note = LF
  misc_feature 25: note = Core
  misc_feature 26..50: note = RF
acttttcattcataaatattctccttctgatttattcttaacataatgta

SEQ ID NO: 22753 - DNA, 50 bp, unidentified
  source 1..50: mol_type = unassigned DNA; note = target_3a7df02
  misc_feature 1..23: note = LF
  misc_feature 24..25: note = Core
  misc_feature 26..50: note = RF
gtgcgtcgaaaaggacccttgattgcgcgtcgggccgtttatgattgcgc

SEQ ID NO: 22754 - DNA, 50 bp, unidentified
  source 1..50: mol_type = unassigned DNA; note = target_3a7e514
  misc_feature 1..23: note = LF
  misc_feature 24..25: note = Core
  misc_feature 26..50: note = RF
ggggtggttgcgacttccggttttggcacttctgcgacattgtccgccgg

SEQ ID NO: 22755 - DNA, 50 bp, unidentified
  source 1..50: mol_type = unassigned DNA; note = target_3a8673c
  misc_feature 1..23: note = LF
  misc_feature 24..25: note = Core
  misc_feature 26..50: note = RF
ctccgtcgcgaagaccctagaatccatgccgttaccttcaccagggagta

SEQ ID NO: 22756 - DNA, 50 bp, unidentified
  source 1..50: mol_type = unassigned DNA; note = target_3a92762
  misc_feature 1..23: note = LF
  misc_feature 24..25: note = Core
  misc_feature 26..50: note = RF
aatcgcctattcattcccctctcctttgcaaatcgtgtcctctgattctt

SEQ ID NO: 22757 - DNA, 50 bp, unidentified
  source 1..50: mol_type = unassigned DNA; note = target_3a93939
  misc_feature 1..24: note = LF
  misc_feature 25: note = Core
  misc_feature 26..50: note = RF
ccacggaacaggaaaccacccagtttccgataagacgtgccgggacttgg

SEQ ID NO: 22758 - DNA, 50 bp, unidentified
  source 1..50: mol_type = unassigned DNA; note = target_3a99366
  misc_feature 1..24: note = LF
  misc_feature 25: note = Core
  misc_feature 26..50: note = RF
ccggccgccgtgccggtcggctgaccgcggcaccctcacgagcgaaggcc

SEQ ID NO: 22759 - DNA, 50 bp, unidentified
  source 1..50: mol_type = unassigned DNA; note = target_3a9a3bd
  misc_feature 1..23: note = LF
  misc_feature 24..25: note = Core
  misc_feature 26..50: note = RF
ctattaagctaactggacacgatagttaaacataaagggttccacatatt

SEQ ID NO: 22760 - DNA, 50 bp, unidentified
  source 1..50: mol_type = unassigned DNA; note = target_3a9e04e
  misc_feature 1..24: note = LF
  misc_feature 25: note = Core
  misc_feature 26..50: note = RF
tattgtttaaactatcctgcccgttagcggagcgaggccaccgattgatt

SEQ ID NO: 22761 - DNA, 50 bp, unidentified
  source 1..50: mol_type = unassigned DNA; note = target_3aa8426
  misc_feature 1..23: note = LF
  misc_feature 24..25: note = Core
  misc_feature 26..50: note = RF
cggtctgacaatcccgatagctatcgggatctatcttcgttttcgttcaa

SEQ ID NO: 22762 - DNA, 50 bp, unidentified
  source 1..50: mol_type = unassigned DNA; note = target_3abbb61
  misc_feature 1..23: note = LF
  misc_feature 24..25: note = Core
  misc_feature 26..50: note = RF
cggacgcggcatgtgttactcatctgccgcgttgaacgcgcgcatcggac

SEQ ID NO: 22763 - DNA, 50 bp, unidentified
  source 1..50: mol_type = unassigned DNA; note = target_3abc09a
  misc_feature 1..24: note = LF
  misc_feature 25: note = Core
  misc_feature 26..50: note = RF
aaggtatgtatttgtagccccccgtgttacttgatcgggggcgtgcgggt

SEQ ID NO: 22764 - DNA, 50 bp, unidentified
  source 1..50: mol_type = unassigned DNA; note = target_3acc119
  misc_feature 1..23: note = LF
  misc_feature 24..25: note = Core
  misc_feature 26..50: note = RF
tggtacgacgaccggtacacctcagatagccgaccacttgctgcaacgcc

SEQ ID NO: 22765 - DNA, 50 bp, unidentified
  source 1..50: mol_type = unassigned DNA; note = target_3ace35d
  misc_feature 1..24: note = LF
  misc_feature 25: note = Core
  misc_feature 26..50: note = RF
taaacaatggattatctccttagcgtacattttcgctccattggccctca

SEQ ID NO: 22766 - DNA, 50 bp, unidentified
  source 1..50: mol_type = unassigned DNA; note = target_3ace4d4
  misc_feature 1..23: note = LF
  misc_feature 24..25: note = Core
  misc_feature 26..50: note = RF
agagtaaagcgtccgtgccaaggatggcgcgggtcgagccatcagggacg

SEQ ID NO: 22767 - DNA, 50 bp, unidentified
  source 1..50: mol_type = unassigned DNA; note = target_3ad6ba0
  misc_feature 1..24: note = LF
  misc_feature 25: note = Core
  misc_feature 26..50: note = RF
caccaccgtattctgtcaccccttcggggtttgatttgtttatgacgtac

SEQ ID NO: 22768 - DNA, 50 bp, unidentified
  source 1..50: mol_type = unassigned DNA; note = target_3adb02e
  misc_feature 1..23: note = LF
  misc_feature 24..25: note = Core
  misc_feature 26..50: note = RF
aaatgatgacctgacggtttttttgtactagcggatgggagactactgca

SEQ ID NO: 22769 - DNA, 50 bp, unidentified
  source 1..50: mol_type = unassigned DNA; note = target_3ade78a
  misc_feature 1..23: note = LF
  misc_feature 24..25: note = Core
  misc_feature 26..50: note = RF
gaaaattttctactcataatctactccttttatttttccatttctggatt

SEQ ID NO: 22770 - DNA, 50 bp, unidentified
  source 1..50: mol_type = unassigned DNA; note = target_3ae1cda
  misc_feature 1..23: note = LF
  misc_feature 24..25: note = Core
  misc_feature 26..50: note = RF
gcctgtgccatgattttacctcccttccttgtgatgtatactcagcgacg

SEQ ID NO: 22771 - DNA, 50 bp, unidentified
  source 1..50: mol_type = unassigned DNA; note = target_3ae488c
  misc_feature 1..23: note = LF
  misc_feature 24..25: note = Core
  misc_feature 26..50: note = RF
tacgcgccatcgccggttcctccctttctcgggggcaacagagacttcac

SEQ ID NO: 22772 - DNA, 50 bp, unidentified
  source 1..50: mol_type = unassigned DNA; note = target_3af3211
  misc_feature 1..22: note = LF
  misc_feature 23..25: note = Core
  misc_feature 26..50: note = RF
acgcttcaaaagcgggttgtgcagaccttccttaacacaactttcgaaca

SEQ ID NO: 22773 - DNA, 50 bp, unidentified
  source 1..50: mol_type = unassigned DNA; note = target_3afc435
  misc_feature 1..23: note = LF
  misc_feature 24..25: note = Core
  misc_feature 26..50: note = RF
atccgcccaaagcgcgcttcgtcctggtacattacgcgcaaagggcgaga

SEQ ID NO: 22774 - DNA, 50 bp, unidentified
  source 1..50: mol_type = unassigned DNA; note = target_3b125db
  misc_feature 1..23: note = LF
  misc_feature 24..25: note = Core
  misc_feature 26..50: note = RF
ataaattgtgccgaaggcaccaccttttaaatggtacgccttcgtcgtgc

SEQ ID NO: 22775 - DNA, 50 bp, unidentified
  source 1..50: mol_type = unassigned DNA; note = target_3b165a9
  misc_feature 1..23: note = LF
  misc_feature 24..25: note = Core
  misc_feature 26..50: note = RF
cgttgatcgtctcggccttggcgttgtcgtagctgtcgcccacactgccg

SEQ ID NO: 22776 - DNA, 50 bp, unidentified
  source 1..50: mol_type = unassigned DNA; note = target_3b1df6e
  misc_feature 1..24: note = LF
  misc_feature 25: note = Core
  misc_feature 26..50: note = RF
tcgcgggccaaactaaggatccctagcagcctgtcggacttagcggaccg

SEQ ID NO: 22777 - DNA, 50 bp, unidentified
  source 1..50: mol_type = unassigned DNA; note = target_3b1e4df
  misc_feature 1..23: note = LF
  misc_feature 24..25: note = Core
  misc_feature 26..50: note = RF
tatttaatacctatttcccagcgagcttgtgagcgatttaatgcgtttgt

SEQ ID NO: 22778 - DNA, 50 bp, unidentified
  source 1..50: mol_type = unassigned DNA; note = target_3b2435f
  misc_feature 1..21: note = LF
  misc_feature 22..25: note = Core
  misc_feature 26..50: note = RF
tcgggaagggcgtcggggttggtcatgatgacggcgcggcgccggttcag

SEQ ID NO: 22779 - DNA, 50 bp, unidentified
  source 1..50: mol_type = unassigned DNA; note = target_3b2f077
  misc_feature 1..23: note = LF
  misc_feature 24..25: note = Core
  misc_feature 26..50: note = RF
tagcgggtaggcatacgactgtgttctgactaacaacaaacaggaagtga

SEQ ID NO: 22780 - DNA, 50 bp, unidentified
  source 1..50: mol_type = unassigned DNA; note = target_3b2f41b
  misc_feature 1..23: note = LF
  misc_feature 24..25: note = Core
  misc_feature 26..50: note = RF
gcgggtgagagtcccgccaacagaggacttcccatgggatcagccgatgt

SEQ ID NO: 22781 - DNA, 50 bp, unidentified
  source 1..50: mol_type = unassigned DNA; note = target_3b31563
  misc_feature 1..23: note = LF
  misc_feature 24..25: note = Core
  misc_feature 26..50: note = RF
tcgagcgcgccctcaccctaaccctctcccgagacgggagagggaaaatc

SEQ ID NO: 22782 - DNA, 50 bp, unidentified
  source 1..50: mol_type = unassigned DNA; note = target_3b32723
  misc_feature 1..22: note = LF
  misc_feature 23..25: note = Core
  misc_feature 26..50: note = RF
gcgttattcaactaacgagggctttagttgtagaagaactactaaataat

SEQ ID NO: 22783 - DNA, 50 bp, unidentified
  source 1..50: mol_type = unassigned DNA; note = target_3b41e3e
  misc_feature 1..22: note = LF
  misc_feature 23..25: note = Core
  misc_feature 26..50: note = RF
tgccaatatctaaaaaacttgtcatgctgaacgtagtgaagcatcttgtc

SEQ ID NO: 22784 - DNA, 50 bp, unidentified
  source 1..50: mol_type = unassigned DNA; note = target_3b4363a
  misc_feature 1..24: note = LF
  misc_feature 25: note = Core
  misc_feature 26..50: note = RF
ttcgatgccagttagcctggcgcacagccgttgacaatcgcagaagcgga
